United States Patent Application Publication US 2008/0034453 A1 - sequence listing, part 12

SEQ ID NO: 92995 - DNA, 553 bp, Zea mays
aggtaagaggcgtttgtaccgatccgaagagagacgtattgctgctaccggtccggaattcccgggtcgacccacgcgtccgagcttgcacttctcatgacactggagcaggggaaacctatgaaagaagcccttggtgaggtgaattatggtgcaagtttcatagaatattttgcagaggaagcaaagcgtatatatggtgacatcattcccccaactttatctgatcgcagattgttggttttgaagcagcctgttggggtagttggagctattacaccatggaattttccattagcaatgataacccggaaggttggaccagctttggcctgtggctgtactgttgttgtcaagccatcggagttcacacctctgacagcattagctgcagcagatcttgctcttcaagcgggaataccagcgggtgcattgaatagtgtgatgggtaatgctgctgaaataggtgatgcgttgctgcagagtacacaggtcagaaagattacattcactggatcaacagctgttggcaaaaaactgatggctggatctc

SEQ ID NO: 92996 - DNA, 548 bp, Zea mays
  unsure (1)..(548): unsure at all n locations
agtttacggggttgttacagcacgggaganatatgtaccgctccggaattcccgggtcgacccacgcgtccggcacagtcatccacactaacgaacgaactcttgctccgatcacgagctagctgaggtcgacgatggcggctgtgctgaacagcaggaagacgccgcaggcggtggtggccgtgctggtggcggcggcgctgctggcttcgtccgcttcggcggcgatcacctgcgggcaggtggggtcgtcgctggcgccgtgcattccgtacgcgacggtgagggccagcgcgctccccgcgtcgtgctgcagcggcgtcaagagcctcaacagcgcggcgcggaccagcgcggaccgccaggcggcgtgccgctgcctcaagagcctcgccaacagcgtcaagagcgtcaacatgggcaccgtcgccaccatccccggcaagtgcggcgtctccgtcggattccccatcagcatgtccaccgactgcaacangatcagctaagttacgacgaccaagctaataaggctaccgaacgtacacgtc

SEQ ID NO: 92997 - DNA, 547 bp, Zea mays
  unsure (1)..(547): unsure at all n locations
nagggtacggaggttntataagaanacacgcatantacagtatcgctctaccggtccggaattcccgggtcgacccacgcgtccgcccacgcgttcggtcaaaatatattcaattacatgactttggatctgaaatcctgccaagagctgtactagatcatagtgtgcaggcatgcatttttacgggctattgggaggatgttggaacaatcaaatcattctttgatgcaaactttgccctcactgagcagtgcttcaagtttgattttatgatccaaaaccactttctttaattgaacccgaatcctggcttcgaacccattggaccagtgccagaatgaagatgcctttatctcaaataggtgcgtacacggagaatgcgacattgagcatatctggaatggaatctggttaatgtcaactctggagtgaacctaaaggattcgtgataaatggaaccgcacctattaaactggaaagaagctttaaagttccggtaactgggagggtccaatgggaatggaaggacaccaaggttagggacctt

SEQ ID NO: 92998 - DNA, 557 bp, Zea mays
  unsure (1)..(557): unsure at all n locations
agtanttacgggctgnnagttcacgctacacgcataggatagtactgctctaccggtccggaattcccgggtcgacccacgcgtccgcggacgcgtgggcgggctgcatcttcgagtacgacgccggccacccgctcggctgcgggggcggcttcaaggaggaggacacgcccaacttcgtcggatcattctactccaaaaccaaggccatggtagaggaattgctcaagaactacgagaacgtatgcacccttcgtgtgaggatgcctatctcatcggatctctccaatcctggcaacttcatcaccaaaatcacccggtacgataaggtcgtcaacatcccgaattcaatgccagtcctggacgagctccttcccttctggaccgaatggccgaaaagaaacctaccgggattatggaattcaacgacccccggcttgttagagcccaccaggtacctgagaatgcacagacctcacttatacacgcgttttccgtggaaacctttaaccggaaggcccagcgcaggggatatactcacccgggggcgcaccttc

SEQ ID NO: 92999 - DNA, 554 bp, Zea mays
aggttaaagtgttttgatcacagaatggaggggagagatgaactcgctccggaattcccgggtcgacccacgcgtccgaaagaatgctcctcctcctatggtaaggttgtctgggaaaagtttggtctctgccatctgggaaggggacagttcgatagttgctgaacttcttcagtcgatggaacctcatgttgaagaagaggtacttagtgatctgaaggccaaaatctgtgctcatgacccatcagattctgaagatattgagggaggcatccgtaattctctcttgtggctgcgtgatgaattacgaactcttccatgcacttacaagtgccgtcatgatgctgctgcagatttgatccatttgtatgcttatacaaagtgctttttccgagtccgggattacaagacagtaaaatctccaccagttcatatcagtccgcttgacttaggccccaaatatgccgataaactgggaccaggctttcaggagtactgcaagacatacccagaaaattactgcttagcccagcttatctattggtatagcccga

SEQ ID NO: 93000 - DNA, 558 bp, Zea mays
  unsure (1)..(558): unsure at all n locations
aggggnagaggcctntataacggatacgagggagacgatagcactgctctaccggtccggaattcccgggtcgacccacgcgtccggctgccgtcccgcaggaagagtgccgtcctcggcgtcgtcgcgttgtcctcctccgtcctgagcctgctccacgccttctctctcccggcagcctctgcgctctccgtcggcctggcgcggcgccacaggcacgatgccacgcccgggctggccgccggcggctgcgacgtcttcagcggcagctgggtcctcgacggcggtagctcggcctcggcggcgtacaccgggtacaactgcccgctcatcgacgcggagttcaactgccagctctacggccgcccggactccgactacctccggtacctctggaagccggccggatgcgagctaccgaggttcgatggcgcggacttcctgacgcggatgaaggggaagacggtgatgttcgtgggcgactcgctggggcgcaaccagtgggagtcgctcgtctgcctgctgcacgccgncgtgcagcagtcgccggcgcagctc

SEQ ID NO: 93001 - DNA, 566 bp, Zea mays
  unsure (1)..(566): unsure at all n locations
gtagagggggttaggggnaaaggttgtgataagaggacgggagagaaagttgaacccctccggaattcccgggtcgacccacgcgtccggctcgcgtcaccggagctctccagaaccgaaccccaactgcccaagggcgagcgatccgaggccctcggcggcttcgtcaacgacgccgagaacactttgaggaatggctgaagaggatgtccagccccttgtgtgtgacaatggcactggaatggtcaaggcgggtttcgctggtgacgacgcaccgagagctgtctttcctagcattgtaggcaggccacgccacactggtgtgatggtgggcatgggccaaaaggatgcatatgtgggcgatgaagctcagtccaaaagaggtattctgacactgaagtacccaattgagcacggcattgtcggcaactgggatgacatggagaagatctggcaccacaccttctacaatgagcttcgtgtggcacctgaggagcaccctatactgctgaccgaggctcctcttgaccccaaagcaaacagggagaagatgacccagattatgt

SEQ ID NO: 93002 - DNA, 546 bp, Zea mays
  unsure (1)..(546): unsure at all n locations
aggttacggggtnnagtacgaaaccgcagtatatgactgctctaccggtccggaattcccgggtcgacccacgcgtccgatttctgggctcctagttcagttttggtgcagctacagcacactgccgctgaatgtgattgtttctcagatgggttccaagttcaagaaatcactggtctcggagaacgtgagggagtcgctgcacagctggtgcaagagggttaaggacaggagccgacacaacccgctcttctcgcggaacgggaccctcacgaccagatccgtgtgctccctagacaccacctacgagacggatcacgagacgaacacggtgtgcacgctgtcgaggacggcgtcggcaacgtcgctggacgaccagttgaccgtggtcaccgtcgattacgagccgtcctgcattgagaaagattgttgacccagttgctggattcgccaaacttacttcctgatcgaccttgtgtgtaggaagtactctaggactgaaatgaatggatatttgcaatggttgcccctataggggcaatgacc

SEQ ID NO: 93003 - DNA, 554 bp, Zea mays
  unsure (1)..(554): unsure at all n locations
nagtttagcgtggtgtggtaccgcacagacagagctcgtcaccgctccggaattcccgggtcgacccacgcgtccggaagaagcacacggcgaaggagatcgccgcgaagatcgacgcggcgacgacgaaccggtgcggcggcaaggccgggctggcggaccggctggggcaggacaagggcgggcatgcgaagctggcgtgcccgctctgccgcaccccggcgcccgacatcaagtccatgcagatccaccacgaggcgcgccaccccaagctccccttcgagccggagaagctcctcaacctgcactccttcgcccccgctgctgctgttgccgccgtcgtcgtcgtcgccgccgctgccgaggccaccaccttcaagcccaagcccggcgtccgcggcagcctcaagaagtaagcttgctggcttggttggctcgcccgcctgcatggggcacaattcccttcggtttcaatcccatccgtcgacccgatctataatcaatcaaaaccggcgcctncggnctggctgctgccgcagtcngnctgcggtgta

SEQ ID NO: 93004 - DNA, 552 bp, Zea mays
  unsure (1)..(552): unsure at all n locations
aggggngacggttgtgagaagggggatgggggggcaagtgtaaccgccccggaattcccgggtcgacccacgcgtccgtccaaatgctgctctaacacggagacacgtgaattcaataaagcaaacttgcaagtcatctggtttggtaaagaggagggggtaccatttggacacatcaccttacaggcctatgctgatcatgattgtcctcctgctggtggctatccttttcggggcactgtataccaagtgatgcacttgtagctggcctttttcccctatggagacgagacaaactctgccaatctgatccttttcgtactctgtagtccccaatggctgcaggaagttcgaaattactggctgtagaagtgtagatcatacggcagcatgctactgcttccatgactccgttactgctctcgattcgtttcttcattatgttttctcgcgcgttgtatcgtttgaagctgttttaagcaacggaaaanaataccatgtgacacgtgtatcctacgaacatgggtttctgtttagttagcagtgggcgca

SEQ ID NO: 93005 - DNA, 553 bp, Zea mays
aggttgggaggcgtttgtgtcactccaagcagtatactgcactgacgtaccggtccggaattcccgggggcttctcctccccctccggttcgggttcgggttcgtgaggttctccggggttcggtttcgtgggtgagcggatcgagatggcggcgtcggatgttgagtaccgctgcttcgtcggcggcctcgcctgggccacggacgaccactccctccacaacgccttcagcacctacggcgaggtcctcgagtccaagatcatcctcgatcgggagacgcagaggtcccgcggcttcggcttcgtcaccttctccacggaggaggcgatgcggaacgccatcgagggcatgaacggcaaggagctggacggccgcaacatcaccgtcaacgaggctccagtcccgcggcggccgtggaggcggcggcggcggcggttacggtggtggccgtggagggcggcgctacggcggtggcggccgccgtgatgggcgctgcggctacggcggtgcggcggctacggtgtggccggcggcggtactgtggtgtggcc

SEQ ID NO: 93006 - DNA, 553 bp, Zea mays
  unsure (1)..(553): unsure at all n locations
agttntgccgggtgtgataaagaaaagagaggagtatgtataccgccccggaattcccgggtcgacccacgcgttcgccgtcgccgcctcgggccaaaccctacgcagggagttgattgatcgattgcagccatgagtgagttgcattccgagcttctcaaggattgcatctcccagatagttcaggatgccaagaagaataggaagttcactgagactgttgagcttcagattagtctgaagaattatgatccacaaaaggacaagcgtttcagtggctctgttaagttgcctcacatccctcgtccaaagatgaaggtgtgcatgcttggtgatgcccagcacgttgaggaggctgagaagatgggacttgactacatggatgttgaagccctcaagaaaatgaacaagaacaagaagcttgttaagaagcttgccaagaagtaccatgcttttttggcatcagagaccatcatcaagcaaattccccgtcttcttggtcctggtctcaacaaggcangcaagttccccactctggtcactcaccaggaan

SEQ ID NO: 93007 - DNA, 556 bp, Zea mays
  unsure (1)..(556): unsure at all n locations
agggttggcggctantgtaccgcgacgcgggggaagacagtagtgctctaccggtccggaattcccgggtcgacccacgcgtccgcatctggggtaaccactcgtcctctcagtaccctgatgttaaccatgccacagtgaagacggccactggggagaagcctgttcgtgagcttgtctctgatgacgagtggcttaatggtgaattcatcacaactgtccaacagcgtggtgctgcaatcattaaagcgagaaagttctccagtgctctctcggctgctagctctgcttgtgaccacattcgtgattgggttcttggaacacctgagggtacatttgtttccatgggtgtgtactctgatggttcatacggtgttccttctggactcatttattcattcccagtaacatgcagtggtggtgaatggaaaatcgttcaaggccctccgattgatgagttctcaaggaagaagatggatgccactgcccaagagctgacggaggagaagacgcttgcttactcatgcctcgagtaaattctaccacacccagagag

SEQ ID NO: 93008 - DNA, 569 bp, Zea mays
  unsure (1)..(569): unsure at all n locations
ngtagagagagtgagtttaagacgggttgatacagagaaggaggagagagtgtaactcgcgcccggaattcccgggtcgacccacgcgtccgactcgtacagattctccatctcttggtccataatactgccgaagggaacgctcgaaggagggattaatcaggccggcatcaagtactacaaaaagctcatcaacttattgatagagaacggaatagagccatttgtaacaatttttcattgggacgtccctcaagcactggaagacaagtacggtggctttttaggcgacaggattgtaaaggattacacagacttcgctaaggtgtgctttgagaacttcggtgacaaggtgaagaattggttgacctttaacgagccacagacatttacaaccttttcgtacggaacgggagtttttgcccctggacggtgctcaccaggagaaaaatgtgctcagcctattgctaactcactcaccgaaccatacattgctggccacaacatccttcgagcccacgctatgactgttgacctctacaacaagaattacaagggtacagacggct

SEQ ID NO: 93009 - DNA, 556 bp, Zea mays
  unsure (1)..(556): unsure at all n locations
agtntttaaggctantggtcagntcaccgcatgtatcgtatctgactnttctcggtccggaattcccgggtcgacccactcgtccggctatgcataggacatgactcgttgcatgacagatgaggagtctggacagcagagtctagggtgcctcaaccccatgctcgtgaagcgtttcacggagttccctccgaggagcagtcttgaccctagcatgtacgtctacaacaccaccaccatcatgcacgcggacctagagaacaagctcgatgacctgacggtgcatcaggcgctgtacggaaacctgctatacatcctgtaccacaactacaacttcatgccgatcctgttcagggtgaacatcctgtaggacaactttatatactccaccagtaccgtgctattcttgccctgtgactgcactctagtaccattagccatcgagctgagcatgcccgatctcctgaacggcctgaccactgtcaagagcaccgtgtacacccaaaagtacgaccatgtcgcaaactcctcggtgtaacaaggtgcacaggtctcc

SEQ ID NO: 93010 - DNA, 550 bp, Zea mays
  unsure (1)..(550): unsure at all n locations
agttggaggcgtctgaatgagtaccgcacgtacgtatttacattccggccttgaattccggggccgagagagccagccgccaggccagaggatctgactcctgtcgggctttgcgggacgacagacactccatgggttcggacgcacgatcacgagcgcgtgccctactagtgtgccggccatcactcggccaccagaacaccacagctcacggtctgctggttgtcatgtcatgtcacgcggtgcagttgacagagccaaggagatgctcggcacgttcagcccccagctggagccctacacgtacgtgacgccggaggacaccaccccgtcgggaatgtttgcccgggggtcctactctgccaggaccaaggtacgtacgtacgtggatgcagaaccagtcctttttcggttcagacagaatccgaatccttcaggctcgatagttcacgaggtttggtttggcatcctgttctttggcagttcctcgacgacgaccgcaagtgctacctgnagatcaactacaccttcgacatccgccgggagtgcg

SEQ ID NO: 93011 - DNA, 556 bp, Zea mays
agttttagagagctttgtacagcacgcggggaagaaagtagtgcatgtaccggtccggaattcccgggtcgacccacgcgtccggtcttagtacattggttttttgtactaatatacttgtctaagtattagaaacaggaagaaggggaagagaagaaagttggctgtgtacaaccaacaggctgtttcggtctggggcaccggactgtccggtggtgcaccggacagtgtccggtggtgcaccggacagtgtccggtgcgccaggctgcctcggccgaagaggccgctctcgggaatttgctgacggcgttcggctaaaattcaccggactgtccggtgtgcaccggactatccggtgagccaacggtcggccagggccaacggtcggccgcgcgatctgcgcgggacacgtggccgagccaacggtcggaagggggcaccggactgtccggtgtgcaccggacatgtccggtgcgccaacggctcccggatctgcaacggtcgaccgcgccaattaaggaaaggaatcgggcaccggacactgtccggtgtgcc

SEQ ID NO: 93012 - DNA, 553 bp, Zea mays
  unsure (1)..(553): unsure at all n locations
aggttagagagctgtttacgaagaggggcgggggaagggagtgctgtaccggtccggaattcccggggtgagaaagccagccgccaggccagaggatctgacgcctggcgggcggggcgggacgacagacacgccatttgtgcgcacgcacgagcacgagcacgtcccctactagtgtgccggccatcactcggccaccagaacaccacagctcacggtctgctggttgtcatgtcatgtcacgcggtgcagttgacagagccaaggagatgctcggcacgttcagcccccagctggagccctacacgtacgtgacgccggaggacaccaccccgtcgggaatgtttgcccgggggtcctactctgccaggaccaaggtacgtacgtacgtggatgcagaaccagtcctttttcggttcagacagaatccgaatccttcaggctcgatagttcacgaggtttggtttggcatcctgttctttggcagttcctcgacgacgaccgcaagtgctacctggagatcaactacaccttcgacatccgccgggagtgn

SEQ ID NO: 93013 - DNA, 556 bp, Zea mays
  unsure (1)..(556): unsure at all n locations
agggtagggagttgataaagagacgggcggaaaaatgtaattctcttccggtccggaattcccgggtcgacccacgcgtccggcaaaaccatcagatctagcagaactctctcgacctcatcggcgttggcggagcgcgtgttgaccggagatggcgccgagcgggtggaggaggagcgcggcggcgcgggtcgcctggcgcccggccacggtttgcctgtggctcgcgctcgccgccgtcgcactgacgctcgcccaggctaagaaggacctgacggaggttacccacaaggtctacttcgacatcgagatcgacggcaagcccgcaggccggattgtcatggggctttttgggaagactgttcctaagacggcagagaacttccgagctctttgcacaggagagaaaggggttggcaagagtggcaaagccctccactacaagggaagtaagttccacagaatcatccccagcttcatgctccaaggaggtgacttcactctcggngacggtaggggtggtgaatctatctacggcttgaagtttgcggatgan

SEQ ID NO: 93014 - DNA, 557 bp, Zea mays
  unsure (1)..(557): unsure at all n locations
agtttggcgggctgttatccacgcatcggggggacgagtgtattctcctcccggaattcccgggtcgacccacgcgtccgcacaagtcgtcgtaggcagcgagcgtctctcctctcccacgcatcgcgccaaggaagagagagagatcgccgctccccttctcggcgtcggtggtgcgggtgccctccctcctcgagcgagatctgtctggtcacagatctatctgacaaaatggtgaagatctgctgcatcggtgctggctatgtcggtggcccaaccatggccgtcattgccctcaagtgcccagacattgaggtcgtcgtcgttgacatctccaagccccgcattgaggcctggaacagtgacaccctgccaatctacgagcctggtctcgatgatgttgtgaagcagtgcatgggcaggaacctcttcttcagcactgatgttgagaagcacgtcgctgaggctgacattatctttgtctcggtgaacaccctcaccaagacccgtgggcttggagctggcaaggctgccgacctnacctactgggagagcgc

SEQ ID NO: 93015 - DNA, 556 bp, Zea mays
aggtttaggaagctgtgataagagggcggggggaaagaagtaatcgtcccggaattcccgggtcgacccacgcgtccggagctctagatattctttttattctgcatgctgaacatgaaatgaactgctccactgctgctgttaggcaccttgcttcaagtggtgtggatgtatttactgctctttctggtggtgttggagctctatatggtcctctgcatggcggcgcaaacgaggcagtacttaaaatgttaaatgagattggaagcatggaaaatattccagatttcattgtaggagtgaagaacaggaagaggaagatgtccggttttgggcaccgtgtgtataaaaactatgaccctcgtgctaaagtcataaggaaattggcagatgaggtgttctcaattgttggacgggatccacttattgaggtggccattgccctagaaaaggcagcgctgtcagacgaatattttatcaagaggaagctgtatccaaatgtggatttctactctgggctaatttatagggcaatgggattccctacagaattttt

SEQ ID NO: 93016 - DNA, 552 bp, Zea mays
  unsure (1)..(552): unsure at all n locations
agggacctggggtggtttccagctaaagacatgaaagtatgctgctaccggtccggaattcccgggtcgacccacgcgtccggttggcttctcctccccctccggttcgggttcgggttcgtgaggttctccggggtggggttgcgtgggtgagcggatcgagatggcggcgtcggatgttgagtaccgctgcttcgtcggcggcctcgcctgggccacggacgaccactccctccacaacgccttcagcacctacggcgaggtcctcgagtccaagatcatcctcgatcgggagacgcagaggtcccgcggcttcggcttcgtcaccttctccacggaggaggcgatgcggaacgccatcgagggcatgaacggcaaggagctggacggccgcaacatcaccgtcaacgaggcccagtcccgcggcggccgtggaggcggcggcggcggcgggtacggtggtggccgtggaggctgcggctacggcggtggcgggcgccgtgatggcggcggcggctacggcngtggctgcggctaccgtggtggcgcngg

SEQ ID NO: 93017 - DNA, 550 bp, Zea mays
  unsure (1)..(550): unsure at all n locations
gggtagcggctntataaggggagggggaagacggaatgctttaccggtccggaattcccgggtcgacccacgcgtccgaagccgaggtcgagctgttcacggcagcgagcatgcaccacgatcccaaccccttcgacgagggcgccgacgagaaccccttctcgaatggaggcggaggagcgcgtggcggaggcgtcaagccgcagtacgggttccggccgacggagcccgcggggttcggcggcggcaggggcgatgcgaccaccgacatccctctggacaccatgaacgattcgaagggcaaggcgaaggagctgtctcagtgggagtcagatctcaggaggagggagtcggatatcaggaggagggaggaagctctcaagagcgctggggtgcccatggaggacaagaactggccgnctttcttcccaatcatccaccatgatattgccaatgagataccagcaaacgctcagaagttgcagatcttgcgtttgcaagctggcttgtnattgtgcttggccttttttggattttaatggctggcata

SEQ ID NO: 93018 - DNA, 560 bp, Zea mays
  unsure (1)..(560): unsure at all n locations
gagtttagcgggcttctgtcaagcataaagaagtatactgtatcgctctaccggtccggaattcccgggtcgacccacgcgtccgggcctctgcgttcgagatcgatctgagctggcaccgtcccacttcgccatggcggaggaccggagccccaagcccatccactgcaaagcggcggtgtgcagagccgtcggcgagccactcaccatcgaggagatcgtcgtcgacccgccgaaagcgtacgagatccgcatccgggtcgtctgcacctcactctgccacaccgatatcaccttctggaaagctaaggtggcaccggtgtttccaagaatactagggcatgaggcgtacggngtagtggagagcgtgggggagcacgtggagggcttcgcggcgggggacaccgtggtgccgacgttcctggggcagtgcgagcgctgcgccagctgcgcgtcggagcacagcaacgtgtgcgacgcggtgccgttcgtcatcggccccgggatgcggcgcgacggcaccacccggttccgggacgcgccggggagcccgctgcact

SEQ ID NO: 93019 - DNA, 557 bp, Zea mays
  unsure (1)..(557): unsure at all n locations
gagtttacgggcttgagtttgcattccgcctagtcgtcagtgactattccatatccaattcggcggtcgacccactcgtgctatcctttgcgttcaatatccatcttagctttcaccgtcccacttctccattccgagcgtcgggagcccgattcccatgcactgcaaagcgtctacgtgcatatccgccggcgatccactcaccatctatgagatcgtcttcgaccctaccaaagcgtactatatccacatacgattcgtctgcacctcactctgccactccgatatcaccttctggaaagctataatggcaccagtgtttccaagaatactatggcatgaggctttcaggatattggatatcgtgctagagcacttagaaggcttcgcggctaggtacaccctgttgccgaccttcctgcagcaatgctagcgctcatccacctgcacattgcagcacattaacatgtacgacccaataccattcatcatcttccccatgatgccgcgctacctcaccacccttatcctgcactcgcatttgatccctatttacn

SEQ ID NO: 93020 - DNA, 551 bp, Zea mays
taggggttccggtgtttggtcacgcataacgataaagtgcactgctccgaattcccgggctgggcctcgtctcggccaggaagaccgccgaggcgatcgacatcctgaagctcatgtcgtccacctacatcgtggcgctgtgccaggccgtggacctgcgccacctcgaggagaacatcaaggcgtcggtgaagaacaccgtgacccaggtggccaagaaggtgctgaccatgaacccctcgggcgagctctccagcgcccgcttcagcgagaaggagctgatcagcgccatcgaccgcgaggccgtgttcacgtacgcggaggacgcggtcagcgccagcctgccgctgatgcagaagctgcgcgccgtgctggtggaccacgccctcagcagcggcgacgcggagcgggagccctccgtgttctccaagatcaccaggttcgaggaggagctccgtgcggtgctgccccaggaggtggaggccgcccgcgttgcggtcgccaagggcaccggccccgtggcgaaccggatcgcggacagccggtcgttc

SEQ ID NO: 93021 - DNA, 555 bp, Zea mays
tagtttaagaggtttctaggtcattccaccgctcgatcgttccagccctgaattattggtctggtcctcgtatctgccaggacgacagtataggccatcgacatatttaagctcatgtcatccacctacatcttggcgcataggggagccttttacctgcgccacctctttgagaacatcaaggagtcgttgaagaacactgagacccaagtagacaataaggtactgaccatgaacctcctagacgagctctccagcgcccgcttcatcaataaggagctgatcatcaccatctaccgcgatgacgtgttcacgtactctgaagacgcgctcagcgccaacctgtccctgatacagaagatgctcgccgagctcgtggaccactccctcatcagcgacaacacggagcgctagcccttcgtgttctgcaagatcatcagcttctaggaggatctacacacgatgctgtcccacgaagttgacgctcgcatcgtggctgtcgatcagggcacagtcaccatgccgaaccggatcgcggacgtaggtcggttcact

SEQ ID NO: 93022 - DNA, 559 bp, Zea mays
  unsure (1)..(559): unsure at all n locations
tagttttcttcgtgttttgattcagcactcagacagtaganatgctctcgctccggaattcccgggtcgacccactcgtccgtccctttccaacacagcatcagcaagaggttatagtattcacaccttgacattgtcggaagacgatttgttgtcttggagaaacctgatgttattccagagcataatttgtatttccaggtttactacagattcaacaacatatccttgctcagagagccgttgatgctgattactggtttcttcctcctgtttgtggcctgtattgtttacatgcgtactgatatgtcaatatccaagagctctccttgctacttggccaagctgcaatgggatgaggtgcaagcaactgttcagaaaatccagggtatctttgagcaatgcttagcagttcatgataaactggaggcctcattgcgggatttgtctaggacaggtgacattcagtctttcaaggcagctcgtaaagctgcttacacgcaagttaaggagctatccgaagatctggagccactgttggcgactctacagtcatttc

SEQ ID NO: 93023 - DNA, 514 bp, Zea mays
  unsure (1)..(514): unsure at all n locations
agaggttttnttctgactatatagtancaatcctcggtcctgaattccgggtcgacccacgcgtccggtcataatctagtgttcattggtcatccaatggaatatcataatctattattcattggtgagtcaagggggaatgcgttgtttggtggtttcttctctttgcacagttggttgctttaataaaagctgtacagttcggggcttcccttgcttaaacactattatgtttatgaattatgatataactcttgcttattcccttggctgacatctttttgtaattgctgcagtgggatactgctgggcaagatcgcttcaggacaatcactagcagctactaccgcggagctcatggaatcattgtaagttggccacctgaactagcaacttctgaaatttgtcaaccatattgatcatattacattattggctcattgctggctttcagattgtatatgacgtgacagacccagaaagcttcaataatgtgaagcaatggttgaacgat

SEQ ID NO: 93024 - DNA, 517 bp, Zea mays
cggagagtgttaatggggggaggagggaagtagtactggtccggaattcccgggtcgacccacgcgtccgcaaacaaacagggtagagggagaggagaggagaggagaggagaggttgggtctgggacaccgtggctccgatgaagctgtacggggcggtgatgtcgtggaacgtgacgaggtgcgcaacggcgctggaggaggctggctccgactacgagatcgtgcccatcaacttcgccaccgccgagcacaagagccccgagcacctcgtccgcaacccgtttggtcaggttccagctctgcaggatggtgacttgtacctcttcgaatcacgagcaatctgcaagtacgctgctcgcaaaaacaagccagagctgttgagggaaggaaacctcgaggaggcagcaatggtggatgtttggatcgaggtggaggctaaccagtacaccgctgcactgaatcccatcctcttccaggtcctcatcagtcctatgcttgggggaaccaccgaccc

SEQ ID NO: 93025 - DNA, 516 bp, Zea mays
ggagggtctgaacagaatagacggaaaggaatcttgccccggtccggaattcccggcccacgcgtccgaaatccccaaagcctccgacccccttcctctctccctccgccgccgctgcgcacgcagggaacaagcgacatgggcgtctacacctttgtgtgccgcaacaacggcggcgagtggaccgccaagcagcactccggcgagatcgaggcttccgccgctaccccatacgagctgcagcgccgcctcgtcgctgccgcctccgcggccgactctgcctacggcgtccagtcgtccttctccatggtcacccccagctccgccgtgttccaggtgatcgtcggtgctgtcggtggtggtgcaatgatggtgagcggaggtggcggcggcggtgctgctgcatctggtggtgctgctgccgaggctcccaaggaggagaagaaggaagaggagaaggaagagagcgacgacgacatgggaattctcctgttcgactaggagtgtgtgtgtcaa

SEQ ID NO: 93026 - DNA, 513 bp, Zea mays
gaggaagtgtttagggggagaggggaagaagtattgtccggaattcccggggaaaagagcaatagatgttatctcagttgatcgcagacagaagagcatctcagcttcgtacatggcatttcttgagagtgaacacatgacagccatcccatgccgctttacgctgcacccgtgcaaagttggccatctggctggtgcaagctctagtggtaaggtgtttctctggaccagagcttgaagcaggctgatcatcgactgactgggatgtcctcggcctgttgctggccctgtcctgcccaagttcctgaccacggagatcctcatctcgcggttctgtactaatgatcgttagcattatcctgcttttaatgtataagggctagtttgagaactctattttttcaagggatttctgtttttttaatagaaaatgaactaatttctattggaaaaataaaaaaatcccttaaaaaaatgaggtggctaaactagccctaatagtttgcactgcat

SEQ ID NO: 93027 - DNA, 520 bp, Zea mays
  unsure (1)..(520): unsure at all n locations
tgagggtnnntttctgacgtacgatgggnaatttgtcttccccctnncctggnnntccgggtcgacccacgcgtccgcaatttggctttttggttctttaacatgtatacaatgctatgttatgttttaggatgtttggcattgtgagatatgcaataggaagccagggcgaggttttggtgggtataattgtcttttaaatatatcctagtagatattttatgtttccatgcgattatgcattattactattcgatgtcatcttaccttttatagaaacaacggttgaggtcttgccacggttgtgccaaatcaaatatgccagtggtacactcgaggagcttctgtatgttgatatgccgagagagtcccagaattcatctggacagattgttttggactataccaaagcaatccaggagagtgtctttgagcaactgcgtgtagtccgtgaagggcatctaagaattgtattcaaccaagacttgaagattgcatcgtgggagttctgtgcccggcc

SEQ ID NO: 93028 - DNA, 521 bp, Zea mays
  unsure (1)..(521): unsure at all n locations
tggatactgtgtgtataggtgggggaggggagggaagttttcaccggtccggaattcccgggtcgacccacgcgtccgaatcacattgatgcgctcgtgaggctgagcggaattactgcagagggccaaggtgtgaagggggaatcctcagcagttccttcagccccaactccagatgttgctgaagcacaggccccagctgctgaggaggaggacgatgatgatgttgacctttttggtgaggagaccgaagatgagaagaaggctgctgaagagcgtgctgcagctgccaaggcttctggcaagaagaaagaatctgggaagtcatcagttttacttgatgtgaagccatgggacgatgagactgacatggccaagcttgaggaagctgttaggagtgtccagatggaagggctgctctggggcgcatccaagcttgtcccagtcggatatggtatcaagaagctgcaaatcatgatgaccatagtcgacgatcttgtctctgtcgacactctcattgn

SEQ ID NO: 93029 - DNA, 517 bp, Zea mays
ggaagtgtgtaagatgtgggaaggagggacagtttgtaccggtcctgaattcccgggtcgacccacgcgtccgcacctcgcttcactagaggaataatctagcatcttctgttgcctccaaattgtccggagaaaggagttgaagcagtgtgagagggccctgatacgatggcgaacctgttcctcaagcaggcaaagcagtacgtggcgacgcggccggtctacccgccggagctcttcgacttcatcgcctccaagacccctcgccgcgacatggcctgggatgtcggcaccggcaacggccaggccgcagcgtcggtcagtcgaccatgcatcctcgctctcccctacacggcacgctgcacacgcactgtccgtgcattatctttataaagtaaaggctggctgggtgaactttcattcaacttgcagctggcgaagctgtacaagcacgtggtgggcacggacacgagcgcgcatcagctcgcctacgcgacgcgcctcatcaacacccgtc

SEQ ID NO: 93030 - DNA, 482 bp, Zea mays
agtggctgtttatgaatagaagtatccatctcgtggctgccgctctagaactagtggatcccccggtctgcaggaattcggcacgagcaacatctaataaaaaccaacatttcttttttcattgggacgcaattaaagaagagagaaaaagtatattttttttccaaggatgatttcttcctggagaaagagaagagctggtaagcgtgcagggaaagagcatgcatggaatgaaaatggtgaaatggagctaacaattcctagagattttaggtgtccgatatcgctggacttgatgaaagaccccgtcacgttatcttcaggtataacgtatgatcgacccaacatcgagaaatggatcgaagcctggaatttcacttgtcctcttaccaatcgagtgttaaggagtctcgaacccatccccaaccacatcataaggaaaaaaatccaagattggtgcgtctagaatcgatcccgcaacc

SEQ ID NO: 93031 - DNA, 523 bp, Zea mays
gatggagagtgtgttagtagggtggggggggaggtaagtattggtccggaattcccgggtcgacccacgcgtccgcccaattctaagcgagacggggcacaggaagaggagagcctaaaaccctaaccccccgaatgggatccggccgccggagcgcggaaccccaccccggccgccatggagatgggagggatgagcgacgctgagcggctgttcttcttcgagatggcctgcaagaactccgaggtcgcgtacgagcagaaccccaacgacgccgacaacctgacgcggtggggcggcgcgctgctggagctgtcgcaggtccgaaccggccccgacagcctcaagcttcttgaagatgcggaagccaaactggaagaggcacttcaaattgatcccaacaagtccgatgcactctggtgcttgggaaatgctcagacctctcatggattcttcactccagacaatgcaatagctaatgagttctttacaaaagcaacccgatgttttcaagaagcttgtt

SEQ ID NO: 93032 - DNA, 514 bp, Zea mays
cagtagtagacggggcaaggaaggaaggacagtattcaccggaattcccgggcacatccctcgagaagactcctgctcctcgccgatcgatacgatggccgtcttctccgacctccacaccgccgacgggctcaagtccctcgaggctcacctcgccggcaaaacctatgtgtctggtgactccattactaaggatgacattaaggtcttcgccgcggtgccgtcgaagcctgtcgctgagtttcctaatgccgcccgctggtacgagaccgtctctgcggctgtagcctcaagattccctggtaaggctgttggtgtaaatctgcctgcgggatcagctcctgcggcagctgctcctgcggatgaggctgacgatgatgatgaccttgatctttttggtgatgaaactgaggaggacaagaaggcagctgatgagcgtgcctgcgctgccaaggcctcttctaaaaagaaagaaagtggtaaatcctccgtccctatggatgtaaaccatgtg

SEQ ID NO: 93033 - DNA, 516 bp, Zea mays
  unsure (1)..(516): unsure at all n locations
tgacggtgtggtagggggccgggggagggaagtattggtccggaattcccgggtcgacccacgcgtccgctcagaggtgggttggcttctcctcccccaccggttcgtgttcaggttctggttcgtgggcgagagggaagagatggcggcgtcggacgttgagtaccgttgcttcgttggcggcctcgcctgggccaccgacgaccactccctcaacaacgccttcagcacctacggcgaggtcctcgagtcgaagatcatcctggatcgggagacgcagaggtcccgcggcttcggcttcgtcaccttctccacggaggacgcgatgcgcagcgccatcgagggcatgaacggcaaggagctcgacggccgcaacatcaccgttaacgaggcccagtcccgcggcggccgtggaagcggcggtggcggatacggtggcgggcgccgtgatggaggcggctaccgcngtggcngtggaggctaccgccgtggtccttgaggcttccggngccgggg

SEQ ID NO: 93034 - DNA, 520 bp, Zea mays
  unsure (1)..(520): unsure at all n locations
ngagagtggtaatgtgggtgggggggggagggaagttctcctccggtccggaattcccgggtcgacccacgcgtccgcatcaaccagaggtccatggacggtgccagggactccgagatcgccatgggcgcgtaccaggcgtaccacttggcgactaggcagcctgcccggggccagatccatggcttccggatgtctctttggtacgagcacctgggaatgctggaagacgtcttccagcggcccgagagcgtagagtgtgtgcagatggtgaacaaggtcgccgagaagtactgggacctgtactcgagcgacgacctggagcaggacctcccgggccacctcctcagctacccgatcggtgtcactgccgacggcagcgttaccgagctgcccgggatggagaacttccccgacacccgcgcccgcgtcctagggaacaagtcggattacctttccgccatcctcaccacatagagtgcacactgcatgcagcgccatggctgctctcctctctggc

SEQ ID NO: 93035 - DNA, 516 bp, Zea mays
tgaggtctctaagaaggggacgggtgggaaagttgtaccggtccggaattcccgggtcgacccacgcgtccggcgaaggcgaccctccctccttcgctccttccgcgccgcctcccggccgtcgccgccatggtgaagtactcgcaggagccgggcaaccctaccaagtcggctaaggccatgggcagggatctgagggtccacttcaagaacacaagggagacagcctttgcgcttcgcaagttgtctttgaccaaggctaagcgataccttgaggatgttattgctcacaagcaggcaattcccttccggagatactgtgggggtgttggtcgcaccgcgcaagctaagtcgcgccactccaatgggcagggccgctggcccgttaaatcagccaggttcatcctggatttgctgaagaatgctgagagtaacgctgatgtgaaaggcttggatgtggacaacctctatgtttcacacatccaagtgaatcaagcccagaagcagaggcgccgc

SEQ ID NO: 93036 - DNA, 518 bp, Zea mays
  unsure (1)..(518): unsure at all n locations
tgaagtttttacgaggtcgcgcgggcgggcagtttttatcggtccggaattcccgggtcgacccacgcgtccgggaatatacccggttgctcccccttggatccttgtttgcttcctgctgcctggccttgtctggtccccaaaatcaatccctcgccgacaaaggagagccagccaaatcttccacctcctccatttccagccccgtccccacaccagctcgcgtaacctcctccccatggctggaggcggcggcgcaggcgcaggctcgtcgtccggcggcggcggaggggcggcagggagggcgactgggactgcggcagctgcggcaaccgcaactacgccttccgctcgctttgcaaccgctgcaagcatccgcgcctnctcgtcgaccccaacaccccgcgcgactccaagtggctaccccgcgccgggggactggatctgcaccgcagcaactacttgcaaatgcaaactggncctatggggatgctggtagatatgggatgcaatcttcc

SEQ ID NO: 93037 - DNA, 484 bp, Zea mays
  unsure (1)..(484): unsure at all n locations
ctaatggctgatcacgcatagtacgtatccaccgtcgtggctgccgctctagaactagtggatcccccgggctgcaggaattcggcacgaggtgagtttaaaaaatcaacacttggaaaatatttcgggtttaatacttgcgcaactaaagaatttgaattgtttataatacgccatccttgcttagctaaaagtgaaacattaaattgagccatatttctgaagcccaatccaccctcttctttaggacggcataagtacttccactgacaccaatgaatacctctcataccatgcgttttttgccaccaaaatttagcaaaaatattctcaaattctcctcaaagagtctttggtaataagaagcatgacatagcgtacgttggaatggcctgtaacaccgatttaataaagacttctttacctccttgagataacattctagtactccacccatcaatcctggtagcaatcttnttttctt

SEQ ID NO: 93038 - DNA, 514 bp, Zea mays
tgaagtgtgtaaggggaaggggagagaagtctgctccggaattcccgggtcgacccactcgtacggttggtagcaaacgctggggactgccgcgccgtgctgtgtcggaaagggactgcggtggaggcgtcgtaggatcacaggccgacatacgacgcagagcgtcaaagggttatcgcgtgcggtggatacatccgaagatgggtacctcatcggcgtactatctgtgacccgggctgtaaggcactgggacatgaatctggccctagagctcttagtaggacattatcgcacagccagagatccactggaccaccctgacggaagactacgagatgctcatcatcagctgcaacgggatctggtatatgatgagcatccatcactcggtgagcacggtacggaagggcctccggatgcacgatgacccagatcggattgaccagtagctcggaatggatgcgtaaaggctctagaccttggacaaccttagcgcgatcgcagtgtgctttga

SEQ ID NO: 93039 - DNA, 513 bp, Zea mays
catgtgtgaaggggggagaaggaaagtagtattggtccggaattcccgggtcgacccacgcgtccgcttggtggaaaggctggtgtttcttgtggacggtttcactatggcagtgcatttggtgagccaagtggtaatgctgacaaggttgcagacataagctctactctaatcaagcatggtttcagctataatggaaaagatttcttgtactcaggcattcttggtcagcctcttgaggcatacatcttcatgggaccaatctactatcagaaactaaagcacatggttcttgataagatgcatgctcgagctagtggaccgcgggtgttactgacgaggcaaccaactgaggggcgaagccgtgatggaggcttgcgtcttggtgagatggaacgtgattgtctaattgcatatggcgcgagcatgctaatatttgaacgtctactgttatcaagtgatccttatcaagtccaggtttgcagaaaatgtggctttgtaggctactacaat

SEQ ID NO: 93040 - DNA, 522 bp, Zea mays
tggaatgtgtgttatgatgggggatggatgagaactcttgtatcggtccggaattcccgggtcgacccacgcgtccgggagaagcaaaagaatgctatcaaatcgagtcatcttaaattggcaacattagagcagcagagagctgatgagaatgtgctgaagcttgtggaagaacaaaaagtatgtaccttggctcctgtgatatgatgctttaggtttcaaacaatgtgtcctatggtagtcttactgtatggaaactacagagggagaaacatgctgcgttaaagaagattctgatgttggaacaacaattggatgcaaaacaaaagcttgaattagaaatacagcagttgaagggcaaactaaaagtgatggagcatatgccaggtgatgaagattcagcgtcaaagaataaaattaatgagctgagtgaggcattgcaagaaaagatagatgaactggatggaatggagtcacttaaccaaactctggttatcaaagaaagcaaaagcatcattgaac

SEQ ID NO: 93041 - DNA, 519 bp, Zea mays
  unsure (1)..(519): unsure at all n locations
gaggaagttttttagggggggacgcaaggaaatgatgctaccggtccggaattcccgggtcgacccacgcgtccgccggagcagccgcagtcccaccgaccccgccgccggtcgccctccatctcctcgccggtgcgtctcgtttctcttttcaataatcaagatgagccgtggtggtagtgccggtggtggtcaaagttctctgggttatctctttggaagcggtgagccccccaaaccagcagtggcaccagctgcaagtgctccacctgttgagaaaccatctgctgcaaagactgatgcggccaagcaggttgctgctggggttaccagccaaaccaataactaccacagggctgatggtcagaacactggcaacttccttacggaccgtccttcaaccaaggtccacgctgctcctggcggtggctcttccctgggctacctgttcggtggcaactgatgcccgtgctggtgcgctcaccaaagttatcctnccctgcctgctgcgtgctatgn

SEQ ID NO: 93042 - DNA, 482 bp, Zea mays
gaagtgtattcatcgacatagaagcatctcgtggctgccgctctagaactagtggatcccccgggctgcaggaattcggcacgaggaacatttttaaggacgagcatgactaagtgatttggacgcccctcaccatagagaatcccacatgcgaagggctgaaaacatggaattctacagttttggaccaacatgtgatccaaataatatagttttgaagggtttcaaattgccagaactagacgtgaatgattggttggtatttcagaacatgggggcttatacttcatcacgtgggaacgatttcaatggcttcaaaacctcagctattccaacttatatcctggttcttatgccacccgtaagacaaggaaaataagtggtttgggctaatttgcttgccaacttatatcttcttgcaatcatgacacgatcaaagataatttagcttatgaaataatgtcctatcttactatttaata

SEQ ID NO: 93043 - DNA, 478 bp, Zea mays
  unsure (1)..(478): unsure at all n locations
taagactaagaagcggaggattatagtatctcttnnctgncgctctagaactagtggatcccccgggctgcaggaattcggcacgagatttcaatttgattgaagaagaagatttaccggttggagggcaagcaattcgtgggcttcctttgttttgtaaggatacaaaggagtacatttctaaaatagtagacattttaaggcaactccttactgctgatgagattgtggagcgtgatgctgttcataaagccttaatgtctgtattaaggcaggatgtgaaggaacttattggaataattgaagggcaggctgatttagatgcacaatttgacgtctctgatgcagatcatattgataggttgatatcgtgtctgttcatggctattccattttttgtgaggggtgcacctggcagcaagtttctcaactacttaaacaaacacattatacctgtttttgataagcttcncccccg

SEQ ID NO: 93044 - DNA, 516 bp, Zea mays
aatgtgtgaacggggggcggaggagagtaagttttggtccggaattcccgggtcgacccacgcgtccgttgaggttagaagaggagctagagcgagagagtcccatcgcaacacacaaaaggaagaggaagaggaagaggaaggcgagaacgatgggcttgctcctgctgctcctcgtcgcggcggcggcgacagctcctgcggccgacgcatggggcaaggaggggcactacatggtgtgcaagatcgctgagagctttctgacgaaagaggcctcgacggcggtgaaggagctgctgccggggtgggccggcggcgagctcgcggagacgtgctcttgggcggacacgcagaggttccggtaccgctggtccagcccgctgcacttcgccgacacgccaggggactgcgagttcgactacgcccgggactgccacaacaccaaaagggagaagaacatgtgcgtggtcggagccatcaacaactacacggcggcgcttaaagactcatcaagtc

SEQ ID NO: 93045 - DNA, 518 bp, Zea mays
tgaaggttttgtagcagggcaggagggatagtagttctcctcctgaattcccgggtcgacccacgcgtccggcacgtctccatctctggtttgaccgccgccgccgccgccctactcggctacgccaggcgcggaggccttcgtcggcattttcgtcggcaagcactcaccaggtattcagccatggtttttcttgaggcagagatgtcatggaatgtgttgatctcacctagccagctggaccgcaagggcctcctgctccgcaaggctatcattgtgcgtcttctggaggatgtcacaaacaggagggcttcgaaagagcatggctactacattgctgttaatcagctgaaggcaatatctgaagggaaagtgcgtgagctaactggagatgttctgttcccagtttcatttacttgcattacacagaagcctatgaagggagaagtcatggttgggcacgtggacaggatcctcaagcatggcgtgttcctcaaatccggacccgtggagagcat

SEQ ID NO: 93046 - DNA, 515 bp, Zea mays
tgagtgttgtcaaacgcaaatggacagtagttctgcaccggtccggaattcccgggtcgacccacgcgtccggtccagaacgcccagatcttactggacacgtgcgtctacgcgtctcctgcgccaaacgttgggagcagaccggtggacggtggtagaaggatcctgagggcggcggggatgggaggaggggcgacgctgaaccatccgccagctcgtcctcggtttggctgcatcacctacggctactacctgtcgtatttctgggcgaacgatgaacgcactcgaacagctcttgggatcaagaagggaacagtggacgagtgggtgaggtgtcacgacgcagacctgccgtacacgatcgacctcaagagcgccatcaagtaccaccggaacctgacgtccagaggctaccgcgccctggtgtacagcggcgaccatgacctgctggtgccacacctgggcacccaggcatgggtcaggtccctcaacttccccgtcgtcgacgactggag

SEQ ID NO: 93047 - DNA, 484 bp, Zea mays
actgtctatgtaggggggcgatgtgaagtatcgccgtggcggccgctctagaactagtggatcccccgggctgcaggaattcggcacgagggtggttcaagagaggataagaggaggagtaagcgacctgggtctaactcttgaagggttcctttttcttcatgctctttttatagaaaaagggcgtcttgagacaacttgggctgtcttgaggaagtttggatataatgacgagttaaagctcagggatgatattcttccagttccaaccaagcatgcccctgatcagactgtggagctgacaaatgaagctatcgactttttgcgtgggatcttccgattgtatgacagtgataatgatggatctttgcaaccttctgagtttgatgatatctttgtaactgcaccagaaagtgggccttgatgacaactctggatccttcatattgtttggctaacttgatttgcattggatatggggggg

SEQ ID NO: 93048 - DNA, 478 bp, Zea mays
cagactctaaggggggacaaggatagtatcgctctggcggccgctctagaactagtggatcccccgggctgcaggaattcggcacgagcttcgtcagagatatacaagacattgcctattaggggagagcttttacgtgcctttgtgaatgcggatttaatcgggtttcatacttttgattatgcaaggcattttttgtcgtgctgtagtcgaatgcttggtcttacttatgaatccaagagggggtacataggtgttgagtattatggaagaactgttagtatcaaaattctccctatggggatacacatgggtcagctggagtcggttttgagccttccagagactgaagccaaggttacagagcttcttaagcagtattgcgatcaagggaagacaatgttgcttggggtggatgatatggacatatttaagggtattagtttgaagctgctagcaatggaacaactatcctttt

SEQ ID NO: 93049 - DNA, 477 bp, Zea mays
aagctgtgtcaccgaataggtagtatctcgtggctgtcgtctagaactgtggatcccccgggctgcaggaattcggcacgagcccctctgtgccgtgtcttgcgggtttcacttcacaggtgtctcacgatctgcatgatggaaagcatgaatagctcttggcagttaggagatgatctccggggacaatctaaagcctcagaagatcacatatggttgatggttgcctccaaactggctgaacagacgaggataaagggtgagcgaatgaacaatctcgatctttcaaagggtccagctgaagtaaggacaagggataaatttgggttccatgaagacaacaaattcgagaaccttaacttcaatatgttgaacttggactccaagatcggagatagtgtaagcaaaagttccttccgaaatggtatttacaacaccgatgctgtttaccagaaaaattacagccacaaccctatt

SEQ ID NO: 93050 - DNA, 518 bp, Zea mays
  unsure (1)..(518): unsure at all n locations
ggtgagtgtgtcaagaagcgccacggaaagtaatcctcgtccggaattcccgggtcgacccacgcgtccggggaaataaaaagccatccatggttcctaaagaacttgccgagggagctcacagaggcggtgcagggatcctacttcaggagggacaacagtgtctctgcattttcagaccaaacaaccgaagaaatcatgaagattgtcaaggaggcaagaaccttgccaaaatcgtcgagatcaggctatggctacagtgaagaatgctcagatgaggaggaaaaggaagtggagagcgaacccaaagaggaggaagaagaagctgagtgtgataagacagttagggaggttcgcgagagcggggagctggatatgacctcactgcacatctaaatgctgcctgtgaggctgtgacgtgtctgtagataattggctttattgtctgctgaatttggtagaacttatgcaattctggcgtcagatatagtggtctatataatgctttttcatnctgg

SEQ ID NO: 93051 - DNA, 518 bp, Zea mays
  unsure (1)..(518): unsure at all n locations
gatggaggtgatgcaaccagcaacaaagtacgtagtctctcgtccggaattcccgggtcgacccacgcgtccggggtttttgattttagccgccgccgctgctcatctcacatccctcgagaagacgcctgctcgtcggcgatcgatacgatggccgtcttctccgacctccacaccgccgacggcctcaagtccctcgaggctcacctcgccggcaaaacctatgtgtctggtgactccattactaaggatgacattaaggtcttcgccgcggtgccgtcgaagcctggcgctgagtttcctaatgccgtccgctggtacgagaccgtctctgcggctgtagcctcaagattccctggtaaggctgttggtgtaaatctgcctgcgggatcagctcctgcggcagctgctcctgcggatgaggctgaagatgatgatgaccttgatctttttggcgatgaaactgangaggacaagaaggcagctgatgagcgtgccgncgctgccaaggcctcttt

SEQ ID NO: 93052 - DNA, 516 bp, Zea mays
taagtcgttgtcacgcgcggacggaaagtaggcatcaccggtcctgaattcccgggtcgacccacgcgtccgccggtctgcaagaaccgtcgataagagggactacccaagagggggtctccagcaacggggggggcaactggtccaggggaaggtggatctacgacaacgtgtcccgcccattgtacagcgttctcaagtgctccttcatcttccccgaggtggcctgtgacaagtatggcatgaaggatgccatgtaccagcactggagatggcagcctcatggtcatggatgcgacctcccaagatttgatgccatcaatctgcttgaaaatctgagaaacatgagaatggtgtttgtgggcgactcagtcaacaggaaccaatgggtctctctcgtgtgcatggcggaggcctcaatacctgacgacaggctcaagatacgcaccttcaatggctcactcatctccttcaaggcattggaatacaacgcatcgatagatttctactggtcac

SEQ ID NO: 93053 - DNA, 520 bp, Zea mays
tggaggtgttgtaagcggggggacgggcagtagtgatgcaccggtccggaattcccgggtcgacccacgcgtccgaattaaggcaaagaatctccaagtttgcttcgctcttgcattgaaccatggagtctggacggctcatcttcaacgcgccgggctctggcgccgggcagatgctcttcctcgactgcggcgcaggcggcggtcccggcggcggcttgttccatcgaggcgggagaccgatgcttggccttgaagaagggcgcggcgtaaaacggcccttcttcacctcgccagacgagctcctcgaggaagagtactacgacgagcagctgccggagaagaagcgccgcctcaccccagagcaggtgcttctgctggagaggagcttcgaggaggagaacaagctggagccggatcgcatgacggagctggcgcgcaagctgggcctgcagccttggcaggtggccggtctgttccaggaaccggcgtgcccggtggtaggaccaagcatctcgag

SEQ ID NO: 93054 - DNA, 483 bp, Zea mays
aagctctgacgtatgcagaaggggaggagtcttctcccggttcgtaattaccggctggacgcacgcatccgcgcgaactccgcacgacagaatgcgaattgggcaccgtcgcttccttaaacgcggtgtcgtccttagaagatgtgccgccctttgatacctactcgcggtccatatactcagtacagatttcttggaaacttatagcagatcacgtctaaatatcgccctaccatcactccaatcggtcatggagcctaccgcatcttctgctcggcgttgaactcggagacgaatgaaatggtaccggttaacaagataatcaactctttcgataatcacatggacgctaagcgtacgcttctggaaaataaccttctccgacatttggatcacgagaatgttatcacgatctgagatgtcactgcttgctctttgctgagagtacatagcgacatctacattgccttggagccccaaaat

SEQ ID NO: 93055 - DNA, 515 bp, Zea mays
gatgaaggtttcacccgccagacagaaagtagtcctcgtccggaattcccgggtcgagccacgcgtccggttttggcccggttttatcaggaagcagctacttctccatcctgaatctgatgattcagctgggcgttctcagattgagacagagaagcttctagcccagttagttgagactgagatgaacagacgtttgaaggagggcacttacaaaggaaagaagtttaatgcaatctgtcacttctttggctaccaagctaggggagcactgccttccaagtttgactgcgattatgcctatgtcttggggcatgtgtgctaccacatcatagctgccggtttgaacggttacatggccacagtgacaaatgttaagagtccagtgaacaagtggcgatgtggtgcggctcctatttcgtctatgatgactgtgcagcgatggtcgcgtggcccttcagccacccaaatcggaaagcctgctggtcacatggctagcgtcgacttggaaggaa

SEQ ID NO: 93056 - DNA, 520 bp, Zea mays
ctgaggtgtgttaacgcgcggacggaaagtagtgctgctaccggtccggaattcccgggtcgacccacgcgtccgaccaagaccttcacgtctgatttccctcatgtcgagaggtatttctggaccatggttaaccggcctaacttcaagaaggtcattggtgaggtcaagcaggcagagtctgcacctactattccgaaaaaggctgctccttctaaggagccaaaggcaaaggatgtcaagaaggaggctccaaaggaggcccccaagccaaaggtggttgaggcaccagcagaagaggaagcaccatagccaaagccaaagaatcctcttgacttgctgccaccaagcatgatggtccttgatgactggaagaggctatactcatacacatagaccaacttccgagaggttgccatcaaaggtttctgggacatgtacgacccatagggctactccttgtgggtctgtgactacaagtacaatgatgagaacaccgtcttccttgtgacccctgaaa

SEQ ID NO: 93057 - DNA, 479 bp, Zea mays
tagggtttgttatcgaacactgtatccatctcgtggctgccgctctagaactagtggatcccccgggctgcaggaattcggcacgagcttcctctcttgttctttcagtttcctttgatgtcagaaggtatgggaactcaggctgctccagaaaatggttatggcagaagcaacagcttggaagagaaatcagcaatggagaaagcaatcgatgagtggatgccaatcacctcatcaagaaatgcaaaatggtggcattaagctttccacaatgtcaccgctatggtgggagctggtgtgctcagactgccttacgccatggcagaactcggatggggtcctggcgtgactgttctaatcctatgatggattatcaccctatatacactatggcaaatggttgaaacgcatgaaatggttcctggaagacgtttcgatagataccatgaactgggtcaatatgcctttggtgaaaaaaa

SEQ ID NO: 93058 - DNA, 477 bp, Zea mays
gctgctgttctagcacgaagttattatctcgtggctgccgctctagaactagtggatcccccggtctgcaggaattcggcacgagtataaaaaatggctgctcctataacaatgctgattcgttggcatcttttttatcccttagtttactttctactgctttcacttctcgagattacgctgatgctcttgaaaagtctattcttttctttgagggacaacggtcgggtccgttgccgtctaatcaacgcctcaaatggaggggtaactctggtttgtccgacggtgcttcttatcacgtggaccttgtgggtggctattatgatgctggagataatgtcaagtttggccttccaatggccttcaccacaacaatgttggcatggagtgttattgaatttggcggttcaatgcatagtcagattgggaatgcaaagactgccctccgatgggccacggattatcttctaaaaaaaa

SEQ ID NO: 93059 - DNA, 518 bp, Zea mays
  unsure (1)..(518): unsure at all n locations
nggtggaatgttgtgaaggagcgaaggggaggaagtattctccggaattcccgggtcgacccacgcgtccgcggacctaatattgcttctgaaatttacaacaaagaatatgcaaatgcacgtatttgtggagctgacaaatggagaaagccccttgcaaagtttttgaggcagcctcattttattgtgtgggataacagtgatctcatcactcatgaagtcatgggtggcttaaaaaatgtctatgctattggtgctggtatggtagctgcactaaccaacgagagtgcaaccagcaaatctgtttactttgcactttgcacatctgagatgatctacatcacacaccttctggaagaagaacctgaaaaacttgctggacccttattagctgacacttatgtcacattgttgaaaggtcgtaatgcatggtatgggcagaagttagctaaaggtgaattgacattagaaatgggtgacagtattaaaggaaaagggaccattcanggtgtctcttg

SEQ ID NO: 93060 - DNA, 515 bp, Zea mays
  unsure (1)..(515): unsure at all n locations
aggagtgtgtcaagagggaggtgggaagaatactcgtccggaattcccgggtcgacccacgcgtccgcggggagggaagcacgcccccaaacgttccgaggtttcgcctctcggagcgcaccaacgccggccggagcgactcgccaccggcgcggagaaggagggcggaggctaggcgatggcggacgagaatgaggctgggaagaaagaggaagaggaatttagcacaggccctctgtcagtactaatgatgagtgttaagaacaacacccaggttctcatcaattgccgcaacaacaagaagctgcttggccgggttcgtgcttttgatcgccactgtaacatggtgctcgagaacgtgcgggagatgtggacagaggtccccaagactggcaagggcaaaaagaaagctctgcctgtgaacaaggatagattcatcagcaagatgttcctcangggcgactcggtcatcatcgtgctgaggaaccccaagtgacccgccaacncggaagccc

SEQ ID NO: 93061 - DNA, 518 bp, Zea mays
  unsure (1)..(518): unsure at all n locations
nggaggttattaacgagcggggacggaagagaagtttttaccggtccggaattcccgggtcgacccacgcgtccggatctatccatgctttgaacctaatggcagactcagttaattgtcttgtgcgatggtcacaagaggttagagaagctggtggagaggcagatagaatattggaaggaattgcagagatgtggctgcggctggtgcaggctctacgcaaggtgtgcatggatcaaagagaagaagtgaggaaccatgcattgttatcgttgcatagatgcttggtagttgatggaatatcagttaagtcttcaacatggttgatggcatttgacattattttccagttgcttgacgaactgttggagattgctcagagctactcaccaaaggatttcagaaacatggaggtatctctcttgcatgctgtaaaactgttatgcaaggtgttcttgcagtcacttaaagacctctcaggacagcacagttttgataagctgtggttggaggttctt

SEQ ID NO: 93062 - DNA, 482 bp, Zea mays
agagactgtaaggggggcgaagggaatcatcgccgtggcggccgctctagaactagtggatcccccgggctgcaggaattcggcacgaggagaggagatagacgaaggagttaggttgatgtactgggcgaacgaatgtgatttggacggcattcgcgagctcttggactcggggatcaatgttaatttccgcgacatcgatgatcggacggctctccatattgcagcttgtcaaggacagaccgatgtcgtttccttgctccttcagcgcggcgctgacgtcgaatctacagatcgatggggaagcactcctttggcggatgctgtatattataagaatcatgatgtgattaaacttctggagaaacatggatctaagccttttatggctccaatgcatgtaaatcacgcgcgtgaagttccagaatatgagattgatccaaaagaacttgattttactaacagcatcaacattaacccaa

SEQ ID NO: 93063 - DNA, 519 bp, Zea mays
acgtctgtgtttacagcaaagcatcgtatagtagtcactcgtccggaattcccgggtcgacccacgcgtccggtggagcttactgaaggtggcactttttggttgtcggaatcaccatcggttccaggaagcggttcatggggagcaaaggcaccctgcattgcaacatgggcaacgtttcaactcaaaaggctagaaccacctggattcagtttccagatcgtaaatacaaatcttgatgaagttagccctcgtgctcgacgaagaagtgctttacttacatggcaacatatagcatcgctgccacccaatttgcctgttatctattgtggaggcttcaatacacagaaggaatctatgactgggcggtttttgcttggcagatccagagaacatggtgttgctggtgatatgagagatgcttggccaaatgctcgagtgcgaaaaaatgtttcactaatacacacatatcatggatttaaaggggagaaacaaggtgccctggaatttcttaaattg

SEQ ID NO: 93064 - DNA, 520 bp, Zea mays
gtgtaatgttgttacccgaacgatagtattgcatcttccggtccggaattcccgggtcgacccacgcgtccgccccttccctccctccctctccccgcgggccgccagaggcaatttcgccctcgattcgacggcgagtcgtccgcccgcgaccgggattccctccgccaagcgcggatctgaacgctgcgctccgtgtcgtcgctcgaatccgccatgaagggggccaaatccaagggcgccgccaaggccgatgccaagctggcggtgaagagcaagggggcggagaagcccgccaagggcaggaaggggaaggccggcaaggaccccaacaagcctaagagggctcccagcgctttcttcgtgttcatggaggaatttcgcaaggagttcaaggagaagaaccctaagaacaagtctgtcgctgcggtgggaaaagctgctggcgacaggtggaaatccctgagcgagtcggacaaggctccctatgtaaccaaggctaacaagctcaagctagagt

SEQ ID NO: 93065 - DNA, 519 bp, Zea mays
  unsure (1)..(519): unsure at all n locations
atgaatgtgtgttaccaagancatagatagtattgcctctaccggtccggaattcccgggtcgacccacgcgtccgacagcatcgtgaacggcagcgacgccgtcatggagccggttgttgctggcagcaacgcgggggtagctgttgcccaagtcgagttgctaacaatgaacgtgcagcagccctctgatgttgccggacccagcgagggggtggcggcgatctccaaaggggggaaggtagggcctaaccggtgcagcgcctgcaggaagagggttgggctcacgggattcaactgtcggtgtgggaacttgtactgcgcgctccaccgctactccgacatgcacgactgcaagttcgactaccggtctgctgacagggacgccattgccaaggctaatacgctggtgaaggcagacatgctcgacaagatctaaggtgggttccctacggctggtgtcaagaagattgtaataccgcgtaactcgtcatgcggaactgctgccttgccctgcgac

SEQ ID NO: 93066 - DNA, 482 bp, Zea mays
  unsure (1)..(482): unsure at all n locations
agatgggtgatctcgatagtacgtatcactgtcgtggcggccgctctagaactagtggatcccccgggctgcaggaattcggcacgaggaaaaacgaataatcaaatgaaaaaacagtattgaagacggactctttcgaccaagaattcttgctgccataatcggagaaacggcattaaaattggcgaaggttttgaagagaagacgaaaatggatgctgccaagaagaagtacagtataatagtaccaacgtataacgagcgcctcaacattgctctcatcgtctatctcatcttcaaacatctccgggatgttgattttgaaataatcgttgtggatgatgggagcccagatggtactcaagaagttgtgaaacagctgcagacactctatggtgaagatcgaattttattgagacctatacctaataagcttggattgggaacggcttatatacatggtttgaagcatgctttnttttg

SEQ ID NO: 93067 - DNA, 480 bp, Zea mays
tgtggctgtaccagcggagaggacagtatcgctctggcggccgctctagaactagtggatcccccgggctgcaggaattcggcacgagagagagagtatgaatcgccaccacgatccaaaccctgtcgatgaagaagaagtcaatccattttcgaatggtggttctgtcgcacctgcacgaccactggcatccgaacctttgggttttgggcagaaacatgatgctactgtggatatacctctggattcaatgaatgattctaagaaaagagaaaaggagctcgcagcttgggaagctgatcttaaaagacgggctaaggatataaagagaagagaagatgctgtttcccaagctggtgtttctgtagatgataaaaattggccaccaattttcccgattatacatcatgatatagctaatgagataccggttcatgctcagaggctgcaatatcttgcatttgcaagttggctttttgg

SEQ ID NO: 93068 - DNA, 483 bp, Zea mays
  unsure (1)..(483): unsure at all n locations
tagggggnntaactgcctccatcctcgtacttcgttccgtttggaattcccggtggacccacgctccgagcagatccgccggcgagcgctcgggggcaatgggtgtcgtctcggcagcggcggacgcgattgtcgcggttttgtccgtcaccatcgtcgtcgcggcgccgctactcgacgcgcagtccgtactcccgcataccctctacccggcgccgctcctggaactcaagcgctggtacgccgccgagtttggcgactacctcatggcccagccccccggcttcttccgtggccttgtttgcctcgagctcgccttccaatggccgctcgccgtcgccacactctacggcatcctcacccgccgccgctgggctgccaccacctccctcatggccggcgttggcaccctcacctccatgtctgcaattcttggtgagatgttaggttcaagcaaatcaacaccaaagttgctttttacac

SEQ ID NO: 93069 - DNA, 534 bp, Zea mays
  unsure (1)..(534): unsure at all n locations
ngaggtagaggtttgtaacagcaaaggatagtatttctctaccggtccggaattcccgggtcgacccacgcgtccgctgctttatgacaccaagggccgcttccgtcttcacccaatcagggatgaggatgccaagtgcaagctctgcaaggtgaggtccgttcagtttggccagaagggcatcccctacctgaacacctacgacggccgtaccatccgctaccccgacccgctcatcaaggccaacgacaccatcaagatcgatctggagaccaacaagatcatggacttcatcaagtttgacgtcggcaacgtggtcatggtgaccggcgggaggaacaccgggcgtgtaggtgtgatcaagaacagggagaagcacaagggcggcttcgataccatccacgtcgaggactccatgggccaccagttcgccacccgcatgggcaacgtgttcaccattggcaagggcaacaagccgtgggtgagcctgcccaagggcaagggtatcaagctcagcatcatcgaggagcagag

SEQ ID NO: 93070 - DNA, 528 bp, Zea mays
  unsure (1)..(528): unsure at all n locations
nagggcgttgtttaaaacagcatctgacgtacgtctgcaccggtccggaattcccgggtcgacccacgcgtccgaaaccccacccgcgcgcgcggcggccggcggcgagccctcacccatccgagcaagccgaggaggaagcgagcgcgcgaaagtatcaggaggaggcatgggtaccctggggcgcgcgatcttcacggtgggcaagtggatccggggcacggggcaggccatggaccgcctcggatccaccatccagggcggcctccgcgtcgaggaacaggtttcaaggcatcgtacaatcatgaatatttttgagaaagagccaaggatccatagagatgtgtttgttgctcccagtgcagcagtcattggggatgttgagattggtcatggatcgtcaatctggtacggatccatattgagaggtgatgtcaacagcattcatattggatctggtactaatatacaagacaattcccttgtacatgtttcaaaagctaacattagcggggagggtnctcccan

SEQ ID NO: 93071 - DNA, 523 bp, Zea mays
  unsure (1)..(523): unsure at all n locations
agggagaggggttgttagagagggggcgggaaagttataccgcgtccggaattcccgggtcgacccacgcgttcggcctcaaaacctgatcatcagagaaacgaaaaggaagaggtgagcgtgggagataaaacaggagaggggataagagatatagccctgagaagaatggcccttacaactgatgaactcaaggccaaggccgaggtatactacggtgacgagatctgccagctgtgtacccagctcctgctcagggaagcaggcctccccaatggtctgcttccattgaaggacctaatcgagtgcggctatgtccaggaaactggattcgtgtggctgaagcaaagcaagagggttgaccacatcttccatagtctangaaagctggtctcttacggcaacgagatcaccggctatgccgagaagggcaggatcaagaaggtcaaagggataaagaccagggagctcatgctgtgggtcccggtggaggagattgctcttgatgatgatccaacgactt

SEQ ID NO: 93072 - DNA, 517 bp, Zea mays
ggaggtttgtttcgaattgaacggaaatgtattgctgcaccggtccggaattcccggttcgtatcgggtccacacctcgacgcaactggaagcttcgcttcaatctgccctactcctccgccgcctccagcaccggagacgcagctgccgcgggcgggagcttggacgtgctactctgctctcatctcgtttccgcgcaggaattgttcacaatggcccgcgtgtatgttggcaacttggattcacgggtgacttctggggaactcgaagatgagttccgtgtgtttggagttctgcgaagtgtttggattgcacgtaaaccacctggctttgcatttattgattttgacgacaggagggatgcggaggatgctattcgtgatctagatggtaagaatggatggagagttgaactatctcgtaattccagtggtcgtggtggtcgtgatcggtatggtggatctgagtcgaagtgctatgaatgtggtgagactgggcactttgcacgtgaatgtcc

SEQ ID NO: 93073 - DNA, 522 bp, Zea mays
  unsure (1)..(522): unsure at all n locations
aggaagctcntgtacagcatccgcacgtagatagtattgctcgccggaattcccgggtcgacccacgcgtccgcagacgccatcctcgaaatttatcagaggagattggtcgtctatctggagcactccgcgggcatcaagccccacgcttaaggtcagggtttctgttggagcgtcagggcgatggtgtttggggcgttcctttatcaacaaggggtagagaaggaagaaggttaatggagattcggaatgcacttgaaatgattcaaaggggggaaaatgtaaggctcgagtctatcttctatggcggcctcgacattcatgacagacacagggacatgcgccttgacattgacaatatgtcctatgaggaactattagcacttgaggaaaggatcggaaatgttagcactggcctcagcgaggaagctgtgataaagttgctcaaacaaaggaaattttcatcgtggagactataagcatctttggacccagaaccatgctgtatttgccaggaggagt

SEQ ID NO: 93074 - DNA, 531 bp, Zea mays
  unsure (1)..(531): unsure at all n locations
aggggagctctgcaacagcaaggatagtattgcttaccggtccggaattcccgggtcgacccacgcgtccgctcttggtgtagcttgccactctcaccaatcaagttttcatgtctgatctcgacattcagatcccaactgccttcgatcccttcgctgaggccaatgctggggactctggtgcggcagcagggtcaaaggactacgtacacgtgcgcatccagcagcgtaatggtcgcaagagcctgaccaccgtccagggattgaagaaggagttcagctacagcaagatcctcaaagatctcaagaaagagttctgctgcaatggtacagtggtccaggacccagaacttggacaggtcattcagctccagggtgatcagaggaagaacgtctcgaatttcctcgtccaggccggcattgtgaagaaggagcacatcaagattcatgggttctgagcaaccgncnggtccatagcanaccaaccctgcatgcagggccagcttattatatataatatctgaggtggag

SEQ ID NO: 93075 - DNA, 527 bp, Zea mays
gggtagtttgtgacgacgggggaaggacggaatgctctaccggtccggaattcccgggtcgacccacgcgtccgcgcgacgggtttcctcttgggttttgttctgttggcaaggcctcaatttagctggatggaaagtcatgagttgccacacactaaccaacctcccaagtacaaaatatactggtatgctttgtgggttgtggcactcgtcttgctgttagttgggtaagtaaatccatatggctggttcagtatatttgttgtagacatgtctttatgcgtttattaaacatatattgcagaaaacgtgctacaaagattcgtgattctggactaatgctaaattttggacgagctataaagatattacttgtttttgtgaaagcttgaaatagcactaatgtcaaattcttggggcacaggtttgtgatttcactagtgatgcttttcaaagggaagaacgggaacgatggctgccattggtgccactacctgaactgcgtgccaacatccaagtgggagtgt

SEQ ID NO: 93076 - DNA, 526 bp, Zea mays
  unsure (1)..(526): unsure at all n locations
ngagataaggggttgatactgcgagggggaggggaagtactgctctactggactggaattcccgggtcgacccacgcgtccggaatttgttggtgacaaatggtattattaaaattgctgactttgggttggcaagagaaatagtcttccaatcctccttacactgattatgtttccaccagatggtatcgggctccagaggttctactgcaatcttcagtttatacacctgctattgacatgtgggcggctggtgctattttggctgagctttttacactgtccccactttttcctggtgaaagtgaaactgaccagctttacaaaatatgcactgtgcttgggacccctgattgcactatttggccagagggaatgaacctgcctcgttcatgcagctttaagttttttcagaatcctccaagaaacttatgggagcttattcctaatgcttcatctgaagcaatcgatttgatccagcaactttgttcctgggatcctcgaaggaggccaactgctgagcaag

SEQ ID NO: 93077 - DNA, 523 bp, Zea mays
  unsure (1)..(523): unsure at all n locations
naggttcggtgttgtaaggggaggggtagagagtgtaatacccgtccggaattcccgggaacgagaccaaggacaacgggctgacgctcttctgccccgtcgactcggccgtcgcggccttcgcggccacgtacaagaaccgcacggccaaggccaaggcggccatcctcctctaccacgccgtgccggactacttctcgctgcagctgctcaagtccaacaacggcatggtcaccacgctggccaccgccagcgacaagaagatggactacagctacgacgtcaagaacaaaggcgagacggtcacgctgcagaccagggtcgtcacgtccagcgtcaccgccaccgttggcgacatggagccgttggccgtgtatgccgtgaacaagttcctgcagcccaaggagctcttcaaggtcgtcgaagcgcccgcgcccgcgccgggaccgttcaagaagaagaaggctggtcgccgccggagtgacgacgatttcctcgacgattcgggagattcgaccgccga

SEQ ID NO: 93078 - DNA, 525 bp, Zea mays
  unsure (1)..(525): unsure at all n locations
ngagtagcgtgtctgtctactaccagcaggtacgtagtgctctaccggtccggaattcccgggtcgacccacgcgtccggttggcttctcctcccccaccggttcgtgttcaggttctggttcgtgggcgagagggaagagatggcggcgtcggacgttgagtaccgttgcttcgttggcggcctcgcctgggccaccgacgaccactccctcaacaacgccttcagcacctacggcgaggtcctcgagtcgaagatcatcctggatcgggagacgcagaggtcccgcggcttcggcttcgtcaccttctccacggaggacgcgatgcgcagcgccatcgagggcatgaacggcaaggagctcgacggccgcaacatcaccgttaacgaggcccagtcccgcggcggccgtggaggcggcggtggcggatacggtggcgggcgccgtgatggaggcggctaccgcggtggcggtggaagcttacggcgtggtcgtggaagcctaccgcggcgtgggggataccgt

SEQ ID NO: 93079 - DNA, 520 bp, Zea mays
  unsure (1)..(520): unsure at all n locations
atggatggtgagtacgcgggggggggagaaggtattccgctccggaattcccgggtcgacccacgcgtccggtggcgtccacagtgctggtgtacgtgcagacgcacgtgggctggggctggggcttcggcgggcccgccgtggtcatggccatcgccgtcggcagcttcttcgtgggcacgccgctgtacaggcaccagaagcccgggggcagcccgctgacgcgcatcgcgcaggtgctcgtcgcgtgcgcgcgcaagtggaacgtggccgtgcccgcggacaagtcgcggctgcacgagacggtggacggggagtccggcatcgaggggagccgcaagctggagcactcggagcagctggcgtgcctcgacagggctgccgtggtgacggccgatgacggcgcggaggcgagcccgtggcgcctgtgctcggtgacgcangtggaggagctcaagagcgtgatccggctgcttgccatctgggccagcgggatcgtgttcgcggccgtgtactcgca

SEQ ID NO: 93080 - DNA, 519 bp, Zea mays
atgtgaggatttgtaaagcgggggtggaaattagtacccgtccggaattcccgggtcgacccacgcgtccgggagtaccaggacgagtcggtgctgtggacggagagcggcgacgtgggcaagggcttccgcggcatgcgcatggtgaacaacatccggctcaacttcgacgccttccacggcgacaagggccacggcggcgtgcacgacggcaccaccgtggtgctgtgggagtgggccaagggcgacaaccagagctggaagatcctgccctggggcgacgaggcctacgccgcgggaggcagcagcgccgccaacgcgccccgcttcggcggcggcggcgagcccaccgtccgcatctactgcaaggccgacgaggggttcagcgccacggtccgcaacggcgccgtgtgcctcgcgcccaccaacccgcgcgacgagtaccagcactggatcaaggacatgcgccacagcaacagccgtaaggacgaggaaaggtccccggcttcgcgctcgtac

SEQ ID NO: 93081 - DNA, 540 bp, Zea mays
  unsure (1)..(540): unsure at all n locations
nagggaaagctgtgtgacccgatcgcgatagtantgctgctaccggtccggaattcccgggtcgacccacgcgtccgctttctcttctgctgctcgccctcggtttctgatcgcgaccatgggaccccgcggcgtcggcctagcgctccttgccgcggcgctgctccaggccctcgcccccgcgtcggcggcggcggcggcggggggcctggtgcgggtcgcgctgaagaagcagcccgtcgaccagaacgcccgcgtcgccgcgcgcctctccgccgaggagaggcagcgcctcctcctccgcggcgccaacgccctgggctcggccggcggcgacgacgactccgacgtcatcgcgctcaagaactacatgaacgcgcagtactttggggagatcggcgtcgggaccgccgcacagaagttcaccgtcatcttcgacaccggcagctgcaacctctgggtgccggccatccagtgctatttctcgatcgcttgctacttccactcgcgctacaagtcantgcagtcaagtacttataa

SEQ ID NO: 93082 - DNA, 528 bp, Zea mays
  unsure (1)..(528): unsure at all n locations
naggtagcgggtgtgtacgggggggggggagtaaggtatacctcgtccggaattcccgggtcgacccacgcgtccgactcgatcggcgagatgggcatggtcgcttccatgtgcacggagcccatcaagcggcaccgggtggagagagacctcgacggcaaggtggcggacgcgctccgggagcggacgaggtcccggcagaggaccttcaggtcggtgaacagcatcaccatgcgcctgcccaggttcaaggaagggctcagggacgtcaagaacatcttcgaccagtacgacgaggattcagatggcacgatcgacagcgaagagctgcagagcttcggaagcagagtccgggtgcacatgtccgaggaggagatgagcaacctgcaccggtactgcgacatcgacagcaggaaagggcgtccagttccaggagttcgtcgtgctcctctgcctcgcgtacctgctcttcgggccagacgtcacacgacgcgtcccgttcnggagtcgagtccggcagcttcactc

SEQ ID NO: 93083 - DNA, 537 bp, Zea mays
  unsure (1)..(537): unsure at all n locations
agcggaggttttttcccccgaaagacggaactgttctactcgtccggaattcccgggtcgacccacgcgtccgctccgatcctcgtcgccgacgcatccacccgaaccctcctccgcgacctcgccgtcgccgcgagccttggccatgtcgatcttcgagtataatgggtccgccgtggtggcgatggtggggaagaactgtttcgcgatcgccagcgaccggcggctgggcgtgcagcttcagaccatcgcgacggacttccagcgggtgttcaaggtccacgacaagctttacatcggcctctctgggctcgccactgacgcccagacgctgtaccagcggttggtgttcaggcacaagctgtatcagctgcgggaggagagggacatgaagcccgagacctttgccagccttgtctctgcgctcctctacgagaagagattcgggccatatttttgccagccaggcattgctggacttggagatgacaacgtaccatttatttgtactatggactgcttaagtgcanaggagcn

SEQ ID NO: 93084 - DNA, 527 bp, Zea mays
aggtagaatggtctgtttatgaacgggggagggaagtagtgctgtaccggtccggaattcccgggtcgacccacgcgtccgattagggatatcctttcaatgcccatgcctatgccaaaaaatccaaagattgcccttatggtcttgacaccaggttcattgccctttgagaaattgtgggagaagtttttacagggacatgagggaagatactccatctatgtgcatgcatcacgtgaaaagcctgttcatactagttctttgtttgctggccgggatattcacagtgatgcggtagtatggggattgatttcaatggttgatgctgagaaaagattgttagcgaatgcactggaagatgttgataatcaagtttttatcttgctttctgacagttgtgttccactgcattcatttgattatgtgtataattacctcatgggaacgaatgttagcttcattgattgtttcaaggatccatgtccacatggcagtggaaggtactctattgagatgtatcctgatat

SEQ ID NO: 93085 - DNA, 523 bp, Zea mays
tggggaggtgtgttaaaagaagagggaagatacggtaactcccgtccggaattcccgggtcgacccacgcgtccgcccacgcgtccgcgtgaacccgccgccgactcagcatcaggagacgcgccaaggagagcccgcaaggaggcgactatgagggccaagtggaagaagaagcgcatgatgaggctgaagaggaagcgccgaaagatgaggcagagatccaagtaggctgatggggattgtggatggtggtgtcggcatagttgtgttacgtttcttcgatgcgtgagttcatggagagatgtcacatcctagttcgtcgtcaccgtttgccatgggtccaatggctcgtcttggaaacctgcacttcagtaggccatctatcgtggtttctagctatatccagagttttgtgctaagacaaatcagtcagtcgttttgtgaacctattatgatggagctctatttgctgctaatatcgacctacctattaagtaattgcaaaaaaaaaaaaaaagggcgg

SEQ ID NO: 93086 - DNA, 519 bp, Zea mays
agggaagttttgaaaggggggggacggtaatttttaccggtccggaattcccgggtcgacccacgcgtccgggaccactctccatcctcgaagtgatcaggtgaccagacccaccgctgaaccactctccatgctcgaagtgatcaggtgaccaggtcctgaagaaaattgccctacaacaagggagagtacagagagggtaacatcgagcgtgtcatgagacagatcgagcttgagtccttcaacaaggctgtagccgcgcttaggggttcagcggacgtggatagactgagactgatggatacctacagcctctcgtccttgagaccggacggccacgttgggccttacagaacaccctatccctttgcaaggggcagcagtaaatccacgcccgtccaaaatgattgcttgcactggtgtgtaccatgccccattgatgcatggaatgatcttgttatgaagatggccctggatccatgaaaaccttatggatttgtatggtgtgctcttatggag

SEQ ID NO: 93087 - DNA, 537 bp, Zea mays
  unsure (1)..(537): unsure at all n locations
atgggaacgtcttcaatccaagccacatagtaatgctgctaccggtccggaattcccgggtcgacccacgcgtccggtggatcggacacccaagatttgagctcatccgccatgatgtcactgagccacttcttgtggaggttgaccagatctatcaccttgcttgccctgcttcaccaatcttctacaagcacaatcctgttaagaccatcaagacaaatgttattggtaccctgaacatgctgggacttgcaaagagagttggagctaggattttgttgacatcaacatctgaagtttatggtgatccacttgagcatcctcaaaccgaggcctactggggcaatgttaacccaattggagtcaggagttgttatgatgagggtaagcgtgtagcagagacgctgatgttcgactatcacaggcagcatggcattgaaatccgaatgccaggattttcaacacctatgggccaangatgaacattgacgatggccgtgttgtagcaacttcattgctcaagctgtgcgttgcgaa

SEQ ID NO: 93088 - DNA, 526 bp, Zea mays
tgagcgagtgtgttacgacccgcaagtatacagattgctctaccggtccggaattcccgggtcgacccacgcgtccggtgatcaagactgtgagtgattggatcagtcaaagatcttctgatgccctgggagactttggtttgtggtgtatagatagcatcatgtctgaattgtcaggtccatcagctggccctaagggttcaaagaaggttgcacaacagtctccaagggcccaggttgcaatctttgttgatcttgccatgactttaagaagaaagcctgatgtactggtaaatgttatgccaaagataatgggaaacaattaatatctgggacaggaaaagcttcccatcattgtctgggttattgctcaggcctctcaaggtgacctagtgtctggcatgttttgctgggctcattctctatttcccacattatgtgcgaagtcaagtgggaatccacttgcaagagatttggttttgcagctgcttgaaagaattttgtctgtcaccaaagctcgttctat

SEQ ID NO: 93089 - DNA, 520 bp, Zea mays
  unsure (1)..(520): unsure at all n locations
tggaatggtgtagtaaggcagggggtgagaacgtaagttcccgtccggaattcccgggtcgacccacgcgtccggttgatgctatgaaggctgttgctgatgcatactctaaaagatctctcaagtattttgaagctgcccttcgtgattataagtcccagctggaggaggaccctattgtccacaggcatctttcttctctgtatgatacactgctggagcagaatctctgcaggttgattgagccctactcaagggtggagattgcacatatagcggagatgattgaattgccgattgaccatgttgagaagaagctgtcgcagatgatccttgacaagaaatttgctgggacactagatcaaggtgctggctgcctcattatctttgaggattctaagacggaggatatcttccctgccactctcgaaaccatttcgaatgtcgggaaagttgtggacagcctttatgtgaggtcggccaagatcatggctngaaagcagctagtcttacctgtttg

SEQ ID NO: 93090 - DNA, 526 bp, Zea mays
  unsure (1)..(526): unsure at all n locations
gagtagggtgtttgtaaagcaacggaagtactctctacccgtccggaattcccgggtcgacccacgcgtccggtccatcgtgtcccgcgagatgacccgtcgctacatgacggacatgatcacctacgccgacgaccgacgtcgtcatcgtgggcgccggctccgcggggctgtcctgcgcgtacgagctctccaaggaccccgccgtgagcatcgccatcgtggagcagtcggtgtcgccgggcggcggcgcgtggctgggcgggcagctgttctcggccatggtggtgcgcaagccggcgcacctgttcctggacgagctgggcgtggcgtacgacgaggccgaggactacgtggtcatcaagcacgccgcgctcttcacgtncacggtcatgagccgnctnctggcgcgccccaacgtgaagctgttcaacgccgtggccgtggaggacctcatcgtcaggggagggcgccgtcgcggcgtcgtcaccaactgggcgctcggggtcatgacccagacacggat

SEQ ID NO: 93091 - DNA, 539 bp, Zea mays
  unsure (1)..(539): unsure at all n locations
agttaagtgatgaaggggaggggaagtagcgctagctaccggtccggaattcccgggtcgtgttacgcgttcaaggcatctcccagcgaaggctacatctgatctgctgcttgtgcaggctgatctttacaccgtggttgatggctttgtcatccgcaacccatgcagagcgaatccagctaacccttcaattgagcttggacctgagttcaagaaggttgccaatttacttggtcggttcaagtccatccccagcatagttgagcttgacagcttgaaggtttctggtgatgtctggtttggctctggaattacactcaagggcaaggtgacaattatcgccaagcctgtagtgaagttggagattccagatggagacgtacttgagaacaaggatgtcaatggtcctgaggatctataagcaatggttatcatcaccaggttttccaaggacatgttacagggactgccaagcctaatcacttctactgagctctaatatttgaaatttcatgggcatntccatatccggtgtgagg

SEQ ID NO: 93092 - DNA, 527 bp, Zea mays
tgtggaggctgtgtgacgaccagccaaatatcgtactgctctaccggtccggaattcccgggtcgacccacgcgtccgagctcttgttggtgacaagacaattgcattctggttgatggataaggatatgtatgatttgatggctctggacaggccttcaacgcctcgcatcgatcgtgggatagcattacataaaatgattaggcttgtcacaatgggtttaggaggtgaaggctatctaaatttcatgggaaatgagtttgggcatcctgaatggatagattttccaagaggtcctcaaagtcttccaaatggctccgtcattcctgggaataacaatagctttgataaatgccgccgtagatttgaccttggagatgcagattatcttagatatcgcggtatgcaagagtttgaccaggcaatgcagcaccttgagggaaaatatgaattcatgacatctgatcactcatatgtatcacggaagcatgaggaggataaggtgatcatctttgagagaggagatt

SEQ ID NO: 93093 - DNA, 536 bp, Zea mays
  unsure (1)..(536): unsure at all n locations
ggagtgtttcagtagaatgtanagagcgctcgtactcggtctcgaattcccgggtcgacccacgcgtccggtcataggcgaaatcagcagatcttttttgatgttaacgatcaatatgatccagaggtttgtttgggtcatctaaagcggtatgctttcaaggagcttcgtgcagctactaataattttaactcaaataacatcttatgtgaaggtggatatggcatagtatacaagggttatttgcgtgatggctctattgttgctgttaaaaggcttaaggattataatgccgtctgtggggaagtccaattccaaactgaagttttagtcataagcttggctgtgcatcggaatcttctccgtcttattgtgttctgcactactgatagcgagagggtacttgtttattcatatatgccaaatgggaagggttgtttttaaattgctggaacatataattcggaaggtcatttctaaacttgtccatgatgatgtgggtttctcttggcaacggcctattgcctttcttaacc

SEQ ID NO: 93094 - DNA, 539 bp, Zea mays
  unsure (1)..(539): unsure at all n locations
nggtaagtgttgtacgacgccgaagaacgtagtgctgtaccggtccggaattcccgggtcgacccacgcgtccgcggacgcgtgggcggacgcgtgggcggacgcgtgggccgatcgctcctctccactgtccagattccagttccactccgcctccgctgccggtcgccgactccgaaactccgacagtccgaccacaaggtcttgtgcgggatccacagaaggatgagtgaagaggataagactgctgcttctgctgagcagccgaagagggcccctaagctcaatgaaaggatcctctcttctctgtccaggaggtccgtagctgctcatccgtggcatgatcttgagatcggtcctgatgctcctgctgttttcaatgttgttgttgagatcacaaagggaagcanagttaaatatgagcttgacaagaaaactggactgattaanggtgatcgagtcctatactcatcagtggtataccctcacaattaatgggttcgtccaaggactctntgtgaagacaatgacccaatggn

SEQ ID NO: 93095 - DNA, 513 bp, Zea mays
ggggaggttgtaaggagggggggagattatacctctccggaattcccgggtcgacccacgcgtccgaactactttgagatcgatctcgatgtccatcggttcagcttcatatcacggaaagggctcgagacgttccaggagcggctcaagcatggcgttcttgatcttggtctaactatccaggcacagaaggctgaggagttgccagagcatgtcctgtgctgcatgaggctgaacaagatcgacttcgccaacaacgggcagataccgacgctgataactgcagctgatgagtaaatctgtcctgttactgtaaggcactaactttctggaaaaagcaaaagagactgttgcttttcgagatgctgttgtatagatcggcagatagttgtagggactaactcaagtttgtgagctaagaaacacctaatcactgaggaaggaaaagaagatattgcagcaatctgcattctgaactctgaagacgatgcatatacatgtctgtgttttctt

SEQ ID NO: 93096 - DNA, 536 bp, Zea mays
  unsure (1)..(536): unsure at all n locations
atggtaggtagtttcaccgcacaaagtatggtgctcccgtcctgaattcccggtgtcgacccactcgtccgcttctgctccccctccggttcgggttcgagttcgtgaggttctccggggttcggtttcgtgggtgagctgatcgagatggcgtgcctctgatgttgagtaccgctgcttcgtcggctgcctcaactggaccacggacgaccactccttgcacaactccttcatcacctactgctaggtaacttagtccaagatcatcctatatcgagtgacacagatgtccctcatcttctgcttcgtcaccttatccacagatgatgcgttgcggtacgccttctacgtcatgaattgtaagcaactggacggcctcatcatctacccgaaacaagcccgatttatatcgacttccgtggtcgcttctttcttctgctgggttcatgttgtgggccttataaagcatgcatactacttgctatttccttaccacctttanacgcttgtatcatgcttcggtctttagcctgctn

SEQ ID NO: 93097 - DNA, 520 bp, Zea mays
  unsure (1)..(520): unsure at all n locations
naggggaggtttgtaaagaggggggtgggtaagtaatacctgtccggaattcccgggtcgacccacgcgtccgctagacgttataaaagtgatcgggaaaggtagcagcggaaatgtgcaattggtccgccacagattgaccggccagttttttgctctgaaggttattcaactaaatattgatgagagtatacgcaaacagattgcaaaggagttgaagataaacttatcaacacagtgccaatatgttgttgtgttctatcagtgtttctatttcaatggcgccatttctattgttttggaatacatggatggtggctcccttgcagatttcctgaagactgttaaaaccattccagaggcctacctcgctgctatctgtacgcagatgctaaaaggactgatctacttgcataacgagaagcgcgttatacaccgagatcttgaaccctcaaatatattggttaatcataagggtggaagtaaaataataaaatttggtgtgagggccattatcttt

SEQ ID NO: 93098 - DNA, 523 bp, Zea mays
atggagatggttgttacgggggaggggggagaattaattacccgtccggaattcccgggtcgacccacgcgtccgcagcggtcgcactacaggtattgtgctcgattctggtgatggtgtgacccacaccgtgccaatctacgagggatacgcgctccctcatgccattcttaggctggatcttgctggccgtgatctgactgactgcctaatgaagatcctcacggaaaggggttattccttcaccacgacggcagaacgggaaatcgtgagagacataaaggagaagctggcctttgtggccctagactacgagcaggagctggagaccgctaagagcagctcctccgtcgagaagagctacgagctgcccgatgggcaggtcatcacgatcggcgcggagaggttcagatgcccagaggtgcttttgcagccgtcgctgatcgggatggaagctcccggcatccacgagaccacctacaactcgatcatgaaatgtgacgttgatatcaagaaggacctc

SEQ ID NO: 93099 - DNA, 521 bp, Zea mays
  unsure (1)..(521): unsure at all n locations
gtggggaggtttgtatcgggggggaggggaagtaatacctcgtccggaattcccgggtcgacccacgcgtccgcggacgcgtgggtgactatggcaagaagtccaagctcggtttcaccgtgtacccatccccggaggtgtccacatccgtggttgagccatacaacagtgtcctgtccacccactctctcctcgagcacactgatgttgctgtcctgctcgacaatgaggccatctatgacatctgccgccgctcccttgacattgagcgcccaacctacaccaacctcaacaggcttgtgtcccaggtcatctcatccctgactgcttccctgaggttcgatggtgctctgaacgttgatgtgaaacgagttccagaccaacctggtgccctaccctaggatccacttcatgctntcgtcctacgctncagtcatttctgctgagaatgcctaccacgagcagatgttcgtggcccaaaatcccaaaagcgccttagaaccattcttcatgatgggcac

SEQ ID NO: 93100 - DNA, 527 bp, Zea mays
gagtagcgctttgttcagctcagatcgactggtctactcgtccggaattcccgggtcgacccacgcgtccgctacgatccaacagttctagagcaagagagaggaagacacaccgcagagttagcaggctagtaactggcaggagcagcaggaatggcggcgacgcgtcgcctctcttgctttctcctcgccgtgcttctggcaggagtggccgctgccaccgccttcgacgaagcggctgctgccggcttcgggcttggccacggcgcgcgtttcgcgcgcaagcatggacgtgctgccgctgagatgccccagccggagccacaacctaaaactaagccggagccccatatgcagtcactgtcccagccagaacctaaaccgaaacctatgccacatccagagcccaagcctgaaccttaaccaagagcccaccctggaccgtaaccaatgcccaagcctcaaccaagatgcaaaccagagccattggctacaccggaccctgacctaagcccgaacctaagcca

SEQ ID NO: 93101 - DNA, 525 bp, Zea mays
  unsure (1)..(525): unsure at all n locations
aggagcggttgtatgggagtgggcggaattgtatacctggtccggaattcccgggtcgacccacgcgtccgcttcgacggcgtgcccgtctccccgggctcattcgccatgcattcctcagcctccgcgagaggaggacgagggctcctcttgccggcggcggttgtggtgctactgttgggtgcagtggcgccagcggcgggttgctatccgcgcgtgttcaacttcggggactctctggcggacacgggcaactacccgttcgtctatggcaacggctcagccaagctccgtccaccatacggcgagaccttcttccaccgcgccaccgggcgcgcctncaacgggcgcctagtggtggacttcatcgcggacacactcggcctnccgttcgtgcgaccgtatctgagcggacggagcgcggaggacttcgcgggcggggccaacttcgccgtgggcggcgccacggcgctcagcccggacttcttcccggcagggggttccacaacatgggaaaccgattgg

SEQ ID NO: 93102 - DNA, 532 bp, Zea mays
  unsure (1)..(532): unsure at all n locations
gaggtagagctcttttacgacccagaatatgatagtattgctctaccggtccggaattcccggggtcggaatgcagcttacaaggctgttgacaaaataatccagattccaacattctccgagaatacagtatgacatcaggcacagaaggcattgacgcgatcgcggcaactcgggttgttgtcactagagatgtgagcaacaacgccaaacatgccctgactggccagtctttctatcgctccttcagcgggagcggggcatccatggacattgtggtgtccagtgtcagagcttacctgagcgccctgaacaagatctgcagtttcgctggcgccgtgaaagccaacagcgatgtagctgagaccgcaagcgtcccgagcacagaatgagctcccgtttggttcagagtgacatgttcaaaaatttctggaaggatcgtccattgagcttangacaggcaggaagtcttggggcttatgtagtgtacaatttctgtatctcatataccgtgctcggtgccagttggtac

SEQ ID NO: 93103 - DNA, 539 bp, Zea mays
  unsure (1)..(539): unsure at all n locations
cgtagtgagaaccctcgaacatagtactgcatntccgcnccggncttgaattcccgggtcgacccacgcgtccgtgaagaatgattttgtcaagtatgcccatgatgaggaagcagccgatgaccagggggagtctggatggaagtatatccatggtgatgtcttcaggttcccaaagaataagtcgctattttccgctgctcttggcacaggaactcaactatttgctctcacaacctttatattccttcttgcacttgtcggagtattctatccttacaaccgtggtgcactatttactgcattggttgtcatttatgcactcacttcacgaattgctggatacattgctacctctntctattgtcagttggaggggacaaactgcgtgaggaacttgctattgacaggatgcctattctgtggacttntcttcctgacattttgcttcttggacaccgttgctattgcttatagtgccacagcagcactggcctttggcactatctgngtcattgtgctcatctgaacctggtcac

SEQ ID NO: 93104 - DNA, 528 bp, Zea mays
  unsure (1)..(528): unsure at all n locations
tgtagcgcgttgtaaagcgggaggggggacgtagtgctctaccggtccggaattcccgggtcgacccacgcgtccgcggacgcgtgggctccctgaaatggtggaaagggttgcgagcatgcttaattactggctcgggcaacttgctggtccccagaggaaatctttgactgtaaaggatccggagaagtacgagttcaagccgaagcagcttttgaaacagattgccaccatctatgtccatatctcaaggggcgacaaggaatctgtcttctcagctgcaatctcgaaagatggcagagcatacaatgatcagttgttttctagtgcagctaatattctgtggaagattgggggtgatcccaaaatcatacaggagtctgtgcaacttgctggtagggcaaaagctgctgcttctgaagctatggatgctgacgcaatccttgcggacataccagatgaattcctcgatccaattcagtatactctaatgaaagatcctgtgacactgncatcgtcaaaggtcac

SEQ ID NO: 93105 - DNA, 524 bp, Zea mays
  unsure (1)..(524): unsure at all n locations
ntgtaggaggtctgtgcctgaacggtcgcattggcagtttcgtccggaattcccgggtcgacccacgcgtccgggagtgggggcagccaaagtcgcggatcacgcacctggtgttctgcaccacgtccggggtggacatgccgggcgccgactaccagctgaccaaggcgctgggcctgcgccccttcgtgaaccgcctcatgatgtaccagcaggggtgcttcgcgggcggcacggtgctgcgcgtggccaaggaccttgcggagaacaaccgcggcgcgcgggtgctggtggtgtgctccgagatcacggccgtcacgttccgcggcccctccgagtcgcacctcgactcgctcgctgtccatgcgctgttcggcgacagctcggcggccagggtcgtgggcgccatcgcgggcgaccgcgtcgagcgcccgatctagcaggtagttttccgggtccagaccattctgcccctcttcgttgggcgccatctacgggacatcttagctaggtggaggcttacg

SEQ ID NO: 93106 - DNA, 525 bp, Zea mays
  unsure (1)..(525): unsure at all n locations
nagggggagatttgtaacagcacggaaagtaggtatgctacccgtccggaattcccgggtcgacccacgcgtccgcacacacacacagacaagtggtttccaaagccaagtgtgtgtactagcaaccagctagctcgggcggcagcaggcagccatcatgtcggaggagaagcaccaccacttcttcaaccaccacaagaaggacgaggagcagcccgccggcgagtacgggtactccgagaccgaggtggtcaccgccaccggcgagggcgagtacgagaggtacaagaaggaggagaaggagcacaagcacaagcagcacctcggcgaggccggcgccatcgccgccggcgccttcgcactctacgagaagcacgaggcgaagaaggaccccgagcacgcgcacaagcacaagatcacggaagaagtcgctgccgcggccgccgtcggcgccggcggctacgtattccacgagcaccacgagaagaagaaggaccacaaggacgccgatgaggccaacggcca

SEQ ID NO: 93107 - DNA, 547 bp, Zea mays
  unsure (1)..(547): unsure at all n locations
gaggggaggtgtgtagtttcgtntctgacagtaactctcatttcctntccagttctgaattcccgtgtcgaccgcacgcgtccgcagggacaatatagtggcatcagaacaaaggagtcatgtgagcataactctaggggtgtggagattttctcaaaatgctggtttccggagaatcgtcgaatgagagcaattgtttgtctttgccatggttatggagacacatgtaccttttttcttgatggagttgcgaggaagattgcttcagctggatatggagtatttgcactggactaccctggctttggtctttcagaaggacttcatggatatattccaagttttgatacacttgttgatgatgtagctgaacacttctctaangtcaaaggaaatcctgaatatagaggcctaccgagctttcttgttggcaatctatggtggagcagttgcatgaaggtcacttcagcacccaattgattgaatggtgcatacttgtggaacctattgcaggataccacacaatgtgttccacctgggcccataa

SEQ ID NO: 93108 - DNA, 558 bp, Zea mays
tgattaggtgtgtttccaccgaaacatagtattgcactcccggtccggaattcccgggtcgaccgacgcgtccggatttttaccctagcttggtctcctctcctcctagtgtttttgttccagaatctgtagcaggtgggtgacggcgaggacatgcagccccttgtttgtgacaatggaactggcatggtcaaggctggttttgctggtgacgatgcgccaagggctgttttcccaagcattgttggacgcccacgtcacactggcgtgatggttggcatggggcagaaggatgcgtatgttggcgatgaggctcagtccaagaggggtatcctgactttgaagtacccgatcgaacatggcattgtcaacaactgggatgatatggagaagatctggcaccacaccttctataacgaactccgtgttgcgcctgaagagcaccctgtgctgctgaccgaagccccactcaacccaaaggctaacagggagaagatgacccaaatcatgtttgagactttcaatgttcctgccatgtatgtcgccatccaggctgtt

SEQ ID NO: 93109 - DNA, 549 bp, Zea mays
  unsure (1)..(549): unsure at all n locations
gaggtgcggtgtgtacgggagggacgggggaaggactcctctccggaattcccgggtcgaccgacgcgtccgctctagggtttttgattttagccgccgccgctgctcatctcacatccctcgagaagacgcgtgctcgctcgccgatcgatacgatggccgtcttctccgacctccacaccgtcgacggcctcaagtccctcgaggctcacctcgccggcaaaacctatgtgtctggtgactccattactaaggatgacattaaggtcttcgccgcggtgccgtcgaagcctggcgctgagtttcctaatgccgcccgctggtacgagaccgtctctgcggctgtagcctcaagattccctggtaaggcttgtggtgtaaatctgcctgcgggatcagctcctgcggcagctgctcctgcggatgaagctgangatgatgatgaccctgatctttttggtgatgaaactgangaggacaagaaggcagctgatgagcgtgccgncgctgccaaggnnctctctaaaagaaagaaagtgtaaatcctcc

SEQ ID NO: 93110 - DNA, 559 bp, Zea mays
  unsure (1)..(559): unsure at all n locations
cgattagttttttgaccaaaggaggatgtaatgcactgctctaccggtccggaattcccgggtcgaccgacgcgtccggtgttctcgtcggtgtctatatttgatgaatacacaaatgatgttcttgacatggcgcctggttcttgttttccaagatttaaatatcggaagggcaaagatgagtcttcacacgggcacagtgttccattatccagaccagcctcattcaacagggagaagcaagaagggaaaaggcctccgtctcgtgttacttcatttaagaacagcattgatgatttcaatccattcaagctgctggaccacctatttgccgaatgcaggaaccagggggaggatttggttaacagaggagtgataacaatgaaggacattgaagaaacgaagtctggcaaagttggcagcggtgttcttaatgttggtctaccagcgtatgttattcttaatgcactccttcggtctgcgaaagctgattctgtcgggctaatcttaagtgacggctctgagattacatctgacaatagacctaaaaacaccattn

SEQ ID NO: 93111 - DNA, 518 bp, Zea mays
tgggagggttataacggatggggaagaacggaatgctctaccggtccggaattcccgggtcgaccgacgcgtccgctataacgaactccgtgttgcgcctgaagagcaccctgtgctgctgaccgaagccccactgaacccaaaggctaacagggagaagatgacccaaatcatgtttgagactttcaatgttcctgccatgtatgtcgccatccaggctgtgctttccctgtacgccagtggacgtacaactggtattgtattggactctggtgatggtgtcagccacacagtgcccaatctatgaaggttatgcccttcctcatgccatcctgcgccttgaccttgctgggcgtgacctgactgacagcctgatgaagatcctcactgagagaggttactccttcaccacctctgctgaacgcgaaattgtaagagacatcaaggaaaagcttgcatatgtggctcttgaatacgaccaggagctcgagaatgccaagagcagctcatctgtggag

SEQ ID NO: 93112 - DNA, 554 bp, Zea mays
  unsure (1)..(554): unsure at all n locations
aggtttgtaaaagaaacggatagtattctgcaccggtccggaattcccgggtcgacccacgcgtccgaagaaaatgaacaagaacaagaagcttgttaagaagcttgccaagaagtaccatgctttttgggcatcagagaccatcatcaagcaaattccccgtctccttggtcctggtctcaacaaggcaggcaagttccccactctggtcactcaccaggaatccctggaatccaaggtgaatgagacgaaggctacagtcaagtttcaactgaagaaagtcctttgcatgggtgtcgcggtcggtaacctgtctatggaggagaagcagatccaacagaacatccagatgagcatcaacttcctcgtgtctcttctgaagaagaactggcagaatgtaagatgtctctacatcaagagcaccatggggaaaccattcaggattttctaagtctggttttttgtgaagtctgctctttatgatatttggtttttgaaccgaggttgtcttgaactaanactctngttagatcatgtntggntggtaggatatt

SEQ ID NO: 93113 - DNA, 522 bp, Zea mays
  unsure (1)..(522): unsure at all n locations
ntgggaaggtgtgtctcgtacggggagaggatagtactgctctaccggtccggaattcccgggagcagccagagagctcatttcccttgcaactcctggacaagttgaccaaagccaactggaccgtgctaaagcctcaggtaaatcagcgatactggcgaatttggaatcacaggcatcactaacagaggacatggggcgccaagttttggcatttggtgaaaggaaacctgctgagcaccttctcaaggctatagatggtgttactatgaaagatataacgtctgttgctgaaaagatcatttcatccccattgacaatggcatctcatggaaacgttctgaatatgcctacttatgagtcggtcagtggcaagttccgctcaaaatgaggagtacatgacccttcccttcattntatcaccttgtttgctggacaagttttaccagtaccttgtcattcacgtctaggccatggttcttggtcagtttcagaagaaataagcaacctcatgcagntttg

SEQ ID NO: 93114 - DNA, 552 bp, Zea mays
  unsure (1)..(552): unsure at all n locations
gtaggcgggtgagtacagcacgaggtagtattcgtatctccgtccggaattcccgggtcgaccgacgcgtccgacggctacgaaaatagtagcgctgcgcggccggttcgagatactgtccatgtccggngctggcctgccggcgccggcgccgtcgggggccacggtgctcaccgtgtacctggcgggggggcaggggcaggtggtgggcgggagcgtcatgggggagctcatcgcgtcgggccccgtcatggtgatcgccgccacgttcggcaacgccacctacgagaggctgccgctggaccaggcagacgccgaggagggcgccgtgctgtccggctcgtccgagggcgccaccgcgcagcagctggagcagcagcagagcagcgggggtcccgtcgtgccgtcgtccatgtacgccgtcccgcagacgccgtcgtacccgcacgacatggtcgggcagtgggggcacgcggctgtgacgcgcccaccgtcgacgtccgtctagctagcgctagatgcacatgcaccagctgcgacctgcaccgccgg

SEQ ID NO: 93115 - DNA, 561 bp, Zea mays
  unsure (1)..(561): unsure at all n locations
ngagttgtcaggtgtgtgacgaccaagcatatgatagtatctgctctaccggtccggaattcccgggtcgaccgacgcgtccgcgagaaccgcctccccctccgctccttccagctcgctctgtaatctgcatcagccgggccggccgccgtcgccgccatggggaggggaaagttcaaggggaagcccacaggccgccgcaacttctccacacccgaggagatcgctgctggtacttcaggtcggccacgcacctttaagaagaaggaggaagaggaagatgaggaagaggtagaaagagaagagtctgaggaagaatctgaagaggattctgatgaaaagactaaacataaaggcactgaaggtattattcagattgaaaatccaaacttggtgaaagccaagaatataaaggccaaggaagttgattttggcaagacaactgaactctcaaagcgtgaaagagaagagcttgagaaacaaaaagctcatgaacggtatatgaagcttcangagcaagggaaaaccagaccagcaccaaaaggattggaacgtcttgct

SEQ ID NO: 93116 - DNA, 524 bp, Zea mays
  unsure (1)..(524): unsure at all n locations
aggagcaggtntgtaatcgatctgccaacggatagtagtgctctaccggtccggaattcccgggctacactgtcaaacatgcccatcattctgcactctgcactgattaccaacctctatttcatatcccagcttctgtacaggaagtacagtggaaacttccttgttaaccttcttgggatgtggaaggagtctgaatactctggccattctgttcctgttggtggtcttgcttactatgtaactgccccatcaagtttggctgatgtccttgcaaatccattccatgcactgttttatgtggtcttcatgctgtcagcttgcgctctgttctcaaaaacgtggattgaagtttctggttcatcagcaaaggatgttgctaagcagctcaaggaacatcaaatggtgatgccaggacatcgtgagtcaaacttgcagaaggaactgaaccgatacattcccactgctgctgcatttggtggagtatgcatcggcgcattgactgtcctggctgatttcatggg

SEQ ID NO: 93117 - DNA, 556 bp, Zea mays
gttaggagggtgtgttaaagaaaagggacagtactcgtgctccgcgtccggaattcccgggctacaagagaaggtttttgtcatcgttgttttaggttatatatcctacaatttcgtcattggtgcttattcctactggggcccaaaggcaggtcaagagatctacaatatggggagtgcagatcttatgtttggtggaattactatagtgtgtggaattattggatcactagcaggaggtttcatccttgacaagatagggtctactattcctaatgccttcaagcttctttcgggtgcgacatttgtaggggcaatattctgctttggtgctttttgtttcaagagcctttatgggttcataccctcctttgcagttggggagctttcagtgttcgcaactcaggcacctgtaaattttgtatgccttcacgccgtgaagccacatttgcggccattggcaattggccgtattcactgtttcaatccatatatttggcgatgtgccttcttcacctcttgtgggcttctttcaggacaaatcaataattggggg

SEQ ID NO: 93118 - DNA, 558 bp, Zea mays
  unsure (1)..(558): unsure at all n locations
ggagttagcaggtttgtaactgaccagacagggacggtactgacgtaccggtccggaattcccgggtcgaccgactcgtccggtcatggccaccgtcaagaaggggaagcccgacctcaggaagaaggtgatgcccggcgtcgtcgtccgccagcgcaagccgtggctccgcaaggactgtgtctacatgtacttcgaagataatgctggagtgattgtgaatcccaagggtgagatgaaaggttccgctatcactggacctatcggcaaggagtgtgctgatctttggcctaggattgctagcgcagcaaacgccatcgtttgagagcttgttggaatatgttcagacttctatatgatcatcttattatcagttgctaagagtgctattgggcttaatgggccctttatgtttgttcactcaaatttgtagtaaacagaatttggtataccaaggtgatctatatatcaatgtatgccataaattgtctgactaaaaaaaataaaacaaatggccggccgttctagaagatccatggctacgtacgcgtgcatgcn

SEQ ID NO: 93119 - DNA, 557 bp, Zea mays
ggtaggtgatctcagcacagcacgtattgtatgacgtaccggtctcggaattcccgggtcgaccgcacgcgtccgcagccagctcgagcagaaggggcggtaccgcaacgtgctggacatgaacgcgcgcctgggggggttcgccgcggcgctggcgctggccggcgacccgctgtgggtcatgaacatggtcccgaccgtggcgaacgcgaccactctcggggccatctacgagcgcggcctcatcggaagctaccaggactggtgcgagggcatgtctacctacccgaggacctacgacctcatccatgcggattcggtgttcaccctgtacaaggacaggtgtgagatggaccgcatcctactggagatggacaggatcctgaggcccaggggcacggtgatcgtcagggaagacgtggacatgctggtgaaggtcaagagcctggcggacgggatgaggtgggagagccagatcgtcgaccactaagactgtccgctcgtcagggagaagatcctcctggtcgtcaagacgtactggactgcccaggaccaac

SEQ ID NO: 93120 - DNA, 523 bp, Zea mays
atggaagtgctgttacgacgggcggcggaaagagaatgcttgtaccggtccggaattcccgggtcgacccacgcgtccgatgttagttcaaccagatgattctatgtctgtgccatatagatctagtgctgctgattctcaaaaactaagtgttgccatgaagttcaagggtcaactgttccaacttatgcaaagactggaaagtacaacaccacactttattcgttgcattaaaccaaataatttacaacttcctgcaatttatgaacaaggacttgtgcttcaacaacttaaatgctgtggggttctcgaggttgtccggatttcaagatctgggtatccaacaagaatgactcaccagaagtttgctcggcggtatggctttcttcttcttgaggatgttgcatctcaagatccactcagtgtttcagttgcaattcttcatcagttcaacattttacctgagatgtatcaagttggctacacaaagttgttcttccgaactggacagattggcaaactt

SEQ ID NO: 93121 - DNA, 553 bp, Zea mays
tgttggagctgagtttcagttccgatcgtattggcattctcgtccggaattcccgggtcgaccgacgcgtacgagagcattgatatcacaaagatcacaccttctacatgagtcgctctacgtaatgatcgctagtctgcggcatctgatcctaccaagcagtgttgatccattggtcaatctcacgaacgtttagaaggctcctgattctacatatgatatgattggaggccttgaccagcaaattaaagagatcaaataggtcattgagctttctatcaaacatgcggaactatgtgagagcctctgaattgtccaccccaagggtgtgcttctttatggacctacgacacatgatcgacattgatggcacgtctctgtgctcatcagacttactgcaccttcatgacggcgtcaggttgtgaatgggttcagacgtatatcggtgaaagctcaccgatagttcaggaactcctttgtatgtcagagaacatgcgcgattcattatcatgaccgatgaaatcgactctatatgaaccgctacaatggagag

SEQ ID NO: 93122 - DNA, 560 bp, Zea mays
  unsure (1)..(560): unsure at all n locations
ngttagcgttgtgttaagcatggagatgtatgcattgctctaccggtccggaattcccgggtcgaccgcacgcgtccgctcgtctgctacgcctctcctgcaggacgaccaatggcttccaggaagttcttcgtgggtggcaactggaaatgcaacggtactggcgaggacgtgaagaagatcgtcaccgtgctcaaccaagccgaggtgccctctgaagacgtcgtcgaggtggtggtgagtccgcctttcgtttttctgcagcaggtcaaggggctgctgcggctggacttcgccgtcgcagcgcagaactgctgggtgcgcaagggcggcgccttcaccggcgagatcagtgctgagatgctggtaaacctgcaggtgccctgngtcattttgggacattctgagcgcagagctctgttgggtgaatccagtgattttgttgctgataaagttgcatatgcactcactcaaggtctcaaggtaattgcttgcattggtgagacccttgagcagagagaggcaggaacaacaatggatgttgttgctgcacatacaat

SEQ ID NO: 93123 - DNA, 564 bp, Zea mays
  unsure (1)..(564): unsure at all n locations
agagtgaggcgtcagattaagaagtggggaggtattgctactcccgtccggaattcccgggtcgacccacgcgttcgccactctcccagcctctcttactctccgncgtcgccctgctcgccccgaaccactggccgccaaatgggccccaaaaggaggcggtaggcccccgtcccccgccaagaaaaaggcggtggtganaaacccgctcttcgagaagaggccgaagcagtttgggatcggcggcgcccttccgtccaagaaggacctccaccgcttcgtcaagtggcccaaggtcgtgcgcatccagcgccagcgccgcatcctcaagcagcgccttaaggtgcccccggcgctcaaccagttcacacgtaccctcgacaagaaccttgcaacaaacttgttcaagatgcttcttaagtaccgtcccgaggacaaagctgccaagaaggagaggctcttgaagagggcccaggctgaaaacgaggggaaaacttgtgagtcaaagaaaccaattgtgtgaagtacgggcttaaccatgtgacttactnatcgagcagagca

SEQ ID NO: 93124 - DNA, 559 bp, Zea mays
  unsure (1)..(559): unsure at all n locations
agttagtgtgngttacgataagagatgtattgcaatactcttcggaattcccgggtcgaccgactcgttcggacatggatatatgacaaaattcatcatgagattaaccagttctgcagtgctcacagtttgcagcaagtttacattgacatgtttgatcagattgatgaaacaatgaaagaagctattcaaagagactgtacacgctatgctcctggaattgaaatcatcagtgttcgtgttacaaagccaaatatacctggtagtatcagaagaaactttgaacttatggaggaggagcgtacaaaggcactgatcgccatcgagaagcaaaaggtagcagagaaggaggcagaaacacagaagaagattgcgctatctgaagcagagaagaacgcgcatgtgagcaagatcctgatggagcataagctgatggagaaggacagttccaagagacaggagaagattgataatgaaatgtacctggcacgagagaaagcactagcagatgcaaactactacaggattttgaaggaagcatangcatataggctcatac

SEQ ID NO: 93125 - DNA, 563 bp, Zea mays
  unsure (1)..(563): unsure at all n locations
agttcgggttagtgctagctaagacaagtagtgctcttctcgtctctggtccggaattcccgggtcgaccgcacgcgtccggaacgaactcttgctccgatcacgagctagctgaggtcgacgatggcggctgtgctgaacggcatgaagacgccgcaggcggtggtggccgtgctggtggcggcggcgctgctggcttcgtccgcttcggcggcgatcacctgcgggcaggtggggtcgtcgctggcgccgtgcatcccgtacgcgacggggagggccagcgcgctccccgcgtcgtgctgcagcggcgtcaagagcctcaacagcgcggcgcggaccagcgcggaccgtcaggcggcgtgccgctgcctcaagagcctcgccaacagcgtcaagagcgtcaacatgggcaccgtcgccaccatccccggcaagtgcggcgtctccgtcggattccccatcagcatgtccaccgactgcaacaagatcagctaagttacgacgaccaagctaatatgcctaccgaacgtacacgtacgcncctggcgctgcacgagtgatga

SEQ ID NO: 93126 - DNA, 555 bp, Zea mays
  unsure (1)..(555): unsure at all n locations
ngaattagtgtgtgacggacgggggggggatggtacgctctaccggtccggaattcccgggtcgaccgacgcgtccgaagatgttaggtgatgaatatggtactgcttcgaacatcaagagtagagttaatcgtcaagctgtgttggctgccatcacctcagctcagcagaggttgaagctctacaacaaagtgcctnctaacggattggttctgtacactggaactattgttactgaagacggaaaggataagaaagttactatngattntgagccattcaagcctatcaatgtatcactctacctttgtgacaacatgtccacactgangctttaaaatgagctctggaatctgatgacaagttggggtcaatggtatggatggtaatggaactctttttgcacactaagtgccattacccgtgaagtgcttcacaaatctactgttgacttccaaagaganccttgttnaagaaggcacactgtgctctgcgtttggctggcttccgataggnataacgccttatatctttgcccaaaaccgagtgaacttt

SEQ ID NO: 93127 - DNA, 514 bp, Zea mays
  unsure (1)..(514): unsure at all n locations
agttagactctattgttgcatgntaggactgatactctcccaattcaaaccctgccgacgcacctaccaaatacacacatgaacacctactgttcaacataagacacaccaatcgcaagctttttagctccgtgccttatttactctatttaactctacacaattcctcctaacttatccttctacacactgaactatgctactgatactcaaaccacacaaattactacgattttgaccattcaatcctatcaatgtatcactctaccttaagacaacaagactccacactcagctctaaacacctctcaaatctatcacatgtctaatacattgttatcatcgtaataacctctctttgcacactaaatgacattacccgtgaattcctacacaaatacacttttgacctcccatagaaccatactcgaacaaggcaacctcctcatcaatttccatcgcttctgatgtacaacctctataactatgtccgcaacacagcttaaattacttc

SEQ ID NO: 93128 - DNA, 522 bp, Zea mays
tgattaggtgagtgtacggaggaaggggggaaagtagtgctgtaccggtccggaattcccgggtcgacccacgcgtccggtcggcggtgacgccggcggacgtgcggactctgccggggctcaacacgctgggcgtgtcggtgtcgcgcatcgactacgcgccgtggggcgtgaacccgccgcacgtgcacccgcgcgccaccgaggtcatcttcgtcctccagggctcgctcgacgtcggcttcgtcgatgccaccgccaccgccaccggcggcagccgcctgtacgcgcgcgccgtcggcgccggcgaggtcttcgtcttcccccggtgcctcgtccactaccagaggaacagcggtggcagccccgccgccgtcctctccgccttcgacagccagctgcccggcacgcagcccgtcgccgaagccctcttcggcgcctcgccgacggtgcccaccgacgtgctcgccaggagcttccaggtcgacggaggactcgtggaggccatcaggtccaacttcc

SEQ ID NO: 93129 - DNA, 520 bp, Zea mays
agatgagcgttgtgtatgacaggaaggtatagtactgctcgtccggtccggaattcccgggtcgaccgactcgtccggcgggaaaaagttctaccgtggtaattacctcaaattctacaatgctataagagaggcctagccagacattcagatgatttcaaactgtgatggttcatctagaccacttgaccatcctgcggatttgtatgatttccatgtctatactgattctaagactttgtttaacatgaggagcacatttgacagaacatctcgtagtggacctaaggcttttgtgagcgagtacgctgtctggagaagtgacgcgggtagaggcagtcttcttgcttcgttggctgaagctgctttcctcactggtctggagaagaacagtgatattgttcagatggcaagttacgcaccactcttcgtgaacgacaatgaccaaacgtggaacccggacgctatcgtcttcaactcctggcagcactatggaactcctagctactggatgcagacg

SEQ ID NO: 93130 - DNA, 519 bp, Zea mays
  unsure (1)..(519): unsure at all n locations
tgagagtgagttcgggggagggggggatgtatttcctnttcnnnnttgnnttcccgggcaggtgcagagtctttcgtcatctcttctccggcgaagaacccccagtcgcccaccagatcacttgttaaacgtttgttgaggggtgatggcggtttctttcgcaaacctcaacaccgaggcagggcttaaaaagcttgatgagtaccttctcactcgcagctacatcactggctaccaagcttccaaggatgacttggctgtctacacttcgttttcgtctgctccctcgtccaagtatatcaacgtagcaaggtggtttaatcacattgatgcgctcgtgaggctgagcggaattactgcagagggccaaggtgtgaaggttgaatcctcagcagttccttcagccccaacttcagatgttgctgaagcacatgccccagctgctgangaggaggacgatgatgatgttgacctttttggtgaggagaccgaagatgagaagaagggctgctgagagcn

SEQ ID NO: 93131 - DNA, 552 bp, Zea mays
gatggactgtttttatgcatagcacgtattcctactctggtccggaattcccgggtcgaccgacgcgtccgatcaagtaggtgatggaaaagagcaacttcaagttgctatcagatgaagagtttgatattgcgcaggctggaaaatatttgttgaatcttccgatcaaagttgatgaatctaagctagacaagaagttgttgacaaaatattttaaagagcacccacatgacaatctaccagagttttcaaacaagtatatcatctttcgtcggggcattggaattgatcgaacaactgactactttttcattgagaaagtagatgtaatgatatcccgagcttggaggtcattgctcagggttaccaggattgaccggttattttctaagaaacaacatttgaagccaaagaatggtacgaagaagactgatgaaattaatgaagatgaagaagatccagattgtttgttgagagaattcgattagaaaaattgaactaagtttgaaaaatctcatgagtaagatgacaattcaagaacctacattcgtt

SEQ ID NO: 93132 - DNA, 561 bp, Zea mays
  unsure (1)..(561): unsure at all n locations
aggagttnttnntaactattatgagtgtcattgcactagccgtccggaattcccgggtcgaccgacgcgtccgcggggatcgtgctcacctccaacggcgtcgaccacgcgcacggcggcgcgcccaccagggggggattctccgacgtcctggtcgcgagcgagcactacgtggtccgcgtccccgacggcctggcgctggaccgcaccgcgccgctgctctgcgccggcgtcaccgtgtacagccccatgatgcgccacggcctcaacgagcccggcaagcacctcggcgtcgtcggcctcggcggcctcggccacgtcgccgtcaagttcggcaaggccttcgggatgaaggtcaccgtcatcagcacgtccgccagcaagcgccaggaggccatcgagaacctcggcgcggacgagttcctcatcagccgggacgaggaccagatgaaggcggcgacggggaccatggacggcatcatcgacacggtgtcggcgtggcacccgatcacgccgctgctggcgctgctgaagccgtggngcagatggtgatcgtgggcc

SEQ ID NO: 93133 - DNA, 564 bp, Zea mays
  unsure (1)..(564): unsure at all n locations
gagtagtcttctgaatgttgcatngntntgcgntgctcgtctnttcgnctctgaattcccgggtcgaccgactcgtccgcaaggactccaagacgcttctcttctgcgataagccgttcaccgtctctgtcatcgggaagccctactagatcccgtggggagaggctgtttctcattatactctttagtccacctgtgtcttcactgacaaggacaaatctgccagcacatctgaatggtattgccaaaaaggacgctatctctgccccaagcatatatgcacccatgtttgttcttagtgtcaatgaggacaagctcacctcccatgttaacattgattacaatgctagctgcaccacaaactgacttgctaccctcgctaaggtcaatcatgacaactatggcattattgcgggcctcacgacaactagtcatgccatcaatgccaaccattaaactgtagatggaccactaaccaaagactggacacgatccagggctgacatctttaacattcatcccaaacacaccgttgcctccaatgctttctgtaaagttcttcca

SEQ ID NO: 93134 - DNA, 565 bp, Zea mays
  unsure (1)..(565): unsure at all n locations
aggagtnntttnnntaactgagctcactctcatcgcatgtccgtaccggtccggaatttccggccaggcgtccgcggggacactaacgaacgaactcttgctccgatcacgagctagctgaggtcgacgatggcggctgtgctgaacagcaggaagacgccgcatgcggtggtggccgtgctggtggcggcggcgctgctggcttcgtccgcttcggcggcgatcacctgcgggcaggtggggtcgtcgctggcgccgtgcatcccgtacgcgacggggagggccagcgcgctccccgcgtcgtgctgcagcggcgtcaagagcctcaacagcgcggcgcggaccagcgcggaccgccaggcggcgtgccgctgcctcaagagcctcgccaacagcgtcaagagcgtcaacatgggcaccgtcgccaccatccccggcaagtgcggcgtctccgtcggattccccatcagcatgtccaccgactgcaacatgatcagctaagttacgacgaccaagcttataagcctaccgaacgtacacgtacgcnccgngcgctgcacgagtg

SEQ ID NO: 93135 - DNA, 523 bp, Zea mays
gggagaaggtgtgtgacgagagggggagggaagagagtgctgctaccggtccggaattcccgggtcgaccgacgcgtccgaaacctggagtgcttggattgattgaaaaggcaacaccatcactcgccgcagcatactccatctctcgggctgttagtattccagtgatgtgctcgtcagggttaagctcggtgactgcaccaatggcagtaactgcaggagctgctggagttggagtcggttctgctattaacaaactcaacgacgttgtggcaatgatcgctgaggtgagaagcattgcgcaagcaatggagcttgcgccaagaatcgtgtccgaaaacttgagaacaattagttactagtggctaggaatacccttgccatttctgagcaaacttgagcagtcaataagaaagcataagagagtcatcgactctcaatttgattctctctacgctgtcttttgcctgtggcaatgaatagcgcattagcatcatagaagtattagcttggtcaatggaag

SEQ ID NO: 93136 - DNA, 532 bp, Zea mays
  unsure (1)..(532): unsure at all n locations
gaggaaatggagatgtgcncgttatacgacacggcggagataactgtaacgctcgtaccggtccggaattcccgggtcgacccacgcgtccggtcaagcctttctccgagtctgaagtccgcaactggtgttttcagatattggaggcgcttgcatacatgcaccagaggggctactttcatcgtgacctcaaacctgagaatctgttggttagcaaaggtgtcataaagctagcagactttggtcttgcaagggaagtctcatcattgccaccatatacagaatatgtctcaactcgctggtatcgggcaccagaagtcttgctccagtcatctgcttatgattctgcagttgatatgtgggcaatgggtgccataatggctgagctgttgacactccatcctctctttcctggaaccagtgaagcagatgagattcacaagatatgcaatgtcaatcgtagtccagatgagcaatcttggcctcaaggattgtctcttgcagaaagcatgaagtatcaggttccacagac

SEQ ID NO: 93137 - DNA, 527 bp, Zea mays
  unsure (1)..(527): unsure at all n locations
ggggaagggtttcngtgatagtacgggggcagtaactgcattgctcgtaccggtccggaattcccgggtcgacccacgcgtccgctcatgcctgaagacacatacaagggacatggtttccgcacagaacttatatgcatggttttggatttgaaaccacgattcttgagatttcctggaggttgttttgtagaaggtgactggctaagaaatgcattcagatggagagagtcaattggtcaatgggaagagaggcctggacacttcggggatgtttggcattactggactgatgatgggcttggatattatgagttccttcagcttgcggaggacctgggtgctgccccaatctgggtattcaacaatggaataagccacaatgatgaagttgatactgtagctattgccccttttgtaaaggatgtattggacagtctggaatttgcaagggggagtgcagattcaacatggggctctgntaaggcttgcatgggggcacctgaaccttttctggtcaaacatgn

SEQ ID NO: 93138 - DNA, 523 bp, Zea mays
  unsure (1)..(523): unsure at all n locations
agtatgcnntgtcttgagcatcgctcactatagtcactctcatctccnntnccngttcggaactgccgggtcgagccacgcgtccgcagaggctgattacatagatgcagcaattgtcactgttttacagatacatggtaccggatcccctggcgatatcctggtgtttctcacaggtcaggaggaaattgaaacagttgatgaaatccttaaacacagaacaaggggcttaggcaccaaaatctcagaattaattatatgtcctatttatgcaaatctgcctaccgagcttcaagctaagatatttgagccaacccctgagggtgcccgtaaggtggttctggccactaatatagcagagacttcattaaccattgatggtataaaatatgttattgatcctggcttttgtaagatcaaatcatacaatccccgcacaggaatggaatctctacttattaatcccatctcaaaagcttcggcaaaccagagggctggaagatctggacgcactggacccggg

SEQ ID NO: 93139 - DNA, 508 bp, Zea mays
  unsure (1)..(508): unsure at all n locations
aaggtgctngtatggtgagggggggagacggtattgctctaccggtccggaattcccgggtcgacccacgcgtccgcaaccatgagcgacctgttatcctacatttccaaggtcatgtgcatcaaggcaagatcggaggcaacacaagccggcgaggacggcggctgcccagcggacgagtgccgcgtctgcctgtccaagattcggctcggcgaggctacccgccgactgccgtgtcgccatgtgttccaccgggactgcgtcgaccggtggctctcgtcctgcaagcgaacctgtccgctctgccgagtttatgtggccgatgggaacaagcagccggtggccgcgaagcacaccagccgtgaagcacaggcactcgccgacgaccttgttatctggttctccaccgtgcttgttccccgtttctgatgccaaattccttcgtctgttcgttcgtttgaaaaagcttgattggtgtgtattttttttattgcatgcatgatacatg

SEQ ID NO: 93140 - DNA, 515 bp, Zea mays
  unsure (1)..(515): unsure at all n locations
aggagcgtcnctgagatgggggatggcggtagatctcactgctgtaccggtccggaattcccgggtcgacccacgcgtccgccggacacacagcgagggggaggaagaaggaagcaagagggaggaccgagcaggcctaggccctagggtagtcccgtccggtcccctgcggcgcaagtccggccggcgggcgggctgactgcctggcgtcggtagggggcgacggcgatctatatctgtcgatgggctactggtgggaccgcgtcgtgctgccggtgcggcgggcctggctcggcgtcgcgtcccgcttcggggttcgccagaccgggctgtggaggctgcggcaggaggtgagcacgtgcgagtacgaggacgtgcacgtgatgtgggagatgctgagccgcaccacggcgccggcgcctaggcggcccagccggttcgggccgcagccgcggccgtggggcagcaggttccgtctctgccgaggcttctagtgctgntgctgccgtgcggcg

SEQ ID NO: 93141 - DNA, 511 bp, Zea mays
agaaggtggtgaggcctgcccaaaggatcatagtcattgctctaccggttcggaataacccggctggacccacgcgtccggagcaggcttcgaggtcacatatcggttatagattaccgttgtctataaaagggttaggaagctgtgatttgtacggacagagcttgaaacataatcctaatggacggttcgttgttgtatgtgtagatggtgagtacataatttatactggcctggcctggaggaataagtcattcggatctgcactggaatttggctggtcatcataaggagaatatgcaattagggaaagtacatcatgaatcaagattttcagtatatcatttcaggagaagaaaactatccggacttcattttcagcagagcgtatttttggtggggtattgtagacaatgtgttctagtgatttcatctgcttttatgactgggtagattgtagactgatacacctaatcgatgtgaatgttaagaacgtgtactgagctgatac

SEQ ID NO: 93142 - DNA, 519 bp, Zea mays
  unsure (1)..(519): unsure at all n locations
tagtgtaggtgcgtttgagcttcacgcttcagatagcataccgtccggattcccggtcgacgcacgcgtccgcaagccgcacgagaaggcaggcaggcaggcagagaggaaggaagaggaggaagagggggagaggcgcgtggaggagcgggatgcggcgggcgaggctgccgccggtcccggtcccgacggcgccgggggacgcggggccggaggtgaagtaccgcggggtgaggcggcggccgtcggggcggtacgcggccgagatccgggacccggctaggaagaccccgatctggctgggcaccttcgactcggccgaggccgcggcccgcgcctactacgccgcagccaggaccatccgcggcgccgncgcgcggaccaactgtccctccgcgcccaccttcgacgcggtcgcgccggcgcttgcacttcccggcttaaccggcggcgcatcaggtgcggcgactatcagcctaagcaacgcccgtagccggtcgatcttaaacgtccggaacc

SEQ ID NO: 93143 - DNA, 490 bp, Zea mays
agggggaagtattggtccggaattcccgggtcgacccacgcgtccgggcggctgcagccggcgccggcgccggcgctgctcctcgtcctggccaccatcgccggcgtcgtggtggtgcgagcggagccccaggtgccgtgctacttcgtgttcggggactccctcgtggacaacggcaacaacaacgacatcgcgtcgctggcgcgggccaactacccgccctacggcatcgacttcgccgccggccccaccggccgtttcagcaatggcctcaccaccgtcgacgctatatctcggcttctgggcttcgacgattacatccccgcgtatgctggcgcgagcggcgatcagctcctcaccggcgtcaacttcgcttccgccgcagccgggatccgtgacgagaccggacagcaactggggcaacggatcagcttcggcgggcaggttcagaactaccaggcggcggtgcagcagctggtgagcattctgg

SEQ ID NO: 93144 - DNA, 492 bp, Zea mays
  unsure (1)..(492): unsure at all n locations
agatgtaatactggtccggaattcccgggtcgacccacgcgtccggcggattacaatgctaagctttcagactttggtctcgcaagaacaggtcctagtggagaccgaacccatgtgtcaactcgggtcatgggaacttatggatacgcagctccagaatatgtcatgactggccatctgacggcacgaagtgatgtttatggcttcggagtggtgcttctagagatgattatcggaagaagggctgtggacaagagccggccaagccgtgagcataacctagttgactgggcacggcccctcctcgtccataacaggaagctgttccgaataatcgatccgagaatggaagggcaatactccaccaaggctgccactgangtggcaagccttgcataccgctgcctgagccaganaccccaaggacgaccaaccatgagccaagtcgtcgagacccttgaggccgtgcagaacatgcttgaatgcaaagac

SEQ ID NO: 93145 - DNA, 520 bp, Zea mays
gggaagtgatctgttatgagggctggaagaagataatgttgtaccggtccggaattcccggggtacagacctgatggaaagaagaaggcttacgtgaagcttacgcctgactatgatgctcttgatgtggccaagagaatcggcatcatctaaagttactgcgtcaggcatctgctgtgctctatttccatgtgaaaccagagtttttgtagctatggctcagtggctccatgaccatgtcttatgcacacttacgaatttgatatcatccaagtcacaggttgtgctcatcaatacttggataccatcacttattcgtattgggttggtctttggctctcacatttcttcgtattgggttggtctttggaaattgggcctgatagctgtttggagtatagtgtatggatctgcgttcataatgcgagcagcagcgcatggaaattggttacggcaattgtgcaaaaaaaaaaataaattacaaaatttaaaattccataacatttaatatgaggcatca

SEQ ID NO: 93146 - DNA, 511 bp, Zea mays
ggagcgctgtattttgtgatgggggggagaagctaatgctcgtaccggtccggaattcccgggcttccctagggtttagtcgcgccgccgccgccgccgaaacagcacatcgctctctcgatctcagccatggcggaggtggagcagccccaggacgcggtgaagctcttcaaccgctggaccttcgacgatgtccaggtgaacgatatctcgctgaacgactacctggctgtgactgcggcgaagcacgcgacattcctgccgcactccgcggggcgctactccaagaagcggttccgcaaggcgcagtgcgccatcgtcgagcgcctcaccaactcgctcatgatgcacgggcgcaacaacggcaagaaggtcatggccgtccgcatcatgaagcacaccctggagatcatccacctgctcactgacgccaatcccatccaggtggtcgtggacgccattatcaacagtggaccacgtgaggatgccacccgtattggttcagcttgtg

SEQ ID NO: 93147 - DNA, 519 bp, Zea mays
  unsure (1)..(519): unsure at all n locations
agagagcgtgttgtgggccattccctgatcagtcgncatgatgtaccggttccggaattgccggggttacctacgctttagtcgcaccgacgacgccgccgtatatcagtacatcgctctctcgatctcagccgtggcgggggtggtgcagcccgaggacgcggtgaagctcttcaaccgctggaccttcgacgatgtccaggtgaacgatatctcgctgaacgactacctgcctgtgactgcggcgaagcacgcgacattcctgccgcactccgcggggcgctactccaagaagcggttccgcaaggcgcagtgcgccatcgtcgagcgcctcaccaactcgctcatgatgcacgagcgcaacaaccgcaagaaggtcatggccgtccgcatcatgaatcacaccctgaagatcatccacctgctcactgacgccaatcccattcagatggtcgtggacgccattatcaacagtggaccacgtgaggatgctcacccgtattggttcaactggtgatt

SEQ ID NO: 93148 - DNA, 521 bp, Zea mays
atgggatgagtttgtatggtggagggggagtatgtaagtactggtccggaattcccgggtcgacccacgcgtccgaggaccttcggcgcccgttcaggatccacatcttcccgagcgagttcttggttgaccgcttgctcttcggaccacctcgaaggctcttggtgtagcttgccactctcaccaatcaagttttcatgtctgatctcgacattcagatcccaactgccttcgatcccttcgctgaggccaatgctggggactctggtgcggcagcagggtcaaaggactacgtacacgtgcgcatccagcagcgtaatggtcgcaagagcctgaccaccgtccagggattgaagaaggagttcagctacagcaagatcctcaaagatctcaagaaagagttctgctgcaatggtacagtggtccaggacccagaacttggacaggtcattcagctccagggtgatcagaggaaagacgtctcgaatttccttcgtcaggccgcattgtgaagaaggaca

SEQ ID NO: 93149 - DNA, 526 bp, Zea mays
  unsure (1)..(526): unsure at all n locations
ggggtgatgggtcntgtcatagcaagaggaagtatgttgtactggtccggaattcccgggatggtgcattgtgctaaatgcaatatcgaatggaacaaaaacgatggcattttcttggttgaagtgaacaggcgtttgaggcctggcggatatgttgtatggacatcgaatttgaatacacatagggccttgcgagacaaagaaaaccaaaagaaatggacagccattcgtgactacgctgagggcctttgttgggagatgctgtcacaacaagatgagacaattgtatggaaaaagacgaataaaagggaatgttacaaatcaagaaaatttgggcctgagctatgtggccatgatccagaatcaccatactaccaaccactaaacccctgcatatcgggcacaagaagtcagcggtggatccccattgaacaccgtaccaacttgccatctcaggctagggcaaaccgcaacaagacttggacttaccatgtgtgcaatcaaaaatctttgctgatgataatca

SEQ ID NO: 93150 - DNA, 532 bp, Zea mays
  unsure (1)..(532): unsure at all n locations
gagggaaatgtagggctntgtttacggtaaggcggggggaggagaaaagttcgtaccggtccggaattcccggggcgacccacgcgtccgctggagcccaccgcaactgtcgaaaaaatcaccggctccacccctgcgcgggtccagttctacgaccccttcgtcctcagcggagtcagcatcgaagccgccgagcacggtcgcctcctctgctcctttgtcgtcacccctcgccttgcgagtcccgcggggtacctccgcagcggtgtcacagcgacgctcgccgaccagctaggatcggccgtgtttttctgcagcgggctccctagcagcggggtatccctcgaaatcagcgtctcctttgttgacgcggctgccgtcggggaggaaatagaggtcgagggaaagctgttgcgtgccggcaagtcagtcggtgtcgtctctgtcgatttcaggaagaaaaagacaggaaaactgatggcgcaggcccgtcacaccaagtatcttgtggcatcaagcagaatgtgaggct

SEQ ID NO: 93151 - DNA, 515 bp, Zea mays
  unsure (1)..(515): unsure at all n locations
ggggagcgtntantcatgaacggtggaagattgtattgctcgtaccggtccggaattcccgggtcgacccacgcgtccgttgcaatcacaacgaacaaaagctctcgatctcaccgacaccgaggaagaagagatgaatggcgtccgagcagggagtcgtgatcgcgtgccacagcaaggctgagtttgacgcccacatgaccaaggcccaggaagccggcaagctggtggtcattgacttcactgccgcctggtgcggtccatgccgcgccatcgccccactgttcgtcgaacacgccaagaagttcactcaggtcgtgttcctgaaggtggacgtggacgaagtgaaggaagtcaccgcggcctacgaggtcgaggcgatgccgaccttccacttcgtcaagaacggcaagacggtcgcgaccatcgtgggtgccaggaaggacgagctcctggcccagatcgagaagcatgctgcgcctgcgcctgcgtctgcgtctgcctaaaggagatca

SEQ ID NO: 93152 - DNA, 513 bp, Zea mays
  unsure (1)..(513): unsure at all n locations
aggggaagggctntgtatgtaacgtggggagatggtatgctctaccggtccggaattcccgggtcgacccacgcgtccgagctagctagcatacagacgaataatctcttcttcacctcactaacaccagctagcagctctttctctcctgcaataatggccgctcgctcctcctcctcccagccgcagctggtcgcggcggcggcggtcctggcagcggcgctgctgctgctggcggcgggggccgggacggcgtcggcggcggtgagctgcggcgaggtgacgtcgtcggtggcgccgtgcctcgggtacgcgatgggcagcgcggcgtcgccctccgcggcgtgctgcagcggggtgcgctcgctcaacagccgcgcgtcgtcggcggcggaccggcaggccacctgcaactgcctcaagagcatgacgggccggctcggcggcggcgtcagcatggccaacgccgncaacatccccggcaagtgcggcgtctccgtcggcgtgcccatc

SEQ ID NO: 93153 - DNA, 492 bp, Zea mays
gagatgtcgtccggtccggaattcccgggtcgacccacgcgtccgcaagggtttccttctcgaccgtgcggaacgagccagagaacaggtatggcggcggcgcggcgcctcagatccggcctgcccctcctccgcgcccacctcgcatcctccgaatccgcggccgtcgctcaggtttcgaggggcttcgcgtcgcaggccgctaagcccaccgggaaggagatcaaggttccaaaggctctgtttggcggcacaggcaactatgccagtgcactgttcctcacagcagctaaatctaatgcattggacaaagttgaatctgagattaaagctattgtagaggcttccaagaagagcccgttgttttctcaattcataaaggacttgtcagttccaaaagcgaccagggtgaaggctatagccgaaatatttgctgacgcctggttttcagatgttacaaaggatttcttggctgtcctgggcgacaatggc

SEQ ID NO: 93154 - DNA, 518 bp, Zea mays
aggggaggatttgtattgggcgaagggagaatgatgtaccggtccggaattcccggggtgcactgtttgcagcatccgatccccaagtcccggaatactgcgagacgctcaagtcggaggactggccagggggtgcctgcattaactatgactgtagtccgatgaatgcgtctgaagaagcgcacaatcttgagacctcgcagctggtctgggagaagacactggagatggtcggccttccgccggatgccctggagaagctcatcgccggagaatcagttcagtgccgttacggacaacaggatacaactttttagttagcagtttagaggtggtttgttcggttgttatgtcattttgatcctaaatttgcagggaggaaaacacagggaaaggagaaaaagaatttgttgacagctacccaatcttggctcttttctgtatgtgtgcaagatgttgtgaaagaggcgtagaaacacatttccccaataattgactattcctatccatgatatact

SEQ ID NO: 93155 - DNA, 532 bp, Zea mays
  unsure (1)..(532): unsure at all n locations
ngagggaagatgagggtcnngttatggtggggggggggaacggtattgctcgtaccggtccggaattcccgggttcctcacgagcgattgcggcggcggaagtaagaggcgatggggcactccaacgtgtggaactcgcacgccaggaactacgggcccggatcccgcgtctgccgggtctgtgcgaaccctcatggactgatcaggaagtacgggctgatgtgctgcaggcagtgcttccgcagcaacgccaaggacattggcttcatcaagtaccgctgaagtcagctgggcgggctatctgaatgccatctcttggacagtgtagtagaggcgatgccacaattttaattactgtcatttagatgttcccttcagaactctgctatttaagtccgccatgtttgtgatggagaactgaagctttgtttgttatactgattatgagttacctgtgcaaaananaattttncaacactgaaaaagggcggccgctctagaagatccaagcttacgtacgcgtgcatgcgaa

SEQ ID NO: 93156 - DNA, 527 bp, Zea mays
  unsure (1)..(527): unsure at all n locations
ggtagatagggtttgtttaagacggggggggaagataggtattgctcgtaccggtccggaattcccggggggacccacgcgtccgcctgggaagaaatcccatgctatcgatgctttctcacatgctctgcaagccgtcccgacaatcatagctgacaatgctggtttggatagcgctgatttgatctctcagctacgagctgagcaccacaaagagaactccactgctggaattgatgtcatcacaggcactgttggtgacatgcaaaagttggggattcaagagtcgttcaaggtgaagcaggccattcttctgtctgcaacagaggctgcggagatgatcctcanggtcgatgagatcataacctgtgccccgcgcagaagagaggacaggaagtgatattacacgctgtttctcgatgaagcgggatgctcattaccctagttttgaggggtattatggtttaggggcgctcaagttggtcagatttcgagtgtttttggcccctaagcaactggaacttgta

SEQ ID NO: 93157 - DNA, 518 bp, Zea mays
  unsure (1)..(518): unsure at all n locations
aggggatatgtgggntgtcatgaatagagggtagaagtattgctcgtaccggtccggaattcccgggtcgacccacgcgtccggcaaaaagagcgaacacgagcacgaacacaagcgcagagcagccaagcgccagacacgcgccgacgcgaaccaaccaaccagctggtagtaggttcgccgcgctgacgatgatgcctcgccgcgcccttctcttcgccgcggtgctcctcgcggcctccgccgccgcggtctccgggttccacctgggaggggacgagagcggtctcgtgaggggtgtgctcgccgcgctccgcgagcgagccgaggccgaggacgccgctcgcttcgccgtcgcccactacaacaagaaccagggcgccgctttggagtttactagggtgctcaaatccaagcggcaggtggtgaccgggaccctgcatgacctgatactggaggcagctgatgctggaaaaaagagtgtgtacagagcaaaggtttgggtgaagccgtgggaa

SEQ ID NO: 93158 - DNA, 512 bp, Zea mays
  unsure (1)..(512): unsure at all n locations
agaaatgggccngtgtaatcgtatgcgggggatgacgggattgctcgtaccggtccggaattcccgggtcgacccacgcgtccgacggcctgttgtcagagatcctaacccaaaccttttctttgcgcaccaagtcatcactaatgcatgtgctactcaagctattctctcagttctcatgaatcgccctgaaattgacattggcccagaattatctcaattgaaggaattcacaggagcttttacacctgatctgaagggcttggctattagcaacagcgaatctatccggacatctcataacagctttgcaaggccagagccatttatttctgatgagcagagggccgcgactaaagatgatgatgtttaccatttcataagctatttaccttttgaaagtgtcctgtatgagctggatggactgaaagaaaggcctgtgaatcttgggcaatgcgatggtgcttatgatcttgattggctaccgatggtgcaaccagttattcaagaaa

SEQ ID NO: 93159 - DNA, 523 bp, Zea mays
  unsure (1)..(523): unsure at all n locations
aggggaggggtcctgtatgtgggagaaggagattgttagtactggtccggaattcccgggtcgacccacgcgtccgtgaggccaaggaaagtgccttggtgtggcaccatcaggatgctgacctaggctttggatccgcacaggcaaaagagatgcttgatcacctggaaagtgtactagcaaatgaaccagtctctgtcaagagtggccagttcattgttgaagtcaaaccacagggaataagcaagggaatagttgccgagaggatacttgcatcagtgaaggagagaggaaagcaggctgatttcttattgtgcatcggcgatgataggtctgatgaggacatgtttgaaaatattgctgatatcattgggaggaatttggttgctccaagaacagcactgtttgcgtgcactgtgggacaaaaaccaagcaaaggccaattctacctgcatgatacattctaaagggtcactatgctgaacgcaatggcaaatgccacaagtnctggacttgagactgt

SEQ ID NO: 93160 - DNA, 490 bp, Zea mays
  unsure (1)..(490): unsure at all n locations
tagtgtagtactggtccggaattcccgggctagggttttcgattttagccgccgccgctgctcatctcacatccctcgagaagacgcctgctcctcgccgagcgatgcgatggccgtcttctgcgacctccacaccgccgacggcctcaagtccctcgaggctcacctcgccggcaaaacctatgtgtctggtgactccattactaaggatgacattaaggtcttcgccgcggtgccgtcgaagcctggcgctgagtttcctaatgccgcccgctggtacgagaccgtctctgcggctgtagcctcaagattccctggtaaggctgttggtgtaaatctgcctgcgggatcagctcctgcggcagctgctcctgcggatgaagctgangatgatgatgaccttgatctttttggtgatgaaactgaggaggacaagaaggcagctgatgagcgtgccggcgctgccaaggcctcttctaaaagaaagaaa

SEQ ID NO: 93161 - DNA, 530 bp, Zea mays
  unsure (1)..(530): unsure at all n locations
naggtaagagaggatnncgtgtaagtacggggagagaacggtattgctcgtaccggtccggaattcccgggtcgacccacgcgtccggttcgtgaggttctccggggttcggtttcgtgggtgagcggatcgagatggcggcgtgggatgttgagtaccgctgcttcgtcggcggcctcgcctgggccacggacgaccactccctccacaacgccttcagcacctacggcgaggtcctcgagtccaagatcatcctcgatcgggagacgcagaggtcccgcggcttcggcttcgtcaccttctccacggaggaggcgatgcggaacgccatcgagggcatgaacggcaaggagctggacggccgcaacatcaccgtcaacgaggcccagtcccgcggcggccgtggaggcggcggcggcggcgggtacggtggtggccgtggaggcggcggctacggcggtggcgggcgccgtgatggcggcggcggctacggccgtggcggcggctaccgtggtggcggcggcggctac

SEQ ID NO: 93162 - DNA, 535 bp, Zea mays
  unsure (1)..(535): unsure at all n locations
atgtgagatgcttntgttgccttcccatgccntanctgactgctcgtaccggtccggaattcccggggcgagccacgcgtccgcggcaagcccgagagcttcggcgggcccttcctcgtgcccagctaccgtggcgcctgcttcctcgacaccgaagggccgctgcggctccaccggctacgacaacgccgtcacgctccccgccgagggcagaggtgacgagcaggagctccacaaggagaacattcagaacgccgtctcctacaccggcaacatcacgtttagcgtgaccaagagcaacccgcagaccatctaaggcatatccgccttcaagagcttgctgtcaaccaacattacactcggggccatatcatcaagggggcccattacccaggcggaccagtacactcaggttgcctgagtgtaccttataacccgtaaaggccccttcttccgacaatggaccttggcaacgatgcaacaattctgctccccaacttttacaataccataagtccgaggacacttcaccacc

SEQ ID NO: 93163 - DNA, 518 bp, Zea mays
  unsure (1)..(518): unsure at all n locations
gggtgagagctgtgtgatgttggagggaagagagtactgctgtaccggtccggaattcccgggtcgacccacgcgtccgggaggccatgcagcaatatgaaatggcgattgcatacatgggagatgatttcatgtgtcaattatttggaaagtacagagacatggccttggctgtgaaaaatccatgccatctcaatatggctgcatgcctgatcaaactaaagagattcgatgaagctattgcgcagtgtagcattgttttgacagaagatgaaagtaatgtcaaagcgctgttcaggcgaggaaaagctaaatctgaacttggccagacagaatcagcgagggaagatttcctcaaagcgaagaagtactccccagaagacaaggagatcattcgggagctccggttgctcgcggaacaagacaaggcactataccagaagcagaaagagctctacaaggtccttttggccaagtcctgaagcgaaaccgaagaagcanagtacctcgttgtgttt

SEQ ID NO: 93164 - DNA, 516 bp, Zea mays
aggtaaagagggtgtgtgatcgaatggaggataatgtcattgctcgtaccggtccggaattcccgggtcgacccacgcgtccgggtgaagcgcgggtgctggtgcgggaagcctcgccagacctagcgctgccgactgcggagctgggtgcgggcgcgaggagtcgacgggaagacaagggtgaggaattatgagtgaaacagggcacactgtacaagtcactaacctctcgagcagagtatctgaaagtgatcttcatgagttcttttcgttctctggtcctattgagcatatagaacttatcagatcagaaggatacggtgccactgcttatgtgacattcaaggaacgctttgccttggaaactgcagtattgctcagtggggctactattgtggatcagccagtatgcataacctattggggacaacctgagggaacttttaatttctgggacaggccaacttgggaagttgaagaggaaatcgaatacaggaactaccaaacatgccagta

SEQ ID NO: 93165 - DNA, 515 bp, Zea mays
  unsure (1)..(515): unsure at all n locations
nagggaagcggntntnantatctgtcatgtggggaagatggtattgctcgtaccggtccggaattcccgggtcgacccacgcgtccgccccaacaacgtcaagtccagtgtttgtgatatccctccgcgtggcctctgcatgggctccaccttcattggcaactccacgtccatccaggagatgttccgccgtgtgagcgagcagttcactgctatgttcaggaggaaggctttcttgcattggtacactggtgagggcatggatgagatggagttcaccgaagctgagagcaacatgaacgatctggtgtccgagtaccagcagtaccaggatgccactgctgatgaggaggcggaatacgaggacgaggaggccatccaagacgagtaagggtggtttgggccctgccacatttgtaccctnggttcctttcattccggggcttgcctatggtttgcttggtgtatttgctcaagttatgcggtatgtagtagtactttcgtgcgtagcatgc

SEQ ID NO: 93166 - DNA, 519 bp, Zea mays
ggtgagaggtttgtcattgacgtaggagtattgctataccggtccggaattcccgggtcgacccacgcgtccgcggaacgcacacaccgcccggtccccgatctccgatcccctcgtcgatccaaagatgcagagcttcgtcaagaccctcactggaaagactatcaccctcgaggtggagtcttctgacaccattgacaacgtcaaggccaagatccaggacaaggagggcatccccccggaccagcagcggctcatctttgctggcaagcagctcgaggacgggcgcacacttgccgactacaacatccagaaggagagcaccctccaccttgttctccgcctcaggggaggcatgcagatcttcgtcaagaccctcactggaaagactatcaccctcgaggtggagtcttctgacaccatcgacaacgtcaaagccaagatccaggacaaggaggggcatccttcagaccagcagcggctaatttttgcggcaagcagctcgaggacgggcgcacc

SEQ ID NO: 93167 - DNA, 528 bp, Zea mays
  unsure (1)..(528): unsure at all n locations
gaggggagaggtgtgtctgatatgtggggcggggagaatgttcgtaccggtccggaattcccgggtcgacccacgcgtccggggacctgaactccttgttgatttacaagactatgattattctttggacatgtggagtcttggttgcatgtttgctggaatgatatttcgcaaggaaccattcttttatggccatgacaaccatgaccaacttgtgaagattgcaaaggtccttggaacagatgggttgaatgcttatttgaacaagtatcacattgagctggaccctcaacttgaagctcttgttggaaggcatagtagaaaaccctggtcaaagttcatgaatgctgataaccaacatctagtatcacctgaggccatagattttctcgataagctcctgcgctatgatcaccaagataggctcactgcacgtgaagctatggcacatccctactttctncaagtcagagctgtggagaacagtngaacgagaccacnatnnatcgtgtctacaccctcgaaatg

SEQ ID NO: 93168 - DNA, 521 bp, Zea mays
  unsure (1)..(521): unsure at all n locations
gggtgaggatggtgtggtaagaggggaggggatattgttgtactggtccggaattcccggggacgagtgcaaacgcagattcagtgtaaagctgtggaaaacattcactgactgttttaactgcttgccagtgtgagcgttgatagacgaaaagatcctctgtatgcatggtggtctatctccagagttgaacaagctcgaacaaatacttaatctgagtcgccccacagacgtgcctgatactggattgctctgtgaccttctttggtctgatccttctaatgaagcaacaggatgggccataaatgatcgaggtgtttcatatacatttggtcctgataaagtttctgaattccttgagaagcatgatttggacctcatctgccgagcccatcaggttgtcgaagatggatatgagtnnttcgctagccgccaactcgtaacaaatgtttcagcccctaactactgtggagaattgataacgcttgtgccatgatgagtgtagatgagacaatgatgtn

SEQ ID NO: 93169 - DNA, 528 bp, Zea mays
  unsure (1)..(528): unsure at all n locations
gtgggagatggttttttcatgactgaggagggagattgtattgctcgtaccggtccggaattcccgggtcgacccacgcgtccgtgaagatcgaccagggtggctgggtcccactcgtcgtggcgacggccttcttgctcgtcatgtacgtgtggcacttctgcacggtgaagcggtacgagttcgagatgcacagcaaggtgtccatggcgtggatcctggggctgggctcgagcctgggcctggtgagggtcccagggatcggcttcgtgtacacggagctggcgagcggcgtgccgcacatcttctcccacttcatcaccaacctccccgcgatccactcggtggtggtgttcgtctgcgtcaagtacctccccgtgtacaccgtgccgacggaggagcggttcctggtgcggaagatcgggcccaggagcttncacatgttccggtgcgtggcgaggtacgggtacaaagacctgcacaagagggacgaggacttcgaagaggtgctggtcgactgcgtncttt

SEQ ID NO: 93170 - DNA, 524 bp, Zea mays
  unsure (1)..(524): unsure at all n locations
tagggagatgaggtnntgttcatgataggcggaggaagtattgctcgtaccggtccggaattcccgggtcgacccacgcgtccgccagttcgccaacatcatccatatctccaagcagctgcgctacttcgagcagtaccgtaggcgcctggccgcgctgatcggcccggaggcggcgtcccgcgtggtgcgcggcgcgctggtgctcatcacgctgggcggcaacgacttcgtgaacaactactacctggtgccctactcggcgcggtcgcgggagttctcgctgccggactacgtcacctacctgctgtcggagtacgcgcaggtgctggaccgactctacgacctcggcgcgcggcgggtgctggtgcatgnggtggggcccatcggctgcgtacccggcgagctggcgctgcacagtctngacggaacctgcgacgccgatctgcagcgcgccgacgagatgtacaacccgcggtcatggggctgctggaggagctcaacgcgcgccatggcggcggtgt

SEQ ID NO: 93171 - DNA, 517 bp, Zea mays
  unsure (1)..(517): unsure at all n locations
gatagagatctatttgcgtttctcatccnttgncacacgctaccgatcggaatcccaccggacccactcatacctgaacatcctcatgatttacaatactataatcattcttctaacatcttcatgcttggtttcatctttactcgcgtgagatttctcaaacaaccattcttttatagccatgacaaccatgaccaacttgtgaacattgcaaaggtccttgcaacatatctgttgaatgcttatttgaacaagtatcacattgagctctacccttaacttgaagctcttgttggaaagcatattataaaaccctggtcaaagttcattaatgctgataaccaacatctagtatcaccttacgccatatattttttccataagctccttcgctatgatcaccaaaatatgctcactgcacgttaagctatggcacattcctactttcttcaaatcaaaactgttgagaacaatataactagaccacaataatcggtgtctacacccttcaaattaa

SEQ ID NO: 93172 - DNA, 530 bp, Zea mays
  unsure (1)..(530): unsure at all n locations
aggatgatgagggtnnngtgatcgtcgagcggggggagaaggtattgctcgtaccggtccggaattcccgggtcgacccacgcgtccgccctctcgccgcccgtctcccccgcggccgaggagccgccaatagcaaggagagggtttcctcctccctccacggctccaccgagctccccgatccctccgccccaaatcccacacacccggttggccaccgcctcgctatggatttggatctgtggatctccaaggtcaaggagggtcagcacctcgcggagcacgagcttcagtccctctgcgaatatgtgaaggagatcctcatcgaagagtcgaacgtgcaaccagtgaacagccccgtgacggtttgcggtgatatccatgggcagttccatgacctaatgaagctcttcgcgaccgggggccacgttccaaagacgaactatattttcatgggtgattttgtggacccgggcttcaatagtctaaagggtttcacacatccaatggttctaaaagggaagtattcc

SEQ ID NO: 93173 - DNA, 517 bp, Zea mays
  unsure (1)..(517): unsure at all n locations
ngttaagtggctgntgtgatcgatgggggggaggatagagattgctcgtaccggtccggaattcccgggtcgacccacgcgtccgcacaaccgtctgtacatggaagcgcgccccttggaggagggtctcgctgaggccatcgatgacggccgtattggcccacgtgatgatccgaaggtgcgctcccagatcctctctcaggagtttgggtgggacaaggacctggccaagaagatttggtgttttggacctgagaccactggcccgaacatggttgtagatatgtgcaagggagtgcagtatctcaatgaaatcaaggattctgttgtggctggtttccagtgggcatcaaaggagggtgcactggctgaggagaacatgcgtggaatttgctttgaggtctgtgatgtcgttcttcatgctgatgctatccacaggggtggtggtcaggtcattcccactgccaggagggtcatctatgcctctcagctcacggccaagccaaggctgctggaa

SEQ ID NO: 93174 - DNA, 491 bp, Zea mays
  unsure (1)..(491): unsure at all n locations
agaagttatcccggtccggaattcccgggtcgacccacgcgtccgcaaggagattgttgatctgtgccttgaccgtatccgcaagcttgctgacaactgcagcggcctccagggcttcctggtcttcaatgccgttggtggtggcaccggctctggccttggttctctcctccttgagcgcctgtctgtggagtacggcaagaaatccaagctgggcttcactgtgtacccatctccccaggtgtcaacctctgttgtggagccttacaacagcgtcctctccactcactcactcctggagcacactgatgtctctatcctgctcgacaacgaggccatctatgacatctgcaggcgctccctcgacattgagaggcccaactactccaacctgaatcgccttgtgtctcaagtgatctcatctctgactgcctcccctgaggntcgatggtgcccctcaatgtggatgtgaaacgagttcagaccaccct

SEQ ID NO: 93175 - DNA, 513 bp, Zea mays
  unsure (1)..(513): unsure at all n locations
agttgatgtggtcnatgccatccattgaaatatcgtactgctgtaccgtccggattcccgggtcgacccacgcgtccgtgctgtagccatcctctctacctcatgtgtttgtccagacatgtggaaatgtgactgttgttacagacctttggtgcagtatcatctcatatttcgagttgaaatggtaatcactgaatgctcttcgcagggcatttccagcttgtatcttctccatgagatcgcatctatactcggactcgtggacgatgacattgaatcgactgacacctgctgtaaccatcctgtctaccccgagatagactcgatctaggtacagttgacaggntggagaaatgcatcacgcccttactacttatacgctgggtacagcttctcaacgacttccctatgattaagtcagtgctacttttcaactccgttacatgcttgacgcttcctttcctgttccacagaggtttcagattacgttttttcacactttgcatcaacgtt

SEQ ID NO: 93176 - DNA, 514 bp, Zea mays
  unsure (1)..(514): unsure at all n locations
ggatggtcgctgcggcattgaaccaagataagatacgcactgncagtaccggtccggaattcccgggctttctgctatccaactatttgcagatccatcgagacctgcttcaagaaacaggcgtcctggggatgaaagtgatggggactctatggatactagcagtgagagcagcattgagaatgacgttgagcggctaagagtctcatcatcactggaaggtacacatcgactggaaaatggtggcatacgaagtgatgatggtgaaggcgatgcatcttcaagttttccaatatttcagtatatggagagggatcctccatatggtagagagcctctgacagacaaggtatcaactcttgcacacagatttccagctctgaagacattcaaaagctgtgatcttctgccatcgagctggatgtctgttgcatggtaccccatatatagaattccaacagggccaacattgaaggatctcgatgcctggtttttgacattccattgcctagca

SEQ ID NO: 93177 - DNA, 530 bp, Zea mays
  unsure (1)..(530): unsure at all n locations
gagtgagagagggtnngtcctctataggagatatattgtcacgctcgtaccggtccggaattcccgggtcgacccacgcgtccgcttgctgcctcatccattccagagctgcgaggcagacagagagacagacagagagacggacagacagagagagggatcgacggagcaaggcggggccgtgtccggtcacacgagcgagccctctcggccgcgcgtttgtgaatggtgaacggcgagcagcgggcggacgcggagtgcacgcgggcgtcgctgctggggaggtatgagatcgggcggaccctcggcgagggcaacttcggcaaggtgaagtacgcgcgccacatcgccaccggcggccacttcgccatcaagatcctcgaccgcagcaagatcctctccctccgcatcgacgaccagatcaggagggagatcgggacgctcaagctgctcaagcacccgaatgtcgtccgcttgcacgaggttgctgccagtaaaacgaagatctacatggtgctngagtttgtgan

SEQ ID NO: 93178 - DNA, 520 bp, Zea mays
  unsure (1)..(520): unsure at all n locations
agttttgggntttnngtcgtgatgaatgtaatgtatactcgtaccggtccggaattcccgggtcgacccacgcgtccgcccagagttccttgcggagggcactgccattgaggacctgttcaagcctgacagagggcttatcggtggccgggagacccctgagggcaggaaggccgtccaggctctcaaggatgtgtacgctcactgggttcccgaggacaggatcctcaccaccaacctgtggtctgctgagctctccaagctcgctgccaacgcgttcctggcacagaggatctcctctgtgaacgccatctccgccctctgcgaggccaccggcgcgaatgtgactgaggtggcttacgccgtgggcaaggacacgaggattggccccaagttcctgaacgccagtgttgggttcggtgggtcttgcttccagaaggacatcctgaacctggtgtacatctgcgagtgcaatggcctgcccgaggtggccaactactggaagcaggtgatcaagatc

SEQ ID NO: 93179 - DNA, 508 bp, Zea mays
  unsure (1)..(508): unsure at all n locations
tgaggggnncnnncaatgaacatgagtgtatcgtcatgctgtaccggtccggaattcccgggtcgacccacgcgtccggggagttaagggaggatccgcagagcatggtgaagcagctattaaccaagtgtgctgaagcattaagtgaggagaggatagaggagttccttaaccttgttcagcaagctcgtggagttgtatcaattactggggagccaatccagcggttaggtgcttacctccttgagggtttggttgctagacatgcaaactcaggtacaaacatatatcgtgccctgaagtgccgtgagccagagagtaatgaactcttgtcttacatgaagattttgtataacatctgtccgtacttgaagtttggctatatggctgccaatggggcaattgcagaggcattaagaaatgaggacaggatccatattattgatttccagattgcccaagggacacagtggataacactgatacaagcgctagctgcaaggcccgg

SEQ ID NO: 93180 - DNA, 554 bp, Zea mays
  unsure (1)..(554): unsure at all n locations
tgagagctgtgtctagatccaagcnctcaganagcactgcgctgtactccggctcggaattcccggggaccgctaatgtccgtccccggacaggtgatcaacctccgtataangaagatacattagcaaaatacacaataaatccagcaatggtgaacgggttttcagactttgttggttctgttgaggtgggaaaattagctgaccttgttctttggaaaccatctttcttcggcgctaaaccagaactggttgtaaagggaggtgcaattgcatgggctaacatgggtgatcccaatgctagcattccaacacctgaacctgttgtgatgcgacctatgtttggtgcatttggaaaggctggaagttccaattcaattgcatttgtgagcaaggctgctaaagaagctggtgtcgcaacggagtacagactagaaaagagggtgaaacctttagcccgtgttctaggcctgacaaagcttgacatgatcttaacgacgccctccgaaaaatgaagtgaaccctgaaacttaccagggccgcgtgttgagagg

SEQ ID NO: 93181 - DNA, 548 bp, Zea mays
  unsure (1)..(548): unsure at all n locations
agggagggccgtctgtccatgatcaagcagatgattgcactgnacgtaccggtccggaattcccgggtcgacccacgcgtccgcatcaattgtcacaaaaactaatttcaagcatctgtattggacgctgacacagcaggtagcacaccacaccatcaacggatgcaacatgaggccgggggatatatttgcgactggcacactgagtggacctgaaccggactccctcgggtgcctgctggagctgacatggaacgggcagaaggagataccggtggggagtttgacccgcaagttcctagaagatggagatgaagtcatcttgacaggatgttgcaagggtgaaggctacaacattggttttggaacctgcaccgggaaggttctgccggcacttccctgagccaacacgtcttggtatcagttctccggagtctcaacgatctcagctatcagagagttgtctcaacggtctcaactatcaaagagttcatgccgctatctagcaaggctgctatgtaacggaccgatatgaatatgggttgttn

SEQ ID NO: 93182 - DNA, 563 bp, Zea mays
  unsure (1)..(563): unsure at all n locations
agaagtattctgtcctagcttactgacgctacgtgctacngctccggaattcccgggtcgacccacgcgtccgcccggtagcaggagcgcagccagcaagctcagccccccagccctactgccaccgcgccgagcgccatggccgagccggcagagcaccgtccagcggaggaggaggaggccgcggcggccggcgaggatgaggacaccggcgcccaggtcgcgcccatcgtgaagctggaggaggtcgccgttaccaccggagaggaggacgaggacgcgctcctggacatgaaggcgaagctctaccggttcgacaaggaggggaaccagtggaaagagcgcggcacaggcactgtgaagctgctcaagcacaaagacaccgtcaaggtccgcctcgtcatgcgtcaggcgaagacgcttaacgattggngccaaccatttggtggtggcaacaactaaaatgcagaacacgccgggagcaccaagttttccttgtgggaacgcttgaatttttcgaacgggaactcaaaagggaaaaggttgctattcggtttggaatc

SEQ ID NO: 93183 - DNA, 538 bp, Zea mays
  unsure (1)..(538): unsure at all n locations
aagtagcgggttgttatgaaagaagagtctcaccctccggaantccggtcgacccacgcgtcgtcgcatacataaaccagtgcagcagaagcagcgcatggcgagcagcaccatggccgtctggtcaagccttcgcggaaggcagtgaacgtgccgtcgctctcttcggcgaggcccgcgtgacgatgcgcaagacggcggcgaaggcaaagccggcggcgagctccggcagcccgtggtacggccccgaccgcgtgctctacctgggcccgctgtccggcgcgcccccgagctacctgacgggcgagttcccgggcgactacggctgggacaccgcggngctgtcggcggacccggagacgttcgccaagaaccgggagctggaggtcatncactccccgctggccatgcnntggcgcgtgggctgcgtgttccccgagctgctcgcccgcaacggcgtcaaagtcggcgaaggcgtgtgggtcaaaggccggtcgcaaatctttagcgagggtggggctggactacctttgcaacc

SEQ ID NO: 93184 - DNA, 537 bp, Zea mays
  unsure (1)..(537): unsure at all n locations
agggagtgtgtctgctcatagtatgagaagtacgtggataccgctccggaattcccgggtagggttttgctgctctccgaccccgagctccgaaggccgcagcatcaggcgcggcccccctcgcgtgtgaccgagatggcgctgccgaatcaggggaccgttgattaccccagcttcaagctcgtcatcgtcggcgatggtggaactggtaaaactacatttgtgaagaggcatctcactggagagtttgagaagaaatatgaaccaaccattggtgtggaagttcatccgttggatttcaccactaactgtggtaagatcaggttctactgctgggataccgcanggcaagagaagtttggtggcctcagggatggatactatatccatggccagtgtgcgatcatcattgttgatgtaacctcaaggctacttacaagaatgttcctacgtggcatanggacctgtgcagggtctgtgaaaaccatcccaatggcctttggcgtattaaggtgatgtggagaccagcctgtcaat

SEQ ID NO: 93185 - DNA, 544 bp, Zea mays
agacacgtgtgtctgtaatctgtaacgatagtaatgctcaccgcgtccggaattcccgggtcgacccacgcgtccgaagcaagcaagcaagcagcgagtacatacatactaggcagccaggcagccatggcgcccaccgtgatgatggcctcgtcggccaccgccgtcgctccgttccaggggctcaagtccaccgccagcctccccgtcgcccgccgctcctccagaagcctcggcaacgtcagcaacggcggaaggatccggtgcatgcaggtgtggccggcctacggcaacaagaagttcgagacgctgtcgtacctgccgccgctgtcgacggacgacctgctgaagcaggtggactacctgctgcgcaacggctggataccctgcctcgagttcagcaaggtcggcttcgtgtaccgcgagaacttcacctcccgtgctactaccaccgccgttcttgacccatttgaaacttgccatggtccggtgaaccgccccacccaagtgttccaagagcttcaagaggccattcaattcttcc

SEQ ID NO: 93186 - DNA, 543 bp, Zea mays
  unsure (1)..(543): unsure at all n locations
agggagttgtctgatccatgattagatagtagtgctcactcctcctgaattcccgggtcgacccacgcgtccggagatgtgggatctctacagaagagaagttattagcgaaaaagttgacatttgggctttggggtgcgttctatatagaatatgctacttcaagtctgcatttgatggagaatccaagttgcagatactcaatggcaattatcgtatccctgagcaacccaagtatagcactgctgtcacagggttgatcaaagatatgctggaagcctctccaaattccagaccagacatcacacaggtctggtttcgtgttaatgagctactgccgcttgagttacaaaaaagtttacctgacggaccttcgccagccgtttccttgagtttgcaagatgaaggtgctcataaaagggcacatgtgatgcctagaaggaaccctnctncaccttcaagagagcaatctaatagttctctatcgcatggaagctcaaaggcaggagatgcacccttaagtgcattttgtgcaacacaaca

SEQ ID NO: 93187 - DNA, 546 bp, Zea mays
  unsure (1)..(546): unsure at all n locations
agggaggccgtctgtgctagcttaagcaggtgantgcatcgctctaccggtccggaattcccgggtcgacccacgcgtccgattcatcaaacctgaggaggcagctcatttggagagaaacttcagccttgcaaatggccatgcagtccatgatgcccagcatccttgccaggctaatgtggtcgtgcggcaggaactccacacccctgcttctgatcgttcatgcactcatttggagttcgacattgctgcaactggtctcacgtatgaaactggcgaccatgttggtgtatacaccgagaactgccctgaggttgtagaggaggcagagaggttgttgggctactcgccagacacatttttcaccattcatgcagacaaagaggatggcacttcactaagtggcagttctcttgctcctccgttcccctccccaatcacagtgaggaatgcacttgctagatatgccgaccttctaaattcaccgaagaaggctnctctggttgcattagctncttatgcttcagatcctgctgaggctgatcg

SEQ ID NO: 93188 - DNA, 543 bp, Zea mays
  unsure (1)..(543): unsure at all n locations
agggaggcctgtcttcatgataagaaggtgatgctactgctgtaccggtccgaattcccgggatcaaaatccatcgataaggcaaagaacttgtttgaggaaggaggcgattgggagaggaagaacaggttgaaagtatatgaaggcttgtactgcatggcaaccagaaacttcaagaaagctgccagcttatttttagactcgatttcgactttcacaacttatgagatattcccatatgatacgttcatcttctatacagtcctcacaagtgtcatcacattggatcgtgtatctctgaaacaaaaggtggtagatgcaccagaaatcctggctgtaattggcaaagtacctcacctctccgagtttctcaactccctgtacaactgccagtataagtcgttcttcgttgcattttctggtctgacagagcaaatcaagttagaccgttatcttcagcctcatttccgctactacatgnaggaaatgcgcaccgtggtatactcacaggtcttagaatcatacaagagtgtgacaatggaa

SEQ ID NO: 93189 - DNA, 561 bp, Zea mays
  unsure (1)..(561): unsure at all n locations
naggagcgtttttgttatgaatgaggcagtagtctacacccgtccggaattcccgggtcgacccacgcgtccggtccatctttattggttctcattcatatttgtttctttgcattgatggttatagtggttcagtgaggtggagtgtcaaattggaaggccgtatcgagtgttctgccgctataactggtgatttctcagaggttgttgttggatgctataaagggaaaatttacttccttgatatgtctacgggaaaattatcctggacctttcaaacagatggggaggtaaaaatgcaaccagttgtggacaagatgaggaatttaatatggtgtggctcgtatgaccattacttgtatgcgttaaattacaaagatcgctgctgcacatacaaagttttttgtggtggaagcatttatggatctnctgctattgacatggcacanaatgtaatctatgtcgcatctacgagtggccctgtgactgcagtttcatttaaaggtatttttaagatctactttgggaaaattgaatgggtaaaacaaaccttttttaccc

SEQ ID NO: 93190 - DNA, 548 bp, Zea mays
  unsure (1)..(548): unsure at all n locations
gagagagtgtgtgtgatcatgccatcgtanagtagtgactctacccgtccggaattcccgggtcgacccacgcgtccggcaattctgcatcatatctgtctgcaattccagtttcagaaatgcgcaaaaatctgcgattgcagtagctaaaaagaatgcgcaaaaatctttgtacgattgtgcgctgtcgaatctctctctgctgtgcacacgcgcgcaggagcatccgggcatgtcgaagggcgacaagaagcggctgtgcgcgctgatggactgcaggaagctgacggcggacgcgagcgagcacgccgtgcagaacgagcggctgcccctgcgcgtggtggtacaggtcctcttcttcgagcaggtccggcagtcggcggcggcagnctctggccgccccgcgcgctcgctcatcctggccagggacgacggcgcgtcgtacggcaagtcgagggcggcgaacacgacggcgacngaggacgagcaatggggccgccgggccgtggtgggcgcgcctgggaccaacgtcacgttgggccgggggc

SEQ ID NO: 93191 - DNA, 546 bp, Zea mays
  unsure (1)..(546): unsure at all n locations
agttagttgtctgtccatgctaagatagtagtgctgcaccgctccggaattcccgggtcgacccacgcgtccgcaccacttcttcaaccaccacaagaaggactaggagcagcccgccggcgagtacgggtactgcgagaccgaggtggtcaccgccaccggcgagggcgagtacgagaggtacaagaaggaggagaaggagcacaagcacaagcagcacctcggcgaggccggcgccatcgccgccggcgccttcgcactctacgagaagcacgaggcgaagaaggaccccgagcacgcgcacaggcacaagatcacggaggaggtcgctgccgcggcggccgtcggcgccggcggctacgtattccacgagcaccacgagaagaagaaggaccacaaggacgccgaggaggccagcggcgaagagaagcaccaccacctcttcggctgaccgtaataccgggccgcgcgcgaccgaactagctagcttcggcgcacacaaccacacacctggttaattctgtactgcatgcgtgtgtaatttgn

SEQ ID NO: 93192 - DNA, 545 bp, Zea mays
  unsure (1)..(545): unsure at all n locations
agggaggccgtctgttccctagcaagcagangttcgcactgnccgtaccggtccggaattcccgggtcgacccacgcgtccggtggacgccggaggaggacctcgtcctcgtctcctacatccaggaccacggccccggcaactggcgcgccgtccccaccagaaccgggctgatgcggtgcagcaagagctgccggcttcggtggaccaactacctccggccgggcatcaggcgcggcaacttcacggagcaggaggagaagctcatcgtccaccttcaggccctcctcggcaacaggtgggcggccatcgcgtcgtacctgccggagcggacggacaatgacgtcaagaactactgggacacgcacctnaagcgcaagctgcaggccggcggcggcgacggcgacggcgacggggcggccaagccgccggcgcacaggccgccgccgtccaactccaagggggcagtggagaggaggctgcagacggacttcaacctggcgcgccgngcgctcgggaagcgcttaacccgttcgcgacctcaa

SEQ ID NO: 93193 - DNA, 541 bp, Zea mays
  unsure (1)..(541): unsure at all n locations
tggtnggtgtgcgttctaagcctcgcatttctgatnagcanatgcaccagtcccggaatttccgggtcgacccacgcgtccgcgacggactcattaacacacacacggacacacaacttctccatacacgccgtagccatgggttccgctgcgcagaagaagatggcaattgtttgcttgatgctgctggccgtcgtcggccaaatcgtcgctgatgctgatgttaccgtagaacatcccagccgcatctgcaccgaaacggtgattgatcctcgtgttcccaacaacgagtgcatctgctccaagaactgcgcctgtgccggcaagtgcatccttgagtcgcctgatgctgtccagacctgctttgtcgactgcgtcctcaagaacgactgcatctgcagcagcaagatcatcctcggcgctgacgacccaaaggctaatgccaagtgaagtagtactgctatcatcatccccaataatggcgtacgtacctaaataaacgaccttccatgcatgcaccaacggggagagttaagtgtgt

SEQ ID NO: 93194 - DNA, 545 bp, Zea mays
aggacacgttgtctgtcatagcatagatagtattgctcaccgcgtccggaattcccgggtcgacccacgcgtccgaaatgagataccaaagtcccgcatgttctggcctcgagagatatggagtaaatatgcagatgaacttgaggacttcaaatatgaggagaactccaaaaaagcagtacaatgcttgaacaatatggtgactgatgcactgattcatgctgaagagtgccttcagtacatgtcagccttgaaggatcctgccattttccgtttttgtgcaataccccagataatggcaattggaacatgtgctctttgctacaataacgtgcatgtctttagaggagttgtgaagatgagacgtggtctcacggcacgaataattgacgagacaaactcaatgacagatgtctatactgctttctatgagttttcttcatggatagagtcaaagattgatgacagtgatccaacttgtgctcttacaccgaaacctgtggattcaataaaaccaactttgcagtcatctggttttgtaaaag

SEQ ID NO: 93195 - DNA, 534 bp, Zea mays
aggttaagtgtgtctgtgctcgaatttacgtcaataatgatctaccgtccggtctccgagtcgagggatgcatgcgctctactgactttgtatgagctacgctcccgcgggtgttcctgctgaatccgaccgtgccgtgagcggctcgtcactgttcgggatgttcgctttgaaggaacgcccgaagtggatgaacatcacctcgcttgacgagctcgagacaaaagtggggcacgtcatcgtgatgattctacttgtgaagatgttcgagaagagcaagatggtgacgatagccacggggctggaccttctcagctactcgatctgcatcttcttgtcgtcagcttctctctatatcctgcacaatctttacaagggcgaccatgaggagtgacaagagtgcaatgccgaatttgtagcctattcgagagcaaattgatggtgtggtccaatacctattacttggtttttagacttttttaaacggggtcctcttcataaaattttaaggggaaagttttgattcaactattt

SEQ ID NO: 93196 - DNA, 556 bp, Zea mays
  unsure (1)..(556): unsure at all n locations
gagttacctgttttctgtccatgcagtagatatcattgctctacccgtccggaattcccgggtgctcagcagcagaacagcatccagttgattcagtaaaagtacataacaatgcatctgttgtgctgaccaaaaaaatgtctgatttatctcttgagtggcgatcagatttatcgaaaactgatgtctggtatgccagttttggatcaaacatgtggagaccaagatttctatgttatattcaaggagggaaggctgagggtatgaatataccatgctgcggatcacgtgacacaagctcaccaaaaggaaccgtgtggaagactgtacctcacaggttgcttttcggtagatcgtctaccccttgttggggaactggtggtgtggcttttctcaaccctgagataaactacaatgagaagtcgtatgtcttgcatgtaccaaaataacgttgaagcaggtcaaatgacaatcttggttcaagaagaatcgtttagtgcctggaggattggcaaagaccgaaacactgtgtatncctgactcttctttgaattgg

SEQ ID NO: 93197 - DNA, 548 bp, Zea mays
  unsure (1)..(548): unsure at all n locations
agtaggcggcgtgtgttcactagctgatcggataagcactgacgtaccggtccggaattcccgggtcgacccacgcgtccgcgggccgcgtcgtcgggacctacgggtacatggcgcccgagttcgcgttggacggcgtctgctcggtgaagtcggacgtgttcagcttcggggtcctcctgctggagatcttgagcgggcaacggaacggcgctttgtacctcgaggaacaccagcagtccctcatccaagacgcatggaagctgttggagtgaagaccgcgcggccgagttcatggaccagtcgctggggcggtcctactccaaggacgaggcgtggcggtgctaccacgtcggcctgctctgcgtgcaggacgaccccgacgtccggcctaccatgtccaacgtcctgctcatgctcatcagcgaccacaccaagttacccgagccagccattgccgccttgttcgcgcggctcaggaacatctncttgctggcgccgncactcactaccaaaaccgagtccaccacgtcttcgctgtcgatcaa

SEQ ID NO: 93198 - DNA, 555 bp, Zea mays
  unsure (1)..(555): unsure at all n locations
gagcggaggtttcttgcctgcactgctcgnagtgnactagncgtccggaattcccgggtcgacccacgcgttcgagaggctgcagtggaggcaactgtcgaattcctgaacaaggcggtgaagccagaccttggggccggccccaaactgcgtgtggcaaaggcacgaaaggcatttgacgatatggtagatgccagtggctatgcctatgccgtgatgccatcggccaagggtcttgtgccagagactcaccctcacttcatcggcacctactggtgcgcagtcagcaccgtcttctgtgctgagattgatgagtccgcatatgcctacctctttgcaggccccaatttcaatgactacagctctgtaggctaactattcctcttcaagacggaaatgcccttattcgtcaatccgaacgtgggataattgggaattggcccgcatatcgaatgtggataataaaagaatcttgcctgaactggcttagaggttaattaagacaccaatggctattagaattacaagaagaactttgtaccttaaggcccaccc

SEQ ID NO: 93199 - DNA, 564 bp, Zea mays
  unsure (1)..(564): unsure at all n locations
ngagaatatgagtctgtaagggggggagaggagatatggtgaatcctctccggaattcccgggctagggtttttgattttagccgccgccgctgctcatctcacatccctcgagaagacgcctgctcctcgccgatcgatgcgatggccgtcttctccgacctccacaccgccgacggcctcaagtccctcgaggctcacctcgccggcaaaacctatgtgtctggtgactccattactaaggatgacattaaggtcttcgccgcggtgccgtcgaagcctggcgctgagtttcctaatgccgcccgctggtacgagaccgtctctgcggctgtagcctcaagattccctggtaaggctgttggtgtaaatctgcctgcgggatcagctcctgcggcagctgctcctgcggatgaagctgangatgatgatgaccttgatctttttggtgatgaaactgangaggacaagaaggcagcttatgagcgtgccggcggtttcaagggcctcttctaaaaagaagaaagtgggaaatccttcgncctatggatgtcaaaccatggga

SEQ ID NO: 93200 - DNA, 544 bp, Zea mays
aggatgacggtgttctgtcatagaaaagaatagtagtgctgctacccgtccggaattcccgggtcgacccacgcgtccgcaccttccgcgaggtcgtcgtgccggcgcaggctaccttcggtgagttgaagaggatccttgttcagactactggcttggagcctgagaggcagaggctcttcttccgtgggaaggagaagagtgacagagagttcctccacgcggcaggtgttaaggatggcgcgaagttgcttctgcttgagaagcctgcccctgccaacatagagcagaaggttgagcctgtgattatggatgagagcgtgatgaaggcatgtgaggctgttgctcgtgttagagctgaaggttgataggctgtctgctaaggtgtgtgacttggagaagaatgtgcttgcagggagaaaagttgatgataaagaatttgtccgcttgacggactggctatgatacaactgctggaacctgatgggcttcaaacctgaggggaaaccagggcccaaaggaaggcttaagtctggccaattca

SEQ ID NO: 93201 - DNA, 545 bp, Zea mays
  unsure (1)..(545): unsure at all n locations
ngtggagggctcncgtcatagcataagcaggtaatagcactgcctgtaccggtccggaattcccgggtcgacccacgcgtccgctgatggtggatccactggccgccggttttctccagctggagagccattcgtgggcgtaggacgagagagaggatcggcggcggcggcgtgtgggagatggcgcgcgagaggcgggagatacggcggatagagagcgcggcggcgcggcaggtgaccttctccaagcgccggcgcgggctgttcaagaaggcggaggagctcgccgtgctgtgcgacgccgacgtcgcgctcgtcgtgttctccggcaccggcaggctctcgcagttcgcgagcttcagtgtgaatgacnatcgtgacaagtacagtacacatttctaagaatctgggggaaatcaccatcgcaggcttctattggtttggatggagaagcgagccaataccagggcttgaacgaacaacttggttgagaaacttatggacttaaacagatgaaaggttgagacctttgaggattgaatgga

SEQ ID NO: 93202 - DNA, 546 bp, Zea mays
  unsure (1)..(546): unsure at all n locations
gggtagagggcgtctgtacctagctcaganaggtattgcactgctctaccggtccggaattcccgggtcgacccacgcgtccgcccacgcgtccggcctcctcgtctcctcggtctcccctccctgtcttccagagacgcagagcagggcgctcttcggtcggaggagaagcgcgaccacgaccatgggctttatctcgttcgtcggccgggttctcttcgcctccctcttcctcctctcggcctaccaagagttcattgaatttggaaatgacggtggacctgcagcgaagaccttgaagccaaagttcaatttgttcgtcaagctagtgtccaagaatactggactggggctgccgcatatggatataaaaactgtcattgcagctaccatgtttcttaaaggctttggtggtcttctgttcatagtcagcagctcatttggagcattcctcctgctcatttacttggcgtttataacccctatggtgtatgacttctacaaccatgaaatggagtcaacactgtttgtcgatcttttttcagg

SEQ ID NO: 93203 - DNA, 543 bp, Zea mays
  unsure (1)..(543): unsure at all n locations
tgagaggcatcaatcatgaataagcacgtantgctactgctctaccggtccggaattcccgggtcgacccacgcgtccgcaaaagcagaggggaaagtgccgtcggctctgactcttgggcacttggctgacgacccgtgctctctctgcaactgcaactgcaacgcaccaagaaactgccggcgatcgatcggggaaggagataaacatggtgcacgggaagctggaggtcctcctcgtctccgccaagggactcgaggacaccgatttcctcaataacatggaccccttcgtgatccttacctgccgcacccaagagcagaaaagcagcgtcgcaaatggagcangaagcgagcccgagtggaacgagaccttcgtcttcaccgtctccgacgacaccccgcagctccacctcaagatcatggacagcgacctcaccaacgacgatttcgtcggcgaagcaaccatccccctggaggccgtgtttcaagaaggcagccttcccccgcggttcacccggtcgtcaggaggagaagtactgcn

SEQ ID NO: 93204 - DNA, 562 bp, Zea mays
  unsure (1)..(562): unsure at all n locations
gtgaaatggtgtgatgctgcactgctngttggngcatactcgtccggaattcccgggtcgacccacgcgtccggngacacagagttgcaatggttggtgatggaataaacgatgccccgtctttagcagccgcggatgttggaatagccatgcgaactcattcaaaagagaacgctgcctctgatgcagcttcagttgttctactaggcaacagactttctcaggtggtagatgcgctatccctgtcgaaggcaacgatggcaaaagttcaccaaaatttggcctgggcagtggcatataacatagtagccattccaattgccgctggagtgctgctgccacaatatgatttcgccatgacaccatctcttttcagggggttgatgggccttagcttaatctttggtggcaacaaatctttgcttctgcaactgcattggtcggtttaaaacacaggaaaaccggaagggtgaacttgagttaagaatttaactggatttggttggtttaagtttgacccaaccgaggacaatgggatttggaatattgaaggtcttatacc

SEQ ID NO: 93205 - DNA, 562 bp, Zea mays
gagttaatggtgtgtcaccgaaaggatagtagtctacacccgtccggaattcccgggtcgacccacgcgtccgcacacacagacaagtggtttccaaagccaagtgtgtgtactagcaaccagctagctcgggcggcagcaggcagccatcatgtcggaggagaagcaccaccacttcttcaaccaccacaagaaggacgaggagcagcccgccggcgagtacgggtactccgagaccgaggtggtcaccgccaccggcgagggcgagtacgagaggtacaagaaggaggagaaggagcacaagcacaagcagcacctcggcgaggccggcgccatcgccgtcggcgccttcgcactctacgagaagcacgaagcgaagaaggaccccgagcacgcgcacaggcacaagatcacggaagaggtcgctgccgcggcggacgtcggcgccggcggctacgtattccacgagcaccacgagaagaagaaggaccacaaagacgcccaggaggcccacggcgagaagaagcccaccaacctttttgctgaacgtagaaccggccgg

SEQ ID NO: 93206 - DNA, 552 bp, Zea mays
  unsure (1)..(552): unsure at all n locations
tagaaagctttgtcctagcatgggaagagcgtgcatccggccgaattcccggtcgacccacgcgtccgagaaagttgtggatgagaaccttgagaagctgaagaaggtgctagaggtgtacgaggcacgcctgagcaagtgcaagtaccttgctggagacttcctcagcctcgccgacctgaaccatgtgtctgtcactctctgcctgttcgctaccatggctccgatgaagctgtacggngcggtgatgtcgtggaacgtgacgaggtgcgcaacggcgctggaggaggctggctccgactacgagatcgtgcccatcaacttcggcaccggcgagcacaagagccccgagcacctcgtncgcaacccgtttggtcaggttccagctctgcangatggtgactngtacctcttcgaatcacgagcaatctgcaagtacgcttggtcgaaaaacaagccagaactggttagggaaggaaaccttgaggaggccgccatggtggatggttggatcgaggtggaggcttaccagtacaaccgtggacttgattc

SEQ ID NO: 93207 - DNA, 549 bp, Zea mays
  unsure (1)..(549): unsure at all n locations
gaggataatgtgtctagttatagaatggagatagtaattcgtctatccggtccggaattcccgggtcgacccacgcgtccggcggaatcgaagtcttggtgcttatgaatgcttagagaatgcttagagaatgcttggtgtactcctccatgcgcctaggggttccttttatagccccaaggcagctaggagccgttgagtgcattccaggaaggcaattcttgccttctgtcgcctggcgcaccggacagtccggtgcaccatcggacactgtccggtgcggatttctttccttatttggcgaagccgaccgttggcgctttggagccgttggcgcaccggacagtccggtgcccccttccgaccgttggctcggccacgtgtctcgcgcggatcgtgcggccgaccgttggctcaccggacagtccggtgcacaccggacagtccggtgaattatagtcgtacggcggtaattacttcccgagagcagcaagttcgcctgagccagcctggtgcccacggatctgccgggcaccancgggaanntcg

SEQ ID NO: 93208 - DNA, 545 bp, Zea mays
  unsure (1)..(545): unsure at all n locations
nagggagctgctcnagtcacagaacagatagtagtgctctaccgcgtccggaattcccgggtcgacccacgcgtccgactatgtctgcgtgtcttacttaattgattgccttaagcccttacaaacttgttatttttcgaagtattactatgtgatcctaaagttattagtgggttgtcctcagcaatttaggtgccgtttggttcaaattttggtaacgtaatgggtaactcataacattaaatcatgtttgtttaagtttaactgtaatcgataccacactacaaatggatagtcttattcaaatttgttactgccggtattcgagtgtgaatcgttaccattaccatttacgttacatttcgtgaaccaaacggcaccttacttttttatagactatgtctccattgttttcattcactttcactgacacataagttccttatcacttatcagctggcagtacttctgtcttctcgccatctatgtcagtctcacctttattgggtatataagttagagtatcggttcaaatcctacctatt

SEQ ID NO: 93209 - DNA, 559 bp, Zea mays
  unsure (1)..(559): unsure at all n locations
gagtaagcgtctgatgccgaaccgctcgntncagcatacccgtccggaattcccgggtcgctctcgaagcaaaacgcgcaccacgccgtcgccggccggccacttcgcacgtacgtaggacgcgcacgcaccggtgcatggatggggctcctgaaccagctgtgggacgacacggtggccgggccgtgcccggactccggcctcggcaagctccgcaagtacgcctccttctccccctcgtcgtcgtcgtcggcggcggtggcggcggctgcggcggcgggctccgcgccgacttcgggcgccgtgacgcggagcttgaccatgctgcggcggccggcggcgcttgccgtcgtcacgttgccccgcagcgagtccagctcccggccggtcgtcccgtcgaccggaagcggcgctccggatatcgcccttggcgcaattgcagtgaccacgcccaagggaaaaggctggaccaaaaaacttgcccggaaaacccagattggccgctgcggcgggaacaacgcccccgggacgccagagagccccaccgtgtttctattgc

SEQ ID NO: 93210 - DNA, 564 bp, Zea mays
gaggtaatggtgtgttagtgaggagaggaggatatggttacaccgctccggaattcccgggtcgacccacgcgtccgcggtgagcccctgactgtccagaggccaggaacacagactaggagtttctgctatgttgccgatatggttgatggtcttattaagctgatgaatggaaacaagactggaccgattaacttggggaacccaggtgaattcaccatgctggaacttgctgagaatgtgaaggagttgatcaacccagatgtgacagtgacaatgaccgagaacactcctgatgacccccgtcagaggaagccggatatcacaaaggcgaaggaagttctgggatgggagcccaagatcgtcctgcgggacggcttggtgctcatggaggatgatttccgggagcgcctgaccgtgcccaagaaaaccaaggcctgaattgccctgaagttggggaagaatattcacacgggggagcatactcataatcgggctcgtcattatttggggcacaattcattacagaaattgtagtttcataaacctaatatttctttgtgg

SEQ ID NO: 93211 - DNA, 559 bp, Zea mays
  unsure (1)..(559): unsure at all n locations
gagttgatggtcntgtcacagcatggaagaggacgctggctacccgtccggaattcccgggtcgacccacgcgtccgcactggagaaatatggtttggtgcagatgtaatggacacagttgctgtttggacgaaaagggtgtgtaacattattgaaggcaagattccatctggtcaagacaacatcaaaagtgaagtcaatgaaaatttattctccaactaccctgttcttgatgttggaactggaaatggtcttcttttgcaagcattggctaagcaagggtttacagacttaactggaacagattacagtaaaggagctgttgaacttgcaagaaacctagctgctcgtgatggcttctcttcaataaactttttggttgatgatgtacttgagacaaaattagataagaaattcanaattattacagacaaagggacatttgatgccatcggattgcattcacaatgtcgtgcaaaaagaatggtntattgggaatctgatcaaacctgggtgaaccttgtggcaatgtgccaatactttttccataagctttaaa

SEQ ID NO: 93212 - DNA, 440 bp, Zea mays
tgtaggctctgtatgatagaagtatgtacccgccgaattccggtcgacccacgcgtcgcaccagagaaaagggcaagccaaaaggcataccgcgcgacacatggcagctgctcaagccgggcaccctgatgcagcggcagatcggggcggcgccctttgctcgtgcgtccgccgtcgcgaactcgctgcaggcgttcggcgtcacccggcccgcaggatcaggctcctgcagactgcagcaggcgtgacccggaagctcgcggttgcgctgcactggcgctctcgttggcgcagcgcgaggacgccaaagctgcctacacagatcaagcaaacgtacatggagtgaaggacggcacggcgaccagtgccgacatcacggcgcgtgagtcgtcccgtcaaggcgcagtacagatgagaactggcctggagcgacgtcctaa

SEQ ID NO: 93213 - DNA, 554 bp, Zea mays
  unsure (1)..(554): unsure at all n locations
gagaagagaggggtannagtccctagctcaagaaaggtaattgtatacncttccggaattcccgggtcgacccacgcgtccggatgaacaatcctgaactcatacgcagtataataatgaacaatcctcaaatgcgcgagctcattgacgcgcaatccggatcttgctcatgtcctcaatgatccaagcattatgcgccagacttttgaagcagttcggaatcctgaactcatgagggagatgatgcggaacacagacagagccatgagcaacatcgagtcttctccagaaggattcaacatgctccgtcgcatgtatgaaactgtccaagagccttttctgaatgcaacaacaatgggtagcgagggtgatcgaaattcgaatccattctctgctcttctaggaaatcaggggtctaaccaagcaagagactcagctgcaaatggaacaactagagcttcagaccccacatcagggtctccagctccaaatactaatccacttccgaatccttgggctcaaatgctggctctggccaaggagcacaanggtcc

SEQ ID NO: 93214 - DNA, 541 bp, Zea mays
  unsure (1)..(541): unsure at all n locations
tgggcgagcgtttgttgcgtacccgcacgcgtagnactgacgtaccggtccggaattcccgggtcgacccacgcgtccgatcccgcacccctgactgtcagccgcgatccgctcttttttgcgtgcagcggcggagcagtgtagatggcgtcggaggccaaggacgtgggcatcctcgccatggacatctacttcccgcccaactgcgtgctccaggaagagttggaaacacatgatggcgtgagcaaagggaagtataccattgggcttgggcaggaaagtatggcattttgcactgaagttgaggatgttatttcgatgagcttgacagtggtgaagtcccttctgaaaaactataacattgacccaaagtgcattggacgtttggaagtgggaattgaaacaatattgtaccagaccaggtttttaaaaacttgcttgatccagatttttgaggaatttggcattactgattttgaaggattggctccttggatgctttttttgttggaccacctgaattgcttaattgggttacctg

SEQ ID NO: 93215 - DNA, 555 bp, Zea mays
cagtggatggttgtgcctttactgtgtactgacttgcgctgaattcccggtcgacccacgcgtgcggtgcggtctccttcgaccgatgccttcgtgccctacatcttcggctgtgacgccggcgaggccgagaccgacaatcggatccggcgacaaggcgagagggaagagattgggctcacgttcaccaagctggtcaggctggtgctcgccaagaaggggatgcggatcctgatggtgggactcgacgccgacggagagactaccatcctctacaagctgaagctcggcgagatcgtcaccatcatcttgaccatcggattcaatgttgaaactgtggagtacaagaacattatcttcactgtctgggatgtctgcggccaggactagatcaggccactgtggaagcattactttcagaacacccaaagtgtcatctttgttgaggacagctatgatagggaccgggttgtttgaacaggggttgagctttaacgaaatgcttaatgacgattgagattcgtgaatgccgggttgcaatgggggtcgctaaca

SEQ ID NO: 93216 - DNA, 563 bp, Zea mays
  unsure (1)..(563): unsure at all n locations
gaggaatatgctgtattccacgtataatcgaactatgctgacacncttccggaattcccgggtcgacccacgcgtccgcgatgaatgcatcaaggactgtgataaggctgtggagaggggaagagaacttcgtgctgagttcaagatgatctcaagggcactgacaagaaaaggaacagctctagtcaagcttgctaagacctctaaggattttgatattgccatcgagacctaccagaaggctctaactgagcatcggaacccagacactcttaaaaagttgaatgaggctgagagagcgaaaaaagagttggagcaacaagagtactatgatccaaaattagcagatgaggagagagagaaaggcaacgagttcttcaaggagcaaaaatacccagaagcaattaaacactacacggaagctctcaagagaaacccaaaggatcctaaggtttacagcaatagggctgcctgctacaccaagttatgagccatgccttaaggtcttaaagatgcctaaaaatgtcttggactataacccacctttacttaagggtacacaa

SEQ ID NO: 93217 - DNA, 568 bp, Zea mays
  unsure (1)..(568): unsure at all n locations
tgagtaacagatgncgactcagcagtggggggaggatgggtacaactctctggaattcccgggtcgacccacgcgtccgccagctgctgcggagtgcggagatgtcgtcgcagctgatcgaggagcaccggtcgggcgcggaggtgcacgtcgggcacgagctgtgcgagcgcaagtcgcgcgagttcatggtggagctgggcctccccgacgggctcctcccgctgcccagcctggacgaggtgggctacaaccggtcgacggggttcgtgtggctgcggcaggccgncggcctgacccacaccttcgggtccatcggcaagcaagtgtggtacgacagggaggtgacggcgttcgtggagccggggcggatgcacggnctngccggggtgaaaagcaaggagcttctcatctgggtcaccatcttcgagatcgtccttaagcccttcggcaccaaaatcggtgtccggaacccccgcgggcttgggccggcctttcctgggaacggctttcaactcgagcccgagggggaccacaaaggccaggaagccgncgncgccgnccncaa

SEQ ID NO: 93218 - DNA, 548 bp, Zea mays
  unsure (1)..(548): unsure at all n locations
gaggagtgcgtgtctgatnccatcgcgatctcactggcaatctgctccggaattcccgggtcgacccacgcgtccggtgccactcccatccaccacaaggcttggcttggtgggaagaagacaaacgccggcacgcgcgacgcggacacgatggcgatctgcagcgcgcacactaccacctccctgcgctccccatgcacaaccgtctcgaacgcaggtctgaggcagaagcaagtcatcttcgtcaccagcaacaggaggagcggcggcggcaggaggcacggaggggcaaggagcttccaggtctcgtgctccgtcgacaagccggtggtgattggcctggcggcagactcagggtgcggcaagagcaccttcatgcgccggctcaacaacggttttcggggcgccgcggagcccgccaaaggcgggaacccggacttcaacacgctcatcagtgacaccacgacagggatatgccttgacgactaacatttcctggacaggaacgggatgaatgagaaaagtgtgaacgccctctaccctaaggc

SEQ ID NO: 93219 - DNA, 548 bp, Zea mays
  unsure (1)..(548): unsure at all n locations
tgggaaagctgtgtctgctcatagtattagatagtattgctgcaccggtccggaattcccgggtcgacccacgcgtccgggatcatcacagtccgggaatgtgctcggtcacagggctttcctgacagctatgaatttgcgggcaacatccagaacaagcaccggcagattggcaatgccgtgcccccgcctcttgcctatgcacttgggaggaagctgaaggaagccgttgacaagcgtcaggaagccagcgcaggcgtgcctgcaccatgagaagttttccttccatcaaaccatgacccatgaagctaagcgctgaggtcgtccttgaggaccagttaattttggttttatcagtcttaatgcactcctgaatgtatatgttagagaagtgtcgattgctgattggttaccctgattcaggtaacggttatatctaaaaacttgaggaaatctagtgtactctagttgtcatgaaaaanaaaaaaaaaaaaaagggcgggcggtctagaggatccaagcttacgtacgcgtgcatgcgacgtcat

SEQ ID NO: 93220 - DNA, 562 bp, Zea mays
  unsure (1)..(562): unsure at all n locations
agaaagctcgtctgcctttcccacgctctgnctgactcacgcctgaatttccgggcacaacacgaaagggagcatgcccttaggtccttcaagagcggagcaactcccatccttgtggcgactgatgttgcggctcgtggtcttgacataccacatgttgcccatgtgattaattttgacctccctaatgatatagatgactatgttcatcggattggaaggactggacgtgctgggaaatctggtcttgcgactgcattcttcaacgagagcaacactacgcttgcaaggccgttgagtgatctcatgaaagaggccaaccaggaggttcctaagtggcttgagggatacgctgcccgatcagcctacggaagtggaggtggtagaaaccgcagacaaggtagcagtgccagatttggtggccgtgatttccggcgagataagggcagtggtggaagatatagtggtggtttctaccgaggaagtggtggtggtggatattggggattcatagataccggggtgcctattgtgggcgttgcaaatgctgtttctgctattt

SEQ ID NO: 93221 - DNA, 575 bp, Zea mays
  unsure (1)..(575): unsure at all n locations
gatgggagaagagggagntncnnagtagagtgngatgaggcggtgtctgattcagctacgattgtactactaaccgcnccggaattcccgggaaaaccgttccctcccgatggcaaccgccgccaccgccatggtggtacccgagcagccacgccgccggaagccggccccggggcgcggaggagtggccctccctgcgggtctctcggaggaggaggccagggtgcgggccatcgccgagattgtctcggcgatgggggagctctcgcggcgcggggaggacgtggacctcaacgcgctcaagtccgccgcgtgccggagatacggtctggcgcgagcgcccaagctggtggagatgatcgctgccgtgcccgaagccggaccggccgcgctgctgccgcggttgcgcgctaagcccgtgcgcacggcatcgggtatcgccgtcctcggcgtcatggttgagccgcaccgttggagccacataggttacaacgggaacaatttggggctactgcccgagcggtcccaattccgatttccaggtccaggacgcggttcctacacgggataccaag

SEQ ID NO: 93222 - DNA, 575 bp, Zea mays
  unsure (1)..(575): unsure at all n locations
gatgggtaattggatggnnttagntgtggngatgggggggcttttgttcgattcaagatgtcgtagnactgacgtaccggtccggaattcccgggcacacagcggcggcgatgtcgtcggcctcctccttcggcgccgccgccaacgccggtgaaggaagcggtgctgcggaggagggcgtggagatcacttacgtgagctatggcggggagcagcatctgccgctggtgatgtcgctggtggacgaggagctcagcgagccctattccatcttcacctaccgctacttcgtctacctctggccgcagctcaccttcctggcgttcgatgccagggatggcaagtgcgtggggacagtcgtgtgcaagatgggggatcatatgggtgcattcaggggctacatcggcatgctcgtcgtcctcaagccctaccgagggaggggaatagcagctgaggctagtaactagatcaattcgggcaatggatggaatctggcttggaagaggtgacacttggagcgagagtttcttaataagggtgccgcttgctctggaatggccagtttggggtgaaac

SEQ ID NO: 93223 - DNA, 553 bp, Zea mays
  unsure (1)..(553): unsure at all n locations
agagaggggtctattccctgcnttagtctcactaagtactgacgtaccggtccggaattcccgggtcgacccacgcgtccggccaaacacatctttgtggaagagcttggtgctgatgaaagctcactgttgaattgtgtcccgaaagaggactttggaggtggtcatccggatcctaaccttacctatgcaaaagagttggttgaacgcatgggtcttggaaagtcatcctcaaatgttgagcctcctgaatttggtgctgcagctgatggagatgctgaccgcaacatgattcttggtaaaagattctttgtgacaccgtcggactctgttgccattatcgtaaccaatggctgtcaatcaattccttactttggcttctggccttgaagtgagtngccagggagcattgccaccatctggttgcccttgatgttgttgcaaaagaatttgaaccttaagttcttttgaggtgcctactggattggaggtttttttggaaatttaattggatgcctgaattggcctcaaatctggggttgaataaaggttt

SEQ ID NO: 93224 - DNA, 554 bp, Zea mays
  unsure (1)..(554): unsure at all n locations
ggaaagtgtcntgttgccttcatccgtccacatcgcattgntcgaccggttcggaattcccgggcttttgcttgttgttagttatattatggtgtaactcagtgttggttaccttcggcgtccgaaggtcctgggaaacgtgatttaatagtgtggctgcagtacaatgtgtaaacaggtatcctcgaactaaagtcggcattacagtggaccggaataatacgaaggttgactcagagccgaaggtgcgagcaggaaagcttctgcgcgacagcaaagagtggaaccgacttatagatgaaaaggctattcagacctcaatagactactatagagntattatcaaatgtaaagggcatgaatgtaattttgtaaggctgtgtcccggtgcaataaataggtgaacagtttcccttactgttcaacctgccttgccattcctttttggggtacgccttgactgcaatttcctttgagataaaggacacctggtgtttaaaagatatttgggtaatgccaaaaaaaaaaaaatgggccggcccttttaaggtccc

SEQ ID NO: 93225 - DNA, 541 bp, Zea mays
  unsure (1)..(541): unsure at all n locations
tgggagggcctgatgtcatgagctcagcctcactaagtactgacgtaccggtccggaattcccgggtcgacccacgcgtccgcccagattaggaagatgaagggtttgaagcagaagaaggctcacctgatggagattcaggtcaatggtggtaccattgctgacaaggtggactatggctacaaattctttgagaaagaggtccctgttgatgctgtcttccagaaggatgagatgattgacatcattggtgtgaccaaggggaaaggttatgagggtgtggtcactcgttggggtgtcacccggcttccccgcaagacccacaggggtctccgcaaagttgcttggatcggtgcatggcatccggctagggtctcctatacggttgcccgtgctggtcaaaatgggtaccaccaccgtactgagatgaacaagaaggtttacaagatcgggcaggctggacaagagactcacgatgcctncacagaatttgacagaactgagagggacattactcccatgggtggccttccccattttc

SEQ ID NO: 93226 - DNA, 582 bp, Zea mays
  unsure (1)..(582): unsure at all n locations
gatgggagtagagggggntgtgnatnatatgtnagtagggagggcgtgtgttacgagtaacgacttattatgccatgacgtaccggtccggaattcccgggtcgaccgcacgcgtccgggtaagcagcagcaggaaccctagcaccgccgcatccgcagccatgggtatcgacctcggggccggtgggaggaacaagaagaccaagcgcacagcgccgaagtccgacgatgtttatctcaagctccttgtcaagctctaccgtttcttggtcaggaggaccaagagcaacttcaatgctgtcattctcaagaggctcttcatgagcaaaaccaatcgcccaccaatctccatgcgccgacttgtcaagttcatggaaggaaaggagaagaacatggctgtgattgttggcacagtcacagatgacaggaggatccaagaggttccagcaatgaaggttactgccctgatggtcaccgagactgcaagggccaggattggcaatgctgggggggagtgcctcacatttggacagcgtgggtcttcgagctcaaatttggtggggaccacagtccttgttaggt

SEQ ID NO: 93227 - DNA, 556 bp, Zea mays
  unsure (1)..(556): unsure at all n locations
gagaaagctgtgtctagctaagaaagttatctcactgctctaccggtccggaattcccgggtcgaccgcacgcgtccggtcgtctcgtcgggtgcccttgctgctgctgtgcctgggcgtgctggtgtcctgctccttcgcggcgggcagcttggaccaggagctggacatcacgtggggcgacgggcggggcaaggtccttgacaacgggcggctgctgacgctgtcgctggaccgcacgtccggctccgggttccagtcccggcacgagtacctgttcggcaagatcgacatgcagctgcggctggtgccgggcaactccgccggcaccgtcaccgcctactacctgtcgtcgcagggcggcgcgcacgacgagatcgacttcgagttcctgggcaacgtgtccggcgagccctacacgctgcacaccaacgtgttcaccgcggggcagggggcaacggagcagcagttccgnctntggttcgacccaccgccgatttcacacctaactcattctttggaacctcaacacgtatctttatgggggaccaatgcc

SEQ ID NO: 93228 - DNA, 573 bp, Zea mays
  unsure (1)..(573): unsure at all n locations
gattgttaataggatnatannatnagattnntagcggaggtgtctgatttcagatactactgcacgtatgtaccgctccggaattcccgggtcgaccgacgcgtccgcggacgcgtgggtcggcctcagcgctctacctcaacatctcgggagtgacggacttctgcgcacagcatgtggcagccccagctacatagctcctgaggttctgcataacagaggctatgacggctccttgtcagatctctggtcttgtggggtcatcctctacgtgatgcttgttggctgccttcccttcgacgacaggaacctcgtcgttctttatcagaagattttcaagggagactgccagatccccaagtggctttcgcctgccgcgcaggaccttcttgagaggatcctgcaaccgaatgcgatggaaaaggatcaacgtcgcggggatcaaggagcccgagtggttcaataaggactacgggcctgcttgtccgcacgatgatgacgaatacgttcttcctaatccagttccctctttgaaggagccaatcgaagaggctcgcccggggaaggagaact

SEQ ID NO: 93229 - DNA, 557 bp, Zea mays
  unsure (1)..(557): unsure at all n locations
tggaagggccttatgaactgagnccaaagcactccgcactgacgtaccggtccggaattcccgggcgaaggttgtgaacgccttgaagaaggaaggggtcagctttgggtccttcgacatcttatctgacgaggaagttagggaaggattgaagacgtgctccaactggcccaccttcttatagctctactacaaatcggaacttattgggggatgtgatatcgttcttggtattgatatattcgtatagctgaagtcgaccctgttagattatgcacctaactagcatgcttgcttctctgtcttgtatatcatattgtctgcattgtatcactcttatgtgattttcattgctttattgttattagatctatatgtgttcttgtcatgtagtgtcacatttctagattttgtatcacatttgcttaattttgtaatcaaactcttgtttaagtcatgttttttgacttgatggttatttttattatgtcaattgtantttttgtattttattgttgatttttttatttttttntttaattttttcattttataat

SEQ ID NO: 93230 - DNA, 557 bp, Zea mays
  unsure (1)..(557): unsure at all n locations
gagaatatggtgtgtgtatgatgggggggtgacggattgctctaccggtccggaattcccgggtcgacgcacgcgtccgcgatctgcagaagctaccggtaaggttcgtcatggacagggccgggctggtcggcgcggacgggccgacccactgcggggcgttcgacgtcgcgtacatggcctgcctgcccaacatggtcgtcatggccccgtccgacgaggccgagctctgccacatggtcgccaccgccgcggcaatcgacgaccgcccgtcctgcttccgctacccgagaggcaacggcgttggcgtcccgttgccgnccaactacaaaggcactcccctcgaggtcgggcaaagcaggatcctgctggagggcgacncggtggcgcgtgctgggtacgggtnggggaggcagggctgcctgtacgccgggtccttggtgcgaacgcacggccttaagggaaccggcgccgacccgaggtcttgaagccctttgaccctgccctgataggaaccctggcaaaatccccaggtgcttatacccgggaggagggtt

SEQ ID NO: 93231 - DNA, 567 bp, Zea mays
  unsure (1)..(567): unsure at all n locations
ttgtgaaattgggtatgtntgtgatgnttgtggtgttcagtttagttacgtatgttatcgcaaccgcgccggaanncccgggtcgacccacgcgnccggngctcaacgangcgcacaagaccaaggacaacgcagagaagannggcaagaggcaggncaggancaggccgncagccaagggcagcagcaagagccggacgggcaagcagcgccanggcnacagaggagagagcgaggacgnngangaccaccgancgggcaagaaggagggcgaacccaacgggaggcngaacaagagcggcgncagcagcccagaggaagagaaaggcgggaaagacagcgagggaaggacggcaaggcagggagcggggaggcggaaggggggcagggnccggacagcggggcaggcaagggggaccacgaggagggccgccggaagagcggcagaggcagggggccagggggagagaaggagagaagcagagaaagagaggggaaggagcggccgggaaggaggaaagagggagaccagaggaccgagggaagggacgaagagaaaggagggcg

SEQ ID NO: 93232 - DNA, 668 bp, Zea mays
  unsure (1)..(668): unsure at all n locations
agtagaaggtctagttgnccttacntgttcgncatcagcactgnctgtactcggtctctggaattccgcgggtcgaccgcaacgtcgtccgtagaagagtgtcagccctcgctngttgcctttcctcactcaagtagccgatnggtggatctactcttgaggtacgtgcgtaccggtggtcgcaatgtgacggcgcagaagggcggtctaagaacctagtccttacctcaaggtagcttacttactcggtgcactggcgctccaaagtgccggctgtgtaagaagccgctgtgtgtagcggtctgtactcagtgactactcgtcgacctggttggtcactcactgtaccgagaggactatgcacactgcactcacaagccctcgccaagcttctcgcagccgtgcggcgcgcaacctcttcattgcccaactgcgcactgcgctagccgctcgcagcactctgatgcatgccgtgcatgctttccgcaccggctggactctgatgggcataggtgcatccccgtcagcatggtgcgcaaaccttaggcattgtttctgccaaactatggcctcctcatattcccattttcggcgtttttgggctcaattctctttagacaataaaaggacccctgttaacttaattcacgcctcttttaagaactttt

SEQ ID NO: 93233 - DNA, 574 bp, Zea mays
  unsure (1)..(574): unsure at all n locations
gtgtgataagagtntntnnnnatnnnantnnnagagagggtgtgngactttagtcatgatggcantacgaaccgctccggaattcccgggtcgacccacgcgtccgcgccggcgttgagatgttggtttatcaggatctcctatctggcgacgagctcctgtcggatgcattcacctacaaggagctcgagaacggcgtcctgtgggaggtcgagggaaagtgggtcacccaaggtcctgttgatgtggacattggtgccaatccatccgccgagggtggtgaggacgaaagcgttgatgacacagctgtgaaggtggttgatattgttgacacattccgtctacaggagcaacctccttttgacaagaaatcatttgtgtcttacatcaaaaaatacatcaagaatctcactgctgtgttggagccagagaaagcggatgagttcaaaaagggtgtccaggggtgccaccaagtttctccttaacaagcttaaggaaccttcaatttttggttggtgagtcccatgaagggatgatgcccctgggggaatccgcctattacaaggatggggcc

SEQ ID NO: 93234 - DNA, 578 bp, Zea mays
  unsure (1)..(578): unsure at all n locations
natgataaatatttatnanatnatnagnagnnaatgagcggcctcatctttagctatagactgtgatcgcactgccgtaccggtccggaattcccgggtcgacccacgcgtccgcgccaacatggccatcaccggcgccacggccatggacgcgcccttcttccgctcgctcggggtctccgacaagatctggaacaacgggcccatcagcttccagctgcagtggttccagcaggtcacctccgccgtgtgcggccaggactgcaagagctacctggccaactcgctgttcgtgttcggcgagttcgggggcaacgactacaacgccatgctgttcggcaactacaacgcggaccaggccagcacgtacacgccgcagatcgtgagcgccatcgcggccggcgtggagaagctgctggccatgggcgccacggacgtggtggtgccgggggtgcttcccatcggctggcttcccatctacttaaccggctacggcacctccaacagcgccgactacgacgcggctcgctggcctaagaagttcaacgacctttccaccaaccacaacggccaagttg

SEQ ID NO: 93235 - DNA, 542 bp, Zea mays
  unsure (1)..(542): unsure at all n locations
gtgagggggtcntagcctcgcattctgtcnactgcgcaacagcaccggaattcccgggccagttttggagtggccagctagggttaaaattgcggctggttcggctcgtggaatagcctatcttcacgaagattgtcaacgcataataatccacagggatataaagtcctccaatatcttgctggataataactttgaagcactggttgctgattttggtcttgcaaggttagctatggatgcttgcactcatgtaaccacacgagtgatgggaactttcgggtaccttgctccagagtacgcgtcaagcggcaagttgactgagagatctgatgtattctcattcagtgtacgcctcttggagcttattactggtagaaagcctgtatacgcatcgaagccattgggtgacgagagccttgttgaatgggcttggccattgcatacacaggcactttagaccggcaacgctcgggaacttgtggacgcccggctttaacatgaacttccacataattgaaatgttccgtattaaccaaaag

SEQ ID NO: 93236 - DNA, 576 bp, Zea mays
  unsure (1)..(576): unsure at all n locations
gatgggagaagagcnntntnnnnagacnnagnnntagaggagggcttantgtttcgattccagtctctcatagcactgacgtaccggtccggaattcccgggtcgacccacgcgtccgcccgtatacggaaaccgacaagagactcactgccttccatcctgaaatcgaggagctcatggacagcgacgtcgagaactccgagcacaagttcgtgctgaaggacaagaagaagccgatcatcttctcgatggcgcgtctcgaccgcgtgaagaacatgacaggcctggtggagatgtacggcaagaacgcgcgcctgagggagctggcgaacctcgtgatcgtcgccggtgaccacggcaaggagtccaaggacagggaggagcatgctgagttcaagaagatgtacagcctcatcgacgagtacaagttgaagggccatatccggtggatctcggcgcagatgaaccgggtccgcaaacgggagctgtaccgctacatttgtgataccaagggcgcattccggcagcctgcgttctacgaagcgttcggcctgactgtgatcgagtccctgacgt

SEQ ID NO: 93237 - DNA, 586 bp, Zea mays
  unsure (1)..(586): unsure at all n locations
natgtaattatatttcnncnntnnatnagacgnnagaggagcgggtnnatnttctgagtaccactcttcttagnactgcacgtaccggtccggaattcccgggtcgacccacgcgtccgtgtttgtcctttcttccatgttcacagcatctttaataataatatacctctgcagatatggtgtttctggtttccctacattgaagttcttccctaagggaaacaaagccggtgaagattatgatggtggccgggacttggatgactttgtcaagttcattaatgagaagtgtggcaccagccgggatccaaagggccacctgacttcagaggctaggcttgtgccaagcttgaatcctcttgtgaaggagtttctcaatgctgttgattacatgcggaaggaaatcctctctaaaatagaagaggatgtggctaagctcaacggttctgcaacccaccatggaaagatatatgtgacaactggcaagaaaatcatggataagggctctaactacactaagaaggggactgaaaggcgttaactggattcctgaaaaattgtgtgtacctggttcaagtaaagatta

SEQ ID NO: 93238 - DNA, 572 bp, Zea mays
  unsure (1)..(572): unsure at all n locations
naggtagaatattnntntntnatcnnttgngtgaggggggctgtgttatgagttagctctcatcgcatgcacgtaccggtccggaattcccgggtcgacccacgcgtccgatgacagtgtggcacgtttcttggaatcacgtggaatgttggaggaagccctcgagatagcgactgacactaattacagatttgacctggctgtgcagcttggtcgacttgaaatagcgaaggtgattgctactgaggtgcaaagtgaatccaagtggaagcaattaggggagttagctatgtcaaatggaaagcttgaaatggcagaggagtgtcttctacatgcaatggacctcagtggtttgttgcttttgtattcttcccttggggatgccgaaggcattaacaaattggcatctgtagccaaagaacaaggaaagaacaatgtttctttcctttgtttcttcatgctaggaaagctgtgaaaggggcttcaattgctaatagaaagcaatcgtaattccggaagcagcaattgatagccagaatttaatctttctaaccaagtgccctgagattgtt

SEQ ID NO: 93239 - DNA, 561 bp, Zea mays
  unsure (1)..(561): unsure at all n locations
agttaaagtggagatnnnagttnannaggaggggggtcagattagtcattacgcantactaaccgcnccggaattcccgggtcgacccacgcgtccgggggttgggaagacttccttgatgaaccaatatgtgaacaagaagttcagcaatcagtacaaggctaggatcggcgcggatttcctcaccaaggaggtgcagttcgtggacaggctcttcactctgcaaatatgggacactgctggccaggaaaggtttcagagtctcggcgttgcattctaccggggagcagattgttgtgtcctagtctatgatgttaattctatgaaatcatttgacaacctgaacaactggcgagaagagtttgtaattcaggctagcccatcagatcctgataatttcccttttgttctggtgggtaacaaagttgatgtagatggtgggaacagccgcgtggtatctgagaaagaagccaaggcatggtgtgctttcaaagggaacatcccggtctttggaacgtctggtaaggaccgaaccaacagtgaaaaacgcctttccagggt

SEQ ID NO: 93240 - DNA, 577 bp, Zea mays
  unsure (1)..(577): unsure at all n locations
tagggataagaggctncnntnatnagagtnncagagggcttnnatttctagtcaagatctctatgaatagctccaccggncttgaatnaccgggccgacccacgcgtccgacaagcgcactctagcaatggcttctgaggttgtccgccctagcgacgccgagctactaaaggcacaagccgacatatggcggctcagcctctcctacctcacgcccctgtcactgaggtgcgccgtggagcttggcatccccacggcgatctaccgccatggcggggctgcctcagccgctgagctggtcacggcgctgtctctcccctccactaagctgccgagcctccgccgcctgctgcggctcctcgccgcgtcgggcgtgttcaacgtcgacaagcatagcacggaagaggagcggtaccgcatcaagccccgggatctaccttctggtggacggcatccctcacgaggaccacatgaaccactgccgtctggtgctcacctgcaccttgacgcgctacatcgaggcggggatagggctggcggaatggttcaagaggggcctggaaaacgttaccggtct

SEQ ID NO: 93241 - DNA, 576 bp, Zea mays
  unsure (1)..(576): unsure at all n locations
atgtgataatgtttcgngnannatgnnnnnggnaagtggcgggcctaatgtcttgagtctagctctcatagcatgccgtaccggtccggaattcccgggtcgacccacgcgtccgaacgccgatcggaggccggagagaccggctcagcctcgctccgccgccgccggcgaccatgtccctggcggctatcttcgtcttcctcatcgtgtccgcgctgcagctgctcgaccgctacctcgacctcgccagaaagagcggaggacttagtgatgagcagatcaaagtgcggcttgaaatcaagcaacttctcaaggaggctgatcagttgtcaacgccgtccacatttgcacaagctgctaaactcaagcgcctggctgctgccaaggagaaggaactggcaaaaatgcaggaacatgaccttaaagggaagcaatccttatacgacaaatacacaaaatttttggtggttactaaggtccatatttatgctgggctcgttctgggcttttggagtactcctgtaactgccagttcacaacatctgctacagcccttccggaaaaatgttttcctgt

SEQ ID NO: 93242 - DNA, 570 bp, Zea mays
  unsure (1)..(570): unsure at all n locations
agagagggtctagatccatgccaaagaactacctgacttagcgcctgaanntnnggnnngggggnggacggacgcgtgcgaattccatggaccgaggaggagcacaggaagttcctggacgggctaaggcagctgggcaagggggactggaggggcatctccaagggcttcgtcaccaccaggacggcgacgcaggtggccagccacgcccagaagtacttcctccggcagaccaaccccgggatgaagaagcgccgggcgagcctcttcgacgtcggtatcgcggactacaaggacaaccaggtgccaggccctcagagcatcgtcactgccaaaccggcgcctacgcaggagataatccacaccgaccgcggcgacgtccccataccaagacgatatagaggcctcggagagattttaggcagtaacatgcaggttaatcaactgactgactactactatttcaacaagaactnccatgttcccgcggggacttcactctccatggcctncggcctggaaacgggctcgaacgtcnacaggcttgggctcaacatctccgtcaaaggg

SEQ ID NO: 93243 - DNA, 567 bp, Zea mays
  unsure (1)..(567): unsure at all n locations
tagagggnntnntcatgaaaatgagatacatcgattgncgncccnnnntnngattcccgggtcgacgcacgcgtccggtcccgcgagatgacccggcgctacatgacggacatgatcacccacgccgacaccgacgtggtgatcgtgggcgccgggtccgcgggcctgtcctgcgcgtacgagctgtccaaggaccccaccgtgagcgtggccatcgtggagcagtccgtgtccccgggcggcggcgcgtggctgggcgggcagctgttctcggccatggtggtgcgcangccggcgcacctgttcctggacgagctgggcgtgggctacgacgaggccgaggactacgtggtggtcaagcacgcggcgctgttcacgtncaccgtgatgaagccgcttcttgcgcggnccaacgtgaagctgntcaacgccggtgcggtggaggacctgatcgtgncgggggggcgccgtcgccgcgttgtcaccaactgtgcgctcgtgttcattaaccacgacacgcaatcgtgcatgtggccccacctgatttgaggccaagtggtggtcaat

SEQ ID NO: 93244 - DNA, 558 bp, Zea mays
  unsure (1)..(558): unsure at all n locations
agagaatgtgtgtctagtcctgccagggggggggggaagtatcgctgcactcggtccggaattcccgggtcgacccacgcgtccgcaacgaggcccagtcccgcggcggccgtggaggcggcggcggcggcgggtacggtggtggccgtggaggcggcggctacggcggtggcgggcgccgtgatggcggcggcggctacggcggtggcggcggctacggtggtggcggcggcggctacggtggtggtggcggcggctacggcggtggcaaccgtggcggcggctacggcaactccgacgggaactggaggaactgagcggtggggcccgcgcggccaagttatcctgttcgctaccgtgttgtttaccctagtccagagtgtttatcttcgttcgtctcgtgtttggtgttgcccatctgtgtttttgattgacggtcgctctgtgtcagttgttagtgctgngttcatcctcgggttcagcagacccatgcatcaaccagcatggactgcggatcgatgggtgctggtacccccgtaaggcttattctaagttaaa

SEQ ID NO: 93245 - DNA, 540 bp, Zea mays
agagcggcttatgctagctccgaaagatatgtatgctctaccggtccggaattcccgggtcgacccacgcgtccgctgtgtgcttcttcttcttgttcctccaagttctggtagctaattaaaggagttgggttgggctgtacagatctccgcgaccacagagcctacctcgccgaccatcctggagcttcagcagtcaccacggcgcagggtgaggaactgaggatgcagatcggcgctgcggcctacatcgagtgcagttccaaaacccagcagaacgtcaagtctgtcttcgatacggccatcaaagtggtccttcagcccccacggaggatggaggcagtgcctgccatgaagaagaacaggcgtggctccggatgctctataatgaaccttgtgtgtggcagcacatgtgctgcttatggagtctactagaacactgaaccggaagggaagtgaaggcgtgattcatggcgagtaatgcgctgtggcaactggcaatgtagattgctatagatgacgatgactggtgcttttgct

SEQ ID NO: 93246 - DNA, 541 bp, Zea mays
  unsure (1)..(541): unsure at all n locations
aggttagctgntattttgaccaatgcacatgatagtatcgctgcaccggtccggaattcccgggtcgacccacgcgtccgaagagcccgcggaaggtgcgcatcaggttccgcgacgtcctggacacgcgcgacctcggctacacgtacgacgccgagtccgacaaggacctgccatggctgcgctgcaagatctcgtcgctggtgccccacggcaaggacagcccgccgaggtcatcgtcggcgaggaaggcggcggcgccggtgttcccgctcgccctgaccaagggccaggtggtggaggtgccggccgtgcctgtgccggccaaggacccggggaaggagcagctgctggtgatcgagggcatcgagtacgacccccaggcgaacaataagttcgacgtcgccatcaacctgcccgcggacaaagcgttgcangtaggcccacagtacaaggagtacgccggaagcttcgncgtcgtgccgggcttncgcgcccggaagacgcngaaaggtgagctcntcctgtgcatcaccggaat

SEQ ID NO: 93247 - DNA, 525 bp, Zea mays
  unsure (1)..(525): unsure at all n locations
aggtaatgctgtgtctgaggcatgcatatgatagctacgctgcaccggccttgaattcccgggcgcgtgcggccactagatttttcctgacgcggtgtctgctcccacttcccctcctctcccccaggtggcggcagcggcggcggggtagcatttgtgctacgagggcttttgcaatggcggcttcggggttcggcggcggcgaggcgttccggctctcggccgcaccaggggccggcttactgaagctgcacaagggcgacatcaccctttggtctgtcgactgcgccaccgacgccatcgttaatgctgctaatgagcgaatgttaagtggcggaggtgttgatggagctatacatcaagctgctggaccagagctagtgcaagcatgccggaaagttccagaggtcaaaccaggagttcgttgtcctactggagaagctaggattactcctgcttttgagcttcctgcctctcggggattcacacttgttgccctatatatgatttggacaagcatnctgg

SEQ ID NO: 93248 - DNA, 552 bp, Zea mays
  unsure (1)..(552): unsure at all n locations
gaggagcaggtgtctagtccatgcataagatagtaggttgacactgctccggaattcccgggtcgacccacgcgtccgcacacacacacacacagacaagtggtttccaaagccaagtgtgtgtactagcaaccagctagctcgggcggcagcaggcagccatcatgtctgatgataagcaccaccacttcttcaaccaccacaagattgacgaggagcagcccgccggctagtacgggtactccgagaccgaggtggtcaccgccaccggcgagggcgagtacgagaggtacaagaaggaggagaaggagcacaagcacaagcagcacctcggcgaggccggcgccatcgccgccggcgccttcgcactctacgagaagcacgatgcgaagaaggaccccgagcacgcgcacaagcacaagatcacggaagaggtcgctgccgcngcngccgtccgcgccggcggctacgtatttcacgagcaccacgaggaagaagaaggaccacaatgacgcccaagaggcccactgccaagaagaggcaccaccacct

SEQ ID NO: 93249 - DNA, 551 bp, Zea mays
  unsure (1)..(551): unsure at all n locations
gagaacgtgtttttcattgatggggaggagatatcattgctgtaccggtccggaattcccgggtcgacccacgcgtccgggcactcttaagccgccagtcaagatttgtgcctcgtatgtggagttgtcttgctggtttgatagagccaggagaaagcctggaagaggcagtgagacgagaaacatgggaggaaactggtatcgaagttgggcaagtcgtttatcacagttctcaaccatggcctgttgggccaaatactatgccgtgtcaactgatggtgggcttctttgcttatgctaaatcattggagataaacgtggacaagcaggagcttgaagatgcccagtggcacaaccgcgaagatgtcaagaaagcgttaacgtttgctgaatacaagatagcccagagaacaagtgctgccaaggtcgatcagatctgcaagggcgctgagaaagggaagagcccctctgccgacttcaaagttggaagcngcgagcctgctccaatgtttgtctcaggacccttacgcattgctcaccaccttatctaa

SEQ ID NO: 93250 - DNA, 589 bp, Zea mays
  unsure (1)..(589): unsure at all n locations
naggagtagtgcgttgtgccctacccatagacaatgacagtatcgcatctactcggtccggaattcccggggtcggacccacgccgtctcgtgctgatagataggaatgggactcttcattagcggcctgccgatctattggggcaccatagggcaaccacgcttaaccgatgatgcggcattactcgttgctctgattattcagcattcgcctctgtcttatttctagtgctctactttgctgcgtatattaccatctttggtaggactgtcggattaaatccagaacctgtataacactcgggaaagtgtgcctaagacctgatgggtacctggaatggtaaaggtcgcgcgaagtggattccagcgcattggacattgctgcaagttctcgactcaatgcaagctctgatgtggaatgtcacgctatattacaacgagccaggatatgagtactatgccnatactccgaatggatagcagatggcctacgactatgatgactgcacactgctgcgttcatgcacctcatatgtgatgcaaacttcagacgccacataggagctactgatattgtggtggccctttt

SEQ ID NO: 93251 - DNA, 523 bp, Zea mays
aggggagcgtgtgtctgagaatagttatggaggaagtgtgcaccgctccggaattcccgggtcgacccacgcgtccgcaggtgctgaatatcaatccaaagatcttggtctactagttgaggatacaacagtggagcagcttggcatagctcggaaagttacaatctcaagttcctcgacgaccattatagcagatgctgctagcaaagacgatatccaggccagaatcgcgcagctgaagagagagctttctcagacggactcgacgtatgactctgagaagttggcagagagaattgcaaagctttctggtggagttgctgtggttaaggttggagcatcgaccgaggcagagctagaggaccgcaagctccgcatagaggacgcgaagaatgcgacttttgcagcaatagaggaaggtattgttccaggaggcggtgcagcgtatgttcatctatcgacattcgtgccggctatcaaggagacgttggatgatcctgaggagcgcctatgagctgatatc

SEQ ID NO: 93252 - DNA, 543 bp, Zea mays
  unsure (1)..(543): unsure at all n locations
nagtagaggtgttgagcctagcttagacgtagagtgacaccgctccggaattcccgggtcgacccacgcgtccgggcgctcgcgcggacggagccatggcggacgacgattacaacgaaatcgacatgggctatggggatgagcctccaaaacctggaatggaggaaggggccgaaaaattttttgataacaacgaaaatgcccctgatgatgtcataggtggagagggtgaaaataaggaacaggaaaagaccaagcgtgagcgcaaaacaccaaaatatatgacgaagtatgaacgtgcgcgcattcttggtacacgagccttgcagataagcatgaatgctccagtcatggttgagcttgaagggaaaactgaccctcttgagattgcgatgaaggagcttaaaacgcgcaaaatacccttcacgatcagacggtacctacccgatggaagttatgaaaactggggagtagacgagctcattgtggaggacttctggaaaccccaaggtggtggaaactgaaaatgccgaactacttgcg

SEQ ID NO: 93253 - DNA, 547 bp, Zea mays
  unsure (1)..(547): unsure at all n locations
naggagttgtgtgtccatgcggagaggagattgtactacctcgtccggaattcccgggtcgacccacgcgtccgcccacgcgtccgcacgcggtggacttctacatctccgatttccagtccgggctgcgagcaggggtgagggcaggatccggcgcgcgcgtgaccccatacgtggacgagtccgtcgctatcgacgtaaacccagacaacaaggacatgtcgcctgagttcctccggtggctccgcggaaggaatctgtcgagcgacgaccggactatgcgcctcaaagaaggatacatcaaggagggcagcaccgtgagcgtgatgggcgtcgttcagaggaacgagaacgtgctgatgatcgttcctccagccgagcccatctccactggctgccagtggggcaagtgtgtcctcccgaccagcctcgagggccttgtcctgagatgcgaggacacgtctggcctggacgtgataccggtctagctagagagggtggttctggcgaatcctctggcgcggaaagggagtagaaaaaaaaagat

SEQ ID NO: 93254 - DNA, 550 bp, Zea mays
  unsure (1)..(550): unsure at all n locations
naggagggcctctgtcatagatggggaggatatagcatcgctctaccggtccggaattcccgggtcgacccacgcgtccgggagctcctgcgatgcccccatctcccctcccctccccatctcgctctcgcggagatcgaagagaagctgaggcctagcgccgcacccgccgccgcatcagccatcagccatggcgctggccgctcgcctcgtctcacgctcccgtcagctacattcggttcaagcagcttttgcgaatggaggtgtcactcaagttcgctcctttgccaaggatgcagctccagctgaccgtcctcctgttagtggggatgatctcctgaagggcatattctttgaggtaaagaagaagtttgagacagctcttggcgtccttaaaaaggaaaagatcactattgatccagacgacccagcggcagtttctcaatatgcccaagtcatgaagactgtaagggaaaaggcggatcttctntctgattctcaaaggattaaatataccattgagaccttcacaggggcatncctgatgcac

SEQ ID NO: 93255 - DNA, 556 bp, Zea mays
  unsure (1)..(556): unsure at all n locations
nagggagggcttttatgcccaccncatgcatgaagtcagcactgacgtactcggtccggaattcccgggctgaccaatagaaattgatttcacacctgccttcagaaggattgatatgattaaagatttggaggctatggcgcaatcgtcaatataccaaaagatctagcaagtgatgaagcgaatcgttacttgatagaagcatgtgctaagtatgatgtgaaatgtccacctccccaaacgacatcacggttgcttgacaagttagttggtcatttcttggaggagacatgtgtgaatccaacatttatcatcaatcatccagagataatgagtccattggcaaagtggcatacgtctcgacctggattgactgagaggtttgagctattcgttaacaaacatgaggtgtgcaatgcatacacagagttaaacgatcctgttgtgcagagacaacggtttgaggagcaactaaaggatcgataatctggtgatgatgaagctatggggctggacgaaacattttgagctagccttgagtttggataccaacaac

SEQ ID NO: 93256 - DNA, 542 bp, Zea mays
  unsure (1)..(542): unsure at all n locations
naggagagtgcttatgtatagcatggggggaaatagtattgctctaccggtccggaattcccgggtcgacccacgcgtccgcagcaaaacgcttggaggccacagagaggactacctgaaaattcagtctcgattgtccgggcttggctttttgaacatttccttcacccgtatccaaaagattctgaaaagctaatgttatcgagacaaactgggttgacaagaagtcagatttcaaactggttcatcaatgcccgtgtccggctgtggaagccaatgatcgaagacatgtacaaagaagagattggtgaagcggagctagactccaactcttcctccgacaacgggcagcgaaacaaggacaaagcaccatcttccgaggaaatgaggacctgcagacnccaacagccaggccttgcaaaacagccagcttgggcaagtccaagccattggtggttgaatgattggctttaatggaatgctaacccgccggtttcacaacgaaggccaacccgatgaccggttcattaaccttattctta

SEQ ID NO: 93257 - DNA, 532 bp, Zea mays
  unsure (1)..(532): unsure at all n locations
agaagtgagagcctgtgtgccctccccaccgataggttcgcatcagctcctgaatttccgggtcgacccacgcgtccggtgcttcttcgtgaaaccttgaaagatgctgacctcgacaaatatcgtgttgttgtcatgggtgaaggacatgaaagatcactcaacactgatgttttgtttggtatactgaagaaggttgttgcacgtagacgggattttaaactaatcgttacatctgcaaccctaaatgctgacaagttctccaagttcttcggaggtgtgcctgtattccatattccgggtcggactttcccagttaacattatgttcagcaaaacaccatgtgaggactatgtggaagctgcagtgaagcaggccatgactatccacataaccagcggccttggtgatatcctaatcttcatgactgggcaggaagaaattgaggctacctgctatgcgcttgctgaacgcatggaacagntaatatcgtcattcaccaagactattcccaagctagagattctgcccc

SEQ ID NO: 93258 - DNA, 526 bp, Zea mays
agtaaggagtgtgtctgagccatgctatacgtcatcgctgcactcggcccggaattcccgggtcgacccacgcgtccgggcagggtgaggctccaatcgattgtgacgcctttaaccgagtttgaccaccctgagaaaggagatgctctgtacgctatggagctggctctggccctggaaaagctggtcaatgaaaagctgcacaacctgcatggtgtggcaacaaggtgcaatgatcctcagctgacagacttcatcgagagtgagttcctcgaggagcaggtggaagccataaacaagatctccaagtatgtcgcccagctgaggagagtgggcaaggggcacggggtgtggcacttcgatcagatgctgcttgaggaagaggcctaaaaagaagaacggacagatgaatgaaggaaacaagtgtgtaatgttgatcaggcggaggaataatgggtcaactgacaactctgggtcggtggatttgtagttggtttgggttttttagttgtagaacggtgttgcc

SEQ ID NO: 93259 - DNA, 532 bp, Zea mays
  unsure (1)..(532): unsure at all n locations
attagagtaagccgtgtgtctgaggcctcnccaccgtccgctcgcatagctcttgaattcccgggtcgacccacgcgtccgggcagggtgaggctccaatcgattgagactcttctaaccgagtatgaccaccctgacaaaggagatgcgctgtacgctattttgctcactctggccctggaaaagctgctcaatgaaaagctgcacaacctacatggtgtggcaacaaggtgcaatgatcctcagctgacagacttcatcgagagtgagttcctcgaagagcaggcggaagccataaacaagatctccaagtatgtcgcccagctgaagagagtgagcaaggcgcacggggagtggcacttcgatcagatgctgcttgaccaagatgcctaaaaagaagaacggacagatgaatgaaggaaacaagtgtgcaatgatgaacaagccgaagaataatgggtcaactcacaactctgggttcgaaaaaaaataatgggatagattttttagtttaaaaccggggtagcccccg

SEQ ID NO: 93260 - DNA, 552 bp, Zea mays
  unsure (1)..(552): unsure at all n locations
gagagagtgtgttgtgtataagaaaggggggagatagtggcaccgctccggaattcccgggtcgacccacgcgtccgaaccaagcagaccccagcagaagaagcgaagtcgtcgccggagcaggaggaagagcgagcagcaagatgtcgtggcaggcgtacgtcgatgaccacctgctgtgcgacatcgaaggccagcacctcagcgccgccgccatcgtcggccacgacggcagcgtctgggcacagtccgagaacttccccgagttaaagcctgaggaggttgctgggatgataaaggactttgatgaacctggaactcttgcaccaactggtctttttgttggaggtacgaagtacatggtgatccaaggtgaacctggagttgtcatccgaggaaagaagggcactggaggcattactatcaagaaaactggcatgtccttgattatcggtatctatgatgagccaatgactccagggcaatgcaatatggtggtggaaaggctcggcgattacctgatcgaacagggcttctaaagttgtcataatn

SEQ ID NO: 93261 - DNA, 546 bp, Zea mays
atgagcacgtgtcttcggccctgcaacgctcgtagagtgcactcgctccggaattcccgggtcgacccacgcgtccgcggacgcgtgggtccccaacaacgtcaagtccagtgtttgtgatatccctacgcgtgaccgttccatggcctccaccttcattggcaactccacgtccatccaggagatgttccggcgagtgagcgagcaactcactgctatgttcaggaggaaggctttcttgcattggttcactggtgagggcatggatgagatggagttcaccgaagctgagagcaacatgaacgatctggtgtccgagtaccactcctaccatgatgccactgctgatgacgaagcggaatacgaggaccatgaggccatccaagacaagttatgctgacttgagccctgccacatttgtacccttggtacctttcatattccaactcgaccattggttgcttgatggattttctcaaagtataccgcatgtattagtaccttcgggcgaaacatactgcatgcttaccagaaatactttttcag

SEQ ID NO: 93262 - DNA, 547 bp, Zea mays
agagagtgctatgtatggatgggggagagatgtaatgcatgtaccggtccggaattcccgggtcgacccacgcgtccgcgagtacccaacgcgctagctagttctattgccgcaccccagatctccaggagggactcgttctttcagctaactacactgcacgcaatggccaccacggcgaccgaggcggcgccggcgcaggagcagcaggccaacggcaacggcgagcagaagacgcggcactccgaggtcggccacaagagcctgctcaagagcgacgacctctaccagtacatcctggacacgagcgtgtacccgcgggagccggagagcatgaaggagctccgcgaggtcaccgccaagcacccatggaacctgatgacgacctccgccgacgaggggcagttcctgaacatgctcatcaagctcatcggcgccaagaagaccatggagatcggcgtctacaccggctactccctcctcgccacggcgctcgcccttccggaggacggcacgatcttggccatggacatcaaccgcgagaact

SEQ ID NO: 93263 - DNA, 549 bp, Zea mays
  unsure (1)..(549): unsure at all n locations
natgagagtgtgtctagttattggatgaggaggagatgtatacccctccggaattcccgggtcgacccacgcgtccgcataactatgtcaaataacataaatggagaggaccaacttgatggcgctgatgaggttaaagaggttaaaaggcgtgggaagacaaaacttattaatgtttggaacattccaagaggccatagggttgtagttaattgtaatgagctgaatcagcctatcggagaagaggcaggagtccttgcaaaattccttggcatggttgctaagaatggctccttgtgtagcttaagcttcaaggattggagactacttataggaaagaaagataggaaccataaacaaatcaataaggaggccattcttaatcaagtaaagaagagatttctttacccttgccggacggaaacatgggtgctgcgaacaatttgagagagatggaggcaacacaagtccaatttgaaatccatttattttgacccacattagagtcaggatgcntataatagtaatgctcctgatggngtatagctt

SEQ ID NO: 93264 - DNA, 551 bp, Zea mays
  unsure (1)..(551): unsure at all n locations
gaggagcggtgtcntgtcatagaaatggatagtaagtctctacccgtccggaattcccgggtgcttcttgactgggtgaaaggactgctgaaggagaaaaaggtggagatgttggtggacccagatctacagaatgcctacgaggagatcgaggtggagaaccttatccaggtggcactcctctgcacgcagggctccccgttggagcgtccaaagatgtcggaggtggtgaggatgctggaaggtgacggcctggcagagcgttgggacgaatggcagaaagtagaggtggtgaggcaggaggctgagtcggcaccgttccgcaatgactggatcgtcgattccacgtacaaccttcgtgccgtgagagctgtccggtccaaggtagtagccactccatgactccgaagaaagaattcaacactgaatggcctagattcagtctaatcgctgcttgtgtatatgaaaggtagcttttggaattgttagcgacagtcaatatgaagggatgttttttatataatctctcgctagcctcagaagttgggggt

SEQ ID NO: 93265 - DNA, 552 bp, Zea mays
  unsure (1)..(552): unsure at all n locations
naggtgggtcctatgttctagtctaagaaagactatagtactgctctaccggtccggaattcccgggtcgacccacgcgtccgcaagaatttgataatgtgaaggatttccgtgctcaattgtgcaaatatgccattgggaaaggatttgcgtaccggttcattaaaaatgaaactactcgtgtcacggtaaaatgtgttgcagagggctgcacatggcgaatgcatgcatccgagtcatctcgtaacaagaaatttgtgatcaagaaaatgacagatgagcatacatgtggaggaggaaatggagaaggtcagcgtcgagcgacaagacaatggctgaccactgttattaaggagaagctgcatgataatccgatgttgaagccaaaggaccttgtcaaggaaatatatgaacaatatggagttacactgacttattcacaggtctggcgaggtaaagaagtagcacagaacgaactgtatcatgctatcanggagacttacagncatttgcccttgtattgtgagaggcttacagaagtcaaccagggaa

SEQ ID NO: 93266 - DNA, 550 bp, Zea mays
  unsure (1)..(550): unsure at all n locations
nagagactggctcnnaatcacgtatcgggggagattattgtattgctgtaccggtccggaattcccgggtcgacccacgcgtccgcagaagattcgacgttccacgggctccggcggcggcaggaacgcctcccgatttcgacggcagagcgagagagcgatggcgctgactaacttcatcgtgacggtggccgtggttggcgcgggggtgcttctcttcaccaccgacatccgcaggtctggcgccctcttccgccgcaacgcgcgccagctccggcagtggctcgaggaggacacggcctccgccgcgtccaagtctgcaaaagaagcagctcaaaagaaactcgactcgacggtccccaaggagaagcaaaaggaagatagccactgattggagctgtttatatgaacggtataacccctatttgaagtcgttcaagttctgttttctacagttgctgcgatacaaacttgtagctctcaagtaaggtgcacggcaggattatgtntcccgtttaacatcngnctctgtggaacagctagctaaatt

SEQ ID NO: 93267 - DNA, 529 bp, Zea mays
  unsure (1)..(529): unsure at all n locations
tagttagggagtgtgtctgagcccatccnaattgtcagcgtagcaccgctccggaattcccgggcccgatccagctacatccgttgaggcccgtgcgtttcttccctgttctcccatcaatcgacctagccttacgccgacgaggggcttcctctaatcgatctggtgtctgttctgtggtattggtctgggtgcactccagggccaggagcagctagccgtcttcgttcgatccgttcgcaccccccaacgcggttcgatttgcaggaaggagcgtgatggccaagacgagctcgttcaagctggagcaccccctcgagaagaggcaatctgaggctaaccgtatcagagagaagtaccctgacagaattccagtgattgttgagaaggctgagaggagtgatattcctgacatttacaagaaaaagtacctcgttcctgcagatcttacagtcgggcagttcgtgtatgttgctaggaagagaatcaagctcattgctgagaatgctatcttcatatttgtgaaaaa

SEQ ID NO: 93268 - DNA, 555 bp, Zea mays
  unsure (1)..(555): unsure at all n locations
nnggggaggaggaggggttttgataggggatgggaggagagttgcaccgctccggaattcccgggtcgacccacgcgtccgcacacacacacagacaagtggtttccaaagccaagtgtgtgtactagcaaccagctagctcgggcggcagcaggcagccatcatgtcggaggagaagcaccaccacttcttcaaccaccacaagaaggacgaggagcagcccgccggcgagtacgggtactccgagaccgaggtggtcaccgccaccggcgagggcgagtacgagaggtacaagaaggaggagaaggagcacaagcacaagcagcacctcggcgaggccggcgccatcgccgccggcgccttcgcactctacgagaagcacgaggcgaagaaggaccccgagcacgcgcacaggcacaagatcacggaagaggtcgctgccgcggcggccgtcggcgccggcggctacgtattccacgagcaccacgaggagaagaaggaccacaaggacgccgangagggcacggcgagaagaagcaccacaactcttcggtt

SEQ ID NO: 93269 - DNA, 548 bp, Zea mays
  unsure (1)..(548): unsure at all n locations
agaggtgtgtgtggcatgccaggaaggggaggctgaacactctccggaattcccgggtcgacccacgcgtccgcccaaggtcccttttttttctcgatctggaagcgccgcagtagcagccatggacgtgagcggagcaggcgggaaggcgaagaagggcgcggccgggcgcaaggccggcgggccgacgaagaagtcggtgtcgcggtcctccaaggccgggctgcagttccccgtcagccgcgtcgggcggtacctcaaaaagggccggtacgcgcagcgtgtatgcacgggtgcccccgtctacctcgccgtcgtcctggagtacctcgcggccgaggtgctcgagctcgccggcaacgcggcaagggacaacaagaagacgcgcattattccgcgccacgtgcttctcgccattcgcaacgacgaggagctcggcaagctgttggccggcgttaccatagtccacgggggggtccttcccaacattcacactgtgctcncttccaaagaagggggccgaagaggccggncaaggagcccaaata

SEQ ID NO: 93270 - DNA, 532 bp, Zea mays
  unsure (1)..(532): unsure at all n locations
atgtagggagtgtgtctgaggcccagtccctcgtntacgatgcactcggcccggaattcccgggtcgacccacgcgtccgctcccaagccagtaccgagtcctacgagcagtcgcacgcaagtgtcaagagacgaaacggtggacatggctcgcacgcaatctgccgtagcggtcgccgtggtggccgcggtgctgctgctggcagcggcggcgacgacctcggaggccgccatcacctgcgggcaggtgagctccgccatcgcgccctgcctatcctacgcccgcggcacggggtccggcccctccgcgtcctgctgtagcggcgtcaggaacctcaagagcgccgccagcaccgncgccgacaggcgcgccgactgcaactgcctcaagaacgccgccaggggcgtcagcggcctcaacgccggcaactccgtcagcatgcgctgcaagtgcggcgtcagcataccctacaccatcagcaccttcaccgactgctccagggtgaactaaaacctataccacgcgcgacga

SEQ ID NO: 93271 - DNA, 530 bp, Zea mays
  unsure (1)..(530): unsure at all n locations
aggggatggtgggtntntngtatggagacggggggaggaattgtatctactccttgaatttccgggtcgacccacgcgtccgggagcagagctgaaggacaccgataaaaaaacggttgctcgctgccaccaccatgtcctatgatcagatgctctcgccgcttttcggtgccggcgggcgatcggcgtggagagcggcccagcacggcggcggcggcgacgcggtgacgaggcagatactcaagtgcacgaggtggcagctcgaggagaccaccgacttcgtcacctgcccctaccactactactgcgacagctcctacccgggcgactaccccgccgccgtcggcgccctcgtcgccgccttcgccgcctactgctttctctccactctcgcgttcaccgtcctcgacctcgtgcggngcaacggtagcagcgccttctcgtcgtcgtcggccggcgtcaggggcatcaagaggaagtacctgctcccctcgggcccgttcctgctccctctggtgctgctcgcgctc

SEQ ID NO: 93272 - DNA, 544 bp, Zea mays
  unsure (1)..(544): unsure at all n locations
gaggagagggctcnagtctatgcatgagggatatagtatgctctaccggtccggaattcccgggtcgacccacgcgtccgggttcttccttggttgaagatgacaagcttgagcttgcgacctctctccttagaagagcggaggagaagggtgtctcccttatgttgccattcgatctggtcgtcgctgataagtttgctcctgatgctagcagtcagctctccaggttgttcctgcatctgcaattcctgatgcatggatgggtctggacataggtccagattcgatttcggcgttcagttctgccctggaaactactcagacagtcatctggaatggacccatgggagtttttgaatttgacaagtttgcagttggaaccaaggcaattgcaaagaagttagccgagcttagtggcaagggcgtcactacaatagttggtgggggagactccattgcagctgttgaaaagggtggtgtcgccgactctctgagccacatttcaactggggggtgttgcaagtttggagttgcttgaagggaa

SEQ ID NO: 93273 - DNA, 557 bp, Zea mays
agggagtgcagtgtgtctgaggcccatgcccttcgactaggcaggtacctccgcctgaatttccgggtcgacccacgcgtccgggcgatgcggaacgccatcgagggcatgaacggcaaggagctggacggccgcaacatcaccggcaacgaggcccagtcccgcggcggccgtggaggcggcggcggcggcgggtaccgtggtggccgtggaggcggcggctacggcggttgcgggcgccgtgatggcggcggcggctactgcggtggcggcggctacggtggtggctgcggcggctacggtggtggtggcggctgctactgcggtggcaaccgtggcggctgctacggcaactcctacgggaactggaagaactgagcggtggggcccgcgcggccaagttatcctgttcgctaccgtgttgtttaccctagttcagagtggttatcttcgttcgtctcgtgtttgttggtgcccatctgtgttattgattgaaagtcgctctgtgtcagttgttagtgctgtgttcatcctcggctccagcagacccatgctta

SEQ ID NO: 93274 - DNA, 555 bp, Zea mays
  unsure (1)..(555): unsure at all n locations
agagagcgtnttttctgatgccctgcngatcgactgctacatcnactgacgtaccggtccggaattcccgggtcgacccacgcgtccgcatctgtggagctggagtggtgaagggcttccagcagggactttacatgggcaacggtggtggcgccaatgttgtcgcacctggctacaccaagggtgatggccttggcgctgagattgttggcaccttcatcctagtctacaccgtcttctcagccaccgatgccaagaggaatgccagggactcccatgttcctatccttgccccactgccaattgggttcgcggtgttcctggtccaccttgccaccatccccattactggcactggcatcaactcagctaggagccttggcgctgccatcatctacaaccaggatcacgcctgaaacgaccattggatcttttggtccgccccttcattggccgctgttttgcttgcattttacaacaagtgatcattaaaagcattccggtcaagaaccaggcttaagcttgcctggccctgccgagacatgccagttccaa

SEQ ID NO: 93275 - DNA, 558 bp, Zea mays
aaggaggcgaggcctgtgtgtattgaacggggggatgatagtaactgcctctaccggtccggaattcccgggtcgacccacgcgtccgcgagcagcctaaaaaccctagcccccgaatcagatcccaccgcccgccggagcgcggaaccctgcccccggccgccatggacatgagcgatgcggagcggctgttcttcttcgagatggcctgcaacaactccgaggtcgcgtacgagcagaaccccaacgacgccgacaacttgacgcgatggggcggagcgctgctggagctatcgcagctgcgtaacggccccgacagcttcaagctcctccaagatgcggaagccaagctggaggaggcactgcaaattgatcccaacaagtctgatgcactctggtgcttgggaaatgctcagacttctcatggattcttcactccagacactgcaattgcaaatgagttctttgcgaaggcaactgaatgtttccagaaggctgctgatgtggaacctgcaaatgagctgtacaggaagtcattagacttgtcagcgaaggcac

SEQ ID NO: 93276 - DNA, 538 bp, Zea mays
  unsure (1)..(538): unsure at all n locations
aggcatccggtgtctgccgccagcncatcagctcatcatccactnccgttccggtccggaattcccgggtcgacccacgcgtccgtctcttcttcacctcactaacaccagctagcaactctttctctcctgcaataatggccgctcgctcctcctcctcccagccgcagctggtcgcggcggcggcggtcctggcagcggcgctgctgctgctggcggcgggggccgggacggcgtcggcggcggtgagctgcggcgaggtgacgtcgtcggtggcgccgtgcctcgggtacgcgatgggcagcgcggcgtcgccctccgcggcgtgctgcagcggggtgcgctcgctcaacagccgcgcgtcgtcggcggcggaccggcaggccacctgcaactgcctcaagagcatgacgggccggctcggcggcggcgtcagcatggccaacgccgncaacatccccggcaagtgcggcgtctccgtcggcgtgcccatcagccccaccgtcgactgcaccaagatcaactgatcgatggaacc

SEQ ID NO: 93277 - DNA, 535 bp, Zea mays
atgggagactgtgtgtgacgattagcatatagatatcatgcactgctcgtccggtccggaattcccgggtcgacccacgcgtccgcaagaacaagtacaatacacccaaataccgatttgttgtgcgatttaccaacaaggacatgattgcacaaatcgtatctgcaagtatcacgggtgatattattcttgctgctgcatattcccgtgagctgccacgatacggtctagaagttggtctgaccaactatgctgcagcctactgcactggtcttcttttggctcgtcgtgttctcaagatccgtgatttggatcaggagtatgagggcaatgttgaggccactggtgaggacttctctgtcgagccagcggaagagaggaggcctttccgtgccctcttagatgtcggccttattaggactactactggaaaccgtgtctttggtgccctcaagggagctttggatggtggtctagatattcctcacagcgataagaggtttgctggcttcaagaaggatgataagcagctgga

SEQ ID NO: 93278 - DNA, 555 bp, Zea mays
  unsure (1)..(555): unsure at all n locations
gagatgagaggcgtgtgtggtccaccgaattantgaagtatcgtctctaccggtccggaattcccgggtcgacccacgcgtccgaagaaggttggatacaaccctgacaagatccactttgttcccatctctggtttcgaaggtgacaacatgattgagaggtccaccaaccttgactggtacaagggcccaaccctacttgaggctttggacttgatcaatgagccgaagaggccttcagacaagcccctgcgtctccccctacaggatgtgtacaagattggtggtattggaactgttcctgttgggcgtgttgagactggtatcatcaagcctggtatggttgttacctttggtcctagtggccttactactgaggtgaagtctgttgaaatgcaccatgaggctctccaggaggccctttctggtgacaatgttggcttcaatgttaagaatgttgctgtgaaggatctgaagcgtgggtatgtggcctccaactccaaggatgacccttccaaggaggctgctagcttcacgtcccaggtcatcatatta

SEQ ID NO: 93279 - DNA, 546 bp, Zea mays
aggatgccggctctggtatagtatgggagtatactgaaccgccccggaattcccgggtcgacccacgcgtccgctaacatgattctcaccattatatctcaggttggcagtatcaaccatcaattccaacaatacaatattttctagaggatgcgctgatatgcatcactaagctggatcggaagaaactatgcttagtcggtgcaggcaggactgatacaggtgttcatgcatggggtcaggtttaataaacatactgcataactgtatactgaagcttaaattgatatctatcatctggtttgcgtatcctgcactgttaaatgtcaatattatgttttatatgaaatactgggggattacatacaatatttgttggtttcaggtggcacattttactacacccttcagttacagttgcctcagtagtattcattctgcaatgaatggactccttcctcctgagattcgagtcagggaaattagtgcagcacgtcctgaattccatgctcgctcatccacaaagagcaaagtctatcgctacaa

SEQ ID NO: 93280 - DNA, 548 bp, Zea mays
aggagagagcctggtcgtacgaacggcggggagaagtatcgctctcccgattcccgggtcgacccacgcgtccggacttcgccacgaacaaaagcgcatcgatctcgctgtcgtcactcctcgtcacccagccacgaacagaggcaccacccagcatggccctgcaggcggcgctcctcccatccaccctctcatccgtccccaagaagtgcagcctcgccgtcgcggcgaaggacacggcattccttagcgtatcccagaagaaggtgcaggcggcgtcgctgtcggtgagaacgcgggtggcgacgacggcgcctgtggccacgccggggtccagcacggcggccaaggatgggaagaagaccgtgcggcagggcgtggtggtgatcacgggcgcgtcgtcggggttgggcctggcggcggccaaggcgctggcggagaccggcaagtggcacgtggtgatggcctgccgcgacttcctcaaggcggccaaggcggccaagggcgccggcatggcggacggcagctacaccatcatgcacctggac

SEQ ID NO: 93281 - DNA, 549 bp, Zea mays
  unsure (1)..(549): unsure at all n locations
agggatgcggnnntntaanccatcgattatgaaagtatattgcactactccccnnnttnngattcccgggtcgacccacgcgtccgctataacctaccttcagagtgcagctcgcttatttggatcttctatctcttccagtgacctgatcagtgtttcaggggttatccctgaagatgttgtcaagtcactgcttgcagcctgcagatctggtgaatttgacgtggcaaacaaggaagttagcaacattatagcagatggatatccggtctcacagctgatggcacagtttctagatgcgattgttagcgcggatgatattccagatgatcaaaaggcaaggatatgtaaaaagcttggggaaactgataagtgcttggttgatggggcagatgagtatctacagctgctggatgtcgccagcgagactattcgcgctcttttcaacatgnccgcgacgctggtcttctaagagttcataaggaggaatgggcggtacgatcccttgcgaaaacttttcctacctcttagatgccgcacccaaggtaa

SEQ ID NO: 93282 - DNA, 561 bp, Zea mays
  unsure (1)..(561): unsure at all n locations
naggaggtcaaggcctantcgttgtgggcgggggggaagaagggaatgcatgctaccggtccggaattcccgggtcgacccacgcgtccgccgtgctgcacctgcctgccagccgcagctgtcctgcctttgccttcccatagcatagccatggacatttggaagtccaaggtgttgcccaagatcaagctcgtcttcgtcaagagcgccggcaagaaggccgccgccgctgccgagctcgtcaagtccttcgacgagtccaaggaggggatcgatggcgagttccaggagaagaaggctgatctccagcccaaggtcgtcgagatctacgagtctgcccctgcaccactcaaggtcctgatcaaggagaggagcaaggtgtccgggatcaagaagaactccgccgcaatcaccaagttcttcgaggagctggccaagatcgaattccctggagccaagcaagtgagcgacggcatctccaaggccggcccggccctgctgtccggccccatcttcgccacgttcgagaaggtctncacgctgctccctgtcgtcgctgcc

SEQ ID NO: 93283 - DNA, 537 bp, Zea mays
  unsure (1)..(537): unsure at all n locations
gagggagcagtggtntnangtatggcaatggggggtattattgactgctctaccggtccggaattcccgggtcgacccacgcgtccgcagggagctaacgtctggcggttccttcaggcaattagcaggcggtatgacttaacggaatcgctgaagaagctcaagtgccggacgctgatctttgttggagaaaactcacagttccatgcggacgctgtccacatgaccacaaagctggaccggagatactgcgctctagtcgaggttcaggcttgtggttcacttgtcacagaagagcagccccatgcgatggtgatcccgatggaatacttcctcatggggtacgggctctacaggccatcgcagcaggaaagcagcccccggagcacactgagcccgttctgcatatcacccgagcttctgtcaccggagagcatgggagtgaagctgaagcccatcaagacgcgcatctcgcttaacgtttagcatgggtggatctcggatggccatggcttgacaaccacagctcagctcatt

SEQ ID NO: 93284 - DNA, 549 bp, Zea mays
  unsure (1)..(549): unsure at all n locations
naggatgccggttctggcatcgaagggggggagaagatacctcccggaattcccgggtcgacccacgcgtccgcgcggagctggagcgcaagccggagaaggtgttcgtgcgcaccatcaccagccagttccaggccctcgtcggcatctggctggtggagatcctgtccagccactcctacgacgaggtgtacctcggccagcgcgacaccaaggagtggacgtccgacgccaaggcgcaagaggcgttcaagcgcttcggcgcgcgggtgaccgagatcgataaacgcgtcgttaccatgaacgcggaccctggtctcaagaaccgcaacggccctgccgagtgccactacacgctgctataccgcaacatgtgctgcacctagggcgatacctccggaatcaccgccaagggcatttcaaacagcatctccattagagtgctgtctgatctgaagacgtacggtcgtggcactagttgcttgcggcacctcgtttcgttcctacaagagtgcatatcacttgcgcagtaatgtgctggacgacatt

SEQ ID NO: 93285 - DNA, 555 bp, Zea mays
aggagtcgagtgctatctctaggatgtggggggagaaagtatcgctgcaccggtccggaattcccgggtcgacccacgcgtccgaaagaagctgaaccatggggaagagaaagtcagctgctaagccacctcctaagaagcggatggacaagcttgacactgtcttttcctgcccattctgcaaccacgggagtagtgttgagtgccgaattgacatgaagaatctgattggcgaagcatcttgtagaatctgtcaggaaaacttcagcacaactgttaatgcactcactgagcctattgatatatatagtgaatggattgatgagtgtgagcgtgtcaacactgttgaaggcgacgatgatgcgtgagcttgccccatgcgatgaaactgttacctacaatcgtaatgtaatgtgctggtattctcgaatgccatagcccatagtcagccatggcttggaataacgtagtggctgaccgatatgccagtaggcaccttatctagtacttacagaactacaaaaagtttgtactatacatatatggacaaaccta

SEQ ID NO: 93286 - DNA, 520 bp, Zea mays
  unsure (1)..(520): unsure at all n locations
tggagcggccttntgatatgaattccgatagactgactgctctaccggtccggaattcccgggagctcatgttcagtgggaaattgaactacttgggtttgaaatgcccaaggattggactggcttaactttcgaagaaatcatggatgaggcagacaaaataaagaacacgggtaacagactgtttaaagaaggaaagttcgaacttgcaaaggcgaaatatgataaggtgcttagggaatataaccacgtgcatcctcatgatgatgaagaggggaaaatctttgctaattcaagaaattccctacatctaaatgtagctttttgctaccagaagatgggtgaatacagaaaatccattgaaacatgcaataaggtgctggacacaaatcctgtgcacgcgaaagctctttaccgccgaggaatgtcctacatgttactcagggaatttgatgatgcgaggaatgattntgagaagatgatttaccgtgacaagtcatcagaaccggacgctacagct

SEQ ID NO: 93287 - DNA, 537 bp, Zea mays
  unsure (1)..(537): unsure at all n locations
agggatgtgagtgccttntattttgcaatggtggggantattgcactgctctaccggtccggaattcccgggtcgacccacgcgtccgctctctcgtcgcgcaacatcagagcacaagcgaggaacccagtccagtcccgggaatggagtgcgtattgggcgtggttggccgcgacttcgcgctggtggcggccgacacttccgccgtgcagagtattctcgtccacaagaccgacgaggacaaggtgatggtgctcgactcgcaaaagctgatgggcgcttcaggggagcctggtgatcgggtgcaatttacggagttcatacagaagaacctncacctgtaccagttccggaacaccatcccgctctcaaccgccgccgccgccaacttcacacgcggcgaactcgccacagcccttcgcaagaatccatatatggtcaatattattcttggtggttatgataaggatgttggtgcttccctctactacatcgactacattgcaaccttgcacaagattgacaagggtgcttttg

SEQ ID NO: 93288 - DNA, 522 bp, Zea mays
  unsure (1)..(522): unsure at all n locations
naggaggagagccgtgtgttgggtaggggggaataaggactgctctaccggtccggaattcccgggtcgacccacgcgtccgcgtcggcgtggcgtcgatgggtgtgatgcggccggagctcgtcatgaagtccatcgtgcccgtggtcatggctggtgtgctcggtatctacgggctcatcatcgccgtcatcatcagcacggggatcaaccccaaggccaagccctactacctctttgatggctacgcccacctttcgtccgggcttgcctgtggtctcgctgggcttgcagctggcatggccatcggcattgtcggtgatgctggagtcagggcaaatgcgcaacagccaaagcttttcgttggcatgatcctcatcctcattttcgcagaagcgcttgctctctatggtctaattgttggaattatcctttcgtctcgcgctggtcaatcccgggcggattaagtgcaccaccattctgtgattaccgnacccgttattatgctattctgagaggatn

SEQ ID NO: 93289 - DNA, 555 bp, Zea mays
  unsure (1)..(555): unsure at all n locations
agagttccagcctagtggcctgcncctcgacaaagagtagccgctccgaatttccgggctcgcattttccttgcaaccgattgcctatccccctcccaaccaaagaccgattgcgcccaaggccgataagaagccggcggcgaagaagccggtggaggaggagcccgcggccgagaagacgaccgtcgggaagaagcccaaggcggagaagcgggtccccgctggcaagtccgccggcaaggagggcggcgagggcaagcgtggcaagaagaagggcaagaagagcgtggagacgtacaagatctacatcttcaaagtgctgaagcaggtgcacccggacatcggcatctcctccaaggccatgtccatcatgaactccttcatcaacgacatcttcgagaagctggccggcgaagccgncaagctcgcgcgctacaacaagaagcccaccatcaccttccgcgagatccagaccttcgtgcgcctcgtgcttcccggcgagcttgccaaacacgccgtctcttgaggcaccaatgccgttaccaagtttacttt

SEQ ID NO: 93290 - DNA, 553 bp, Zea mays
  unsure (1)..(553): unsure at all n locations
gagctttagagcctnacgtgctgagatacgcagantanagtacttacgcaccggtccggaattcccgggtcgacccacgcgtccgtgcgtcttgaaaggggagagagagagagagaagagagagagaagagagagagagagagaggagtgggagacccgcgagaggctgccgtgtagggaccgtagactcagcgactgcgaaggagggataaggggatggccgggatcggaccgatcaggcaggactgggagccggtcgttgtgcggaagaaggcacccaccgacgccgccaagaaggatgagaaggccgtcaacgccgcgcgccgcgccggtgcggagatcgataccatgaagaagtacaacgctggtacgaacaaggcggcatccagcggtacatccctcaacaccaagcgcctcgacgacgacaccgaaaacctcgcccatgagcgagttccaagtgatctgaagaagattctcatgcaagcaaggctcgataagaagctgacacaggcacaacttgctcagatgataaatgagaagccacaggtgattc

SEQ ID NO: 93291 - DNA, 553 bp, Zea mays
  unsure (1)..(553): unsure at all n locations
agttnttaagggttntgtcatgatcgccgggagatagtattgctcaccggtccggaattcccgggctgtccatgtatccttcgtcgtcatcaaggctgacaccccgtggcattacagcgaggagggcgtcgatcttgtggttgaggatcctaatggcgctcaagtccgtgattcccgagataagactagtgacaagtttgagttcatagttcagaagagaggcgtccatcgcttctgcttcacgaacaaatccccatatcacgaaacgatagacttcgatgttcatgttggccatttttcatatttcgagcagcatgccaaagatgagcattttgcaccactttttgagcaaataggcaagttggatgaggcactttataatattcagttcgaacagcactggctagaggcccagactgaccgtcaagcaatattgaacgagaacatgagcaggagggcagtccataaggcgctcttcgagtcagcggcgctgatcgccgncagcgtcatccaagtctacctcctgcgccggctcttcgagcgcaagctgggg

SEQ ID NO: 93292 - DNA, 531 bp, Zea mays
agggagtagagcctgtgtgctcgtatgggggggattactgcactgctctaccggtccggaattcccggggttcggggagctctaccgcgccatcatggacggcgccgcggaggagggggaggaggagggaggtggcgaggaggaggaggacatgcgggaggcgttccgcgtgttcgacgccaacggcgacgggtacatcaccgcggacgagctgggcgcggtgctgtcgtcgctggggctgcggcagggccgcaccgcggaggagtgccggcgcatgatcggccgcgtggaccgcgacggcgacggcagggtcgacttccgcgagttccgccagatgatgcgcgccggcgggctcgccacgctcgggtgatgggtgaccgtcgccggccggtgctgcctgcctcctgctcctgcacctgggcctggccatggagcgccgggcaccttatttctgcatctgcgtgcttgatttcgtgtgctagaaagaacctgtagatagatattgcttgctcggagcgaggggggagctca

SEQ ID NO: 93293 - DNA, 530 bp, Zea mays
  unsure (1)..(530): unsure at all n locations
nagggaggagaggcttagtcgtctgatactcgcacantattgtatcgctctaccggtccggaattcccgggtcgacccacgcgtccgcagagctgagagccgaggagggaaacgaagaagcggccatggcgatgaagcggccggcgcgcagcgacccacacctgccacccgaggaggcggcacgggtggaggccgaggttcggagctacttcgacagcgtcgcgccgaggcgcccggccaagccgccgcgcagcgacccgtcggtggacaccttcgcggaacccgccgccgtcgacgccggggaccacgacttgccggagctccgcaagctgcgcgacctcgaggcgaagccccagaagctggtgttggacggagggggaggggacgtggatggcggggaggattacgtggagacgcgatactacgatggcctcataggcatcgacaagcagcatcacacgactgggacaggctttatcaaagtggagagatccaatggcagcagcttcagtgtgatgactaacggctac

SEQ ID NO: 93294 - DNA, 552 bp, Zea mays
atggaggcagtgtgtctgagtattgacatggggggatgaatgatactctcccggaattcccgggtcgacccacgcgtccggttagatacaaggcacttcttgatgaatgggaaacaaatccaagtgtcaagtgtattcttgtggaaagcagctcttctcgtgccttctcagcagggatggatattaagggggttgccgtggaaatacaaaaagacaaaaaaacaccacttgtgcaaaaggtattcacagtagagtactctttaatttgtaagatacatgagtatgcaaaaccttatatatgcttgatggatggagtgacaatgggatttggaattgggctatcagggcatggccgctaccgcattattacagagagaacactcctagccatgcctgaaaatggtattggcctgttcccagatgttggctttgcttacattggtgcaaaagcaccaggaaggggtgcagttggaagttaccttgggattactggaaaaaggatatcatcacctgctgatgctatgttcataggccttggtactcactatgtcc

SEQ ID NO: 93295 - DNA, 556 bp, Zea mays
aggaggccggctttgctatggcagagggggggagaactgtaaccctcccggaattcccgggtcgacccacgcgtccggatgttgataccaaggagacacctctacccatggaggatgccttaaatgactacaaaaggctagattacatccagcgccacatcgctactcttaaggaatcaatagacttgggatcaaatgtgcaaggctacttcgcttggtctctgctggacaactttgaatggttcgccggcttcaccgaacgttatggcattgtctacgtcgaccgcaacaataactgcacgcgctacatgaaggagtctgccaagtggttgaaacagttcaacgccgcgaagaagcccagcaagaagattcttacgccagcttagaaaatcggggcctcatgatgtgggtgcagcccataaaaaactggtgtgtggtttggaaaccgaaattttctgtttttttccgccacgagaaggtctggaggcatactctccagcaccgtggctaataacgcattgttccaattcagtctggccttgtcatgcatgcaata

SEQ ID NO: 93296 - DNA, 567 bp, Zea mays
gggagggaggatgcgcggtgtctgcgacgcgagaggggacggggaaggaaatgctgcaccggtccggaattcccgggtcgacccacgcgtccgtgatggacaagtaatcaccattggtgcagagagattcaggtgccctgaggtcctcttccagccgtcgatgattggtatggaggctgctggaatccatgagacaacatacaattcaatcatgaagtgtgacgtggatatcaggaaggacctctatggtaacattgtgctcagtggtggttcgactatgttcccgggtatcgctgatcgtatgagcaaggagatcacttcccttgcaccaagcagcatgaagatcaaggtcgttgcaccgcctgagaggaagtacagtgtctggataggagggtcgatcctagcctcgctcagcactttccaacagatgtggatatcgaaggaggagtacgacgagtctggcccggcaattgttcaccggaagtgcttctagggtttcacaagttcctcgtcgttacctagtctcaaattatgtcccctccatttctcgagatatgtgtggcagat

SEQ ID NO: 93297 - DNA, 532 bp, Zea mays
  unsure (1)..(532): unsure at all n locations
aggtagtagagccttaatgtatgcggatggggggagagatagcactgctctaccggtccggaattcccgggtcgacccacgcgtccgcaagaacgttcaggtggtggacagcagcaaccagctcagcgcccccaagggcgtaggcaccttcaccgagcagtccaactgctacgacgtgcagaacggtaacaatggggactggggcacctacttctactacggcggccctggcaagaactcgaactgcccgtgactggtgcttctaatgtgtagtgtgaagtgccgtcaccactagcaaaatgtaacccaagcgttcaggttcgcttatacagcgtcaatctgcatctccttgttcagtcctagctaggtagtgtgtaacatgtgcatgtgctctctagactctaatgttttcttcttcttttcattgtattttcttcttgtgccatgtaaagtttctgaagagaaggagcatggcttgaggctgcngtgggtggttgggctggtcggtggtgacctctactgatttttgcgt

SEQ ID NO: 93298 - DNA, 531 bp, Zea mays
  unsure (1)..(531): unsure at all n locations
aggtaagtacgggccttntcgcatganttacgcatangtcagcactgctcgtaccggtccggaattcccgggtcgacccacgcgtccggagttataccaagacttgttgaggttgtcaagggatctactaaagagaaggtggtcagagttgctgtgttgtctttctgtaatttgctggcaaagggtgcatttgctgcccagatgatcgatcttggattgccgcaaatagtacaaaacttgaaagctcaagcatggactgatgaggatctgttagatgctttgaatcaactagaggtgggactcaaagaaaacctcaagaagttgagttcctttgataagtacaaacagcaagttcttcttggtcatcttgactggtctccaatgcacaaagatccaagtttctggcgtgagaacattaacaattttgaagagaatgatttccagattctacgagttctcatgacaatcattgacacatcaagtgacaccaccgctcttgccgtggcctgctacgacctctcacagttcctn

SEQ ID NO: 93299 - DNA, 560 bp, Zea mays
  unsure (1)..(560): unsure at all n locations
agaagacggctcnggtaagtgagatgcgaggagaatgtgaccccctccggaattcccgggcaaatctaggcttccaagcgagcgaaagccttcctccgccagccgatctaccaacatcctctccgccgattggaggcgcctgcgaagatgccgcagcggcactcaaagaacaacagcgacctcggcttcttcacgtacgaggagaagcggaagctcgagtacatcacagcagcgggagcgcctggggaaggactccatcaagcccttcgacgcctgctgcctctgcctcaagccgctcatcgacccgctctgctgccccaagggccataccttctgcaaggagtgcatccttgagtgcctcctcgcccagaagaaggacatcaagcgtaagctagcagctcacgaggcccagaagaagcaagagaaggaagaggaggaggaaaagctaattctgcagaaggctaaggagttggatgcctttgatcagcagaatcatggggctgttccccagtaccatgatcgcagtggttcccaaggcaagaatgggtttcatggagcga

SEQ ID NO: 93300 - DNA, 529 bp, Zea mays
  unsure (1)..(529): unsure at all n locations
aggaagtagaggcctntgtcatgaatctcgcaaagtatctgcactgctctaccggtccggaattcccgggtcgacccacgcgtccgattaaaattgacgaagagaatgagtgcaccgacagaaactatgttttcacctgctcgctcacgatgttgtctgtcttctggaacgtcagccggtccgctgccgaagcacaacggcgtcagctggaggggcaattcctgcatgaaggatggcctctccgacagcaccgtccgccggagcttggtcggaggcttctacgatgctggggacgccatcaagttcaactaccccatggcctggtccatgaccatgctcagctggagtgtgatcgagtacaaggcgaagtatgaggccatcggtgagctcgaccatatcaaggagctgatcaagtggngaacagactacatcctcanaaccttcaattcatctgctgacacgatagacaggattgtcgctcaagtgggtgtaggtgacacctcttaaggcagcagtcagcctaatgacc

SEQ ID NO: 93301 - DNA, 554 bp, Zea mays
  unsure (1)..(554): unsure at all n locations
nagggaggcagtgtgtctgagctacgcatcatagantagnagtaatcgcgccggaattcccggggtcgcttccagccgccgccgcgtccgcctcgccaagcgcagcagccgccgcagcacatcgctctcttgatctcagccgtggcggaggtggagcagcaacaggacacgccgaagctcttcaaccgctggaccttcgatgatgtccaggtgaacgacatctcgctgaacgactacctcgctgtgaacgcgacgaagcacgcgatgtacctgccgcacaccgcggggcgctactccaagaagcggttccgcaaggcgcagtgcccgatcgttgagcgccttacaaactgcctcatgatgcacgggcgcaacaacggcaagaaagtcatggctgtccgcatcatcaagcataccctggagatcattcacctggtcaccgatgccaaccccatccaagtcgtcgtcgacgcgatcatcaacagtggaccccgtgaggatgccacccgtattggttccgcatgtgttgtgaagaagcaagccgaggatatcttaac

SEQ ID NO: 93302 - DNA, 554 bp, Zea mays
  unsure (1)..(554): unsure at all n locations
naggtgcgggttgacctgcaccgtgggcgaagtatcctcaccggccggaattcccgggtcgacccacgcgttcgccagccccttaaccctcgttcctctagccgtctcgcgcagccacagcctccattgctcctgcgacggcggtgcggctagctcaaccatggcggactccaaggccacctcggcggtcaccctccgcactcgcaagttcatgaccaaccgcctgctggcccgcaaacaatttgtgcttgaggttatccaccccggccgcgccaacgtctccaaggcggagttgaaggagaggcttgccaagatgtacgaggtgaaggaccccaacaccatcttcgtcttcaagttccgcacccacttcggtggaggcaagtccactggcttcggcctcatctacgataacctcgagtctgccaagaagttcgagcccaaataccgcctcatcaggaatggtcttgctactaaggttgagaagtcccgcaagcaaatgaaagagcggaagaacagggccaagaagatccgtggtgtcaagaagaccaatgctt

SEQ ID NO: 93303 - DNA, 551 bp, Zea mays
agtgtaaggccgtgtggtcagttttcgcaagatagtatcgtctgcaccggtccggaattcccgggtcgacccacgcgtccgcaagaatctatcgtcggaggggccgcaatcgaaagctgaaatatacttggaaatctgcagggcatccaactgttagaaaaagaactgatgacgggaagcaatgttacacacaatatagcccatgtgcgtgccagcaaatgtgtggtaaagattgcccctgtgcggacaagggaacttgctgtgagaagtactgtgggtgttcgaagagctgcaaaaacaagtttagaggctgtcattgtgcaaaaagccaatgcagaagcagacagtgcccctgttttgcagccagtcgtgaatgtgatccagatgtttgtaggaattgctgggtgagctgtggagatggttcactaggtgagccacttgcaagaagtgatggttatcagtgtggaaatatgaaactccttttgaaacaacaagcaaggattttggtaggaaaatcttatgttgcaagttggggtgcattcattaagaat

SEQ ID NO: 93304 - DNA, 532 bp, Zea mays
  unsure (1)..(532): unsure at all n locations
aggggagagggctgtgcaatcagcattgcggggaatattgtattgctccaccggtccggaattcccgggtcgacccacgcgtccgctcgcggtagccggcggcggcggaggaggaggaaagcaggcaggccatggcgtcgtcgtcgtcgaccccggcggccgtccgcgagatgcagaaggatctcgaggtccaggccaacgccctcagcaagatccagaaagacatcgccaagaaccaccaggtccgcaagcagtacaccatccaggtcggcgagaacgagctcgtcctcaaggagctggagctgctcagcgatggggccaacgtgtacaagctcatcggaccggtgctggtcaagcaggacctcgcggaggccaaggccaacgtcaagaagcgcatcgagtacatctccgcagagctgaagcggatggatcgggcgctcaaagacttggaggaaaagcaaaacagcaagaaggaatcgatattcaagttgcagcagaggatgcaggctgtacaagctaaagcttagacaan

SEQ ID NO: 93305 - DNA, 563 bp, Zea mays
tagagcgttgtctgagcactgcatgggggggaggacggtaccagcgcctgaattcccgggtcgacccacgcgtccgatttgggcaggaatgcacacagtccgttactttgatggcaaaacatatgaatgggtcggactgagccgtcaacgaagcatcatgggtaaggtgaaaagatcgctgagccagttcacccctgctcaatgggacaaggatcagtggcatcctttcatggggccactgctgttcatccaagttctgttcctctgtgacgtcttcatgaccgtggagcttaacacattcttccttaagttttgcctgcggatccctccaaggaatcccttagtcgagtacagattgatcctttggcggctgattgccatcccaaccatccgcgagtacaactactacttacaagacagcaaaccggcgaagaacgttggagccttctgatggctctctctggctatatgcatagtggagctgcttatctgcatgaagtttgggcatgggctatttcatgacccaatgcctacctggctgatcatcctttggagctgggatg

SEQ ID NO: 93306 - DNA, 566 bp, Zea mays
  unsure (1)..(566): unsure at all n locations
tagaacgtgntnnnatgatgagtccagtcgacgtcgcactgacgtaccggtcttgaattcccgggcatgaggcaatgggcatcgatgtgatgctgtacaacatgcttatgttcatgtgtgcagacattggctatgttgacgaggctgatgagatcttcagagacatgaaggcgtccatgggtgcccattccaagcctgatagctggagctactcatcaatggtgacgctgtactcattcactgccaacgtactgagtgcagagggcatactgaatgaaatggtggatgcccgctttaagccaaacatctttggcctgacctnactcatccgatgctatggcaaggtgggccgcactgacaattgggccaaataatccggaatgctccagaaccttggatcaatcccgataacagattctgggcttgctttttaaagatggcatcaaaacaaccaacgaagaaactggccaagggaacacactcctttggaagaaccaccttcacattggtgccgtaaaggaacttccttttgaccggagactcttcttaaattttatagaaaccac

SEQ ID NO: 93307 - DNA, 539 bp, Zea mays
  unsure (1)..(539): unsure at all n locations
naggtcagtggagaggcctgtgtcgggttcaagtctccgcacacgatcgcactgacccgcccggtccggaattcccggggcacagtcatccacactaacgaacgaactcttgctccgatcacgagctagctgaggtcgacgatggcggctgggctgaacagcaggaagacgccgcaggcggtggtggccgtgctggtggcggcggcgctgctggcttcgtccgcttcggcggcgatcacctgcgggcaggtggggtcgtcgctggcgccgtgcatcccgtacgcgacggggagggccagcgcgctccccgcgtcgtgctgcagcggcgtcaagagcctcaacagcgcggcgcggaccagcgcggaccgccaggcggcgtgccgctgcctcaagagcctcgccaacagcgtcaagagcgtcaacatgggcaccgtcgccaccatccccggcaagtgcggcgtctccgtcggattccccatcagcatgtccaccgactgcaacaagatcagctaagttacgacgaccaagctaataagcct

SEQ ID NO: 93308 - DNA, 505 bp, Zea mays
  unsure (1)..(505): unsure at all n locations
ggccagttgtgccttactcccctacgaacatctgcttgtacgcactgctggagcagcatccgtcaggatatggttaaatgagcacgggctatttgaacttgcacatggcgacaagaccgccgatgattctataccgatggtgctgaaaataccgcgcatgtttgatccatgtcgtggatacagcatcattggctttggtgatatccttcttcctggtcttttagctgctttctgagctaaaatacgatttttctgcaaagaatggcttacggactgcttacagccagtgggcaaaggtggcctatggctctggactactaatcacatatgtagccctgaacctaatggatgggcatggacaacgtgcccttttgtacatcgtgcccttcactcttggcacattgatcgcgctaggatggaagacaggatagctgtagaacctgaggtctatcggagagtctcagaaaatgtgcacgcatatgcatatgccgctgatgccgccacn

SEQ ID NO: 93309 - DNA, 515 bp, Zea mays
  unsure (1)..(515): unsure at all n locations
agggtccgtgcgcatgatcgtatcgcatngccgtaccggttcggaattcccgggtgcgacccaagccgtccgctagggtttttgattttagccgcctccgttgcaatttacatacctcgagaaaacgcctgctcctcgccgatcgatacgatggccgtcttctccgacctccacaccgccgacggcctcaagtccctcgaggctcacctcgccggcaaaacctatgtgtctggtgactccattactaaggatgacattaaggtcttcgccgcggtgccgtcgaagcctggcgctgagtttcctaatgccgcccgctggtacgagaccgtctctgcggctgtagcctcaagattccctggtaaggctgttggtgtaaatctgcctgcgggatcagctcctgcggcagctgctcctgcggatgaagctgangatgatgatgaccttgatctttttggtgatgaaactgangaggacaagaaggcagctgatgagcgtgccgncgctgccaaggcctc

SEQ ID NO: 93310 - DNA, 516 bp, Zea mays
  unsure (1)..(516): unsure at all n locations
cggagcccattgtgactgcaccgcgtacgtactgctgtaccggtccggaattcccgggtcgacnacgcgtccgggattcgggaaggtgtacaagggcaagatcaacggacagatggtggcagtgaagcagctcgctcgagacggcgtgcaggggaggaacgagttcttggtcgaggtgctcatgcttacagtgctcaaccatcgcaaccttgtcagcttggtcgggttctgcgcgcagggggacgagaggctgctggtctacgagtacatgccgttcggaagcctggagagccatctgtttgacgtgcctctcggcaagaaaccactcgactggaacacgcgcgtgaggatagccgtgggagtcgcggaaggggtttcctacctgcacaacgtagccgacccgcctgtgatctaccgcgacatgaaggccgncaacattctgctgggcgaggacttcagcccgaggctctccgacttcgggctcgcgaaggtcgggccggttggagacaggactca

SEQ ID NO: 93311 - DNA, 534 bp, Zea mays
  unsure (1)..(534): unsure at all n locations
nggagtccgtggttgagcatcgaaccctcagnattgctcgtaccggttcggaattcccgggtcgacccacgcgtccgctgttggtaagggacttatcacttcacatgcccttatgagtttagaagctcgtgggatcctctttgtatcccctggaatggaggcatatgaagggatgatagttggtgagcactcacgtgacagtgatcttgaggtgaatcctgtgagaactaaagaacttacaaatatccgagcccctggaaaggatgaaaatgtccgtttgtctccaccccgattggtatgatattttctgcttttaatgagatcatgagagatggtgtttcttttctgtaaaagaaacacaatactacaattcctaatcaattggttaattgcccactgtaacttggatcagcaatgcaaattctagaacccattattggcatatgatattatgttcacacattggggttccagatctgattagaaccgaaggaaaatgaagcttggtttccttatataaatggttggtgaaaa

SEQ ID NO: 93312 - DNA, 535 bp, Zea mays
  unsure (1)..(535): unsure at all n locations
nggttgtagagtgatcctcgcttgtagatcatagtagtaccggttcggaattcccgggtcgacccacgcgtccgatttcacaccttcgatatccccgtaactaccggccaactcctccagccggttgtaagggtgtaggtgggtgctcagactcaaacaagtgtgcatgtgcagtgaaaaatggtggagaaatccctttcaatgataaaggccgtattgtagaagcaaaacctctcgtttatgagtgtggtccttcttgcaagtgccctcctacatgtcacaacagagttggccaacatgggctcaagtttcggctgcaaatcttcaaaacaaaatcaatgggttggggtgtgagaactcttgaattcataccatctggaaagcttgtgtgtgaatatataggtgaagtgttggaggatgaagaagcacaaaaaaagacgaatgatgagtatttatttggctattggcacaattattatgattaggctttttgggaaggcctattcagaactataccggcacttcagaaaggttc

SEQ ID NO: 93313 - DNA, 514 bp, Zea mays
  unsure (1)..(514): unsure at all n locations
agtttctatcctatggatangntaggctgntccggttcggaattcccgggcgagaatgactgccgatacgcgatctatgatttcgactttgttactgcagaagatgtccagaagagcaggatcttctatatcctatggtccccatcctccgccaaggtgaagagcaagatgctttatgcaagctcaaaccaaaaattcaagagtgggctcaatggcattcaggtggaactgcaggctactgatgcaagtgaaatcagccttgatgagatcaaggatcgggctcgctaggcatcatgatcatgcatcatggactcggcctactactgtggatttgtatgccattatagacttggtgctgtgaaagactgcttgatgatttgcggggtttgtgctgtgtaaaaaaaagtcccatggcttccagaagaccatgaaggttcggatctatcatgtaattccttggtatctgccaattatgtatggactatggacatgtgttgcgcttgttcacttaaaa

SEQ ID NO: 93314 - DNA, 514 bp, Zea mays
  unsure (1)..(514): unsure at all n locations
tgtcatnaaatagaccgagctcatagcagtactgtaccggtccggaattcccgggtcgacccacgcgtccgcacagacaagtggtttccaaagccaagtgtgtgtactagcaaccagctagctcgggcggcagcaggcagccatcatgtcggaggagaagcaccaccacttcttcaaccaccacaagaaggacgaggagcagcccgccggcgagtacgggtactccgagaccgaggtggtcaccgccaccggcgagggcgagtacgagaggtacaagaaggaggagaaggagcacaagcacaagcagcacctcggcgaggccggcgccatcgccgccggcgccttcgcactctacgagaagcacgaggcgaagaaggaccccgagcacgcgcacaggcacaagatcacggaggaggtcgctgccgcggcggccgtcggcgccggcggctacgtattccacgagcaccacgagaagaagaaggaccacaaggacgccgaggaggccagcggcgaa

SEQ ID NO: 93315 - DNA, 538 bp, Zea mays
  unsure (1)..(538): unsure at all n locations
ngtaaaatggttggccctagccagtcagcattgctcgtaccggttcggaattcccggggcgacccacgcgtccggccaaccgcatccagtccaccccattcccctcgaccccgacaaccccgagtcccgagccgatggcgcccaagggcgagaagaagccagcggagaagaagccggcggccgaggagaaggcggagaagacgaccgcaggtaagaagcccaagtccgagaagcgcctgcccgcctcgaagtcctccggcaaggagggcggcgagaagaaggggaagaagaaggccaagaagagcgtggagacctacaaaatctacatcttcaaggtcctgaagcaggtgcaccccgacatcggcatctnctccaaggccatgtccatcatgaactccttcatcaacgacatcttcgagaagctcgccggcgaggccgcttaagctcgccggtacaacaaggagcccaccatcaccttccgcgagattcaagacttcgtgcgccttggccctccaggagaagttggcaaacacggccn

SEQ ID NO: 93316 - DNA, 537 bp, Zea mays
aggtgagtgaagcgtgtgccttgcaactgttctgctacgtgcgaactctgtccggaattcccggggcgacccacgcgtccgtgggctcccgcagcggcgccacctccaaggaggtgaaggtcgctgactgtggccaggtctagatctctggtctgtccggctgccctccctccgtcatcgtcgactccgcctgcgtccgtcccttttcatttccttcgatctgaataagatgatggcgatctgagtggtggtcttagttgagtcttcaagtcgtttgtgtctgtgtccctcgcggttttaatttagcggtttaggtgtggatctgtgaatcccgtggcgcctctgcttaatccttgtttcagctgttatgttatgggatccatgataatgctataaaactgaaattccggttcgggcttcaaaaaaaaaaaaaaagggcggccgctctaaaggatcccagcttacgtacgcctgcatgccacgtcatagctcttctattatggcacctaaattcaattcactgggccgcgttttaca

SEQ ID NO: 93317 - DNA, 533 bp, Zea mays
  unsure (1)..(533): unsure at all n locations
gttaatatgtgaccacgaacggagtggtatgctcataccggttcggaattcccgggtcgacccacgcgtccgcatcacaaccgatcacatctcacctgccggaaacattcacccagacagcccagctgcaaaatatctgaaggagcgtggcgttgaaaggaaggacttcaactcatatggtagccgaagaggaaatgatgagatcatggctaggggaacctttgccaacattcgtcttgtgaataagttcttgaagggtgaggttggacccaagacaatccatgttccatctggggagaagcttgcagtttttgatgctgctatgaaatacaagaatgaagggcatgacactattatcctggctggtgccgagtacgggagtggaagctctcgggattgggcttgaaaaggcccaatgcttgcaggagtgaaagctgtgatagcaaaaaagcttcagaggattcaccggaacaatcttgcttgcattggaatcaatcctctattcttcaaaacaagggaagatgccnaccggc

SEQ ID NO: 93318 - DNA, 524 bp, Zea mays
  unsure (1)..(524): unsure at all n locations
ngaatggtnnttgaaataagtacgtatttggactgctcgtaccggtccggaattcccgggtcgacccacgcgtccgcttcccactcccgccgctgcctcctcgcagcttccgccactctactcgtcgccttatgcggcgccgtgcatgaccggccagatgggcctgaaccagctcggcccggcccagatccagcagatccaggcccagttcatgttccagcagcagcagcagcagaggggcctgcacgcggcgttcctgggcccgcgggcgcagccgatgaagcagtccgggtcgccgccgccgctggcgccggcgccggcgcagtcgaagctgtaccgcggcgtgcggcagcgccactggggcaagtgggtggcggagatccgtctcccgaagaaccgcacgcggctgtggctcggcaccttcgacaccgncgaggacgcggcgctcgcctacgacaaggcggccttccgncttcgcggcgacacggcgcgcctcaactcccggcccttcggcgcggcgcgcc

SEQ ID NO: 93319 - DNA, 517 bp, Zea mays
  unsure (1)..(517): unsure at all n locations
ctgtattgacactagaactatctgnagngctcgtaccggtccggaattcccgggtcgacccacgcgtccggctacgctggccactacgttccacagttagcccagcgcatggttgagttcaacaagaaggagaagctattcaacctgaaaggcattgctcttggcaaccctgtgctggagttctccaccgacttcaactcgcgggccgagttcttctggtcgcacggcctgatatcggactccacctacaacatcttcacgacggtgtgcaactactcgcggtacgtgagcgagtactaccgcggctccctgagcacggcctgcgacagggtgatgagccaggtggcgagggagacgagccggttcgtcgacaagtacgacgtcaccctggacgtctgcatctcgtcggtgctcatgcagtcccaggtcctcgtccctcagcaagggagcagggagctggacgtgtgcgtggaggacgagacgatgcngtacctgaaaccgaaagacctgcagcagg

SEQ ID NO: 93320 - DNA, 509 bp, Zea mays
  unsure (1)..(509): unsure at all n locations
agtcntntcatcgattgagcatacagtcacgctcgtaccggtccggaattcccgggtcgacccacgcgtccgtaacatcactactggtgttatatgcaatggagtgaagagtgtaatcaaggaaggccacaagagctttcccagtggacacacttcatggtcttttgctggtctaggcttccttgcatggtacttagctgggaaactcacggcttttgatcgcaaaggacatattgcgaagctatgcattgtgtttctgcctcttcttactgctgcgcttgtggctgtttctcgagtggatgactactggcatcattggcaagatgtatttgcagggggtcttataggtcttacagttgcttcattttgctatctacagttttttccatatccttttgatggcgatgcgttgtggcctcacgcatacactgtccagttagccgaagaagggaacagcagaaatacaaacttctacagcgtgagaccaagccagatcgaaacagtcaata

SEQ ID NO: 93321 - DNA, 519 bp, Zea mays
  unsure (1)..(519): unsure at all n locations
gtcggtnatgtttctgaccgcagtcgtatgtcttgcggtaccggtccggaattcccgggtgacaaattgagtcgacggggaaggaaataaagaaggggaagagcacgcgccgccgccagcaccgcgggcgccatggccgcctcctcccgccgcgcgtctcaattgctggggtccgcggcctcccgcctcctcctcgggcggggcttcgccgcggcagccgccgcggcgccctcgccggcggtcttcgtcgacaagagcacccgtgtgatctgccagggcatcacggggaagaacggcaccttccacaccgagcaggccatcgagtacggcaccaacatggttggtggagtgactcccaagaaaggtggaactgaacatttaaggctcccagtgtttaactctgtagcagaagctaaggctgaaacaaaagccaatgcatctgttatatatgttccaccaccatttgctgccgccgctataatggaagcaatggaggctgagctcgaccttgtgtctgct

SEQ ID NO: 93322 - DNA, 532 bp, Zea mays
  unsure (1)..(532): unsure at all n locations
tgtgtggaggctgagcctagcttgttatgtatgctcatacctgtccggaattcccgggtcgacccacgcgtccgcccagcttccctttcgttcctcctcgtcccagcgacgcggcctcccgtagaccgagcaaggcaacccaccactgagaggcacgcagaggagcaggaagccggagaccaagatgtcgtcggtgttcagcggcgatgagacggcccccttcttcggtttcctcggcgccgccgccgccctcgtcttctcatgcatgggcgcagcgtacgggaccgcgaagagcggcgtcggcgtggcgtcgatgggtgtgatgcggccggagctcgtcatgaagtccatcgtgcccgtggtcatggctggtgtgctcggtatctacgggctcattatcgncgtcatcatcagcactgggatcaaccccaaggccaagccctactaactttttgatggctacgcttaactttcgttcgggcttggctggtggcttgcttggcttggcactggcattggcattggcattgtc

SEQ ID NO: 93323 - DNA, 545 bp, Zea mays
  unsure (1)..(545): unsure at all n locations
atagccgatttgaccccttcagcctcnncagtcnacgncggtactngtgtccggatattcccgggccgttctgcttgtattatgcgctcggcacctgccatcgcaggcanggacggcctgacccggaaatttccccaatctctctttctcaaggattgcttccggaattccccctgctgggttcccatcgatcaaagggcccggcgcttgttccatttcgcattcaatccctttcgggtcgaatttgtggcgaacctctggattggctccgtccttgccaaaggagaagggctggctggatcagggatcgagcaaggaaccagccatgagcggcagcagaagcgtgagtttcctcgagatccacccgtcggagctcgcattccactttgagataatgaggcagatctcgtgctccatgcaactgaccaatacgactgaccattatgtagcattcaaggtcaaaacaaccaacccagaacagtactgtgtgcgtcctaatattggtgttgaattccctggctcaacttgcgatgttacagtgacaa

SEQ ID NO: 93324 - DNA, 513 bp, Zea mays
  unsure (1)..(513): unsure at all n locations
cgtacttgcccatcgaccattagnagggctcgtctcggtccggaattcccgggtcgacccacgcgtccgcggacgcgtgggcgcagacgccttgttcaccatggtgttcgaaaccgacaggctagagggctccacgctcgtcatcaacggaatggtcacggatgggtcagacgaatgggcgatctacggcggaaccggggtgttcgccatggccaccggtgtcatgaagagaagaaaccttgccgccggtagcaacgacgggaactctgacgagcttgccctggaagttttctgcccggtgtttggcgcatcacagcaaccaattagcaagcagcaggactccatctcctccgtcaccaagatcggactatggggcggacagggaaggtcggcacaggacatcacggcagagcagccaccacggcgtctgcacagcatcaccgtccgcgctggcgttgccgtcgactccatcgagttcacctacaccgacgacgctgggcaaaggcgcactgc

SEQ ID NO: 93325 - DNA, 514 bp, Zea mays
  unsure (1)..(514): unsure at all n locations
ggcgttattgatccttcagctncagtacgncggtccnggttcggaattcccgggtcgacccacgcgtccgggaaaaatcctgcagtctacaaatttcttggtgagacgatccatgtagatggtcatgacctgtatgaatcagcaaagaggctcaaactacgagagctttcagcttttgctctggaacacttgccaaatcggaattccttgatatatggtgacctttatggtatctacaaagaagcatccaccatatatagggctactcttcgttacgaacgttttagtgagataatggtaacccttttcaaaactgggttctctgatgctgcaaatcatccactgctgcaagatactagtcgttcaacatatcatggtttccttgatgaactactgaataatatctgcacaattaacacggacttagatattgaagcctctgctggatacgatgatgacctgattgccaggctgttcaagctcgactgttgcaaaaataagggaatagctgcta

SEQ ID NO: 93326 - DNA, 512 bp, Zea mays
  unsure (1)..(512): unsure at all n locations
tgcggtgatcatgattgagaatgatagcactctcgtaccggtccggaattcccgggtcgacccacgcgtccggacgactcttggccaacagaagtgtttgagcttgtcactggagagaaatcgaagacattggaaaggcttgaccctggtgccactgcttcgcacacatatgtcctggagaccaaaacacagggcaggttccagggttcaccagctattattacataccgtgttcccacaaagacagctcttcaggaggcatactcaactcccatcttcccactggatattctcgctgagagacctccagagaagaagtttgaatgggctaagaggcttgtgatgaaatacgggtcacttgtgtctgttgtctcttttgttggactgtttatctaccttgtcgcgagcccgtcgaagagcagctcanaggcaagcaagaagagacgctgatctacttataggtcgcagttgacggtgtagctggtggttttgcctggaggaactctnggtag

SEQ ID NO: 93327 - DNA, 518 bp, Zea mays
  unsure (1)..(518): unsure at all n locations
ngttcgtnnctgtcatagtaagtatntgnactgctcgtaccggtccggaattcccgggtcgacccacgcgtccgaggataacaaattttgctgaggataagtttggaagggatggtattgatgtgaaaactggatataaagttgtgaaggtttctaaggatgatattaccatgcaaaatcctgccaccggggatatttcagtcccttatgggatggctgtctggtcgactggtattggaactcgtccattcgttgtggaatttatgaaacaaattggccaggccaatcgccgtgtcttggctactgatgaatggctaagggtccgtgaatgtgatggtgtctatgcaataggtgactgtgctacaataaaccagaggaaagtaatggaagacatttcagaaatattcagagtcgcagataaagataagtctggaaccttgactgtgaaagaaattcaagatatccttgatgatatctacgtgaggtacccgcaagtacagctctaccttaagagcagg

SEQ ID NO: 93328 - DNA, 518 bp, Zea mays
  unsure (1)..(518): unsure at all n locations
aggtaattgatccctcgcattaatgcatcgctcgtacnggtccggaattcccgggtcgacccacgcgtccgatccacactaacgaacgaactcttgctccgatcacgagctagctgaggtcgacgatggcggctgtgctgaacagcaggaagacgccgcaggcggtggtggccgtgctggtggcggcggcgctgctggcttcgtccgcttcggcggcgatcacctgcgggcaggtggggtcgtcgctggcgccgtgcatcccgtacgcgacggggagggccagcgcgctccccgcgtcgtgctgcagcggcgtcaagagcctgaacagcgcggcgcggaccagcgcggaccggcaggcggcgtgccgctgcctcaagagcctcgccaacagcgtcaagagcgtcaacatgggcaccgtcgtcaccatgcgcggcaagtgccgcgtctncgtcggatatcccatcagcatgtacaccgactgccaccagatcagctaagttacgacgaccaagctaata

SEQ ID NO: 93329 - DNA, 521 bp, Zea mays
  unsure (1)..(521): unsure at all n locations
ggtaagttnctgacccatcgaattantagntctgctcgtaccggtccggaattcccgggtcgacccacgcgtccggggagatgcccgccgagatggagcgcaccggggccaaggtggacatgtccgatcaggtcgggatgacgcttcgccggacgcagaaactttaccttgttcctagaattcccaaatgagtgtcgtcgtcgtcgtacaaatggcatgcatcttattgtaagttttggagtttgttgttgcacacgcaacgatggaccgcctgtgatatctttaataaatgtaaccgcagataataatgaaataaaaagaacgcatggctattgtattattaaaaaaaaaaaaaaagggcggccgctctagaggatccaagcttacgtacgcgtgcatgcgacgtcatagctcttctatagtgtcacctaaattcaattcactggccgtcgttttacaacgtcgtgactgggaaaaccctggcgttacccaacttaatcgccttgcagcacatccccctt

SEQ ID NO: 93330 - DNA, 688 bp, Zea mays
  unsure (1)..(688): unsure at all n locations
gaattgctgnttgatcatcgtctagtctcagtacagccantgccggtactcggttccggaattcgccggcgtcgacgccacgtcgnntccggggttggggcttnnctcctcccccttccggtttcnngggttcgtggttcgtgaggggttctccgggggtgtcggtttcgtaggggtgagccggatcnngagatggcngtngcgtcggatgggttgagtacctcgctgcntttcgtcggtcggcccttcgcctggggcccacgtgacccgaccactttcccttccacannnacgcctntnncagcacncttaccggcngnnaggtccntnncgagtccccaagaaatcatcncnttcgatnncgggagtaccccgcagagnngtcncnncgcggcttttcgngcttttnncgtcacnctntctttccaaacggagggagggcngaaatgcgngaaccgcnncatcnngagggccccatgaacccggcaaagggagccnttggacgggcncngcannnacatcacnncgtcanaccgagggcncnncagtcnnccgnncggcgggccccgtggaagggcgnnngcggcgnngcggcggggtaccgggtgggtgggccccgtggagggccggcgggctttacggcnggtgnggcgggccgcccgttgatggncngccggcnggctaccgg

SEQ ID NO: 93331 - DNA, 533 bp, Zea mays
  unsure (1)..(533): unsure at all n locations
gggagtccggctgatccaagtatagattgtatactcataccggtccggaattcccgggtcgacccacgcgtccggcacccaccagaggaaaagggcaaaagccaaaaggcatcaccgccgcgacgacgatggcagcctcgctccaagccgcggccaccctgatgcagccggccaagatcggcggccgggcgccctttgcctcgctgccgtcccgcccgtcgtcgcaactcgcctgcagggcgttcggcgtcgacgccggcgccgccaggatcacgtgctccctgcaggacgtcgccagcaggtgcgtcgacgccgcgaagctcgccggcttcgcgctcgccacctcggcgctcctcgtctcgggcgcgagcgcggaaggcacgcccaagaggctgacctacgacgagatccagagcaaaacgtacatggaagtgaaaggcacgggcacggcgaaccagtgcccggacattgacggcngcctggagtcggtcccggtcaagggccgcaaggtccaaattgagaagctggggctg

SEQ ID NO: 93332 - DNA, 533 bp, Zea mays
  unsure (1)..(533): unsure at all n locations
gtgaaagtgaccacgtatgagaagtattctcataccggtccggaattcccggggcgacccacgcgtccgcggacgcgtgggcggacgcgtgggcgacggcatcgtgctcgagaacctcgcgtccggcttcatgtccgacgtgcaggtcgccgaggcgcgggccttctacggcttccagatcgccatcgagaacatccactcggagatgtactcgctgctgctcgagacctacatccgcgacgacgtcgagaaggaccgcctcttccgcgccatcgatacggtgcccgcggtccggcgcaaggcggactgggccatgcgctggatcgacggcggggagcgcttcgccgagcgcctcgttgccttcgcctgcgtcgagggcatcttcttctcgggctccttctgcgccatcttttggcttgagaagcgcgggctcatgccgggcctnaccttcttcaacgaagctcatctccgggaccagggcctgcactgcgaattcgcctgccttccttacgatgttctacgcaacaaggctg

SEQ ID NO: 93333 - DNA, 536 bp, Zea mays
  unsure (1)..(536): unsure at all n locations
gtagagcactactgagccacgccatgtattgtatngctcgtaccggttcggaattcccgggtcgacccacgcgtccggacccggactccgtggaggcggcggagatggcgcagacgctgcacgactgcgaggcgcccgcggccaggggcgagaggaaggcgtgcgccacgtcgctggaatccatggtggactttgccaccgccagcctcgggaccagccacgtgagggccgcgtcgacggtcgtggggagggagggctcgccgaggcaggagtacaccgtgacaggcgtgaagcgggcgggcggcgggcgcctggtggcctgccacgcggagccgtacgcgtacgccgtgttcgcgtgccacttgacgcagcagacgcgggcgtactcggtgtcgatgcttggcaaggacggcacggncgtggacgcttgtcccgtgtgccacgccgacacgtccggcttgaaccccaagcacgttgtctggaacccgcngcngctgaaaatggtccgccgttgcatgcacttggcatgacacccc

SEQ ID NO: 93334 - DNA, 519 bp, Zea mays
  unsure (1)..(519): unsure at all n locations
gttacgtgcttgtcctccgaatatntgnactgncggtaccggtccggaattcccgggtcgacccacgcgtccgatcagctagctagctgctgccaagagctagccaggggacagagcagcagcttgaagttggtgaccaatgctaaggatgggccgcgccagcgccacagcaggtgtgttgcgcttcgtcagggcgttcgccctctgcgtggctacggcatgcctcctcctggcggccggcatgccctcgcctgtggcggcgcaggacccgtcgaagctgagcctgcagtactactccaagacgtgccccaacgtggagcacgtcgtccggacggagatggagtgcgcggtgcgcgccgacacgcgcaacgccgcgctcatgctccgnctccatttccatgactgcttcgtgcagggctgcgacgggtcggtgctgctcgacgacacggcaaccatgatcggagagaagcaggcggagcagaacgtcaactcgctgaaagggttcgatctggttgacaa

SEQ ID NO: 93335 - DNA, 520 bp, Zea mays
gatatgcactgaccataatgaaagactgcacggctcgtaccggtccggaattcccgggaactgacgactaccttgatgtcactgatgtgatgcgaaggcttctcatcgcacagcatcgagaagctcctgcgctcttcaagcatgaaggcacctactatatggtaacgtctggctgcacaggctgggctccaaacactgcgctggctcacgcagcaacatcagtgatgggaccttgggagacgctggggaatccttgtgtgggagggaacgaggtcttcagatcaacaacgttcttctcccagagcacatttgtcttgccggttccagggctgccgggctcattcatcttcatggctgatcggtggaacccatccgatcttagagattcgcggtatgtctggctgcctctgacgatagggggagtccctgatgaagccgcagactatagcttcatgttccctctctggtcccgggtgtccatctactggcacaaacggtggcgtctccctgaggagtggag

SEQ ID NO: 93336 - DNA, 515 bp, Zea mays
gttatgcgtgatatcgttagctcagtacgtagtgcagtaccggtccggaattcccgggtcgacccacgcgtccgggtgttggaaaaagcacattctcagcccaactctcgtttgccctagctgaaatggaccatcaggttggccttcttgacatagatatatgtggccctagcatccctaaaatgctaggccttgaaggacaagatattcatcaaagcaaccttggctggtcacctgtgtatgttgagtccaaccttggtgtgatgtcgattggtttcatgctgcctaatccagacgatgctgtcatatggaggggtccccgcaagaatggactgatcaagcagttcttaaaggatgtcgattggggggagattgactatcttgttgtggacgctcctccaggaacatctgatgagcacatctcgatcgtgcaataccttcaagccacaggaatcgatggcgcgataatcgtcacgactccgcagcaggtctctctgattgacgtgaggaaggaa

SEQ ID NO: 93337 - DNA, 515 bp, Zea mays
aggcagtgatctcgaatagtaatgattgtattgctcgtaccggtccggaattcccgggtcgacccacgcgtccggaaaaactggatcaaggcaatggccatgacagcatcacttttcccatttatgtgctgtggaattggcctggtgcttaacactattgctattttctatggatcgttagctgccataccatttggtacgatggtggttgttttcatcctgtgggccttcatctctttccctcttgcacttttgggaactgttgttggtagaaattggagtggtgctccaaacaatccctgtagggtgaagactattcctcgccctattcctgagaagaaatggtacctcacaccatctgtcattgcgcttatgggaggactgcttccttttggtagtatctttattgagatgtactttgtcttcacatcgttctggaactataaggtctactatgtttacgggttcatgttgctggtctttctgatactcatcattgtcaccatatgtgtaac

SEQ ID NO: 93338 - DNA, 533 bp, Zea mays
  unsure (1)..(533): unsure at all n locations
ngtgagtggtcttggcacgacatggagagtattgtcatacccgtccggaattcccgggtcgacccacgcgtccggacatgcccatcagggacttccgcaacctggagagcaagggggtggcgttccccaagagccagccgatgcggctctactccagcctgtggaacgcggacgactgggcgacgcagggcgggcgcgtcaagacggactggtcccacgcccccttctccgcctcctaccgcgggttcaaggccgacgcttgcgtcgccgtcgcgggcggccggacccgctgcggcgccaccgtcggcaccgagggcaccggcgcccccgcctccgccgccggcgccggggactggtacaaccaggagctggacctcaccctgcagcagcggatgcgctgggtgcagcgcaagtacatgatctacaactactgcaccgaccccaagcgctaacagcaaggccctcccggcgagtgcttcatgccgtaacgcccgggtatttcctggccggtcaacaatggcgcgcgcgcgcgt

SEQ ID NO: 93339 - DNA, 533 bp, Zea mays
  unsure (1)..(533): unsure at all n locations
cgctggtttattgtgaaagcctgctcagcataactcgtcncgntnnnngnggngacccacgcgtccgggcaagactgaggagcaggtgacggctctaggaattccctatcgtgtgggcaagtggccacttttggctaacagtcgtgcgaaggccattgatgatgctgaaggggtagttaaggtgatcgcggagaaggaaaccgataagattctaggtgtgcacataatggcacccaatgctggtgaaatcatccatgaagctgtcatcgccttgcagtatggagcatccagtgaggatgttgctcgaacatgccacgcacaccctaccgtgagcgaagccctcaaagaggcttgcttgcaaaccttcgataaagcaatccacatataatttctcattttctatttcctttgcatccaaacttttggcttaacaagatccaaaggttattgtaattttgggccttgtggaacaaaaaggcttccgatggcctttggtttggtggcaattatgtggaatctttgagattgcccat

SEQ ID NO: 93340 - DNA, 516 bp, Zea mays
  unsure (1)..(516): unsure at all n locations
cgtcatttgtccttcgtctagttgntcggctgntccggttcggaattcccgggcaaatttagtaatgtatatgtgaagaatctgtcagatactgttactgatgatgagttgaaggagatgtttggaaaatatggaaccataactagtgctgttgttatgcgggatagcgatggaaaatccaggtgttttggatttgtcaattttgaaaatgcagatgctgctgctcaggctgttcaagagttgaatggcaagatattcaatgataaggaactgtatgttggaagagcacagaagaagtctgaaagagagatggagttgaaggagaaatttgaaaagaatgttcaagaggtagctgagaagttccaaaacacaaacttgtatttgaagaacttagaggagaacattgatgatgagaaattgcgtgaactctttgctgagtatggcaatattactttctgcaaggttatgcnggattcgaatggtgtcagcagagggtctggattttgtgctttcaan

SEQ ID NO: 93341 - DNA, 518 bp, Zea mays
  unsure (1)..(518): unsure at all n locations
cggtactgattatgaacgtacnctatgncagtacnggtccggaattcccgggtcgacccacgcgtcccgaaaggggagagagagagagagaagagagagataagagagagagagagagaggagtgggagacccgcgagaggctgacgtgtaaggaccgtagactcagcgactgcgaaggacggattaggggatggccgggatcggaccgatcactgcaggactgggagcctgtcgttgtgcggaagaaggcacccaccggcgacgacaagaaggatgataaggccgacaacgtcgcgcgccgtgcccatgcggatatcgataccatgatgaagtacaacgctggtacaaacaaagcggcatacagcggtacaattctcaacaccaatcgcctctacgacgacaccgaaaaccttttccatgaacgaatttcaagagatctctagaaaaaatctctgctagcaatgctctaaaaaaagctgttacacgctcaaatagttcagatgatataagagaagcc

SEQ ID NO: 93342 - DNA, 516 bp, Zea mays
  unsure (1)..(516): unsure at all n locations
cggtacttgagccatgccactaccgtaggctgtcncggtccggaattcccgggtcgacccacgcgtccggacccggactccgtggaggcggcggagatggcgcagacgctgcacgactgcgaggcgcccgcggccaggggcgagaggaaggcgtgcgccacgtcgctggaatccatggtggactttgccaccgccagcctcgggaccagccacgtgagggccgcgtcgacggtcgtggggagggagggctcgccgaggcaggagtacaccgtgacaggcgtgaagcgggcgggcggcgggcgcctggtggcctgccacgcggagccgtacgcgtacgccgtgttcgcgtgccacttgacgcagcagacgcgggcgtactcggtgtcgatgctgggcaaggacggcacggccgtggacgctgtcgcggtgtgccacgccgacacgtncggctggaaccccaagcacgtcgtctggacccgcggcggctgagagtggtcgccgtttgcatgcactggt

SEQ ID NO: 93343 - DNA, 516 bp, Zea mays
  unsure (1)..(516): unsure at all n locations
agatgctgagccaccgagaactgcatcgcagtacnggtccggaattcccgggtcgacccacgcgtccgggaggatactcatcaatatctggtccacgcgtgattgaaaaaactttcagtgacatgagcatcagtggttctggattaggtggactgagcactgacatggactcatttgctagcaagcccaaaggccgtccatctacagcagctactgcacctggtaaaggttttggtatgaaattaggcaagacacagaagacaaatcaattccttgaatctttgaaagctgaaggagaagtcattttggaggatgtacaaccaagtgcagtttctacaaggtcatctgctcttccaccaagtgaccctgtcacagtaactatagaagagaagctcaatgttgntgttaaaagagatggtggtattaataactttgatgttcaaggaacacttgctcttcaggttctcaatgatactgatgggttcatccaattgcagattgaaagcccagatattc

SEQ ID NO: 93344 - DNA, 521 bp, Zea mays
  unsure (1)..(521): unsure at all n locations
gaaagccattgatcatgaatgaacagtacagcactgctcgtaccggtccggaattcccggggtccccgcacatcagcagagagacgccactaccaccaccgcaagcgacgacggggagatgtttctgcgacggatcctgaccggcggaggtggcctggcggcgctgagggcggcgcgcgccgtgaaggagacgacggggatcgtcggccttgaggtggcgcccaacgcgcgggaggttctcatcgggctctacacgcgtacgctcaaggagatcgaggccgtccccaaagacgagggctaccgcaaggccgttgagtccttcaccaatcaccgcctccagatctgccaggaggaggacgactggaagcgcatcgaggaccgaatcggatgcgggcaagtcgaggagctcatcgaagaggccgaggacgagctcaagctcatcgccaaaatgatngaatgggatcccgtgggtgtccctgatgactacgaatgtgaggtgattgaagacgacaccccaattt

SEQ ID NO: 93345 - DNA, 528 bp, Zea mays
  unsure (1)..(528): unsure at all n locations
ggagactcatcgaaacctttgtcgagtctcgtactgctagtactcggtccggatttcccgactggaccgacgcatccaggaggatactcatcaatatctggtcttcgcgtgattgaaaaaactatcagtgacatgagcggcactgattctgggttgggtggactgagcactgacatggactcatttgctaacaagcccaaaggccgtccatctacagcatctactgcacctggtaaaggttttggtatgaaattatgcaagacacagaatacaaaacaattccttgaatctttgaaagctgaatgagaagtcattttggaggatgtacaaccaattgcaatttctacaaagtcatctgctcttacaccaaatgacccttgcacaataactattgaagaaaaactcaatggtgctgttaaaagaaatcgtggaattaataactttgatgttcaaagaacacttgctcttcacgttctcaaatataccgaagggttcatccaaatgcatattgaaagccaagatattttn

SEQ ID NO: 93346 - DNA, 520 bp, Zea mays
  unsure (1)..(520): unsure at all n locations
tgccaatcatcatgaatagaacagtacagtcattgctcgtaccggtccggaattcccgggtcgacccacgcgtccggagtggtcttatagatcatattggaatcgaacctttgatgatggaagctcttgagaagattgagaaggatattaagaaaccactcttaaggagtgactagaagaacatggccacccttatggcagagtttgacaagattaacacaaagcttggcattcggaaggaggatcttcctaagatcgagaaagaacttgaattggagattgccaaaagtgagctgactgaacttaagaaggaatgtgttgaggcaatggagactcaactcaagagggaggagttccaagatgaggagatgcctgatgtcaggaaactggacatccgaaacttcctgtaggcctgatcgacgataacctttgaggcattgcaaatcacccagcccacctgtgattntttttcttttggttntggtttcaagttgatcggtgctgtaagctacacctatga

SEQ ID NO: 93347 - DNA, 522 bp, Zea mays
  unsure (1)..(522): unsure at all n locations
ggaggtccttgagctgcattgcttctcatngcactgcggtaccggtccggaattcccgggtcgacccacgcgtacggacttcgacggccgcaacatcgtcgactccgagaagctgatggagatcggcgttcatcgtctactccatcggcaagccgatcgacgcctggctcaaggacatgcccgcggtcgcctaatcgcaccccatttacccatggatcggattccgggaaggaagaggagagaagctggttgaccgctctttattacagttagtttctgcaggctacgctacgcgattatgtatagtgtcaggcatgaaaaacggttcggacggactgctagcattgcctgctgctcggtgacctcgtgtcggaggacgtctgtcgatgtacaattacttcagccccttgtgttcggctagaggaagtttccgtagtaccctgtacctggtatagtcggttgatacgtcaattgtgttcctaatagttactacacagtcgatatggaccgtctctttattgc

SEQ ID NO: 93348 - DNA, 521 bp, Zea mays
  unsure (1)..(521): unsure at all n locations
tgcgggtaagttaggctgaagcatagcataccgntcggaattcccgggtcgacccacgcgtccgggacgcgtgggtcaactttgatctattctctgccaccaaagagatggaaaaacagggatgtgatgagtttgactttgtgcgcgaagcaagagcaatggaaagaatacgagaatttctacgtgtcactaataagaaacctccggttatggtgcctcgtgtgattcctgggatggttagcagagaagttttgataatggaatttatcaaggggaccccaataatgaatcttggcaatgaaatggctaaaaggggcatagatcctggtggtaagattgcagcaatggcaaagcagaagattttgtcagatcttactcttgcatatggtcaaatgatcttgaaagatggctttttccatgcagaaccacacccaggaaacattcttatctgcaggacacagaggtggctttacttgattattggacagtgaaagaaatgccagaagaattaccggtggctt

SEQ ID NO: 93349 - DNA, 516 bp, Zea mays
  unsure (1)..(516): unsure at all n locations
cgatactgaccctcgaactagtgnacgcatgtcccggtccggaattcccgggtcgacccacgcgtccgctccccggccgcaccgacaacgccgtcaagaaccactggaactgctccctcaagcgcaagctcgccgccgcgtccgccccggcgggttcctccgacgtcgacgcgcgcccgaccaagcgcgtcagcctctcgcccgacagcccgtcggggtcggggtcagggtccgggtccgggtccgggtccgaccgtagcgacctgagccacggcgccggccaggtttaccgccccgtggcgcggtccggtgggttcgagccggcggactgcgcgatgagccgtccgctggaggaagaggaggaggaaaaggaggacccgctcacctncctcagcctctcgcttcccggcacggaccagcggttccaccacgaccgcgcccacagccagttccaggagctcccggcgtcggcgccctcgcnctccccgccttcgncgncggcgggtccgacctcgg

SEQ ID NO: 93350 - DNA, 521 bp, Zea mays
  unsure (1)..(521): unsure at all n locations
tgtgaggtacttgacctagttgttcncggactgctgtaccggtccggaattcccgggtcgacccacgcgtccggccacgctcatcgcgctcgacctcgtcaacggctacttcaggacgcacgccgggcaggtggctctggtgatgacgtcggagtcgatcgcgcccaactggtacgcgggcaacaagcgcaccttcatgctgggcaactgcctgttccgctccggcggctgcgcctacttcctgaccaacgacccgcggctccggccgcacgccaagctccgtctccgccacgtggtgcgcacccacacgggcgcctncgacgaggcctacaactgcgcgctccagatggaggacgaggccggccgcccggggttccacctgggcaaggagctgccgcgcgccgcggtgcacgccttcgtgcacaaccttcgcgtgctggcgccccgcgtgctgccgctcccggagctgctccgnctcgcctgcgccaccctctcggcgcgcctggcgcgcaagaagcggc

SEQ ID NO: 93351 - DNA, 520 bp, Zea mays
  unsure (1)..(520): unsure at all n locations
ggtacggggnttatcatgataagacagtaagctagtactggtccggaattcccgggtcgacccacgcgtccgcctccacattgttcttcatgcagcaaaagccttagagtatctccatgacacctgtgaacctcctgtagtacaccagaattttgaaccagccaacgtgctcctcgacaatagatgctcagtgcgtgttgctgaatgtgggctggcacaattgatggcgtctggttctgttacacagctatcaggccgtatgagagctctactcaattatgaagcacctgaaatccatgaatctgagccttttactcgtcaaagcgacgtatatagtttgggtgtggtgatgctagaacttcttactggtcgtaagccatatgacagttctcgtccacgtgatgaacaacatcttgttcgatgggctaattctcagcttcatgacatggagtccctgtcaaagatggttgatccttctatccgaggagagtgttctgtgatactggtgtcacgttttgcn

SEQ ID NO: 93352 - DNA, 521 bp, Zea mays
  unsure (1)..(521): unsure at all n locations
gtgggtgccagtgatgctgcctagctcactcagtcacagcggtaccggttcggaattcccgggtcgacccacgcgtccggttggcttctcctccccctccggttcgggttcgggttcgtgaggttctccggggttcggtttcgtgggtgagcggatcgagatggcggcgtcggatgttgagtaccgctgcttcgtcggcggcctcgcctgggccacggacgaccactccctccacaacgccttcagcacctacggcgaggtcctcgagtccaagatcatcctcgatcgggagacgcagaggtcccgcggcttcggcttcgtcaccttctccacggaggaggcgatgcggaacgccatcgagggcatgaacggcaaggagctggacggccgcaacatcaccgtcaacgaggcccagtcccgcggcggccgtggaggctgcggcggcggcgggtacggtggtggccgtggaggcggcggctactgcggtggctggcgccgtgatggcngccgcggctacggct

SEQ ID NO: 93353 - DNA, 527 bp, Zea mays
  unsure (1)..(527): unsure at all n locations
cgttacgggnnnntatctctggtacgaatactntactgctatacgtntccgatccggaatacccaccgacgcctacgcgtccacattgttcttcatgcaccaattgccttagagcatctgcatgacacctctgaggctagggtagttcaccagaatggtgaaccagccaacgtgctcctcgacaatagatgctcagcgcgtgttgctgaatgtgcgctggcacaattgatggcgtctggctctgttacacagctatcacgccgtatgagagctctactcaattatgaagcacctgaaatccatgaatctgagccttttacttgtcaaagcgacgtatataagtttgcgtgtcgtgatgcttgaacttcttactgagtcgaagccatatgacaagttctgttcacgtgatgaacaacatctctgttcatgggctaattctcagcttcatgacatggaatacctgtcaataatggtgatccttctatccgaagagagtgttctgtgatactggtgtcacctttttgaaa

SEQ ID NO: 93354 - DNA, 533 bp, Zea mays
  unsure (1)..(533): unsure at all n locations
tgtgagtgcgactgatccctccntgattgtcatgctataccggttcggaattcccgggtcgacccacgcgtccgatcagtcagaagactttatgttcagggcaaagagatcaatggtgctggtatcaatgctagctttgctgttcaccaggatgttgatggaagggcaacagatgtagctctagggtggtcagtagctttaggttctcctttcacatttgctactactctagagcaggagtaccggagtgacatttttggcgagcgaggtattttgcttggtgctgtccatggcatggtggaggctcttttcaggagatacacagaacaaggaatggatgaggactcagcatataagaatactgtagagagcatcactggaattatatcgaaaactatttcaaagaagggtattgctggaatgtataactctctgacttgagaagggaagaaacaagttattgaggcctataatgcagcatattaaccatgcattgacatattggatgaatgcctatgagacctcttttctgg

SEQ ID NO: 93355 - DNA, 539 bp, Zea mays
  unsure (1)..(539): unsure at all n locations
tgatggnncgattggtncttgacccatcccgtagtgctcagtactgctgtacgggttcggagtttcgacctacgcgtacgacttccaagagttctgtgcagcagcagttagtgtgcatcagcttgaagcattggatagatgggagcaacatgcgcgatctgcttatgaatattttgagaaggaaggcaaccgatctatggttatagatgattnagcttctgaattgggcctcagtccttcagtgccactgcatgtcgttctgcaagattggatcaggcatacggatgggaaattaagttttcttggatttgtcaagttgttgcatggcatgtccagcaggtccctgtcaaagatgagatagcttgcgataatctctaacgacagcgcgggtaatcaccgtcctgttgacttgggtcacaggcaaattaacatggctttagaattctactatttgagctttgcttattagggcgtttggaactcatacatatttgttttcgtttcttattttacttttggagtattttatatttgttttt

SEQ ID NO: 93356 - DNA, 539 bp, Zea mays
  unsure (1)..(539): unsure at all n locations
ggatgnnnngaccggtactgaactagcattgtatgttatagtactgctcgtaccggtccggaattcccgggtcgacccacgcgtccgggacgccatcatcagcctccacgagcagctcggcaacaggtactttttactcacgccgctgttctttcccttcgtcctcgcattgctgtcttctcgggtgtaaaaatcagaggatcaatgattgtttgcttgttgcttcaaacgcaaattactattcgtcttcgtcttctcccctctctcctctgaattgttcctgtcagtggggcagggcatacaatacattatccccgtgggccccgcctcgaggcccgcccgacgaagggagaaagaaagaaaatccaagtgtgctggccacttggtcgctagtatagttcagcttgttcgctgcggcttgctgcggctgcaatccggctgcggctgcggcttctacagtatttttctctctatggattgcagctgcagcagttcaaacagctggcacagtgtcggcttgtaaccaagccgacacgccc

SEQ ID NO: 93357 - DNA, 534 bp, Zea mays
  unsure (1)..(534): unsure at all n locations
tttgttgtatnntgnnagccattgctatagaggggatatatagtatcgctcgtaccggtccggaattcccgggtcgacccacgcgtccgattaaatattatggaccggttcgcagtgtttttctgtttctgcctttcactcttgtttgcagcagttcccagttggtgtagaactagtacctagttttgatagttgctagatgatgctatgccatatcttgttatggctactaactccattggttttgaacagaaaaggagaacttgtgcctctatggctatcccgatgagacatgggaggttaccttgccagctgaggaagtgcccccagagatccctgaaccagcattaggaatcaactttgctagggatggcatgaatgagaaggactggctggcgctagttgcagtccacagtgattcctggttactatctgtcgcattctactttggtgcacggtttggatttgacagagaagctangaggcggctctttagcctgataaacaacatgcccacgatttttgaggtggtga

SEQ ID NO: 93358 - DNA, 533 bp, Zea mays
  unsure (1)..(533): unsure at all n locations
aaattnnngagtgtgctgacctcgattcgtcngtacgctcatactgttcggaattcccgggtcgacccacgcgtccggaaggatagctatctgtatttttgatgatgttgcagagcaatgccgtgaatcagctgtgaagtattatgacacataccttcctttccttttggaggcatcaaacgatgaaaattcagatgatcggcaggctgctgtctatggtgtgggtgtatgtgccgagtttggtggtcatgtttttcgccctctagtaggagaggccttatcaaaattaaacaatgttataaggcatcctgatgcacgacttcctgataatatcatggcatatgacaatgctgtttcggcgcttggaaaaatatgccaatttcatcgggatggtattgacgcagctcaggttgttccagcctggcttagctgcttgcctataaaagacgacaaggttgaaactaaagttgtacatggacagctttgctccatggtggaaaaggcggatgcttaaaatctttgtccttacagtc

SEQ ID NO: 93359 - DNA, 540 bp, Zea mays
  unsure (1)..(540): unsure at all n locations
tgaggnnnggagccgtgcntgccatgaagggaggagggtattgtagtgctcgtccggaattcccgggattccactccgacattcacgtgcagctgtcgggagcaggcaatggcgccggatctaagcgaactcgccgncggcgctgcagcccgtggcgcctacctcgccggcgtcggtgtcgcggtcctcctcgctgcctccttgctcccagtagccgagtcgtcctgcgtgcgagataactcattggtgagagacataagccaaatgccgcaaagcagctatgggattgaaggattgtcacatataacagttgctggtgcgctcaatcatgggatgaaggaggtggaagtgtggcttcagacaataagtccaggtcaaaggacgccgatccacaggcattcctgtgaagaagttttcactgtcctcaaagggaagggtacgctctngatgggatcaagctcactaaagtacccaaggcagccacaggaaattcctttctttcaggataccacattttcaaatccctgtaaccgatcaacc

SEQ ID NO: 93360 - DNA, 546 bp, Zea mays
  unsure (1)..(546): unsure at all n locations
ttgtttnatnngatttggcgctgacgatcgcattagtagtgcctacgggcactgccngtaccggtccggaattcccgggggccaggacgtcgccgtcaaagtcatccccaaggccaagatgacaacagctatcgccattgaagatgtgagaagagaagtgagaatactgagttctctggcaggccacagtaacctagtgcagttctacgatgcttttgaggatgaagataacgtgtatatagttatggaattatgtaaaggaggtgaactgctggacaggatattagctaggggtggaaagtactctgaagaggatgcaaaggttgttatggtacaaattttgggtgtcgtatcattttgccatcttcaaggtgttgttcatcgtgatctgaagccggagaatttccttttctcttcaaaggacgaaaactctcccttgaaggtcatagattttggcctgtctgactttgtgaagccagacgaaagactaaatgatattggtggtagtgcatactacgttgcttcagaagggcgttcaccgacttt

SEQ ID NO: 93361 - DNA, 534 bp, Zea mays
  unsure (1)..(534): unsure at all n locations
nggggtgcagcnnntccttgagatacgcaattattgcatctctcgtaccggtccggaattcccgggtcgacccacgcgtccgcgttcgtatccttctctcgtcttcctctccttctccaattcctctccgagagcttctagtctagcactccgttaacaatcgagtaatccacggcgcggcagtaatgtacttatatgtgctaccaggtagtgagcagacgaaggctcggcagctgagcgacgggcaggcccggaagcggcggctgagcgacgggcaggcgcggttcctggagctcagcttcgggaaggagcggaagctggagacgccccgcaaggtgcagctggccgccgagctgggcctcgacgccaagcaagtggccgtctggttccagaaccgncgggcccgtcacaagagccagctcatggaagaagaattcttcaggcttcgggccgggcaccaaggcggcggtcttcacaacttgcaacttgagaacgaaggccgtgggcccaatgcaccacacacccaaattttct

SEQ ID NO: 93362 - DNA, 530 bp, Zea mays
  unsure (1)..(530): unsure at all n locations
gggacgaggnnacaatcgatatgaggagttagtgcactctcgtaccggtccggaattcccgggtcgacccacgcgtccgcactagtggagattgtgagaaggattgatagtaaacctcattatatcattgcaaagggaggaatcacttcatctgatattgctacaaaggcgctggaagctaaacgtgccaaagtcatgggacaagcattagctggtgtacccttgtggcagcttggtcctgagagtagatttcctggggtcccttacattgtttttcctggtaatgttggtgataacagtgctcttgctaaagtggtgaaaagttgggcttccccatctagaagttctacaaaagaaattcttcttgatgcggaaaagggcggntatgcttgtggtgctttcaatgtgtataacctttgaggaattgaagctggntgtgcaacaacagaggcttaaaaagatcctcgctatcttcaaattcattccaatgctcttaagccaggtggagttccactgtgagcatggtgcat

SEQ ID NO: 93363 - DNA, 530 bp, Zea mays
ggaaaaggtgtcatgcataagacgctacgcactgcggtaccggtccggaattcccgggcgcacccttgcggattacaacattcagaaggagagcaccctccacctggtgctgcgcctcaggggaggaatgcagatcttcgtgaagacattgactggcaagaccatcaccttggaggttgagagctccgacaccattgataatgtgaaggccaagatccaggacaaggagggtatccccccggaccagcagcggctgatcttcgccggcaagcagctggaggatggtcgcaccttggctgactacaacatccagaaggagagcaccctccatctggtgctccgcctgaggggcggtatgcagatctttgtgaagaccttgactggcaagaccataaccctggaggttgagagctctgacaccatcgacaacgtgaaggctaagatccaagacaaggaggggattcccccagaccagcagcgtctgatcttcgccggcaagcagctggaggatggtcgcacccttgcagact

SEQ ID NO: 93364 - DNA, 533 bp, Zea mays
  unsure (1)..(533): unsure at all n locations
ttattagngtaagtggtgagctgatgaagtatgtatgctcgtaccggtccggaattcccgggtcgacccacgcgtccgcgcagttccccgaccacaccgttccttcgagcccaggagcagccccgcgccaggaggaagtttgttcttttaacaatatgtcgagggaggagaatgtttacatggccaagttggctgatcaggctgaaaggtatgaggagatggttgagtatatggagaaggtggctaagactgtagatgtggaagagctcactgttgaggagcgtaaccttctgtctgttgcatacaagaatgtgattggggctcgccgcgcttcatggcgcattgtttcttccattgaacaaaaggaggagtcccgtaagaacgaagagcatgtgaaccttatcaaggaatatcgtggcaagatcgaggctgaactgagcaatatctgtgatggcatcttgaagctgcttgactcccacctaatgccttcttctacttgtggtggatcaaaggtcttctaacctaagaggaag

SEQ ID NO: 93365 - DNA, 533 bp, Zea mays
  unsure (1)..(533): unsure at all n locations
taatgatnnnngntccgggttggtatgaatggagtgttatgctcgtaccggtccggaattcccgggtcgacccacgcgtccgcgcgtgcgaaccaagcagaccccagcagaagaagcgaagtcgtcgccggagcaggaggaagagcgagcagcaagatgtcgtggcaggcgtacgtcgatgaccacctgctgtgcgacatcgaaggccagcacctcagcgccgccgccatcgtcggccacgacggcagcgtctgggcacagtccgagaacttccccgagttaaagcctgaggaggttgctgggatgataaaggactttgatgaacctggaactcttgcaccaactggtctttttgttggaggtacgaagtacatggtgatccaaggtgaacctggagttgtcatccgaggaaagaagggcactggaggcattactatcaagaaaactggcatgtncttgnatatcggtatctatgatgagccaatgactccagggcaatgcaatatggtggtggagaggctcggcgattacct

SEQ ID NO: 93366 - DNA, 535 bp, Zea mays
  unsure (1)..(535): unsure at all n locations
tgaggatnngaggcgggntgaaatcggatgcatcgctcngcactgcggtaccggtccggaattcccgggtcgacccacgcgtccgcggacgcgtgggaaggccaatcccgagcagtggtgcgaaacctcgagcgctggcgccggtgaccataacaaagaggaagccgcggtagcactggtagcggcagcagtagggggtatatgtcgtaagcgttcagcggcgatgagaccgcccctttcttcggcttccttggcgcctccgctgcgctcgtcttctcatgcatgggggcggcgtacgggacagccaagagtggcgtcggcgtggcgtccatgggtgtcatgcgcccagagctcgtcatgaagtccatcgggcccgtggtcatggctggtgtactcgggatctacggcctcatcatcggcgtcatcatcagcactgggatcaacctcaatgccaagccatactaactttttgacggctatgcccacctgtcgtatggccttgcctgaggcttggttggcttggctgaggcctgga

SEQ ID NO: 93367 - DNA, 535 bp, Zea mays
  unsure (1)..(535): unsure at all n locations
gttagnnnngtaaatgcntgagcatcgtaggagggttattgcactgctcgtaccggtccggaattcccgggtccgaagctcaatcaattcactcaaacctcttccccaaatcttcgattagattctcgttgacaagaagactagaaccgaacctgaccatgtcgctgatccgccgcagcaacgtgttcgatcccttctccctcgacctctgggacccctttgagggcttccccttcggctccggcagcagcagcagtctcttcccctcgttcccgcggaccagctcggagaccgcggccttcgctggcgcgcggatcgactggaaggagactccagaggcgcacgtgttcaaggcagacgtaccggggctgaagaaagaggaggtcaaggtggaagtcgaggacggcaacgtccttcagatcagcggcgagcgcaacaaggagcangaggagaagacggacacctggcaccgcgtggagcggagcagccggagaatcctgcgcaggtttcgacttgccgaggacgccaaaaccgg

SEQ ID NO: 93368 - DNA, 535 bp, Zea mays
  unsure (1)..(535): unsure at all n locations
ngtgatatggtgtgatcgaagggggtatattgtatctgtcgtaccggtccggaattcccgggtcgacccacgcgtccgggtaaatcctccgtccttatggatgtcaaaccatgggacgatgagactgatatgaagaagctggaggaggctgtccgcagtgtccagatggagggtctgacttggggagcatcaaagcttgtgcctgttggatacggcatcaagaagatgactatcatgttgacaattgtcgacgatcttgtgtccatcgacactctaattgaggaccaccttacgcaagagcccatcaatgagtacgtccagagttgcgacattgtggctttcaacaagatctagagttcagtttctgagattgggcaacggcagcggctcagctcgtcaagtttgtgctgggatgccagtttatcccttctagtctattacagaaatgttgntcggagctgagtctattataaacatcttggtcttgagttattggtgagtggtgccaagttttttcaatatacatttatcttaa

SEQ ID NO: 93369 - DNA, 531 bp, Zea mays
  unsure (1)..(531): unsure at all n locations
ngggatcgatgcttccttgaatgaggagttattggactctcgtaccggtccggaattcccgggggccatactatcctggtccatgctgctgctggtggtgtcggctcactcctttgtcaatgggcaaacgcccttggtgccactgtcatcgggactgtttccaatcaagaaaaagccgctcaggcagctcaggatggatgccaccatcccataatttacactagcgaggatgtcgtcgcaagagtcaaggatattacatcaggaaaaggtgtcaatgtcgtctatgattctgttggaaaggatacatacaaggcttccctggagtgcttggcgtcccgcggcttcctggtgtcgtttgggcagtcgtcaagcaaacctgacccaatcccaacgagcgacctggcttccaagtccttggtcctcactcgtcctaacctcatgccttacaatggtaccccggattaacttgttgaatcaagcggccaaggggttggccatggcccttaccgggtgcttgaccttccggttaaa

SEQ ID NO: 93370 - DNA, 535 bp, Zea mays
  unsure (1)..(535): unsure at all n locations
taattatnngtngtgtcntnagatgataagacttatgcatctgctcgtaccggtccggaattcccgggtcgacccacgcgtccggtgtatggcttccctccactcgttgaagatatctgggtatacggggacagtttcagatcaagtttagttgcagtagtcaatccacaccaagaaaacacaatgaagtgggcagagtccaatggctacaagggttcttttgatgaaatctgcaaacttgaaggactcaaagagtacatcctgaaagagctggcagccgttgcgcagaagaacaagctacgaggcttcgagtacatcaaaggcgtagtgttggatcctgtgccttttgacatcgagagggatttggtgactgcaacaatgaagaagaagagaaagaatatgctgaactattaccagtctgagattgacacaatatacaaaaagcttgaggcgcaaaagaatgctgccagaactaagtgaagagatgtgccctattcgatcatcagcttgaaacaanggaaacgaacacggtgtt

SEQ ID NO: 93371 - DNA, 535 bp, Zea mays
  unsure (1)..(535): unsure at all n locations
tatttggtgnnngcccgtnntagatagatggggtgtattgcattgctcgtaccggtccggaattcccgggtcgacccacgcgtccggtgaaggccaagatccaggacaaggagggcattcccccagaccagcagcgtctgatgtttgctggcaagcagctggaggatggtcgcaccctcgcggactacaacatccagaaggagagtacccttcaccttgttctccgcctcaggggtggtatgcagatctttgtgaagaccctgactggaaaaaccataaccctggaggttgagagctcggacaccatcgacaatgtgaaggcgaagatccaggacaaggagggcatccccccggaccagcagcgtctgatcttcgccggcaaacagctggaggatggccgcaccttagcagactacaacatccaaaaggagagcaccctncaccttgtgctccgtcttcgtggtggtcagtaagtcatgggtcgtttaagctggcgatgtgcctgcttcgtctggtggccttttcatattggagg

SEQ ID NO: 93372 - DNA, 528 bp, Zea mays
  unsure (1)..(528): unsure at all n locations
agtgaggcgcttggatcgatagaaggctcagtactgtcgtaccggtccggaattcccgggtcgacccacgcgtccgcccacgcgtccgcccacgcgtccgcaatatatttggcattgctgttcactccaagtgtactgatggccccatttgcagagactcttggcagtaagtataggaaaacatggcttcgacttgtccatcgtactttggagcttgcaggtcctgcgtttatcaaatggggccaatgggctgcaacacgccctgatctgtttccaagtgacctttgtactgaattgtcaaagctgcacacaaaagcaccagctcacagctttacctatactaagaaaactgttgagaaagcttttggtcgaaagctatcagacatttttgaaaattttggagaagacccttgtgcatctggaaagtgtggctaagggccatcggcttgtctacaattcggtattcctaatcggaggccaaggcgtggtacctgtggagtaaaagtaaagcattcttgtggangggac

SEQ ID NO: 93373 - DNA, 531 bp, Zea mays
  unsure (1)..(531): unsure at all n locations
ngggatgatgcatttcatgattgaggagtcattgtcactctcgtaccggtccggaattcccgggtcgacccacgcgtccgctgccatcacacagcatgcaaagaacaataaacctgccctggtgtatgtaccgacaaggaagcatgcaaggttgactgcattggacttgtgtgcgtactctagtgttgagggtgctggaactccatttcttcttgggtcaggagatgagatggatactttcaccagaggtgttgaagaagagactcttaagaatacacttaaatgtggtgttggctatttgcatgagggtctaagtgagcttgatcaggaacttgtaacccagctgttccttggtgggaggatccaagtgtgtgttgcaagcagcacaatgtgttggggaagaccattggctgctcatttggtccgtggcaatgggactcaatattattgatggccggaaaatgcttacaacgactatcaattaccgaactggtttaaatggatgggcattgcaattgaacacatttagaa

SEQ ID NO: 93374 - DNA, 538 bp, Zea mays
  unsure (1)..(538): unsure at all n locations
gaatttatnngagngtgtgctgaacccaccctgagtgtatagctcataccggttcggaattcccgggtcgacccacgcgtccgctaagttaccaggtcatgaagagtcatacaatccttctgttgaatacattcctacacaagaggaaatagattcataccagcttatgtatgaggaggatcgcccaaagttcattccgaaacgatttgagtgccttcgaagtgtacctgcatatgagaaggcgttgagggaaggttttgatcggtgtctagatctttatctatgccctagaacccgcaaaaagcgtataaatattgatcctgagtcactcaagcccaagttaccaagtaaaaaggatttgaagccatacccgaaaacttggtaccttgagttcaagggccatatgagtcctgtgaaatccatttcggtcgaaattaccaggcaatggcttgcatttggttcttgtgatggtacaattcgtgtctgggaggttgaaactggtccctggctttaaagtttggaatgtggaagggaatgt

SEQ ID NO: 93375 - DNA, 532 bp, Zea mays
  unsure (1)..(532): unsure at all n locations
gtgtnnnggtacgtgcttgacctaccttgtagatcatagctcgtaccggtccggaattcccgggtcgacccacgcgtccggggttgccgccgcgtgctggtgacggtcacggggcctctggggtgcgcgccggcgatccttgcgcagcgcagccgcaacggcgagtgcgcggcggagctgatgcgcgcggcggcgctcttcaacccgtagcttggcgcgcgtcctggaccagctcaacgcgcgctttggcgccggcaccttcatcgcggccaacgcgttccgcgtccacttcgacttcgtcagcgatccggccgccttcggcttcgccacggccaaggacgcgtgctgcggacagggcccccacaacggcctgggcctctgcaccccgctctccaacctgtgcgccgaccgcagcaagtacgtcttctgggacgcctaccaccccacggagcgcgccaaccgggtcatcgtcaggcagttcatgtcaaggtcgttcgactatctcaggcccatgaacttaacaacggtttgt

SEQ ID NO: 93376 - DNA, 535 bp, Zea mays
  unsure (1)..(535): unsure at all n locations
tgatttatnnatcgagccattagactgctagtctagtcagcattgcagtaccggttcggaattcccggggttcaagagatcagtgtatggtggagttgtaggccctgtcccaccagcaccagacactgaagggggtaatgacgaagtatcggttcaagagatcagtgaagcccagcccttgccttgaagacggtgctcatttgccttaaagccccgctttcttctcccgcacctggtgatcttcacgatgttgttgttgcacagcaggtccggactgagtatttcctatttggttctatttttagtgcactataatatcacaagcgaagctacaattggttgtgagctatattggcatatccttcccttggatgtattcccttgaacaatgattcagaacaactgtttaaccattttctaaaggatcgactgcttatgtactcatgcagaactgcctaattgtgcctctggctgaatagcagccaagtaagcatgacatgctcttggtcatttagtatggtccacaatggcttat

SEQ ID NO: 93377 - DNA, 531 bp, Zea mays
  unsure (1)..(531): unsure at all n locations
ggatnnggtngcgtactnctatcgatagaatgttattgcatctgctcgtaccggtccggaattcccgggtcgacccacgcgtccgctcaaggtcatagctggtgtagacacgagcttcactgtgacatccaagggtggagacgacgaggagttctcagagctgtacacattcaaatggacgacccttctgatacctccgacaaccctgctcctactgaacttcattggagtggtagctggcatctccaatgcgatcaacaacggatatgaatcatggggccccctgttcgggaagctcttctttgcattttgggtgatcgtccatctttacccgttcctcaagggtctggttgggaggcagaacatgacgccaacgattgtcattgtctggtccatcctcctggcttcgatcttctcgctgctttgggtccggatcgaccctttccttgcgaaggatgatggtcccctgttggaggagtgtggtctggattgcaactaggaggtcagcacgttaacttccccggcagtgtg

SEQ ID NO: 93378 - DNA, 539 bp, Zea mays
  unsure (1)..(539): unsure at all n locations
taattnatnngtnngcggtcctgagctcatgnatgatcgtatgactataccggtccggaattcccgggtcgacccacgcgtccgtgctggaatttctgaatatattgatatggagaaggagcttcaagaggtcataacgttaaccgaagagattttggcaactgcaaagcaaactgagagtgcccagaatgttgcaggtctatcaccgccaagctattcagctggagtgcagtctgagggactggatgacctttcacattcccataagtttgccgttggtactagagttcaagctgtgtggagtgaagatggagaatggtataatgcaaccgttgaagctttgacaccaaatggatactatgtagcctacgatggctggggaaacagtgaagaggtggacccagataatgtgaggctgcttgaggaagaagcagctgatgccttgggacaagctgaaaagggaagctgaagctacaaaaatggcaataaagaggaaaattgaacaagcagcaacatcttgatttcaagcgcgtaacttt

SEQ ID NO: 93379 - DNA, 529 bp, Zea mays
  unsure (1)..(529): unsure at all n locations
ggagnggcccgtggttgacctaccttgagtcgcatagcagtaccggtccggaattcccgggtcgacccacgcgtccgggagagcagtcaccaaaccaaaccgctctcgagtctccatccattctctccgctcatgcgcagctctctagtctccagctctagctagccttagcctcgtccaagggacgaaggggccgaccatgagcgtggtgatcctggacggctccacggtgcgcggcttcgtggcggacgaggcggccttcgcgcgcagcctggacgcgcggttcgccgcgctggacgccaacggcgacggcgtgctgtcccgcgccgagctccggcgcgcgctcgagtccttccgcctcctcgacggcggcggcttcgggtccgcccagccggcgccgctccccgccgaggtcgccgcgctctacgacgccgtcttcgagcagttcgacgccgaccacagcggcgccgtcgaccgtgccgagttccacgacgaggagcgccgattatggctgccgtggccaacggct

SEQ ID NO: 93380 - DNA, 534 bp, Zea mays
  unsure (1)..(534): unsure at all n locations
tgattnatnnatngacgtgttgattagtatgtatagtatgctcgtaccggtccggaattcccgggtcgacccacgcgtccggataagaaaatccttaagaaggttctcaaggagggagaaggttatgagcgtcccaacgagggtgctgttgttgaagtcaaaattatcggaaagcttcaggatggcgcggtgtttacaaagaaggggcatgacgaagagccatttaaattcaagaccgatgaagaggaagttattgccggtcttgatcgtgctgtgttgaacatgaagaagggcgaggttgctcttgtcacaattcctcctgaatatgcatttggttcaactgagtcaaagcaggatcttgctgttgttccacctaacagcacagtaatatatgaagttgagcttatttcatttgtgaaggacaaggagtcgtgggacttgaacaatgaagagaagattgaggctgctggtaagaagaaagaggaagggaatgcattgttcaaatcgggcaatatgctagagcttncaagcgat

SEQ ID NO: 93381 - DNA, 525 bp, Zea mays
ggtgtggggagtggtgacctatgagtatgtatcgctgtaccggtccggaattcccgggctgcacactgccatcgctctcctacggtactgctgcctaccgcgcgtctcgtcccttcgctgccgctctatcggatctcggccggagccatgggcggcggtggcgcggcgctgctgctgctggtgatgtgggcgggcgtggcgtcggcggccgtgtacgaggtgggcggcacgattgggtggaccgtcatgggcaaccccgactacgccgcctgggccagctccaagcagatcgtcatcggcgacactgttgtgttcacgtataacaagcagttccacaacgtgctggcggtgagcaaggcggactacaagaactgcatcgccaccaagccgacggccacctggtccacggggaacgattccgtcgtcctcaacaccacgggccaccactactttctttgcggctacccgggccactgcgctggcaggcagaagtggacattcgcgttgcttctttgtggccctttc

SEQ ID NO: 93382 - DNA, 540 bp, Zea mays
  unsure (1)..(540): unsure at all n locations
gtgatnanagnggagggagtttagatcggctcagcgtcgctcagctactgctngtaccggtccggaattcccgggtcgacccacgcgtccgcccacgcgtccgcgaggttcaggtttcacgcagtgcggcgagagctggcagccatggagagggggagcccatggtcgctgcggctgctaatttgctgcgcggcaatggtggccatcgcgcttctcccccaacaaggaggccaggccgcttgtttcgtgccgacgccgggtccagctccggcaccgcccggctcctccgcgacgaacacgaacgactcctccgctgctcctcggccagccaagcccagcgcattcccacccccaatgtacggtggtgtcacccccggcagtctccagccacacgagtgcggcggccggtgcgcggggcggtgctcggcgacggcgtaccagaagccgtgcctatttttctgccagaagtgctgcgcggcgtgcctgtgcgtgccgacgggcacctaccggaaacaggaccactggccctggtccaacaac

SEQ ID NO: 93383 - DNA, 533 bp, Zea mays
  unsure (1)..(533): unsure at all n locations
tatggatnngtcgcgccantagatgctacgatattatgcattgctcgtaccggtccggaattcccgggtcgacccacgcgtccggaccgacccgccgccgccgccgccgccggccgacgactccaaggccctggccatcggcgagaaagttgcagatgaacctgctcccgagaagcctgcccctgcgaagcaagggggctccaatgacagggatctcgctcttgcaagggtggaaacagagaagaggaactctttgatcaaagcttgggaagagaatgagaagacaaaagctgagaacaaggctgctaagaaagtatccgctattctttcatgggaaaacacanagaaagcaaacatagaagctgaactgaagaagattgaggaacaactggaaaagaagaaggctgaatatgcagagaagatgaagaacaaggttgcaatgatacacaaggaagccgaagagaagcgagcgatggtggangcataacgcggtgaggaggtcctgaaggccangagaatgctgccaagtanga

SEQ ID NO: 93384 - DNA, 538 bp, Zea mays
agtagtcgcatggttcaattgaatggaggaggtcactgcatcgctcgtaccggtccggaattcccgggtcgacccacgcgtccgaggagatctacctccactcgctccccgtcaaggagcaccagatcgtcgagaccctcgtgccggggctcaaggacgaggtgatgaagatcacgcccgttcagaagcagacccgcgccggacagcgcacccgcttcaaggcctttgtcgtcgtgggcgacggcgacggccacgtcggcctgggagtcaagtgcgccaaggaggtggccaccgccatccgcggcgccatcatcctcgccaagctctccgttgttcccgtcaggagaggctactgggggaacaagatcgggcagccgcacaccgtgcccttgcaggtcaccggcaagtgcgggtccgtcaccgtgcgcatggtgcctgggcccaagggttctggcatcggcggcgggcgcgtggccaagaaggtgcttgaagtcgcttgcattgaagattgcttcaacttggtccgtggcttcactta

SEQ ID NO: 93385 - DNA, 521 bp, Zea mays
  unsure (1)..(521): unsure at all n locations
ttatnggggtgtcgtgaccctcattttagtacgcatacgtccgaattcccgggtcgacccacgcgtccggcagatttcaatcttcgaatcagtctccagatatggctgctcgttgcatctacgggtgtccttggaaccttcggctaccatgctcccgagtatgccatgactggccagctaacttataagagtgttatatatagctttggggttgtccttttagagcttctaacaggaaggaaaccagtatatcatacaatgcctagaggtcagcagagtctggttacatgggcaacacctatattgactgaggacacagtataacaatgtgttgatccaagattgaatggagaatattcttcaaagggtgtgtgcctgttttgctgctgttgcttcactttttgttcaataggattgttgtttattacatttgtgatcatttaattaacgggactttcatcgcgtagtgtgcttttaattttattatattttttttggacctgtttgtgttttttctgatt

SEQ ID NO: 93386 - DNA, 542 bp, Zea mays
  unsure (1)..(542): unsure at all n locations
taattnatnngngaggtcattacctcgaacaagatcgcttagcatctgctcgtaccggtccggaattcccgggtcgacccacgcgtccggtcggatgcaggctcttcctggtgtgttcttcttttatgacctttctccaatcaaggtcacattcacggaacaacatgtgtcatttttacactttttaactaatgtttgcgctattgttggaggtgtgttcaccgtttctggaatcatagattcgtttgtataccatagtcaaagagcaatcaagaagaagatggaaatcggcaaattcaactgatgttgccttactattgctgcaattaagtagctcctgttgcagctccaagatccagaaatgcaatgtggcttttcctcgaactcttggcacagttgcgtagttgacaaacaattgctcatcagataactcttgatgtgcttgccaacttgcttccggcaaagataccagcgagcaagatggtcatcttggatacttcgatgttacattttttggacgcttaagttcgaccaagaaaacc

SEQ ID NO: 93387 - DNA, 528 bp, Zea mays
  unsure (1)..(528): unsure at all n locations
tataatggagcgnngcgtgatgtgtatgaatgagaggtagtgtatactcgtccggaattcccgggtcgacccacgcgtccgctttaccactatgatcttcctcttgcgcttgagaagaaatatggagggtggttaagcgcgaagatggcggacttgtttacagactatgctgacttctgttttaagacctacggcgatcgcgtaaagcactggtttacattcaatgagccaaggatagtagcgctacttggctatgacacagggtcaaatcctcctcaaaggtgcaccagatgcgctgctggtgggaattcagcaaccgaaccttacatagttgctcataattttctcttggcacatgctactgcagttgcaagataccgtacgaaatatcaggctgctcagaaggtaaggtcggaatagtcctggacttcaactggtacgaggctcttacaacttacctgatgaccaacagcagnccaaagaggcagggacttncacattgcttgttngttgatccatggataaccg

SEQ ID NO: 93388 - DNA, 534 bp, Zea mays
  unsure (1)..(534): unsure at all n locations
tgagtatgngncccgtgctganctagttgaagatcgttataccacactcgtaccggtccggaattcccgggtcgacccacgcgtccggcgggctcccggctcccttcggccacgcgcaccaccaccccgtcgtccgtggccgtggccaccccgcgcgccggcggcggccccatccgcgcgtccatctcctcccccaacccgccctacgacctgacgtccttccggttcagccccatcaaggagtccatcgtgtcccgcgagatgacccggcgctacatgacggacatgatcacccacgccgacaccgacgtggtgatcgtgggcgccgggtccgcgggcctgtcctgcgcgtacgagctgtccaaggaccccaccgtgagcgtggccatcgtggagcagtccgtgtccccgggcggcggcgcgtggctgggcgggcagctgttcttcggcatggtggtgcgcaagcccgcgcacctgttcctgaacgagctgggcctgggctacgacgaggccgaggactacctggtggcaaac

SEQ ID NO: 93389 - DNA, 536 bp, Zea mays
  unsure (1)..(536): unsure at all n locations
ttataattnatnnnngnngtgccnntggctcgataagtaatatagcatcctcgaaccggtccggaattccggggtatccttanaaaaaagagtgcgcgagtttgtatagagcgcaatggggtacattgcaccaaacctttctgcaattgttggcagtgctgttgcttccaaactgatgggtactgcaggtggtctgggagcacttgcaaaaatgcctgcttgtaatgttcagttactcggtgcaaagaggaaaaatcttgctggattttctactgccacttctcagtttcgtgttggctatcttgaacaaactgaagtatttcagagcacccctccacctttaaggactcgtgcctgcagacttattgctgcaaaatcaactctggcagcaaggattgattcaattagaggtgatccaactggaaaagctggacggaacttgttagaagaaattcgtaagaagattgagaagtggcaagaaccggcttctgcgaagcttccaaaggcaactccaagttcgggcatctgaagctaaa

SEQ ID NO: 93390 - DNA, 537 bp, Zea mays
  unsure (1)..(537): unsure at all n locations
aataattnagggncaggnnnannnatagaagtcgatagcactactagaaccntagaggtaggagaagaagccgggagccacgcgtacgggtaaatcctccgtccttatggatgttaaaccatgggacgatgagactgagatgaggaagctggaggaggctgtccgcagtgtccagatggagggtctgactagagagagcaaatgaacaaagaaaagattggatacggcatcaagaagatgactatcatgttgacaattgtcgacgatcttgtgtccatcgacactctaattgaggaccaccttacgcaagagcccatcaatgagtacgtacagagttacgacattggggctttcaacaagatcttatattcagtttctgaaattgtgcaacagcagcggatcaactcgtcaagtatgtgctgggatgccagtatataccatctatgtcattacagaaaagatgaatcgaaccgaagtcaatattaaccaaatagactgattcaaaatgagaaaggtgcccagatttttaaaanacca

SEQ ID NO: 93391 - DNA, 530 bp, Zea mays
  unsure (1)..(530): unsure at all n locations
nggggtgtgcttatatggctacgatgatatagcactactcgtaccggtccggaattcccgggtcgacccacgcgtccgggtaaatcctccgtccttatggatgtcaaaccatgggacgatgagactgatatgaagaagctggaggaggctgtccgcagtgtccagatggagggtctgacttggggagcatcaaagcttgtgcctgttggatacggcatcaagaagatgactatcatgttgacaattgtcgacgatcttgtgtccatcgacactctaattgaggaccaccttacgcaagagcccatcaatgagtacgtccagagttgcgacattgtggctttcaacaagatctagagttcagtttctgagattgggcaacggcagcggctcaactcgtcaaagttgtgcttggatgccaagttatcccttctaggctattacaggaatggatgtcggagctgaatctaatattaaccatttggcctgaggttatggtgaatggtgccagtttttttcatatccatntattc

SEQ ID NO: 93392 - DNA, 531 bp, Zea mays
  unsure (1)..(531): unsure at all n locations
ngagagctggtttaatgataagaagtagtgcactgctcgtaccgtccggaattcccgggtcgactcacgcgtccgccgaaatcccgttgcgtctctcgcgcgttaccaagctctcaagttttctcgcgccgacggcaatggatgaggtcaccgaggccgtgaacaacctcaacatctcgggcgtaggggccgcgggcgttgccggggcggaagggcacaagaagaatcgcatccaggtctccaacactaagaagcccctcttcttctatgtcaacctcgccaagaggtacatgcagctgcacaacgaagtagagctgtcggccctcggcatggccattgcgacggtggtgacagtagcagaaattctgaaaaataacgggcttgctgtcgcgaagagtatcatgacatctactgttgatatcaaggacgagactaggacccggcctatccagaaggccaagattgaaatattgcttggcaagacggagaagtttgatgagctgatggcaacggctgccgaggaaagggagg

SEQ ID NO: 93393 - DNA, 544 bp, Zea mays
  unsure (1)..(544): unsure at all n locations
nggggtaagtgggcccatcgaattcgttgctcttcnannactgtaccggtccggaattcccgggtcgacccacgcgtccggcggttttagatctctcatatacttttggaacttcactggtggatgccaaacttcgacttcctgttgtattgaataaatttttgcagcctataactcttacccctgaagaatttttcctccagtggaaagcgctgactgttcacttgctgaaggttcaagaagtggttaaaggtgtgaaaccaatgcctctttctgagatggctaatcttttcatgagccttcacttggcggtcgctcctggacttgataacaacccgaacaatctggttgcatgcacgacattcttttctgaagcaacacaagccatgctttgtcttgatagactttgaacagattcacaagacaagacccaactgcggctgacaagtggcttgggcgatcaacatttgacattcgagtttgaagagttcgtcaaggaacatttgaatgatattccaaggactcaagctggcccacctatggc

SEQ ID NO: 93394 - DNA, 510 bp, Zea mays
tggtttttaaatagcacgagactcactgcattgctcgtaccggttcggaattcccgggtcgacccacgcgtccggaaaaagaagatcaaaagagaaattaaaattcttcagaatctttgtggaggccctaacattgtgaagctgctcgatattgttagagatcagcattcgaaaacgcccagcttgatctttgaatatgttaacaacacagatttcaaagtgctgtacccaacattaacagattatgacattcggtattacatctacgagttactcaaggcattagattactgccattcacaaggtattatgcaccgagatgtgaagccccacaatgttatgatagatcatgagcttcggaaactccggctgatagactggggtcttgctgaattctatcatcctggcaaggaatataatgtccgtgttgcatccaggtacttcaaggggcctgagcttcttgttgacttgcaagattatgattactctttggacatgtggagtctgggc

SEQ ID NO: 93395 - DNA, 517 bp, Zea mays
tgctgtcctgatgccagcatatataggattgctcgtaccggtccggaattcccgggtcgacccacgcgtccgagaggaggagaggaagggcagcggtggcgccgccgccggcggcggctcgacccctggggcgaatctaagggacctggtgtcgagggaatactacggccacaagaagaaggtgcactctgtagcatggaactgcctaggcacaaagcttgcttcaggatcgatcgatcataccgcacgtgtctggagcattgatccacatgtccattctaaggttaaagatattgaactgaaaggccacacagatagtgtagatcagctttgctgggatccaaatcatcctgatacagttgctactgcagctgctgacaaatctattcgtctttgggatgctcgaagtggaaaatgtcaagttgttgaacttagtggagaaaacatcaacatcacatataaacatgatggcactcagatagcttgtggaaacaaggaggatgagctgacgatattg

SEQ ID NO: 93396 - DNA, 510 bp, Zea mays
  unsure (1)..(510): unsure at all n locations
cggtccttgggactagacagatagtattgctctaccggtccggaattcccgggtcgacccacgcgtccgcaaaccggccggaacgccatgctggaggagtacaaaccgtgtgcggccatggtggtgacgcagtgcatctacgccgctctagcgctcttgtccaaggcggcgttcaccggcggcatgagccccctggtgttcgtcgtctacaggcaggccgtcgccaccattgtactcgtccccgtcgtcatcgcggccaacaggaagaagatgaaggagatgacgacgggccttggactgacgggcttctcgctggtcttcgtcgcctcccttgtcggggcaacggtgaaccagtgcatgtactaccaaggggtgaatctgggctcgtcgtccatggcaacggccatgaccaacttgatccccgncatcaccttcgtcatggcggcatcagtcggcctagagaaggtggaggccacgaagccgaaggaccctggccagaactttgggacg

SEQ ID NO: 93397 - DNA, 526 bp, Zea mays
  unsure (1)..(526): unsure at all n locations
agttaggggtgagaaaagactagtagtatcgctcgtnccggttcggaattcccgggtcgacccacgcgtccggcaatttcgccctcgattcgaccccgattcgtccgcccgcgaccgggattccctccggcaagcgcggatctgaacgctgcgctccgtgtcgtcgctcgaatccgccatgaagggggccaaatccaagggcgccgccaaggccgatgccaagctggcggtgaagagcaagggggcggagaagcccgccaagggcaggaaggggaaagccggcaaggaccccaacaagcctaagagggctcccagcgctttcttcgtgttcatggaggaatttcgcaaggagttcaaggagaagaaccctaagaacaagtctgtcgctgcggtgggaaaagctgctggcgacaggtggaaatccctgagcgagtccgacaaggctccctatgtagccaaagctaaacaagctcaagctagagtaccacaagggcattggagcctacaaccaagggcgagaagactt

SEQ ID NO: 93398 - DNA, 497 bp, Zea mays
  unsure (1)..(497): unsure at all n locations
gaaaaagaanaaaaaaactgagatcgatgcatngtacgaaccntttgagatcccggtgttggcttctcctaccccaccggttcgtgttcaggttctggttcgtgggccgagagcggaagagcatggcctgcgtctggacggtgagtaccgatgcttcgttggcggtctctgctgagccaccgacgaccactatgtctacaacgacttaagaacctactgagaggtgctctagacgctgatcatactggatcggtatacgcaaaggtctatacgatgctgatgtgactcactatccacggtagactcaatgcgcacaacgactgagatcgtgaacatccaggtgctattgtgacagagaagtacggttatggtagcatagtctcggggacgtcgctgatgcacaggacgcagatactgtgtgatgcgctgccatggacgctacttctgcggatgcctaagcatgtacacgagggagctgagaggattccgttgagatc

SEQ ID NO: 93399 - DNA, 512 bp, Zea mays
  unsure (1)..(512): unsure at all n locations
gtaggnctgcgtatgaggagggagaaagtagtactcggtccggaattcccgggtcgacccacgcgtccgcgcgtggacttcaaggagcccgtgtggttcaaggccggcgcgcagatcttctcggagggcgggctggactacctgggcaaccccaacctggtgcacgcgcagagcatcctggccgtgctcggcttccaggtcatcctcatgggcctcgtcgagggcttccgcatcaacggcctcgacggcgtcggcgagggcaacaacctctaccccggcggccagtacttcgacccgctgggcctcgccgacgaccccgtcaccttcgccgagctcaaggtcaaggagatcaagaacggccgcctcgccatgttctccatgttcggcttcttcgtccaggccatcgtcaccggcaaggggcccctcgagaacctgctcgaccacctcgacgaccccgtcggcaacaacgcctgggtctacgccaccaagttcgcacccaggtcttaagctaa

SEQ ID NO: 93400 - DNA, 518 bp, Zea mays
  unsure (1)..(518): unsure at all n locations
tgggtgaataagcagaggtagaaaggatgtctcggtccggaattcccgggtcgacccacgcgtccgcaggctcaccacaccaaccagcaagcaaaaattccccaatcctctcgtctccgcggctaagatgtcggggcgcggcaagggcggcaagggcctgggcaagggcggcgcgaagcgtcaccggaaggtgctgcgcgacaacatccaggggatcacgaagccggcgatccggaggctggcgcggcggggcggcgtgaagcgcatctcggggctcatctacgaggagacccgcggcgtgctcaagatcttcctggagaacgtcatccgcgacgccgtcacctacaccgagcacgcgcgccgtaagaccgtcaccgtcatggacgtcgtctacgcccttaagcgccagggccgcaccctctatggctcngcggctaagtctgccgcggccgctctagaagatccaagcttacgtacgcgtgcatgcaacgtcatagctcttctataaggtcaaccaa

SEQ ID NO: 93401 - DNA, 492 bp, Zea mays
agaaatgtgtctctataagataggggggggagaggtatcacctcctcggaattcccgggatgaggatgagaagaagggagcagcagtgggcaccatgaaagtgaagacgggagaagaaggtaataagggtgcgtcagagcaatcggaggcacagatatttgtgcagatggtagcggcatttggattgaaggataagttcgatgaggagttcttgagaaggctgtttgttgctaatggacggaagagggagcttgctaggattgcatgcgtgcttggatttgaggaaagccttggagatattgttgaggaactaataaagtcagggaatgctatagaggctatatatgttgcccatgaagctgatttgcttgggaaatttccacctgtgcctctcttcaaatcttatctgcagaattccactgataaggctcaagcagtgttgaaaagtggaagacattccaggtctgcacttgaagaggcaaacagcttgga

SEQ ID NO: 93402 - DNA, 493 bp, Zea mays
agggttgctccttgataggggggcgggaggggtaagtttgtaccggtccggaattcccgggtcgacccacgcgtccggttgattactatgagcatggtgttttggtgttgtattcaaagttctgagctatccttaactaactggtgctgtccgaagtggggtgcacaaaagcttttggatttgatattacagctgcttgtagtgggtttttagtcggcttaatcacagctactcgctttatcaaaggcggaggttttcagaatgtcttagtagttggtgcagatgctctttcaaaatacgtggattggacagacagaggcaggattgaggctgtttcatcctcctctgctgcgggatgggtggggtcgtcaccgtggcgtcactcgtggcgtatcgtgcagtatggacgacaacggggagctgtcaagatgggttacctcaagacggatgagttcctcaagaggggcgagagcggtggcacgtgctgtgtcat

SEQ ID NO: 93403 - DNA, 489 bp, Zea mays
  unsure (1)..(489): unsure at all n locations
gtngagtgtcctgaaacgggaggggggaaaaagtgttatcccgtccggaattcccgggtcgacccacgcgtccggcttacatctcaataatcgctctaattgtttgcattccacctgcattgatctttgaagggcccaagctaatgcagcatggatttagtgatgccattgcanaagtaggtttgacaaagtttgtcagtgacctattcttggttggactgttctaccatctgtataaccagattgctacaaacaccttggagcgagtggctcctctgacacatgctgtcggcaatgtgttgaaacgtgttttcgtcatcggtttctcaatcattgtttttggcaacaaaattagcacacaaactggaattggcacgtccattgccatagctggtgttgctatgtactcttacattaaggctaagattgaagaggagaaaaggaaaaagagcgcatgactgctgtgaataatattatcaggaccttccc

SEQ ID NO: 93404 - DNA, 488 bp, Zea mays
  unsure (1)..(488): unsure at all n locations
ngagaggtgctgcacacgcagcgaaggtaagctgctccgctgatgaccccccgggtcgacccacgcgtccgcggacgcgtgggatcggcgagtggcaatccaatggcacgatgaagatcatcgacagagggaagaacatcttcaagctgtcccagggggagtatgtggcagttgaggtcctggaaagagcatacctgcagtcaccccttgtggcatcggtctgggtctacgggaacagcttcgagtcgttcctcgttgccgtggctgtccctgagaggcaggctctcgaggaatgggcagcagccaacagcaaggccggcgactttgcagagctgtgcgctgatcccaaggcgaggacctacgttcgggatcagctgaaccaaactgggaagaaacttgggttgagaggcttcgagatgctgaaagcagtctacctggagccggtgcctttcagcatcgagaaggacctcgtcactccaacctttaaa

SEQ ID NO: 93405 - DNA, 516 bp, Zea mays
tggttattatggggggaaaaaagtagagtcgtaccggtccggaattcccgggtcgacccacgcgtccgggcaagaagaaagaatctgggaagtcatcagttttacttgatgtgaagccatgggacgatgagactgacatggccaagcttgaggaagctgttaggagtgtccagatggaagggctgctctggggcgcatccaagcttgtcccagtcggatatggtatcaagaagctgcaaatcatgatgaccatagtcgacgatcttgtctctgtcgacactctcattgaggactatctgtgcgctgagccagttaacgagtacgtccagagctgcgacatcgttgccttcaacaagatctaggcgtgactttcgatcagtccttcccctggggtgctggcgatggtggtggctgggcaatgcaccagcctaattttccatagctatatgtctgctttgtgtggccagtgatatttgcgtgagtattttttggatcctattcaagtcggatgtccca

SEQ ID NO: 93406 - DNA, 516 bp, Zea mays
  unsure (1)..(516): unsure at all n locations
ntggattgcgacactagacacgaaagtattgctactacaggttcggaattcccgggtcgacccacgcgtccgggataaattactatacctcaaggttctctaagcacgtcgacttctcagaagactactgacctaagctcaacgccgacgacgcctatgccactgcagaaatctttggacctgacgggaattctattggtcctcctatgggaaatccatggatctacatgtaccctaaaggcctaaaggatctccttatgatcatgaagaacaaatacggaaacccgcctatctatatcaccgagaacggaatcggggacgttgacacaaaggataatcctctatccatgcaagatgcgttggacgactacaagaggctagattacctncagcgccacatctcagttatcaaagaatcaatagacttgggggcggacgtgcgcggccacttcacatggtctctgttggacaacttcgagtggtctaatggctacaccgagcgttaccggattattt

SEQ ID NO: 93407 - DNA, 485 bp, Zea mays
gcgctctgtgtatagaataaagaatatgtgaactcgtctcggattcccgggtcgacccacgcgtccgatgaagaaactcaaaatgcaatcatgggtcatcccaagatacagtttccattatggattgaattgggagaaggaagccatccattacctctctgagaaagcgcaattgtgaaacctgccaagaagggacctaaggttgttaccttggcactccttaaccaggcacataacctacacagatatggaaaactatatcttcagatgtgcccaaagttgagagtaagactcgtatatggcaccagcttatctgctgcagtagttgagaatagtgcccctcagggcacatatcaagttgttctcgcagggaatatttccaaagttgctcgtgctgttgccgcatcattgtgtaggaagaatatcaaggtagtaatgaccaacatgcaggattaccatttttttaagcctaacatggcagaaga

SEQ ID NO: 93408 - DNA, 484 bp, Zea mays
acgtgctgattctccgacaaaggtatgtacttctgttctcggaattcccgggtcgacccacgcgtccgctccggggttcggtttcgtgggtgagcggatcgagatggcggcgtcggatgttgagggccgctgcttcgtcggcggcctcgcctgggccacggacgaccactgcctgcacaacgccttcagcacctacggcgaggtcctcgagtccaagatcatcctcgatcgggagacgcagaggtcccgcggcttcggcttcgtcaccttctccacggaggaggcgatgcggaacgccatcgagggcatgaacggcacggagctggacggccgcaacatcaccgtcaacgaggcccagtcccgcggcggccgtggaggccgcggcggcggcggatacggtggcggacgtggaggcggcggctacggcggtggcgggcgccgcgatggcggcggcggctacggccgtggcggctgctacggtggg

SEQ ID NO: 93409 - DNA, 521 bp, Zea mays
  unsure (1)..(521): unsure at all n locations
ggttatgtgttgnctattgtggggggaagaaaagtattgctcgtaccggtccggaattcccgggcgaagatattgcaaagaatttgcggttgaatttgacaaaaaaggatggtggcttgttaaagatggaagcttcaaagcccggaaggaaaggggtaatgggtatcgatgccgaagtatttgaggttagccccaacttccatcttgtggagataaagaagacgaatggcgacactctagagtatcaaaaggtcctgaaccaagaaatgaggcccgcactcaaggaaatagtgtgggcttggcaaggtgagcaatcaaagcaaaagcaggaacaacagtcgtgttaaaaacttatgagctagtgcaatgtttttagccaatttccaatctttcgtgtatttgtgtagtttttactcttttattatccatttttgttttcccgtgtaataccaacaaaaacttgtgtagttgtgttattttctgaggacacaatttgttcaaaaaaaaaaaaaaaaaaaaaa

SEQ ID NO: 93410 - DNA, 491 bp, Zea mays
gggaagcgtgcttgaactgacgcggacggtatgctcgtaccggtccggaattcccgggtcgacccacgcgtccggtccgcgagcgctgcagcacctcggatcccgccccaatggcaacagcgtgtccgccgctctcgctgccgtccacctccctcttccgcggcaggtccgcccgcgccgggcccagacgcaggcagctcacggccgtccgctgcagcgccgtcggagaggcggtagtggaggaggcctcgcccgggacggcggaagagccgctgctggtgagcgcaatcagagggaggaaggtcgagaggccacccgtctggctcatgaggcaggccgggaggtacatgaagagctaccaattgctctgcgagcggtatccttcgttccgtgaaagatcagaaaatgtcgacctagttgttgagatctctttgcaaccatggaaggttttcaagcctgatggagtcatcttgttctcggacatccttacc

SEQ ID NO: 93411 - DNA, 486 bp, Zea mays
acgtattgcacgggggcggatgaaatagcttctaccggtccggaattcccgggtcgacccacgcgtccgagacgagccaccttatacgagatgataagggattatggacatgctgctaatgatttaaggaagctaatctcacttcttgaaaagaaagtcaatgtgtctggaatatcaccaaaagcttttaacaagcataaagatatcaagcaagcacatgcgaggctttcacacatacatgctgaagcaaaaaacgatacccccctgaatttgtatttaatcttgggagtggagccatcctgctcttcagcagatattaagaaggcataccggaaagctgcattgagacatcacccagacaaggctgctcaattattagtaaggaacgagaatgctgaagatggattttggagggatgttatcaaggaagtctatgcagatgcggatcatctgttcaaaacaattggggaggcatataatgttctt

SEQ ID NO: 93412 - DNA, 493 bp, Zea mays
  unsure (1)..(493): unsure at all n locations
aggtggagcgtccttgagttccttagaaacatagcgcactaccgccttccgattcccggctcgacccacgcgttcgatacgagcaaccttatacgacatgatattggattatagacatgctgctaatgattcagggaagctaatctcacctcttgaaaagaaagtcaatgtgtctggaatatcaccaaaagcttttaacaagcataaacatatcatagcaagcacatgcgaagctttcacacatacatgctgaagcacaaaacgataccccactgaatttgtatttaatctttgaagtggagccatgctgctattcaacacatattaataatgcataccgcaaagctgccttgaaacatcacccatacaatgctgatcaattatcagtaatgaacgagaattctgaagatggataccggagggatgatatcaatgaagtctattcagatgctgatcatctgttcaaaacaattggggaggcatataatgttcn

SEQ ID NO: 93413 - DNA, 487 bp, Zea mays
gatactagagtcatgcctatcgtatgtctgttccggtctcggaattcccggttcgacccacgcgtccgggttcgtgaggctctccgagttcggttcgtggtgacggacgagatgccgcgggggatgttgagtaccgctgcttcatcggcggactcgcctgggccacggacgaccactctctccacaacgccttcagcacctacggcgaggtcctcgagtccaagatcatcctggatcgggagacgcagatgtcccgctgcttctggttcgtcaccttctacacggaggatgctatgcggaacgccatcgagggcatgaacggcaaggagctggactgacgcatcatcaccgtcaacgaggtccagtcccgctgcggcccgagaagcctcagcagcgactgctacagggtgggacgcagaggctgtatgctacatgccgtggcatggcgcccgtgagaattggggcaggctactgaaagggcttgccg

SEQ ID NO: 93414 - DNA, 516 bp, Zea mays
  unsure (1)..(516): unsure at all n locations
aggnttgcttacgcggggggacgaaaagtagtgctcgtaccggtccggaattcccgggtcgacccacgcgtccggttcatggctggcgccgcgctgctcgccggggctgccggcgccggcgcgcagcagggcgtgtggagcatcatcacccggcccatgttccagagcatgctgagccaccgcggcgacagcgggtgccagggcgccttctacacctacgacgccttcatcgaggccgccagcaagttccccggcttcggcaccaccggcgacgagcagacgcgcaggcgggagctcgccgccttcttcggccagacgtcccacgaaaccaccggtggatgggcgactgctccggatggaccgtttgcctggggatactgccgggtgaaggaacagaaacagacggacccaccctactatggacgaggacccatacagctaactcattagtacaactacaggctcggcgggcaagcgcttaacctggacctggtgggccaacccggacttgttgca

SEQ ID NO: 93415 - DNA, 524 bp, Zea mays
gaatatggtgtcttatagtacaagatagtatactcgtaccggttcggaattcccgggtcgacccacgcgtccgaggagaagcagccgccgttgctgctgccgcgtccacagaatggggggtttcgtgaagactcataagaccaatgcgtatttcaaacgtttccaagtgaaattcaagagaaggcgggctggcaagacagactacagggccaggataaggctgattaaccaagacaaaaacaagtacaacacacccaaatacagatttgttgtgcgatttaccaacaaggacatcactgcccaaatcatatctgctagtatagcgggtgatatggttcttgcttctgcctactcgcatgagttgccacgatatggtcttgaagttggtctgaccaactatgcacctactgcactggccttctgttggctcgccgtgtgctcaagatccgtggtttggatcaagagtacgagggcaatgttgacgccactggtgaggacttctcttgtgagccagctgatgagag

SEQ ID NO: 93416 - DNA, 516 bp, Zea mays
tgtttaccttatgagggtgggagggaggaaatgttgtaccggtccggaattcccgggcacacctcacacattgctgtcaagtttgctgagctcgttaccaagattgataggcgatccggcaaggagctggagaaggagcccaaatttctcaagaacggtgatgctggtatggtgaagatggttcccactaagcccatggtggtggagaccttttctcagtatcctcctcttggtcgatttgctgtccgtgacatgaggcaaacggtggctgtcggagtcatcaagagtgtggagaagaaggacccaactggagccaaggtgacgaaggctgctgccaagaagaaatgatctatctggctggtgacgaaggctgctgccaagaagaaatgatctatctggctggtgctgtgcttgcttgttggttacctcgtggaagcttaaaatatctcgtcttgttgacatccttgcagttgtcgcgtgaacaagtaatctatgatggcaatgtttgcctggtca

SEQ ID NO: 93417 - DNA, 525 bp, Zea mays
  unsure (1)..(525): unsure at all n locations
ggtatatggtgatacagtgggaggtgggtgagtagttttcgtaccggtattcccgggtcgacccacgcgtccgcgaagagagtgggacgctgggtgatatatgggagactgtatcaaacagtgatcttgggttgctactgatatctgattctgctcaggctgataactacgagaaaattttctcgcacatgaaaccaaacagtattcttggtttgtcacatggatttctccttggacatttgcaatctctgggttttgatttccctaaaagcatcagtgtgattgctgtatgccccaagggaatgggcccatcagtcagaagactttatgttcaaggcaaagagatcaatggtgctggtatcaatgctagctttgctgttcaccaggatgttgatggaagggcaacagatgtagctctagggtggtcagtagctttaggttctnctttcacatttgctactactctagagcaggagtaccggagtgacatttttgcgagcgaggtattttgctaggtgctgtcaa

SEQ ID NO: 93418 - DNA, 489 bp, Zea mays
aggatggaggtgcttgaaacgaagggggggtattgtactccggtccggaattcccgggtactcctgctagttggggccaagctggaggttgtcatcatggagatggccaaggagatacaggacaaggcgacggtcatcaagggggcgcctgtggtggagccaagtgacaggttcttctggtttaaccgccctggctgggtcctcttcctcatccacctcacgctcttccagaacgccttccagatggcgcatttcgtttggacactggtaggtttggacaatggtagcctgtaaaagatcctcgagtgttctgttcatccagtcagtgcagcataacgagcagaggctgacttgcctacctcttttctctttggctggttcgtcctggcgcagctcaccccagacctgaagaaatgctaccacgagaggctgggcctgagcatcatgaaagttgcggtgggcctggctctccagttcctctgcagctac

SEQ ID NO: 93419 - DNA, 525 bp, Zea mays
  unsure (1)..(525): unsure at all n locations
atggtnntttacgagagcagatgtactgctacactcgtaccggtccggaattcccgggctcacctcccccgtcctccggttcatgtcctgctgctccccatgtcgcccccactcgacctcgactacataggcctctcgccggcggcggctgccgccgctgcccacgacgacctgaagggtaccgagctccgccttggtctgccggggtccggttcgccggaccgccgtgttgtggctgccaccgcaaccaccctggacctgctcccggctaagggcgccaagcgcgggttttctgacgaggcgccgacgccatcgcccggtgcagcttccgggaagggaaagaaggtagcggaagaggaggacgacaagaaggttgcagcgacgccgcagccggtcgcaaaagctcaggtggtgggatggccaccaatccgaagctaccgcaagaacacgatgtctaccacccagctgaagggcagcaaggaggatgctgaggccaagcaggaccaggggtcctgtacgtcaggt

SEQ ID NO: 93420 - DNA, 525 bp, Zea mays
  unsure (1)..(525): unsure at all n locations
acggtgctacaaccgcaccacggacagtatctctcggtccggaattcccgggtcgacccacgcgtccgaaactccgcaggccagtctgcgcgagttggatggccttcttcttggccctcgtgtgcatcctcgtcttgctagccatcgcctcctacgtccagtacactcgctggcagaaggggaaaggccgcttcggcggccatgggaggtctgctcccttgaagctgcctcctggctccatgggctggccttaccttggcgagaccctccagctttactcccaggaccccagcgtcttcttcgcttccaaacagaagaggtacggcgagatcttcaagacgcaccttctgggctgcccgtgcgtgatgctggcgagcccggaggcggcgcggttcgtgctggtgacgcaggcgcacctgttcaagccgacctaaccgcggagcaaggagcgcatgatcgggccgtcggctctcttcttccacccaggcgactaccacctnncgcttcgcaagctcgtccagggcc

SEQ ID NO: 93421 - DNA, 518 bp, Zea mays
  unsure (1)..(518): unsure at all n locations
cggtgtacggagaaatgtatgctcttctnnnncnntttngnnntnnncgctcgacccacgcgtccgagggcatatcgaggaggtttttagggtggtggtggtgttgtgaggagctgctgccggtgctctccagtctccaccgatggcgatcaagaacatgacggtggcggcgacgacgcggtcgctggacgcggacatgacggtggacgagttcaaggagtggctgcggcggttcgacacggaccaggacgggcgcatcagccgcgacgagctgcggcgcgccctgcgtgccatccgctcccggttcacggggtggaggagcaggcagggcatcagttacgccgacgctgacggcgacggctacatcgacgacagcgaggtcgatggcctcatcgagttcgcgcagaagaacctcggcctcaagatcgtcgcctactgatctcacatggggcgcggcgcgccggggtcggggggtgggacgcacttgcttgccctgagctagctttagcggcaatgca

SEQ ID NO: 93422 - DNA, 528 bp, Zea mays
atggttgagatgtgcgcggggcgagtgagtaatctcgtaccggtccggaattcccgggtcgacccacgcgtccgatcaatttcatcgtccaacccttcgacggtcaagactggttcgactcggtcgacatggactgtagcctcatacaaagatagtcgagagcttcctactcctaggacagaaggggaaatcttgtcatcaccaaatttgaaggcattctcgtttggtgatctcagaactgcgtcgaggaacttcagatcagacagtcttcttggggaaggaggatttggctatgtgttcaaaggctggattgatgagcaaactcttgccccttcaaagccaggaagcggtatggttgttgccatcaagaagctaaaaccagaaggttttcagggccacaaggagtggctgacagagggtgactaccttgggccaacttcaccaccagaatcttgtcaaactcattggttattgcacagatggtgatcaccgacttctggtgtatgagtccatgccttaaggaagttg

SEQ ID NO: 93423 - DNA, 517 bp, Zea mays
atgtccttgtactcgacgggaagatagtatgtctcggttcggaattcccgggtcgacccacgcgtccgccatcgtgtcccgcgagatgacccggcgctacatgacggacatgatcacccacgccgacaccgacgtggtgatcgtgggcgccgggtccgcgggcctgtcctgcgcgtacgagctgtccaaggaccccaccgtgagcgtggccatcgtggagcagtccgtgtccccgggcggcggcgcgtggctgggcgggcagctgttctcggccatggtggtgcgcaggccggcgcacctgttcctggacgagctgggcgtgggctacgacgaggccgaggactacgtggtggtcaagcacgcggcgctgttcacgtccaccgtgatgagccggctcctggcgcggcccaacgtgaagctgttcaacgccgtggcggtggaggacctgatcgtgcggcggggggcgccgtcggcggcgtggtcaccaactgggcgctcgtgtccatgaaccacgaac

SEQ ID NO: 93424 - DNA, 525 bp, Zea mays
  unsure (1)..(525): unsure at all n locations
agagtcgtannttttcgattncnttcagnacagtactccgtccgaattcgcggggcaagccacccgtactacgaaaggcattgtgcgaccctttgattgtcactactggttcgactcggtcgaggtggactgtatcctcatacaaagatcgtcgagagcttcctactcctaggacagaaggggaaatcttgtcatcaccaaatttgaaggcattctcgtttggtgatctcagaactgcgtcgaggaacttcagatcagacagtcttcttggggaaggaggatttggctatgtgttcaaaggctggattgatgagcaaactcttgccccttcaaagccaggaagcggtatggttgttgccatcaagaagctaaaaccagaagggtttcatggccacaaggagtggttgacagatgatgactaccttggtcaactttaccaccagaatcttgttaaactcaatgggttttgctcacaatgtgatcaccgacttctggggtgtgagtccctcccttaaagaagttttg

SEQ ID NO: 93425 - DNA, 488 bp, Zea mays
  unsure (1)..(488): unsure at all n locations
gagaggccattcgtcgaccccgaaatatagctatancggttcggaattcccgggtcgacccacgcgtccggtgggttggcttctcctccccctccggttcgggttcgggttcgtgaggttctccggggttcggtttcgtgggtgagcggatcgagatggcggcgtcggatgttgagtaccgctgcttcgtcggcggcctcgcctgggccacggacgaccactccctccacaacgccttcagcacctacggcgaggtcctcgagtccaagatcatcctcgatcgggagacgcagaggtcccgcggcttcggcttcgtcaccttctccacggaggaggcgatgcggaacgccatcgagggcatgaacggcaaggagctggacggccgcaacatcaccgtcaacgaggcccagtcccgcggcggccgtggaggcggcggcggcggcgggtacggtggtggccgtggaggcggcggctacggccgtggccgg

SEQ ID NO: 93426 - DNA, 493 bp, Zea mays
ggggagcgtccttaaaccgtatgaagagtattctactccggtctcggaattcccgggtcgacccacgcgtccgtgaagattctgtgagcttcatggcacatgggggtggtggggatacttatgcagcagtgaagaagtaccttggccgtatcctttctgaggtggtggatgcttccattcaaaaacttgttgattcaggcagtggtctaagtgtgtcccaggcaatgcaagtcgctgctaacatgtctgtgatggagcgggcatgtgagttcttcacacgccatgctgcacaactgtgtggtgtgccactgcgtgctgtggaccgtggtcggcgggacttcccacttcgcaggtcacgtgatgctgctgatgcgctcctgctgcggctcctatgtgctaaggttgatgagttcatgcggcaatctgatggtgttaactggatggctgattacgcttcttctggcggcaatgaatatgccaaccaggtcattat

SEQ ID NO: 93427 - DNA, 522 bp, Zea mays
  unsure (1)..(522): unsure at all n locations
tgggtntttagagctcactctctctcttctnnntcnnttnnnnntnnnnggctcgacccacgcgtccgtgaaacacaccaagggccagctgtccttggaattgctcttattgctatggctgaagaattaggagctgaaatggctgtacgttcacttgagcgtcttctgcagtatggcgagcagaatataagacgagcagttcctcttgctcttggtatactctgcatatctaatcccaaggtgaatgttatggacacactgagtagattgagtcatgatgccgatgccgatgtgtcaatggctgcaattatctcattgggtttgattggtgctggcacaaacaatgccagaatagctgccatgcttcgcaatctttcaagttattactacaaagaagcggctcatctgttttgtgttagaattgctcagggccttgttcacctcggaaagggcttgttgaccctttctccgtaccattctgatagatttcttctttccccgatggcacttggagggctngta

SEQ ID NO: 93428 - DNA, 520 bp, Zea mays
  unsure (1)..(520): unsure at all n locations
acgtgcttgtgttacctgctatncgtacctcatcgtctcggttcggaattcccgggtcgacccacgcgtccggctcatccttggggatagcagtcttggcctttaccttgatcccgttcaggtcgtgagagctgtgccgcatcaccttccgcactgcttgctgcgaatcaaaggtgacgaaaccgaaccccctcgaccggctcgtctcgctgtcataaatcaccacgacgtccgttaccgagccaaacgtctcaaagtaagcccggaactacttctcggagatattatcccgcaaaccggcaatgaatacctcatatgaatcatagctcacactgtcgtcactgtcagcagtaccattaccagcgggcgactgattgtcttggataccctgaccccgggcttgctcagcctgctgaggctgcgagtgctgatcgccctgagttcgtggaactctagtactggccctcttagcgtacaccatgcggacgctctaaaaggaccaagcttacttacgcgtggg

SEQ ID NO: 93429 - DNA, 529 bp, Zea mays
  unsure (1)..(529): unsure at all n locations
agattaatgtgcttgctgttcgatntcgtcgtancgncngtncaggttcggaattcccgggtcgacccacgcgtccggctgagtatttccgtgatatgggctacaacgtcagtatgatggctgactccacctccgggtgggctgaggcattgcgtgagatctcagggcgtttggctgaaatgcctgctgatagtggttacccagcttacttggctgcacgtttggcatccttttatgaacgtgctggtaaggtaaaatgtctgggaagtccagacaggaatggcagtgtcacaattgttggagccgtctctcctcctggtggtgatttttcagaccctgttaccttcgcaaccctcagtattgttcatgtcttctggggtttagataaaaagctcgctcaaaggaagcatttcccatctgtgaattggctcattttctattctaaatactgcaaagcgccttgagtctctttacgagatatttgatccaaatttcattgattttagggacaaaatcacgtttggttgtt

SEQ ID NO: 93430 - DNA, 541 bp, Zea mays
  unsure (1)..(541): unsure at all n locations
gtttcagtggatgtttcccacttggaccgnanggtgatcgaactcggtttggaattcccgggtcgagccacgcgtccgtgaaacacaccaagggccagctgtccttggaattgctcttattgctatggctgaggagtgaggagctgaaatggctgtgcgttcacttgagcgtcttctgcagtatggcgagcagaatataagacgagcagtgcctcttgctcttggtatactctgcatatctaatcccaaggtgaatgttatggacacactgtttagattgagtcatgatgccgatgcctatgtgtcaatggctgcaattatctcattgggtatgattggtgctggcacatacaatgccagaatagctgccatgcttcgcaatctttcaagttattactactaagaagcgggctcatctgttttgtgttagaattgctcatggccttggttaatctctgaaggggcttgttgacccttttctcccgacctattctgatagatattctttttttccccattgcactttgtaaggcgtggatcc

SEQ ID NO: 93431 - DNA, 488 bp, Zea mays
tgtagcggtgtgataacgcagggaagtactctatacccgtccggaattcccgggtcgacccacgcgtacgtatgacaaccacaatggaactggtcctcgtgaagaatgggtgccattgagacaagagggggataagccgcctcagatacgtcttgcacaccctgctaccctctccaaattcaaaactaggaaacggcgcagggaaacagcaggcagctgtttatgggtcattggagatcatgtagacgcatgggtcaataattgctgttggcgagagggagttatttctcagaattatgagactgacgagacgaaatatgttgtacatttttcagttggaggtggtggtgaatccttagtagttgatgcttggagtcttcgtccatcacgtgtttggaaagatgttcaatggatagagtggtcccgtgcaagagaaaggaaatccaagtctaataagggcgattcacctcttgagaaacgccaaaaga

SEQ ID NO: 93432 - DNA, 491 bp, Zea mays
tgttttgggtactgaaaagcggggggggggtaaggtatcctcgtccggaattcccgggtcgacccacgcgtccggccaagcgcgcgttcgtgcactggtacgtcggctagggcttggaggagggggagttctccgaggcacgcgaggacctggccgtcctggagaaggactacgaggaggtcgccgcagagggcggcagtgatgactgcgacgaggaggaggaatactgatctgcttgcatgaatctgtttggctgtcgagccaggttgtggtgttgaaaaacctttgtttgtgtcctgggtaatgtttgggtgtttccttccatcatcacttgctgaactgctctagtatttgcatttgtaattgaagtctgtcgctttaaaaaaaaaaaaaaaaaaaaacataaaaaaaaaaaaagggcggccgctctagaggatccaagcttacgtacgcgtgcatgcgacgtcatagctcttctatagtgtcaccta

SEQ ID NO: 93433 - DNA, 509 bp, Zea mays
  unsure (1)..(509): unsure at all n locations
agaatgcgntnnntnaagtctgtcgcttattgcattgctctaccggtccggaattcccgggccagaactgcctcaagtacggccgccccgacctgggcttcctcaagtggcggtggcggccctccggatgcgagctgccgcgcttcgacccgctgcagttcctgcagttcgcccgcgggaagtcgctggccttcgtcggggactcgctggcgcggaaccacatgcagtcgctgctctgcctcctgtcccaggtggcgtatcccaaggacctgtcggcgaacccgtcggaccagaacaaggtgtaccactaccgggcgtacaacttcaccatcagcatgttctggtcgccgttcctggtgcgcgcccgggagcccgaccacgacggccccgcgcacacgggccactggagcctctacctggacgagcccgacgacaagtgggtgtcccagatgccccgcttcgactacgtgctggtgtcggcggccaactgggtctcccngcccctcctc

SEQ ID NO: 93434 - DNA, 498 bp, Zea mays
aggatggtgtgtgcatgcataatgaagatagcaccgctgtaccggtccggaattcccgggtcgacccacgcgtccgatcttcttttgcgtcgccagccgagccacatcgctcagacaccatggggaaggtgaaggtcggagtcaacggatttggtcgtattgggcgcctggtcaccagggctgcttttaactctggtaaagtggatattgttgccatcaatgaccccttcattgacctcaactacatggtttacatgttccaatatgattccacccatggcaaattccatggcaccgtcaaggctgagaacgggaagcttgtcatcaatggaaatcccatcaccatcttccaggagcgagatccctccaaaatcaagtggggcgatgctggcgctgagtacgtcgtggagtccactggcgtcttcaccaccatggagaaggctggggctcatttgcaggggggagccaaaagggtcatcatctctgccccctctgctt

SEQ ID NO: 93435 - DNA, 503 bp, Zea mays
  unsure (1)..(503): unsure at all n locations
agggatggcgtctntngatcgatcgcggggttaattgcattgctcgtaccggtccggaattcccgggtcgacccacgcgtccgctttaaaagaggtaagagcaacgtgctttgggagcagagaagagggagaaagcagcatcttgcctggatgagccaggggacacagaagagaagcccactatctcatttaatctttacaactctcttgcaaggttccctggttgtgaaaatacatgagataaatcatgaaggccactatcatcctccttctgcttgcacaagtttcctgggctggaccatttcaacagagaggcttatttgactttatgctagaagatgaggcttctgggataggcccagaagttcctgatgaccgcgacttcgagccctccctaggcccagtgtgccccttccgctgtcaatgccatcttcgagtggtccagtgttctgatttgggtctggacaaagtgccaaaggatcttccccctgacacaactctgg

SEQ ID NO: 93436 - DNA, 501 bp, Zea mays
  unsure (1)..(501): unsure at all n locations
agatggtccntgtaggcatcccaacgtcccttcgcactgctgtaccggtccggaattcccgggtcgacccacgcgtccgccagtcccgaaggcactactggccagtcctacaaccagtattctcagagatgccatcagagaacaaacactaatgttaattgcccaattgagtgcttaatgcctttagatgtacaggctgacagagaagattcccgagagtaaatcatctttccaatccagaggaacaagcatgtctctctgccaagatccatctaaactggagtgatgttagcagacccagcttagagttcttctttctttcttaagccctttgctctggaggaagttctccagcttcagctcaactcacagcttatccaagcatcaccctgggagtttcctgagggttttctcataaatgatggctgcacattgcctgttctgcttcgaagtattcaataccgctcagtattttaaatgaagtgattctaagatttggtc

SEQ ID NO: 93437 - DNA, 505 bp, Zea mays
  unsure (1)..(505): unsure at all n locations
agcctgcgtcgctgaagcactccacaaagaacaaatcgcacctgccggtaccggtccggaattcccgggtcgacccacgcgtccgggtggctatcctgctgaagcttggaacttctggacaagaaaaggcctggtttctggtggcctctatgaatcccatgtagggtgcagaccgtactccatccctccctgtgagcaccacgtcaacggctcccggcccccatgcacggcggagggagatacccccaagtgtagcaagatctgtgagcctggctacagcccgacctacaaacaggacaagcactacggatacaattcctacagcgtctccaatagcgagaaggacatcatggccgagatctacaaaaacggccccgtggagggagctctctgtgagtattcggacttactgctctacaagtcacgagtgtaccaacacgtcacctgacagatgatgggtggccatgccatgcgcatcctgggctggggagcggagaatgacacn

SEQ ID NO: 93438 - DNA, 502 bp, Zea mays
aggagagcgtccttgaattgtcatcggggggatatatcattgctcgtaccggtccggaattcccgggtcgacccacgcgtccgcggcgttgttctggattcccgtcgtaacttaaagggaaactttcacaatgtccggagcccttgatgtcctgcaaatgaaggaggaggatgtccttaagttccttgcagcaggaacccacttaggtggcaccaatcttgacttccagatggaacagtacatctataaaaggaaaagtgatggcatctatatcataaatctcaagaggacctgggagaagcttctgctggcagctcgtgcaattgttgccattgaaaaccctgctgatgtcagtgttatatcctccaggaatactggccagagggctgtgctgaagtttgctgctgccactggagccactccaattgctggccgcttcactcctggaaccttcactaaccagatccaggcagccttccgggagccacggcttcttgtggtt

SEQ ID NO: 93439 - DNA, 504 bp, Zea mays
  unsure (1)..(504): unsure at all n locations
ntgcattggtgagaccgagtgtactgtattgctatgctcgtaccggtccggaattcccgggagttgctcaagatgtaattgcttcgattcatggtgtgatttacagcatccgtgagagtatcaagttcataaaagcttctccaagtcgtgaggagaagtttgctgagattgctctgcagctggagattcccagtaccaagactctttgtttagatgttacaacccagtggaacacaacttatctgatgctactggctgccttggactataagcaggcttttgctacactggagacatgtgatgataattacaatgaatctccttcagcagaggactggaagaaagttgaggctagctgtaattacctgaaactgctatatgactctgcacatagtgtgatggcttcagcgaaccctactgcaaacatctttttccatgaagcttggaaaattcagcttgaactagcccatggcacaagacatgggaagtcctttttcaactgat

SEQ ID NO: 93440 - DNA, 515 bp, Zea mays
  unsure (1)..(515): unsure at all n locations
gtgtccgtnnntactactgaccagcaagtatagtagtgctcgcaccggtccggaattcccgggtcgacccacgcgtccggtcatccctgtactcctgtttgtgggcgtagtttttatcgtgattggccttggctgcattgcagcctcaaacagggtggttgaagtggtctatgagtatgagacttcatgcataccaagacacatgcttggcaacaaagtcgcctatatccaaaacccagctatagataagacctgcacatggattctcaaggttcctagggatatgaagcacccaatctacgtatattaccagcttgacaagttctaccagaaccacaggaggtacgtgaagagccgcagcgacaagcagctgagagatcccaaagaggccaacagcacgcagcagtactgcaagcccgaagctaccaccgagcacgggagcgccgtcgtcccctgcgggctcgtggcctggagcctgttcaacgacacctacagcttcggccgggggcacaacc

SEQ ID NO: 93441 - DNA, 513 bp, Zea mays
  unsure (1)..(513): unsure at all n locations
gtgaacgactatanttcaatnnnctacgncatttcagatcgtttttttgccggacgcacgcgttcaataaatgtggatggcgcgtgcctctgtttcttcaggttcatgctgagtcttgacatgtttggcacttttggttccctggctggtaccatctgtgacaaatccgctcgctaaaaaaaaaaaaaaaaaaaagggttgcccctcttgaagatccaaacttaccttccccttcatgccaactcataactcttctataaggtcacctaaattcaattcactggcccgtcatttacaacgtcctgactgggaaaaccctggctttacccaacttaaacgccttgcaacacattcccctttcgccaacttgcctaatacccaaaaggccctgaacgattgccctttccaaaaatttgctcaaccctgaatagccaaagggacaccccctttgtaacggcccattaaacacccgctggttttgaggtttacacccacattttaccccctacaatg

SEQ ID NO: 93442 - DNA, 514 bp, Zea mays
  unsure (1)..(514): unsure at all n locations
ngtaatatggcntggacaagcagtgatagtattgatgtaccggtccggaattcccgggtcgacccacgcgtccgataaatgtggatggcgcgtgcctctgggtcgccaggttcatgctgagtctggacatgttttgcacttttgtttcccttcctgctaccatctgtgacagatccgctcgctaaaaaaaaaaaaaaaaaaaagggcggccgctctagaggatccaagcttacgtacgcgtgcatgcgacgtcatagctcttctatagtgtcacctaaattcaattcactggccgtcgttttacaacgtcgtgactgggaaaaccctggcgttacccaacttaatcgccttgcagcacatccccctttcgccagctggcgtaatagcgaagaggcccgcaccgatcgcccttcccaacagttgcgcagcctgaatggcgaatgggacgcgccctgtancggcgcattaaacgcggccggtgtgggtggtacncgcagcgtgaccgtttcattgt

SEQ ID NO: 93443 - DNA, 497 bp, Zea mays
  unsure (1)..(497): unsure at all n locations
tgaagttnncttaatcgggggatggacggtaatggtattctctaccggtccggaattcccgggtcgacccacgcgtccgagttatggccgcaaaggcttgagaagacccctttctggattgatggttccaaggttggtgtctatggaaagcctgcaaatgaagattttgaggcagataatgcccactggaaacgggttgtaagtaaatcgtatgtgaatggcatgggaattgactggtccaaagtgagaaatgtcatggacatgagagctgtgtatggagggtaagtaaatggttttcgtagtttcttgggcatgtttatttatttatttatttttggtaattcagatcacactacataactactagttacccaagctggcacatagctaacttaaaacataacactataacaagcaacttgtccaccatatgtcatcaagcatatntctttgaaagattcagtcaacctggagaaattatctttattggtcatggt

SEQ ID NO: 93444 - DNA, 480 bp, Zea mays
  unsure (1)..(480): unsure at all n locations
ttgcgntgattacgaggggggagagangggaaaagcttgtaccggtccggaattcccgggtcgacccacgcgtccgcccggtctgcacaccgaggccgtgggactgctgcgacagcgtggcctgcacaagggactacatccccaactgcatgtgcctggacaaggtggagtcgtgctcgagcaactgcgaacggtgcgagtttctgtatcattcggacccttctcgcttccaatgccgagacatcttccacggctatcctggtcccaagtgcaggacatggatcagtacgagcaactagctcagctcagctacttgctaaaagtagcgtagcgcagcgcgcgcggctacttgctagtatacgtacgttcacaaattaaaataaaagtggctagcgtacaaagctaacatctggttgttcgtcccgacatggacgattagcctagctcgatcgctagctgctgccactctcgttcgattta

SEQ ID NO: 93445 - DNA, 608 bp, Zea mays
  unsure (1)..(608): unsure at all n locations
ggtatataggctcnctcgaggttccctagccnctcgccttcgccactgccagtaccggtctcggaattctccgggtcttagtcagcnctgtccatcatctactanngctatactgtgcacgagtgcaataggtcgtcccacaggttgcagcctcggtggtggggaggtgcatagtcaccgcggcttgacgaacgctgtcgggccggcagcttgcgatgacttcgacgggagcctgttcgcccaacgatctatccccgagcaggtacatagagcatccgagacctcgtcgaggggcgacgagcatacgtcggcccggcacgcgtctcgccttccttcaagctacacccgaggcaggtgctcgatgcttgcacgttcgcgcaagggagaagcattgagaacaggcggaccgacgacgaacaagggtggtgtacgtacaagacgtggtggacgagcgagcatggcggaccttctacaacgaacttcaagatcacgcctgaaggtgaactctcggccaagggcggtagggcgaagggcgagcgccagtcgtcagactggggccattggagttccgacaatgggcaaaccacccaggttgccttgacccggac

SEQ ID NO: 93446 - DNA, 513 bp, Zea mays
acgggtcgctacagtgggcggaatagacggaactgctcgtaccggtccggaattcccgggtcgacccacgcgtccggcaagtgaagaagtacagtggtggcatgaggaggcgccttagtgtcgccatctcgttgatcggagatgctaaagttgtgtacatggatgagccaagcaccggattagacccagcttcgaggaagagtctgtggagcgcagtgaagcaagcaaagcaggatagagcaatcattctcaccacgcattccatggaagaagctgaaactctttgtgacagactgtgtatcatggtcgatggaaagctccagtgcataggcactcccaaagagctcatagctagatacggagggtactacgtgctgacgatgacgacactgccggagttcgaacaagaggtcgaagatctggtgcgcaggctctcgccaagctccaggaaagtgtaccaattgtcggggacgccgaagcacgagcttgccgaacaggaagcaagggtctcaa

SEQ ID NO: 93447 - DNA, 519 bp, Zea mays
  unsure (1)..(519): unsure at all n locations
gaaagctgggntgtgaataagactatgtatgtatcgctgtaccggtctcggaattcccgggttgactctacgctttcggtggtttccaaagccaagtgtgtgtactagcaaccagctagctcgggcggcagcaggcagccatcatgtcggaggagaagcaccaccacttcttcaaccaccacaagaaggacgaggagcagcccgccggcgagtacgggtactccgagaccgacgtggtcaccgccaccggcgagggcgagtacgagaggtacaagaaggaggagaaggagcacaagcacaagcagcacctcggcgaggccggcgccatcgccgtcggcgccttcgcactctacgagaagcacgaagcgaagaaggaccccgagcacgcgcacaggcacaagatcacggaggaggtcgctgccgctgcggtcgtcagcgccggcggctacgtattgcacgagcaccacgagaaagaagaatgatcacaatgacgcccaagaagcccagcgccgagaaaaa

SEQ ID NO: 93448 - DNA, 507 bp, Zea mays
ggagtagtgtgctgaatcagagtggagtagtaatgtaagtatcggtccggaattcccgggtcgacccacgcgtccgagcagcatcaggtccagccgtcgccgttcccacttcccaccactgccacgcgcgcccgggatcgagggagggcacgcagacgctgaggagggaggatgagtctcttcgggcttggacggaaccagaagacattccgccccaagaagagcgctccatcaggcagcaagggagcacagctccgtaagcacatagatgccactctcggcagtggaaaccttagggaagctgtgaggttgcctcctggagaggatatcaatgaatggcttgctgtcaataccgtggatttctttaaccaagttaatatgctgtatggcacgctcacagaattctgcacacctgagagctgcccgacaatgacagctggcccaaagtatgagtacaggatggctgatggtgtgcagattaatgaacccatagaggtattagccccc

SEQ ID NO: 93449 - DNA, 501 bp, Zea mays
tgtggagtgcatgagtcaattgcacagtacgctatgcggttcgaattcccgggtcgacccacgcgtacgctttccccgtcggcgcctcctcagatttaatttggacgccgtcggcgccgctgacccaggtggtcttgatggcgcccgctgtagaagccgtgaaggagacaggctcgttccatatggttcctgccttgaacgaaaggatactgtcatccatgtccaggaggtctgatgctgcacacccttggcatgatctggagatagcgtcctggtgcttcaaccatattcaactgcgtcattgagataccaaggggcagcaaggttaaatatgaacttgacaagaaaactggactgatcaaggtggaccgtgtgctgtattcgacagttgtttaccctgacaactatggattcattcctcgcactctttgcgaagacagtgatccttttgatgtactgggtattattcaagaacctgatatcccacgcttgtttctacct

SEQ ID NO: 93450 - DNA, 507 bp, Zea mays
atggctgcttacccgcccaaagtatagtacactcgtaccggtccggaattcccgggtcgacccacgcgtccgcttgtccgtggaacccaaactcttgggcttgtcacgagtgctggtttccctgctggaaagtacctctttgctggtgttgtggatggacgcaacatctgggctgatgatcttgctacatctctcagcactctccagtctcttgaggctgttgttgggaaggacaagcttgtcgtatcaacttcctgctcgctcatgcacaccgctgtggatcttgtgaacgagactaagcttgacagcgagattaagtcttggcttgcttttgctgcccagaaggttgttgaggttgatgctcttgctaaggcattggctggtcaaaaggatgaggcttacttcgcagcaaatgctgctgctcaagcctcgaggaaatcctcaccccgtgtgaccaatgaagaagtccaaaaagctgctgctgctctcaagggctcttaccaccgc

SEQ ID NO: 93451 - DNA, 481 bp, Zea mays
  unsure (1)..(481): unsure at all n locations
tgggctgctttagatgggcgaaggtagtattgctgtaccggtccggaattcccgggtcgacccacgcgtccgcccacgcgtccggggccttcgcggggagctcttgccctgcttctgctcctgttcgtccacggaggccagcgagcagcagaggccggcggggacgcgttcgtgagggtccagggcacccgcttcgtgcaggacggcaagccgttcttcgccaacgggttcaacgcctactggctcatgacattcggcgccgaccccgcgcggaggggcaaggtcacctcggcgctcagccaggccgtcggcgccggcctctccgtggccaggacgtgggcgttcagcgacggcggctgcggcggcggcagcgcgctgcagtactcttccggccgctacaacgagaacaccttccaggggctggatttcgtgctgtctgangcaaggaagcatgggattaagatgattctgagcctcgtga

SEQ ID NO: 93452 - DNA, 507 bp, Zea mays
  unsure (1)..(507): unsure at all n locations
ncggttncttacgcagacgaataacagtatcgtcgtaccggtccggaattcccgggtcgacccacgcgtccgggccctatggccagagggctgtcctcaagtttgcgcagtacactggtgcccatgccattgctggcaggcacactcctggtacattcaccaaccagttgcaaacctccttcagtgagccacgccttcttatcctgactgacccgaggactgatcatcagcccattaaggagtctgcgcttggaaacattcccaccatcgccttctgtgatactgattcccctatgcgctatgttgatatcggcattcccgccaataacaaggggaaacagagcattggttgtctgttctggctgctcgcccgaatggtcctncagatgcgcggtacaattcttccaggacacaagtgggacatcatggtagatcttttcttctacagagacccaaaggaagcgaggcagctggaggaagaaaaggctctggtgcacctgactatgg

SEQ ID NO: 93453 - DNA, 508 bp, Zea mays
  unsure (1)..(508): unsure at all n locations
tggcttgtacttgacaatancgtattgctcgtaccggtccggaattcccgggcacagacaagtggtttccaaagccaagtgtgtgtactagcaaccagctagctcgggcggcagcaggcagccatcatgtcggaggagaagcaccaccacttcttcaaccaccacaagaaggacgaggagcagcccgccggcgagtacgggtactccgagaccgaggtggtcaccgtcaccggcgagggcgagtacgagaggtacaagaaggaggagaaggagcacaagcacaagcagcacctcggcgaggccggcgccatcgccgncggcgccttcgcactctacgagaagcacgaggcgatagaaggacctcgagcacgcgcacaggcacaagatcacggaggaggtccctgccgcggcggccgtgggcgccggcggctactaattcacgagcaccaacagaaggagagggccacaaggacgcccaggagccagcggccagaaaagccccaccccc

SEQ ID NO: 93454 - DNA, 478 bp, Zea mays
  unsure (1)..(478): unsure at all n locations
tatgtnttattcgaaggggggaagaaaagttatgctgtaccggtccggaattcccgggtcgacccacgcgtccggtggcggccaagacacctctaggtatcaaagctaaagaagctatgaataagggagagcttgtttcagatgatttggttgtgggcattattgatgaagctatgaagaaaccctcatgccagaaaggtttcattcttgatggctttcctagaactgtgactcaagcacagaagcttgatgagatgttggcaaagcaaggtgccaatgttgacaaagtcctgaactttgcaattgatgatgctgtattggaagaacggattactggtcgttggatccactcagccagtggtaggacttaccactcaaaatttgcaccttcaaagtcttcaagaattgatgatgtaactggggaggcattgattcaaaagagagattacaccgctgaagtcttgaagtcaaagcttga

SEQ ID NO: 93455 - DNA, 474 bp, Zea mays
  unsure (1)..(474): unsure at all n locations
agcnttgttaagaggggggagaagtatgctgtaccggtccggaattcccgggtcgacccacgcgttcgcggacgcctgggctctctcgagtcgattcctaagcagcttgccaatgaattgaggttaagcttccaacatggggggaagttgttattgccctgttcctcctgctttgttaagccttctgttcctttgccaaccggccggccggcgtcaactacggttcgtggcaaagcgcccacgccacgttctacggcggcggcgacgcgtctggcacgatgggcggcgcgtgcggctacgggaacatgtacagcacggggtacggcaccaacacggcggcgctgatcacggcgctcttcaacgacggcgccgcgtgcgggtcctgctacgagctgcgctgcgacaacgacgggcagtcgtgcctgccgggcaccatcaccgtcactgtcaccaacttctgcccgccaactacgg

SEQ ID NO: 93456 - DNA, 504 bp, Zea mays
  unsure (1)..(504): unsure at all n locations
tgcgntggttatcgccgggggaataatgtatctgtcgtaccggtccggaattcccgggtcgacccacgcgtccgaaacgcccatcattccagatgagatcaccagtgtctaccacaacgactctagtgaaccatgcaaaaggagcgtccaagtcgtttgacggaggctgtagatcacttgaacgctataagggccatgtaaacgggaatggtatgaacgtatctaccgattccagtgaagataaagattcaaacaactcagatgagaagtgtaacgagtttgcatctgctgagtcggaggactcggtgtcaggtgttctatatgatatgttgcaaaaggaggtcatttctctaaggaaggcgtgccacgaaaaggatcagagcctgaaagacaaggacgactcagttgagatgttggcaaagaaagtagatactttgacaaaagctatggagtcagatgccaagaaatcgaagcgcgagctagctggtattggaaagggacctg

SEQ ID NO: 93457 - DNA, 511 bp, Zea mays
aggatttgtatcacgacaagatagtattgctcgtcccggtccggaattcccgggcagaccatcaaacaagtgccagcgccctctcgcagtcgccgtattggagagcaccttcatcatgatcaagcctgacggcgtccagaggggcctcattggtgagatcatcagccgttttgagaagaagggcttctacctcaaggccttgaagcttgtgaacgtggagaggtcgtttgctgagaagcactacgccgatctcgcctccaagcccttcttccagggcctcgtggactacatcatctctggccctgtggtggccatggtctgggagggcaagagcgtcgtcacaactggccgcaagatcattggcgccaccaaccccctggcttctgagcccggcaccatccgtggcgactttgctgtcgacattggcaggaatgtcattcatggaagtgacagcattgatagtgctaatatggagattgccctgtggttccccgaagggccttgttattgg

SEQ ID NO: 93458 - DNA, 501 bp, Zea mays
aggtgtacaggagggacgtagtgtagtctcggtccggaattcccgggcgaaggttgtgaacgccttgaagaaggaaggggtcagctttgggtccttcgacatcttatctgacgaggaagttaggcaaggtttgaagacgtactccaactggcccaccttcccccagctctactacaaatcggagctgattgggggatgtgatatcgttcttgagatggagaagagcggagagctgaagtcgaccctgtcagagtagacacctagctagcattcttgcttcgctggcgtttttatcacattgcctgcattggatcactctactctggtattcatgccattatattcatagatccacgttggtacttgtctgcagtgccacattgctagaattgggacacatctgcgaaaggaatactcacgcttgttcacgcttggtcgggactgatggcatggtcctatatcaccagttctatttaccggatgggagctttttggtccggg

SEQ ID NO: 93459 - DNA, 484 bp, Zea mays
  unsure (1)..(484): unsure at all n locations
tatgttntttgatatagatggggggagggacagtattgatgtaccggtccggaattcccgggtcgacccacgcgtccgggcgcggcggaagtgaagggcaagcgggcggtggatctcaagatgggatccatgacgcgggacaaggtgcaggacaagttcacgcagtactggtccttctttcgtcgacccaaggggacggtcaacaaggcggcgtccgccgaaaaagtgccagccttcgtctacaccttctacaaactcgtggccgacatctacgaatgggggtggtgccagtccttacacttctaccccgtccttcccgggcagttccaccgggacgccacgcgcgtacactaggagcgccgtcgcgacctcctctgcgccatgccgggccaacgtctactggacatctgctgctgcgtcggctggcccatgcgcgccatcggcgagcactcgggatccaacgtcgtcggcattaccatcaacg

SEQ ID NO: 93460 - DNA, 476 bp, Zea mays
  unsure (1)..(476): unsure at all n locations
taggntnnttaaggtgggggagatacgggaaagttgtaccggtccggaattcccgggtcgacccacgcgtccggccggtgtcaatggcagcgtcgtcactgagaaggtcctttctaacgataacttgaagtatggttacaatgctgctactggacagtacgaggacttgatggctgctggtatcattgatcctacgaaggtggtgagatgctgtttggagcatgccgcgtcggtggccaagaccttcctgacatctgatgttgtggtcgtcgatattaaggagccagagtctgcgccccttgctaacccgatggacaactctggctatggatactaatggagatgagatggccaagccgcatgggaagaaaggtgatcaccattttttttttggtaggcgagaagagtcgggtcgaggtagtttttcatcatcagattaaaaaagcgagtttgttgtacgaccattangcgaaaaa

SEQ ID NO: 93461 - DNA, 505 bp, Zea mays
  unsure (1)..(505): unsure at all n locations
atgcgntgccaatcgtctcagcaagatattgtgactgctcgtaccggtccggaattcccgggcagtgttgaaaagataatttctgctgctgctttggttgagaaggaaaggtctagaagactcagcacctccattcttaatcaagttattagagaagctatagcattcaaatcaccaccaagaacaagaggtggcaaaagaggtcgtgtctattatacaacacaggctgccgtcggtccaccaacattcgttctatttgtaaatgatgcgaagctcttccctgacacgtaccggcgttacatggaaaagaaactccggtcagacgccggttttccaggcacccctattcagttactggggcgtagcagaaggcggccagacaaacgaggtaaatctgctgacagtagagcgcagagcccaagaacccctaacgaagtgggtctagccgcctaactaaaccgcggctcagaaaagctcgccccaaatcacttgaccactgggaagg

SEQ ID NO: 93462 - DNA, 507 bp, Zea mays
atgcttggacacgccgcggaagaatagtagcatccgtaccggtccggaattcccgggtcgacccacgcgttcgagcgaggagagatcgttaggcaaatcggtgatgcactgagagcaaagctccatcaccttggcaggcttgtgtcacttgagatggggaaaattcttcctgaagggatcggtgaggttcaagaaatcatcgacatgtgtgattatgctgtggggctaagtcgccaactaaatggatccattataccatctgaacgaccaaaccatatgatgatggaggtgtggaatccccttggagttgcgggtggtataacggcatttaatttcccttgcgctgtgcttggttggaatgcttgcattgctttggtctggggaaattgggtcgtctggaaaggttctacaacaacttcgcttgacactattgcaatgacaaaaatggggcttgtgtctggaaaaaaaacattgccaggcgcaattttacatctttttggggggccc

SEQ ID NO: 93463 - DNA, 498 bp, Zea mays
  unsure (1)..(498): unsure at all n locations
agcgtgcttctggggggtagaggaatgtgtgtaccggtccggaattcccgggtcgacccacgcgtccgatcttttcttggacgcttcgatgtttgtactaaacatatatctaaatttgcaggtggtgcggcttcaggtggagcaagaaagttgtatgttggcaatcttcactcaaatattactgaagaccaattaagacaggtatttgaaccatttgggcaagtggagcttgtacagcttcctctagatgcaatgactggactgtgcaaaggttatggctttattcagtttgcccggcttgaagatgcaaaagctgcacagagtttgaatgggcagcttgatattgccggcagagttattaaggtttcagctgttactgatcatgtgggagtgcaagctagtggagctactactggagatctagatgatgatgaangtggaagcttggcgcttaatgcaagcttcagagctgctctaatgctcaaatggacaggagtg

SEQ ID NO: 93464 - DNA, 514 bp, Zea mays
  unsure (1)..(514): unsure at all n locations
atggntnttttatgacgagaaagtaataggatcgctcgtaccggtccggaattcccgggtcgacccacgcgttcgagaagaacccggagaagttcttcgtgcgctccatcaccgaccaattgcaggccgtcgtcggcatctcgctgctggagatcctgtccagccactccttcgacgaggtgtacctcggccagcgcgacacctaggagtggacgtcggacgccaaggcgcaggatgcgttcaagcggttcggcgcgcggctgaccgagatcgagaaacgcgtggaggccatgaacaaggacccgcgcttcatgaaccgatacagcgcggtccagttcccctacaccctgctcttccccaacacctccgacaagggcgataacaccggcgtcactgccaagggcatgcccaacggcatatccatctgattcgatcgagtcctggcccagcgttcacccaaataagcagaactagcggtgattcctggatggtatccggtccatttttaacagaa

SEQ ID NO: 93465 - DNA, 507 bp, Zea mays
atggtggctatagtggggagaggaaagatgtctctttccttaattcccgggtcgacccacgcgtccgagtgcagatcactgacctcggcatggccaagtgcctgatgaacgacggcgtgaccagctgctcgagctccccggcgcggatgctgggcacgttcggctacttcgcaccggagtacgccatcgtgggcaaggcgtcgctcaagtccgacgtcttcagcttcggcgtcgttgtgctggagctcatcaccggccggcagcccatccacaagtcgtcgtcgacgagggccgacgagagcctcgtactctgggcgacgtcgcggctgcgggacagccggctggtggtcacggagctgccggacccgacgctgcagggcaagttcccggcggaggagatgcagatcatggcgcacctggcgcggaagtgcctgcagtgggaccccgaggccaggcccacatgacggaggtcgtgcacattctggcaacatcgaaccacttcagacg

SEQ ID NO: 93466 - DNA, 466 bp, Zea mays
  unsure (1)..(466): unsure at all n locations
atggntgttcacgagcgtaaagtacgcatgactgtaccggccggaattcccgggtcgacccacgcgttcggcagcgaagatggagcttgcacgggccaacgcacacacaacacagctcgtggagatggcgcgggggctagggtgctggcgctggacgcgcactgcatcgcgtggcgtccgggcggcggctactgaacgcgaaagacggatgcgctgaccactgggggcctgcgccgagctgcatacgtgcggggcagcccgcgcgccgacgccgactgctgggccgatgcgccagagctgggaagaccccaagtgctgtgcgtgctcgtaaggacaacgacgacccaacctgggcttaagagcaacgaaccctcggcttgtgctcactacgcctgcgggccacccgcgcaacgtgtccactgggtcagctctgctatcctcgggctccatagacccgtcggctgaa

SEQ ID NO: 93467 - DNA, 515 bp, Zea mays
  unsure (1)..(515): unsure at all n locations
gattgggntgngaccagacgacanagtattgctcgtaccggtccggaattcccgggctgtctcacgtcttccgcacccgcttctcgctccggattccggattccctctgctctttccctaacgaaggtagccatggcggngagaggtaaggcgatcggctcaggcgccgccaagaaggccacgtccaggagctccaaggctggcctccagttccccgtgggaaggatcgccaggttcctcaaggccggcaagtatgccgagagagtcggcgccggcgcccctgtctacctcgctgccgtgctcgagtatcttgctgctgaggttcttgagctggccggcaatgcggcacgtgacaacaagaagacccgcatcgtaccgagccacatccagctcgccgtccgcaacgacgaagagctctcccgcttgctgagcacggtgaccatcgctagcggtggtgtaatgcccaacatccataaccttttgctcccgaagaaggccgcggctgcagcgccaag

SEQ ID NO: 93468 - DNA, 513 bp, Zea mays
  unsure (1)..(513): unsure at all n locations
gaaagaagctnctgggtcagcngtactgcatagncgtactggtctcggaattcccgggctaggcagccaggcagccatggcgcccaccgtgatgatggccttgtcggccaccgccgtcgctccgttccatgggctggagttcaccgacagtcttcccgacgaccggcgctgctccagaagcctatgtaacgttagcaacggcggaaggatccggtgcatgcaagggtggtcggactacggaaacacgaagttctagactctgtagtacctggcggcgattgcgacagacgacctgcttgagcaatgtgactaccatgatgtgcaacggctggataccctggctctagttcataccggacagatatgagtaccgtgagaacttcatctaaccgtgctaattcgaactgcgttactggaccatgcgaaagctgcccatgagacgctgcaacgacgcacgccaggtgcacaaggtgctcgtagacgacaatcaatactactagtgggctgttcccg

SEQ ID NO: 93469 - DNA, 482 bp, Zea mays
  unsure (1)..(482): unsure at all n locations
aagtcactgaaaccaaagcaacaaagganggcatcgacgtaccggtccggaattcccgggcaacatctcaaatcaagctagttgaggggtcctattttgagaagttctataagcaaacggctgatatggatccagctcagcgtgctgcctttctcgaggaagatgatgagatggaagatgcacattctgttgctgcatctgctggtgacactgatgtgaactttatgagcttgatggacgaaaatcacaacccacattccatggcccttcatcacctgaaaccttgttgcaggatgctgcaaaagtcatcaaagctagaattgcagagaaccctaactctatgaacttcaacgtcatggctctttcaaagaagtgaagtgtactgtgatggattttctttggcagaatacgggcctcttttcctttcactttcactgggctgcaccgagtggaaaggttgcatggggcaacattaggaaaaa

SEQ ID NO: 93470 - DNA, 489 bp, Zea mays
  unsure (1)..(489): unsure at all n locations
tggcncttgagacagcaaggggggggggaatagtaagtactggtcccggatcggaattcccgggtcgacccacgcgtccggcggcaccgcaccgggtactattttgacctcggtcgctcaaaatctctgtctgtcggccctgcagaccccagacctagaccctccaaaaacaactcaacaacaatgctgctcctcctgctgctgctcgtcgcctactgctccctgtcccaagagggcgtgctcggcgacgtgccgacgtacaacaagctggtcttcatcctggcggggcagtccaacatggccggccgcggcggggtggtggcgaaccgctgggacggcgtggtgcccggcgactgggcgccgttccccgcggtgctgcgtctctcgaccgacctgcgctgggaagaagcgccggagccggttgacgccggcatcgacgccgtcaaccacgccgtcggggtgggccccgggatggcgtttggcaacgcc

SEQ ID NO: 93471 - DNA, 517 bp, Zea mays
  unsure (1)..(517): unsure at all n locations
aggatcttaggcgctgatgctggtcagcncctacagtactgcggtaccggtccggaattcccgggtcgacccacgcgtccggaagccgccgccgctgcagtgtccatagccaccgcaggagactgagatggggggttgtgtcaagacccacaagagcaatgcgtacttcaagcgtttccaggtgaagttcaagagaaggcgcgctggcaagacagactacagggccaggataaggctgattaaccaagacaaaaacaagtacaatacacccaaatacagatttgttgtgcgatttaccaacaaggacatcacagcacaaatcatctctgctagtatagcaggtgatatggttcttgcttctgcttactcgcatgagttgccacgatatggtcttgaagttggtctgaccaactatgcagctgcctactgcactggccttctgttggctcgccgtgtgctcaagacccgtggtttagataaggaatatgagggcaatgttgaggccactggtgaagan

SEQ ID NO: 93472 - DNA, 524 bp, Zea mays
  unsure (1)..(524): unsure at all n locations
ntggtnntnactacgtacctcactgcatngccatactcgtcccgaatcgcaattcccgggtcgacccacgcgtacggttgaccgcgccgacagtcgccgtatgtccctcgtattcgcaccgcgcgctgttgtccatccttgtgcagcaaaaatgactgctggctacattgctggctcactggtcggatcctttggcattgcatacctgtgtgacacatttatctctgacaagaaagcatttggaggtagcacccccaagactgtttctgagaaggagtggtggcaaggcacagacaccaagttccaggcctggcctcgcactgctggggcaccggttgtcatgaaccccattagccggcagaacttcatcgtcaagttcactgaataggttggggctggagaaactggttcttgcgacttgggtgccggcatgaagcccgaggttccttttctaaggtcttattcaattgtaataaaaccgaattacaggccaggattttttttgggaattttttaattggacc

SEQ ID NO: 93473 - DNA, 514 bp, Zea mays
aggatcaagtttctaataacgtacgtagtcgtctgacgtaccggttcggaattcccgggtcgacccacgcgtccgaccataccctaactccaaattcccaattgtcaatctctactcagagttcgagtgaccgtgtacgcgcgcggaaagggcgggaaggcgctaggcaagggcggcgcgaagcgtcaccgtaaggttctccgtgacaacatccagggcattacgaatccggcgatccgtacgctggcgagaaggggcggactgaagcgcatctcggggctcatatacgaggagacccgcagcgtgctcaagatcttcctagagaatgtcattcgcgacgctgtcacctacacggagcacgcccggcgtaagaccgtcaccgccatggacgtcgtctacgcgctcaagcggcagggccgcaccctctacggatttagcggctgaagggtcacgggtgtccgacaactgctgctggtcgtgggcaaagtcttgggtcaccgtcaccaaattgagt

SEQ ID NO: 93474 - DNA, 517 bp, Zea mays
  unsure (1)..(517): unsure at all n locations
ggacgtgnttgtgactgagcagcagggatcgcagtgctggtccggaattcccgggtcgacccacgcgtccgggcaaggacgacgtgatcgagagcggtgctgtctgctgcgagttcgctgccaagggctacacggacccttccccggcgccgctgatcgacgcggatgagctggggtcctggtcgctgtaccgtgccgtgatcgccgagttcatcggcacgctgctgttcctgtacataacggtggccaccgtgatcggttccaagcaccagacggacgcgttggcgtcgggtgccgacgcggtttgcggcggcttgggggtgctgggcatcgccggggccttcggcggcatgatcttaggcctggtttactgcaccgccggtatctcggggggccacatcaacctcgcccgaacctatggcctcttcctggcgcgcaaggtcttcctggtgcgcgcgctgctatacattgtggcacagtgcctctgggccattttgtgggttttgcctagaaaagg

SEQ ID NO: 93475 - DNA, 507 bp, Zea mays
  unsure (1)..(507): unsure at all n locations
tggttntgtcgctgaaagctangcatgcgtccggtccggattccggtcgacccagctacgggcagggcgacgtgatcgagagcggcgctggctgcggcgagttcgctggcaaggactacacggacccttccccggcgccgctgatcgacgcggctgagctggggtcctggtcgctgtaccgcgccgtgatcgccgagttcatcgccacgctgctgttcctgtacatcacggtggccaccgtgatcgggtacaagcaccagacggacgcgtcggcgtcgggtgccgacgctgcgtgcggcggcgtgggggtgctgggcatcggctgtgccttcagcggcatgatcttcgggctcgtctactgcaccgccgggatattcgggggccacatcaacctcgccgtcacctttcggctctttctagcgcgccagggtctcctggagcgcgcgctgttctacattgtggcgcaatggcttgggggccttttgcgcgtcggccttgtcaaagcgg

SEQ ID NO: 93476 - DNA, 475 bp, Zea mays
  unsure (1)..(475): unsure at all n locations
ggtnctcttcgaagagagtgatgcactgctcgtaccggtccggaattcccgggtcgacccacgcgtccgccgaggtccgcaagaacggaacctgcccctggctcaggcctgatgggaagacccaggtgacagtcgagtaccgcaatgagggtggtgccatggtccccatccgtgtccacaccgtcctcatctccacccagcacgacgagacagtgaccaatgatgagatcgctgctgacctgaaggagcatgtcatcaagcctgtcatccctgagcagtaccttgacgagaagaccatcttccaccttaacccatctggccgctttgtcattggtggacctcacggcgatgctggcctcactggccgcaagatcatcattgacacctacggtggctggggagcccatggtggtggcgctttctccggcaaggacccaaccaaggttgaccgcagcggagcctatgtcgcaaggcn

SEQ ID NO: 93477 - DNA, 519 bp, Zea mays
  unsure (1)..(519): unsure at all n locations
aggggnntnaaaacaagcatatattgcactgctcgtaccggtccggaattcccgggtcgacccacgcgtccggacgcgctgcggcggctcgtggagcggcacggcgcgcgcaactggacggcgatcgggcgcgagatcccggggcggtcgggcaagtcgtgccgcctgcggtggtgcaaccagctgtcgccgcaggtggagcgccggcccttcacggcggaggaggacgcggccatcgtccgcgcccacgcgcgcctcggcaaccgctgggccgtcatcgcgcgcctnnctcccggccgcaccgacaacgccgtcaagaaccactggaactggctcctcaagcgcaagctcgccgtcgcgtccgtcccggcgggttcctccgacgtcgacgcgcgcccgaccaagcgcgtcaggctcttcgccgacagcccgtcggggtcggggtcagggtcccggtcccgggtccggttcgaccgtaacgacctgagccacggttgccggcaggtttaccgcccgtgg

SEQ ID NO: 93478 - DNA, 523 bp, Zea mays
  unsure (1)..(523): unsure at all n locations
gggaggggntgcaaccgacgggggaatgaagtattgctcgtaccggtccggaattcccgggtcgacccacgcgtccgggaccctccacaacaatggccaccgtcctgggcagcccccgcgcgccggccttcttcttttcgtcgtcctccctccgcgccgcgccggcgcctaccgccgtggcgctgcctgcggccaaggtgggcatcatgggccgtagcgccagcagcaggcgcaggctgcgcgcgcaggccacctacaacgtgaagctgatcacgccggagggggaggtggagctgcaggtgcccgacgacgtgtacatcctggaccaggccgaggaggacggcatcgacctgccctactcctgccgcgcggggtcctgctcctcgtgcgccggcaaggtcgtctccggctccgtggaccagtccgaccagagctacctcgacgacggccagatcgccgacggctgggtgctcaccttgcacgcctaccccacctctgacgtcgtcatcgagacgcacattga

SEQ ID NO: 93479 - DNA, 489 bp, Zea mays
acgtgctgagctgataacacgaaaatagtatgctcgtaccgtccgtattcccggtcgacccacgcgtctcggatcatgtgatttaacatgaccacttgtcatatttggtccctgtatgagatgtgtaatgtgtggggatattttctctctttaatacaaagaagggcagctaatcttgtgtttttgaaaaaaaaaacaaaaattgagaaataaaaataagtatacaaaatctaaataaaaataaatattaaaaaaaaagggctgccgctctaaaggatccaagctaacttacgcgtgcatgcaacgtcatagctctgctatagtgtcacctaaattcaatttactggccgtcgttttacaacttcgtgactgggaaaaccctggcgttaccaaacttaatctccttgcatcacatccccttttagccagctggcttaataccgtaaaggcccgcaacgaacgccctttccaacatttgtcgctttctga

SEQ ID NO: 93480 - DNA, 485 bp, Zea mays
ggcgatgcttacgccgggggaaagaaggaatgctgtaccggtccggaattcccgggtcgacccacgcgtccgtttgtgactgacagtgaaaaaatgacagtcgagtatgagaactgcaagcttctccttgtggacaagaaaattaacaatgccagagatcttatcactatcctggaggatgctattagaagtggatatccaattctaatagtggcagaggacattgagcaggaagctcttgcaacccttgtggttaataggcttagaggtgcattgaagattgctgctattaaggcccctggttttggagagcgcaaaagtcaatatcttgatgacattgctactctcactggaggcactgtcatcagagaagaagttggattatccttagacaaggcagacaatgcggtcctaggaactgctgctaaggttgtagttaccaaggattcaacaacaatagtgggagatggcactacacaggagga

SEQ ID NO: 93481 - DNA, 520 bp, Zea mays
  unsure (1)..(520): unsure at all n locations
gatagtgctgagctaccgaaaaatagtactgctcgtacttgtcctgaattcccgtgtcgacccacgcgtccgctgtgtacgaagccgactagcagccgactctaaagcttggtccggtgagcttcagagaaggggcgggtacgtcaagatgcagatcttcgtgaagaccctgacgggaaagaccatcaccctcgaggtcgagagcagcgatacaatcgacaatgtcaaggccaagatccaggacaaggaaggtatcccgccggaccagcagcgactaatctttgcggngaagcagctcgaagacggccgcaccttggccgactacaacatccagaaggagtccacccttcaccttgttcttcgccttcgcggtggcatcattgaaaccttccttcaggcgctcgtccgcaagtacaaccaggacatgatgatctgcctcaagtgctaatcacggctgcaacccagggccggtaactgccctaagaagaatttttgccacattatacaactttaggcctaa

SEQ ID NO: 93482 - DNA, 516 bp, Zea mays
cgtcctgagtcactcgatattgtatgctcttctgtccggaattcccgggtcgacccacgcgttcggtaaaaccaaccgaccaccaatctccatgcgccgccttgtcaagtttatggaaggaaaggagaagaacattgctgtcattgttggcacagtcacagatgacaaaaggatccaggaggttccagcaatgaaggttactgccctgaggttcacggagacagcaagggccaggattgtcaatgctggtggcgagtgcctcacatttgaccagcttgctcttcgtgctccacttggcgagaacacggtcctcttgaggggccccaagaatgcccgtgaggcagtgaggcactttggcaaggctcctggagtgccgcacagtcacaccaagccgtatgtgcgctccaagggaaggaagttcgagaaggctcgtggcaggaggaacagccgtggattcaaggtttaaaacaaattgtcgccctacgtgttgccatcagcatagtgcaaccgttgtgt

SEQ ID NO: 93483 - DNA, 486 bp, Zea mays
  unsure (1)..(486): unsure at all n locations
ggcattaaacgagggggggggggaggggaatgcttgtaccggtccggaattcccgggtcgacccacgcgtccggaagggcaggagatcatggacctggccgacctgtccacgcccctcccggagtggttcaccgaggaggacctggacgcctacgccaagctctacgagaagtccggcttcgggtacccgctcaagatgccgtacagatctatgcacaagctcccgaaccggctggacgccaagttccaggtgccggtgttcatggtgatgggggagaaggactacgcgttcaagttcccggngttcgagaccgccatgcgcggcggcgtcatggacaacttcatgccggacctcaagatcacctacatccctgaggggagccacttcgtgcaggagcagctcccagagcaggtcaacgacctgctcctcggcttcctcagggaccatccctccgccgcataagcagtgggtgagaccgtcagaat

SEQ ID NO: 93484 - DNA, 490 bp, Zea mays
  unsure (1)..(490): unsure at all n locations
aggaatggcccttacacgtaacggggagtaangtgactgctcgtaccggtccggaattcccgggtcgacccactcgtccgggaagggtgacttcatatacaatgtcaatacagggaagaaaatcaaagttcctcgcttggtaaggatgcactctaatgagatggaggatattcaagaagcatatgctggccaaattgttgctgtttttggtgttgattgtgcatcaggcgatacatttactgatggaacagtgaaatatactatgacttcaatgaatgtccctgaacctgtgatgtccttggcagcttcacctatatctaaagactctggaggacagttttcaaaagctctgaatcgcttccaaaaggaggatcctactttccgtgtgggtttggatgctgagagtggccagactattatttccgggatgggtgagctgcatctggatatatacgttgaacgtattaagagagagttcaaggtggatgca

SEQ ID NO: 93485 - DNA, 486 bp, Zea mays
  unsure (1)..(486): unsure at all n locations
ggagtcctaattacgaacgggaagtattgcantgccgtaccggtccggaattcccgggtcgacccacgcgtccgcccacaccgcgggcgaccctgtgatgcacgactaccggagggcccggtaccttgccttcttctacagcaactccacctccttcgtggcgtccgtggtggtcgtcgtgcttctgctgccagagtcgctgcacaagaagtggtggtggctcggggtcatgaacgcgacgatcgtgctggacctgctgggcctcttgatcgcctatgccgccgggtccagcaggacgtggaagacttctgtggttgtttccgctctcgttctcgctgtgctcgcctatttcgtcatacatgtgctgctgtcaagctgcgtcaggagagggaagaagacagcccccgactctcggccccatgaccaggagaacagagaggaaaacgaagcggcaacgaaagaggtcgagctccagggtccagcttg

SEQ ID NO: 93486 - DNA, 522 bp, Zea mays
  unsure (1)..(522): unsure at all n locations
ngtagtactggtatgtatgtattgcatctgctcgtaccggtctcggaattcccgggtcgacccacgcgtccgaatccctctcgcctcatccccaccagcgcaaagccgtcctatcgtcctgtcgtgagaagcaatggcgggccgtggcaaggcgattggcgctggtgccgcgaagaaggcgacgtcaaggagctccaaggctgggctgcagtttcccgtcggcaggatcgctcggttcctcaaggcctgcaagtacgcccaagcgcgtggctcccgctccccttgctaacttggcggtgttctcgagtaccttggcgcttaagtcctggaacttgcttggaacgcaacgagggattacaagaagacccgcatcgtgccgcggtacatacagctcgncgtgcgcaacgactaggagctgaccaaactgcttggtggttgcaccattgctagcggctgcttattgcccacattcaccagnaccttctccccagaaagcttggctcgtcaatgttttcaccggcc

SEQ ID NO: 93487 - DNA, 515 bp, Zea mays
aggctgagttgtaggcggagtgatagttacgctcgtactcggtccggaattcccgggctcgctcgacactgtcactagctagttgctctactagagggcgggtatagagctgcctgcaatccgccgcttagaagggaggatcggaagcgacgatgaggtcgtttgctcctgtctttctgtcggcggtcgtggcctggcttgagcttgcgggcaccgctcaaggcggcaacttctaccaggacacctagatgacctggggccattgccgccgcaaggtaatggaccgccggcgccggcttgacctgacgcttgaccgcacgttcggcttcgggttccagtccaagagcgagtacctgttcggcaagatcgacatgcagatcaagcttgtgccaggcaacttcgtggcacggtcaccaacttctaccttgtcgtccaaggcgactcgcacgacgagatcgacttcgagttcctgggcaacgttagccgggaggcctcacgctggacaccaacgtgtt

SEQ ID NO: 93488 - DNA, 518 bp, Zea mays
  unsure (1)..(518): unsure at all n locations
gttcgtgctgaagttcaaatgnagtangncgcttcgttttcggaattcccgtctcgacccacgcgtacgaatccctctcggcttatccccaccagctcaaagtcgccctatcgtcctgtcgtgagaagcaatggctgtccgtggcaaggcgattggcgctggtgccgccaagaaagcgacctcaaggagctccaaggctgggctgcagtttaccgtctgcaggatcgctcagttgctcaaggacggctagtacgccgagcgcgtgggcgcccgcgcccctgtctacctcgccgctgttctcgagtacctcgccgctgaagtcctggagcttgctgggaacgcatcgagggataacacgaagacacccattgtgccccgttacatacagatcgtcgtgcgcaacgacgaggagctttccaaaatgcttggtgtgccaccatctttagcggcggcgtttttcccacaatcaaccagaacctcttcccaagaaagcttggttttcaaaaggttcaccgggg

SEQ ID NO: 93489 - DNA, 513 bp, Zea mays
  unsure (1)..(513): unsure at all n locations
cgagctggctgccattagagccttcgcaacagaaataantagctaccgtcagccaccggttccggtaattcgccgggggaggacccaccgcgtgccgcgagcggctgcaaccacctactcattgcgttttcaatggcaacaacgtgtacgtcggtctcggtgccgtgcaccttcctcttgcgcggcaggtccgcccgcaccatgcccagacgcaagcagctcacggccgtccgctgcagcgccgtcagacaggccgtagtggaagaggcctcgcccgggaccgcggacgatccgctgctggtgagcgcaatcagagggacgaaggtcgagaagccacccgtatggctcatgaggcacgccgggaggtacatgaagagctaccaattgctctgcgagcggcatccttcgttccgtgaaagatcagaaaatgtcgacctagttgttgagatctctttgcaaccatggaaggttttcaagcctgaaggaatcatcttggtctcggacattcttact

SEQ ID NO: 93490 - DNA, 491 bp, Zea mays
  unsure (1)..(491): unsure at all n locations
atgagccnntaaaatcgatagcgggggtattgtgtatgctcgtaccggtccggaattcccgggtcgacccacgcgtccggcttcccttctcggcacttatttcaagtggtgttacacaaaggccagtgtcagtgaccgcttccttggagcacaaaaccagcgatgctagaaggaagttcctaaaacttgcgcttgggaatatcggagttggactgcccaccttgttgggtgttaagaaagctctcgctgatgagcaaggaatctcgtcctcgaggatgtcttattcaaggttccttgagtatcttgacaagggtagagtgaagaaggttgatttatttgagaatgggacaattgctatcgtggaggccatttctcctgagcttggcaaccgcgtgcagagagtccgtgtgcagcttcctggtctaagccaggagcttcttcagaagttgagggaaaagaacatcgattttgctgctcacagcaaccatgaa

SEQ ID NO: 93491 - DNA, 498 bp, Zea mays
ggagggagcgccgattgattacgtacagcggggatagaagttactgctcgtaccggtccggaattcccgggtcgacccacgcgtccgctggacacaggaggaaagagagatgctaagacataaggtaccgttgactggtctgaagacaccatttcgcgatggatatgttagagatttagccgaggaagttctaaaactggccaagaatggattggaaagaagaggatacaaggaggtcggtttccttagagaggttgacgaagtggtgaggacaggagtgacacctgccgagagacttctgcatctgtacgagacgaagtggcaacgcaacgtcgaccatgttttcgagcacttgctatactgacgttgtagatgtaccctagtacaaaaatctcatctttgattcattcaacgccttgagtgggagggcacaggaacacatcttttggttaagttgctgaccgggggaacagctacccggtgctgcgtgcggtgcct

SEQ ID NO: 93492 - DNA, 519 bp, Zea mays
  unsure (1)..(519): unsure at all n locations
agcggcttgatacacgaaaagatagtattgctctaccggtccggaattcccgggtcgacccacgcgtccggcggcggcgatgggcggtgaccatggcggtgggcacgccggcggcgacttccgccagaaggtatggagcatgacgggcggcccctactgccgccccgtccactggcgccgtaacaccgccatcgccatgttcggcgtcttcctcatctgcatccccatcgctatgaagtccgcagagctcgagcaacgcccgcatcacccagtccggccaatcccatctcaactgtggtgcaaaaactttggtaagaaggaatactgaaggaccctccaactagcatgaagtgtgggcaccttgcttttgccttctttttgtggaaacctgtgcctagccataatgctgggttaagtgttaggagcatctctggaatgcttcgcgtagtatcttttgaatcttctttnccttcgtggtacatgtgaaatgcctgatgaactcaaaatatgaccggtgat

SEQ ID NO: 93493 - DNA, 514 bp, Zea mays
  unsure (1)..(514): unsure at all n locations
acggctgagaaagcgggggaaatattgcatgtaccggtccggaattcccgggatcaatcccatcttgtaaactgcttgaagaagtatgcaagaggaattttgctacgcattttgattattgcacaactgcttgcacggactttgtgtcattagatgaggcaacatttaaggatattcttgagcatggtgatatgacagtaacgtcggaagagagggttctggatgtcattttaacatggtgcatgggagcttgtgaaacttttcactggacttcagtagatgagctgttgagaacttcaacaacagaacagctctttggggaaaagcttttcgccatcaatactttgctaccattagtgaagttccctttgatgcacctgtctatactaaagaggatggagagaagtaatctagcaaaccacatacaagcattcagacaagtggttgcagaagccattgaattctctcatgctggacaantgatgcctacagcatgcgaatgtgagagatttaa

SEQ ID NO: 93494 - DNA, 517 bp, Zea mays
  unsure (1)..(517): unsure at all n locations
acggctgatatagggggaggaagtacgtgatcgctgtaccggtccggaattcccgggtcgacccacgcgtccgcttccgccgcgcttcgccctctcgctccagccgcttcacagcgccgtcgctcgcctctccgaccgccgcgagaatgccgttcaagaggttcgtggagatcgggcgcgtggccctggtgaactacggcaaagactatggccgcctcgtcgtcatcgtcgatgtggtcgaccagaacagggcacttgtggacgcccctgatatggtcaggtgccagattaacttcaaacggctctcacttactgacatcaagattgacatcaaacgcgttcccaagaagtcaaccctgatcaaggctatggaagaagctgatgtgaagacgaagtgggaaaacagctcatggtgcaagaagctgattgtccagaagaggagggctgcgctcagtgactntgacaggttcaaggtcatgctggcaaggatcaagaggggtggtgctatcaggcaaga

SEQ ID NO: 93495 - DNA, 490 bp, Zea mays
  unsure (1)..(490): unsure at all n locations
ggtgtaaggcctntgatacgacaggggtttaagggatgctctaccggtccggaattcccgggtcgacccacgcgtccggaagaagcgcaaggaggagctcaaggagaagtttgagggcctctgcaaggtcatcaaggaggtgctgggcgacaaggtggagaaggtggtggtctccgaccgcgtggtggactccccctgctgcctggtgaccggcgagtacggttggaccgccaacatggagcggatcatgaaagcccaggcgctgagggactccagcatgtctgggtacatgtcctccaagaagacgatggagatcaaccccgagaacgccatcatggaggagctccgcaagcgtgccgaggctgacaagaacgacaagtccgttaaggaccttgtcatgctgctgttcgagacggcgctgctcacttctggctttagcctcgacgatcccaacacctttggcagccgcatccaccgcatgctcaagctg

SEQ ID NO: 93496 - DNA, 522 bp, Zea mays
atgcgttgatgatagatgaaggagggacagtatctgctcgtaccggtccggaattcccgggtcgacccacgcgtccgaccctttatcaatcaactacagacggcaagaagtttgttgactgcttgaaggatcagaatatcatgcctggcatcaaggttgacaagggtttggttccattgcctggatccaacaatgaatcatggtgccaaggtcttgatggtttggcttcaaggtgtgctgagtactataagcagggggcgcgcttcgcaaagtggaggactgttgttagcatcccttgtggtccatctgcattagcagtcaaggaagcagcatggggacttgctcgatatgctgctattgctcaggataatggtttagtgccaattgtggagccagagattcttcttgatggagaccatgggatcgagggagctcttgaggtggcagagaaagtgtggtctgaggtgtttttctacttagccgagaacaatgttctgtttgagggtattctgctgaagccta

SEQ ID NO: 93497 - DNA, 486 bp, Zea mays
  unsure (1)..(486): unsure at all n locations
tggagagtgcttatacgatggggggaaagtatgctgtaccggtccggaattcccgggctcaagttagaagaagcaccagtgcctgatcgatggcggcccaggctctcctctccggccggcagctgctgggccgtcccgtgcagtcggccgtctctaggtcgtcggcgaggaaggcgcccttcgtcgtcagggccagctcgagcccttcagccaagcaaggtgccgacaggcagctgtggttcgcgtccaagcagtccctctcctacctcgatggcacgctgcccggcgactatggcttcgacccgctgggcctctcggacccggagggcaccgggggcttcatcgagcccaagtggctggcctacggcgaggtgatcaacggccgctacgccatgctgggcgcggtgggcgccatcgccccggagatcttcggcaagatgggcatcatcccgccggagaccgcgctgccgtggttcaagacnggcc

SEQ ID NO: 93498 - DNA, 493 bp, Zea mays
agatgtggccgtgagcacgaacgtaagcatcgcatgtcgttccggtccggaattcccgggtcgacccacgcgtccgagttcggcgaggccgtgtggttcaaggccggctcccagatcttcagcgagggcgggctggactacctcgggaacccgagcctcatccacgcgcagagcatccttgccatctgggcctgccaggtcgtgctcatgggcgccgtcgagggctaccgcatcgccggcggcccgctcggcgaggtcgtcgacccgctctaccccggcggcagcttcgacccgctcggcctcgccgacgaccccgaggccttcgccgagctcaaggtcaaggagctcaagaacggccgcctcgccatgttctccatgttcggattcttcgtccaggccatcgtcaccgggaagggcccgctcgagaacctcgctgaccacattgccgaccccgtcaacaacaacgcttgggcctacgccaccaacttcgtcc

SEQ ID NO: 93499 - DNA, 516 bp, Zea mays
  unsure (1)..(516): unsure at all n locations
cagggtgtaagagggagggagtattgtaatactctaccggtccggaattcccgggtcgacccacgcgtccgggcgtcgtacgtgcactccaacgtcgccggcctcgtcacgctcctcgaggcctgcaaggacgccgacccgcagccggccatcgtctgggccttctcctccttcgtctacggtctcaacgacaaggtccccttctcggagcgcgaccgcaccgaccagtcggcctcactctacgcggtcaccaagaaagccggcgaggagatcacgcacacgtacaaccacatctacggactcttcatcaccggccttcgcttcttcaccgtgtacgggcccctggtgccgtcccgacatggcctacttcttcttcacccgcaacattcctcaagggaaagccattacggtttaccggggcaaggaccacgtggaccctgtccggcgacttaacctacantgacatatatgtcagggcttgcttggcctcctggaaacggnctngcagagcaccgc

SEQ ID NO: 93500 - DNA, 515 bp, Zea mays
  unsure (1)..(515): unsure at all n locations
cgggtttnaattgactgcataggatgctattccgtaccggtctcggaattcccgggtcgacccacgcgtccgccagcccagatcagcgaaacacactccgctctcccgagaccggacacatggcggcggcggcggtgacgtccaacggcggctcagtggccgcaaatgggccggcgcccggccggctggcctccgtgtacagcgaggtgcagacgaaccggctcctgcacgcccttacccttcccttcgtgctccgctccaacttctcggtcgtcgtcggccccgccagctccggcgtgggcaatcccgatgagatcgccaaggcttttcccaacctgttcggtcagccctcggcgtcactggtgccgtcggtcgaagcccgagggaccaagtcgctcaaaatcggcgttgtgctcttcggtgacacgcgcccggcggccacaatggattctgcgggatctttgactatttccaggaacttcaaaaaggcagaacctggatggatttaagggagg

SEQ ID NO: 93501 - DNA, 515 bp, Zea mays
  unsure (1)..(515): unsure at all n locations
tcggnttaagnnttcagttccagtacgtactgtcgtatctgttcagccgtccgtgcgacgcgtacgcgtacgctggaccgaactatacttgcactctactttgtgactgacactgaaaaaatgacggtggggtatgagaactgcaagcttgtacttgtggacaagaaaatcaacaatgccagagatcttatcactatcctgcaggatgctattagaagtggatatccaattctaatagtggcagaggacattgagcaggaagctcttgcaacccttgtggctaataggcttagaggtgcattgaagattgctgctattaaggcccttggttttggagagcgcaaaagtcaatatcttgatgacattgctactctcactggaagcactgtcatcagagaaaaagttggattatccttagacaaggcagacaatgccgtcctaagaactgctgctaacgttgtaggtaccaagggatgaacaacaataatgggagatggcactacccaggaagaagc

SEQ ID NO: 93502 - DNA, 501 bp, Zea mays
tggggatggtgccgattaaaatcgacaagacgaataaaagtactgctggtaccggtctcggaattcccgggtcgacccacgcgtccgcattcctcccatctcccaagacctcctcagacccgagaagcgcagctgcggccatggacgccaccggcactggagctggagggaaggcgaagaagggagcggccggtcgcaaggccggcgggccgaggaagaagtcggtgacgaggtccgtgaaggccgggctccagttccccgtcggccgcatcgggcgctacctcaagaagggccgctacgcgcatcgcgtcggcagcggtgcccccgtctacctcgcggtcgtcctggagtacctcgccgctgaggtcctggagctcgccggcaacgctgccaaggacaacaagaagacgcgcatcgtcccgcgccacgtgctgctggcgatccgcaacgacgaggagctcgggaagctgctgaccggcgtgaccatcgcccacgggggcg

SEQ ID NO: 93503 - DNA, 500 bp, Zea mays
ggggagatggtccttgatcgcgagggggggaaaaggtatgctcgtaccggtccggaattcccgggtcgacccacgcgtccgcatttcgccacgccatggatttctgcagccacctccatctcgcggctgtgctcgcgctcctcaccggctgcgcttctgcggcgagccggggcgctggttccttcgacccatcccgcgtggttcaactctcttggcgccccacggcgttcttgcacaagggtctcctggtggatgcggagtgcgaccacctcatcgcgctggccaaggacaagctggagaagtctatggcggcggacaacaagtccggtaagagtgtccagagtgaggtgcgcaccagctccggcatgttcctcgagaagaagcacgatgaagtagtaacgagaatagaggagaggatatctgcttggacatttcttccaccagagaatggtgaagccattcagatattacactaccatgaatggggaggaattatgaac

SEQ ID NO: 93504 - DNA, 527 bp, Zea mays
  unsure (1)..(527): unsure at all n locations
ngggaagcgtactgagaccgcacgagactgtatcgctcgtaccggtccggaattcccgggtcgacccacgcgtccgagggttttcgcgccgccgccgcagccgcaacaatgccgtcgcacaagaccttccggagcaagaagaagctggcgaagaagatgcgccagaaccgccccatcccctactggatccgcatgcgcactgacaataccatcaggtacaacgccaagcgcaggcactggcgccgcaccaagctcggcttctgagcgtcgggattggccggctgctgcgtcggaaggctagggtctaagagctatcttctgttttatcattgtctctgtttctgtaagctagcaagtgatgctgtgatgcttttattaagattctgatgagtggtgacgttaagagaaaattggcagtactgtgttgtaccccaagattccttgcagcattgctatgctaagtaacgaaccctttatcttaaaaaaaaaaaannnnnnnnaaaaaaaaaaaaaagggcggccgctcn

SEQ ID NO: 93505 - DNA, 528 bp, Zea mays
  unsure (1)..(528): unsure at all n locations
ggtatagcgcctctgtagactgcctagcccgtagcgtacttcggtaccggtctcggaattcccgggtcgacccactcgtccgctcaacccaaggcgtgcctcctctccggtcacccgtcactccacgcaaccatgtcgaggaggaagaccagggagcccaaggaggagaacgtcacccttggacccactgtccgtgaaggagagtatgtctttggtgtcgctcacatctttgcatccttcaatgacaccttcattcatatcactgatttgtctgggagggaaactctggttcggatcaccggtggcatgaaggtgaaggctgaccgtgacgagtcgtcaccttacgctgctatgcttgctgctcaagacgtcgcacagcgctgcaaggagcttggcattactgcactgcacattaagcttcgcgccaccggaggcaacatgaccaagacccctggacctggtgcccagtctgccctcatggcgcttgctcgttccggaatgaaaatcggacgcattgaggacgttacn

SEQ ID NO: 93506 - DNA, 493 bp, Zea mays
  unsure (1)..(493): unsure at all n locations
ggcggggnnnaactcgtatagactgtactctctaccctccggaattcccgggtcgacccacgcgtccgatcagatctagcagaactctctcgacctcatcggcgttggcggagcgcgtgttgaccggagatggcgccgagcgggtggaggaggagcgcggcggcgcgggtcgcctggcgcccggccacggtttgcctgtggctcgcgctcgccgccgccgcactgacgctcgcccaggctaagaaggacctgacggaggttacccacaaggtctacttcgacatcgagatcgacggcaagcccgcatgccggattgtcatggggctttttgggaagactgttcctaagacggcagagaacttccgagctctntgcacaggagagaaaggggttggcaagagtggcaaagccctccactacaagggaagtaagttccacagaatcatccccagcttcatgctccaaggaagtgacttcactctcggggacggga

SEQ ID NO: 93507 - DNA, 483 bp, Zea mays
  unsure (1)..(483): unsure at all n locations
tagctncttgaacaggggggggatgagatagtcatgctcccggtccggaattcccgggtcgacccacgcgtccgcacacacacacacacagacaagtggtttccaaagccaagtgtgtgtactagcaaccagggagctcgggcggcagcaggcagccatcatgtcggaggagaagcaccaccacttcttcaaccaccacaagaaggacgaggagcagcccgccggcgagtacgggtactccgagaccgaggtggtcaccgccaccggcgagggcgagtacgagaggtacaagaaggaggagaaggagcacaagcacaagccagacctcggcgatgcccggggcattgccgcagcagcctcggactctacgagaagcacgaggcgaagaaggaccccgagcacgcgcacaggcacaagatcacggaggaggtcgctgccgcggcggccgttggcgcctgcggttacgtattccacgagcaccac

SEQ ID NO: 93508 - DNA, 490 bp, Zea mays
  unsure (1)..(490): unsure at all n locations
cgctactanttacgagacgggaagtacagtagtgcttgtaccggaattcccgggtcgacccacgcgtccgggcaaaggagccgtgtcatctttgcatggttggcatataggcagccgcaactgctactgctcgatgagccgacaaatcatttggacattgagaccattgactccctggcggaggcactgaatgagtgggatggtggtttggtcttggtgagccatgatttcaggctgatcaaccaggttgctcaagagatttgggtgtgtgagaatcaggcggtgacaaggtgggaaggtgatatcatggatttcaaggcacacttgaagagcaaggctggtttatctgattagagggctttttccagcaaccatgagctttttaactctgtatcacgaagtcccagttttccaatagcgaactatcagagttactttattgtatcggatttcttttgacttgcattgcaacctgattaccttatactac

SEQ ID NO: 93509 - DNA, 520 bp, Zea mays
  unsure (1)..(520): unsure at all n locations
aaggtgcntgttacgagctgaagtatgctacttcggttccgaattgccgggtcgacccacgcgtccgagttttcccagtatctgaatgagtgctctcaggtgatgagagctacgcagaagattggggtgttcgacatgcattaactgcttaccttgaatacattgcgtacctatatcagaagatggatccgattcctgagcaggtacgcattgatactaattacagggacttttggcagtatgactcgtgcgcctctaatggacaatttggaagctcaaacttatgagacatttgagaaggatgttgtgaactacactcagccggagaattttcaaagtaaaatgttcggtgaacaggatgcagaaaaagttaaaagctgcaacgataaggcaaacaaaatgttcccaaaggtgccctcaaagatcagcttcaacatagttctgagccaattactgaaaacaatgatgatatcacgcactngttgnttgccgtcattgtaggttctttccttccatgccc

SEQ ID NO: 93510 - DNA, 521 bp, Zea mays
  unsure (1)..(521): unsure at all n locations
gttaggtgactgataggggaggggagtattgtagctgcctgtccgaatcgccgggtcgacccacgcgtccgctcgggtcaaaccctaagcagggagttgatttatccgctgcagccatgagtaagttgcagtctgagtctgtcaaggatgccatctcccagattgttggggatgccaaggagaagaataggaagttcactgagactgtggaacttcagattggtctgaagaattatgatccacagaaggacaagcgtttcagtggctctgttaagttgccccatatccctcgtcccaagatgaaggtgtgcatgcttggtgatgcccagcatgttgaggaggccgagaagatgggacttgactacatggatgttgaggctctcaagaaaatgaacaagaacaagaagcttgttaagaggcttgccaagaagtaccatgctttcttggcatcagaggccatcatcaagcagattccccgtctcctggtccttgtctcaacaagcangcaagttaccgacccc

SEQ ID NO: 93511 - DNA, 482 bp, Zea mays
  unsure (1)..(482): unsure at all n locations
aatggnnnctgaacgcgggggggatgagaaagcttgctaccggtccggaattcccgggtcgacccacgcgtccgctagggttttgctgctctccgaccccgagctccgaaggccgcagcttcaggcgcggccgccctggcgtgtgaccgagatggcgctgccgaatcaggggaccgttgattaccccagcttcaagctcgtcatcgtcggcgatggtggaactggtaaaactacatttgtgaagaggcatctcactggagagtttgagaagaaatatgaaccaaccattggtgtggaagttcatccgttggatttcaccactaactgtggtaagatcaggttctactgctgggataccggcaggcaagagaagtttggtggcctcagggatgggatctatatccatggccagtgtgcgatcatcatgtttgatgtaacctcaaggcttacttacaagaatgttcctacgtggcatagggacc

SEQ ID NO: 93512 - DNA, 484 bp, Zea mays
agaagccgttatacgaagcggggggaagtaatgctcgtccggaattcccgggtcgacccacgcgtccggagataaaaatagactatgaaggtagatttgattccgatagtggtgatgagaataactggaagttgttggtgatgcaaagacatgggaaacctgatgctatgatgcagtcatggatggatcaatttgaggctgattctgacaacgaatgctgggcatctttttaagagcggatctcaagagcaccaaatcaagtgttgaggtattgtcgagaaccaaatgctaaacctatctgggcgttatcttctgggtgtgcatcaaatgctgatatcccatcatgtagctactgtaaaggtccattatgttatgaatttcaggtaatgccacaattgctatatctctttgtagtgggaaatcaaccatactcccttgactgagcaacaattgctgtctacacgtgtcaaggggcatgtgaccc

SEQ ID NO: 93513 - DNA, 516 bp, Zea mays
  unsure (1)..(516): unsure at all n locations
tatgttttgttatctgcaaagacagtaactgctgctccggtctcgaatttcccggttcgacgcacccttccggtagtataaaaattgaactattgaaaggtaggattttgatttgccgattaggttggtggattgaaggaattnaccttgcganaagttgtgtttggattgattggcgggaggaacttggggaaaaccctggttcctattattccattcatggatggatcaatttgatgctgattctgacaacaaatgctgggcatcttttcaagagcgggtctcaagagcaccaaatcaagtgttgaagtattgtcgagaaccaaatgctaaacctatctgggcgttatcttctgggtgtccatcaaatgctgatatcccatcatgtagctactgtaaaagtccattatgttatgaaatttangtaatgccacaattgctatatttctttgttgtgggaaatcaaccagactcccttgactgggcaacaattgctgtctacacgtgtcaaggggc

SEQ ID NO: 93514 - DNA, 516 bp, Zea mays
  unsure (1)..(516): unsure at all n locations
gttagggtcctgagcacgacgtattgctcgccgttcggtccggattcccggctcaccaaccacttcttcgcagagaacctgatcgggaacggagggaacagcagggtgtacaggggcagcctcgcctgcggccggcaggtggcgatcaagctgtgcaaggcgtcggcggaggcgtccaaggacttcctccgggaggtggacatcatcaccaagctgcagcaccaccggatcgtccccttgatcggcgtctgcgtggaaggccgcaacctcatctccgtttaccgctacctccccaggggcagcctcgaggacaacctacacggggaaaggtcaaagccggcgctgtcgtgggagaaccggtacaaggctgcgctggggatcgcggaggctctgagctacctgcactccggcagctcgcggccggtgatccacagggacgtcaagtcgtccaacatcctncttacagaagagttcgagcctcagctatccgatttcgggctggccatctgggcgccg

SEQ ID NO: 93515 - DNA, 517 bp, Zea mays
  unsure (1)..(517): unsure at all n locations
cggccttccgctgcaagctatgatgcactgctgtaccggtccggaattcccgggggatctactgcttatggggtgaaaaacatcgatgtcctagagggtgcaagggctgctctgaatctgtcaggagccgtgcttggatattatcctgtcaatgttctgccgtcaaaaactgccattgcaccagtcaacaaaacattcctacccaggtctaacgatgaacatgaaatgtgtgcaaggactatctactgcacaaattaacattgacaagaaggtcactcaagcagatctaaagttattctttgagtccatatgtggtgaggttggtcgttctttactccaaacacaatctcccttctgtatagctaaaagtttgcagaaatggcaccatcaagatcgatctggagaccaacaagatcatggacttcatcaagtttgacgtcggcaacgtggtcatgatgaccggcgggaggaacaccgggcatgtangagtgatcaagaacagggagaagcacaaggg

SEQ ID NO: 93516 - DNA, 453 bp, Zea mays
gacggtagtattggtccggaattcccgggtcgacccacgcgtccggcaatccacgtgtcaagaaaataccagatgaagagtggtattgtttggcatgtaaaagaaagaaacctaagagacaacgtggaaagtttgcaaatcccaaagttgaatcatccaagggcattcaaagaccccgccgaggtcttggtcctattcgagatatgttactggattctgaatcatatgaaagtggggttcggattggtactaagtttcaagcagaagttccaaaatggtctggtcctatttctagtagagaagatgagtttgctgagcccactgaacttgatcgtagtaaaacgacaatgctgagtttcgaggataagaaaaccagtatcggtaactggatccagtgccgggaagttctagacacaagaattggttgtggcaaattggcggaggcaccattgt

SEQ ID NO: 93517 - DNA, 476 bp, Zea mays
agtgcttgaaagaggggggacggaaagtatgtcccggtccggaattcccgggtcgacccacgcgtccggtcgtcgtggctcgtccgcgccctgacccaccgggccgtgcgcgaggtggatgcctagcgagactccttgttcgccttcatggatgtagtggtaggtgagcgcttggatcgacgagaaggtcaactgaagaagaggaggaggagggagaggatctgattgacgttctcctccggagccacaaggaaggaaacctcccgttccctctcaccatgaggacaatcgaagcggtcatatttgatctgatcggagggggtatcgagacagcaacaacaacgctgcagtgggcgatggctgagctgatgaggaatccaggcatcatggccaaggcacaggccgaggtcaggggattgttcatgggccaaaccaaggtaaccgaagaccggctaggtgagctaccctacctgcag

SEQ ID NO: 93518 - DNA, 477 bp, Zea mays
  unsure (1)..(477): unsure at all n locations
tagtncttgatcgaaggcgggaggggaaagtagtcccggtccggaattcccgggtcgacccacgcgtccgggcaaggcagtggttgttggaggaggttatattggcctcgaacttagtgcagccctgaagatcaatgactttgatgtcactatggtgtttcctgaaccttggtgcatgcctcgcctcttcactgccgatattgctgctttctatgaggcttactatactaacaaaggtgtaaagatcttgaagggcacactagctgttggttttgatgctgatgccaatggtgatgtcactgcagttaagctaaaggatggcacagtacttgaagccgatattgttgttgtcggtgttggaggcagaccattgactactctcttcaagggtcaagttgctgaagagaagggtggaatcaagactgacgcttnctttgaaacaagcgtacctggagtatatgccattggtgatgtggc

SEQ ID NO: 93519 - DNA, 515 bp, Zea mays
  unsure (1)..(515): unsure at all n locations
tacgtctgangcctagcttcgtacgtcattacttgtcctgaattcccgggtcgacccactcgtctcgcccagattaggaagatgaagggtttgaagcataagaaggctcacctgatggagattgaggtcaatggtggtaccattgcgtgactaggtggactatggctacaaattctttgagaaagaggtccctgttgatgctgtcttacagaaggatgagatgattgacatcattggtgtgaccaaggggtaaggttatgagggtgtatccactagtcgtggtttaacagggcttacgtgagagtccctctatgggctacgtatagtctggtgtacatgcgcatgtgtttctacgagctcctggactctagtctgcagtgcaagtttgcttgagttgagacgcatatcatggaggaactggttcggctttttcatcagtgttaccctctgggtgaattcttcttgtctgacgtggttcacatactcgataacatccttacctgttaggacgtgct

SEQ ID NO: 93520 - DNA, 476 bp, Zea mays
  unsure (1)..(476): unsure at all n locations
ggtntnatctactcgaaaaagtacgtactacggtccggattcccgggtcgacccactcgtccgcggaggcgtgcgtgctgcggcctgcggcctgcaggaccagagatcggggactgatctagggtctgggactgggaggcggagatgtcgacgccgtcgaggaagcgcctgatgcgggacttcaagctgttgcatcatgacccgtccgccggcatcagcggctcgccgcacgacaacaacatcatgctctggaacgccgtcatattcgggccggatgacacgcctagggacggatgcacgttctagctgactcttctatgtacagaagattacgctaacagaacgtcgactgatcgcattctgacatggacgtcacattcgaacttatattcggttcggaccagacgtttggacaggccacgtatgcagcagagttctatggaccatggcttcagcattatcgcacggtatatttt

SEQ ID NO: 93521 - DNA, 470 bp, Zea mays
aagtcttgagggggggagggaatttcttccggtccggattcccgggtcgacccacgcgtccgggaagagagaatcctaccaaacctagctaccaactcgatcgtcgtcatcacgctcgaccgcacaactgcaccgaggggggaggagacctaaaaactactacatcttttagctacacatctagctaaagatcgagaggggtaaataaggacgagtgggcgctagctagaagagcagctgcaggtactaccatcatcgtcgtcgtcgtcgtcgccaggatgaccgtcgtcgacgccgtcgtctcctccaccgataccggcgcccctgccgccgccgccgtaccggcggggaacgggcagaccgtgtgcgtcaccggcgcggccgggtacatcgcctcgtggttggtgaaactgctgctcgagaaaggatacactgtgaagggcaccgtgaggaacccagatgacccgaag

SEQ ID NO: 93522 - DNA, 522 bp, Zea mays
  unsure (1)..(522): unsure at all n locations
ggtcggtnntgattacgacacgaaaagtatcgctcgtacaggtccggaattcccgggtcgacccacgcgtccgacagcatctaatcaatcaagacagccccgtgctagctcacccgccggggctcgccacgatgagaggcctcctcgcgtgcgccaccctcgcccgccgcgccgccgcctcctccgcgcccgcgcgcgtccgccacctggcgggcgccgcggaggcggcggaggccgagctcaagaggacggcgctctacgacttccacgtcgcccacggcggcaagatggtgccgttcgccggctggagcatgcccatccagtacagggactccatcatggactccaccgtcaactgccgcgccaacggcagcctcttcgacgtcgcccacatgtgcggcctcagcctcaagggccgcggtgccatccccttcctcgagtccctcgtcgtcgccgacgtcgccgggctcaggtactgcaccggcaccctnaccgtctttaccaacgagcatggcggcgcct

SEQ ID NO: 93523 - DNA, 524 bp, Zea mays
  unsure (1)..(524): unsure at all n locations
gatacggtcactgattaccccgaaatanagctatgctacttccgtaccggtccggaattcccgggtcgacccacgcgtccggcgtaaccttctatctgttgccttcaagaatgtgattgcggccccccgtgcctcatggcgcattatctcctccatcgagcagaaagaggagtcccgtaagaatgaggaacatgttgcacagatcaaggaataccgtggcaagattgaggctgaattgagcaacatttgtgatggtatcctaaagctgcttgacacgcaccttgtgccttcctncactgccacagagtcgaaagtgttttacctcaagatgaanggtgattatcacaggtaccttgctgagtttaagactggtgctgagaggaaggaatctgcagagagcacaatggtagcttataaggcagctcangatattgcattggctgaactgccacctattcatcccataaggctgggactngcacttaacttctcagttttctattacgaggatcagaactctccaa

SEQ ID NO: 93524 - DNA, 482 bp, Zea mays
  unsure (1)..(482): unsure at all n locations
tatgnntttgattgtggtggaggcgggaatgtaagtacttggtcccggaattcccgggtcgacccacgcgtccggttttttccttgatgtagaagacatttctgggaggaggacaatgcactctttctacagtgatgttgtgcgccttcagggtctaagggaaaggttttcacattgtaactcaaacatggacgcaggccagtgtttctttccacgtgaagttgtgaagcacattgtcaacccagttttcgttcttaatccagcatatgatgcctggcatgtacaacatgcgttggctccagaagcatctgaccctcaacattcatggctggactgcagattggatattagcaagtgcagccctaaacaacttggaattcttcaaggttcaggaaagaactgcatgacgctataagtgaagctaatcatataaggtgctggggattttatatcaactcgtgctttggtcattgtcagtcgct

SEQ ID NO: 93525 - DNA, 485 bp, Zea mays
  unsure (1)..(485): unsure at all n locations
ggggctgaatatggagcggtatagtaatgttactgctcgtaccggttcggagtttcgacccacgcgttcgctcccacctctagcccgacaggtgaagccgccgccgctgcagtgtccatagccaccggaggagactgagatggggggttttgtcaagacccacaagagcaatgcgtacttgaagcgtttccaggtgaagttcaagagaaggcgcgctggcaagacagactacagggccaggataaggctgattaaccaagacataaacaagtacaatacacccaaatacagatttgttgtgcgatttaccaacaaggacatcacagcacaaatcatctctgctagtatagcangtgatatggttcttgcttctgcttactcgcatgagttgccacgatatgggcttgaagttggtctgaccaactatgcagctgcctactgcactggccttctgttggctcgccgtgtgctcaagacccgtggtt

SEQ ID NO: 93526 - DNA, 523 bp, Zea mays
  unsure (1)..(523): unsure at all n locations
gttaaggtnctgattataagaaaagnagtantgctcgtaccggtccggaattcccgggtcgacccacgcgtccgcttcgacggcgtgcccgtctccccgggctcattcgccatgcattcctcagcctccgcgagaggaggactagggctcctcttgccggcggcggttgtggtgctactgttgggtgcagtggcgccagcggcgggttgctatccgtgcgtgttcaacttcggggactctctggcggacacgggcaactacccgttcgtctatggcaacggctcatccaagctccgtccaccatacggcgagaccttcttccaccgcgccacctggcgcgcctncaacgggcgcctagtggtggacttcatcgcggacacactcggccttccgttcgtgcgaccgtatctgagcggacggatcgcggatgacttcgcgggccgggccaacttcgccgtgtgcggcgccacgtcgctcagcccggacttttttcgtgcaagggggttccacatcatgngaaacc

SEQ ID NO: 93527 - DNA, 525 bp, Zea mays
gttaggcctctgattactaaaagaagtatactggactgctcgtaccggtccggaattcccgggtcgacccacgcgtccgagtttggcgagctgcagtcgaagaggctgcaccgcttcataactttcaagatggacgacaagttcaaggagatagttgtggaccaggtcggggatcgcgctaccagctacgatgacttcacaaacagcctccctgagaatgactgccgatacgcgatctatgatttcgactttgttactgcagaggatgtccagaagagcaggatcttctatatcctatggtccccatccttcgtcaaggtgaagagcaagatgctttacgcaagctcaaaccagaaattcaagagtggcctcaatggcattcaggttgaactccaggccacagatgcgagtgaaatcagcctcgatgagatcaaggatcggtcacgctaggcgcaccgtcatcgcgagtttcatgatcacgcatcatggactcgcctactactgtggatttgtatgccattataa

SEQ ID NO: 93528 - DNA, 518 bp, Zea mays
gtaggccttgatctgcagggagtgatggactgccgtaccggtccggaattcccgggtcgacccacgcgtccgctggcctccatgggttccatgtacatgcacttggtgacaccaccaatggatgcatgtcaactggaccacactacaatcctgcgagcaaggagcatggggcaccagaagatgagaaccgccatgctggtgatcttggaaacgtgtcagctggagcagatggtgttgctaatatcaatgtcaccgacagccagatcccactgactgggccaaactcaatcattggcagagctgttgttgttcacgctgatcctgatgatcttggaaagggtgggcacgagctcagcaagagcactggaaacgccggtggccgtgttgcttgtgggatcattggactccagggctgaaaacgatcgccggacttgggggtgcctgagaggtccgtctcctgccgtacccagcagactagcctgaacattcggagacatcgtgaaatatgagcgtcgctg

SEQ ID NO: 93529 - DNA, 485 bp, Zea mays
  unsure (1)..(485): unsure at all n locations
aggggnnnnaaatttagctgatatcattgcatgtctgtccggttccaattcgacccacgcgtacgaagagcccagatgagcaccctttctttcctgaggatctgcctgagccccggttgccagctatgcagtacccaagggttttgcatcccattgccgattctatcaatatcaacaaagagatttggaaaatgtattttgatgaacttcttccaagattggtgaaaaaaggaagtgatggtaatgctggatccagtgctctttgtgacacgacctgcttgcaggcgctctccaaaaggatccactatgggaagtttgtggcagaagctaagtttcaggagtccccggaagcttacatgccatccataatagctcaagaccgtgatcaactcatgcaccttctcacatatgaaacggtggaacgtgctatcgaacacagggtggaaaccaaagccaagatcttcgggcaagaagtgaacatcggt

SEQ ID NO: 93530 - DNA, 551 bp, Zea mays
  unsure (1)..(551): unsure at all n locations
agttagagggccgtgtgtcnaaaccatcgatgctgcatcgcattagctaccggtccggaattcccgggtcgacccacgcgtccgcccacgcgtccgcctgcagtcatctcctccatcaccaccaaactcaacaacagccagctcgcgaaaataatgaagagccgcagcatggcatcatcggccgcgctcttggtgctagccctcgcgctagtggcggccaccgccccacaggtagcggaggcaaagaagaagagagcggcggagagcggcgaggcggcggaggcgaagaagatccaggacgacttctgctcgacgctgtgcgagggcaagaaggggacggacctggtcgtgtgcaaggagtcctgcgcgctctcccagcagtccaacctggtgctgtacggcaggatccagtgcaagggcaagtgcaccgagcagaagggcatcacggcgccggccatgaaggtctgccaggaggagtgcgacaaggcgtacgtggtgaaggcggccgaggtcaccaaggcctgcagcgtcacctgcgccaagagaagaac

SEQ ID NO: 93531 - DNA, 555 bp, Zea mays
agtataaggctaggggccgtgtagttttgaaccatcgatgctcgtacgcactgcactaccggtccggaattcccgggtcgacccacgcgtccggagggtataaaatttcttctccaaataccaaccaaattcaggggttacctcttgtctctctctctctctctcttttccttttgattaaaagtaagtgaattaggcgagggtttaattatttattttgtcaaaacttatgtgagtcatgaaatgttgcatcaaaaaaaaaaaaaaagggcggccgctctagaggatccaagcttacgtacgcgtgcatgcgacgtcatagctcttctatagtgtcacctaaattcaattcactggccgtcgttttacaacctcgtgactgggaaaaccctggcgttacccaacttaatcgccttgcagcacatccccctttcgccagctggcgtaatagcgaagaggcccgcaccgatcgcccttcccaacagttgcgcagcctgaatggcgaatgggacgcgccctgtagcggcgcattaagcgcggcggatgtggtggttc

SEQ ID NO: 93532 - DNA, 552 bp, Zea mays
  unsure (1)..(552): unsure at all n locations
nggggaggcggtgtgtcnaacaatcgatgctcatcgcctgtactaccggtccggaattcccgggtcgacccacgcgtccgcccacgcgtccgaccacaacctcttctcccctgtttcctctcgtgcgttctccgcaggagcgaggagggctcgcggcagcggcagggtctccggtgtttttgttccagaatctgtagcaaatggctgacggcgaggacatccagccccttgtttgtgacaatggaactggcatggtcaaggctggttttgctggtgacgatgcgccaagggctgttttcccaagcattgttggacgcccacgtcacactggcgtgatggttggcatggggcagaaggatgcgtatgttggcgatgaggctcagtccaagaggggtatcctgactttgaagtacccgatcgaacatggcattgtcaacaactgggatgatatggagaagatctggcaccacaccttctataacgaactccgtgttgcgcctgaagagcaccctgtgctgctgaccgaagccccactcaaccanagggctacag

SEQ ID NO: 93533 - DNA, 562 bp, Zea mays
  unsure (1)..(562): unsure at all n locations
naggagaggaggtncacgtgtngtcattgaaatcgatgctcgtcgcactgcagcgtaccggtccggaattcccgggtcgacccacgcgtccgatcgccgtgtgcgccgacgaccccgagtaccgtcactacaacgacatcagcgagctctgccctcaccgcctacaggagatccgccgcttcttcgaagactacaagaagaacgagaacaaggaggtggccgtcaacgacttcctgcccgccgccgctgcccgcgaagccatccagtactgcatggacctgtacgggcagtacatcatgcagaccctgcggcggtagagcgtgtcctaccagatcccatgcgagctgagctgacgcaagagcacagatcgacagaatccttgtggtctagtctcatgcatggatagccaggtcacatggcttgtcgacgaccatgcatctgttcttcccagcgattctagcctgtatctgcccttatttatagtctcttgggtttggtggaatctgtccacagtgtggcttgatctatgtactactcttctacatttctaccagaacgaatn

SEQ ID NO: 93534 - DNA, 506 bp, Zea mays
  unsure (1)..(506): unsure at all n locations
gggaggtnncgctgtgttttgaaaatcgtaaactcgtnacgcctgcacgtaccggtccggaattcccgggtcgacccacgcgtccgcacaaatctggagtttgaacacacgacaggtgatatgcttatcttttgtggatggactgttcgcttggcttttgctgattgaattggagctgcacttgtagtttggtaacgtttatatacataactatgcggattgcgttagctagaatatgtcttccagtacctgggtgacaatgggctctaaattttagagtgttgtagatttgttttgttgcaaatgtggcatggcatggcttggcttgcagcttcgagtactggtcgttcgagatccttgtgctgtttgcagggctgatgcccgactctcatctcagcacttccatcattgcaatgtgccaaaacaccgaaaccatatcatacatgatcacctatggcttcgccgctgtcatcagcacaagggtgtccaacgagcttggaaccccg

SEQ ID NO: 93535 - DNA, 552 bp, Zea mays
  unsure (1)..(552): unsure at all n locations
aggtgaggcggtgcgttcaaagtctcgatgatcgtcgcctgcgctaccggtccggaattcccgggtcgacccacgcgtccgaccgcctgggccggcgcgcgctgttcctgcagggcggcacgcagatgttcgtctcccagatcgtggtgggcacgctgatcgcgctccagttcggcaccgccggcgtgggcgagatgtcccgctccaacgcctggctgctggtgctcttcatctgcctctacgtcgccgggttcgcctggtcgtgggggccgctgggctggctcgtcccctcggaggtgttcgcgctggaggtccggtcggcggggcagagcatcgccgtgtgcgtcaacatgctgctcaccttcatcatcggccaggccttcctcagcatgctgtgctcgctcaagttcgggctcttctacttcttcgccgggtggatgttcatcatgaccaccttcatcgccctcttcctgccggagaccaagggggtgcccatcgaggagatgaacctcgtctggagccgncactggttctggggcaagtacgtcaacn

SEQ ID NO: 93536 - DNA, 549 bp, Zea mays
  unsure (1)..(549): unsure at all n locations
aggttagggcgtgntgttcnaatccatcgaatctcatcgcatgcacgtaccggtccggaattcccgggtcgacccacgcgtacgcggacgcgtgggcggacgcgtggggaaggccggcatcgtgcccatctcctaccgcagggtggcgtgcgcgaagcagggcggcatccggtacaccatcaccgggaacaagtacttcaacatggtgacgatcaccaatgtgggtggcgccggcgacatcgcggcggtgtcggtgaaggggagcaagcgtgtcaagtggacggagatgaagcgcaactgggggcaagtgtggcagaccggggaggacctcacctgcgagtcgctgacgttccgggtgatgaccagcgaccaccggaaggccacctcatggcacgttctccccgctgactggaagttcggtgtcacgtaccaggcatccaagaacttctaagtagccacttttcctcctcttcttcaacctgcatatgcccacaagcaaccatgcagatgataacatgcatcatgcatgcatattcattctttcgctca

SEQ ID NO: 93537 - DNA, 550 bp, Zea mays
  unsure (1)..(550): unsure at all n locations
ggttaggcgtggtgtccgaccctcgatgctcgatcgccttagctaccgctccggaattcccgggtcgacccacgcgtccgcccacgcgtccgcggacgcgtgggcactcgcgaactccatttcgatcccatttgaaatcaacccatcctcgtttcctccgtctagcagcctctcaccctcatggccaagatcaagatcgggatcaatgggttcggcaggatcggaaggctggtggccagggtggccctgcagagcgacgacgtcgagctcgtcgccgtgaacgaccccttcatcagcaccgattacatgacctacatgttcaagtatgacactgtgcacggacagtggaagcaccatgaggtcaaggtgaaggactccaagacccttctctttggtgagaaggaggttgctgtgtttggctgcaggaaccctgaggagatcccatggggttccgttggcgctgaatatgttgntgagtctactggtgttttcactgaccaagagaaggcttgagctcacttgaaaggttgtgccaagaaggttgtcattt

SEQ ID NO: 93538 - DNA, 550 bp, Zea mays
  unsure (1)..(550): unsure at all n locations
agattaggcggtgcgtgaagcactganctcgatagctgtcgcctgcaggtaccggtccggaattcccgggtcgacccacgcgtccggctgacgacaccaccgtgtggtcgacaaaataaaaaggagagagagatggccctgttgggtcgccctatggccgccgcaccattcttcgtcgtcgtccttctcgtactcgtggcggcagaaaggacgatgggcagggtggtggtggaagagacgctctggctgtcgcaaagccatgccttcaaaggcgtgtgcctcagcaacaccaactgtgacaacgtatgcaagacggagaagttcacaggcggtgagtgcaagatggacggcgtcatgcgcaagtgctactgcaagaaggtctgctagggcatgaccggcaacaagccctaaccgtacggctggttgatccggttgcacactgcacagctcggttgggcacgcggtcatgttccgggcttttcggctgtaattaattcttccttggtatgataaatagactcttttagtcacgtgcgttttaatctgggtt

SEQ ID NO: 93539 - DNA, 548 bp, Zea mays
  unsure (1)..(548): unsure at all n locations
aggtagggcgtgtgtcnaaatctcagtactcatcgcactgcactaccggtccggaattcccgggtcgacccacgcgtccgcccacgcgtccgctgtttttgatgcggccatgagatacaaatctgagggccatgctactataatcctcgctggtgctgagtatggaagcggcagttctcgtgattgggctgctaagggtccgatgctcctgggagttaaagctgtaattgccaagagctttgagcgtatccacagaagcaacttggtggggatgggaatcattcctctgtgcttcaaagctggtgaggatgctgattcgcttggcctcactggacatgagcggtacagcatcgatctccctaccaacctcagtgagatccgtcccggccaggatgtgactgttactaccgacaatgggaaatctttcacttgcatcgttcgctttgacactgaggtggagctggcgtacttcaaccatggaggcatcctcccttatgtcatccgcaacttggcagctgcgcataactgaggcaaggtcaacacaccgn

SEQ ID NO: 93540 - DNA, 556 bp, Zea mays
  unsure (1)..(556): unsure at all n locations
aggttgagggagtcgccgtgtagtnattganaatcgaatgccggtacgcctgcagcgtaccggtccggaattcccgggtcgacccacgcgtccgcccacgcgtccgtacgttcgccgcgtaacgcgcgaacgtgccatctgacggtgcgtttgtctcccccctggcttgcagggtggggcacgaacgaggcgctcatcatctccatcctcggccaccgcgacgccgcgcagcgccgcgccatccgccgcgcttacgccgaggcctacggcgaggagctcctccgctccatcacggacgagatctccggcgacttcgagagggccgtgatcctgtggacgctggacccagcggagcgcgacgcggtgctggccaacgaggcggcgcggaagtggaagcccgggaaccgtgtgctcgtcgagatcgcctggacgcgcaactgcgggcagatcttcgcgaccaggcaggcttatcacgagcggttcaagcgctcgcttgaagaagacatcggtgcgcatgtcactggggacttncggaagctaatggtgccacttgtan

SEQ ID NO: 93541 - DNA, 521 bp, Zea mays
  unsure (1)..(521): unsure at all n locations
tgttttgagtanagggtgcgtgtagtttagattctgtatgcagtnacgcctgcaggtaccggtccggaattcccgggtcgacccacgcgtccgcaaagagtggaaaacaagcaaaatgttaaatatactagactttgaattcccttcgattcatccggcgcggtgggctatggacctgcagcagcaagctaattaagtttatatatattgcatgagagagcatgcaccgctaaccatatatactactgagacttctgaattctagtatatgtaatccttttgtttgggtttaggaggcaattctaatcatgtatgccgaattccaaagagtggaaaacaagcaaaatgttaaataaaaaaaaaaaaaaaaaaattaaaaataaataatatataaattaaataataaatattaaaaataataatttatttaatttatttattttatatttatttatttttatatttttttatatattattttattttttatatttttttttttattaagagggctgcccttn

SEQ ID NO: 93542 - DNA, 504 bp, Zea mays
  unsure (1)..(504): unsure at all n locations
ggttgaggagggcctgtgtatgagactgangctgngcgactgccgtaccggtccggaattcccgggtcgacccacgcgtccgcggacgcgtgggcggacgcgtggggtacagcaatgtcccgcacacgaagctggtggaggtgaagggtcaccagaactgggtgaaggtgagcgggcagtacctgacattccccggcggcggcacgcagttcatccatggtgcgctgcactacatcgacttcctgcagcagtccgtccgcgccatctcgtgggggaagcacacgcgggtggtgctcgacgttggctgcggcgtggccagcttcggcggctacctgttcgagcgcgacgtggcgaccatgtcgttcgcgcccaaggacgagcacgaggcgcangtgcagatggcgctcgagcgcgggatcccggncatctcggccgtcatgggctccaagcgcctgcctttcccgagcaagtcgttcgacctgttcactgggcgcgctgccgctt

SEQ ID NO: 93543 - DNA, 539 bp, Zea mays
  unsure (1)..(539): unsure at all n locations
aggtaggcgtgtgtcnncccatgaactgctcgcatgcgcgaccggtccggaattcccgggtcgacccacgcgtccgatccatcgcagctggattgacgaagtctgtgacgccgaacgatctccctacttcctccttgtcagggttgagatcaacgccgatgatcttggatgcgccacacattttcgcgccttggaccaccgcagctggacaagcgttccgtcgtagaggtgatcgttgagatgaccggcggcggcgtggactacagcttcgagtgcatcggcgtgccgtcggtgatgaccgacgccttcagatgcaccaagatggggaagggcaagacgatcgtgctggggctggggagggacagcgacgaggtgtgcctgccgtcgctggagctgctgttcgggaggtgcgtcatggggtcgctcttcggcgggctgaagcccaagacccacattcncgtcctcgccaagaaatgcatggacaaggagctgcagctggacgcgctggtcacgcatgagctgggactgcangacatcan

SEQ ID NO: 93544 - DNA, 547 bp, Zea mays
  unsure (1)..(547): unsure at all n locations
aggtnagccaggtgctgtgtgtttgaaaatcgatgctgtcgcctgcaggtaccggtccggaattcccgggtcgacccacgcgtccggaccaacgttgcatctagcctcacgtctcgagaagttaagaggggttgtcctccacagcggcatactctctggcatacgggttctgtatccagtgaaagtgacgctttggttcgacatcttcaagaacatcgacaaaataaagcaggtggactgccctgtgttagtcatacatggcacagccgacgacatcgtggacttggctcacggcaagcggctgtgggagctagccaaggacaagtatgagccgctgtggatcaaaggcggtgggcactgcaacctgcagacgtacccggagtacatcaggcacacgcgcaagttcataagcgccatggagaagctggccaaggacagcagcaaggcggcccaggcgccgccgccgtcgagcatggccgccgaagaaagacacaccaagtgcttgagattcgggaagagatgagatgccggcgacctggacctgcga

SEQ ID NO: 93545 - DNA, 552 bp, Zea mays
  unsure (1)..(552): unsure at all n locations
agttttagggccgtgtgtcngctgattgatatcggtcgcactgcagcgtaccggtccggaattcccgggtcgacccacgcgtccgcccacgcgtccgcccacgcgtccgcccacgcgtccggttccgttgcgcccgctaacgatcacgcgtttccggtgggagagagagtaggtagggagaggacgggacaggatgctcgggttcaggcagatgtcgtggtcgtcggcggaggcgcaggcgccgtcggagcagctgtgcgaaggggtggcggccgtcgtggcggcgcgccaggggatggagacgccgctgacggcggtggccgaggcgttcgaggagctggtgcgcgggatggacgccgacggcggcgagctccgcgtcgcgcccttcagcgacacctgtgccctcgtctccgtgctcttcagcagcctcgggatggccttcaggttcgccgagatggagtacgtcaccaaagtgaacgatctcatcggtgccggcaagtcgtaccgtacgctgagcgacatnctcgacaaggacatccagaacgactgctn

SEQ ID NO: 93546 - DNA, 556 bp, Zea mays
  unsure (1)..(556): unsure at all n locations
atggtaagtataggtgcttcgtngtcattgaaatcgatagctgtacgcctgcaggtaccggtccggaattcccgggtcgacccacgcgtccgaggtaattgcaaatagggcatctgagatccttggacacaagcgcggtgagaagtttgtgcacccaaatgaccatgtgaataggtcacaatcttcaaatgatacatttcccactgtaatgcatatagcgacggccgttgagatacattcgaggtttatcccaagtttgcaacagttgcatgattcacttcattcgaaaactattgagtttaaagacataattaaaattggacgtacacatacccaagatgccaccccattgactcttggccaagaattcagtggctacactacacaggtcaaatatggaattgaccgcattaattgtacattacctcggatgtaccagcttgcttaaggtggaactgcagttggaactggcttgaacacctataaaggattttatgccaaaatagcttgtgcagtggctgaagaatctaacctaccctttgtgacagcataaaag

SEQ ID NO: 93547 - DNA, 548 bp, Zea mays
  unsure (1)..(548): unsure at all n locations
ggttagcagttccgtgtcgtattganatcgatgccgtacgcctgcaggtaccggtccggaattcccgggtcgacccacgcgtccgcgcgcgacagggtccagtcgagggccggggaatcgccggagaatggaggtgggcagggctccgcgacgacggctgtgcccagcggcggcggctgtgccttcgctgcttctgttcgccgttctattcgcgggccgggcggcggcggcgttcggccacctgcaaggcgccggcgccggcgcgacggcgctgtacaagcacgcgtcgttcttcgaccgcgacggcgacggcgtcgtctccttctcggagacgtacggcgcgtttcgggcactcgggtttggattcggcctgtccagcgtcagcgctgcgctcatcaacggcgctcttggtagcaagtgcagacctcaaaatgcaacgtcatcgaagttggatatctacatagaggacatccagaaagggaaacatggaagcgattcagggtcatacgacgccgaaggaaggtttgttcctgacaagttcgaagaga

SEQ ID NO: 93548 - DNA, 507 bp, Zea mays
  unsure (1)..(507): unsure at all n locations
ggttgaggnaggtgcgtgtgtttgacgctgaagctgtacgcctgcagtaccggtccggaattcccgggtcgacccacgcgtccgcaaataaaggcacatctcttgcctcctctttcgcgctgtccggagaggaggggcaggaggaggccgcaccaaatctatctggggatcggagcgcgggcgacaagatgccacgcggcggcaagcccgcggcttcgtcgaagccgaacccgttcgactcggactcggactcggagtccagcaataagccggcgaacaagtccggggcgtcgtcgtaccaggcccccgccgacgccaagaagcggtacaaggacgggttccgggactcgggcgggctggagaaccagtcggtgcaagagctggagcactacgcggcgtacaaggccgaagagaccacggacgcgctcggcggctggctgcgcatcgccgaggacatcaagcaagacgccagcgacacgctgattaagctttgaaaggcaggggagg

SEQ ID NO: 93549 - DNA, 500 bp, Zea mays
gggaggggcctgtgtttgagcatgaaactgtacgactgccgtaccggtccggaattcccgggtcgacccacgcgtccgcccacgcgtccggcggcggcactgggaagcagacaatcctcatacccaagggtgacttccttgtcggacaactcaacttcacaggcccttgcaagggcgacgtgaccatccaggtggatggcaatctgctggcgaccacggacctaagccagtacaaggaccatggtaattggatcgagattctacgtgtggataacctggtcatcaccggcaagggaaaccttgacgggcagggcccagccgtgtggagcaagaactcctgcaccaagaagtacgactgcaagatccttcccaactcgctggtgatggacttcgtgaacaacggggaggtgtccggggtcacgctgctcaactccaagttcttccacatgaacatgtaccggtgcaaggacatgcttatcaaggaccttaaccgtaacggc

SEQ ID NO: 93550 - DNA, 551 bp, Zea mays
  unsure (1)..(551): unsure at all n locations
ggtatagtnagtnccgtgncgtattgaaatcgatgcctgtcgcctgcaggtaccggtccggaattcccgggtcgacccacgcgtccgaacgtgctgatcgacaaagtgacggtcaaggcccccggcgacagccccaacacggacggcatccacatcggcgactccagcaacgtgaccatcagcagcaccaccatcggcgtcggcgacgactgcatctccatcggccccgggagcaagatgatccgcatccatggcgtcaagtgcggcccaggccacggcatcagcgtcggcagcctggggcgctacaaggacgagaaggacgtggaagacgtgcaggtgacggggtgcacgatcgccggcaccacgaacggcctgcgcatcaagtcgtacgaggactccaagtcgtcgctcaaggccagcaagttcctgtacgagggcatcaccatggacaatgtctcctaccccatcatcatcgaccagaagtactgccccaacaacatctgcgtcaagtccggcgcctncaaggtggccgtcaacgacgtcgtcttcan

SEQ ID NO: 93551 - DNA, 555 bp, Zea mays
  unsure (1)..(555): unsure at all n locations
agtttgaggccgtngcctagnagtcattgaaaatcgatgccggtacgcctgcacgtaccggtccggaattcccgggtcgacccacgcgtccgcccacgcgtccggcaacggcaagaagaccgggtacgcggtgcggaggcaggccacggacgacgacctcgctgtgatggagacgctgcgggcggtctccatgggcgccggcgtgctccccgggagggccgccccttcgtcggcgcccgaggcggctgcggctgcggcagcggacgacgaggtgccctacatgcgcggctgcttcgaccacttcgtcgggtcccgggactcggagtcgctgtacatgatcgcgccgcagggcggcggcacgggcccggagctggccgtcttcttcgtcaggctctgacctccgatccgatccgccccgcgccttgcctctagctatctcctcgcccccatgcatgcgaagacggcccaaccgcccaagggcatccattaaccgccacgacgccacgtacataaacatcgtcagcattcattggatggtgcaacctanagattgac

SEQ ID NO: 93552 - DNA, 553 bp, Zea mays
  unsure (1)..(553): unsure at all n locations
agttttaggcagtgggtcngcggctgatgtcgatagacggtcccctgaggtaccggtccggaattcccgggtcgacccacgcgtccgcccacgcgtccgattacaaaaaacttcagcagtgatgccctcattggcgagggctcgtatgccagagtctattttggtgtgctgaaagatgggacgaaatctgcagtgaagaagcttgactccagcaaacagcctgatcaagaattccttgtgcaggtttcagctgtctcaaggttgaaacatgagaatgttgtccaactcgtcggatactgcgccgaagggagcacccgcgttcttgcttatgagtatgcaactaggggatcattgcatgatatcctccatggtaaaaagggtgtcaaaggagcccagccagggccagtcctgtcatggatgcagcgagctaggattgccgtatgtgctgctcgaggtctcgagtttctccacgagaaggccgatcctcgagtggtccaccgagacatcaagtcaagcaacatactgctctttgaccatgatgttgcgaagatcg

SEQ ID NO: 93553 - DNA, 551 bp, Zea mays
  unsure (1)..(551): unsure at all n locations
agttaaggcctgtgtcnncccatgaaatgatcgctgtcgcatgcacgtccggtccggaattcccgggtcgacccacgcgtccgcccacgcgtccgctcggcgcgaccagcgacggcaagacggactgcacaaaggcagtccaggacgcgtggacgtcagcgtgcgaagcgaccggaagcgccacggtggtgatccccaagggcgactacctggtcggccctctcaacttcactgggccatgcaaggggagcaacatcgccatccagctggatggcaacctgctgggatcaaacgacctggacaagtacacggcgagctggatcgaattgtctcacgttaacaacatcgggatcaccggctcgggcacgctggacggccaggggaccgncgtttatagcaggagcaagaccgacaacgtgaaggcgatgcccaacacactggttgctgttcacgtgatcaacggcactgtcgccggaatcaaactacttaacttcaagttcttccacatcaacatcgacaactcagagagcatcaccgtgaaggacgttgac

SEQ ID NO: 93554 - DNA, 553 bp, Zea mays
  unsure (1)..(553): unsure at all n locations
agtttaggtgcgggccttggagtcatgatcatgatcgccggtagctaccgctccggaattcccgggtcgacccacgcgtccgaaaatggcaaaggctctcctaggtggcctatcggcgatcctcgtcgtggcggtggtcgtcggtgtggtcgccaccgtcacccgctccggcaagaaggccggcgacaacttcacggtcccgggggaggcttcccttgccacgtccggcaagtcggtcaagtccctgtgcgcgcccaccctatacaaggagtcgtgcgagaagacactgtcccaggccaccaatggcaccgagaaccccaaggaggtgttccacagcgtggccaaggtggcgctggagtcggtccagacggcggtcgagcagtccaagtcgatcggcgaggccaaggccagcgactccatgaccgagagcgcgcgcgaggactgcaagaagctcctggaggacgccgncgacgacctgaggggcatgctcgagatggccggcggcgacatcaaggtgctgttcagccggtccgacgacctcgagacctggctc

SEQ ID NO: 93555 - DNA, 553 bp, Zea mays
  unsure (1)..(553): unsure at all n locations
aggtagaggcaggngcgtcgantcattgaagatcgattgctgtcgcctgcagcgtaccggtccggaattcccgggtcgacccacgcgtccgtctagtgctcttcataccatcagaactatgcaggctatgcttttgtctactttgaggatgaacgtgatggcaatgatgccatacgggctcttgatggttatccatttggccctggcagacgcaggctttcagtagagtggtcacggggtgatcaagctggtagacgtgatggcaacaaaccagaagcaaatactaagccaacaaggacactgtttgtcattaactttgatccaatgaacacaagagtcagtgacatcgaaaggcacttcacaccatttgggaacatatcaagtgttcggataaggaagaactttgcttttgttcagtttgaaactatggaagaagccagaaaggctcttgaagctactcatgctaccacccttttggacagggtgatttctgttgagtacgccttcagggatgatagtgaagtgagtgataggtacggcagcccaagaagag

SEQ ID NO: 93556 - DNA, 511 bp, Zea mays
  unsure (1)..(511): unsure at all n locations
ggattgagggnaggggcgtgtatattgaggctgaaacgtncgcactgccgtaccggtccggaattcccgggtcgacccacgcgtccgcccacgcgtccgaaagcaaaaattttcttcagtgctgcagttgaagcctgggatgcagaattttatgtcaaagttgaagataacattaatcttgacttagctgggttaattgagatgctcgaaggccgtcgaggtagccaaggattgtacatgggttgtatgaaatcagggatggtcataagtgaagagggccaacaatggtatgaacctgagtggtggaaatttggagattcaaaaacgtattttcgacacgcttctggttctttgtttatcctctcaaaaaatttggctcgctacatcaacataaatagtgcgtcactgcagagttatgcacacgatgatatatcagtaggttcatggatgatgggactgaatgcaacttacgtggatgatgaccggttgtgctgcagcagttccagacaag

SEQ ID NO: 93557 - DNA, 522 bp, Zea mays
  unsure (1)..(522): unsure at all n locations
gggtaagggcctgtgttcnaaccatgaactgcatancactgcacgtaccggtccggaattcccgggtcgacccacgcgtccgctccgacggccgcctcgtcgtcgatttcatcgcgcaggagttgggcctcccgctgccgccgccgtccaaggccaagaacgccagcttcgcgcagggcgccaacttcgccatcaccggcgccaccgcgctcgacaccgacttcttccggaagcgagggctcggcagcaccgtgtggaactccggctccctccgcacgcaaatccagtggctgcgagacctcaagccatcgctctgcagctccgcgcaaggcacacgatgcaaggagttcttcgccgagtgcctgttcgtcgtaggcgaattcggtgggaacgactacaacgccccgctgttcgccggcaaggacctcanggaggcatacaagctgacgttccacgtgatccgagccatcttcgatggagtcgaacaactgatcccccagggggcaaaagattttattctgc

SEQ ID NO: 93558 - DNA, 506 bp, Zea mays
agtaaggactgtgtcacccatgactcctgccttgccgtaccggtccggaattcccgggtcgacccacgcgtccgttcttgtttgggggtttgccatcagactctagtgcagcagaaactacagttgctcttgcgaagactgtttcatcttgtgtgcatcacatggaacttggtgctcttagtgcctgccttgctgctgttgtttgttcgtctgaacagccacctctgcgccctcttggtagctctgctggtgatggggcttctcttgttattaaatcagtactggaccgagcaactgagttactgactgatcgccatgctgcagccagctacactgtgccaaaccgtgctctctggcaggcatcatttgatgctttctttgggcttctaacaaaatactgtgtcagtaagtttgaaagtatccaacagatgtttgtcacacagacaccgagctcaggaatcggacctgaggcttccaaagctactagtaaagagatgccctgtgaa

SEQ ID NO: 93559 - DNA, 517 bp, Zea mays
  unsure (1)..(517): unsure at all n locations
agaaaggagggcgtgtgtgctgcgacgnangctccggcactgccgtaccggtccggaattcccgggtcgacccacgcgtccgcaaggaccttcggcgcccgttcaggatccacatcttcccgagcgagttcttggttgagctcttcctcttcggaccacctccaaggctcttggtgtagcttgccactctcaccaatcaagttttcatgtctgatctcgacattcagatcccaactgccttcgatcccttcgctgaggccaatgctggggactctggcgcggaaccggggccaaggctctccgcacatgtgcgcttccaacagtgtagtgttctaaagaccgtcaccacggcccaggtataaaacaaggttttcatctacagtgaagacccaaaagatcctaaaaagatcttctgcaaaagtgcaacggtccacgagccccaacattttccgggggtttaaacttcccgtgggtcattcgaaagaaacactctaaaatattcctctcgaccggcctg

SEQ ID NO: 93560 - DNA, 498 bp, Zea mays
  unsure (1)..(498): unsure at all n locations
gaggagtcgtgtaaaaaattttgaatacgatacanttggcaagcacgtaccggtccggaattcccgggtcgacccacgcgttcgcccacgcgtccgcggacgcgtgggcagaggattgctgcctaatggcatagagattgctgtaaaacaatgaaactggaaaccggcaatggaaagcgtgagttccaggctgaggttgagattatcagccgagtacatcacaaacatcttgtgtctttggttggctattgcatttctggaggcaagaggttgcttgtctatgagttcgtccccaacaacacattggaattccacttacatgggaacgatcgaccaacaatggagtggcccactagattaaagatcgctctgggtgctgccaagggtttagcttatcttcatgaagactgccatccaaagatcatccaccgcgacattaacgcatctaacattcttcttgacttcaaatttgaagctatggttgctgactctggactt

SEQ ID NO: 93561 - DNA, 515 bp, Zea mays
  unsure (1)..(515): unsure at all n locations
aggataggggctgtcttcnattgctgaattgatgcgcatgccgtaccggtccggaattcccgggtcgacccacgcgtccgtcacaacaagatggcatgtatagacaatgcaatgagagccttgttccttctagcgctcttctgcaccgtgcatggtgagaaggcaaagtcaaaggacaacgattcaaaagcgtccgggcccggtgggtccttcgacatcaccaagttgggcgcctctggcaatggcaagacggatagcacgaaggctgtgcaggaggcgtgggcatcggcgtgcggcggcaccgggaagcagacgatcctcatccccaagggcgacttcctcgtcggaccactcaacttcacaggcccatgcaagggcgacgtgaccatccaggtgaatggcaatctgctggcgaccacggacctaagccagtacaaggatcatggtaattggatcgagattctacgcgtggacaaccttgtcatcaccggcaaggggaaaacttgacaggcaag

SEQ ID NO: 93562 - DNA, 514 bp, Zea mays
  unsure (1)..(514): unsure at all n locations
gtaaggaggngcctgtgtgctgagacggatactgtacgcactgccgtaccggtccggaattcccgggtcgacccacgcgtccggcggcggtgttccagaactgcctcatcatcacgcggcggcccatggacaaccagcagaactcggtgacggcgcacgggcgcaccgaccccaacatgaagtccgggctcgtcatccagaactgccgcctggtgcccgaccagaagctgttcccggaccgcttcaagatcccctcgtacctgggccgcccctggaaggagttctcgcgcctcgtcatcatggagagcaccatcgccgacttcgtcaagccagaggggtacatgccctggaacggcgacttcgccctcaagacgctctactacgccgagtacaacaaccgcgggcccggcgccggcaccagcaagagggtcaactggcccggcttccacgtcatcggacggaaggaggccgagccgttcaccgncgggccgttcatcgacggcgccatgtggcn

SEQ ID NO: 93563 - DNA, 520 bp, Zea mays
  unsure (1)..(520): unsure at all n locations
gtnnnaaaggnaggtnnctcgtngtattgagtactatgctctngcgcactgccgtaccggtccggaattcccgggtcgacccacgcgtccgcggacgcgtgggcggacgcgtgggccggtgtactgcagtaatgtaaaggtccacaatgtgacgattaagacctcattggacgctccactgactgatggcatagttccagattcatgttcaaacttatgcattgaggacagcaccataagtgtcagccatgaagccatctccctgaaaagcgggtgggacaggtatggcatttccttcgggaggcctacctccgacattcgcatcagcagagtggacctgctatcatcttccggagccgctcttgcattcgggagtgagatgtctggtggtatctcagacattcatgttaaccacctccggatccacgactcctccaaaggtatttctttcaagacctcacccggccgtgggggttacatcgaggacgtggtcatctcggaggtacagatggaaaatgtg

SEQ ID NO: 93564 - DNA, 501 bp, Zea mays
aggtgagagtgtgtgcattgctgtattgcatctcgtacgcctgccgtaccggtccggaattcccgggtcgacccacgcgtccgcggacgcgtgggcagaaaccggcgtcggcgatagtgtcaaagctggagcagatcgctggagacagagcgcttcatggtgaagaaacaggacggtctggtgaagctgcaggggtccaagcaagggaggaaggggctgctcgcgatcgacgccgagatcttcgaggtgactccggcctttcacgtcatctaggtgaagaagtcggcaggcgacacgctggagtatgagatgttctgcagcatgggcctaagaccttcactcagcgacatctgctggagcatccgatctgaggagaacatggctccttcagtggttcagccatcacaattggagccattctattagaccgtctacgacagttgactcacccctcttagtcgattgatattcaagtgcagtctcttcggagatgcaattacg

SEQ ID NO: 93565 - DNA, 504 bp, Zea mays
gggagtatcgtcgtgtaacttgtacgcatgctcgtacgcctgccgtaccggtccggaattcccgggtcgacccacgcgtccgagcaagcaagcaagcagcgagtacatacatactaggcagccaggcagccatggcgcccaccgtgatgatggcctcgtcggccaccgccgtcgctccgttccaggggctcaagtccaccgccagcctccccgtcgcccgccgctcctccagaagcctcggcaacgtcagcaacggcggaaggatccggtgcatgcaggtgtggccggcctacggcaacaagaagttcgagacgctgtcgtacctgccgccgctgtcgacggacgacctgctgaagcaggtggactacctgctgcgcaacggctggataccctgcctcgagttcagcaaggtcggcttcgtgtaccgcgagaactccacctccccgtgctactacgacggccgctactggaccatgtggaagctgcccatgttcggcttcaacc

SEQ ID NO: 93566 - DNA, 519 bp, Zea mays
  unsure (1)..(519): unsure at all n locations
ngattttgggcgctgagtcggacccatcgaactcgtcgcctgccgtaccggtccggaattcccgggtcgacccacgcgtccgcggacgcgtgggcggacgcgtgggcggacgcgtgggcctggagggtgcaagggagggaggcggtcgaatccgtcatccactgagcaccgccagccccgcacgcggaggtcggagggctacgctccggagtccgaggggaaggcagaggaggcaagcaggccggatgggtgccgctggtgacgccgcggcagcgggcacgcggtgcgagctctgcgggggcgcggcggccgtgcactgcgccgcggactcggcgttcctctgcccgcgctgcgacgccaaggtgcacggcgccaacttcctggcgtccaggcacgtgaggcgccgnctgccgcgcggnggcgccgactccggggtgtccgcgtccgcgtccagcggctcctgcctgtccacggccgactncgtgcaatcgagggcngngccgncgncagggagagggg

SEQ ID NO: 93567 - DNA, 517 bp, Zea mays
  unsure (1)..(517): unsure at all n locations
agtnttaggttagtacctcgtgtttgacatcgangctgtnacgcctgcaggtaccggtccggaattcccgggtcgacccacgcgtccgatcgatcagctagctagctgctgccaagagctagccaggggacagagcagcagcttgaagttggtcaccaatgctaaggatgggccgcgccagcgccacagcaggtgtgttgcgcttcgtcagggcgttcgccctctgcgtggctacggcatgcctcctcctggcggccggcatgccctcgcctgtggcggcgcaggacccgtcgaagctgagcctgcagtactactccaagacgtgccccaacgtggagcacgtcgtccggacggagatggagtgcgcggtgcgcgccgacacgcgcaacgccgngctcatgctccggctccatttccatgactgcttcgtgcaggtgatcagtcggtccgtcctatatatatcagctaatgcagcaacagcagctagctgatggcattcgcctattttgcagggctn

SEQ ID NO: 93568 - DNA, 511 bp, Zea mays
  unsure (1)..(511): unsure at all n locations
aggattaggagcatctntttgatgagatcgagctctgcgcactgccgtaccggtccggaattcccgggtcgacccacgcgtccgctctgtccctctacggtgcttctgctcgccggcccaaaatcgcctcatcgaccacgcccccttccaggctcccgtctccatgggtctcctctcaaacaggattgggagggagagcctcaaggcgggggatcatatctactcctggagggcggcgtgggtctacgcgcatcacggaatatatgtgggcgatgataaggtgatccatttcacangaggaagaggacaggaggtcggaacaggaactgtcgtcgatattattcttgtgagttccaccccaaaacgaagcaacacgccttgcccggtgtgcaccgacgaaaccagggacagcagcacagaaacaaacggcggggtctcctgctgcctcagctggttactagctgggggtgctttctaccgtnaggagtacgcagtcaacgggtcttttttc

SEQ ID NO: 93569 - DNA, 518 bp, Zea mays
  unsure (1)..(518): unsure at all n locations
tggagggcgtgtcgtgggtcactgaatcgnatgctgtacgcctgcaggtaccggtccggaattcccgggtcgacccacgcgtccgagcagaactctctcgacctcatcggcgttggcggagcgcgtgttgaccggagatggcgccgagcgggtggaggaggagcgcggcggcgcgggtcgcctggcgcccggacacggtttgcctgtggctcgcgctcggcgacgccgtactgacgctcgcccaggctaagaaggacctgacggaggttaccctccaggtctacttcgacatcgagatcgacggtaagcccgcaggccggattgtcatggtgctttatgagaagactgttcctaatactgtagagaacttccgagctctttgcgcaggagagaacggggttgccaagagtggcaaagcccttcactacatgggaagtcagttccacagaatcatcctcagcttcatgctccaaggaggtgacttcactctcggggacgggaggtgtggtgaatctatn

SEQ ID NO: 93570 - DNA, 514 bp, Zea mays
  unsure (1)..(514): unsure at all n locations
cgtaattagggctgtattggatgactgaactcaatgcattgccgtaccggtccggaattcccgggtcgacccacgcgtccgcgcggagaaatcgttcgggcgtgacatagtcgacgcccactacaaggcctgcctgtacgcaggcatcaacatcagtggcatcaacggggaggtcatgccggggcagtgggagttccaggtcggaccgtccgtcggcatctcttcgggcgatcaggtgtgggttgctcgctacattcttgagaggatcaccgagatcgccggcgtggtggtgacgttcgacccgaagccgatcccgggcgactggaacggcgcgggcgcccacaccaactacagcaccgagtccatgaggaaggagggcgggtacgaggtgatcaaggcggccatcgagaagctgaagctgcggcacaaggagcacatcgcggcctacggcgagggcaacgagcgccggctcaccggcaggcacgagaccgncgacattaacaactttaggtgg

SEQ ID NO: 93571 - DNA, 515 bp, Zea mays
  unsure (1)..(515): unsure at all n locations
agttttagtagggctgtgtatgagatggagctctgcgcactgccgtaccggtccggaattcccgggtcgacccacgcgtccgcggacgcgtgggcgagggggtggtggagagcaagcccgccttcgtcgtcgtcgcctcgtccgcggcgacgcagtccagggcgcgccaggaagcaccggacccggcgccggcggcccgaccagaaccaatccaggggcgtccgcggccgcccgtggggcaggtgggccgccaggatccgggacccggtcaagggcgtccgcgtttggttgggaactttcccttcggccgaggccgcgcggcgcgcttacaaccacgcgggcgcgccatatcgcggggcccaagggccaagtctaaatttcctcttcttctgcgtctgcgccgccggcgcccgcgacagccgaaagcgcgcgcgcgccgtcgacgcagacgccgttatagacctcgaggaacaagagcagcgcccggccgcggtggccttgaagcacgaggcccn

SEQ ID NO: 93572 - DNA, 489 bp, Zea mays
gggtgcctagtactgtacgactctctagcacgtcttaccggtccggaattcccggctcgacccacgcgtccggttcttccacatgaacatgtaccggtgcaaggacatgctgatcaaggacgtgaccgtgacggcgcccggggacaggcccaacacggatggcatccacatgggcgactcatccgggatcaccatcaccaacaccgtcattggcgtcggcgacgactgcatctccatcggccccgggacctccaaggtgaacatcaccggcgtgacctgcggccctggccacggcatcagcatcggaagcctagggcggtacaaggacgagaaggacgtcacggacatcaacgtcaaggattgcactcttaagaagacgatgttcggcgtccgcatcaaggcgtacgaggacgccgcctccgtgctcaccgtctccaagatccactacgagaatatcaagatggaggactcagccaaccccatcttcat

SEQ ID NO: 93573 - DNA, 503 bp, Zea mays
  unsure (1)..(503): unsure at all n locations
aggagttactcgtagttattggtctgcaaactgtacgcctgccgtaccggtccggaattcccgggtcgacccacgcgtccgtatcaccctcgaggtggagtcgtctgacaccattgacaacgttaaggccaagatccaggacaaggagggcatccccccagaccagcagcggctcatcttcgctggcaaacagcttgaggacgggcgcacgcttgctgactacaacatccagaaggagagcaccctccaccttgtgctccgcctcaggggaggcatgcagatctttgtgaaaaccctgaccggcaagactatcaccctcgaggtggagtcctctgacaccattgacaacgtcaaggccaagatccaggacaaggagggcatccctccagaccagcagcggctcatctttgctgggaagcagcttgaggacgggcgcacgcttgccgactacaacatccagaaggagagcaccctncacttggtgctgcgcctcaggggaggcn

SEQ ID NO: 93574 - DNA, 514 bp, Zea mays
  unsure (1)..(514): unsure at all n locations
agcatagggcgctgtgtcnatcgctgtactcggtgcgcctgccgtaccggtccggaattcccgggtcgacccacgcgtccgcccacgcgtccgcccacgcgtccgcccacgcgtccgcccctcgatccccctcaatccatatggcggnggggggggggcgatgcttgcggttgcgctcgtcgccattttgatctccagcattgtggtcgccgcctcattacttggatctccgacgcgcgcggtggtcgggtgggcgatgcttgcttgccattgtgctcgtcgtcgcttggatctccggcatggtggtcgccgcctcatcgtcgggtgagcaggtgtcctaccgtggcgactggatccgcgtccagcccgtgcccggtgccttcgtcgtcaacttcggccacatcttgtgactcacatttctcatgtttttgaatatgtatacaaatataaatgttgcagttaccctttcactgacatggttgatagacagatttacctcatatagtattttctg

SEQ ID NO: 93575 - DNA, 512 bp, Zea mays
  unsure (1)..(512): unsure at all n locations
gttattgagtgctgtgttcagtgctgcactgctngcattgacgtaccggtccggaattcccgggtcgacccacgcgtccgcccacgcgtccgcggacgcgtgcgctcacacgatcgaaaataggttcacttccgtgaagatggcccatccacagaagagatagccgaggttgtcaagtcaagtgtgctccctgacatgttcaagagcacatatgagtcaatcaccaatggaaatcctacgtggaatgagctgccagtctcaacaagcactctctacccctgggatccatcatctacatacatgcatgagccaccttacttcaaggatatcaaaatgagtactgctggcccgcggtctgtgaaggatgcatattgcctttcgaattttggtgacagcatcacaaccgatcacatctcacctgccggaaacattcacccagacagcccatctgcaaaatatctgaaggagcgtggcgttgaaaggaaggacttcaactcatatggtagccgaaa

SEQ ID NO: 93576 - DNA, 513 bp, Zea mays
  unsure (1)..(513): unsure at all n locations
agtaagggctgtngtcnaacgctggatttcgtagcgactgccgtaccggtccggaattcccgggtcgacccacgcgtccggcggagcgcgccgaggtggctcggtcgcgcaacctcgccgcctacgtcagcgaccccgtggccgccacgaaccggttcaacgcggacgtgctgagggccacgacgcggcgggcgctggcgaggtacgatggcccgtgcatggcgaccaaccccatcgaccggtgctggcgctgacgcgccgactgggcgacggaccggaagcggctggcgcagtgcgcgcgcgggttcggccacaggagcgtcagcggcgcggccggcaagctgtacgtggtgagggacccgagcgacgactagatgatcatcccgcggaagggcacgctgcggcacgcggtgatccaggaccggccgctgtggatcgtgatcgcgcagatcacgctgcagaacgtgcagaacgtgatcctgcacaatctgcgcatgcacgggttcaaggcgc

SEQ ID NO: 93577 - DNA, 511 bp, Zea mays
  unsure (1)..(511): unsure at all n locations
gttaggagtcgctgngtgctgaatcgatgctgtggcactgccgtaccggtccggaattcccgggtcgacccacgcgtccggtcgtgtaccacctcttgctgctcgtccactgtcacggactcgtcctcgtcgcccccgtcaccggcggcggccaatgccgcgcccgcgccacggaaggcggaggccgagactggcggggacgaggacggttgtgctggtaaggcggcgccggcgaagaagcgggagcggagcagcgaggggaagcacccgacgtaccgcggcgtgcggatgcgggcgtggggcaagtgggtgtcagagatccgcgagccgcgcaagaagtcgcgcatatggctcggcacgttcccgaccgccgagatggccgcgcgcgcccacgacgccgccgcgctcgccatcaagggccgcgccacgcgaagtgcccgccacaagagcggcagctgttcgacttgccggacctgctcctcgacgtccgggacgggttcgggcgcttccc

SEQ ID NO: 93578 - DNA, 510 bp, Zea mays
agggggagaggaggtgactcgtagtacatcgatacgcatactcgtacgcctgccgtaccggtccggaattcccgggtcgacccacgcgtccgcacgctcaaggaggagctcatcatccgcggcgacaagaccattgacggccgcggcgtgcaggtgcgcatcaccaatggcgcgcagctcacgttgcagttcgtcaacaacgtcatcatccacaacatccacatcaacgacatcgtctcctccaacaaggacggcggctacgtccgcgactcgccggaccacttcggctggcgcaccgtctccgacggcgacggcatcaccgtcttcggctccaccaacgtgtggctggaccacctctccctctccaactgccaggacggcctcatcgacgtcatcgccaagtccactggcgtcaccatctccaactgccacctcaccaaccacaacgacgtcatgctcttcagctccagcgacaagcatcccgaggaccagatcatgcagatcaccgtc

SEQ ID NO: 93579 - DNA, 515 bp, Zea mays
  unsure (1)..(515): unsure at all n locations
aggggagggcgtcgtgtgnaccgctcggagtctctngcgaatgccgtaccggtccggaattcccgggtcgacccacgcgtccgcgatcacaataagatggcgtgtatagacaatgcaatgagagccttgttccttttagcgctcttctgtgtcgtgcatggtgagaaggcaaagtcaaaggacaacgatgcaaaagcgtccgggcccggtgggtccttcgacatcaccaagttgggcgcctccggcaatggcaagacggatagcacgaaggctgtgcaggaggcgtgggcatcagcgtgcggcggcaccgggaagcagacgatcctcatccccaagggcgacttcctcgtcggaccactcaacttcacaggcccatgcaagggcgacgtgaccatccaggtgaatggcaatctgctggcgaccacggacctaagccagtacaaggatcatggtaattggatcgagattctacgcgtggacaaccttgtcatcaccgcaagggaaagctcgacggc

SEQ ID NO: 93580 - DNA, 518 bp, Zea mays
  unsure (1)..(518): unsure at all n locations
agtttataggagtttcttgtgtgatcgaacgaaagctgngcgcactgccgtaccggtccggaattcccgggtcgacccacgcgtccgaaactttgcgccatttgatgcgtatgacccgaacatgggattcaacaatgtcaatgattcctaaaggtggtgatacaatttggggaaatctggattggtctccagaagatggcattgaatgtaaagctaagaagcacaaagccaacgatactggggtttctaaggatagcaatgggggaaatatcgaggttcaacctgaacctattaactatggaaggctggtatcttttggtaaagatgtagcagaagcaccttcttcagagattgagcagatagaatttcgtgatgctgttaaaggtaataatatcgcccattcaaatacgtcatgccgggagatctggacagagtatcacgaattatgatggggtggaataaaggcagtcgcagactacatagtttacactgctagttctgttgtagaccttcttctg

SEQ ID NO: 93581 - DNA, 512 bp, Zea mays
  unsure (1)..(512): unsure at all n locations
agttaggcgctgtgtgtgcgctgcatcgnagctgtacgcctgcggtaccgtccggattcccgggtcgacccacgcgtccgggaggagaaccacttgtccaccgggacctgaagcccgccaacatcctcctggaccacaacttcgtcagcaggatcagcgacgtcggcttcgcaaggctgttcccacagtccgtggccgtcgtcacccattacaggttgacttatccggccgtccctttgtgctactttcactcggagtaccatcagactggcatgctcaccaccatgtcttacgtgtacttcctcggcatcatgcggctatcagattatctcgcgtgggtcgccaatgggcctaacgcatcacgtgtagatggcattatagagaggtgccttctgatgagatccttgacctggtagacaccttttgacctgcgcaagaatcttttgacttggattagagttactcggcgttgcacagttttttcgttgtttttacagtccttttcttggggt

SEQ ID NO: 93582 - DNA, 504 bp, Zea mays
aggagttaccttaagtaaatagtacgcatactctcacgcctgccgtaccggtccggaattcccgggtcgacccacgcgtccgcacccgcgcgcgcggcggccggcggcgagccctcacccatccgagcaagccgaggaggaagcgagcgcgcgaaagtatcaggaggaggcatgggtaccctggggcgcgcgatcttcacggtgggcaagtggatccggggcacggggcaggccatggaccgcctcggatccaccatccagggcggcctccgcgtcgaggaacaggtttcaaggcatcgtacaatcatgaatatttttgagaaagagccaaggatccatagagatgtgtttgttgctcccagtgcagcagtcattggggatgttgagattggtcatggatcgtcaatctggtacggatccatattgagaggtgatgtcaacagcattcatattggatctggtactaatatacaagacaattcccttgtacatgtttcaaaagct

SEQ ID NO: 93583 - DNA, 514 bp, Zea mays
  unsure (1)..(514): unsure at all n locations
agttaggcgtntctcgatcatgagatgcanctctngcgactgccgtaccggtccggaattcccgggtcgacccacgcgtccgcccacgcgtccggatattttcaaactggctattaatgtatctttcagatgaggaggtccaaaagcttgtggggaaaatggttaaatggttaaaggtcggaggccatattttctttagagaatcatgttttcaccaatctggagattccaaaaggaaggtgaacccaacacactatcgagaaccaaggttttataccaaggtatttaaagagggccattcatttgatcaagatggaggttcgtttgaactttctctagtgacctgtaaatgcattggggcttatgtcaaaaacaagaagaatcaaaaccagatatgctggttatgggaaaaggtaaaatcaacagaagacagagattttcaaagattcctggacaacgtgcaatacaaaacaagtgggatattacgttatgagcgtgtctttggtgaaggttt

SEQ ID NO: 93584 - DNA, 513 bp, Zea mays
  unsure (1)..(513): unsure at all n locations
tgtctagtagtgcgtgtgtgctgaatcgatgctgtgcgcactgccgtaccggtccggaattcccgggtcgacccacgcgtccgtccaccgcgacgtcaagaccaccaacatcctcgtcgacggggactgggtcgccaaggtctccgacttcggcctctccaagtccggcccgacgacggtgaaccagacacacgtgagcaccatggtcaagggcagcttcgggtacctcgacccggagtacttccggcggcagcagctcacggacaagtccgacgtgtactccttcggcgtcgttctcttcgaggtgctcctggcgcggccagctctcgacccggcgctgccacgggagcaggtcagcctcgccgactacgcgctcagctgccagcggaacggcaccctgctggacgtcctcgacccaacgatcaaggaccagatcgcgccggagtgtttcaagaaggtcgcggacacggncgagaagtgcctcgccgagcagagcatcgaccggccgnccan

SEQ ID NO: 93585 - DNA, 502 bp, Zea mays
  unsure (1)..(502): unsure at all n locations
ggagggggtacttaagtcctgtttcatactgtacgcctgccgtaccggtccggaattcccgggtcgacccacgcgtccggaaacgttggcgtgttggttgggtggcgtcggcatggacgaggcaacgaagaagaatgtggaggctacggtgctggagatcctccggggctccgatatggagtccgtgacggagtacaaggtccgcgccgctgccagcgaccgcctcggcatcgacctctccatacccgaccgcaagctcttcgtccgcggcgtcgttgaggaatacctactttcactctcctccaaggaggaggcgaaggcggaggaggagggcgtcactggcagggagagcaagggcaaggaacacgaagaggaggacgaagaggatgacgatgaggaggaggatgaaggtaagggtggcgggaagagagagtacgatgaccaaggtgaccttatcctgttgccgctttcgagcaagangagggtgactntatcggaattt

SEQ ID NO: 93586 - DNA, 513 bp, Zea mays
  unsure (1)..(513): unsure at all n locations
agttagggctgtataggaccatgagatgatagcntngcgcatgccgtaccggtccggaattcccgggtcgacccacgcgtccggtctgatcggatatggtgccagtgctgtgtgtccttatctggcactagaaacatgccggcaatggaggctgagcaacaaaactcttaatttgatgcggaatgggaagatgcccacagtgaccatcgagcaggcacaaaggaactttatcaaagcagtaaaatcaggtctgctcaaaattctttcaaaaatgggtatctcactgctctcaagctattgtggagctcagatctttgaaatttatggtcttggtcaagaagttgttgatcttgccttctgtggaagtgtatcgaaaattggaggtctcacacttgatgagctgggtagggagaccttatcattctgggtgaaggcgttctctgaagatactgcaaagaggctagaaaactttggatttatccaatccagacctggaggtgaataccatgcana

SEQ ID NO: 93587 - DNA, 533 bp, Zea mays
  unsure (1)..(533): unsure at all n locations
agtacaaggtgactgatnnncccggggctcngnacgncagntncgatctccgttctgaattccggaggcaagccacacatcctcccactcgtgcgcccacgcgtcttcccacacgtgcgcggggcggcaatgacctgctgggacctttaggtggtcaccgcgctcgacacctccaatacgcaatggtaccacttcaccgccatcgtggtcgccagcatcgggttcttcaccgacgcctacgacctcttctgcatctccctcgtgactaatctcctctgccgcatctactacaccgtggaggggtccgccacgcccggcacccttccgccgtacgtgtccgcgtacgtcaactgcgtggccttcgttggcacgctgtcaaggcagctcttcttccgctggctgggcaacaagctcgggcgcaagatagtctatggcattacgctcatgctcatggtccttttctacattcacgtccgtgctcttgtatccggcacacctccgttcttccctcatatgcaaaacttttctctttt

SEQ ID NO: 93588 - DNA, 522 bp, Zea mays
  unsure (1)..(522): unsure at all n locations
nagggaactgtntnngtagaaggggatgtattgcatagctctaccggtccggaattcccgggtcgacccacgcgtccgcccacgcgtccgcccacgcgtccgcccacgcgtccgcggggcggcaatggccgccggggaccttgaggtgctcaccgcgctcgacaccgcgaagacgcaatggtaccacttcaccgccatcgtggtcgccggcatggggttcttcaccgacgcctacgacctcttctgcatctccctcgtgactaagctcctcggccgcatctactacaccgtggaggggtccgcgacgcccggcaccctcccgccgcacgtgtccgcgtccgtcaacggcgtggccttcgtgggcacgctgtcagggcagctcttcttcggctggctgggcgacaagctcgggcgcaagaaggtctatggcatgacgctcatgctcatggtcctctgctccgtcgcgtcggggctctcgttcggccacaccccggcgtccgtcatggcgaagctttgcttttc

SEQ ID NO: 93589 - DNA, 516 bp, Zea mays
  unsure (1)..(516): unsure at all n locations
aggttaaagtntgtaatagatgggatgtactgtacacttctccggnttnnnnnnnnggnggggagccacgcgtccggaaatgttaacgcattaaaaggtatacggtatcagtaaaccttacaagtgtgatgccaagggaaaacggcatcagctgacacattgctatattcctgtttatttcgtccgaataaagtatataacttaagaaaggggctcttgccccacagcagctcaagcaaaaatgtacaaagaaaagcagctcgagtagagagaatttgccactctctcgacagattgagctgctgccatggcgctaattcacgacacatttgatgtctcggcaagacggggaggagctcagtaagtgagatgataaaaaaatagaatcaggttggagggtaagtatacacgggtagaaaaattgcctccttggccttaattntgggtcttctccaccttggccttgatcttctgctcgatgattgccttctctgtgtcgaggcttgacattcngtt

SEQ ID NO: 93590 - DNA, 498 bp, Zea mays
  unsure (1)..(498): unsure at all n locations
agaatgtgctgagcccccagctttcgcacgncgcgccgtactcggtccggaattcccgggtcgacccacgcgtccgcccacgcgtccgcccacgcgtccgcggacgcgtgggcaaaggccttcctcccggggtagttgctttggctcttctgctccacgccataagatatctagcaattggtcactcgccttaattagttcgctttgcttttgaggttgattcgaccattttgctgtagcgtgaattgcatgcatggacatgcaacgctccaatggcctttggaatgtggaatttttttccccattttctgtatttttcctataaaaaatgaactgggtcttaaaaaaaaaaaaaaaaggcggcccgtctaaaagatccaagcttacctacgccttcatgcaacgtcattgctcttttatggggccactaaatttaattcaacggcccaccggttaccaacgtcggaactggaaaacccttgcctttccccaccttaa

SEQ ID NO: 93591 - DNA, 506 bp, Zea mays
  unsure (1)..(506): unsure at all n locations
naaggtnntntccactgaacggaaagtatggtatcctgctccggaatcggaattcccggctcgacccacgcgtcacgcgtacgcgtggcacaatatcatcatcactacatcacccgcttttctcaaaagggacaggcataacaaaacaaaccctgaagataatagatacttcattaaaaggaatcactggatgaaaaagttcgcatatggagcattcaaaaccgtgaaattgttgattggaaagatttgcatgaaatggtcactgctgcttgctataccccagatggacagagtgcactaattggttcccataaaggcagctgccatatttatgatacatctgataataagcttctccaaaagaaacaaattgacctgcaaattaagaaaaagaagtccagtcagaagaaaataactggatttcaggtccttgaatagtttcttccagggagtacttaagggtccctattacatctgcagattccaaaataaggtttgttaatgcc

SEQ ID NO: 93592 - DNA, 521 bp, Zea mays
  unsure (1)..(521): unsure at all n locations
gggtaatgtngtgaatgggggaaaagggtttgctactccggnccggnncngaattcccgggtcgacccacgcgtccgcccacgcgtccggtggggataagttcccactctttgctggcatcatagcacttgtgatgagcatcgcaacgatggtccgtctgacccgcagcatgatgcctgggaaggttctcggtgctgccataggtggagctaccctctcagaaggtaaatcaaaagtacaagagcgccagcggtccaagctatcagaagaggctgtggaggaagctgaagacgccgtctctgcaaagcgcctctcggagcttgaggagaaggtcattgcactcctgacaaaacccgcatcaatgcctgctgataaggaggaggttctgcaggctgctgtctcccgcgttagtgcactggaagaggagcttgcagctacaaagaagaccttgcaggagactcttgagcgtcagttggagatcgttgcatacattgagaagaagaaaaaaagcgcgccgtttt

SEQ ID NO: 93593 - DNA, 514 bp, Zea mays
  unsure (1)..(514): unsure at all n locations
ngtnaaaaggctactatgggatgaggggaagagaaaagttgtaccggtccggaattcccgggtcgacccacgcgtccgccctccctccctcacacaaataataaggaaaggtcccgcccttttcctccgacatccgcaaggggggaggggaaaacacgtacattcacccggcggcaataatggcctcggttccggctccggcgacgacgaccgccgccgtcatcctatgcctatgcgtcgtcctctcctgtgccgcggctgacgacccgaacctccccgactacgtcatccagggccgcgtgtactgcgacacctgccgngccgggttcgtgaccaacgtcaccgagtacatcgcgggcgccaaggtgagggctgagtgcaagcacttcggcaccggcaagctcgagcgcgccatcgacggggtcaccgacgcgaccggcacctacacgatcgagctcaaggacagncacgaggaggacatctggcaggtggtgcttgtggccaaaccgnncaa

SEQ ID NO: 93594 - DNA, 479 bp, Zea mays
cgccgcaagccttcgtactcggtccggaattcccgggtcgacccacgcgtccgggagcaagcttgcaatgaagctctaatcctcctgctgtgcgacatgcctgccctgcaggaggagcaagcttgcagtgaagcatataagacttcaaacacacgataccaggcatgcatgccatacagtacatgggaatgaaaaccacacaacgctcgactactgataattgcatgacacagtcacttacgattgctataatcaatactgacagcatgacctacatggttccaatgcaggcattcgccttattaatcatccactacacactcaccctacctaatagaaacaacctggacagcctaatcaaatacaagaacacacgctacagagaatctgtggatactcacgccttgcataaactctttcagcgagttctaaaatatccagaataactcagcaggatcgagaattaaagattgatgacg

SEQ ID NO: 93595 - DNA, 476 bp, Zea mays
  unsure (1)..(476): unsure at all n locations
cgggggagctcttcgtccggatcggagtttccggcgtcagagcgtcccgtcacgcgtccggtcacgcgtacgctcaaatggcagctgatcaacaggtctatgcactggtggttcctggcttttggatggatggtggtcagcccagagactacattactggattgcgtctgtatctagactcgcttacgaagaaatcggctgccaggctagctgctggagcacatgttgctggcaacgtgctggtgcatgagagcgccaagattggagaaggttgcctgatcggtcctgatgtctcaattggacctcgatgtgtcgtgcaagatggcatgaggctatcccgctgcactgtcatgcgtcgagtgcgtatcaagaagcatgcctgcatctcgaacagcattatcgaggggcactcaactgttggacaatgggcacggatagagaatatgaccatnctgggcgaggatgttcatgtgtgt

SEQ ID NO: 93596 - DNA, 517 bp, Zea mays
ggtaagtcgtgtatgttggaaaatggaaatgatgtctcggtccggaattcccgggtcgacccacgcgtccgcctcgatcttaattacaggtcatagctaagcaggtctgacaggatgtcgtggcagacgtacgtcgatgagcacctgatgtgcgagatcgagggccaccacctgacctccgctgccatagtcggccacgacggcgccgtttgggcccagagcaccgcattcccacagttcaagacagaggagatgaccaacatcatgaaggacttcgacgagcccgggttccttgccccgaccggcctcttcctcggccccaccaagtacatggtcattcaaggcgaacccggcgctggcattcgcgggaagaagggatcctggaggcttaactgtgaagaagacagggcaggcgatggtggtcggcatctacgacgagcccatgacccccggccagtgcaacatggtggtcgagaggctcggagactaccttgtaaagaaagccctgtgaatgatt

SEQ ID NO: 93597 - DNA, 518 bp, Zea mays
  unsure (1)..(518): unsure at all n locations
gtaaatgggtgaggccccagcttgngangnatctgacgtaccgtccggaattcccgggtcgacccacgcgtccggagaccgccaagtgcaagaagatcgtctgcgatccttcgtatttgccagacaaggtggagaatgttggaagggtggcccgcgcgatatgcatcatgaagcatcctatcccggacaccaaggactcgcactccgtgcagatcatcctccccaagatgcagctaaagcgcaaatccgacatgtacgtgttctgctgctactactcccacaacgtcgcgcccaaaggcaagttcatcgtcttcgtctccaccgaggccgagaccgacaagcctgagatcgagctcaagcccgggatcgaccagctagtctcctggagtggagaccttgttcgacatctacgacagatatgaacccgtcaacaaccatgactacgactgctgtttactcacatattgctatgacctcaccactcatttacttactactgttaaggtttttattgtttt

SEQ ID NO: 93598 - DNA, 491 bp, Zea mays
  unsure (1)..(491): unsure at all n locations
gaagaaatgtttgtaccggtccggaattcccgggtcgacccacgcgtccggattattacaagcataaagctatagaacacattttgattttgtcaggagatcaactcgatcgtatggattacatggagcttgtgcagaaacatgtcgatgacaatgcagacataactttatcatgcgctcctgttggagagagtcgagcatctgactatggattagttaagttcgatagttcaggccgtgtaattcagttctctgagaaaccaaagggtgctgccttggaagaaatgaaagtggataccagctttctcaatttcgccattgattccccagctgaatatccctatattgcttcaatgggagtttacgtttttaagagagatgttttgttagaccttctaaagtcacggtatgctgaactgcatgactntggttctgaaattctgcccaaggctttgcatgagcacaatgtacagggcatatgtttcactgac

SEQ ID NO: 93599 - DNA, 518 bp, Zea mays
  unsure (1)..(518): unsure at all n locations
catgcngtgtcatcgtggaagaagagagtgcatgctaccggtccggaattcccgggtcgacccacgcgtccgcggacgcgtgggtttcaagagtgggaaatcaatagaagccgataattctttggactatgcggcaaatttctcacacatgcttggttttgacgaccaaaaaatgctggagctgatgcggctctatgtaacaattcacactgatcatgaaggcgggaatgtcagtgctcatactggtcatctggttgggagtgctctgtcagatccttatctttctttcgcagcggctctaaatgggctagctgggccactgcatggccttgcaaatcaggaagtgcttttatggatcaaatctgtaattgaggaaactgggagtggtgttaccacagatcaactcaaagactatgtctggaagacactaaagagtggaaaggttgttcctgggtttggtcatggagttctgcgtaagaccgacccacggtattcatgtcaaaaggagtttgccctta

SEQ ID NO: 93600 - DNA, 500 bp, Zea mays
  unsure (1)..(500): unsure at all n locations
agttcgtgcgtggcccccgccccntggagtgcacgcgtactcggtctcggattcccgggtcgacctacgcgtccgcagttacatggcgtgtatagacaatgcaatgagagccttgttccttttagcgggcttgtgtgtcgtgcatggtgagaaggcaaagtcaaaggacaacgatgcaaaagcgtccgggcccggtgggtccttcgacatcaccaagttgggcgccttcggcaatggcaagactgatagcacgaaggctgtgcaagaggcgtgggcatcaacgtgcggcggcaccgggaagcagacgatcctcattcccaagggcgacttcctcgtcggaccactcaacttcacaggcccatgcaagggcgacgtgaccattcaagtgaatggcaatctgctggcgaccactgacctaatccaagtcaaagatcatggtaattggatcgagattctaaccctggacaaacttggcattaactggcaaggaaagctttacc

SEQ ID NO: 93601 - DNA, 498 bp, Zea mays
  unsure (1)..(498): unsure at all n locations
agatgtgctgggccattgcaaatagtangtacgctctaccggtctcggaattcccgggtcgacccacgcgtccggagcttcgcacgctatcgctcacaactgtgggcagatgcagtctttgaaccataggctggtgtgatgatgttacagataagggagtgaccagcttagcgtcaggatgccctgatctcagagccgtagacttgtgcggttgtgttcttataacagatgagagtgtggttgctcttgccaacggatgtccgcacctgcgctcgctgggcctctacttctgccagaacatcacggaccgcgccatgtactccctcgcaaacagccgcgtgaagagcaagcgttggaagtgggatgcaatggaagaacggcctgcgaaccttaacaataggcagtgcaacgtccttacgccccccgcggttcaagccctttgccaattcttcccggcgcttgacaactggcccgaaaagcaattccttatcattagtg

SEQ ID NO: 93602 - DNA, 513 bp, Zea mays
  unsure (1)..(513): unsure at all n locations
gaaaggttagatgagggaagggaacatgatgctcggcccggaattcccgggtcgacgcgcgccacgcggcgacatttcgaataacacagttgagcgcgacgatgggatccctcgctaataacatcatggtcgtgggtgtcgtccttgcagcgctcgtcgccggcgggtcatgcgggcccccgaaggtgccgcccggtcccaacatcaccaccaactacaacggcaagtggctcaccgccagggccacctggtacggtcagcccaacggtgccggcgctcctgacaacggcggtgcgtgcgggatcaagaacgtgaacctgccaccctacagcggcatgacggcgtgtggcaacgtccccatttcaaaggccggcaagggttccggttcatgctattangtgagatgcaaggaaaaacctgagtgctcgggcaatccagtcacggtgtacatcactgacatgaactacgagcctatcggtccctacacttcgactgaacggccagggccttcgc

SEQ ID NO: 93603 - DNA, 520 bp, Zea mays
  unsure (1)..(520): unsure at all n locations
ggataatgtgctatccatccgatanacatagtatcgctctaccggtccggaattcccgggtcgacccacgcgtccggaagaaggtcgggcgttacaagcaaatcaagcgaacagaaggtgtctcgagcactgacgatagttgggaggatattgctaacattcaggcagaaagatgctggcactgatttaagtgttgtcattgctgagaagtctggagagaaatcaaatgatgaagtgaaaagtcagctatctcatttccttccaacttctcgccggatcatgcagttttcaaatgggcaggctccttcgccaggtgctcgtgttgtctatgtagatggcacatttgatcttttccacgctggccatgttgagttcctcaggagtgccagacaacttggtgactttcttcttgtcggtatctatgacgacgagtctatcagggatagaagaggctgccgtcctataatgcatctccatgagcgtactcttagtgttcttgcctggccgtatgtcgaataat

SEQ ID NO: 93604 - DNA, 520 bp, Zea mays
  unsure (1)..(520): unsure at all n locations
tgaaatggtnngtttgaggggttggaggagggtgtatgaggtaccggtccggaattcccgggtcgacccacgcgtccggttgccaaagaattccctcccctagccgccgccgccgctcgtctccctgagaggtgccgggaccgaggatttggccgagttctaggtagagaatcggttttacttgtctcagcccggggtctgctgcgtctggtggtggtgaaggggagaaattcgtgagatctgttccggatcaggcgtgcgagctcgggaatcaggggtttcacacatagcttcgtcgatttgaatttgatgtactaatggagtctaagggtggcaaaaagtctagcagtagtcgttctatgatgtatgaagctccccttggctacagcattgaggacgttcgacctgccggaggcgtgaagaagttccagtctgctgcttactccaactgcgcgaagaagccatcctgatatcccttttggcttcctcattctagtagtttaggatttcttttctgaca

SEQ ID NO: 93605 - DNA, 500 bp, Zea mays
agagcgtggctgacatgcggtgaggaggtatgctactactcgtccggaacggaattcccgggtcgacccacgcgtccgcccacgcgtccgtatggctagttcgtggatggcggcgccacgacctctcctgttgtcgctgctggtcgccatgctagcggtggccgccgatgtcgccaacgccggccacgccaagcccctgacgcctggcgggcgcgtggtacacgacaaccacggcaagttcacggccgggccgtggaaaccagcccacgcgaccttctacggcgggcgggacgggtccggcaccacggcgggcgcgtgcgggtacaaggacacgcgcgcgcaggggtacggcgtgcaaacggtggccgtgagcacggtgttgtttggcgacggcgcggcctgcggcgggtgctaccaagtgcagtgcctggacagccccaacgggtgcaagcccgacgcggttgcccttgtggtgaccgcgaccgaactgtggccaacca

SEQ ID NO: 93606 - DNA, 517 bp, Zea mays
  unsure (1)..(517): unsure at all n locations
gantagcgtcctgaccacagaatgattgtatgctcgtaccggtccggaattcccgggtcgacccacgcgtccgaattcatagaagcctgggggtgcacatatctaaggtaagatctgctaccctggatacatggctgccagagcaagttgcatttatccaatcaatgggaaacgaaaaagcaaatagccattgggaagcagagctgcctcctaactatgatagggttgggatagagaatttcatccgtgcaaaatatgaggacaagagatgggtaccgaggaatggaacattgcgaccttcctccggtgttcgagatgagaagagccaagagtctccagctagtgctaataggagtggacatcatagatcttcatttgagcaaaaccgtgcttcaccagctcttccgagcaaagttgcacatgtagcttcaaggataccctctcaggcatcacctcagcccccaaggtagaaccaccaagttctaaggtggttcaaccttctaagcacaaaaatttc

SEQ ID NO: 93607 - DNA, 519 bp, Zea mays
agtaatggttgtatgagtggggagaggaaagatgttgtctcggtccggaattcccgggtcgacccacgcgtccgattactatcttcatgtgacgacagctggggatgatcttatgtctgatagctaccacttgagttctgcacctggaaataatgtgttcgtggggtctggagctgcattgaaccctgggaccatattgagccctgtcccagcatgcaaagaggatttctcacggaagaagcttacttcgttcgacaaacttatagaaagaacatgtagttctataaggaatgtaaggcttcattgtgacgctgatctaaagccaagtggaggtgttggaacttctggaatggcaccagatgcagctgagatacagcttaaaagccccaactggttgtttggtcaaaggaagcatacggagacaatttcaaccgcaagagttgccccggttgaaaacgtgaacgaggggaacagagacgagtcaaatgtgtctctttgtggggaactaatttggctatc

SEQ ID NO: 93608 - DNA, 514 bp, Zea mays
atagtggctgtatgcggggagagaatgagatgctctaccggtccggaattcccgggtcgacccacgcgtccgcccacgcgtccgatacgtacgtgaagaaccaacaggagggccgggctctcgctcgccgcgcgcacccccctctctctatctctcccgccgccgttgatctatcaccgggccgccggtccgtgactgtcgccagcggctgctggttgttgcttggttgcgtcgccgcgggagccgtgtgacccgggcgcaatgccgggagccgtgatcgtgcaccaccacacgaggtacaagacgtaccccggcgaggtcaccggcatcgccatcttctcgtgcttcatcgcctccgtcgccggctgcatcttcggctatgacatcggcctcacatccgggctgacgtcgacggagccgttcctggtcaagttcttcccctccatctacgaggagatgaagaggcaggtggtcgtcaaccagtacttgcaagtcgacagccaggtcctgacgc

SEQ ID NO: 93609 - DNA, 523 bp, Zea mays
  unsure (1)..(523): unsure at all n locations
aagagatgtcctgcgttggtgggaagggagaagagtaatgaggtaccggtccggaattcccgggtcgacccacgcgtccggctccacaggatcctctgcgccaccgcaaccgtgtgaccgcccgtgccgccggcgatcccgatccgccgacccgtcccagccccgctcgcagccatgtcgccgtcggagccgacgcgggaggagagcgtgtacatggccaagcttgcggagcaggcggagcggtacgaggagatggtcgagttcatggagcgcgtcgcgcgctacgccgnggcgccggcggcggggaggagctctcggtggaggagcgcaacctgctgtccgtcgcctacaagaacgtcatcggcgcccgcagggcctcgtggcggatcatctnctccatcgagcagaaggaagaaggccccggtaactaggcgcacgccggattcattcgggcctaccgntccaagatcgatgcctagctcggccggatctgcgacggattcttggggctcctggattgcaa

SEQ ID NO: 93610 - DNA, 496 bp, Zea mays
  unsure (1)..(496): unsure at all n locations
tgaagcnntgcgaatgaggtggaagtatggatcgctctaccggtccggaattcccgggtcgacccacgcgtccgggagttctacagcctctgcgaggaaatggacctgcaggcgctaccgctaccactagaggacggctggaccgtggacgcgtccaatttcgaggtcccctgctcttccccgaacccagcgccgcccccggtggacagggctaccgctaacgtcgccgccgacgcctcaagggcacccgtctacggctctcgcgcgaccagtttcatggcttggacgaggtcctcgcggcagtcgtcgtgctccgacgaagcggcgccggcagtagtgccggccatcgaggagccgcagagattgctgaagaaagtggtggccggcggcggcggtgcttgggagagctgtggcggcgcgacgggagcagcacaggaaatgagtgccaccaagaaccacgtcatgtcggagcgaaagcgacgagagaagctcaact

SEQ ID NO: 93611 - DNA, 524 bp, Zea mays
aggggaaatgggtcgctttgtggggagagggatgtgattgttgtaccggtccggaattcccgggtcgacccacgcgtccgcccacgcgtccgcccacgcgtccgctcctcctcagaaacccaccaaccccgtccagccgccggctgtctcggccgtcgccgccgccgccgccgccctatcccggtccttcaggtgaaccaggttggccatggccttcaacaagatcaaggtcgccaaccccatcgtcgagatggacggcgatgagatgaccagggtgttctggaaatctatcaaggacaagcttatattccctttcgtagacctcgacatcaaatattttgacctcgggcttccacaccgtgatgctaccgacgacaaagtcacagtggaggctgcggaggccacactcaagtacaatgtggctatcaagtgtgccaccattacaccagatgaagcaagggtaaaggagtttggcttgaaggctatgtggaagagcccaaatggcacaattagggaatatccta

SEQ ID NO: 93612 - DNA, 521 bp, Zea mays
  unsure (1)..(521): unsure at all n locations
tgaatgtnngtgaatggtgggaggtggaagttaatgtggtaccggtccggaattcccgggtcgacccacgcgtccgcccacgcgtccgcaagcaactgcaaagcagcaagctctactcttcttctgtactgaacgtgtgactagataacaacaagcgtgaaccatggcggacgagtacggccgcagcggctacggcaggtccggcgccggcgacgactacgacagcggctacaacagcaagtccggcactgatgactacggccgtggcgaaggtggctacaacaagtcgggcggcgatgacgactacggccgcagcggcggcgatgggtacggcaggtccggcggcgacgactacggccgtggcaccggcggcggtggctacaacaagtccggcggcggagacgactacggccgcagcggcggcgacgactacggccgtggcaccggcggcggcgggtacaacaagtccggagacgacggctacgacaggcggtacaacagattcggcaccaacaacgacg

SEQ ID NO: 93613 - DNA, 499 bp, Zea mays
  unsure (1)..(499): unsure at all n locations
ttggtgctgaccctcgcttagagctacgcatgacggtaccggtccggaattcccgggtcgacccacgcgtccgcccacgcgtccgcccacgcgtccgcccacgcgtccgggcggtggccgtggtgaccatggctctgtcagcctcctggtccgcaacattccattgagatgcaggcctgaggaactacgtgtccctttcgaacggttcggccctgttcgggatgtttacctgccaagagattatcacactggggagccaagaggatttgggttcgtggagttcgttgatgcttatgacgcttctgaggcacagtaccacatgaatcgccagatgtttgctgggcgtgaaataactgttgtacttgctgcggatacacggaaaaagcctgaggacatgcgtagacgaactggaccaagaggttattctggtcatgaagggcgtcgtccgaatcgtcatggtgcangacggtcccgatctcgttcatactcgcgttccccg

SEQ ID NO: 93614 - DNA, 501 bp, Zea mays
tgtaggtggtgacatatgaatgacggtacgtctgtaccggtccggaattcccgggtcgacccacgcgtccgaccagtcagaaaatagtgggatcgagttgtgtcactgcacgagcacatcctccggcgagcaccgggctcactatgcgtcctctagcgaccgaccaacgcgccgagcgaagatgtcgtggcagacgtacgtggacgagcacctgatgtgcgagatcgagggccaccacctgacgtcggcggacatcgtcggccacgacggcgccacctgggctcagagcaccgcgttccgcgagttcaagcccgaggagatggctgccatcatgaaggatttcgacgagccggggcaccttggcccgaccgggctgatcctgggaggcaccaagtacatggtcatgcaaggcgaacctggagctgtcatacgtggcaagaagggatccgggggcattactgtgaagaaaacagggcagtcattcatcattggcatctacgg

SEQ ID NO: 93615 - DNA, 502 bp, Zea mays
  unsure (1)..(502): unsure at all n locations
gcgtnnntatatggccgtcgagggaagtgatgctctaccggtccggaattcccgggtcgacccacgcgtccggggacgactgcgcataacagaggtgttcctcgcggcggcggtggtgacggcggcggcggtgacaactagtggtggcatggtcgccgcggtgcgggacgacgacttcttcgtggacggctcggtgtaatgcgacacctgccgggcggggttcgagacgaacgcgacgacgccgatcgcgggcgccaaggtgcggctggagtgccggcactacatgagcgcgagcggcgcggtggagcggtcagcggagggcaccacggacgcggcagggaagtaccgcatcgagctggtggacaaccgcggcgccgaggaggtgtgttcggtggcgctggtcagcagccccgtgcccgggtgcgccgagaaggaggttggccgcgaccgcgcccaggtgtcgctgttcacggacgccggggccggcctcgccaccaccgtg

SEQ ID NO: 93616 - DNA, 500 bp, Zea mays
agagatgtagtgaccatgaggtaatgaggtatgctgctaccggtccggaattcccgggtcgacccacgcgtccgcggacgcgtgggctttgccaccgcggcgtacgcggcgtcggcgtcggcgtcgcgcgcggcggccgtcgtcaggggcgcgggcgccccgtcgcagtcggagttggagtcggacccggagaaccagtgcgtgtacacggtgtacgtgcggacggggtccatctggaagggcggcacggactcgaccatcggcgtgacgctgctgggccccgacggcacgggcatccggatccgggacctggcggagtggggcggcctcatgggcgccggccacgactactacgagcgcggcaacctggacatcttcagcggccggggcccctgcatgagccaggcgccctgcgccatgaacctcaccttcgacggcaccggcgcgcaccacggctggtactggaactaactcgaggccacggtcacggggccccactt

SEQ ID NO: 93617 - DNA, 500 bp, Zea mays
  unsure (1)..(500): unsure at all n locations
gaaggtngtgaccatcgggtgagggaatagtatgctcgtaccgaattcccgggtcgacccacgcgtaccgctgacgcgtcggcggacgcgtgggcggacgcgtgggctgacgcgtggggtgaaaatgtgacatgcatccagttcaaccctgttgatgatagatacttcattagtggttcactggatgaaaaagttcgcatatggagcattcaaaaccgtgaaattgttgattggaaagatttgcatgaaatggtcactgctgcttgctataccccagatggacagagtgcactaattggttcccataaaggcagctgccatatttatgatacatctgataataagcttctccaaaagaaacaaattgacctgcaaattaagaaaaagaagtccagtcagaagaaaataactggatttcagttccttgaatagtttctcccagggagtacttcaagggtccttattacatctgcagattcaggaatcangggtgttgatgg

SEQ ID NO: 93618 - DNA, 501 bp, Zea mays
tggagagtagtgtcactaggttgagggaaggtaggtccggtccggaattcccgggtcgacccacgcgtccgtaatgaatcagctccttgacacgaacccggagaccaggatcacggtggctcagataatgtgagagcaggtggtttaagaaagggttccggccggtcaggttctacgtcgaggatgaccaagtgcacagcttggcagacagtgaggctgaggcgctggaagaactggggcccagtgacagtgagccttcacccccacctccccctcccccgccaccaccaccaccacagaaagaggacgacggcgatgattctggctgggagtcagactcctccgtagcgtcctgcccagccacattgtcatcagaggagaggagacggcctgtcggatctcttccacggccggtaagtctaaacgcgttcgatatcatctcgttctcaaggggattcaatctgtcggggttgttcgaggagcgaggcaatgaagtgagat

SEQ ID NO: 93619 - DNA, 500 bp, Zea mays
  unsure (1)..(500): unsure at all n locations
tatgtntgactctcgtggggagaaggaagatattgctctaccggtccggaattcccgggtcgacccacgcgtccgcccacgcgtccgacttgtttgattatttgcctctcacagctcttatagaaaatcagatgttctgcctacatggtggtctctctccatcactggatactttggataatgtccgctcccttgatcgcatacaagaggtcccgcatgaaggacctatgtgtgatcttttgtggtctgacccggatgacagatgtggatggggaatttcaccaaggggtgctggatacacatttggccaagatattgcacaacaattcaaccatacaaatgggctaagtcttatttcaagagctcatcaacttgtaatggaagggttcaattggtgccaggataagaacgttgtgacagtgttcagcgcgcctaactattgctaccgatgcgggaacatggctgcgatcctcgaaattggcgagaacatggatcagaac

SEQ ID NO: 93620 - DNA, 503 bp, Zea mays
  unsure (1)..(503): unsure at all n locations
tggttattgtgnctctcgtggggcgaaggacaggtatgcttgtaccggtccggaattcccgggtcgacccacgcgtccggaagacagggcacgcactcgtcgttggcatctacgactagccgatgacgcctgggcagtgcaacatggtggtggaaaggctgatcgactacctgcttgaacagggcatgtaactactacgtaccagctggaatgcatgtcgacgacgatggtttcgagtttcgacttccaataatagtaacaacaaagcaaaggccttcctcccggcgtatttgctttggctcttctcctccacgccataagatatctagcaattggtcactcgccttaattagttcgctttgcttttgaggttgattcgaccattttgctgtagcgtgaattgcatgcatggacatgcaacgctccaatggcctttggaatgtggaatttttttccccattttctgtatttttcctataaaaaatgaactggttcttatataa

SEQ ID NO: 93621 - DNA, 476 bp, Zea mays
cgcgcagcactcgtccggaattcccgggtcgacccacgcgtccgcccacgcgtccgcccacgcgtccgctcaaattgcagctgatcaacagctctatgcaatggtccgtcctggtttttggatggatgttgggcagccaagagactacattactggattgcgtctttatctagactcgcttaggaagaaatcggctgccaggctagctgctggagcacatgttgttggcaacgtgctggtgcatgagagcgccaagattggagaaggttgcctgatcggtcctgatgtcgcaattggacctggatgtgtcgtggaggatggcgtgaggctttcccgctgcactgtcatgcgtggtgtgcgtatcaagaagcatgcctgcatctcgaacagcattatcgggtggcactcaactgttggacaatgggcacggatagagaatatgaccattctgggcgaagatgttcatgtgtgtgact

SEQ ID NO: 93622 - DNA, 498 bp, Zea mays
cgtgggtgtcatagtgaggatagtatgcatgtactcggtccggaattcccgggtcgacccacgcgtccgcggacgcgtggggcaacatggaaggctcaggtcgtcgcatcaatacgtggtgcacgtggagaaggctacctcaccggcaagaccaagatgcctgccgctgaacttgtcagcaaagatggtgacaaagttgccaactctgcctacgaagattggctagcttcggaccaacaagtccttagtttccttcttgcctctgtctccaaggatgttttgatccagattgcgactaagcacaccgcgacggaggcatggcatgcaatcgagaccatgttctcgtcacaaacaagagctcgggcagtaaacacgcgcctggctttatccaccgcccacaaagggaacatgtcggtggccgaatatgtcgggaagatgcggtctctcggcgatgaaatggctgcagcaggacgacctctcgaagatgaagaattggtg

SEQ ID NO: 93623 - DNA, 504 bp, Zea mays
  unsure (1)..(504): unsure at all n locations
aagggaatgtntnnntctcgttggggaggatagtatgctgtaccggtccggaattcccgggtcgacccacgcgtccgcccacgcgtccgcggacgcgtggggaaaaatccaagaatcagactgagatattgctagaactttctgcttcacaagccgaacaagagtcgttgagacaagaaattgaagaattgaaattgtctttgaaggtggctactgaacgacaaatagttggtggaatttccaaatctggtgatgcaatagatgtccaatttgagctaaaagatgaggtacagtttttgagggaatcaaatgaaaacttaacaatgcaactgaagaagagtcaagatgcaaatatagagcttgtttctattcttcaggaactggaagaaacaatagaggcacaaagaacaacaatctccaatttcactcaaatgagtaatatgattgatcaagatatacccacgaatgcattatcagcgcaagaggatgcagagtgggaaagaa

SEQ ID NO: 93624 - DNA, 495 bp, Zea mays
  unsure (1)..(495): unsure at all n locations
tgtggttntcactgccgggaggtagtacgctcgtaccgtccgtaattcccgggtcgacccacgcgtccgaaggcattacttatccaagaacatagaatgaagaagagaactgcagaaagccgtcctagggtccctagaaagtttgacaaagataggaaattcacaactgataggatgggacgccagctttcatccatgggtatggatcctagtgctgccatgaatagaattcgcagtcagtctaggggtcgcaggcttgaaaggtcattgagcaaagctgcaccgaatggtgcacggttggatatagatggccagcagagcaccggaattgcgtcggacatttaggtgtaggtctagggctaggtgacgtgctcccgaggaagtgctttctggagaaagggtcaagggctctgagcacaagaaaaaggctatcaagaaagcacaggccgctactaggaacaggaacacggaagctcgtcctggagaggctttcct

SEQ ID NO: 93625 - DNA, 500 bp, Zea mays
  unsure (1)..(500): unsure at all n locations
ggaatgtnttnctcatgatggagaaaatagtattgttgtaccggtccggaattcccgggtcgacccacgcgtccgcccacgcgtccgcccacgcgtccgcggacgcgtgggctattttcctccttcactgcaccacttgagtttgctctacatgggaacaaatgatatgcaaatactgtttccatatgctactgcacttaagaagttagaccttcagtttacattcctttgcacagaggatcattgtcagatagttcaacgctgctccaatctggaaaccttagaggtgagggatgtcataggggatcgtggactacaagttgttgcacagacctgcaagaaattgcataggctcagagtagagagaggagatgatgatcaaggaggtcttgaggatgaacaaggtaggatttcacaggtggggttgatggctatagcccaaggctgccctgagttgacatactgggcgatacatgtatcagacattacaaatgcagctt

SEQ ID NO: 93626 - DNA, 498 bp, Zea mays
  unsure (1)..(498): unsure at all n locations
agtgtggtggatgtggggagtgggtagctgtaccggtccggaattcccgggtcgacccacgcgtccggacccacgcgtccgcccacgcgtccgagtcgctcaaaaccctagagctctcgcctgctggcctccgccgccggagcgagctccccatcttcatccgtcaaccatggcgacccagatcagcaagaagaagaagttcgtcagcgacggtgttttctacgccgagctcaacgagatgctgacgcgggagctggcggaggacggctactctggcgtggaggtgcgcgtcacgccgatgcgcacggagatcatcatccgcgccacgcgcacgcagaacgtgctcggcgagaagggccgtaggatcagggagctcacctncgtcgtccagaagaggttcaacttccctgagaatggcgtagagctttacgccgagaaggtcgtcaaccgtggcctctgtgccatcgcgcaggccgagtccctncgttacaagctcct

SEQ ID NO: 93627 - DNA, 494 bp, Zea mays
tggtgtgtcatgtgggggaggaaagatgtatcggtccggaattcccgggtcgacccacgcgtccgcccacgcgtccgggcgccgggcctggccgtgttgccgatgcgggtgatggcgtccgactccatcgcctcggtgaagctccgcgtgcagacgtcccggggcgtgagggcgcgcaagcagaagctcgtcttcggcgggcgcgagctggcgcgcgacgacgggcgcatccgggactacggcgtggcggacggcaacgtggtgcacctggtcatccgcgtcccggacgtgcgcctcatcaccgtggagaccgtgcagggcggcaagttcaggttccgcgtggagcccgggcgcaccgtcgggtacgtgaagcagcagatcgccaaggaccaccccgcggcggcgcgccccggcgagcagcggctcgtgctcgagggcgaggacctcgacgaccggcacctcatccacgacgtgtgcagggccgacggcgccgt

SEQ ID NO: 93628 - DNA, 497 bp, Zea mays
gagtggtgtcatgcgggaaggggtaggcattactcggtccggaattcccgggtcgacccacgcgtccgcaacgcggacgtgctgagggccacgacgcggcgggcgctggcgaggtacgatggcccgtgcatggcgaccaaccccatcgaccggtgctggcgctgccgcgccgactgggcgacggaccggaagcggctggcgcagtgcgcgcgcgggttcggccacaggagcgtcggcggcgcggccggcaagctgtacgtggtgagggacccgagcgacgacgagatgatcatcccgcggaagggcacgctgcggcacgcggtgatccaggaccggccgctgtggatcgtgttcgcgcgcgacatggtgatcgagctgcggcaggagctgatcgtgaaccacaacaagacgatcgacgggcggggcgcgcaggtgcacatcatgttcgcgcagatcacgctgcagaacgtgcagaacgtgatcctgcacaacctgca

SEQ ID NO: 93629 - DNA, 500 bp, Zea mays
  unsure (1)..(500): unsure at all n locations
tgaattttgngaatgacgggggtggacagtatcgctgtaccggtccggaattcccgggtcgacccacgcgtccgtgcgtgttaagctcatcatgaaagaaggggtgaagaacttcaacccggtttatctctgggacgaaggatcgaccatcagctgggtgccttgtggaagaaagctcacatgctcttaccctggcatcaaattttcctatggcccggacacttacttcggaaacgaggtatctgttctggagatggatgggcaattcgacagactagatgagctcatctacgtggagagccatctaagcaacctttcaaccaagttctacggagaggtgacacaacaaatgctaaagcatgcagacttcccaggtagcaacaacgggacaggtctcttccagaccatcattggactgaagattagagacctctatgaacagattgttgctgagagggctggtgtaccagcggaagcagcaaaagtttaacgatctatgn

SEQ ID NO: 93630 - DNA, 505 bp, Zea mays
gaaaagagtgctgagcatcgggttgagaggagatagtaagtatcgtccggaattcccgggtcgacccacgcgtccgctgggatactgccgggcaggagaggtatcatagcttggctcccatgtactataggggtgcagctgctgccattgttgtctatgacatcacaaatccggcctccttcacccgtgccaagaaatgggttcaagaacttcaagctcaaggaaatcagaataccatagtggctcttgctggaaacaaggctgatatgctagatgcgaggcaagtgccagcagaggaagcaaaggcgtatgctcaggagaatgggctcttcttcatggagacatctgctaaaactgcaatcaatgtgaatgacatattttatgagattgcaaagaaattgcttcaagggcaacaagctccaagcccacaggctggaatggttctgaatcagagaccaaatgagaggacggtcaacaagtcttcatgctgcttttgaactgggtt

SEQ ID NO: 93631 - DNA, 500 bp, Zea mays
ggtagatggtgacgactaagaggaggaagcatgctctaccggtccggaattcccgggtcgacccacgcgtccgcccacgcgtccgcccacgcgtccgcccacgcgtccggcaactgaaaacagccgagcgggctcctctccctctccctctccgatccattctccagcgcagcgaagtaaacatgtctgaccgggcaaagatgtcgtggcaggcgtacgtggacgagcacctgatgtgcgagatcgagggccaccacctcgcggcggcggccatcgtcggccacgacggtgccgcctgggcgcagagcacggcgttccccgagttcaagaccgaggacatggccaacatcatgaaggacttcgacgagccagggcacctcgcgccgacaggcctgttcctcggacctaccaagtacatggtcatccaaggcgagcctggtgccgtcatccgtggcaagaagggatcaggaggcatcaccgtgaagaagacagggcaggca

SEQ ID NO: 93632 - DNA, 503 bp, Zea mays
  unsure (1)..(503): unsure at all n locations
agggtagattntgnttgatgtgggaggtggatgtgatgctgtaccggtccggaattcccgggtcgacccacgcgtccgaattgttgtctatgatataacaagtccggaatcatttagcaaagcacagtattgggtaaaggaacttcagaagcatggtagtcctggtattgtaatggttttggttggtaataaggctgatctacatgataatcgaagtgtatcctcgcaggatgcgcaggactacgcagagaagaacaatatgtttttcattgagacgtcggccaagacagctgataatataaaccaactgtttgaggaaattgcaaagaggttgcctaggccaacggcatcgtgacagaacacttgtgtgtattgcttgtaccatgtaatgcatgccagtccatatacacgggtactgtatggactacggaagacctctcatgtaaagatatttcccccattctgtcatagttgtggatgacaattggtattgagaatatcct

SEQ ID NO: 93633 - DNA, 499 bp, Zea mays
ggaagggctgcgattgtagggacgaaagtatgctctaccggtccggaattcccgggtcgacccacgcgtccgcttcaacatctcgtctctctcatcctccgacgccatccgctcccggcccggccgagccgcgcgttgtgtatggattccaaaagcaatcatacaggggctatggcgaggccttacaaacctaagaatatcctcattacaggagctgctggttttatcgcctcccatgtcgcaatccgcattaccaagaagtaccccgattacaagattatcgtccttgacaaacttgactactgctctaatctgaagaacctgcttcctgtgagctcatcaccaaacttcaagtttgtgaagggtgatattgcaagtgttgatcttgtcaacttccttcttgtcacagagaacattgataccataatgcacttcgcggcccagacacatgtcgacaattcatttgggaattctttcgaatttaccaagaacaatattt

SEQ ID NO: 93634 - DNA, 492 bp, Zea mays
  unsure (1)..(492): unsure at all n locations
tgaagtgnctgaatgagggaagatgagagtgctgctaccggtccggaattcccgggtcgacccacgcgtccgcggacgcgtgggttcccagatccatcgactcgctcgggccgcccctcccgtcgtccccgttcgaaggtgcggcagccggcaggcgagcgatttcattcgacatgaatcccgagtacgactaccttttcaaacttctgcttattggtgattctggtgttgggaaatcatgcttgcttctcagatttgcagacgattcttatttggacagctatatcagcacaattggggttgatttcaaaattcgcacagtggagcaagatgggaagaccataaaacttcaaatttgggatactgctgggcaagagcgcttcaggacaatcactagcagctactaccgcggagctcatggaatcattattggatatgacgtgacagaccaagaaggcttcattatgtgaagcatggttgacgagataaacc

SEQ ID NO: 93635 - DNA, 504 bp, Zea mays
tggatacgtgactgaatgtcgggtaagaagtaaagctgtaccggtccggaattcccgggtcgacccacgcgtccgcccacgcgtccgcccacgcgtccggcgagtgcgtgcgttcgtgcagccacagacaggcgtccgggcaccatgtctttcaccggcacgcaggacaagtgcacggcgtgcgacaagaccgtccacttcatcgacctcctcatgccgacggcgccatctaccataagacatgcttcaagtgcagccactgcaaaggggtcctctcgatgtgcagctactcctccatggacggtgtgctgtactgcaagacccacttcgagcagctcttcaaggagaccgggagcttctccaagaacttcacgccaggtggcaagtcatcagacaagggtgaactgacaagggccccaagcaagctgtcgtctgcattttctggtacccaagataagtgcgcagcatgcccagaaacagggtacccgcttgagaaggtaactt

SEQ ID NO: 93636 - DNA, 499 bp, Zea mays
tgttagcgtgtgtcatcgctatgtagtatgctgtaccggtccggaattcccgggtcgacccacgcgtccgcgcgggtccgggcgactccggcagctacaaggactggccggaggacacgggcttcttgcggcgcgagggcgggtggagcacggagtacggggagttcttcatgagctggtactcgcagatgctcctggagcacggcgagcgcatcctgtcggcggcgacgggcgtgttcacgggttcccccggcgtgaagatctcggtgaaggtggccgggatccactggcactacggcacccggtcccacgcggcggagctgacggcggggtactacaacacccggtcgcacgacgggtacgcgcccatcgcgcgcatgctggcgcgccacggcgccgtgctcaacttcacgtgcgtggagatgcgcgaccacgagcagccgcaggacgcgcagttgccgcccgaggcgctggtgcagcaggtggccgccgcggcgcg

SEQ ID NO: 93637 - DNA, 500 bp, Zea mays
  unsure (1)..(500): unsure at all n locations
ctgatagatgctgagnccttgcacttgtcgtcatgactgcattcgagtaaccggaccgaccgacgcgtacgaagacgactgatcctacacaatctacatttaactgacaggcaccaacctccaccaatagtggcgtaccaccgccggcgggttcgccactaagccctctagcaacaacccatccgccagcgtcggctgtagcaggtacggcaagcactccgatgaaggccccctcaactactgcgagtacggctcctccaggaacgactcggagaagtacctgaaagaggagaaggagcacaagcacaatgagcacctcggcaacataggcacccttgccgtcggagccttcgacctgtacgagaggcaccatgcgaagaatgacccggagcacgcgcagcatgcacaagatcgaagagggcctaactgctgtggctgccctgggcaacagccgcttaacgttccacgagcaccacgacaagaagaggccaaagacgcgc

SEQ ID NO: 93638 - DNA, 501 bp, Zea mays
  unsure (1)..(501): unsure at all n locations
ggggagatgttgntgatgtgggagaggacgagatgctcgtaccggtccggaattcccgggtcgacccacgcgtccggtggagttcctggggactttcgcgagcacggtgcacctgagcgggagactctggctcgctagcatgatgatcggctcgggaagcctgctgatgggcgccggcctcaagttcatccctgtcgatccgggcagtgaaggctcgtctgaccgccacgatgggtaccagcccatccccaccggccccaacgccgtgtgatttccaagaagacctcctgccatccttcttgatttttatttccttctatagaaacaatagaactgaaccctcggatgcgtttgcagtttggggaaaaaaaagatgttttagataggagcgacggttgcatatgatggccgtcctcaagaattttaatcctcgtctcttggctattttgtctttgtagccggcaatgttttgtttctgaatttggatgatagaatcgatgt

SEQ ID NO: 93639 - DNA, 500 bp, Zea mays
aggtaagaggttcgtcactgagatgaagaagcatgctctaccggtccggaattcccgggtcgacccacgcgtccgcccacgcgtccggacggaaggactagcgtcatgggcacgcccaccgagacggccatcctggagttcggcctcgaggtggagaagtacaccaaggtggagcacgcggacgccaagaagctcaaggtggagccgttcaactcggtgaagaagaccatggccgtggttatcgcgtccccgaacgcggccggccacccgcgcgcgttcctcaagggcgcgtccgaggtcgtcctgagccggtgcggctccgtcttggacggcaccggtgccgcagagaagctcacggaggcgaaggcgaagcgcgtggccagcgccatcgactcgttcgcgtgcgaagcgctgcacacgctctgtcttgctgtccaagaactcagcaagccccagaacttccccgggaacagtgacacgcttatatcggagttcaacag

SEQ ID NO: 93640 - DNA, 503 bp, Zea mays
  unsure (1)..(503): unsure at all n locations
tatgggctgcccatcgacagaagtaagctacgctctactcggtccggaattcccgggtcgacccacgcgtccgggcagaaggagcgacagggtctgctgaaccagaagggctgcgtcgtgtggatcactgggctaagcggttcacggaaaagcacgctcgcttgcgcactgagccgcgagctgcacggcacaagccacctcacgtacgtactcgacggcgacaacctcaggcactgactgaacagggaccttagcttcggagcagaggaccgcacctagaacatccgcagagtacgggaagtagcgaagctattcgccgacgctggcctcggctgcatcggcagcctcatatcgccctacagaagcgaccgaagcgcgtgtcgcgatctgctgcccaagcactcgcttatcgaggtgttcctggacgtaccgcttcaagtgtgcaaagccagggaccccaaatgcctctacaagctcgcacgcgccgacaaaatcaaagggan

SEQ ID NO: 93641 - DNA, 497 bp, Zea mays
  unsure (1)..(497): unsure at all n locations
ngaatgtcctgacaatgcagaagatagtattgctgtaccggtccggaattcccgggtcgacccacgcgtccgcgaagattgccaccccaggatcatccaccgtgacatcaaggcagccaacatccttctggacgagaatttcgaggctaaggtcgcggatttcggacttgccaagctgaccacagacaccaacacgcacgtctccacgcgtgtcatgggaactttcgggtatttggccccggagtacgcgtcgagcggcaagctcaccgacaagtcggacgtgttctccttcggcgtcatgctcctggagctcattaccggcaggagaccggttgatcccacgaactacatggaggacagcctggtcgactgggccaagcccctcttggcgcgcgcgcttgccgaagacaacttccaccagctggctgacccgcggcttgaaaacaaggtccaccggcttggacttgagcggatggtcctcctttgcggggcggccc

SEQ ID NO: 93642 - DNA, 506 bp, Zea mays
  unsure (1)..(506): unsure at all n locations
gatgcnntgcttttgcgggtgggcggaaagcatgtctcggtccggaattcccgggtcgacccacgcgtccgctccctggcaaagcccgggctcaacgacaagcttcgccactgcggcatcatggacgtcgagttcagaagggtgcggtgcaagtaccccgctgggcagaagatcgtgttccacatcgagaagggctgcaaccccaactacctggccgtgctggtgaagtttgtggcggacgatggcgacatcgtgctgatggaaatccaggacaagttgtcggctgagtggaagcccatgaagctctcttggggcgccatctggaggatggacactgccaaggcgctcaagggccccttctctatccgcctcaccagcgagtccggcaagaaggtcatcgctaaagacatcatcccggcgaactggagacccgatgccgtctacacttccaacgtccaattctactagactttgaattgccttcgattcatccggcgcggcgggcc

SEQ ID NO: 93643 - DNA, 502 bp, Zea mays
  unsure (1)..(502): unsure at all n locations
agagatgtntgngatgagggggagatagcatgctgtaccggtccggaattcccgggtcgacccacgcgtccgcccacgcgtccgaaggagccgccgcgtgtccgttgtcttctacgtcgtcctcgccgcagctgcagccgcggcgcaggcatccaataacgtcacctccgacgaggattactgggcggagcgcgccgaggtggctcggtcgcgcaacctcgccgcctacgtcagcgaccccgtggccgccacgaaccgcttcaacgcggacgtgctgagggccacgacgcggcgggcgctggcgaggtacgatggcccgtgcatggcgaccaaccccatcgaccggtgctggcgctgccgcgccgactgggcgacggaccggaagcggctggcgcagtgcgcgcgcgggttcggccacaggagcgtcggcggcgcggccggcaagctgtacgtggtgagggacccgagcgacgacgagatgatcatcccgcggaagggcacg

SEQ ID NO: 93644 - DNA, 504 bp, Zea mays
  unsure (1)..(504): unsure at all n locations
tgggagagatgnctgtagtgtgtttaggggaggggaatgatgtaccggtccggaattcccgggtcgacccacgcgtccgaacgcgtcgcatccgctccacaggatcctctgcgccaccgcaaccgtgtgaccgcccgtgccgccggcgatcccgatccgccgacccgtcccagccccgctcgcagccatgtcgccgtcggagccgacgcgggaggagagcgtgtacatggccaagcttgcggagcaggcggagcggtacgaggagatggtcgagttcatggagcgcgtcgcgcgctacgccgggggcgccggcggcngggaggagctctcggtggaggagcgcaacctgctgtccgtcgcctacaagaacgtcatcggcgcccgcagggcctcgtggcggatcatctcctccatcgagcagaaggaggaaggccgcgggaacgaggcgcacgccgcatccatccgcgcctaccgctccaagatcgaggccgagctcgcccgcat

SEQ ID NO: 93645 - DNA, 507 bp, Zea mays
ggagtgtggtgggataagaagggtagtattctacgctgtaccggtccggaattcccgggtcgacccacgcgtccggtgcacgcccccgccaccggccggatcgacagcaccgatcaccctgaccgtctgcgcgcggcggctctcactccggtgacacgcagggcgcgcataggcgagggcctccccccccggcgagggatggtgtggtcggctgggatggcaacaatgcgaggcgcctccgccgccgcgctactggtgctggcgctcgccgccgccgtggcgcgcgcggaggacccctaccacttcttcgagtggaaggtgacgtacgggacgaggaccatcatggggacggcgcagaaggtgatcctcatcaacgacatgttcccgggccctaccatcaactgctcatccaacaacaacatcctcgtcaacgtgttcaacatgctcgaccagccgctcctcttcacctggcacgggatccagcagaggaagaactcgtggcaggac

SEQ ID NO: 93646 - DNA, 495 bp, Zea mays
  unsure (1)..(495): unsure at all n locations
ngaatgtgctgagcaatgcctatagctcgctctncggtctcggaattcccgggtcgaccgacgcgtccggcaagatcaagatcggaatcaacggtttcggaaggatcggcaggctcgtggccagggtggccgtgcagagcgaggatgtcgagctcgtcgccgtcaacgaccccttcatcaccacggattacatgacctacatgttcaagtacgacaccgtgcacggccaatggaagcacagcgacatcaccctcaaggactccaagacgcttctcttcggcgagaagccggtcaccgtctttggcatcaggaaccccgaggagatcccgtcgggtgaggctggtgctgagtatgtcgtggagtccaccggtgtcttcactgacaagggcaaggctgctgcacatatggagggtggtgccaaggaaggtgttatctctgccccaagcanagatgcacccatgtttggtgttggtgtcaatgatgacaagtacacct

SEQ ID NO: 93647 - DNA, 503 bp, Zea mays
  unsure (1)..(503): unsure at all n locations
tagcggtgntnnccatgaggggaggtggtattgctatactcgtccggaattcccgggtcgacccacgcgtccggttgccaaagaattccctcccctagccgccgccgccgctcgtctccctgagaggtgccgggaccgaggatttggccgagttctaggtagagaatcggttttacttgtctcagcccggggtctgctgcgtctggtggtggtgaaggggagaaattcgtgagatctgttccggatcaggcgtgcgagctcgggaatcaagggtttcacacatagcttcgtcgatttgaatttgatgtactaatggagtctaagggtggcaaaaagtctaaccgtagtcggtctatgatggatgaagcctcccttggcttcagcattgaagacgttcgaccttggccgagcgtgaagaagttccaggcttgttgttactcccactgggccaagaagccaatcctgtattccttttggctttcttaatctagtagtttaggatt

SEQ ID NO: 93648 - DNA, 509 bp, Zea mays
  unsure (1)..(509): unsure at all n locations
tgagcggtnntntgatagaggggggaaggaaagtagttctcgtccggaattcccgggtcgacccacgcgtccgcggacgcgtggggtgctgtacggccggatccagtgcaagggcaagtgcaccgagcagaagggcatcaccgcgccgcagatgaaggtgtgccaagaggcgtgcgacaaggactacgtggtcaaggcggctgaggtcaccaaggcctgcaacaccacctgcgccaaggagaagcagcctctgctcagcgagaactgcaggaggtcctgcacccctcctccttcctgaacgcagagcacgcccgccggtcgtcgtcttctgcctgcttgcgtgacactgaatcactgatacatcatacatgcatgcatgggatgcgatgacgatttgatgcatgcatgcatgggtatacctaccaatttgatgaccgacgatgtatagtttcgtcgactgcttcatacacatatatagcagcccaattaatgtaacgtcacgcanatan

SEQ ID NO: 93649 - DNA, 493 bp, Zea mays
  unsure (1)..(493): unsure at all n locations
gtgtntgtatttgactgaagtatgctgtaccggtccggaattcccgggtcgacccacgcgtccggatctacacctggctcgccaagcccggggccggggtcatgatcatggacccctacggcgccaggatcagctccatcccgcaggatgcgacgccgtttccgcaccggcagggcgtgctgttcaacatccagtacgtcagctactggttcggcgagggcgacggggcggcgccgacgcagtggagcagggacatgtacgcgttcatggagccgtacgtcagcaagaaccctaggcaggcgtacgccaactacagggacctcgaccttggcgtcaacgaggtggtcggcgacgtctccacctacgacagcggcagggtctggggcgagaagtactacaatggcaacttcgagaggctcgccaggaccaaggccaaggtggacccctgcgactacttcaggaacgagcagagcatcccgccattgctcaagtn

SEQ ID NO: 93650 - DNA, 499 bp, Zea mays
agagatggtggtcatgctgcaggaggatagtatcgctctaccggtccggaattcccgggtcgacccacgcgtccgcgacagcttctccacctcctgggcgaaccttccggcggccatgtacacgaggaccggagtgccggtggctttgtgcaggttcaggaagtacccacaggctttgggcgtcggacaaggaagccgtcggcctggtcgtttctcacctgaagaagatgctcccggatgccactgaaccgacgcagtacctggtgtcgcgatggggctccgaccccaactccctggggtcctactcgtgcgacctggtcgcgaagccggccgacgtgtgcgcgaggttcgccgcccccgtcgagaacctgcacttcgccggcgaggcggccagtgccgagcactcggggtccgtgcacggcgcctactcgtcgggcatcgccgctgccgaggaatgcaggaagcggctcctggcgctgaagggcatcccggacctggt

SEQ ID NO: 93651 - DNA, 513 bp, Zea mays
  unsure (1)..(513): unsure at all n locations
ttggnccnttncctccggaccgtagncgatagtactttcgtaccggaactgaattcccgggtcgagccacgcgtacggcatagcacaggtgaacgcgacgatagcatccctggctaataacatcattgtcgggggcgccgtccttacgagactggacgtcctcctgacgtgcgggcccccgaaggtgccactcggcccaaacatcaccaccaactacaacggcaagtggctcaccgctagtgccacctgctacggttagatcaacggagcactgcgctcctgacatcggctgtgcatgctggatcaacaacctgaacctgccacactacagcggactgacgttatgcgccaacgatgctatcttcaaggactgtaaggtctgcggctcatgctacgaggtgagatgctacgaaaaacccgagtgcttgggcattacaatcacggtgtacatgactgacctgaactacgagcctattcgttcctagcacttctacttgagccgaaaggcttttt

SEQ ID NO: 93652 - DNA, 496 bp, Zea mays
agaaggtactgtgccatggccatcgtaggctcgtaccggtctcggaattcccgggtcgacccacgcgtccgattgagcgcggttcctaaactcggatcctgcattttgtttcggcgatatgtgttggtgttaccagttgctgcagcgatacttccaatttctgtgccgatgggtttcctcgttttcttcttattttgtttcctcgtcgtcgcagcctgcaaattggtagtttcttggttcttatcagtggagctggctttggaatttgcaggcaccgttctgagctgcgctggtgctcctggaaaggtgttggtgcctggaggtggcagtgatgacttgctttcctccgtagagcctgtcagcgacactcaacctgaagaactacagcctttgcactttcatatcaggcattgtgcaatgcctcgtgaattgttggttaaggcaccgtgctggttcttgggctactgacattgctagcttgtgatcccacctacac

SEQ ID NO: 93653 - DNA, 504 bp, Zea mays
  unsure (1)..(504): unsure at all n locations
atagggctcngtgcccatgagaagaaatgtatgctatgccggtccggaattcccgggtcgacccacgcgtccggaattggataagatgagattaggacgctcgcaagctgaatctgtggtgcaaaagatagtcgagcttactagcaatctcataggttctgtcaaaggcgaagaattcgacatttataacttgctggatgatgaaattttaagcacgagcacagcccttgagtacagtttgcataagcataaccaactggaggctgacatagacatgttaaaagaatccttgcgacagaaggacatggatctgactgctgcttataaagcgcttgacgccaaagatcgagagttgaaagccgtaattggaaaggtagatgttaaggataaggaactagaaaacttggaagagctatccataaacccctattgcaccaggaaactgtctaaaagtgcttgttaggcaacccgagacaaccattggtggtgaaccgaacttccaaa

SEQ ID NO: 93654 - DNA, 552 bp, Zea mays
  unsure (1)..(552): unsure at all n locations
gcgggtnacttgaacctagctcacatacggaatagctccaccggtccggaattcccgtcgagccacgcgttcggtcaacacccatcttagtctttctagagcctttcattaggccaatggtacccggtggaggagggcattcttggccgctcgccaagggcgaagaagttcagcagcaggagcatcgggtttctgaacaacacccagatgtcagcgtggcggacacggagcatgtaccaccggggcaggagcaccccactgatgtgcaagaccacgagcaccctcgcggcggtcatggcgcagatgctgtcccatcgggccacacacgtctgggtgacggacgcagagtcggaggaggacggcgtcgtcgtcggcgtggtgggctacaccgagatcttcaatgccgncaccaggagcacctgcccaagtccgacagcatcttgatgcaccacatcgtgctgtacagtatacttgctgtggttgatccgttggtgccccggtgcacgcttgtgcacttgactgtacaatgtactttgctcaatttgtgtttgg

SEQ ID NO: 93655 - DNA, 545 bp, Zea mays
  unsure (1)..(545): unsure at all n locations
gatgtnactgtatgttgggggtgagggatgcttcaccggtccggaattcccgggtcgacccacgcgtccgccgagagcagagagacatggcgccccaacacccgcagccggcccctggtccggttccaatccggcttcttcctcttcctccttgccccgcccttcgccggcgcgtggggaaaggagggccacatcatggtctgcaagatcgccgagaagtacctgtcggagaaggcggcggcggcggtgaaggcgttgctgccggagtcggcgggcggtgagctgtcggcggtgtgcccgtgggcggaccatgtgcgctggcactaccactgggccagcccgctccactacgccaacaccccccaagtctgcaacttcaagttttctcgggactgccacaattctcgtggccagcaagggatgtgcgtcgtcggngctatcaacaactacacggaccagctctacagctacggccagaagacttcgtataacctgacggagagcctgatgttcctggcacacttcgtncgcgacgtccaccagcc

SEQ ID NO: 93656 - DNA, 553 bp, Zea mays
gatgtggtgacttgagcccagcctcagcacgcatgatctaccggtccggaattcccgggtcgaccgacgcgtccgcggacgcgtgggcggacgcgtgggtcgggattgtgggcgagtgcgtgcgttcgtgcagccagagacaggcgtccgggcaccatgtctttcaccggcacgcaggacaagtgcacggcgtgcgacaagaccgtccacttcatcgacctcctcacggccgacggcgccatctaccataagacatgcttcaagtgcagccactgcaaaggggtcctctcgatgtgcagctactcctccatggacggtgtgctgtactgcaagacccacttcgagcagctcttcaaggagaccgggagcttctccaagaacttcacgccaggtggcaagtcatcagacaagggtgaactgacaagggccccaagcaagctgtcgtctgcattttctggtacccaggataagtgcgcagcatgccagaaaacagtgtacccgctggagaagtttactctggaaagccagtcctaccacaagagctgttcaaagt

SEQ ID NO: 93657 - DNA, 518 bp, Zea mays
  unsure (1)..(518): unsure at all n locations
agggaattggtgctagtgccctgcactgctcngtactgctctacccgtccggaattcccgggtcgaccgacgcgtccggagccaccacaatttgtggctattttccagccaatggttattcttaagggtggtactagcgctgggtataagaaatttgtagaagagaagggtctgaaagatgaaacgtattgttctgatggcactgctctcattcaaatttctggaacagcggttcataacaataaaacgcttcaagttgatgcggtcgcaacatccttgagttccacagattgttttgttttgcaagctaaaaactcgatgtttatatggaatgggaatgcaagttcttttgaacaacaacagtgggctgctaaagttgctgaatttctgaagaccggtgttgctgtcaagcattgcaaggagggcactgagagctctattttctggtcttctattggtggaaagcagagttatacaaatagaaatgctgcacctgatgttgttattagagagcctca

SEQ ID NO: 93658 - DNA, 524 bp, Zea mays
ggtatagggtagtgtccctgcttaagagtgtcatagtactgctctaccggtccggaattccgaggcgtacgacgtacgcggacgcgtgggcggacgcgtgggcggacgcgtgggttcacactatcctgacaaaggatgggaagaggcacttgatcaagaaggatgtgccttgtgagactgatcagttgactcatgtttacactttgatcatccgtcccgatgcaacatacagcattctcatcgataatgaagagaagcaaactggcagcatctatgagcactgggatattcttccccctaagcaaatcaaggacccagaggctaagaagcctgaggactgggatgacaaggaatacattcctgaccctgaggacaagaagccagagggctatgatgatattcccaaggaaattcctgaccctgatgctaagaagcctgaggactgggatgacgaggaagatggtgaatggactgcccctaccattcccaacccagaatacaaaggaccatggaaacaaaagaaa

SEQ ID NO: 93659 - DNA, 518 bp, Zea mays
  unsure (1)..(518): unsure at all n locations
agttaattgtgctagtcccaccnctgatcgtaattctatacncgtccggaattcccgggtcgaccgacgcgtccgggagaccatggcggaccagctcaccgacgaccagatcgccgagttcaaggaggccttcagcgctcttggacaaggacggcgacggttgcatcacaaccaaggagctcggaactgtcatgcgatcactgggtcagaacccaaccgaggctgagctccaggacatgatcaacgaggtcgatgcggacggcaacggcaccatcgacttcccggagttcctcaacctcatggcccgcaagatgaaggacaccgactccgaggaggagctcaaggaggcgttcagggtgttcgacaaggaccagaacggcttcatctctgcggcggagctccgccacgtgatgaccaacctcggcgagaagctgaccgaccaggaagtcgatgagatgatccgcgaggccgacgtcgatggcgatggccagatcaactacgacgagttcgtcaagggt

SEQ ID NO: 93660 - DNA, 523 bp, Zea mays
ccggtagtgagccaggccctacgactgcgtaccgtctcgattcccggtcgacccacgcgtccgcccaccgtcgcgaccgtggcggactcgtggccactgcccggcaccaacgcgctagttatcgagggcgaggcgcctccacagcgcactacgagcgtgccccgcaagtactccgagtacacgccctgcgaggacgtggagcgctccctgcggttcccgcgggaccgcctcgtctaccgcgagcgccactgccccgcggacggcgagcgcctgcgctgcctcgtgccggcgcccaggggctaccgcaacccgttcccctggccggccagccgcgacgtcgcctggttcgccaacgtgccgcacaaggagctcatcgtcgagaatgcgctgcaaaactggatccgcgtcgactgctacaggttccgcttccacgggggcggcaccatgttccttcgcagaaccggcgcttacattgacgacatcgccaagcttattcctattcacgactgatccatccggactt

SEQ ID NO: 93661 - DNA, 550 bp, Zea mays
catgtgtgactagacccagcctccgacgcatgatctaccggtctcggattcccgggtcgacccacgcgtccgcccacgcgtccgcccacgcgtccgcccacgcgtccgggctcccagttcttcatctgcaccgttgctacctcttggctcgacggcaatcacgtcatcttcggccaggtcgtcaagggcatggacgtcgtcaaggccatcgagaaggtggacacccgcaacggcttcacctacaaggtggtcaaagtcgctgactgctgacagctctgctagatctctctgatctggtatgttcggacaacctaccttcgtcatcgtctactactcctgcgtccattcctttggatctgaataatatggtggtaatctgaatggtggtattagtttatcatgtatcgctcgcagtataatatatcggtttaggtgatgatctttgaaaaataataaaattttgattcgaaacaacaacacaaactttatcattattagtaacttttataacaattaatcttacataactaactaaagatgccaactcttt

SEQ ID NO: 93662 - DNA, 519 bp, Zea mays
  unsure (1)..(519): unsure at all n locations
tggtttcggtcctatggccctcncttgaaagtaactgattcnctgccggaattcccgggtcgacccacgcgtccgcggacgcgtgggctttcagcagaccagctattgctctaatatgttttggcacaatcgcctgattccgaagtgttttgttaccttcttcgcccttcatgtggcttgctgggatgacttttggatatctttatggctttttgataatcacagtggggatgagcataggcatgtcgttgccgtattttataggttctgcattccactgcaggatacatagatggctggagaagtggccaaagaaagcagcttttgtaaggcttgctggcgagggagattggcatcatcaatttaaggctgttgctttactcaggatttctccatttccatatttagtttttaactacgcttctgtggctacgaacgtcaaatattacccatacatagctggttccatggctggaaccatacatgaaactttccttgcaatatacagtgggaaacttt

SEQ ID NO: 93663 - DNA, 550 bp, Zea mays
  unsure (1)..(550): unsure at all n locations
cgatggtnnnntgtccctagccccactacgnactgccgtaccggtccggaattcccgggtcgacccacgcgtccgctcgcgcacgctctacatccagtcggagatcggcgggttcatcgacccgcagggctggcgggcgtggctcggcgacttcggcctcagcacctgctactacgccgaggtggaaaaccacgggcccggcgccaacatgaccagacgcgtcaagtggaggggtatcaagaacatcacctaccagcacgcgctgcagaagtacaccgtcgagagcttcatccagggccagcactggctcccacagctcggcgtgccattcatcccggggctgctgccgcagcagcaatcgggcaggatacactgacatctaaggaagatgatatatgatcggcaggctgcgttgtcgatatgacgtggcactaacatgtacgtaccatggtttagtttattggttggtttatgctattttgactactactttttttatattcgataaaaaaatgcagtacagaattaaaaacgcaaattacaaatggtt

SEQ ID NO: 93664 - DNA, 544 bp, Zea mays
  unsure (1)..(544): unsure at all n locations
tattgnntaaccatcgancatgactgaatctgctctaccggtccggaattcccgggtcgacccacgcgtccgctcctcgaccctcccgacgcggaaaaaaaacagggaggagaggagggagaaagggaagagggggccgaaatctcctccccctttccaaatcctggctcaataatctctccatcaggggatcctaaggctgatcactgatcaggtcggaggactcggcgggcgcaggcatgaacgagaaggcgtccgtctccaaggagctcaacgccaagcacaagaagatattggaaggtcttcttcggcttcctgagaatagagaatgtgcagactgcaagtcaaagggtcctcgatgggcaagtgttaatctcgggatctttatatgtatgacatgttctggaattcatagaagcctgngggtgcacatatctaaggtaagatctgctaccctggatacatggctgccagagcaagttgcatttatccaatcaatgggaaacgaataagcaaatagccattgngaagcagagctgcctcc

SEQ ID NO: 93665 - DNA, 544 bp, Zea mays
  unsure (1)..(544): unsure at all n locations
atggtgctgacatcgaatatatagtaagctgcaccggtccggaattcccgggtcgacccacgcgtccgcccacgcgtccgatgagcagctgcgcggactggctggtggacgcggtggacggctccaccgggatcaccgtctccaacggccacttcacgaggcacgaccacgttatgctgttcggggccagcgacgccgcgtccaaggacagggagatgcaggtcaccgtcgccttcaaccacttcggcaaggggctggtgcagcggatgccgcgctgccgtcacggcttcttccacgtggtgaacaacgactacacgcactggctcatgtacgccatcggcggcagccggaaccccaccatcatcagccagggcaaccgcttccgcgccgtcgacgacagcaggttcaaggaggtgaccaagcgggagtacacgcagtacagcgagtacaagaactgggtgtggaagtcgcaggacgacctgttcctcaacggcgccttcttcaaccagtccggcggtcagaacgagcgcaagtacgacaggcn

SEQ ID NO: 93666 - DNA, 544 bp, Zea mays
  unsure (1)..(544): unsure at all n locations
tatgtggctgtatggtgggagatgagtgatgctgcaccggtccggaattcccgggcggacgcgtgggtccgcacgatgccggccgtcgggccggggagctacccggggcggatcgccgtggtcggtgacctgcgggctcacctacaacaccacctcgacggtggaccacttggtgcgcaaccgccccgacctggtgctcctcctcggcgacgtctgctacgccaacctgtacctgaccaacggcaccggggcggactgctactcctgcgccttcgccaagtccacgcccatccacgagacgtaccagccgcgctgggattactggggaaggtacatggagcccgtgacgtcgagcatcccgatgatggtggtggagggcaaccatgagatcgagcagcagatccacaacaggacgttcgcggcctacagctcgcggttcgcgttcccgtcggaggagagcgggtcctnctcgccgttctactactcgttcgacgccggcggcatccacttcgtcatgctngcgtnctacgccgactacagcaga

SEQ ID NO: 93667 - DNA, 520 bp, Zea mays
  unsure (1)..(520): unsure at all n locations
agantaatatgtgctgacctgacacgaaatggtaatggtatacccgtccggaattcccgggtcgacccacgcgtccgaccagctcttctgttgagaagagctacgagctgcctgacggacaggtcatcaccattggtgctgagcgcttacgctgccctgaggtcctcttccagccatccttcattgggatggaagctgctggtatccacgagaccacctacaactccatcatgaagtgcgacgtggatattaggaaggatctgtatggcaacatcgtcctctccggtggtaccactatgttccctggcattgctgacaggatgagcaaggaaatcaccgccctggctcctagcagcatgaagatcaaggtggttgctcctccagaaaggaagtacagtgtctggattggaggatccatcctggcatcgctcagcaccttccagcagatgtggattgccaaggctgagtacgacgagtctggcccgtccatcgtgcacaggaaatgcttctaattctttgg

SEQ ID NO: 93668 - DNA, 544 bp, Zea mays
  unsure (1)..(544): unsure at all n locations
acggtgntngtccctgcctaggtacgcacgatctaccggtccggaattcccgggtcgacccacgcgtccgaggcagaagcagagataatggacgacgtacatgtctggttcgtctcgctggcctgccttggtggtttgtacatcgccgccatctgctggcggcccctcgcctatctcgcgttgtgcctgcgtgggccgaaggacctgcaccgctacggctcatgggccatggtgactggcccgacctccgggctcggccggtccatggccatggagctcgcgcgacggggcctcaacctcgtcctccttgacctcgacgccaacaacctccaggagacctacgaggccatcaagtccgtccaccccgtgaagataaggactgtggttctagacctctccctcgtcgccacaccagaaggcgacaaggcgatccgacgtctgcgggaggcgatcgaggggctggacgtggggatactggtgaacaacgcggcggtgaacacgcctggcgcagtgtacctgcacgaggcggacatcgagcgctttg

SEQ ID NO: 93669 - DNA, 585 bp, Zea mays
  unsure (1)..(585): unsure at all n locations
ccgggtgagtcgtccctagttgacgataggactagatcgtactcggtccggaattttcccgggtcgactccacgcccgtccgggagaagtaccccaaggtgccataccaagaaatttctaagggccttgcnnttgataggtanntggtcctgataggggggttcttgactnacgccgtatcacagagnngctggttttacctggcnnattggtgttggtgccagcttatcnatggtcttcggcctattattagagtttatgacatnttaatnttctcgatgcaggcttattgatcatatcatcaattcagctgccaagtcaaattatatgtcagctggtcagatatctgttcctattgtttttagaggaccaaacggagctgctgctggagttggtgctcaacactcacagtgttatgcagcttggtttgcacatgttccaggacttaaggttctcacaccatactcttcagaagatgcccgaggcttgctcaaagctgctatcagggaccctgatcctgttattttcctggaaaatgaattgctttatggagaatctttcccagtttctgctgaagtgcttgat

SEQ ID NO: 93670 - DNA, 520 bp, Zea mays
  unsure (1)..(520): unsure at all n locations
cgaataggtgctgttagccctgcaccgctcgttccngtatacncgtccggaattcccgggtcgacccacgcgtccgtgatcgagctctgccaggagctcatcgtgagcagcgacaagaccatcgacgggcgcggagcgcaggggcacatcgtgggcgcgcagatcacgctgcagaacgtgcgcaacgtgatcctccacaacctgcacgtccacgacgccgcggcgcacggcggcggcgcgatccgggactcgcagcaccactggggcgtgcgcggggagagcgacggctacggcgtcttcgtgatggggtccagcgatatctggatcgaccacctgtccatgagcagctgcgcggacgggctggtggacgcggtggaccgctacaccgacatcaccggctgcaacggccacttcacgaggcacgaccacgttatgctgatcggggccagcgacgccgtgttcaaggacagggagatgcacgtcaccggcgacttaaccactttggcaaggggctggtgcc

SEQ ID NO: 93671 - DNA, 523 bp, Zea mays
  unsure (1)..(523): unsure at all n locations
cggtaggctgtggtagtccctgcactcgctcgtagtggtctacncgtccggaattcccgggtcgacccacgcgtccgcccacgcgttcgcccacgcgtccgcgcagcgaagtaaacatgtctgaccgggcaaagatgtggtggcaggcgtacgtggacgagcacctgatgtgcgagatcgagggccaccacctcgcggcggcggccatcgtcggccacgacggtgccgcctgggcgcagagcacggcgttccccgagttcaagaccgaggacatggccaacatcatgaaggacttcgacgagccagggcacctcgcgccgacaggcctgttcctcggacctaccaagtacatggtcatccaaggcgagcctggtgccgtcatccgtggcaagaagggatcaggaggcatcaccgtgaagaagacagggcaggcactcgtcgttggcatctacgacgagccgatgacgcctgggcagtgcaacatggtggtggaaaggctgggcgactacctgctcgaacaggn

SEQ ID NO: 93672 - DNA, 551 bp, Zea mays
  unsure (1)..(551): unsure at all n locations
gtgggtgnctngcccctagttccactancgtactgcctgtaccggtccggaattcccgggtcgacccacgcgtccgcaaagattcattgggagatggtgttgtcagaggaagaatactgatcacaactcggaacgaggaagtggcaacaagcatgaaggcaactatccaccatgttgacaaaatggaccctgagagtgcctgggcattattgtgcaatcaagttgatgcagaatgcaattcggaagagcttgcaacattaaaggatgttgggattaagattgcagagaaatgtgatggccatcctctagcaatcaaggtcattgcaggtatcctaaggtcaagaggcaacagcaaggctgaatgggagatggttctgaacaatgattcttggtccatgtgcccaatccttccagaagtaccacaagccgtgtatgttagttatgtcgatctttcttctcaactgaaggagtgtttccttcattgctctctgtatccagaagaattccctattcagcgctntgctcttgtgcggcgttggattgctgaagga

SEQ ID NO: 93673 - DNA, 544 bp, Zea mays
  unsure (1)..(544): unsure at all n locations
tatgtnnctngttttgttggctagtaagtgatgcttcaccggtccggaattcccgggtcgacccacgcgtccggaagcttttgctgggaaccttgaccagaacagcctgctgggcactttagattctttctctggtggaggcattggccggcttggaatttgctcccttggcattgtaccatttatcaatgcacagattgtgtttcaactccttgcgcaactctacccaaaattgcaagaccttcagcggaaagaaggggaagcaggaagaaagaaggttcttcagtatacaagatatgcttctgttggatttgcaattgttcaggccattggacaagttctttatctccgtccctatgtgaatgatttcagcacagaatgggttctaacatctgtgacattattgacacttggatcggtctttactactttcattggtgaaagaatatctgatctgaaacttggaaatggaacatcacttcttatatttacaagtataatatcatatttgcctgcatcatttgggaggacaagtgcgcangca

SEQ ID NO: 93674 - DNA, 525 bp, Zea mays
  unsure (1)..(525): unsure at all n locations
cggattatgcgtgtgctagtgcctcgcatccgntcgtnantggcatacncgtccggaattcccgggtcgacccacgcgtacggcagcgtctgatctttgctggcaagcagctggaggatggtcgcaccctcgcggactacagcgtccagaaggagagtacccttcaccttgttctccgcctcaggggtggtatgcagatctttgtgaagaccctgactggaaaaaccataaccctggaggttgagagctcggacaccatcgacaatgtgaaggcgaagatccaggacaaggagggcatccccccggaccagcagcgtctgatcttcgccggcaaacagctggaggatggccgcaccttagcagactacaacatccaaaaggagagcacccttcaccttgtgctccgtctccgtggtggtcagtaagtcatgggtcgtttaagctgccgatgtgcctgcatcgtctggtgccctcttcatatggaggttgtcaaagtatctggctgtcgagtcatgagtcgtgtca

SEQ ID NO: 93675 - DNA, 521 bp, Zea mays
  unsure (1)..(521): unsure at all n locations
tgtttnacgctggtgccctagtctagcaagtagtgctctacccgtccggaattcccgggtcgacccacgcgtccggattccgacaccgctgggctcagatgccgtcgccgacgccgccgccgcagcagcagcagcggcagtccggcatgactctctgccgcctccccacggccactcttggccttcccctttctctcccctgtttgctacctcgttcccgcccccgcctgtgcttcgccgcacgtcatgccagggccgtcgccgccagggcttcctcatcctctccatcaccggactcttcattcggttcgcggatggaggagtccgtcaagaagacggtggccgacaaccccgttgtcatctactccaagtcatggtgctcatattgcatggaggtgaaggcgctcttcaagcggatcggtgtgcagccccatgttatcgagcttgaccatctcggtgctcaaggaccacaaatacagaaggtattagagaggctgactggacagtctactgttcctaat

SEQ ID NO: 93676 - DNA, 519 bp, Zea mays
tgtttatgcggtgcgtgtccctcacccgtccgtactgcatactcgtccggaattcccgggtcgaccgacgcgtccgcccacgcgtccgcccacgcgtccgagacccggtcccccaattccaattcgcccctctcgcggccgggctcgcgagacgccgattcggatcccatctcctgctcagagcctcgattcgaccggcggtggcgacgattcgaccgggtcggtagccaggcagaggcagcggaaggagaggatgagcttccaggacctggaggcggggcacgtccgcggggcgccgctcggcggcggccggaggaacggcaggggccccgcggaggcggggggcgccggcgccggcgcgtcgcatgccgtggcgtcgggcgtcttccagatcaacaccgcggttgccacgttccagcgcctcgtcaacacgctcggcacgcccaaggatacccccgaccttcgcgacaggatacataaaacacggtaacacataacacaactagtgaaggatacatc

SEQ ID NO: 93677 - DNA, 523 bp, Zea mays
  unsure (1)..(523): unsure at all n locations
ggtataggtgcgtgccctagcttagcatcgtactgctctacccgtccggaattcccgggtcgacccacgcgtccgcccacgcgtccgcccacgcgtccgcggagaatcggattgctcccgaccgcgattacgccgaggctgtcaagcacaccaactccggtggcagcatggagctgcttgcgctgaatgttcagatataccttcaaatgaacaggacggaccacgcagagaagcagctcagggtgatgcagcagctggacgaagaccacacgctgacgcagctcgccaacgcatgggtcgaccttgtgctgggtggttccaagatccaagaagcgcgcctcatcttccaggacctgtccgagaagtacccgacgacctgcacgattcttaacgggaaagccctgtgctcgatgcacatgggcaacttcgaggacgcggaggggttgctgctcgagtcactgaacaaggacgccaaggatactgagactctcgccaacctcacggtgtgcaacctgaacctggn

SEQ ID NO: 93678 - DNA, 550 bp, Zea mays
  unsure (1)..(550): unsure at all n locations
cagggtgngtagccctagctcagtacagtattgcctgtaccggtccggaattcccgggtcgaccgcacgcgtccgccttgaagaaggttgttctttctgatggtgcagtcgtaacagtgaagggtgctagagctgggagcctccgtttgccgcttgaattaccacttcctctcaaccgtaccacttacaagggtcgcctctcaagcctgatatccatcgcacaagccctgcgtggtgcagcccggtctaatcagaaacccctgctctctcttcgcgttgagggtccagtttccttgtcctcgactccttccatgtctcccaaggacaagctcaagctcaaacggttggccccaggccaagtggagctctcctcacaggcgggggcaatccctgctatcaccgaagacgaggatgaaccacataaccctggattgtggcctcttttgtctctgaatggttcagatggcagcctgcaggggtttgaagagctattggcctcagtacttggaaagaaggcaggcgagaagggtcccttcaagctactgaaggn

SEQ ID NO: 93679 - DNA, 546 bp, Zea mays
ccgggtgagtgcctatgaagtatattggatctgctctaccggtccggaattcccgggtcgacccacgcgtccggctttccaaagccttggtgtggtgtttggggatttaggcacatcacctttatatgtcttcggcaacattttccctcatgaaattgaagacacggaacaaattattggagcactctcgcttgttatttactcccttaccctgattccacttgttaagtacgtgttcattgtcttgagggcaaatgataatggccaaggtggaacatttgctctttactcgttgctttgccggcatgcaaagataaacactattccgaatcagcatagaacagatgaagaactaacaacatacagccgccacacatatgatgagaaatctcttgctgcaaagatcaaaaggtggttagaggggcaccaattcagaaagaatgtcattcttattcttgttctttttggtacttgtatggcagttggagatggaatcctcactcctgcaatatcagttctttctgcaactggaggaatacaagtgga

SEQ ID NO: 93680 - DNA, 545 bp, Zea mays
  unsure (1)..(545): unsure at all n locations
catgctgactgacctagccgactaagnattgctgcaccggtctttaaattcccgggtcgaccgcacgcgtccgcggacgcgtgggcggacgcgtgggcggacgcgtgggcggacgcgtgggctgatcgacaaggtgacggtcaaggcccccggcgacagccccaacacggacggcatccacatcggcgactccagcaacgtgaccatcagcagcaccaccatcggcgtcggcgacgactgcatctccatcggccccgggagcaagatgatccgcatccatggcgtcaagtgcggcccaggccacggcatcagcgtcggcagcctggggcgctacaaggacgagaaggacgtggaagacgtgcaggtgacggggtgcacgatcgccggcaccacgaacggcctgcgcatcaagtcgtacgaggactccaagtcgtcgctcaaggccagcaagttcctgtacgagggcatcaccatggacaatgtctnctaccccatcatcatcgaccagaagtactgccccaacaacatctgcgtcaagtcccgcg

SEQ ID NO: 93681 - DNA, 542 bp, Zea mays
  unsure (1)..(542): unsure at all n locations
acgctgctgannccaattcgacngatgcactaccggtccggaattcccgggtcgaccgacgcgtccgcccacgcgtgcgcccacgcgtgcgcacacgcgtctgctgacccctttacattctctctctcgggcacgtattcgccggcgtggaatttgctccctcggcattctaccatttatcaatgcacagattgtgtttcaactccttgcgcaactctacccaaaattgcaagaccttcatcggaaagaaggggaagcaggaagaaagaacgttcttcactatacaagatatgcttctgttggatttgcaattgttcaggccattggacaagttctttatctccgtacctatgtgaatgatttcagcacagaatgggttctaacatctgtgacattattgacacttggatcggtctttactactttcattggtgaaagaatatctgatctgaaacttggaaatggaacatcacttcttatatttacaagtataatatcatatttgcctgcatcatttgggaggacagttgcgcaagcatttt

SEQ ID NO: 93682 - DNA, 543 bp, Zea mays
  unsure (1)..(543): unsure at all n locations
tgggtnntnaatnnccgggtggcgacgcactgatcgtaccggctctaattcacccgtcgagccgcgcgtacggaaacgcttgctcggaagcattgaccaaagcttcagctggggctttaaagtctgtctctagtcaagctcttgggcggctgtggaatatgctgactcggcattgaaccattcatcaatgcacacattgtgtaccaactccttgcgcatctctacccaaaattgcaagaccttcagcggaaagaacgtgaagcacgaagaaagaaggtacttcaacatacaatatatgcttctgttgtatttgcaattgatcatgccattgtacaagttctttatctccgtccctatgtgaatgatttcatcacagaatggctactagcatctgtgacattattgacacttggatcggtctttactactatcattgaccaaagaatatctgatctgaaacttggaaatggcacatcacttcttatatttacaagtataatatcatatttgcctgcatcatttgagaggacagttgcacatgtg

SEQ ID NO: 93683 - DNA, 545 bp, Zea mays
  unsure (1)..(545): unsure at all n locations
gatggtgntngnaaatagaacagtataggatcgctcaccggtccggaattcccgggtcgaccgacgcgtccgggctggttcgtggatgccggcgccacaggctctcctgctgtcgctgctggtcgccgtgctaggggtggccgccgatgtcgccaacgccggccacgccaagcccctgacgcctggcgggcgcgtggtacaccacaaccacggcaagttcacggccgggccgtggaaacccgcccacgcgaccttctacggcgggcgggacgggtccggcaccacggcgggcgcgtgcgggtacaaggacacgcgcgcgcaggggtatggcgtgcagacggtggccgtgagcacggtgctgttcggtgacggcgcggcctgcggcgggtgctacgaagtgcgctgcgtggacagccctagcgggtgcaagcccagcgcggcgacactggtggtgacggcgaccgacctgtgcccgtccaacgaccagcagtccgcggacagcggcgggtggtgcaacccgncgcgggagcacttcgacctcagcc

SEQ ID NO: 93684 - DNA, 523 bp, Zea mays
aggttttggctgtgacccctcccaagatcgtaatagtatacccgtccggaattcccgggtcgacccacgcgtccgcagcgtggcgtttgtcaacaacaaattcgtaggatgtgggcacgggaccaagatgaacaaggcgtggacgctcgagaagcccatggacctgaagaagggcgtgaaccacgtcgccgtcttggcatcgtcgatgggaatgacggacagtggcgcttacatggagcaccgtctggccggcgtggacagggtgcagatcacgggcctgaacgcgggcacgctggacctgacgaataacggctggggccacatcgtcggcctcgtcggcgagaagaagcagatctacaccgacaagggcatgggcagcgtcacctggaagccggccgtgaacgacaggccgctcacctggtacaagaggcacttcgacatgccgtcgggagaggacccggtcgtgctggacatgagcacgatgggcaagggcatgatgttcgtcaacggccaaggcattggc

SEQ ID NO: 93685 - DNA, 551 bp, Zea mays
  unsure (1)..(551): unsure at all n locations
tacggtnnnntngtccctagtncagtacagnactgctcgtaccggtccggaattcccgggtcgacccacgcgtccgcggacgcgtgggcggacgcgtgggcggacgcgtgggcggacgcgtgggcggacgcgtgggcgcgtgcgtacattaatctaagcgatcttcatccagccttctgctctgctccctcgaaatggaggcgacgagcaaggcgatggcttcaggcctcctcgttctgctgcttctcatcaacacaggctttgtcctgcccgtccattccgaggactgctgggccgacacccgcgtcatctgcaccaagacgcacaactgccgggacgacacttgcgcggggcgcggcatgccggacggccgctgccactgggagttccccaacctggtgcccttctgccagtgcctgcgccccaactgccactagtccgggcgcctcggattggctcacttcgccggcgatgatggatggtgcccaactgcgactgcccagtctgctccattcgttgttgtttaaggcataatatataaactgccaaat

SEQ ID NO: 93686 - DNA, 544 bp, Zea mays
tatatgactgtctatgataactatagtatgcttttccccggtcgaattcccgggtcgagacagacgtgcgcgcgggaaagtagtcaggagaggcgtttccctcgcaatcgaccatcacagatcaaatcgctgcgactagctagggtttcgtcgcctcatctctcgtcgatccatcgatggcgtccgagggcgacaacaagaggatgatcacgctcaggagctccgacttagaggagttcgaggtggaggaagcggtggccatggagtcgcagactctccgccacatgatcgaggacgactgcgccgacaacggcatcccgctccccaacgtcaactccaggatcctctctaaggtcatcgagtactgcaacagtcacgtccacgccgccgccaaacccgctgactccgctgcctccgagggcggcgaggacctcaagagctgggacgcgaagttcgtcaaggtggaccaggctacgctcttcgacctcatcctggctgccaactatctgaacatcaagggattgctggacctgacctgccagac

SEQ ID NO: 93687 - DNA, 548 bp, Zea mays
tatggtgactagcatttgaatttatagtatagctctcccggtccggaattcccgggtcgacccacgcgtccgctctcttcttccccttcctcggcggctttccaccattcaggttcagactggaggggccttcgtgccaatctccagtgcgtgttcttcagtggaggcgccggccggactcgcgatggagcgggacggccagcagacccgccgcgacaagctcatcatcgatacggatcccggcatcgatgatagcatggctatcctaatggcgttcagagcacatactctggaaatcattgggctcacgaccatattcggcaacgtcgacacagaaggcgcaacatgtaatgcactattgctgtgtgagagagcaggacatcctgaggttccagtagcagagggcagccacgagcccctaaagggaggaaagccccgtattgctgattttgttcatgggtcagatggcattgggaatctgtttcttcctgcaccctctgctaagaaggttgaggaaagtgctgctgatttcatggttaataaggtct

SEQ ID NO: 93688 - DNA, 546 bp, Zea mays
  unsure (1)..(546): unsure at all n locations
gcggnnntnaacatagcagctgacagaaatgcttgcccggtccgtaatattcccggntcgacggacgcgtgcgcgcgctcgtcgccggcgggtcgtgcgggcccccgaaggtgccacccggccccaacatcacgagccaactacaacggcaagtggctcaccgctagggccacctggtacggtcagcccaacggtgccggcgctcctgacaacggcggtgcgtgcgggatcaagaacgtgaacctgccaccctacagcggcatgacggcgtgcggcaacgtccccatcttcaaggacggcaagggctgcggctcatgctacgaggtgagatgcaaggaaaaacctgagtgctcgggcaatccagtcacggtgtacatcactgacatgaactacgagcctatcgctccctaccacttcgacttgagcggcaaggccttcggctccctggcaaagcccgggctcaacgacaagattcgccactgcggcatcatggacgtcgagttcagaaaggtgcgatgcaagtaccccgncgggcagaggatcgtg

SEQ ID NO: 93689 - DNA, 551 bp, Zea mays
  unsure (1)..(551): unsure at all n locations
tatggngnntngacccacgtagatgattgcatctgctctaccggtccggaattcccgggtcgacccacgcgtccgcccacgcgtccggtgatttgaaataattgggaataaatagttcgtgaatccctgaagcgtgcgatatatatattcctgccaagataaaggtaatggagtcgtcacgcaggttccagccggccgtcatcctgcttctcctgctcattgtgtccaccgatatggcacaggcaagggaatgcgagaagtacagtgagcgatttgttggggcatgcatgatcgcagacaactgcgccaatgtgtgccgcggtgagggcttcttggccggcaggtgcagcaccttccgccgccgctgcatctgcactaggcagtgctaaacaagatcgctcgatcgctcgccatgcatcgacaacctattcttaataacgttcattatctcgttcttatttatgacgaatgtcatgtatgttctggtgactgtcatgtatattctgatgactgtcatgtatcttgttcatgtatgctcaaggttcattatn

SEQ ID NO: 93690 - DNA, 546 bp, Zea mays
  unsure (1)..(546): unsure at all n locations
agggnnnnnntcncccacnctcaccgcgattaacacatccggttcagatttcccgtcgacacacgcgtccgcccacgcgttctcggacaccttaactaacttttaataaatagttcgtgaatccctgaagcgggcatatatatattcgtgccaagataaaggtaatggagtcgtcacgcaggttccagccggccgtcatcctgcttctcctgctcattgtgtccaccgatatgacacaggcaagggaatgctagaagtacagtgagcgatttgttggcgcatgcatgatcgcagacaactgcgccaatgtgtgccgctgtgagggcttattggccggcaggtgcaacaccttacgccgacgctgcatctgcactatgcagtgctaaacaagatcgctcgatcgctcgccatgcatcgacaacctattcttaatacacgtcattatctcgtacttatttatgacgaatgtcatgtatggctctggtgactgtcatctatattctaatgactgtcatgtatcttgttcatgtatgctcaaagatcatt

SEQ ID NO: 93691 - DNA, 550 bp, Zea mays
  unsure (1)..(550): unsure at all n locations
catgtgnctagattatgaggagttgtatagtattgctgtaccggtccggaattcccgggtcgacccacgcgtccggtggaggacttaataccaaaagcagttatgcatttcttggttaatcatacaaaaagggcgctgcataattaccttataacaaaactttatagagatgatcttttggaagacttgctcaaagaacctgatgagataaccataaagaggaagcagatacgtgaaaatctcaaggtccttcaacaagcttacaaaactttggacgagataccacttgacgcagaggcagtagagaggggtggatactccctggattctgatgcgattggtctgccaagggcccatgggctttcttcatccctccacggattcaacgatggaagctcaccatattcaaccccgaagcagtcaaggtcaaggaggtcaaaccattctggcgagcagcttcctttcaaccccaatatgagtggcaatggtttttgatgccacccttctacgttacaagacggccaaccagattggttatggaaccaaccaa

SEQ ID NO: 93692 - DNA, 514 bp, Zea mays
  unsure (1)..(514): unsure at all n locations
aggagaggtgctgtgcttgccacgttatnagtggcatacccgtctggaattcccgggtcgacccacgcgtccgatcacaataagatggcgtgtatagacaatgcaatgagagccttgttccttttagcgctcttgtgtggcgtgcatggtgagaaggcaaagtcaaaggacaacgatgcaaaagcgttcgggcccggtgggtccttcgacatcaccaagttgggcgcctgcggcaatggcaagacggatagcacgaaagctgtgcaggaggcgtgggcattaacgtgcggcggcaccgggaagcagacgatcctcatccccaagggcgacttcctcgtcggaccactcaacttcacaggcccatgcaagggcgacgtgaccatccaagtgaatggcaatctgctggcgaccacggacctaagccagtacaaggatcatggtaattggatcgagaatctacgcgtggacaaacttgtcatcaccggcaagggaaaactcgactggcaggggccat

SEQ ID NO: 93693 - DNA, 527 bp, Zea mays
  unsure (1)..(527): unsure at all n locations
tgattcgtctnntntcngctgcnatagacgtagatcgcaattccgctggaattcccgggtcgacccacgcgtccgcgacaagatggcgtgcacagacaatgcgattagagccttgttcctcctggtcctcttctgcgtcgtgcatggtgagaaggaagagtcaaagggcatcgatgcgaaagcgtccgggcctggtgggtccttcgacatcaccaagttgggcgcctccggcaatggcaagacagacagcacgaaggctgtgcaggaggcatgggcatcggcgtgcggcggcactgggaagcagacaatcctcatacccaagggcgacttccttgtcggacaactcaacttcacaggcccttgcaagggcgacgtgaccatacaggtggatggcaatctgctggcgaccacggacctaagccagtacaaggaacatggtaattggatcgagattctacgcgtggataacctggtcatcaccggcaagggaaaccttgaacggcaaggcccaaccgtgtggatcaagn

SEQ ID NO: 93694 - DNA, 534 bp, Zea mays
  unsure (1)..(534): unsure at all n locations
ggtaaatatgcaggancctagccatanatgcatgctctaccggtccggaattcccgggtcgacccacgcgtccgccggttccctcctctcggcggcggctcatgtccctctccatctccggcgtggcgcttggcgtctgacctcaacaagcaagaaagcaaatggcaggcggcagggttgcacatgccaccctcaagggcccgagtgtggtgaaggagatcttcattggactgaccctgggtctgatcgcgggaggcatgtggaagatgcaccactggaacgagcagaggaagactaggtccttctatgacatgcttgacaagggccagatcagcgttgtcgtcgaggagtaaagagttcttcccagttattttcaaagaactctctcgagagcatgacaaagtgattgcttgctgtggagatttgtcctggaaataagcccaaccatttgggaacaccagattttggcgaattttnctttccttttgatgaatatttgagcacgttcatgtgaaatcccaacattttggcttt

SEQ ID NO: 93695 - DNA, 559 bp, Zea mays
  unsure (1)..(559): unsure at all n locations
tgttatttgtaaagagnatattatttgaagggtcaatcacaggtacgcatgctgcaccggntntcggaattcccgggtcgacccacgcgtccgcggacgcgtgggcgaactaatatatagataatcgaaatcgaaaagaactgtcttttgtgtatactttccccgttctattgctaccgcgggtcttatgcaatcgatcggatcatatagatatcccttcaacacaacataggtcatcgaaaggatctcggacgactcaccaaagcacgaaagccagttagaaaatggattcctatttgaagagtgcctaaccgcatggataagctcacattaacccgtcaattttggatccaattcgggatttttcttgggaagtttcgggaagaaattggaataatatcgattcatacagaggaaaaagttctctattgatgcaaacgctgtacctagaggatagggatagaggaagagggaaaaatcgaaatgaaattaattaagaataaagccaaaaaaattagtcgaagatttaagaacccagattcaaaatgaataaaaggag

SEQ ID NO: 93696 - DNA, 562 bp, Zea mays
  unsure (1)..(562): unsure at all n locations
tgtaataatataatggatgttgntataatgaaaaatgaagccacgcactgacgtaatcctcgtccggttcggaattcccgggtcgacccacgcgtccgcccaacaccacctcgcctgcgatctccgtagcctccgtcgcgtcgagcatcgatcagggcggcctactgcggaaagtacaaggatgagctcatcaagaatgctgcctacattggcacccctggcaagggtatccttgctgctgatgagtccactggcaccattggcaagcgcctttccagcatcaatgtcgagaacgttgaggagaaccgccgtgccctccgtgagctcctattctgctgccctggtgctctccagtacatcagcggtgtgatcctcttcgaggagaccctgtaccagaagaccaaggatggcaagccttttgttgatgtcctcaaagagggaggcgtcctccctggcatcaaggttgacaagggcaccattgaagttgttggcactgataaggggaccaccaccccaaggcatgaccacctttggaagcgctgtgccaaatacttctaaggcg

SEQ ID NO: 93697 - DNA, 516 bp, Zea mays
aggagacgtgctgtcatggatgaggagtatattgtatctgctctaccggtccggaattcccgggtcgacccacgcgtccgcctgcacctcagaggggtgggggaagatacccttcgggccactgcgcagcgacgcgattagcgtcgagccccctatcgcggggttaccggtgatctcgtccgctcccagccggatacctcgttccattcaaaggcgcccctggcgtgggtgtctaccgaaggcgatccatacttcattctcgacaacgtcaacgagcgagatgtctgggctgagttccaggcacaggaccatttggcctagaggagcgccgaagtggccaacctgacgtcccggtgcaagggactgaaggaggagggtgtagccgaccgcaaggaggcctgtcgactgagggctgaggtccttggtctgaaggcagaggcagaccaccgtgaggaggtgctacggtgggcgcaggagggccttcaagcggtgacggaagaacgtaacttcctcgcc

SEQ ID NO: 93698 - DNA, 559 bp, Zea mays
  unsure (1)..(559): unsure at all n locations
tgtggtattgtntatgatagtgntattatgtattaaattaagctacgtatatacagtaatgcttctaccggttcggaattcccgggtcgacccacgcgtccgcgatcacaataagatggcgtgtatagacaatgcaatgagagccttgttccttttagcggtcttctgtgtcgtgcatggtgagaaggcaaagtcaaaggacaacgatgcaaaagcgtccgggcccggtgggtccttcgacatcaccaagttgggcgcctccggcaatggcaagacggatagcacgaaggctgtgcaggaggcgtgggcatcagcgtgcggcggcaccgggaagcagacgatcctcatccccaagggcgacttcctcgtcggaccactcaacttcacaggcccatgcaagggcgacgtgaccattcaagtgaatggcaatctgcttgcgaccacggacctaagccagtacaaggatcatggtaattggatcgaaaatctacgcttggacaaacttgtcattaaccggaagggaaactttacgtgcaaggccacacccgtggaacaataa

SEQ ID NO: 93699 - DNA, 562 bp, Zea mays
tgttatttgtaattatgtatgaattacttatgcagttcctgccattgatgtatccttcgtaccggttcggaattcccgggtcgacccacgcgtccgcggacgcgtgggcggacgcgtgggcggacgcgtgggcggacgcgtgggcggacgcgggggcagaatggcaaacatggaagcgacacaggcgcctacgacgctcaaggaaggttcgttcccgcgaagctggacgagatgttcaccaagcacgccaagaccgtaccgaacgctctgacgaaagacgagctcgacgagatgctcaaggataaccgggagaagatggacgtcgcaggatggctgggagccaagtcggagtgggagatgctgtacaagctagccaaggacaaggacggccgcctgtccaaggacaccgtcagggccgtgtacgacggatccctcttttaccagctggcggtgcaagggaaggaaggctgaatcgttaaccttaatttcagtaatcaattacaagcaacgtttttgtttggcaggtctgaaagaaatgccgtgtaggctttgttaaaaaaac

SEQ ID NO: 93700 - DNA, 528 bp, Zea mays
  unsure (1)..(528): unsure at all n locations
tgaatatagagagncatcgtattacagtattgctctaccggtccggaattcccgggtcgacccacgcgtccgaagaaacaacatgactgacagcgacgatgatgccacagctgcgtagcctcgtcacgcgggtactcgtggccacggccatagccgccgctcccggcgttgggtttgtcgttaccggccgcatctactgagacaactgacgagccggattcgagacaaacgtgtcccacgccatccaaggctcgactgtggagatggagtgccgtcaattcgagtcgcaacaggtccacgacaaggcggatgcgaatacgggccccggctgctggtacaggatggagatcagcggcgaccaccaagacgagatctgcgacgtgcgcctgctcaagagccccgaggcggactgggccgagatcgaccacttccgcgaccgctgccgcataccgattaaccgctacgaccgcatcaagcagaacggcggtcgtttagccaacccataggctttctccgcaagagggcctt

SEQ ID NO: 93701 - DNA, 529 bp, Zea mays
  unsure (1)..(529): unsure at all n locations
gttatgtgggtgtccctgcnatgatagtcatgctctactcggttcggaattcccgggtcgacccacgcgtccgctggagcatcctctacgtgctgaacgtgatctacagcctcctgacgggcaggctggtgcgcgagaaggtcgacccggcggtgcagcgggtggtccgcagccagatgaacgcggtggactcgtcgccgttcagggagtcgccggacctgttcgaggtggaggccaccaacggcatgccgcgggcgtccatcgacaagctccccgagtcgtggatcaccgaggagtacaggcgcgacgccgtcggcgacctctccggctgctccgtctgcctccaggatttccaggtcggggagaaggtgcggagcctgccggactgctggcacgtgttccacgtgccgtgcattgacggctggctcatcaagcacgggttctggctggtctgcatgagggaactgtatgcggatcgaccgggctacgccctttacgatgttcttttctgggatcgagccccttattt

SEQ ID NO: 93702 - DNA, 519 bp, Zea mays
  unsure (1)..(519): unsure at all n locations
cgtnntaagtggtgtccatgaaggaggtgtatagtactgctctaccggtccggaattcccgggtcgacccacgcgtccgtttttttttaaacaaaacaaaactggctctgaacaataagccctgaatcatggtcgcattcgctacaacaggtcccgcatcgatgcaacatgtcctgattcttaaaaggaacatgttgtcatccacacaactacaaatccgtactatgaaaatacatttctaattagaccgaggaaaccatgaagatggatggaagcagaacacccaaggagaccaaaagggagaccagcaaggcaggtccgttcgaggtggctgaagccgaaccagccggccggccgcctgaaccagtctgcggggtagcagccttggagcccgtccccgaaagcatgtctctgaaccagtacgccgagtccttggggtaccgcttcagcgtcgcgaagtcgacgtagacgatgccgaacttggacgtgtagcccgacagccactcgaaattgtccaag

SEQ ID NO: 93703 - DNA, 532 bp, Zea mays
  unsure (1)..(532): unsure at all n locations
gggaattataacgaancctagctatgactgaatgctgctaccggtccggaattcccgggtcgacccacgcgtccgcccacgcgtccggttctctgttaccttagataatgctttttctaattcaactgccatgcgcacattgtcacctatgcttgctggttatttgggtgctgatgttgatccaacagataccagtaacaaaacttatagtgtgcttcatcagcgttgtgcatgtcacattattaacttgatagtgaagtgtgggttgaaaaggcttaaggattatttagatgtgtttaggactgctattaatttcttaaactcttctaaccagagaattggttcatttagtaattactgcaaagcaaaaggttgtagacctagaaaatttggtttaaacatggatgttagatggaattcaacttatcttatgctaaaacatctcttgccttataagtctggggtttctgtgttcaattatacacactatgggtataccttactgaatgaacaacatttggatgttactgaa

SEQ ID NO: 93704 - DNA, 561 bp, Zea mays
tgtattatataattgatgttgtattataaataggtgtcctagctagatagcacagctgctaccggtccggaattcccgggtcgacccacgcgtccggccccgggacctccaaggtgaacatcaccggcgtgacctgcggccctggccacggcatgggcatcggcagcctagggcggtacaaggacgagaaggacgtcacggacatcaacgtcaaggattgcactcttaagaagacgatgttcggcgtccgcatcaaggcgtacgaggacgccgcctccgtgctcaccgtctccaagatccactacgagaatatcaagatggaggactcagccaaccccatcttcatcgacatgaagtactgccccaacaagttgtgtactgccaacggcgccttcaaggtcaccgtcaaggatgtcaccttcaagaacatcaccggcaccttcttcaaccccgaagccgttagcctgctctgcactggcaaagtgccatgcaccggggttaccattggatgacataaacgcgaatatacggggacccacaccaagaacatggtttatggcg

SEQ ID NO: 93705 - DNA, 534 bp, Zea mays
  unsure (1)..(534): unsure at all n locations
ntgtatataaagaagccacgtaattacagtattgctgctaccggtctcggaattcccgggtcgacccacgcgtccgcggacgcgtgggcggacgcgtgggtgcgcttgagtcgaccaacgttgagaatgcattggcagaagtcctagctcagatctaccgtattgtgagcaagagagcagttgaagcaggtgaagatgcagcatctgggcctggcaggggcgagaagataaacataaaggatgacgtctcggcagtgaagaagggtggctgctgctctagctgagctgccgtgctgtaatttttttttgggagttgtgggatgtagcttatgttatggcattttcagcgactggaaattggtagtggcatttagcagcctctattacctagagaggtaattgtcaaactgaaaaaaaaaactgaaggttagatcagtttagagctctggtactgtattgtggatccggcaataggcatagtattggtttttggtttaaaaaaaaaaaaaaaaaggctggcgctttagaggattc

SEQ ID NO: 93706 - DNA, 561 bp, Zea mays
  unsure (1)..(561): unsure at all n locations
tgtgattatgaattatgtatntatttgatttaggtggcccacgaaatgattgcattgctctaccggtccggaattcccgggtcgacccacgcgtccggtcatctcctccaccaccaccaccaagctcaacaacagccagctcgcgaaaataatggagagccgcagcatggcatcatcggccgcgctcttggtgctagccctcgcgctagtggcggccaccgccccacaggtagcggaggcaaagaagaagagagcggcggagagcggcgaggcggcggaggcgaagaagatccaggacgacttctgctcgacgctgtgcgagggcaagaaggggacggacctggtcgtgtgcaaggagtcctgcgctctctcccagcagtccaacctggtgctgtacggcaggatccagtgcaagggcaagtgcaccgagcagaagggcatcacggcgccggccatgaaggtctgccaggaagagtgcgacaaggcgtacgtggtgaaggctgccgaggtcaccaaagcctgaaagttacctgtgccaaagggaaaaaaccgtgccttaac

SEQ ID NO: 93707 - DNA, 533 bp, Zea mays
tgatatgatggtgtggccctagccatgactgcattgctctaccggttcggaattcccgggtcgacccacgcgtccgatgcgccatccttgggagcatgtgttggtgatgggtctcggtgcagtatttgtgaacgagctggtaaaatttgacgagaagctcaaggaggacctcgacaagatgcttgagcgcgccaggctagccaacgagcaacgctacattgatgatgatgaatagctgttcagatttgtttgtcagtgacctgtatttttttgcaacatgttgtcagtacacatggtcaggactgtggatcccccatgacttagttgttgcctcagcttccacatttcaactgtggccttgtaataaaatgtcgttgcccaatggatctgatggatcacaattgtaagctacaaattatgggctttgaatatgatcgcttactttctctaaaaaaaaaaaggtgtacattgttgaagtaaatccaattatgatattctattaagtatttatgacatatggatttaaatttgag

SEQ ID NO: 93708 - DNA, 532 bp, Zea mays
gtaataatggacctagctttattgtacgctcgtaccggtctcggaattcccgggtcgacccacgcgtccgcccacgcgtccgcccacgcgtccgcggacgcgtgggatcgctgacgcgaacgtcgggggggccacctgcggctggaactcggtccagcctgtcttgtagtagccgtagagcgggttcgcgttggccgcctgcgcgcagacgaggcgcggcacgcggtccacgagcccgaggacacggcacatctcgaaccccttgtagaaggcgtatatgttccccaggttgcctcccggcacgatcacccagtcgggcacctcccagtcgaactgctgcagtatctcgatggccgccgtcttctgcccctcgaggcggagggagttgagcgagttggcgaagtagataggcagctcggcggtcaccttcctgatgagccgcatgcacccgtcgaagtccgtgtcgagcgagagcaccgtggcgcccgttgcgataggcttgattagctggttcaacgagatgccggttgcg

SEQ ID NO: 93709 - DNA, 520 bp, Zea mays
  unsure (1)..(520): unsure at all n locations
agtatgagcgcttgngcatgataagaagangtacgcactgctctaccggtccggaattcccgggtcgacccacgcgtccgcccacgcgtccgcgacaagatggcgtgcacaaacaatgcgatgagagccttgttcctcctggtcctcttctgcatcgtgcatggtgagaaggaagagtcaaagggcatcgatgcgaaagcgtccgggcctggtgggtccttcgacatcaccaagttgggcgcctccggcaatggcaagacagacagcacgaaggctgtgcaggaggcatgggcatcggcgtgcggcggcactgggaagcagacaatcctcatacccaagggcgacttccttgtcggacaactcaactttacaggcccttgcaagggcgacgtgaccatccaagtggatggcaatctgctggcgaccacggacctaagccagtacaaggaccatggtaattggatcgagattctacgcgtggataacctggtcatcaccggcaagggaaaccttgacgggc

SEQ ID NO: 93710 - DNA, 534 bp, Zea mays
  unsure (1)..(534): unsure at all n locations
tgatttagcatgtccacgtattacagtatgcttcaccggttcggaattcccgggtcgacccacgcgtccgaaccagattcaacgatggaatataggacgaaatttataagagctaagtatgagacacaggattttttgaagccaagtttgcgcatttcatcgagatcatcttttaaatctaccaattctgtgaagagtgtagatagcaatttctctagcacttcaaggaaggatatctctgaagatacaagagaatttgttggagagctgaatattacagtcgtgaaaggtactaacttggccgttagagacatgctaacaagtgatccatatgttgttttaacactcggagggcagaaagctcaatcgacagttaaaaaaagtgatctntaatccgtatggaatgaaatgcttaagatttctgttcctcgaaattacggaccttctaaacttgaagtgtattaacatgatacgttcttaggcgatgatttcatgggggaaagccagattgatcttccaaccatgatctcagcc

SEQ ID NO: 93711 - DNA, 534 bp, Zea mays
  unsure (1)..(534): unsure at all n locations
tggaatgaagcgtagcctagctatanatgaacgctctaccggtctcggaattcccgggtcgacccacgcgtccgcccggcctncacctgaccgctaccaccacccgggacgtcttccatggcctgctcatagagtaagctctatctcaccgcagcaactcctcattacaatccttcaagagagcagcactacactacactacattagagagaggtcgagcgcccctcctccgatccgccggcccgccgagagctagctgctgatcggtcgaggagagtcatggcgacgtcgacgatgcgcgttgccgccggcgtgctgctggtcgtgtcggcgctggcgaccttggcccgggccgaggacccctacctgttcttcgagtggaaggtgacgtacgggaccaggtccctgctgggagtgccccagaaggtcatcctcatcaacggggaagttccctggccccaggatcaactggttcttcaacaacaacatcgtgggcaacgtttttaaacaggtctgaccttcgcttcttttaaa

SEQ ID NO: 93712 - DNA, 539 bp, Zea mays
  unsure (1)..(539): unsure at all n locations
ggtatatagtgtgaccctagccatgatagcatgcggctaccggtctcggaattcccgggtcgacccacgcgtccggctgctttacgaacatcatttaagactgttgttgctgtttggcataagctcagccacgcgaatgttacaaagtttgttggtgcatctatggggaccacagaccttaagattccatcaaacaattccaatggtgctgcacgtacaaatttgccagcaagagcatgttgtgttgtggtagagtatcttgctggaggaactttgaagcaatatttgataaagaatagccgacggaagcttgcttataaagttgtggtccagcttgcattggatttggccagaggattgagctatctgcactccagaaagattgtacatcgggatgtgaaaagcgaaaacatgctgcttactccacagagaaaccttaagattgncgaattcggggttgctcgtgttgaagctcaaaatccaaaggacattactggtgcaacaagggcactttgggtatatggcttcacaaggttttt

SEQ ID NO: 93713 - DNA, 529 bp, Zea mays
  unsure (1)..(529): unsure at all n locations
tgtagatacagtactagtaatatagtnatgctgctccggtccggaattcccgggtcgacccacgcgtccgcccacgcgtccgaaatacttcagaatctctgtggaggtccaaacattgtgaaattgcgtgatattgtcagggatcagcattcaaagactcccagtttgatatttgaattcgtcaacaacacagacttcaaagttttgtaccccacattgacggattatgacatccgctactacatatatgagctactcaaggcccttgattactgtcattctcaaggcatcatgcatcgagatgtcaagccccataatgtaatgatagatcatgagcttcgaaaacttcggttgatagactggggcttagctgagttctaccatccaggcaaggaatacaatgtccgtgttgcatcgaggtatttcaagggacctgaactccttgttgatttacaagactatgattattctttagacatgtggaagcttggttgcatgtttgctggaatgatatttcgcaaggaacccc

SEQ ID NO: 93714 - DNA, 536 bp, Zea mays
attatatatggcgtgatcccagctacgacagccacgctcgtaccggtctcggaattcccgggtcgacccacgcgtccgcaaaccacctcggccggtcggcccacgggccacgactcaaaaaaggatcaaggtgggggaaacaaaacacaaggcggcgtccgcagcttccccactccacgttccgtgtttccgactccggtgactccaccaccagcaacccgtgcagcgagcgcactccgaccatcgccatgtcgaggcgcggcgactgggtctacgagaacaacggcgggacctgcgtggccatcgccggcgctgattactgtgtcgtctctgcggacacccgcctctctgtaggatacagtatcctcacgcgtgatcactccaagatctgcgacctggctgacaaatgtgtactggcatcttctggctttcaaggtgatattaaggctctgcagaagaacctagctgccagagaattgctgtaccaacaccaacatatattaaagattagcttgcccgccatggcacaggttctt

SEQ ID NO: 93715 - DNA, 524 bp, Zea mays
  unsure (1)..(524): unsure at all n locations
tgtnntaggtgcgtntgcccctgcattcgctcggtacagcactgctcgtaccggtccggaattcccgggtcgacccacgcgtccgcgtcggtcgaggagtagggttctagcgcctatctggtttctccctgcgccgccggcgccggcgtggacaaccggagcgtagtgggaggggatgatggagggaggtagccgcgcggatgggcggaatccgaaccagctccggccgttcacctgcaccgggaacccgctccaccgcgcccacggctccgcgcggtgggcgcagggcgacaccgtcgtgctggccgctgtgtacgggcccaagccgggaacccggaagggcgagaaccccgagaaggcctccatcgaggtcgtgtggaagcccaagaccggccagatcggaaggcaagaaagggaatatgagatgacactcaagaggacgttgcagagcatctgcttgctcacagttcatcctaacaccaccacctctgtcgtgcttcaggttgtgggtgatgatggttctt

SEQ ID NO: 93716 - DNA, 518 bp, Zea mays
  unsure (1)..(518): unsure at all n locations
gttnatggtgcgttnccatgatagagaggtgattgcactgctctaccggtccggaattcccgggtcgacccacgcgtccgcccacgcgtccgcaaggttccaggagggaatcaaggccttctcaggaagcccaattgttggggagatacgcggtctgggactgatacttggaactgaatttgtcgacaacaaatctccaaatgatccatttccagctgaatggggtgttggttcgatatttggcgcggagtgcgagaagcgtgggatgctcatcagggtggctggggacagcatcatgctgtcacccccgctgatcatgactcccaatgaagtcgaagaaatcataagcaaattcggcgatgctctgaaggccacggaggaacggattggagaactgaaatccaggaagaattagccgatgctgctggttgtaacgacggtgaggatggtgatggcagcagtatattttcaaactttatttcagtaaagtgctgggctggaaccttgtagtcggttgg

SEQ ID NO: 93717 - DNA, 520 bp, Zea mays
  unsure (1)..(520): unsure at all n locations
gtnnaaagtgctgtcatgcatgagaggtgattgctactgctctaccggtccggaattcccgggtcgacccacgcgtccgccgcgcgacgcaaaaccctagcccatccaccgatccttgtcatggcggccaccaccagccaggcgagcctcctcctgcagaagcagctcagagatctcgccaagcacccggtggatgggttctcggctgggctggtcgacgatagtaacgtattcgagtggcaggtcaccatcatcggcccgcccgataccctatatgatggagggtacttcaatgcaataatgagcttcccagaaaattacccaaacagcccgccatcagtcagatttacctctgaaatgtggcatccaaatgtttattcagatgggctggtgtgtatctctattcttcatccacctggtgaagatccaagtggttatgagctcgcaagtgagcgttggacacctgtgcatacagttgaaagcatagttctgagcattatatcaatgctctctagtccaa

SEQ ID NO: 93718 - DNA, 537 bp, Zea mays
  unsure (1)..(537): unsure at all n locations
ngtagagagagaggctacgtaatgacggcatgcttcaccggtccggaattcccgggtcgaccgacgcgtccgtgaacgtcttgggcggggaggaggacgacagggacgaggggtggcggcggtggtcggtgctggtggcgacggtgtggatccaggcgctgacggggaccaacttcgacttctcggcctactcgtcggcgctcaagtcgtcgctgggcgtctcgcaggaggcgctcaactgcctggccacggcgtcggacctgggcaaggcgctggggtggtcgtcgggcctggcgctgctccacatgccgctccacgccgtgctcatgctgtccgccgcgatggggctcgccgcctacgccgcgcagtactactgcctcgtgttcgccggcggcgctgatgcgggagcgggagcgtcgtcgtccgtgggcgtnccctaccctctggaaagtgtcactttggtcgcacacggtgggcttggtgctgcaattgggcccatgcccaaagggctctttccccttgtgggaacaaacaaaa

SEQ ID NO: 93719 - DNA, 534 bp, Zea mays
  unsure (1)..(534): unsure at all n locations
gtgagttatgggtggnccccagcctcgaacgcatgtccgtaccggtccggaattcccgggtcgacccacgcgtccgcccacgcgtccgcgggaactggaggaactgagcggtggcgggcgccgtgatggcggcggcggctacggcggtggcggcggctacggtggtggcggcggcggctacggtggtggtggcggcggctacggcggtggcaaccgtggcggcggctacggcaactccgacgggaactggaggaactgagcggtggggcccgcgcggccaagttatcctgttcgctaccgtgttgtttaccctagtccagagtgtttatcttcgttcgtctcgtgtttgttgttgcccatctgtgtttttgattgaaggtcgctctgtgtcagttgttagtgctgtgttcatcctcggcttcagcagacccatgcatcaaccagcatggactggggaatcgattggtgctgttacccccgtcaggctttaattttaggtaaatcctaaaggaaaaaatggtgcttcttggggcc

SEQ ID NO: 93720 - DNA, 528 bp, Zea mays
gtaatataagggccctagtatattgcacgctctaccggtccggaattcccgggtcgacccacgcgtccgatccggcgcggcgggctatggacctgcagcagcaagctaattaagttggccgatatagatataatatataatggaagccctgggctttgattattggggaagccccaaccagaatgcggataggccaccaccccgcatgattacgttagcatttatgctggtataaccaaattatataattttcatatactatgcaatgaatctaaaaaaaaaaaaaaaaaaaaaaaaaaagggcggccgctctagaggatccaagcttacgtacgcgtgcatgcgacgtcatagctcttctatagtgtcacctaaattcaattcactggccgtcgttttacaacgtcgtgactgggaaaaccctggcgttacccaacttaatcgccttgcagcacatccccctttcgccagctggcgtaatagctaagaagcccgaaccgatcgccctttccaacaattgggcagacc

SEQ ID NO: 93721 - DNA, 535 bp, Zea mays
  unsure (1)..(535): unsure at all n locations
ttaaataaacgtgtcctagcnaggtcagccactgctcgtaccggtccggaattcccgggtcgacccacgcgtccgcggacgcgtgggcggacgcgtgggcggacgcgtgggcggacgcgtgggtcggcctgtggagcgtcagcgctgcgctcatcaacggcgctcttggtagcaagtgcagacctcaaaatgcaacgtcatcgaagttggatatctacatagaggacatccagaaagggaaacatggaagcgattcagggtcatacgacgccgaaggaaggtttgttcctgacaagttcgaagagatattcgccaagcacgccaagactgtccccgacgccctgacgtcggacgagatcgaccagctgctgcaggcgaacagagagcccggggactacagcggatgggctggcgcagaagcggagtggaagaccctttacagccctggcaaggacaaggacgggcttcttcgcaaggaacgtctcgagaaacgtgtactaccgggcactgtttcacatgctcgcgccccaatggc

SEQ ID NO: 93722 - DNA, 522 bp, Zea mays
  unsure (1)..(522): unsure at all n locations
agtntatggtgcgntgcccatgatacgacncactacgcacctgctctaccggtccggaattcccgggtcgacccacgcgtccgacggcttcttccacgtggtgaacaacgactacacgcactggctcatgtacgccatcggcgggagccggaaccccaccatcatcagccagggcaaccgcttccgcgccgtcgacgacagcaggttcaaggaggtgaccaagcgggagtacacgcagtacagcgagtacaagaactgggtgtggaagtcgcaggacgacctgttcctcaacggcgccttcttcaaccagtccggcggccagaacgagcgcaagtacgacaggctcgacctcatccaggccaagggcggccagtacgccgagtcgctcaccaggtacgccggcgcgctcaactgccgcgtcggcaggaagtgctagtgcgtgtgcagctctaagctgcagctttcatcattggcgatcgatcgtaacaatggcaggttgtggngtatataactcttgtgttg

SEQ ID NO: 93723 - DNA, 525 bp, Zea mays
  unsure (1)..(525): unsure at all n locations
cgttttatgggntttccatcgttatgccgagtacggcactgctcgtaccggtccggaattcccgggtcgacccacgcgtccgcccacgcgtccggacgaggaagatggtgaatggactgcccctaccattcccaaccgagaggacaaaggaccatggaaacaaaagaaaatcaagaaccctaactaccagggtaaatggaaggcacctatgattgacaacccagatttcaaggatgatccgtacatttatgcatttgacagcctgaaatacattggcattgagctgtggcaggttaaatcaggcactttgtttgacaacatcatcatcactgatgatcctgcgttggccaagacttttgcagaggagacatggggcaagcacaaggaggcagagaagactgctttcgatgaggctgagaaaaagaaggaagaagaggaagccgccaagggtggcgatgatgacgatgatgacctagaggatgaagcagacgatgacaaggcagacgatgacaaggccgactctgg

SEQ ID NO: 93724 - DNA, 534 bp, Zea mays
tgtattgatgtgggtcccagccatattgcacgctctaccggtctcggaattcccgggtcgacccacgcgtccggttcggagcgcacacacacacaaccagatctcccccaaatccacccgtcggcacctccggttcaagatgcagatctttgtgaaaaccctgaccggcaagactatcaccctcgaggtggagtcgtctgacaccattgacaacgttaaggccaagatccaggacaaggagggcatccccccagaccagcagcggctcatcttcgctggcaaacagcttgaggacgggcgcacgcttgctgactacaacatccagaaggagagcaccctccaccttgtgctccgcctcaggggaggcatgcagatctttgtgaaaaccctgaccggcaagactatcacccttgaggtggagtcctctgacaccattgacaacgtcaaggccaagatcccagacaaggggggcattccttcagaccaagtagcggctaaatttttcttggaaacaactttaggacaggcgcacgc

SEQ ID NO: 93725 - DNA, 528 bp, Zea mays
tttatatgggtgtccatgcattatagtatcgctctaccggtccggaattcccgggtcgacccacgcgtccgcggacgcgtgggccgtcgcccgccggggagccgtcgtgggggagaggtaccgccacgggggcgccgccgaggagctgccggagagcgtcgactggagggagaagggcgccgtcgcgcccgtcaagaaccaggggcaatgcggaagttgctgggctttctctgcagtaagctcagtggaaagcgttaaccagatcgtcaccggtgagatggtgacactgtctgaacaggagctcgtagagtgctcgactgacggagggaacagcggctgcaacggcgggctcatggacgccgctttcgatttcatcataaagaacgggggcatcgataccgaagatgactacccttacagagccgtggacgggaagtgcgacatgaacaggaaaaatgcccaggttgtgagcattgattgctttgaagacatgcctttgaacgaccaggaagcccttcacaaggcggt

SEQ ID NO: 93726 - DNA, 541 bp, Zea mays
  unsure (1)..(541): unsure at all n locations
ggtataagtcgacgaggcctacgctatanatgtatcgctctaccggtctcggaattcccgggtcgacccacgcgtccgcccacgcgtccgaactccagcttgcgttggggaagggcgcgtccctgagagacgaagggagagagcctaggactgactcactgacccgaacccgttcccggcgggacttcctctcgaatcgtcccagtcgagaccctagttgccccacgaaccgaggatccaagatgagtttcctgttcgggaagaggaagacgcccgccgagctgttaagagaaaacaagagaatgctagatcgatccatcagggaaattgagcgagagagacaaggattgcaggcccaggagaaaaagctcatcactgagatcaagaaaacagcttaagaaggccagatgggagctgtcaaagtaatggccaaagatcttattcgccccggcattagataacaaaggtctaccaactcaaatctcaaatcccaagagtttctctaagaagttacacactctaaattacttctgggtttgga

SEQ ID NO: 93727 - DNA, 526 bp, Zea mays
tgtataaaggacctagtatgaagcatgctctaccggttcggaattcccgggtcgacccacgcgtccggtgctctccaggaggaacagccacgcgtctatcaaggcacccagagacagctccggtgcggccacaccgatgtcgcatagtgcttcatcaagtggcatcaagtggtgcgagaacaatgtgatatggagctcactctcctcaagcttggtgcgtcatggaaaggaagcaatgaagcagagagacatggagctgcaagctgtgcttgatggactgctagaagcatctgcctctgagaagttgataaaatgcctgagcaaatactccgaactacattctgacaaggacgacgacccaaaggaggtcatcagcaggttcttgaaattctctcaagaactggatcatgccatcttcattgctcagtcacaggccagactcaagcacccaaaagcatgctgtttcaacttaacacccttagctttggctaaagcctgttccaaagcaacgtttgacaaggaacca

SEQ ID NO: 93728 - DNA, 533 bp, Zea mays
  unsure (1)..(533): unsure at all n locations
gttaattaagtgtatnctacgtacttgactgtacgcttctaccggtccggaattcccgggtcgacccacgcgtccggttgagtataagaacattagcttcactgtttgggatgttggtggccaggacaagatcaggcccctgtggaggcactactttcagaacacacagggacttatttttgttgtagacagcaacgacaggtaacgtgttgttgaggctagagatgagctccacaggatgctgaatgaggatgagctgcgtgacgctgtgctgcttgtatttgcaaacaaacaagatcttcccaatgctatgaatgctgctgaaattactgacaagcttggtctgcattccctgcgacagcggcactggtacatccagagcacttgtgctacatctggtgaagggttgtatgaggggcttgactggctttccagcaacatcttcagcaagtcttgaagcttttcgggagggcttctaacgagaggatgtctgaacaacttatggctgctttttttttacatattaatactaa

SEQ ID NO: 93729 - DNA, 531 bp, Zea mays
  unsure (1)..(531): unsure at all n locations
ntaaatatggtggaatgaagaagatgatattgttgtaccggtccggaattcccgggtcgacccacgcgtccgttttccacagaggaagtagggattgatttaatcattgatttaatcccacacgcgtgtatctacgtatacagtttgtataacatgaaccacctctgtttgcgattggtctaaaaataaatataatacttatataaaaaaaaaaaaaaatttgaccaaactgtactgtgatgtgtaacaatgccacaacacagtacttgaaggcaaacgtatgtagattaattagcagaacgacaacctgtgatccatccttgctttcttccatgaaatgaaacgcagccagcgcgacctggcatggccaggcccccttatggccaagatcaagatcgggatcaatgggttcggcaggatcggaaagcttgtggccaaggtggccctttaaaacgaaaaaatttaacttgttcccgtgaacaaaccctttattagccccgtttcatgagccatatgttgtaagtttacacc

SEQ ID NO: 93730 - DNA, 529 bp, Zea mays
  unsure (1)..(529): unsure at all n locations
gtagttaaagggataaatgaattattgcaagctccaccggttctganattcccgggtcgacccacgcgtccgccccggccaaggatgttcttgctgttcaattgggacttgatgtattcaatatctactgatcctgcaattcaatatcctcaagctcataccatgttctggatctttgtaaaacaaataagggttcctggtctggctctgaatcctcagcttccaaaagatcactgccattcctagcacaggattttgaatcagatattgacacaagacttctgaagcttgtaaataagattgcttctggatcttgtggggacatgtttcttgggacctacagtggtgaggaggttgctgttaaagttcttaatcctcagaatttgaacaaaaatgtatggagtgaatttaagcaagaaatcaacatgttaagggaagttgatcatccgaatattgtccgattcattggttcatgcacaaaggcacctcagttttacataattacagagtgcatgtctataggaagtcc

SEQ ID NO: 93731 - DNA, 527 bp, Zea mays
  unsure (1)..(527): unsure at all n locations
agatgctcgtcgtgtgccctgcactggtcgcatacgcagtgaccgcaccggtccggaattcccgggtcgacccacgcgtccgcccacgcgtccgcggacgcgtggtcggacgcgtgggcggggcggcaatggccgggggtgagcttgaggtgctcaccgcgctggacaccgcgaagacgcaatggtaccacttcaccgccatcgtggtcgccggcatggggttcttcaccgacgcctacgacctgttctgcatctccctcgtgactaagctgctcggccgcatctactacaccgtggaggggtccgcgacgcccggcaccctcccgccgcacgtgtccgcgtccgtcaacggcgtggccttagtgggcacgctgtcagggcagctcttcttcggctggctgggcgacaagctcgggcgcaagaaggtctatggcatgacgctcatgctcatggtcctctgctccgtcgcgtcagggctctcgttcggccacaccccggcgttcgtcatggcgacgctgtgcttcttn

SEQ ID NO: 93732 - DNA, 527 bp, Zea mays
  unsure (1)..(527): unsure at all n locations
tggtccctgtgctgagcatcgtataagcatgtgatagtactgctctaccggtccggaattcccgggtcgacccacgcgtccgcacacctcctcgcttccactccgctcgtctgacatctcgtcccgtcctttcgtttcgaagcctcgcgagccccgacgatggccaccgccgcggtgtcggtcgacgagaagctcgacaagcttcgcgccgaggtcgccaagctcgaccagatcagcgagaacgagaagtccgggttcatcagcctcgtgtcacgctacctcagtggggaagcggagcagatcgagtggagcaagatccagacccctacggatgaggtggtggtgccctacgataccgtcgcgtcgcctcccgaagatctcgaggagacgaagaagctgctggataagctcgttgtgctcaagcttaacggagggctcgggacgaccatgggctgcactgggcccaagtctgtcattgaagtccgcaatgggttcacattccttgaccttattgtgattcanatnga

SEQ ID NO: 93733 - DNA, 530 bp, Zea mays
tgaaagtaacgagaataagaattatgtatgctgctccggtccggaattcccgggtcgacccacgcgtccgacaggatggacctcctggagacgtccgccgctgtccgcaagagcttctcagatcggcactgcacggcgcggatcgagaacctgaccctcagctgcctggattctcccgggagacccaacgtcgatacccgggaataccgggtgtttgtaggcacatggaatgtgggagggaagcctcctgacagcagcgttaacctcgaagagtttctgcagattgaaggattgcccgatatatacgtcttggggtttcaggagatcgtgcctctgaacgcgggcaacgtgctggtcgtggaggacaacgagccggcgggcaagtggatggagctcatctaccaggccctgaacaggccgtcggcccaccaagacggggagtccttgggcgacgagctcttgccggcggggttcaacttcttctttcgctaaccccagacgtgccaagggccgcaagtctggctcgaccc

SEQ ID NO: 93734 - DNA, 519 bp, Zea mays
  unsure (1)..(519): unsure at all n locations
gggtgtggttgtgccagtgcatcgatctacganatattgcactgctcgtaccggttcggaattcccgggtcgacccacgcgtccgcttcgcggaggccatgtcggcgcgcgtcgtcagctcctgcctaggcctgtacgcgccgatgccgccgggctcccccgccgcggcgcgcctccacggccgcgtggccgccgcgttccaggtgttcaacggcatcagccccttcgtcaagttctcgcacttcaccgccaactaggccatccaggaggcgttcgagcgggaggagcgtgtgtgcatcatcgacctcgacatcatgcaggggctgcagtggccgggcctcttccacatccttgtctcccgccccggcggcccgcccagggtcaggctcaccggcctgggggcgtccatggacgcgctcgaggcgacggggaagcgcctttccgacttcgncgacacgctcggnctgccctttcgagtctgcgccgtcgccgagaaggccggcacgttgacccgcanan

SEQ ID NO: 93735 - DNA, 544 bp, Zea mays
  unsure (1)..(544): unsure at all n locations
tatttngttagcatcgaggatatggtatactcctccggtccggaattcccgggtcgaccgacgcgtccgcccacgcgtccggaagaaagcttctgtctttttcaagactaatgctgatgggaacacaacatgtgccaaggaaatgacaaagctctctggcatctctgaaatcatccccgagatggagatctgcgattttgactttgaaccctgtggctactccatgaatgcgatccatggctctgcattctccacaatccatgtgacgcccgaggacggtttcagctatgccagttatgaggttatgggcttggatgccactgctctgtcttatggtgaccttgtcaagagggtccttcggtgctttggcccctcggagttttccgttgccgtgaccatcttcggcgggcgtggccatgccgggacatggggaaaggcacttggtgcagaggtctatgactgcaacaacatggtggagcatgagctgcctggaggcgggctcctcgtgtaccagagcttctgtgctgctgaagacgcctgtgcn

SEQ ID NO: 93736 - DNA, 548 bp, Zea mays
tagttatgtagccacgccaatgagacagcacctctctaccggtccggaattcccgggtcgaccgacgcgtccgcccacgcgtccgatcacaataagatggcgtgtatagacaatgcaatgagagccttgttgcgggttagcgctcttctgtgtcgtgcatggtgagaaggcaaagtcaaaggacaacgatgcaaaagcgtccgggcccggtgggtccttcgacatcaccaagttgggcacctctggcaatggtaagacggatagcacgaacgctatgcaggaggcgtgggcatcagcgtgcggcggtaccggtaagcagacgatgctcatctgcaaaggcgacttactagtcggaccactcaacttcacaggcccatgcatggtcgacgtgaccatccaggtgaatggcaatctgctggcgaccacggacctaagccagtacaaggatcatggtaattggatcgagattctacacgtggacaaccttgtcatcaccggcaagggaaagctcgtccggcagctgccagccttgtggagcaagaactcct

SEQ ID NO: 93737 - DNA, 520 bp, Zea mays
  unsure (1)..(520): unsure at all n locations
agtgtgtcgggccttccatgattcaagacactccgcactgctcgtaccgtccggaattcccgggtcgacccacgcgtccgcccacgcgtccggctgcgctgctgcctacagctagagatgcatcgatctcagttgcccgcctcctgtccgccatggtggcggcggcctcccgcgatccacgacacgaaggcgtccatggtgcccgcgtccgaccggtagtgcttctgcgtgaactcgaggaactcgcgccacgtgaagtccgggaacgcgcgcgggcggcccgcctgcttgttctcctggaggagcgcgcccggcgggcggacgacgcggtccagcggcgggttgaggaagaaggcgagcgaccggcgggcgccgtcgccgctcaccacggcgcggtgcangcagctggtgtgacgcccgtcggtgagcgcggcgaaggtgtcgccgatgttgaccacgaacgcggtcccgcggggccgnaccgggcgccacggtccgccgccggcgcgcacctgcagcc

SEQ ID NO: 93738 - DNA, 551 bp, Zea mays
  unsure (1)..(551): unsure at all n locations
tatgttnngtgctggagggagtatatgtgaccgctgtaccggtccggaattcccgggtcgaccgacgcgtccggggacggacctggtcgtgtgcaaggagtcctgcgcgctctcccagcagtccaacctggtgctgtacggcaggatccagtgcaagggcaagtgcaccgagcagaagggcatcacggcgccggccatgaaggtctgccaggaggagtgcgacaaggcgtacgtggtgaaggcggccgaggtcaccaaggcctgcagcgtcacctgcgccaaggagaagaacccgcgcctcagcgagaactgcaagaggtcctgcacccctcctccttcttgaagcgaagccccttgaaatgaatgaaccatgcatgcatgcatgtatgcatgcgccggggtgacgtggcgttcagctcaggcgctgagcgagtctatacgtacgtcgtcaccggctggccacgcatgcgataaccatctgatatggacggaactatatattggattcctattaatctggcattntctaagctaattgttttttttccaaa

SEQ ID NO: 93739 - DNA, 518 bp, Zea mays
  unsure (1)..(518): unsure at all n locations
tgtgtgaaggccgttcactgatccagccatacgtactgcctgtaccggtctcggaattcccgggtcgacccacgcgtccgcccacgcgtccgcagaaaagcaagattttcttcattgcctggtccccatcggcgatcccgcatacgtgctaagatgctgtactccacgtcgaaggaccgcatcaagtacgagcttgacgggttccactacgaaatccaggcgaccgacccatcggaggtggacatcgaggttctccgggagcgggctcactgaagctggttctccttttgaagggacctgtggagggccgtgaaccttcagccagatgcaaattcaattgtcaacgatgaagctcccgccgtggtgtttgttaataagttcctgtaagcgtatcatttagtcgctatgcatgatactagctggtgaagcgctatctaagctgtaaacgaagcaagatttgcaaacttgttatattgtggtattgatgatactggattactggctgtgggttaaaaaan

SEQ ID NO: 93740 - DNA, 521 bp, Zea mays
  unsure (1)..(521): unsure at all n locations
agatggtagtgcctgtgcatgtataaagacactaagtcatgctcgtaccggttcggaattcccgggtcgacccacgcgtccggcgcaccgcctccccgtgtcccctccttctcgcccggcaccgtcgagctcgggtgtgggaacagaacaaacccatcaaccatggcgaactcggcgtcggggatggccgtgagcgacgagtgcaagctcaagttccaggagctcaagtcgaagcgaagcttccggttcatcacgttcaagatcaacgagcagacgcagcaggtggtggtggacaggctggggcagccgggcgacacctacgacgacttcaccggctccatgcccgagagcgagtgccgctacgccgtcttcgacttcgacttcaccaccgacgagaactgccagaagagcaagatcttgttcatctcctggtccccggacacctcgagggtcangagcaagatgctgtacgcgagcttcaaggaccggttcaagagggagcttggaggcattcaacttgg

SEQ ID NO: 93741 - DNA, 551 bp, Zea mays
gatgttgtctagcatcgggtattaagagatgagctgctccggtccggaattcccgggtcgaccgacgcgtccgatagagagagagagagagggggactggatgccctgcagcggcatttcggggaccctcagggcggggcagatcgacgtggtcatcgacacggggaacccgttcctgaaccgcaccgtcgacggcttgctcaagatcggcgctgtcggcgcctgcaaggtggcggccgaggagaccttcgactgcctgcacaggggggatgtttcaaagcgcaaggttgagcatgccctgaagaagatgtgcaaggagggcgcatattgcgggactgttgctggcgtctacgtgggcgtggtgtatggcgtgtagagggtacgtgggcgcagtgactggaagaacgcgatggtcggaggcgccttgtccggcgcgctggtctccgacgccagcagcaaccacggtgacaagatcgtcacggacgccatcaccggcggcgccgtcgcaacggccgttgagttcgccaactacctcacctagctgagcaaac

SEQ ID NO: 93742 - DNA, 543 bp, Zea mays
catgtttctagatgaggactatgatgtagctctcccggtccggaattcccgggtcgaccgacgcgtccgcccacgcgtccgcccacgcgtgcgcccacgcgtccgcccacgcgtccgcccacgcgtacggggggcgtacggcagagctccacggggatcaccatctccaactgccacttcaccaaccacaacgacgtcatgctcttcggcgccagcgactcctggccgcaggaccagatcatgcagatcaccgtcgccttcaaccacttcggcaggggcctggtgcagcggatgccaaggtgccgctggggcttcttccacgttgtcaacaacgactacacgcactggctcatgtacgccattggcggcggcgacgcgccaaccatcatcagccagggcaaccgctacatagcaccaccaaacatcgccgccaaagtgatcaccaagcactacgcggaagaaggcgtgtggaagaactgggtgtggcacacggaggacgacctgttcatgaacggcgccatcttcaatccgtacggcggcgcc

SEQ ID NO: 93743 - DNA, 630 bp, Zea mays
  unsure (1)..(630): unsure at all n locations
tatggtnntnttccaccgtagccatcgatgnattcgctcgtaccggtctccggaattcccgtggtcgaccgcactgccgtctcgtccaagcctaggggccagtagatgtggccaagcgctgagtctggtcgaggccgtgaagaactctcgcgtgaccgctcgagcgatgtgactgtnacggcagagcaacccgtgctgtcngtggccactcttcgctctctcttgtcgggcatagcgtgcctggggccggatgggatcgtcaatcaatccctcgctctgctgagcctcgctcgcgacccagcattcacacgctggatgttacgtgcccccaagagtccctgtaacctcgcgttaccaaagagtcgtacagaagtgcctcctccggtgttcataccagatattggatgaatcaacaacagtgaggattctgatggtcccgcctcaaaagaaaattcccacgttgctcacgtggactcttggagggaggaatatctacgttgaaggatcatgggacaactggacatcaaagaaactcgttgagaaatccggaaaagatcacaccattcttttgatgctttcatctggagttcaccgttatagattcattgtagatggagaaagaagatttat

SEQ ID NO: 93744 - DNA, 521 bp, Zea mays
  unsure (1)..(521): unsure at all n locations
agttttattagggcctntgcctgagccacgccctacgctactgccgtaccggttcggaattcccgggtcgacccacgcgtccgcccacgcgtccgcccacgcgtccgcccacgcgtccgcccacgcgtccggccggcggacgtcaaaggggttgccctcatcggcggcagcgccaacagcacggtcgctggggtcattcacttcttcgaggacccctccaccaggtacaccgaggtgaggggcaaggtcacgggcttgactccgggaaggcatggattccacatccacgtcttcggcgacactaccaatggctgcaactcaaccgggccccattttaaccctcataataaaccccatggagctccatttgacgatgaacgacatttgggcgacctgggaaacatagtagccaatgaagatggagatgcagaagtgttcataagagacttacagatttcattgagtgggcctcattccatactgggaagggcagttgttgtacatgctgatcctgatgaccc

SEQ ID NO: 93745 - DNA, 551 bp, Zea mays
atgttactctagcatggagagagtatagtatagagctcctccggtccggaattcccgggtcgacgcacgcgtacgataagatggcgtgtctagacaatgcaatgagagcctagatccttatagcgctctactgtggcgggcatggtgagaaggcaaagtcaaaggacaacgatgcaaaagcgtccgggcccggtgggtccttcgacatcaccaagttgggcgcctccggcaatggcaagacggatagcacgaaggctgtgcaagaggcgtgggcatcagcgtgcggaggcaccgggaagcatgacgatcctcatccacaagggcgacttgctcgtcggaccactcaacttcacaggcccatgcaagggcgacgtgaccatgcaggtgaatggcaatctgctggcgaccacggacctaagccagtacaaggatcatggtaattggatcgagattctacgcgtggacaaccttgtcatcaccggcaagggaaagctcgacgggcacgggccagccgtgtggagcaagaactcctgccgtaagaagtacgactg

SEQ ID NO: 93746 - DNA, 541 bp, Zea mays
  unsure (1)..(541): unsure at all n locations
atttgctgccatggatatattgattcctctaccggtccggaattcccgggtcgaccgacgcgtccgggaacatttgagtggatcatggactgattgttaggcctcttgaaagtccgggtggtgaggggcatcaaccttgcctaccgcgacgcaagaggcagcgatccgtatgtcgtcctacgacttggcaagaagaaacttaagacgagcgtgaagaagagatctgtgaaccccatctggcacgaggagctaactctgaccgtcacagatcccagcctagctctgaagctggaggtgttcgacaaggacacgttcagcagggacgacccgatgggggacgcggagatcgacgtggcgccgatggtggaggccgcgaacgcgagccctgaggcaagcctgtggaacggcgccatcatcctgtcagtgcggccgagcgccacgaactgactatccgacaagagctacgtgtgctggaagaacggtaagttcgcgcatgacatgatcctncgactgaagaacgtgcagagcggtcagattcatc

SEQ ID NO: 93747 - DNA, 549 bp, Zea mays
  unsure (1)..(549): unsure at all n locations
tgggtgncttgccctaggggttcatacagtactcgctcgtaccggtccggaattcccgggtcgaccgacgcgtccgcccacgcgtccgcccacgcgtccggaaataattgggaataaatagttcgtgaatccctggggcgtgcatatatatattcctgccaagataaaggtaatggagtcgtcacgcaggttccagccggccgtcatcctgcttctcctgctcattgtgtccaccgatatggcacaggcaagggaatgcgagaagtacagtgagcgatttgttggggcatgcatgatcgcagacaactgcgccaatgtgtgccgcggtgagggcttcttggccggcaggtgcagcaccttccgccgccgctgcatctgcactaggcagtgctaaacaagatcgctcgatcgctcgccatgcatcgacaacctattcttaataacgttcattatctcgttcttatttatgacgaatgtcatgtatgttctggtgactgtcatgtatattctgatgactgtcatgtatcttgttcatgtatgctcaaggtn

SEQ ID NO: 93748 - DNA, 520 bp, Zea mays
  unsure (1)..(520): unsure at all n locations
tgtgtttagggcctgtccatgcacaagaaatgatcgcatgctcgtaccgtctcggaattcccgggtcgactcacgcgtccgtaccctcgtcgtcgtctcactcaccccgccttcacgcctccctcaccaaataaggtccggcccttttccgacattcacaggggggacaggaaatcagcggccatggcctcgattccggcgacgaccttcgccgtcatcttatccgtcctcttctgtgccgcggctggcaccgccgtcgacaacgacctccccgactacgtcatccagggccgcgtctactgcgacacctgccgcgccgggttcgtgaccaatgtcaccgagtacatcgcgggcgccaaggtgaggctggagtgcaagcacttcggcaccggcaagctcgagcgctccatcgacggngtgaccgacgcgaacggcacgtacacgatcgagctcaaggacagccacgaggaggacatctgcgaggtggtccttggtggaaagcccgcgcaaggactggcaa

SEQ ID NO: 93749 - DNA, 519 bp, Zea mays
  unsure (1)..(519): unsure at all n locations
ggagggtcgggcctgtcgactcaccaagagttactgcactgccgtaccggtccggaattcccgggtcgacccacgcgtccgcccacgcgtccgccagatcaacaatgggggctgctggaatgagactaggaacgggaagagtgtgtctgcctgctcaaaccaagaagctaaaggctgcaagtgcccagcaggtttcaagggcgacggagccaacagctgcgaagatgtggatgagtgcaaggagaagcttttctgccagtgcaaggactgcgcttgcgagaacacgtggggaagctacgagtgcagctgcggcggcggcaactcgctgtacatcagagagcatgacacttgcatcagcaaacattccagctcgacgccgagctggggcttcctgtgggtggttttcttgggccttgccttggccggagcaggagcgtacgccgtgtacaaatacaggctacggagctacatggattcaaagatccgcgcgatcatggcccagtacatgcccctggagan

SEQ ID NO: 93750 - DNA, 543 bp, Zea mays
  unsure (1)..(543): unsure at all n locations
gatgttcttggctgtgggagtagtgatgagctctcncggtccggaattcccgggtcgaccgacgcgtccgggccgncggggaccttgaggtgctcaccgcgctcgacaccgcgaagacgcaatggtaccagtgcaccgccatcgtggtcgccggcatggggttcttcaccgacgcctacgacctcttctgcatctccctcgtgactaagctcctcggccgcatctactacaccgtggaggggtccgcgacgcccggcaccctcccgccgcacgtgtccgcgtccgtcaacggcgtggccttcgtgggcacgctgtcagggcagctcttcttcggctggctgggcgacaagctcgggcgcaagaaggtctatggcatgacgctcatgctcatggtcctctgctccgtcgcgtcggggctctcgttcggccacaccccggcgtccgtcatggcgacgctgtgcttcttccgcttctggctcgggttcggcatcggccgcgactacccgctgtcggcgaccatcatgtccgagtacgccaacaaga

SEQ ID NO: 93751 - DNA, 546 bp, Zea mays
  unsure (1)..(546): unsure at all n locations
gatgtnntggtgttgtggggggtaggggagactgctccggtccggaattcccggctcgtcggccgacgcgtccgcccacgcgtccggccatctgatcaaccagccagccgatctcagcgatccgccatggccgcggcgtattacgagaggccccgtggcggcgccgtcgaggaggcggacgacttcgatgagttcgaccccacgccgtacggcggtgggtacgacctcgccgtcaccttcggtcgcccgctgccaccgtccgaggaaacctgctacgcgtgctcggcgccctcgacctcctacgacgcaccgcactacgccgcctccgagccgtccccctacggtcaccacgccaagccaaagcccaactacgggttccgcccccagcaggagcaacagccgtcttacggcagcggctacggatccaggcccgagcccgctgcggaggagggcggtggctatggatctggcttcggatccgggtatgggaggaagaagcaggaggaggagagctacggctctggatatgggaggaaaccgcaggcg

SEQ ID NO: 93752 - DNA, 520 bp, Zea mays
  unsure (1)..(520): unsure at all n locations
tggagggtcgggcctgtgaactgcccacgcnactacggtactactgtaccggtccggaattcccgggtcgacccacgcgtccgcggacgcgtgggcggacgcgtgggcaagcgagtcgtggtgcttggcccccaggtcccgctcaaggagcagctcgagctcgacaaggatgatgagagcctgaggaggtggaaggagcaactccttgggcaggtcgacacagagcagctgggagaaactgcggaaccagaggtcaaggtgctggacctgaccatcctgtcacctggcagaccggacctgatccttccgatcccgttccaggctgacgagaagggctatgcgtttgccctcaaggacggcagcccctacagcttccgcttctccttcatcgtctccaacaacatcgtgtcaggcctcaagtacaccaacactgtctggaaaactggagtcaaagtggagacccagaagatgatgctggggacgttcagcccccaactagagccctatgtctacgagggcn

SEQ ID NO: 93753 - DNA, 547 bp, Zea mays
atgactggctgttgggatacgtagtgaactgctccggtccggaattcccgggtcgacggacgcgtccgcccacgcgtccgccttgaaaaggggtgcggccccaactacctggcgctgctggtcaagtacggggatggcgacggtgacattgtggcagtggacgtcaaggagaagggctctgacacgtacgagcccctgaagcactcctggggcgccatctggaggaaggacagcgacaaaccgcttaagggacccctcaccgtccgcctcactaccgagggaggcaccaagtccgtctacgacgatgtcatccctgccaactggaaggccaacaccgtctacaccgacgaataattaactttagtgctgacaatactataagccggcctatgctagctatactagaattggttggatcccaagcaatgcattacacatgcatgcattggaccgtgaaaaatactttaatgactcggaccaggttaatcgttttactttccaattcaatactatataacacggaccgccgttcataaggatccaagtc

SEQ ID NO: 93754 - DNA, 543 bp, Zea mays
  unsure (1)..(543): unsure at all n locations
tatgtnctgacatgggagataagggatgatctctctaccgtggaattcccgggtcgacggacgcgtccgcgtaccgcttccgcgtctgcaacgtgggcatcaaggcgtccttcaacatccgcatccagaggggatcatgaagctggtggagatggagggctcccacaccatgcagaacgactacgactcgctggacctccacatcggccagtgcctgtcgttcctcgtcaccgccgaccagaagcccggcgactacctgctggcggtgtccacccggttcatcaaggaggtgaacagcatcacggccgtgatccgctacaagggctccaacgccccgccgacggccaaggtgccggagagtcccagcgggtgggcgtggtccatcaaccagtgcaggtccttccgctggaacctgacggcgagcgcggcgcggcccaacccgcaagggtcgtaccactacggccagatcaacatcacccgcaccatcaagctcgccatgggccgcagcaaggtggacggcaagtgaccgttcggcttcaacgg

SEQ ID NO: 93755 - DNA, 548 bp, Zea mays
  unsure (1)..(548): unsure at all n locations
atgtnngtgtgcatagatggagtaaggagtagctcctccggtgttctggaattcccgggtcgaccgcacgcgtccgagcggcactacgtgcgagtcgtcgcatcaggtcccctcgattcgccggcggcggcgccgcggaccaagctcatacatctgaattgactagtccaactcagggatttctttggggaccaatcaaactcaagaactaagtttcatgtctgatctcgacgtccagcttccatctgcttttgatccgtttgcagaggcaaatgctgaggactccagtgctggtgctggatcaaaggactatgtgcacgtgcgtattcagcagcgcaacggaaggaagagtctgacaactgttcagggcttgaagaaagagtacagctacaacaagatccctaaggatctcaaaaaagagttctgctgcaatggtactgtaatccaagatccagagctaggccaggtcattcaactgcaacgtgatcagcgtaaaaatgtcggtacttttctagtacaggccggaatcgtgaaaaaagatagcataa

SEQ ID NO: 93756 - DNA, 548 bp, Zea mays
tatgttctctgccacgaaggtataagggatgccatctaccggtctggaattcccgggtcgaccgacgcgtccgcggacgcgtgggcgaatccagcctcatcttcgtctccgatctgccccccgctcagccgggggttctttcgctgcgtggtgggacggagccgagtagtgcggtggtagccgagcgctccggccatggcgttctatcggggcctcaccgcagtctcgagactgcgatcacgcatggcgcaggaggccaccacgctggggggtgtgaggtggctgcagatgcagagcgcgtccgatctcgatcttaagtcccagttgcaggaattgattccggaacaacaggatcgcttaaagaagctcaagtcagagcatggaaagacccagcttggaaacataactgtggatatggtccttggtggaatgagagggatgactggaatgctctgggaaacatccctacttgatccagaggagggtattcgttttaggggcctctcaattccagaatgccaaatagtgctgccaacagcagctaaggg

SEQ ID NO: 93757 - DNA, 544 bp, Zea mays
  unsure (1)..(544): unsure at all n locations
taggtntctgatggtgggataagagggactgctccggtgctgtagaattgccgcgtcgaccgacgcgtccggagaagcgatcgggattgtgggcgagtgcgtgcgttcgtgcagccacagacaggcgtgcgggcaccatgtctttcaccggcacgcaggacaagtgcacggcgtgcgacaagaccgtccacttcatcgacctcctcacggccgacggcgccatctaccataagacatgcttcaagtgcagccactgcaaaggggtcctctcgatgtgcagctactcctccatggacggtgtgctgtactgcaagacccacttcgagcagctcttcaaggagaccgggagcttctccaagaacttcacgccaggtggcaagtcatcagacaagggtgaactgacaagggccccaagcaagctgtcgtctgcattttctggtacccaggataagtgcgcagcatgccaganaacagtgtacccgctggagaagttaactctggaaggcgagtcctaccacangagctgcttcaagtgctcgcacgg

SEQ ID NO: 93758 - DNA, 547 bp, Zea mays
tagttcgttgaatggggggtatatgtgaccgctgtaccggtccggaattcccgggtcgacccacgcgtccgggacgagactcgcagctagctgacacggccgagaagcagcttgcattgcaggcgtagtacggacccagcagcagctagcactagcagtccatcggagcgacgatggtgagaaggacggtgctggcggcgctgctggtggccgccgccctcgccggcggcgcgcgggcgcagctcaaggaggggttctacgactactcctgcccacaggcggagaagatcgtcaaggactacgtgaaggcgcacatcccccacgcgcccgacgtcgcctccaccctgctccgcacccacttccacgactgcttcgtcaggggctgcgacgcgtcagtgctgctcaacgcgactggcggcagcgaggcggagaaggacgcggcgcccaacctgacgctgcgcggcttcggcttcatcgaccgcatcaaggcgctgctcgagaaggagtgccccggcgtggtgtcctgcgccgacatcgtcgcgctcgc

SEQ ID NO: 93759 - DNA, 520 bp, Zea mays
  unsure (1)..(520): unsure at all n locations
aganaggacgtgcctgtaaatgagtacgaccactcagcatgccgtaccggttcggaattcccggtcgactcacgcgtccggaacataagggggagatgaaggttgtggtcaggacagttatttcactcaccagggaggaggagaaagaactcaaggaaaccttgcaggatatccttggggaaaacaaaactattttggttgaacagaagattgactacagcatcatgggaggattagtgattgaattcgggcagaaggtgcttgatatctcaatcaggaacagggcgaagcaaatggaggcgttcttgaagcaaccacttgacttctaacagccttttggataaaagcatcatcggaatgcagaggctgtccttgtgaaggttttcctgtgtctgcaattttaatctgtcctttttgataaaatgtttcctctaacaagtgaaaggcacttgttttaatgtctcgtgggccacagattgctgctggacaatttatggtcatttcttcttttcttaaaaag

SEQ ID NO: 93760 - DNA, 550 bp, Zea mays
  unsure (1)..(550): unsure at all n locations
tatggtgactagcatgaagantattgtgtacctctccggtccggaattcccgggtcgaccgacgcgtccgcgacaagatggcgtgcacagacaatgcgatgagagccttgttcctcctggtcctcttctgcatggtgcatggtgagaaggaagagtcaaagggcatcgatgcgaaagcgttcgggcctggtgggttcttcgacatcaccaagttgggcagcctccggcaatggcaagacagacagcacgaaggctgtgcatgaggcatgggcatcggcgtgcggaggcactgggaagcagacaatcctcatacccaagggcgacttccttgtcggacaactcaacttcacaggcccttgcaagggcgacgtgaccatccaggtggatggcaatctgctggcgaccacggacctaagccagtacaaggaacatggtaattggatcgagattctacgcgtggataacctggtcatcaccggcaagggaaaccttgacgggcatggcccagccgtgtggagcaagaactcctgcaccatgaagtacgactgca

SEQ ID NO: 93761 - DNA, 549 bp, Zea mays
  unsure (1)..(549): unsure at all n locations
atggggnnnnaacccatgcatgtatgggagnactcctctaccggtccggaattcccgggtcggccgacgcgtccgcacggagagcgccagctacaccgggcatgtttattggcctcctgcccctgttcgaccgggcggggcacgacagcgcggagaccatccgccgcgcgctccacctgggcgtcaacgtgaagatgatcaccggcgaccagctcgccatcggctaggagaccggccgccggctcggcatgggcactaacatgtacccatgcaccacgctcctgggcgacacgaacaccacggcgaacggcatgcacatcgacgagctgatcgagaaggcggacggcttcgctggggtcttccccgagcacaagtactagatagtgaaacggcttcagcaccggaaccacatctgcagcatgaccggggactgcgtgaacgacgcgccggcgctgaagaaggcggacatcggcatcgccgtggacgacgcgactgacgcggaccggagcgcgtaggacatcgagctgactgagcccaggctgagcgtan

SEQ ID NO: 93762 - DNA, 514 bp, Zea mays
  unsure (1)..(514): unsure at all n locations
agaggggcggcctntgatgaataccganatgatgcactgctcgtaccggtccggaattcccgggtcgacccacgcgtccgcccacgcgtccgtccacgcgtccgcccacgcgtccgcttcgtcgccgctttcgtcctctgcgcctaccaggagtttaatgaattcggtgctgatggtggaccagcagctaaggcccttcggcccaaattcaacgtgtttgtcaaaaatgtatctgctcatctgggagtagctgcgccacacattgagttgaagcatgtgattgctgctacaattggtcttaagggtcttggaagcctcctttttattttgagcagctctctcagtgcttatctcctgctgctgtaccttgcttagatcactcctatcatccatgacttctacaactacgatatggagaaggcagaatctgcaggcctctctgcgaagttcacccatgatttggcgctgatcggagctctgctcttctttctgggcatgaagagctccatccgca

SEQ ID NO: 93763 - DNA, 551 bp, Zea mays
  unsure (1)..(551): unsure at all n locations
agaagcgggtgatcccacgctcnanagcactgacataccggtccggaattcccgggtcgacgcacgcgtccgcgcgcgcatcgccgccaaggtggccgccaaggcctacgagctcggcctcgccagccggcggccccgacccgacgacctcgtcagctacgcggagagctgcatgtacacccccacctaccgcagctaccggtaaggaccacccatgccgccatgcgtggcatggagccatggccggcgctagaggagtgagttttacacgtacgtactttgattttttttatgtactgtatttctgtgtacggcaaaatacaccacacccacatatatacggaggtgaagttgattcttctgacaaaaaaaaaataattaataataaaagtaataaaatatatgattagagaataaaaaaagggcgcccttttttaagtgacccatctgaatgatgctgtcattgggattatgtacttttgtattgaggtacccaaaatgaatatctgggggcgaatttaacaaagttgtgcttggaaaaaactcgagcc

SEQ ID NO: 93764 - DNA, 542 bp, Zea mays
gttcgggtgacctagttggagatgtattgctactcctgtccggaattcccgggtcgacccacgcgtccgcccacgcgtccggcgctgtgcagggcgcgagcgcgttcgttcggcatggaacagaacgcgcggctcgttcctcgccgtgcgtcgcctctccggtggcgccatccaccaccatcgtcaccactcttccccggctgaggtcgtgggcgtgtccactgcgtggctcggtaaggggctttcatgcgtctgcgcgcagaggagggagagcgacgtgcgcctgtccttcgatttgagtcccattcaggaagagtgcttgaataggttgcagaaccggatagaggtgcagtatgatggttcaaatctggagcatcagaaagcactggaagccctttggcgttcttcttttcctggaactgaacttctagggttagtatcagaccagtggaaggagatgggatggcaagggaaagatccatctacagatttcaggggccggggttttatatctttggaaaattaccgggattctttaggac

SEQ ID NO: 93765 - DNA, 685 bp, Zea mays
  unsure (1)..(685): unsure at all n locations
agggcncttataatggtctacgtancagtanacgcactgcctcgtactcgtgtctcgtgaattcccgggtccgactccactgcgtctcgtcccactgccgtccgtcccactgcgtctcgtcaactgtcgtgcatactcattnggatcannngtgcagagcagagccaanatgctcctaaagtgatgtngnnattcctaactctgcaatnngggaggaactnnngtggagatacctatggccannggtccnnaatgaactaagatgtcatgccctnctcttggtggacctggagaatctggactagcactagttatcagagtattcggtgactccactcatcctcagcgttcttgctgagggactattgcnnatttgctcgtggcgcgcccttcttcnntccgtgggccggtaccttatgtactaaatctactacnanttgtatccatgtgtgtgaaccacaactnnnttgtgaagggaccaatctggctggctgcttttgtggaattgcccaaatatatcttacggatcgaagtgcactcttctctgatgagaatatcgggtctgtgacaagagagctctaaagtgtgggcccatctgtagggagcctgcacactggcggctttaaacttgtgcaaagaaagcgcccgctcttgggggaaagacaatttacncgaggaaactttg

SEQ ID NO: 93766 - DNA, 545 bp, Zea mays
  unsure (1)..(545): unsure at all n locations
tgtaactggtgtcatgcattgtagcgtancgcatgctcgtaccggtccggaattcccgggtcgacccacgcgtccgcatccctgcaaattaccgcgatggctcccaagatcctagtcatccttgtgttcctcgccgtggcctcaccggctgctctggccgccttcgatgtgatagagatgctggccgacaagcccacgtactccacgttcctgaagctcctgcaggacaccaaggtcgcgggcgaggcgaatcagctccggtcggcgacgctactggtcgtccccgacaaacttgccaagcctctggcgtcgctgcccgccgataaggtgcggccggcggtggagaaccacgtccttctcagttacttcgaccccatcaagctggacgagatgaagacacgcaccgtcatcctncccacgctgctctccgtcaccgacaagaaactcggcgtcctcaactacaccagggccgacgacgggcagatgtacttcggcgcttccggcgccccctgggtggccaaacttgagaaaggcgtttctaaccc

SEQ ID NO: 93767 - DNA, 524 bp, Zea mays
  unsure (1)..(524): unsure at all n locations
agatgaacggtnactgccatgagcactgagctcattcnactgccgtaccggttcggaattcccgggtcgacccacgcgtccgcggacgcgtgggaccggcgtgacctgcggccccggccacggcatcagcatcggcagcctagggcggtacaaggacgagaaggacgtcacggatatcaacgtcaaggactgcacgcttaagaagacggccaacggcgtccgcatcaaggcgtatgaggacgccgcctccgtgctcaccgcctccaagatccactatgagaatatcaagatggaggactcgggctaccccatcatcatcgacatgaagtactgccccaacaagttatgcaccgccaatggtgcctccaaggtcaccgtcaaggacgtcaccttcaagaacatcaccggcacctcctccaccccggaggccgtcaacctgctctgctctgccaagatcccatgcaccggcgtcaccatggacgacgtcaacatcaagtacagtggcaccaacaacaagaccatgg

SEQ ID NO: 93768 - DNA, 510 bp, Zea mays
taagtgtagtggtgccctacccgtagcatggcggactgcgtcggaattcccgggtcgacgcacgcgtccgcccacgcgtccggcgttcccgtcggaggagagcgggtcctcctcgccgttctactactggttcgacgccggcggcatccacttcgtcatgcttgcgtcctacgccgactacagcagatcaggtgcgcagtacaagtggctggaggcggacctggagaaggtggacaggtcggtgacgccatggctgatcgcgggctggcacgcgccctggtacaccacctacaaggctcactacagggaagccgagtgcatgagggtggagatggaggagctcctctacgcctacggtgtcgacgtcgtcttcaccggccacgtgcacgcgtacgagcggtcgaaccgggtgttcaactacacgctggacgcgtgcggccccgtgcacatctcggtgggcgacggctgcaaccgcgagaagatggcgacggcgcacgctgacgatgccgg

SEQ ID NO: 93769 - DNA, 523 bp, Zea mays
  unsure (1)..(523): unsure at all n locations
tttgttaggtgctgtgctctgaaaggaagctcttcgaacngctctggnnnttcngnngggacggangcggccacgcgtacgcagccaagagctatccatacgcacagcgatgcaccagcacgagatactagggatcatgggcctgtcgtccctcctcctcgtcgtggccgccctctcggcgcgcgccgcggcgcagcaggtgccgccggtgggcggcagcgctctgaagccggactactacagccagtcgtgcccgcgcgcggagcggatcatcgcggaggtgatgcagacgaagcagatggcgaacccgacgacggccgcgggcatgctgcgcgtcttcttccacgactgcttcgtcaccgggtgcgacgcgtcggtgctgatcgcgtccacccagttccagaagtcggagcacgacgcggagatcaaccactcgctccccggngacgccttcgacgccgtggtgcgcgccaagctggccctggagctggagtgcccccgngtggtgtcctgcgccgacatc

SEQ ID NO: 93770 - DNA, 550 bp, Zea mays
  unsure (1)..(550): unsure at all n locations
ntgaatagactgatcctcnctgaaatagttatgctatacccgtccggaattcccgggtcgacccacgcgtccgtaccctcgtcgtcgtctcactcaccccgccttcacgcctccctcaccaaataaggtccggcccttttccgacattcacaggggggacaggaaatcagcggccatggcctcgattccggcgacgaccttcgccgtcatcttatccgtcctcttctgtgccgcggctggcaccgccgtcgacaacgacctccccgactacgtcatccagggccgcgtctactgcgacacctgccgcgccgggttcgtgaccaatgtcaccgagtacatcgcgggcgccaaggtgaggctggagtgcaagcacttcggcaccggcaagctcgagcgctccatcgacggggtgaccgacgcgaacggcacgtacacgatcgagctcaaggacagccacgaggaggacatttgcgaggtgggcttgggggagaacccgcgcaaggactgtgaccaggtgcacgcggacaagggccgcgcccgcgttcttttt

SEQ ID NO: 93771 - DNA, 544 bp, Zea mays
  unsure (1)..(544): unsure at all n locations
ngaagctggtgacctcacnttgatctgcatggctctaccggtccggaattcccgggtcgacccacgcgtccgcccacgcgtccgcccacgcgtccggttccgcgccgacggcgagcagaagccgttcgcgcaggccgagctgcagctgcagagcttccccaccgtgctcctgttccccagccgcaccgcccggcccatcaagtacccgtcggagaagagggacgtcgactcgctcctcgccttcgtcaacagcctccggtgaggcccgtcagtgagcgagaaccatcgttctctgtcagtatgtactgtattacatgttggtatccatctaggtgcgctgtacgtagagagggaggcggagggaactgggatgctagaaaaaacagatgcaggtgttgcttgtaactgcagaatgatggtaggtatgcatgaagtctgagggcctgtgttatttggcaactgagggagagatttgtgcctgctttgtagtgtagctagtggccaatgaggatttttaggggaaattaatttgaaatggaatttt

SEQ ID NO: 93772 - DNA, 543 bp, Zea mays
tgtacggtgttcatgattagaccgtacagcatgctctaccggtccggaattcccgggtcgacccacgcgtccgcccacgcgtccgcccacgcgtccggtgtctgcgtgcagggcgcgagcgcggagggcacgcccaagaggctgacctacgacgagatccagagcaaaacgtacatggaggtgaagggcacgggcacggcgaaccagtgcccgaccatcgacggcggcgtggagtcgttcccgttcaaggccggcaagtaccagatgaagaagctgtgcctggagccgacgtccttcaccgtcaaggcggagggcatcgccaagaacgccccgcccgagttccagaagaccaagctcatgacccgcctcacgtacacgctggacgagatcgagggcccgctcgaggtcggctccgacggcacgctcaagttcgaggagaaggactgcatcgactacgccgtcgtcaccgtgcagcttccggggggcgagcgcgtgccgttcctcttcaacgtgaagcaacttgtcggcacacgggaagccgaa

SEQ ID NO: 93773 - DNA, 540 bp, Zea mays
gaaaggtgccatgatagaggatgtattgcatgctctaccggtccggaattcccgggtcgacccacgcgtccgaggaagggtgttgccatcaactttgtgacccgcgacgacgagcggatgctgttcgacatccagaagttctacaacgtgttgattgaggagctgcctgccaacgtcgctgaccttctgtgatcattttgaagaaaaacagaactaaaagaacggtggtgggggtgatctggtaaggcttggttttgccgaaatattgtgggggaggagtgataaggtcggtggggtttctatgttaaagtcgtggtctcgggcaatatgcgatttttctttatgccatgttttgggaaattttgtagctgcctaggcctcgtgctgttgtggtggttcattagtatgaagacgaaagctctgctggctatgggagtcctttttctttttgatagtattttgtttaaaactatgtatgaccgaattatttgtcatccttgactcaattctgctgcaaaaaaaaaaaaaaataggggcggg

SEQ ID NO: 93774 - DNA, 561 bp, Zea mays
  unsure (1)..(561): unsure at all n locations
gtaaatgctacgcttgcccagctcagtgacgtcatgacgtaccggttcggaattcccgggtcgacccacgcgtccgatccaaacaacgacaccaacgccaacattaattaattagtagtctccatgccctgggattgtgcgtggccgctccgttaaacaccacccatccttcgttcggcattttttcccccttgtttatataattttattgtatcgttttggcaaataattttgtgattcgaccccaaagcaagtttggttgtcttacgatttgtaaacctggaacaatatataatgtgattgaactgctttgtctaaaaaaaaaaaaaaaaataaaaaaaaaaaataaaaaacaaaaaaaaagataaaatagataaatattgattttaaattaacttttttttgtggcattattttaaatatggttttattttagctattttataattctggtgttttctgtgaaattgatcaaatatggcctgtttttttatagaggtttttttttgttttgctttttgcgttatatatttttgttttntttgtggtccaaattttctt

SEQ ID NO: 93775 - DNA, 529 bp, Zea mays
  unsure (1)..(529): unsure at all n locations
aggcgttgtagtgtccgtgtggccttacnnctgatgctacagtcgaaccgcttcggaattcccgggtcgacccacgcgtccgagagtatgtaaacccagttgcctgtgcagtggcaatagaagctttgaaactttaccgggaaagggatattcctggtcatgtcaagcaaatcgctccaaagttccaggacggaattagggcgttggcagacagcccaatcatcggggagatacgtggcttagggatgattatgggaaccgaattcaccaacaacaaatcaccgactgatctattccctgccgaatggggggttggtgccatctttggagaggagtgccagaagcgcggcatgctggtcagggttgctggcgacgccatcatgatgtcgcccatgctgatcatgacgccccggcgaggtcgacgagctggtgagcatctacggggaagccctcanggccacggangagagggtgtcagacctgaagatgaaatccgagaagaactaaccaaaagggcgaggacgacgac

SEQ ID NO: 93776 - DNA, 520 bp, Zea mays
  unsure (1)..(520): unsure at all n locations
agagtggaggtcgtgtagccggcatccgccgccatnngcgacngcttcggaattcccgggtcgacccacgcgtccggcagaagacgcaagactcgcggataacggaggactccgcgatggcgatgatcgagcgggagaaggctcgggcgaaggcggccatggaggcggcggaggcgtcgcagcggatcgcggagatggaggtccagaagcggatcagcgcggagaagaagctgctcaaggaggccgaggagcgcaagaaccgcggcggcagcggcatgtcccacgaggcccggtaccggcgctacagcatcgaggagatcgagcaggcgacggacaacttcaacgacgcgcgcaaggtgagcgagggctggtactggcccgtgtacaaaggcttcctcgaccacacgcaggtggccatcaaagtgcttacggccgacacagggcatgggccgttcgcagttcagccagaagtggaggttcttaacttcatccggaacccaacattggggctcctcttagc

SEQ ID NO: 93777 - DNA, 545 bp, Zea mays
  unsure (1)..(545): unsure at all n locations
agattactggtgtcctagtttgtanatctatgctctaccggtccggaattcccgggtcgacccacgcgtccggggggacaactgcacctggattaccttatgtcgaggaggcaattaccaatgctggtgactggttggttggtggggacttggaggttatagaaccaatcaagtacaatgatggtctagatcagtatcgcctgtctccagcacagctgcgtgaagagtttgccaggcgcaatgctgatgcagtatttgcctttcagcttcgcaatcctgtacacaatgggcatgctcttcttatgaccgacacacgcaaacgtctccttgagatgggttataaaaaccctgttcttctgctccatccactgggaggattcacaaaagcagatgatgtgcctcttagttggagaatgaagcaacatgagaaggttcttgaggaaagtgtccttaacccagaatcaactggtggtgcgaacttttcctcttcaatgcattatgcttggcccactgaagggccaagggcttcttaagcgtttgttaat

SEQ ID NO: 93778 - DNA, 547 bp, Zea mays
agcagtgggtgtccagctcgtactgcatgctctaccggtccggaattcccgggtcgacccacgcgtccgctggtaaaagagcatcgatggaggacttctatgaggcaagaatagacgacgttgatggagagaaaattggaatgttcggtgtatatgatggtcatggaggagtccgagcagctgagtatgttaagcagcaccttttcagcaatttaatcaaacacccaaagttcatcactgataccaaggctgctatcgccgaaacttacaacctcacagattcagaatttctgaaagctgatagctgtcaaactcgagatgctggctcaactgcctcaacagctattattgtaggtgaccgtttgcttgttgcaaatgttggagattctagagccgttatttctaaaggaagacaagcgattgcggtttcaagggatcacaaacctggtcagaccgatgatagaccaagaattgaggacacaagggggctttgttatgtggggctcgggcattgcgaagaggggggttggtcttgccgtgtctctcc

SEQ ID NO: 93779 - DNA, 551 bp, Zea mays
agaagtggtgagcatgatggaaggtgtattggaatgctctaccggtccggaattcccgggtcgacccacgcgtccgcccacgcgtccgcccacgcgtccgcccacgcgtccgcccacgcgtccgagcacacacgggcgcatcagggcctagctcgagtccactacttgaaaaacaggaaaaaggttgcgtttgaggagatgacgaagctcgtggagatagccagccactgcgcgtcggcatatgaaaagcggtcggaatacggtgagcgcgaagctgcgaggagcgacctgaacatggcgacgcttcttgatcctaccaggacttatccttacagatacagagcagctgtactgatggacgaaggcaaggaggaggaggcgatcgcggagctgtcaggagccatagctttcaagccggaccttcagctgctgcaccttcgcgcggcgttcttcgactccatgggcgagcgcgagagcgccctgtgggactgcgaggccgcgctctgtctggacccggaccacagggacacatttgagctgttcagcaaaac

SEQ ID NO: 93780 - DNA, 515 bp, Zea mays
tgtagggcggtggtgtcctcgtaagagagtaatgcaaccgcttcggaattcccgggtcgacccacgcgtccgctccctaggccctagccaagggaatagaggcctccctggatccactaccacggaacacggatcataactctcacgcagatgctggagttccattggagaacattctttatcttggtggacctaatattgcttctgaaatttacaacaaagaatatgcaaatgcacgtatttgtggagctgacaaatggagaaaaacccttgcaaaatttttgaggcggcctcattttattgtgtgggataacagtgatctcatcactcatgaagtcatgggcggcttaaaaaatgcctatgctggtgctggtatggttagctgcattaaccaacgagagtgcaaccagcaaatccgtttactttgcactttgcacatctgagttgatctacatcacacaccttttggaagaagagcctgagaaacttgttggtagagatggcaatgggtactt

SEQ ID NO: 93781 - DNA, 548 bp, Zea mays
agtagtggcgtgtcctagccttgtacatgcatgctctaccggtccggaattcccgggtcgacccacgcgtccgcggacgcgtgggcagctgttccgccgagcgaacgacccacaaccagaagccacccattggcgtacgcgaggcgatcggagcatcccgtcccaagaggagaaactccggccggcgacgcgggggaaaatggggaagacgccggtgcggatgaaggcggtggtgtacgcgctgtcgcccttccagcagaaggtgatgccggggctgtggaaggacatcaccaccaagatccaccacaaggtcaccgagaactggatctccgccacgctcctcctcacccccgtcgtcggcacctaccaatacgccatgtggtacaaagagcatgagaagcttttccacagatactaaatgggatgtccttcaagttgctgcgggttgtcgcaattgaatttttcatgatggggttggtaatctgtgaatggcatatttttggtcaaatttaggtcaaaccctttttaccttttcctatggcataccg

SEQ ID NO: 93782 - DNA, 548 bp, Zea mays
ggaagtggtgagcctcagccttcagtacgtacacccgtccggaattcccggtcgacccacgcgtccggcgatgcacaagcacgagataccagccaccatgcgcctgtccctcctcctcgtcgtcggggccggcctctcggcgcgcaccgcggcgcagctgccgctggcgggcggcggcggcggcgccctgaagccggacttctatagccagtcgtgcccgcgcgcggagcggatcattgcggaggtgatgcagacgaagcagatggcgaacccgacgacggccgcgggcctgctccgcgtcttcttccacgactgcttcgtcagcgggtgcgacgcgtcggtgctgatcgcgtccacccagttccagaagtcggagcacgactcggagatcaaccactcccttcccggggacgcctttgacgccgtggtgcgcgccaagctggccctgtagctggagtgccctcgggtggtgtcctgggccgacattctcgcactggcgtctggcgtgctgattaccattacccggggggccccgggccccggtcctc

SEQ ID NO: 93783 - DNA, 547 bp, Zea mays
  unsure (1)..(547): unsure at all n locations
aggccgggtgtcatgcttagttcagtacagctatgnccgtaccggtccggaattcccgggtcgacccacgcgtccgcccacgcgtccgcccacgcgtccgcccaccttccctacaccgccgccgccgtcggacgcagccgcatccgccatgggggcgtacaagtatgtctcggagttatggaggaggaagcaatccgacgtgatgcggttcgtgcagcgcgtgcgctgctgggagtacaggcagcagccggccatcgtccgcctcacaaggcccacccgccccgacaaggcccgacgactaggctacaaggccaagcaagggtatgttgtttaccgtgtccgtgtcaagcgtggcggcaggaagaggcctgtgcctaagggtattggctatggcaagcccaagcaccagggtctcacccagcttaagttccagaagaaccagatgtcttgtgctgaagagagggcttggcgaaagcttggtggacttaaggtttttaaatcctaatgggtgaatgagggtattgccttcaaggtctttgagaacatg

SEQ ID NO: 93784 - DNA, 553 bp, Zea mays
tgaaatggtgacaatgaaggagacatgattgctactgctctaccggtccggaattcccgggtcgacccacgcgtccgaaggaacctgaagactcgtgttattggttgcccaaagactatcgatggagatctgaaatgtaaggaggtaccaacaagctttggatttgatactgcttgcaagatatactccgaaatgattggcaatgttatgactgatgcaagatccacaggaaaatactaccactttgtgaggcttatgggtcgtgctgcttctcacattacattggaatgcgctttgcaaacacaccccaatgctgcactcattggggaagaggttgctgcgaagaaagaaacccttaagaatgtcacaaactacattactgatatcatctgcaagcgtgcagatcttggttacaactatggtgttatccttataccagaaagcctgattgatttcataccagaagttcaaaaactcatcgcggaattgaatgaaattttagcacatgatgttgttgatgaaagcagggcctctaaaaacaaactttatgctc

SEQ ID NO: 93785 - DNA, 555 bp, Zea mays
  unsure (1)..(555): unsure at all n locations
tggaagtggttngacttgccagcccagtaacgtcatgacgtaccggtccggaattcccgggtcgacccacgcgtccgcccacgcgtccgcttcgccacaagcacctcgtgtcgctcatcggctgctgcgaggacgagggcgagatggtcctcgtgtacgactacatggcgcacggcacgctgcgggagcacctgtacaagagcgggaagccggcgctgacgtggcggcagcgccttgagatcaccatcggcgccgcgcggggcctgcactacctgcacaccggcgccaagtacaccattattcaccgggacgtgaagacgaccaagatactggtggacgagaactgagtggctaaggtttgcgactttgacttgtccaagaccggcccctcaggcttgaaccatgatcacgttatgaccctggtgaagggcaagttccggatgcctgagaccgggtgctttaggtgggaatagatttcagataagcccgagttctattttttaactttattgttcctttttggggtatttgttttgtattgtggtaattcccgtg

SEQ ID NO: 93786 - DNA, 514 bp, Zea mays
  unsure (1)..(514): unsure at all n locations
ggtgtgacgtggtgtgctagctcgacgtactactaacgctctcggaattcccgggtcgacgcacgcgtccggaacgtcgtacgagaacctttctccctcctccacctttctccttttcttgccacggcagaacaccttcgccggcgagagcatggcgatggcgtaccgtgtcctggaggtcaccctggtgtcggcaaatgacctcaagaaagtgtcgctcttctcccggactcgcatctacgccgtggcttccatctccggattcgacctccgcatcccttcccacagcacccaagcagaccacagcaacggctgcaacccctgctggaacgccgtggtacacttccccatcccggctgccgctgacacccgcggcctcgcactccacgtgaggctccgcgcccagcgtctatacctgggcgatcgcgacatcggcgaagtgtttgtgcccatcgacgacctcctggccggcgccgacaagggtggcgatccgaggcccgtgagctaccangtg

SEQ ID NO: 93787 - DNA, 550 bp, Zea mays
gtagcggtgaccctcagcttgcagtacggcctaccggtccggaattcccgggtcgacccacgcgtccgcccacgcgtccggggggacaggaaatcagcggccatggcctcgattccggcgacgaccggcgccgtcatcttatccgtcctcttctgtgccgcggctggcaccgccgtcgacaacgacctccccgactacgtcatccagggccgcgtctactgcgacacctgccgcgccgggttcgtgaccaatgtcaccgagtacatcgcgggcgccaaggtgaggctggagtgcaagcacttcggcaccggcaagctcgagcgctccatcgacggggtgaccgacgcgaacggcacgtacacgatcgagctcaaggacagccacgaggaggacatctgcgaggtggtcttggtggagagcccgcgcaaggactgcgaccaggtgcatgcggacagggaccgcgccggagttctgctcaccaggaacgtgtgcgtcagcggcaacctgggccccgcaaaccgcttgggtgctttaaagacgtgccgctttc

SEQ ID NO: 93788 - DNA, 551 bp, Zea mays
  unsure (1)..(551): unsure at all n locations
cgagctggtacgaatggctagcncagtacgtcatgacgtaccgaatcggaatttcgactcagacctaccgcgcagtgcaccctggcgaaaatcccgcgcaccgaacggataggaacttactatctacacccggggtaggtactaccgacaacgccgatgcggacgccatacacgacctaaccagcgccatacgggggcgcgcccccacgagcagatgtcgaagacggccgagttcgaggtcttcaatgttgatgacctgatgaactgggcacgtaagggctcgatttggcccatgacctttgggctcaaatgctgcgcggtcgaaatgatacacgccggcgcgttcagctacgacttccaccgggtcggagtcatcttacggccctcgacgatccagatccattgcatgatcgtggccggtacgcttaccaacaaaatgggttcaacccttcataaaggttatgaccaaatgcctgaacctaagagggataattcaattggcaactgtgccaaagggggggattctaacatatgctcaaactgttggcccn

SEQ ID NO: 93789 - DNA, 556 bp, Zea mays
tgaagcggtgtcactcgcacgccagtacgggcactgcctgtaccggtccggaattcccgggtcgacccacgcgtccgcggacgcgtgggcggacgcgtgggcggacgcgtgggcgggttccaggacacgctgtacgcgcactccaaggcgcagttctaccgcaactgcatcatctccggcaccgtggacttcatcttcggcgacgcggcggcggtgttccagaactgcatcctggtgctgcgccgcccgatggacaaccagcagaacatcgcgaccgcgcagggccgcgcggacgcgcgcgaggccacggggttcgtgctccagaagtgcgagttccaggccgaggccgcgctccgggactgcgggcgcccgcccatccgcaactacctgggccggccgtggcgcgagtgctcgcgcaccatcgtcatggagtcggagctcccggaacttatcgacaaggcggggtacttgccctggaacggcgactttgggcttaagacgttgtgggacgccgaggtctgcaacacaggggccggcgccaacacgggggggcgcc

SEQ ID NO: 93790 - DNA, 517 bp, Zea mays
  unsure (1)..(517): unsure at all n locations
tggagggagcgtggtgcgcacgtatagaggtaatctcaaccgctccggaattcccgggtcgacgcacgcgtccgcccacgcgtccgcccacgcgtccgcccacgcgtccgcccacgcgtccgcgacgctggaggagctgaagaacgacccgcgcacgtcgggcgcgctccacgactgcaaggagatgctggggtacgccatcgacgagctcaagtcgtccttcgacaagctgggcggcttcgagatgaccaacttcaacaaggccgtggacgacctcaagacgtggctcagcgccgcgctcacgtaccaggacacctgcctggacggcttcgcgaacgccaccaccaccgaggcctccgccaagatgcagaaggcgctcaacgcgtcgcaggagctgacggaggacatcctggcgggggtggaccagttctncgacacgctgggagggctcagcatcggccgncgactgctgctcacgcccaagctgggtgtcgagccaggccgacccggcaggcaa

SEQ ID NO: 93791 - DNA, 525 bp, Zea mays
  unsure (1)..(525): unsure at all n locations
agtaaggatgaggtgngtgaagccctgcctctgacgtaacgtgcaactcgcttcggaattcccgggtcgacccacgcgtccggcagatcaccgtcgccttcaaccacttcggcagaggcctcgtgcagaggatgccaaggggccgctggggcttcttccacgtggtcaacaacgactacacgcactggctcatgtacgccatcggcggcagcaaggcccccaccatcatcagccagggcaaccgctacatcgcgccgcccaaccttgccgcgaagcaggtcaccaagcagcatgacacgccggagtccgtgtggaagaactgggtgtggcactccgagaacgacctcttcatggagggcgcctacttcaccgtcaccggcggccagatcaacagacagttcaacaagaaggacctcatcaagcccaggaacgggtcctacgtcaccaggctcacgcgctacgccggcttcctcgcctgcaagcccggcaagccctgctagatcaagccaccagcgaagacgggcc

SEQ ID NO: 93792 - DNA, 547 bp, Zea mays
  unsure (1)..(547): unsure at all n locations
ttatatgggtgatcctagctatgantgcatgcctctaccggtccggaattcccgggtcgacccacgcgtccggcgtaaagggcatttggagtggcatgattggaggaactttcatgcagacggctatcttagtgtgggccaccttgagaactgattggaacaaagaggtagaggaagcacagaaaaggctacacaaatgggaggatcagaagacgacgacgacaacgacggagcccctccttgcgggggtcgtcggcaatggcaatgccaattagtttactggatggacatcattctcccagacggcttcaccagcgtcaccgtcaggatatggaccctgcaaagtgtttctccggagtgtttaagttttctttcccgtatcaaaatttgcgaaacagagaaggaagggttttttttttgaaaacagaactgacgtctatcttttgagtgtaagaaattcgagcatacatgtggattttttttaaaaaaaaaaaaataatatgataaatgaagttattattttttattttgattaaaaaaaaaaaag

SEQ ID NO: 93793 - DNA, 542 bp, Zea mays
  unsure (1)..(542): unsure at all n locations
nggacggtgtcatgaagggantgcatgctctacccgtccggaattcccgggtcgacccacgcgtccggacgaaacggtcgacatggctcgcacgcaatctgccgtagcggtcgccgtggtggccgcggtgctgctgctggcagcggcggcgacgacctcggaggccgccatcacctgcgggcaggtgagctccgccatcgcgccctgcctctcctacgcccgcggcacggggtccggcccctccgcgtcctgctgtagcggcgtcaggaacctcaagagcgccgccagcaccgccgccgacaggcgcgccgcctgcaactgcctcaagaacgccgccaggggcgtcagcggcctcaacgccggcaacgccggcagcatccccttcaagtgcggcgtcagcattccctacaccatcagcaccttcaccgactggttcagggtgaacctaaacctataccacgcgcgaagaacggccgctgatcgatcgagccaacatttcggcgttgccccccggcgggtcatttaaacggggcatgaagata

SEQ ID NO: 93794 - DNA, 554 bp, Zea mays
  unsure (1)..(554): unsure at all n locations
tgaagagttgtgatagatagggacgtgatgctatgctctaccggtccggaattcccgggtcgacccacgcgtccgtgccttcaaattctgccgtagtagtagttatcgccatctttcttgttgttatcctcggcgccagccacgcggtcaccggcgcccgtgtcggcaccatgatgatccggcagccttcttcgtcgtcctccgtcctgatgttcagggaggcgcccgcgttccggaacggccccgactgcggcgcggacggccgggtggacatcgccatgacgctggacgccaactacctccgcggcaccatggccgcggtgctgtccatcctgcagcacacggcgtgccccgagagcgtagcgttccacttcctcaccgccgacgccgacgccgacggccacggcctctccgccgcgctgcgcgcctcgtttccgttccttgaccttcgggtgtaccgcttcgacccgtcgcgcgtncgcgaccggatctcgcgctcggtgcgccaggagctgggaccagcgcttaactacacgcgcgtgtaccttgacgac

SEQ ID NO: 93795 - DNA, 513 bp, Zea mays
tgagttgagcgtcgttcgttgaatcgtacgcatacgattgcttcggattccgggtcgaggcacgcgtccggccacgcgtccgcccacgcgtccgcccacgcgtccgcccacgcgtccggattaccatgagcagcgggccctggtacccggttccgctggtgcgcatggactccctgtcgtcgtcgtccacggcgcccgacgtggagctgacgctcgccaacttcaccgtggaccgcctcatacagatgttcggcgccaaggggttcacggttcaagagctggtgtcgctggacggcgcccacacgctgggcttctcccactgcaaggagttcagcgaccgtctctacaacttcagcaaccacggcggcaagccgaagcagttctaccccagcatgaacccgttctacgccagggggctgcacgacttgtgcacggactacctcaaggaccccaccatcgtcgcgtttaacgacatcatgacgccccgtaagttcgacaacttgtactttgttg

SEQ ID NO: 93796 - DNA, 515 bp, Zea mays
agtagggcggtcgttcccctcaccccgcccatcccgactgctctcggaattcccgggtcgacgccacgcgtccgcccaataaaaataaagaaaagttggcacagtgcaactccaagacagcccttgctttcagagttcgggatgagtgctttcagccacacattgacgatagaagtggaattaatgattcacaatgttgcatataattgtggttctgatttcagtcgtttagacttcagtggtttctatgcatttatcctggaacggggtgatgaagtaatagctgcagcatctgtaaggattcatggaactgatttagcagaaatgccattcataggcacaagatgcatgtataggcaccaagggatgtgtcgtcgactactgaatggaattgaatcggccctcggttccctcagtgttcagaaactagtagtatctgctgtgactgaaatggagaatacttggacaacttgttttggttttaagcctgttgcaccttccaagatacaaagaat

SEQ ID NO: 93797 - DNA, 549 bp, Zea mays
  unsure (1)..(549): unsure at all n locations
agaagtggctgagccctgcatcgtnagtaccgctatgnctgtaccggtccggaattcccgggtcgacccacgcgtccgcggacgcgtgggcggacgcgtgggcgctagcgagcgagagagacgcacatctatgtgtcgagcgacgccgcggcctcgatcagagtcggaggcgaacaccctcatggcggcggttggcggcggcgcaagagggaaggtatccttcaagatcatcctcacctgcgaccccaagctccctttcaaagtgttcagcgtgcccgaggcggcgccctttaccgcggtgctcaagtacgccgcggaggagttcaaggtcccgtcccataccagctccatcatcaccaacgattgaattggcatcaacccccagcaaagtgcatgcaacgtgtttctgaaacatggatcggagctgcgtcttatccctcgcgattagagttgagctgtaatcatgnttttcgggtataggatatattcaggcccaagccttatgagcccaactttagagaaattaaaagcttgaatgtggccctcttt

SEQ ID NO: 93798 - DNA, 519 bp, Zea mays
aggacgggcggtgcgtgcgcctgcaccgttgccatgcgctaccgcttcggaattcccgggtcgacgcacgcgtccggccaggatcagctccatcccgcaggatgcgacgccgtttccgtaccggcagggcgtgcggttcagacatccagtacgtcagctactggttcggcgagggcgacggagcggcgccgacgcagtggagcagggacatgtacgcgttcatggagccgtacgtcagcaagaaccctaggcaggcgtacgccaactacagggacctcgaccttggcgtcaacgaggtggtcggcgacgtcttcacctacgacagcggcagggtctggggcgagaagtactacaatggcaacttcgataggctcgccaggaccaaggccaaggtggacccctgcgactacttcaagaacgagcagagcatcccgacattgctcaagtgatcgatgatacccgggcccatacagatcctttcgaccgcgctcagcaaaaggaccacgagtcgtacatgat

SEQ ID NO: 93799 - DNA, 513 bp, Zea mays
tggaggcgctgtgaccagatgggggagtatgtgcatccgcgtcggaattcccgggtcgacccacgcgtccgctgatgactggacatgaaaggaatgaacttgaaggcgcaaaacatagctcagtgaccggggagatggctgatatgacaacttactatcaatgtgctgttattgatgaaattcacatggttggctgctaatgacggggttattcgctcacacatgcacttgtgggacttcgttcatatgaacttcatgactgaggtgaccacacctgatcgacctcttatccagcaaattctcgaagctactggtgatgtagataccgatcaatattatgagagactatctactgtggatcctctgaacatctcactagggtgtttctgtaacatcacagcatgagattgcttattatgattctcaatacgtcgcatgtatacactcaagatcagaatagaaacggtcgggaaaacatattagctttgacgactagtcgtaatcgacaccaga

SEQ ID NO: 93800 - DNA, 551 bp, Zea mays
gtagctggtgtcatgaagtagacagtatgctctaccggtccggaattcccgggtcgacccacgcgtccggattcctgtaatggaaaccatgttcgatgcggattcagaaccaaaaaatcgtaagcttgaagaatttgacactaaggcaaatagaaacatgggaatgattgacgaagaatcagatgatgacgatgattatcaagttcctgaagctaatatagaggaagacgtgaacaaatctcatcatgatatcaagcgcacagatgagcctacagaaaaaattgatttatcttgttttttgagtattcttcatcgtgatcccgaggagaaaagtcgcaattgttggacagtacctgatagcaagatcttcaaagttcgtagcaaaaacttcccacaagacaaatcaaagatacctgcagcaagttatctcatggagcttgcagccattgactggtttagggacaccaacgtatggataatgtgtgcaggcaaaaggttgtgttgctcacgttgctgctgatctagggaggctacacttgtggggacacaac

SEQ ID NO: 93801 - DNA, 558 bp, Zea mays
  unsure (1)..(558): unsure at all n locations
gtagcggntgtcactcgcagttgcgtacacgcatgccgtaccggtccggaattcccgggtcgacccacgcgtccgcgcatcttcctccgtgatccaagttctagcagcgcagcgctcggtttcgacaatatgtcggggcgcggcaagggcggcaagggtctgggcaagggcggcgccaagcgccaccgcaaggtcctgcgcgacaatatccagggcatcaccaagccggcgatccggaggctggctaggaggggcggcgtcaagcgcatctccgggctcatctacgaggagacccgcggtgtgctcaagatctttctggagaacgtcattcgtgacgccgtcacctacaccgagcacgctcggcgcaagaccgtcaccgccatggatgtcgtctacgcgctcaagcgacagggccgtaccctctacggcttcggcggctaggtcgctttgacatctggtggcgaactgcatgtatttcggctgttggcgtgttgtgggcctaaattaatggaaaccgtgctctatatacggcctgtaggcttgggggtgaatgaaacc

SEQ ID NO: 93802 - DNA, 512 bp, Zea mays
aggtgtggtaggtggtgtgcctgcatcgtcgcatcacgactgcgtcggattccgggtcgacgcacgcgtccgctaccaagccatcagctcgcggggccaccacacctacatgctgcagactgccgagctggtgcacgagtcgtcgacggacgcggcggcgtcgctgctggtgacggcgctgaacgaggggcgggacgtgatcctggacggcaccctgtcgtgggagccgttcgtgcggcagaccatcgcgatggcgcggtccgtgcaccggcagcgctaccgcatgggggtcggctacaaggtcgcgcccgacggcacgaccacggagaagtactggtagcccgtagaggaggactgctagcagcaggcaggaagggcaggcaggacgaggaagccgtaccgtgtatagctcgtcagcatcatctgcgacgcctaccttgccgtcgtcaggagcatcaagcgagctatcatatccgggagagcccttcggttgaacatgcaatttaagtcga

SEQ ID NO: 93803 - DNA, 491 bp, Zea mays
  unsure (1)..(491): unsure at all n locations
tagctgtgatttncccaactgcganaggacgtctcgttccggaattcccgggtcgagccacgcgtccggggaaggccaggactgtgttcctgcgctacacggtgatgtggcgcgactggagcccggcgggggtgctgcccgtgcggatctacatcttcgacgtggccggctgcggcgtggaatacgacgtggaggagcaatgcagcggcggcgcgggcggcgagtgcgtgcacgttaagacggccactcaagcgctgccactgggcggcgacttggtgttcggcgtggcgcaccagcacgcgggcagcgccagcgcgtcgctgcacagcgacaacagccgcctgctgtgctagtccgcggccacatacgggggcggtcaataggccatggacaaagctgtctacatcgtcagcatgtccacgtgctacccgcgctcccacgccatcacagtgctcgactgggagccgctcaacgtcgtgtacaggtacagt

SEQ ID NO: 93804 - DNA, 510 bp, Zea mays
  unsure (1)..(510): unsure at all n locations
gtagcnntcnntnacccactcatgtaaagtacgccatcgcggtactcggtaattcccgggtcgacccacgcgtccgcatcgatcacgacaagatggcgtgcacagacaatgcgatgagagccttgttcctccgggtgctcttctgcatcgtgcatgtgagaaggaagagtcaaagggcatcgatgcgaaagcgtccgggcctggtgggttcttcgacatcaccaagttgggcgcctccggcaatggcaagacagacagcacgaaggctgtgcaggaggcatgggcatcggcgtgcggcggcactgggaagcagacaatcctcatacccaagggcgacttccttgtcggacaactcaacttcacaggcccttgcaagggcgacgtgaccatccaggtggatggcaatctgctggcgaccacggacctaagccagtacaaggaacatgggaattggatcgagattctacgcgtggataacctggtcatcaccggcaagggaaaccttgacgg

SEQ ID NO: 93805 - DNA, 494 bp, Zea mays
  unsure (1)..(494): unsure at all n locations
tatgctgtggcttgcctcacnccnctcnagtacatccncggtccggaattcccgggtcgagccacgcgtccgcccacgcgtccgcccacgcgtccgccgacgcgtgggaggaacgaatctgctgatagggcggtggtggcctataaggctgctcaagacattgatctggctgagctcgcacctacccatccgataaggctgggacttgctcttaatctttcagagctctattatgagactctgaactccccagacaaagcttgcaacctggcaaagcaggcgtttgatgaagctatctctgagttacacagccctggagaggagtcatacaaggatagcactctgatcatgcaactactgagggataacttgaccctttggacatccgacctcacggaggatagtgctgatcagggcaaagatgccccgaaaggcgatgcatgctacggacagttatcctctgagggcggtgcaaagttgctccagccccaaag

SEQ ID NO: 93806 - DNA, 501 bp, Zea mays
gatagggtggtgtcccctaccctgccctccgctatcctgtccggaattcccgggtcgacccacgcgtccgcggacgcgtggggtcgaccaacctgcggcagtaccacaagaactaccagcgggacgggtggagccgcgtgctggggctgctccgcgacgacggcgtgctgacggtgaagggccacgtgcagaagccggtgctcaaggagcggttcaagcagttcaacgccgccatggacgagatccaccggacgcagggcgcatgggtcgtcagcgacgagcagctgcagtcggagctgcgcgtctccatcgccgccgtcgtcgtgccggcctaccgctccttcctcggccgcttcgcgcagcacttcagcgccgggagacagacggagaagtacgtcaagctcagcgctgaggacgtggagaccatcatcgacgagctcttcgacggcaacgccacgtccatgacgatgaggaaagacatgccaccatttactacaccct

SEQ ID NO: 93807 - DNA, 502 bp, Zea mays
  unsure (1)..(502): unsure at all n locations
gaggtcgttgtcccctagcccnnctcacggacgtcncggtccggaattcccgggtcgagccacgcgtccgcggacgcgtgggcggacgcgtgggaagcaaagcaagtgtctgctcactcagtcctggtcaagagctcgctctcggagaaaaaaacgcgggaggcgataatggagggaggtgccggtgcgagcgagaaagggaaggtgctggtcacgggggcgtcgggcttcgtcggctcctggctcgtcatgaagctcctccaggccggctacaccgtccgggcgaccgtgcgcgatcccgcgaacgttgggaagacgaagccattgatggaccttcccggagcaacggagcgcctgtccatatggaaagccgacctgtcggaggaaggcagcttccacgacgccatcaggggctgcaccggcgtcttccacgtggccacgcccatggacttcctgtccaaagaccctgaggtagatcagtctctagctctggctgcacaan

SEQ ID NO: 93808 - DNA, 496 bp, Zea mays
tagggtcgtcccctagccttagctccgctactgcggtaccggtccggaattcccgggtcgacccacgcgtccggcgacgcgcaaggcgacgccttcacgtcctcctagatctgctgcttctcatcaagacgggctttgtcctgcccgtccattccgaggactgctgggccgacacccgcgtcatctgcaccaagacgcacaactgccgggacgacacttgcgcggggcgcggcatgccggacggccgctgccactgggagttccccaacctggtgcccttctgccagtgcctgcgccccaactgccactagttcgggcgcctcggattggctcacttcgccggcgatgatggatggtgcccaactgcgactgcccagtctgctccattcgttgttgtttaaggcataatatctaaactgccaaattcacatgtatcttgggatatttgatatcatactatgaaatgactgtgaatcggtgttcaaaaaaaaaaaat

SEQ ID NO: 93809 - DNA, 502 bp, Zea mays
  unsure (1)..(502): unsure at all n locations
tgtgatggntcgtttgccttcccctgcccatcagcataactgtccggaattcccgggtcgacccacgcgtccggctagctctctgttgaccattgcgtattctgaaccatcgagccatggctgccaagcgtactggcctccacagtcttcgcgaacgccttggtgccaccttctcctcccatcccaatgaactgatagcactcttttccaggtatgttcaccagggcaagggaatgcttcagcgccatcagctgcttgcggagtttgatgccctgtttgatagtgacaaggagaagtatgcaccctttgaagacattcttcgtgctgctcacgaagcaattgtgctccccccatgggttgcacttgctatcaggccaaggcctcgtgtctgggattacattcgggtgaatgtaagtgagcttgctttggaggtacttagtgtttcttagtacttggcatttaaggaacaacttgttggttggccattccaactatcaacttt

SEQ ID NO: 93810 - DNA, 504 bp, Zea mays
agttggtgcgtgctgaatgccaggcttccgacgcactgctataccggtccggaattcccgggtcgacccacgcgtccgcgaccagcaggaggtacgagcaagaccacctaggaggcctctctctccctctcccgagccacgcccgtagcgagagggagggcggaagaggatgagcgcgtccaggttcataaagtgcgtcacggtcggggacggcgccgtcggcaagacctgcatgctcatctcctacaccttcaacaccttccccaccgactatgttccgacagtgtttgataacttcagtgccaacgttgtggttgatggtaacactgtcaaccttggcctctgggacactgcaggtcaagaggattacaacagactgagaccactgagctatcgtggagctgatgtttttcttctggctttctcactgatcagtaaggccagctatgagaatgtttcgaagaaatggatacctgaactgaagcattatgcacctggtgtgcc

SEQ ID NO: 93811 - DNA, 504 bp, Zea mays
  unsure (1)..(504): unsure at all n locations
ngaggcctgtggcgcactcgctctagtaagctactagcggtaccggtccggaattcccgggtcgacccacgcgtccggttctagacgcgagcggccgcccttttttttttttttttttatcaaaagtaggtgntgtttctcgtagccatgagacccatcaaatcaaattaatgaagcacccatcaacaattagcaagaccgatgaactagcaaggcttcttgcagaagcacttgcgcatggccacgtcccgcttgcactcgccaccgggaaagctctccttcatgcacacctcggcgcatctgtcgctgttgaagcagaagccctcgaactggagactcggcgataagcattgactctcttccttctccgtgcttttctgctccttcttctccttctcctgctgtttcgctttctccattatcaaggcatgcatgggcatggctactcccattttggcatcgatggttcccacctctgctgcgacgaggaggagaaacaagaat

SEQ ID NO: 93812 - DNA, 493 bp, Zea mays
gagggtggtgccatcgaaatagttagctacgctcgtaccggtccggaattcccgggtcgacccacgcgtccggacgaccactccctccacaacgccttcagcacctacggcgaggtcctcgagtccaagatcatcctcgatcgggagacgcagaggtcccgcggcttcggcttcgtcaccttctccacggaggaggcgatgcggaacgccatcgagggcatgaacggcaaggagctggacggccgcaacatcaccgtcaacgaggcccagtcccgcggcggccgtggaggcggcggcggcggcgggtacggtggtggccgtggaggcggcggctacggcggtggcgggcgccgtgatggcggcggcggctacggcggtggcggcggctacggtggtggcggcggcggctacggtggtggtggcggctgctacggcggtggcaaccgtggcggcggctacggcaactccgacgggaactggaggaactgagcgg

SEQ ID NO: 93813 - DNA, 496 bp, Zea mays
cgttagaggtgctgcgccatttcgatagtaccgctataccggtccggaattcccgggtcgacccacgcgtccgcccacgcgtccgcccacgcgtccgcggacgcgtgggaggaaggaatctgctgagagggcaatggtggcctataaggctgctcaggacattgctctggctgagctggcacctacccatccgataaggctgggacttgctcttaatttttcagtgttctattatgagattctgaactccccagacaaagcttgcaacctggcaaagcaggcgtttgatgaagctatctctgagttagacagccttggtgaggagtcatacaaggatagcactctgatcatgcaactcctgagggataacttgaccctttggacatccgacctcacggaggatggtgctgatgagggcaaagatgccccgaaaggcgatgcatgcgatggacagtaatctttggaggggggtgcatagatgttcgagccccatgtt

SEQ ID NO: 93814 - DNA, 501 bp, Zea mays
  unsure (1)..(501): unsure at all n locations
cgatgagtgtgcttgcgcttacnncgaccgtgcgctataccggtccggaattcccgggtcgacccacgcgtccgcggacgcgtgggtgctatagctatggaaggccctcaaatgtgggctgctggttggcgaaaggctcttgcagaagttggacccaatgttgtctggtggattgctgcacagagcgtgttctaccacttatataaccaggtgtcctacatgtctctcgatcagatttctccattgacattcagcattggcaatacaatgaagcgtatatcagtgattgtttcatcaatcattatcttccacactcctgtccgcgctgtcaatgcactgggagctgccattgccatccttggcacattcctgtactctcaggcaaaggtgtgaggcgggccatgatgactaacgtctgcagaatcagtagcaagcactaaatccaattttgcttgttccagtggcatgtaaatatcgggttaggttttcgtatgagaattn

SEQ ID NO: 93815 - DNA, 503 bp, Zea mays
  unsure (1)..(503): unsure at all n locations
tgttattagttgcgtgggnccttttcgtancgtancgctataccggtctcggaattcccgggtcgacccacgcgtccgaaaggggtggtgattacagtgaaatgtctaaggcgtacagaccattccatgcagatgcaacggatgacttcaagtatggagttagagctgtgcatggaggtggaaggtcatcagccagagaaaccattggcagggtggctgcaggagctcttgcaaagaaaattctaaagctcaaatcaggagtggagatcttggcatttgtttctaaagtgcaccaagtcgtactttcagaagatgcagttgattatgagactgtaaccttggaacatatagagagcaacatcgttagatgtcctgatccataatatgcacagaagatgattgctgccattgatacggtacgagttataggagattcaattggtggggtcgtcacatgcattgcaagaaatgttcctcgtggtcttggctctcctgtatatgat

SEQ ID NO: 93816 - DNA, 497 bp, Zea mays
tatggtgcgtgtccctcgactggttgccagtgccgtcccggtccggaattcccgggtcgacccacgcgtccgctgacgtccagaggctaccgtgccctggtatacagcggcgaccatgacctgctgggggcggatctgggcacccaggcctgggtcaggtcgctcaacttccgcgtcgtggacgactggatggcgtggcatctcggtggccagtcagctggatttacgatgactgactcaaacaacatgacattcgcgactatcaagggcgcctggcatacaggacctgagtacgagccggagaggtgtttcgccatgttcagccgctggatcctcaaccggtcactctaatccatatgtacgtggatccatcagtgaatgaagagattcgtgtgtaaatctttcttcacgaaactactggctatgagacgtacgtggatggaataaaatgctggctatgaacccttgacgctgatgatatatatatactccactag

SEQ ID NO: 93817 - DNA, 497 bp, Zea mays
  unsure (1)..(497): unsure at all n locations
agctntggcccataagaaaaagtacgcaactgctcgtaccggtccggaattcccgggtcgacccacgcgtccgcccacgcgtccgctcctccatcaccaccaaactcaacaacagccagctcgcgaaaataatgaagagccgcagcatggcatcatcggccgcgctcttggtgctagccctcgcgctagtggcggccaccgccccacaggtagcggaggcaaagaagaagagagcggcggagagcggcgaggcggcggaggcgaagaagatccaggacgacttctgctcgacgctgtgcgagggcaagaaggggacggacctggtcgtgtgcaaggagtcctgcgcgctctcccagcagtccaacctggtgctgtacggcaggatccagtgcaagggcaagtgcaccgagcagaagggcatcacggcgccggccatgaaggtctgccaggaggagtgcgacaaggcgtacgtggtgaaggcggccgaggtcaccaag

SEQ ID NO: 93818 - DNA, 501 bp, Zea mays
gtttgactgtggtgaggcttgaaacgtgtgcatagcagtaccggtccggaattcccgggtcgagccacgcgtccgcgaaaatgcagctcccctgcctcatgcccatcaaatcgttaaacttgttagatcgggaggcggagagaggccagactgatgggaatggcagcgaaggagcactttgtgcttgttcatggtgaagggcatggagcctggtgctggttcaagctccgctggctccttgagggtgctggctaccatgttacatgcattgacctagccggaggcggcgtcgatcctactgaccccaacacaatccggtcgttccagcagtacgacaagccactcatagacctcatttcaaccttgccggagggggagaaggtgattctaatcggacatggtgctggagggctgagtgtgattcatgcaatgcacgaatttgttgacagaatcagccaagcattttttgtggcagctacaatgctaccatttggatttcaa

SEQ ID NO: 93819 - DNA, 500 bp, Zea mays
agcattgagctcggtgcgccgattccgacgtaccgcctatcccgtccggaattcccgggtcgacccacgcgtccgaggaaggccaccacgatcgtggaggagtacttctccacggacgacgtcgccgcgacggcgagcgagctgcgggagctccgcgtcccgtgctaccacttctacttcgtcaagaagctggtctccgtggcaatggaccgccacgacagggagaaggagaaggcggcggtgctgctgtcctcgctctacggcgacgtcgtcgaccgcccgcagctctgcaaggccttctgcaagctcaccgagtcctgcgacgacctgtccgtcgacacgcccgacgccgtcgacatcctcgccgtgttcgtcgcccgcgccgtcgtcgacgacatgctgccgccggcgttcctggccacgcagagcgcgcgcctgccccacgggtgcaagggcgccaaggtcctccgcagggcggagaagagctacctgtccgtgcc

SEQ ID NO: 93820 - DNA, 500 bp, Zea mays
ggtgagatgctgcggcctgaccgcccgtaccgctataccggtccggaattcccgggtcgacccacgcgtccgcccacgcgtacgcccacgcgtccggctacatggtctccaagaagaagtacatctacggcatggacgacgactgcttcgttgccaaggacccatcaggcaaggatatcaatgcccttgagcagcacatcaagaacctcctcagcccgtccacaccgttcttcttcaacaccctgtacgacccctaccgtgagggtgctgactttgtgcgtggataccccttcagcctcagggagggtgcccacactgctgtctcccacggcctgtggctgaacatccctgactatgatgcacccacccagctggtcaagcctaaggagaggaacgaaaggtacgttgatgctgtcatgacaatcctcaagggaaccttgttccccatgtgcggcatgaaccttgccttcgacagggatctcattggccctgccatgtac

SEQ ID NO: 93821 - DNA, 496 bp, Zea mays
  unsure (1)..(496): unsure at all n locations
cgtttgaggtgcntgcccctgaccgctcgtacgccgtaccggccggattcccgggtcgacccacgcgtccgcgcttcaacgacggcgtgcacagggcgacggcgacgcggtcgcggtccctggcgcagagggcgcggggcccctgcacggcgaccaaccccatcgaccagtgctggcggtgccgccgcgactgggcccgcgaccgcaagcgcctggccaggtgcgccatgggcttcggccacaggaccaccggcgggctggccggcaagttctacgtggtgattgaccccagcgacgacgccgccgacctcgtcacccccaggaagggcacgctccggcacgccgtgacccgggcccgggcgctgtggatcaccttcgcgcgcgacatggtgatcgagctctgccaggagctcatcgtgagcagcgacaagaccatcgacgggcgcggagcgcatgtgcacatcgtgggcgcgcagatcacgctgcagaacgtgcg

SEQ ID NO: 93822 - DNA, 499 bp, Zea mays
  unsure (1)..(499): unsure at all n locations
catctgttgctgnnncagtttccgcacgtactatcnctgttcgtaattcccgggtcgagccacgcgtccgcggacgcgtggggttgccaaagaattcccttccctagccgtcgtccgcgctcgtctggctgggaagttcccggacccgagattttgcccaattcttaggttaaaaatcggtttacctggcttaaccccgggtcttcttcctttggttgttgttaaagggaaaaaattcttagatctgttccggatcaagcgttccaactcgggaatcaagggtttcacacatatatttgtccatttgaaaattatgtactcaaggggtctaaaggtggcaaaaagtctagcaattgtcgttctatgatgtatgaagcttccctttgctacaacatttaggacgttcgacctgccggaagcgtgaagaaatttcaatctgctgcttactccaactgcgcgaaaaaaccatactgatatcccttttgtgcttcctcaattt

SEQ ID NO: 93823 - DNA, 502 bp, Zea mays
gttagtgcctatggtcaactccagtcactacgtacctgctgtaccggtccggaattcccgggtcgacccacgcgtccgaattcaacgacaaagcagaccggatccacaacgccatcctccagaccatcgccgaggggaagtacaggactgctgatcttggtggaaaggcatcgacatcagagtttacaaacgcagtctgtgatcacatctgagaaacggatgtgattcttccttctgattgttttgtcatcctaatatttttttgtcacatatgagaggagctttagctttaagaggttaactggcagcacctcgaacttctttggggtgtttaacacggtttgagaccgtcaaataattttgtcacatttcttgcggttcagaaattctttcaacattggaatggagccaagaattgtctgtaataatcaacatcagcattataacagtatgtagggtttatctcaaaaaaaaaaaaaaaagggcggccgctctagaggat

SEQ ID NO: 93824 - DNA, 498 bp, Zea mays
gcgttagcgtgtttcccaactcgcacgactgacgtctcggtccggaattcccgggtcgagccacgcgtccgcccacgcgtccgcaggatgccccgcagcggcatttcggggaccctcaggtcgccccggagggacgtggtcatcggcacggggaaccccttcctgaaccgcaccgtcgacggcttcctcaagatcggcgctgtcggcgcctgcaaggtggcggccgacgagaccttcgactgcctccacaggggggatgtttcaaagcgcaaggttgagcatgccctgaagaatatgtgcaaggagggcgcatattgggggactgttgctggcgtctacgtgggcgtggtgtatggcgtgcagagggtccgtgggcgcaatgactggaagaacgcgatggtccgacgcgccttgtccggcgcgctggtcttcggcgtcagcaccaaccacggagacaagatcgtcaaggacgccatcaccgtcggcgccgtcgcaacg

SEQ ID NO: 93825 - DNA, 495 bp, Zea mays
  unsure (1)..(495): unsure at all n locations
cggctgtggcgtcccctaccctgctgcagtactgtcncggtccggaattcccgggtcgacgccacgcgtccggggaagacgaagacagagtccgagattttgtggatcgaggtgaagcccggttggaagaagggcaccaagatcacgttcgccggtaagggcaaccagcagtggaaccagctccccgccgatctggtcttcgtggtcgacgagaagccccaccccgtgtaccggcgtgacggcaacgacctgttggccgaggtccgtgtgacgctcgcccaggcgctgggcggcacggtcgtcgtcctcaccgcgctcgacggccgcgagctcgccgtcgacgtgggcggcggcggcgaggacgaggacgatgaggacgacgcgcccgtggtgtgccccggctacgagctggtgctgcctggcgaaggcatgcccatcgngcgcgagcccggccgccgaggcaacttaaggatccgttcgacgtcgctttcccga

SEQ ID NO: 93826 - DNA, 499 bp, Zea mays
  unsure (1)..(499): unsure at all n locations
gggaggcacantncccatgcagctagtacgtaccgcctgtaccggtccggaattcccgggtcgacctacgcgtccgcccacgcgtccgcccacgcgtccgcccacgcgtccgcactgcctcaacgctgctgcggagcaaccgaagaagagcttcgatgatcgccgccgggcgcaggtgtttctgcgtgaccacatatccaactcggtcaacatcgtgtgctacgtcctcctgtcgatggtctccgtcgccgccataccgtacctctacccgcagatgcggcgcgcgcacgtcgccctcatctacctcgccgcgccggtcgtcgcgttctgcgacgcgtacgccttcggcgtgacggacatgaacctgtcgagcacctacggcaagctcgccatggtgctcgtgggctccagcgtggggcgcaacgacggcggcgtcgtcgccggcctcgtggcctgtgggatcgtgatggggaccatgtccaacgccaacaacctgatg

SEQ ID NO: 93827 - DNA, 496 bp, Zea mays
gtaagggtctgccctcgatagcagtaagcactagctcgtaccggtccggaattcccgggtcgacccacgcgtccgcgccgttgtggatattgatgtgcactacgggaatggcaccgcggagggcttctatgggacagacaccgtgttgacgatgtctcttcacatgatgcatggttcttgggggccatcgcatccgcagagtggctccgtcgatgagattggtgagggcaaggggcttgggtacaatctcaatatacctttgcctaatggaagtggagatgctgcgtatgaatatgcgatgaacgagttggttgttccatcgattgataagtttcagcctcaactgttgtttcttgtggtcggccaagattccagtgcgtttgatcccaatggaagacagtgcttgaccatggaaggctacaggaaaattggacaaataatgaggcgcctggctgatcgccattgcaatgggcaaatactggttgtccaggaaggg

SEQ ID NO: 93828 - DNA, 501 bp, Zea mays
  unsure (1)..(501): unsure at all n locations
gantagttgcttcgccctacnctgagcgtcatgctgtaccggtccggaattcccgggtcgacccacgcgtccgcgcacttcttgatgaggcatgtatgttccccaagtccacacacgagacgtttgcccggaagctataccagacttttcaaaagcacaagcggtttgtgaagccgaagctatctcgtaccgattttacaatctgtcactacgccggagaggtgctgtaccagtctgatcagttccttgacaaaaacaaagactacgttgtggcggagcaccaggaactgctgagcgcttctaaatgctcgtttatctccggattgtttccgcctccgccagaggagacgtccaaatcgtccaagttctcttccattggagctcgctttaagcaacaacttcaagcccttatggacacattgaactccacagagcctcactatattagatgtgtgaagccaaacaatgtcctgaaaccagcgatctttgagaacgtcaatg

SEQ ID NO: 93829 - DNA, 498 bp, Zea mays
cgcggttggagatggcttgacttggctccatgacgtaccggtccggaattcccgggtcgacccacgcgttcgcggacgcgtgggcggcaggatcaagttcaaggcgttcgaccttgggggccaccagagggggcgccgcgtctggaaggactactacgccaaggttgatgctgttgtgtacttggtggatgctgttgacaaggaacgttttgccgagtcgaagaaggagctcgatgcgcttcttgcagatgactcccttgcaaacgttcctttccttatactgggcaacaagattgacattccatacgcggcttcagaggaagagctgaggtactaccttggcctgagcaactttacaaccgggaaaggcaacgtgaacttggccgacttcaacgttcggcccctggagaacttcatgtgcaatgtggtgcgcaagatgggctattgcgaaggcttcaaatggatgtctcaagtcattaagtgagtcgctgctgtcct

SEQ ID NO: 93830 - DNA, 495 bp, Zea mays
  unsure (1)..(495): unsure at all n locations
gcggtgctgtccctgactggttgccactgcctgtcccggtccggaattcccgggtcgacccacgcgtccggagagagacgcaggcccgccggcgacgatcgaggagggaggaaccagagacccggcggcggcgacgatggctccgcgcagctcatcggcggcgacgtgcctgtgcctcgctctcgccgcggccacgctggcgctggcccacggtgcgcaaggaggaggaccatcggcatcggcggcggacctggacaaggtcacggccgagaccttcttcgacatcgagatcgacggcaagcctgcaggccggatcgtgctgggactgtttggggacaccgttcctaaaactgcagagaacttccgagcactttgcacaggggagaaaggaattgccaagtccggcaagcctctgtggtacaaggggtcgacgttccacaggatcatcccggggttcatgatccagggaggcgacttcaccaacggcaacggccn

SEQ ID NO: 93831 - DNA, 497 bp, Zea mays
  unsure (1)..(497): unsure at all n locations
gaaagccgntggcggactccagccactccgtaccgctgtaccggtccggaattcccgggtcgacccacgcgtccgggccggctcgttgcacctcggcctccgactcccttggtcagcatagctgtcgcggcgggctccagcccgggcccctccgcgcccctctcctgccgcggaccggcgcctcgctggcgacgttcgagcgtgagggcgcgcaccggggccgacgacggccgcgggcatagggagtccccgtacgaggtgctcggcgtgtcgccgtctgcggcgcccaacgagatcaagcgcgcgtaccggcgcctcgcgctcaagtaccacccggacgtgaacaaggagcccaatgctcatgagaagtatctgcggatcaagcacgcttacaacactctgatgaactcagagtcacgatccaagtacgcgagcagcagttcggattcgtcctggtcctccagctaccgggagaggaaatcagctgctgcagaaga

SEQ ID NO: 93832 - DNA, 497 bp, Zea mays
  unsure (1)..(497): unsure at all n locations
ngtaggttnntncccactgcagtcagtaagtaccgctcgtaccggtccggaattcccgggtcgacccacgcgtccgcggacgcgtgggcggacgcgtgggcggacgcgtgggcggacgcgtgggcggacgcgtgggcggacgcgtgggcgcggctccgaatggcaacttccccgaaccccgcgacgattcaccgagccggcgcccagtgacccttccagaagcttccagaaggtcaccgccatggccgcgcccttcttttccactcctttccagccctacgtctaccagagccagcaaggatctgtgacggcgtttcagatatccggtggagatgtgcaggtcctgcaggtgatgctgaagtctcaggagaagctgactgcaaaaccaggtgcaatgtgctacatgtctgggaacatgcagatggacaacaattacttgcctgaaaatgatggaggcgtgtggcagtggatttttgggaaacgtgtaagcagcacca

SEQ ID NO: 93833 - DNA, 498 bp, Zea mays
  unsure (1)..(498): unsure at all n locations
atggggnnnnccatgacgtagcagtacgcatcactcctactggtccggaattcccgggtcgacccacgcgtccgggggctacagccgcaaagacctcggcgtcagctacgttaaggagaagcagctgacggtcaacatggggatcagcaagctgagggagaaggtgaaggagcaccaagagaagttccacagcgcggccaagatcgctggaaccaaccccgtggagtggatggagaatgccgaccgttggatcgtcgggttcctcgagaagttcgaggaaggatgccacatgatggaaaccgccattaaaggtcgaattcaggagggtctgaagaggcaaggcaggtcagagtcgaacctttccggagaggactccgactcgtaataatggtctgtagtatccaaatcaaactagacggaagctggactggaggtcatactcgcgcagtctgtgtaacagtgtgagattgattagcatgtttttgtaggagatcagga

SEQ ID NO: 93834 - DNA, 503 bp, Zea mays
  unsure (1)..(503): unsure at all n locations
gtntttggggnnnnccatgatgacctctagtacngccgtnccggttcggaattcccgggtcgacccacgcgtccgatcattaccatcgccgcgcccgcctgctggctcgccggcgatcgaatttgaccgccggtccgcgagcggagcatacgtgcatacatggtttgcctgacgccggcggcggcggcgctgctgctcgtcgtcgtcctagcggcggccgtgtccgcgctcccggcgatcaacgtgacgacgatggcgttcgaggacgggtacgcgccgctgttcgggcacggcaacatcctccgctccgccgaccaccgcaccgtcagcctcctcctcgaccgttccaccgggtccggtttcatctcgtcgtccatgtaccagcacggcttcttcagcgcgtccatcaagctccccttcgactacaccgncggcgtcgtcgtcgccttctacgcgtncaacggcgacgtgttcgagaagcggcacgacgagctggacttcga

SEQ ID NO: 93835 - DNA, 505 bp, Zea mays
  unsure (1)..(505): unsure at all n locations
agtttgtggttggtgagccccagctcganagcactgctcgtaccggtccggaattcccgggtcgacccacgcgtccgggtcaaaccaaccgcgatccgcgaatccgcgggagaggaggggaggggcgcgggggcgatggagttcctgcagggccagaggctggagaccacgctggccgtcgcgggcgccgtcgttgccgtcgcagccggctccgcctacctcttcctccgcagtaggaagcccaggggatgcctagaccccgagaacttcaaggagtttaaacttgttgagaagaggcagctgagtcataatgttgccaagttcaagtttgcgctcccaacacctacttctgtattgggtcttccaatcggacagcatataagctgcagaggacaggatgcttctggcgaagaagtgatcaagccttatactccaactactctggactctgatgttggatcttttgagcttgttataaagatgtatccncaaagaagaatgtccn

SEQ ID NO: 93836 - DNA, 607 bp, Zea mays
  unsure (1)..(607): unsure at all n locations
atatgatatgtatgtagttattatattnnttagattattatagnatgnatgtgtgatgataaatgttgatnatttatatatagtatgcggggnataaatttagtcctgatgccatngctannccccnnnnnttcggaattcccgggtcgacccacgcgtccggccacccggccccaacatcaccaccaactacaacggcaagtggctcaccgctagggccacctggtacggtcagcccaacggtgccggcgctcctgacaacggcggtgcgtgcgggatcaagaacgtgaacctgccaccctacagcggcatgacggcgtgcggcaacgtccccatcttcaaggacggcaagggctgcggctcatgctacgaagtgagatgcagggaaaaccctgaatggctcggcaatcaatcaacggggacattaatggccttaacctacaacctatcggttcctaacaatttgacttgaaccgcaaagccttcggcttcctggcaaagcccgggcttaaccgacagattcggcactgcgggattatgggacgttcagttcaaaaagggtgcgatgccagtaccccggcgggcagaagatcgtgttccacatcga

SEQ ID NO: 93837 - DNA, 497 bp, Zea mays
gtagaggccaatcggcctgccagccatacgctatgctgtaccggtccggaattcccgggtcgacccacgcgtccggagagagagagagagatggatgaggagtacgacgtgatcgtgttggggacggggctcaaggagtgcatcatcagcggcctcctctccgtcgatggcctcaaggtccttcacatggacaggaatgactactacggaggagaatcttcgtccctgaatctaaccaagctctggaacaggttcaagggcaacgacagccctcccgagcacctgggcgtcagcaaagagtacaacgtcgacatggtgcccaagttcatgatggcaaacggcgcgctggtccgcgtcctgatccgcaccagcgtgaccaagtatctcaacttcaaagctgttgacgggagctttgtgtacaacaatggcaagatccacaaagtcccggcaaccgacgtggaggccctcaagtcgaacctgatgggcctgttcgagaa

SEQ ID NO: 93838 - DNA, 592 bp, Zea mays
  unsure (1)..(592): unsure at all n locations
atattatgtgtnattatgtatatgtaagnatnatataagattagaatttatgaatatatttttaggntnaaaattatatttattatgnnnattaagtcgtgagtagtgagaagactgtatgctcgtccggtccggaattcccgggtcgacccacgcgtccgccaaaacttagaggtctcttggacttggtttgaggttgaaaatcgcattgggtgctggaaagggaattttgtatctacatactgaagcagatccacctatattccaccgtgatgttaaggccagcaacattctgttggactccaaattcgttgcaaaggtagccgattttggtctctcgaggcttgctccagtgccagatgtcgaagggacattgccagctcacgtatccactgttgtcaagggcaccccaggctatcttgatccggaatacttcctaactcacaaactgaccgacaagagtgatgtttacagcctgggtgtcgtgttccttgaaatgttaactggtatgaaaccaattgagcatggtaaaaacatagtgagagaggtaaactcagcttgccagtcgggcgcagtttctggaataatcgat

SEQ ID NO: 93839 - DNA, 531 bp, Zea mays
  unsure (1)..(531): unsure at all n locations
agatagatggtgntntattnnncccaagctcccancancgctataaccgtccttaattctgaatagcaggggcgagccacgcgtccggttcattcgacgcgagaggaattgagtgggcatgtatgtgatggtaaactgttcacggttcaaacttgaaagcgcactgattcaagggcaaaaaatggtgtcagcaggagctgcaacgtcacagttttttagatttgtttgagcagtttaacattatgtatgtttggttagatcgtttgtagatctatatatatattcacttaaatccacatgtgttggagtggtattggtttttatatttttttattttttcttcttatttttatttcatattttttatatctttattatttttggtatattatttttttttttttattttttttttatttattatatttttcttatttttatatttttattatttttatcttatttttataattttttatttttttattattcttttcatttaattattttattcttattttatttatattg

SEQ ID NO: 93840 - DNA, 597 bp, Zea mays
  unsure (1)..(597): unsure at all n locations
ggatgatatagatattgttagtagaggatcatggtatgtatntatgntgagagttgtgggtggatgatatttatatatagttatggagagtgngtgagttagtagaaagatgtaatgctagtacnggtccggaattcccgggtcgacccacgcgtccggcgccccggactccttctactaccagctgaagcggcagctgggcgagatggcccaggaccggtgcgacttcgccgaggaggaggagtcgcgggtggaggccggcctcatccacctgcgctcgctgcagaagcgcaccggcagctacttccgctacacgggctccctcaccgtgccgccatgcaccgagaacgtcgtctggagcgtcctcggcaaggtgcgccagatcagccaggaccagctgcagctgctcaaggcgccgctgcccgggagcgacgcgcgccccacgcagccgctcaacggcaggaccgtccaattctacaacccgtccaacagcaccatctacttccagatctaacactaaagagtactttggaatctttaatatagcggaactctgtttatgattaaaaaagaaaaaagggcggtcgctctagagga

SEQ ID NO: 93841 - DNA, 508 bp, Zea mays
aagttataaaatgtgctgacctacgcctatagtactgctctaccggtccggaattcccgggtcgacccacgcgtccggcccaggcaacaagagacacgaataaagcatcgatcacaacaagatggcatgtatagacaatgcaatgagagccttgttccttctagcgctcttctgcaccgtgcatggtgagaaggcaaagtcaaaggacaacgattcaaaagcgtccgggcccggtgggtccttcgacatcaccaagttgggcgcctctggcaatggcaagacggatagcacgaatgctgtgcaagaggcgtgggcatcggcgtgcggcggcaccgggaagcagacgatcctcatccccaagggcgacttcctcgtcggaccactcaacttcacaggcccatgcaagggcgacgtgaccatccaggtgaatggcaatctgctggcgaccacggacctaagccagtacaaggatcatgggaattggatcgagattctacgcgtggacaac

SEQ ID NO: 93842 - DNA, 593 bp, Zea mays
  unsure (1)..(593): unsure at all n locations
atatcatatatcatattgtattagattnttnattgattatttacatntgattatataatttgtatatttgttttaatagatattgtaatgtgctgactcattttagttctccttgcagtacnggtccggaattcccgggtcgacccacgcgtccgcggagttggcaactgcaaggagtgatattgtggtacaacactagttctaattgaaggaatagggcgatgttgaaactgtctgctaccattgcttccatggcaactaatgagaacctcccgccaaatgtcatcaagcaattggctaaagaactgaagaaccttgatgagtcacctccagaagggattaatgtgattgtcaatgatgattacttaactactatttttgctgacattgaaagccctgctggaactccatatgagaacgtagtattcatgatgaagctattattgtcacgcgatttccctcaatctcccccaaaagggtatctctagactaaatatttttcatcctaacataacttctagtggttagatattttgtaactcacttaaaatatgttgtaatattagacgattttaaccaaacgatatagtcag

SEQ ID NO: 93843 - DNA, 584 bp, Zea mays
gtagaattataattttatttattaaaagttagtttgaattcagattaatatatatgagttagatatattttttattgatgcggtgaattagtatgtatgtcttgtactgctgtaccggtccggaattcccgggtcgacccacgcgtccgactacttcaagaggttgttcaacttcaagaaggatagggatggctattggaagtggtgtgctggcaacctggcctctggtggtgctgctggagcttcctctttgttttttgtgtactccctggactacgcgagaacaaggttggctaatgacgcgaaggctgccaagggaggaggtgaaaggcagttcaatgggcttgtcgatgtctaccgcaagacacataagtcagatggtattgctgggctttaccgtggatttaacatctaatgagtttgaatcattgcttaatcgtgactgtactatgggctctatttattacatcaagccagatagccttactgttaacctttaatactatttctttgccaggaccgctctgtgtagtctgaacactaatgtggcttgtaattgcatttacgccagcgatacttgaaga

SEQ ID NO: 93844 - DNA, 512 bp, Zea mays
tatttttttaaatgtgctggtcatgtagaaagatgattgcactgctcgtaccggtccggaattcccgggtcgacccacgcgtccgcaacgggtgagggattgtatgaaggcctggactggctgtccagcaacattgcaaccgggtcctaaattgtcaagcaaggtttggatcatctaggagcttttggatgatgatgatggtgctggatatttagggttgggttggtatttccgtatgtaagatgtatgcccctgagctcggcagtttttgagctctgcttaagattctcacagttaaattgttttatgtaatttgggccttgagatgtttctgaaccaaacagctaaaagagttcagttgagttaactggttgccattattacattatgagattctttgaaaaaaaaaacaaaaaaaaagggcggccgctctagaggatccaagcttacgtacgcgtgcatgcgacgtcatagctcttctatagtgtcacctaaattcaattcactggccg

SEQ ID NO: 93845 - DNA, 505 bp, Zea mays
  unsure (1)..(505): unsure at all n locations
gttgttggtggtngtcgaagtgnaaagcnagtacagctactacggtaccggtccggaattgccgggtcgacccacgcgtccggatctttatattggcaggtggatgctttcaaaaccacgagacaagataattgtggcggccaaagttgccggttattcagagtggtctacatttctttgagacaatgcaaaagtggttcgtgttggtgctgccaatatcaaagaaagtattgaaatgagtcttaaacgcttgtctacagattacattgatttgcttcagatacactgggttatgttgtgtaccttgtctgtgtgaggcgtggtggtaggaagaggcctttgcccaagtgtattatctatggctagcccaagcaccagggtatcacccaactcaagttctagaggtacaagagctctctcgctgatgagagagctagacgcaagcttggtggactgaaggttcttaacttctactgggtgaacgaagtacattcgaattgaacan

SEQ ID NO: 93846 - DNA, 595 bp, Zea mays
  unsure (1)..(595): unsure at all n locations
gtatgatgtgtatatttaattggattnatatgttatgagataagggagattggattgtaatggagttgtattatattgataatagggtgtgcgantgntgatgtaggaagcatgatggcagtacnggtccggaattcccgggtcgacccacgcgtccgggcaaatgctctcctaggtggcctgtgggcgatcgtcgtcgtcgcgcgcggtcgtcggcgtggtcgccaccgtcacccactccggcaagaaggccggcgacgacttcaccgtcccgggggaagcctccattgccacgtccggcaagtcggtcgagtccctgtgcgcgcccacgttgtacaaggagtcgtgtgagaagacgctctcccaggccaccaatggcaccgagaaccccaaggaggtgttccacagcgttgccaaggtggcgctggagtcggtgaaaacagcggtcgagcagtccaagacgatcggcgaggctaatgccagcgactccatgaccgagagcgcgcgggaggactgcaagaagctcctcgaggacgccgttgacgacctcaggggcatgctcgagatggccggcggcgacatcaaagtgcttatc

SEQ ID NO: 93847 - DNA, 502 bp, Zea mays
  unsure (1)..(502): unsure at all n locations
gtcgatgctgctgctcccggaacgtccgtangctacatcgtaccgttcggaattcccgggtggagccacgcgtccggggttctcttcccttccctgagcaaatagaagtagccacaagcatgtctggggtcagcgacaatatccaggtgaggctccacatcggtggcgaccacaaggaggagcacgagcacaagaagggcgaggagcaccacatgaagggcgaggagcaccacatgaaggacgactgggagcacaaggagggcatcgtggagaagatcaaggacaagatcaccggctagcacggcgacaagtccggcgaccacaaggacaaagaccataaggagaagaaagattttaagaagaagaaagagaagaatcacggggaaggccatgaccatggtgatggtgactgccacagcagcaacatcagcgacagcgactgatctcgccttggcgaacgccgtacgcacaaatgcaccgcgcaggttataatacgagctgt

SEQ ID NO: 93848 - DNA, 499 bp, Zea mays
  unsure (1)..(499): unsure at all n locations
cgtggagccgntgctccggttagtncatacgcactgcagtaccggtccggaattcccgggtcgacccacgcgtccggtgggactacctgccgctcctgcggcggttcgacgtgctcggggtgaggaacgagagcagggacgttgtcggcaggagggacgccttcctgcagcggctcatcgacgcggagcggcggaggctggacggcgacggcgacggcgacgagaagaagagcatgatcgccgtgatgctctcgctgcagaagtcggagccggacgtgtacacggacaccatgatcatggcactgtgcgggaacttgtttacagccggaacggagacgacgtcgtccacgatagaatgggccatgtcgctgctgctgaaccacccggaggcgctgaagaaggccgaggcagagatcgaggcggccgtgggcgcgttccgcctcatcaccatggacgacgtgcccgggctgggctacctgcagtgcgtcatcaacgagac

SEQ ID NO: 93849 - DNA, 587 bp, Zea mays
  unsure (1)..(587): unsure at all n locations
atatgatgtagatattgttattattnagnaggaatagataattntgattagtatatttgtatgtttatataaatttaaaaggggcgtgctgagtcagtttgtactgcgtctgctgtaccggtccggaattcccgggtcgacccacgcgtccgcaccacctcgcctgcgatctccgtagcctccgtcgcgtcgagcatcgatcatgtcgggctactgcggaaagtacaaggatgagctcatcaagaatgctgcctacattggcacccctggcaagggtatccttgctgctgatgagtccactggcaccattggcaagcgcctttccagcatcaatgtcgagaacgttgaggagaaccgccgtgccctccgtgagctcctattctgctgccctggtgctctccagtacatcagcggtgtgatcctcttcgaggagaccctgtaccagaagaccaaggatggcaagccttttgttgatgtcctcaaggagggaggcgtcctccctggcatcaaggttgacaagggcaccattgaggttgttggcactgataaggagaccaccacccaaagccatgacgaccttggcaagc

SEQ ID NO: 93850 - DNA, 509 bp, Zea mays
  unsure (1)..(509): unsure at all n locations
tttttttgggagtgctngtcatgccagttcagtacggcctgcggtaccggtccggaattcccgggtcgacccacgcgtccgggaccttgtcaggcgctacctcggcagcatcgtaccgcctggcgacaactaggatgccgccctcaattcagcggtgttcagcgacggatccttctgctacgtgcccaaggacacggtctgccccatggaaatttcgacttacttcaggatcaacgacaaggagacaggccagcttgagaggactctgattgtagccgatgagagaagctctgttagctatttggaaggctgcactgcaccagcatttgactcaaatcagctgcatgctttagttgtggagcttgtgtgttagaatgtggcagagatcaagtactcgactggtgccaattcgttactctggtgatgaggtggctagtggaggcattgtttgcttagtgacagagtcgctttggtgcatatgtgctctttctgaaatcttattgacacat

SEQ ID NO: 93851 - DNA, 499 bp, Zea mays
  unsure (1)..(499): unsure at all n locations
tgtgaggcctntggacgtgcagcccatancgcaccactgtaccggtccggaattcccgggtcgacccacgcgtccgcccacgcgtacgcccacgcgtccgcccacgcgtccgcggacgcgtgggtcgggccgggcctccctcacacaaataataaggaaaggtcccgcccttttcctccgacatccacaaggggggaggggaaaacacgtacattcacccggcggcaataatggccttggttccggctccggcgacgacgaccgccgtcgtcatcctatgcctatgcgtcgtcctctcctgtgccgcggctgacgacccgaacctccccgactacgtcatccagggccgcgtgtactgcgacacctgccgcgccgggttcgtgaccaacgtcaccgagtacatcgcggacgccaaggtgaggctggagtgcaagcacttcggcaccggcaagctcgagcgcgccatcgacggggtcaccgacgcgaccggcacctacac

SEQ ID NO: 93852 - DNA, 599 bp, Zea mays
  unsure (1)..(599): unsure at all n locations
gtatgtagattgatatttgtatatggttgatnatattatttctgatgttatntattgtgtattatcgatntgatttatatgattatttttgggggtgggctgacgttagtaagaagacgttatggctcgtaccggtccggaattcccgggtcgacccacgcgtccgttcaagaacatcaccggcacctcctccaccccggaggccgttagcctgctctgcagtgccaaggtcccatgcaccggcgtcaccatggatgacgtcaacgtcgagtatagcggcaccaacaacaagaccatggctatatgcacgaacgccaagggcagcaccaagggttgcctcaaggagcttgcatgcttctagacccttcgtcgactgacccatctctctagttataattnttctctcgtccttgcattgcccattagttgctatccattggtaacgcacaacagtaaaacgacagacatccgacagctatattatgttcgacggtgtaacaccctgaatttgaaggtataaaatttcttctctaaataccaaccaaattcaggtgttaaaaataaaatttntgtgtgatttgtaaatcatgcttaatgaa

SEQ ID NO: 93853 - DNA, 496 bp, Zea mays
  unsure (1)..(496): unsure at all n locations
gtaagttgctgaatccgtactgnngtantgctataacgttctctttcgaattgccgggtcgagccacgcgtccgcggacgcgtgggctccatgaaagaaatattgctcacagagacattaaatgcgcaaagattctgatgcatgcaaatggatctgtgaagcttgcagattttgaactcgctaaggagattaccaaattcaatgaacttaaatcatgcaaaggaactgtttattgcatggcaccgcaggttgttgatccgcagcatacatatggacctgcagctgatatatggagtcttggttgcactgtcctggagatgttgacacgccagataccctatcctgaccttgaatggtcacaagctctatacaggatctgtaaggcgtaatcaccatcaatttcaaacactctttctacggatactctataatttataaggccgtgtgtaaaatctaatccgtatacaaaccgtcagcattcaaactgttgaagcct

SEQ ID NO: 93854 - DNA, 583 bp, Zea mays
  unsure (1)..(583): unsure at all n locations
gtattatatagatattgttattattttgatatattaatatttntgataaatttgttggagatgataagttaattttatanaggcgtggtgacttattctcatgtctatgcgtaccggtccggaattcccgggtcgacccacgcgtccggccgccgcccccagtccccgatccgaagctgtgcctcgtaccatttcgatccaatggcgccgacgtcgaagctgtcgacgggcatcaagcgcgcttcgcggtcgcacgcgtaccatcgccgtgggctgtgggccatcaaggccaagaacggcggcgccttccccaaggccgacaaggccgccgccgtcgtggaacccaagttctaccctgccgacgacgtcaagccccgcgttcccagcacccgcaagcctaagcctaccaagctcaggtcgagcatcacgcctgggacggtgctgatcctcctcgcaaggcgcttcatggggaagagagtggtggttctcaagcagctcaagttcggcctgctccttgtctcttggcctttcaagatcaatggagtaccgatccgncgtgtgaaccagacctatgtcattgctn

SEQ ID NO: 93855 - DNA, 510 bp, Zea mays
  unsure (1)..(510): unsure at all n locations
agtagagcggtcgtntaggcctgcactcgctcggtncgctagtaccggttcggaattccaattgccgggtcgacccacgcgtccggaaggatatagtggaagtgatctcaagaacctgtgcacgacggcagcatatcgcccggtgagggagctaatccagaaggaaagaaagaaggagctggagaagctgaagcgtgaaaaaggagaaactccatcggatcttccgaagaaggaagagaccatcaccctaaggccgctgagcatggcagatctgaaggaagcaaagaaccaggtggatccatgccttaccaagtgcaatttgaaacgatgcggatgcagattaacacttttcaacttgaaaaataaactaatggcagttcgaatgttataataccctgtaaactctcaaattcaggtggctgcaagtttcgcttccgaaggtgtctgcatgagcgagctgaagcaatggaacgagttgtatggtgaaggaggctccagaaagaaggaaca

SEQ ID NO: 93856 - DNA, 509 bp, Zea mays
  unsure (1)..(509): unsure at all n locations
tattatagactgtgtgtcctagctgtactgcatcgnctgtaccggtccggaattcccgggtcgacccacgcgtccgcccacgcgtccgcaccgccgctgcacacaaacccagaaaccaccggcaataaacaagtcccgctcccagtctccgatccgaggaagccggaagaggggatttcgagccgcggcgatcggggctagagtggccctcgacgcgtccgcgggtggaattgccgagaagccgagagagaggggttggagcggagttgcgggaggtgggagagaaggcggcgatggggcgcctgttcctgatgcacctggacggcaacgtctacagctgcaagcactgtaagacccacctcagcgttgccagcgacatcatctgcaaggccttccagtgcaagcacggcaaggcgtacctcttccataaggttgtcaacgtgacttctggagtaaaagaagaccggatgatgatcacaggaatgcatactggttctgatatcttctgt

SEQ ID NO: 93857 - DNA, 576 bp, Zea mays
  unsure (1)..(576): unsure at all n locations
ggagttaggtgatagatttatggggaattatgagtgtnattgtgaggtagttaataggngattatgatttaaatggaggggctgagtatgatgggagtgatgcactactggtccggaattcccgggtcgacccacgcgtccgtgcttccgcaccctcaagctcaccaacccttcatttggcgacctgaaccatctgatctcggcgaccatgagcggcgtgacgtgctgcctgcggttcccgggccagctgaactcggacctccgcaagctggcggtgaacctgatcccgttcccgcggctgcacttcttcatggtggggttcgcgccgctgacgtcgcgcgggtcgcagcagtaccgcgcgctgacggtgccggagctgacgcagcagatgtgggacgccaagaacatgatgtgcgcggcggacccgcggcacgggcggtatctgacggcgtccgccatgttccggggccagatgagcaccaatgaggtggacgagcagatgatcaacgtgcaaaacaagaacttcttctacttcgtggagtggatcccaacaacgtcaaatccagcgtgtgcaat

SEQ ID NO: 93858 - DNA, 594 bp, Zea mays
  unsure (1)..(594): unsure at all n locations
gtatgatgtggatatgtgagtggagtnattatagatttgtgatggagntgttgtgaatggttagttgagtgttgagtttattttgtaagttgggtggtgaatttatgcgatacggtatgctgtccggtccggaattcccgggtcgacccacgcgtccggccgtcacgccgatcaagaaccagggcccgtcgtgctctagctgctgggcattcgtgacggcggcgacgatcgagagcatcaccaagatcacgacagggaggctggtgtcgctgtcggagcaagagctgatcgactgcgacccctacgacggcggctgcaacctgggctacttcgtgaacggctacaggtgggtgatccagaacggcgggctcaccaacgaagccaactacccgtaccaagcgcggcgggacgcgtgcaaccggttcaagggccgtcaacacggcggcaacatttgcgactacgtgcaagtgccggcgggcgaaggccaactgcaacaagacggtggcgcaacaggccctggacgcggtcctcgagaatgggcggcaagctgcagttctacagcggcggcgtcttctcgggcaatgcgggaccaag

SEQ ID NO: 93859 - DNA, 581 bp, Zea mays
  unsure (1)..(581): unsure at all n locations
gtataataatgaagtgaattgtttataagttagggagtatgatatatatgttttggtgagtttatattttatatggggganatntctagagaagaacgtacgtcatnacagtaccggtccggaattcccgggtcgacccacgcgtccgcccacgcgtccgaccacgcgtccgtctcaactctcctttcctctcgtgggcgatcggctctctcctgcggcggcggcggcgatcaacgtcgacgactacggtccacgattctccttcgaagcgcgaatcatgatacattttgtgctccttatcagcaggcaggggaaggtgaggctgaccaaatggcacactccatacccacagaagcagagatccatgatcatcacagagattagtacgctcgtcctgacaagaagccccaagctgtgcaattttggctactggcaaggctacagaattgtgtacaatagggatgctagcctttacttctgcatgggcattggccactttgacaatgaactggaaacccttcagatcatccttaactatggtgagatattggcccggtactttggcaatgtctgggaccttt

SEQ ID NO: 93860 - DNA, 509 bp, Zea mays
  unsure (1)..(509): unsure at all n locations
agctaggcnnccccntctactgtatccttggggactgtattactcttccgcttcggaattgccgggtcgacccacgcgtccgaggggatgtaacaacaacccctgttctagcaggtagtcgcccagaggatggggcaacgaccccttcccctggaatgcatgttgatgatgttgctggttccaacttcgttttcagtaataataacaacaaagcgaagaccctcctacctaccctatttgcttgagcggctcttgtccgcgccacaagataccaattgttgcgctgggaatattcagttacgatgacccgctttagttcagttttttttttgggggggttggttcgatcatttggctgtagcgtgaatcgcatggacaacagactgcaattactaagcgcatatttttcttctgcgtaagccgttaacaaaaaaattaacggctttccctttattgcaaccaaatttaccttcgcatacattctaacgtactaagtctaatataaagag

SEQ ID NO: 93861 - DNA, 545 bp, Zea mays
  unsure (1)..(545): unsure at all n locations
cggggnnnnnnccctagcccatgattgcatcgctctaccggtccggaattcccgggtcgaccgacgcgtccgcccacgcgtccgcccacgcgtccgcactcaccccgccttcacgcctccctcaccaaataaggtcccgcccttttccgacattcacaggggggacaggaaatcagcggccatggcctcgattccggcgacgaccttcgccgtcatcttatccgtcctcttctgtgccgcggctggcaccgccgtcgacaacgacctccccgactacgtcatccagggccgcgtctactgcgacacctgccgcgccgggttcgtgaccaatgtcaccgagtacatcgcgggcgccaaggtgaggctggagtgcaagcacttcggcaccggcaagctcgagcgctccatcgacggtgtgaccgacgcgaacggcacgtacacgatcgagctcaaggacagccacgaggaggacatctgctaggtggtcttggtggagagcccgcgcatggactgcgaccaagtgcangctgacaggtaccgcgccg

SEQ ID NO: 93862 - DNA, 538 bp, Zea mays
  unsure (1)..(538): unsure at all n locations
cggggnnatccagtagggacgtatgatcaacactcctnnnttgaattcccgggtcgacccacgcgtccgcccacgcgtccggcgacttcaccgtgacaacaaaggaaggcaaagtgtatgacatcggcaagggccacatcgtcgcgacatcaccatccttcgccaacaggctgccccacatctacaagaaccctgactcatatgaccctgaccggttcggtcccggaagggaggaggacaaggctgcaggtgccttctcgtacatctccttcggtggtggcaggcatgggtgcctcggtgagcccttcgcctaccttcagatcaaggcgatctggacgcacctactgaggaactttgagttcgagctggtatcgccgttcccagagaacgactggaacgccatggtggttggcatcaagggcgaggtgatggttaactacaagaggcggaagcttgtcgtggacaactaagattgtggtcgccagtctctatctcttagatgctngctngcnntcttttgattccattgctttcaccc

SEQ ID NO: 93863 - DNA, 537 bp, Zea mays
  unsure (1)..(537): unsure at all n locations
agttnctgatcatgggtttttggtaggactgctctaccggtccggaattcccgggtcgacccacgcgtccggtcaggggtacgcatgctggttccagttcgggaccagagacagaagactgcatggagatggctagaacctttaacagctgatctatggtttggaactggatccttcgttgtcttcacaggttttatagtttggtttatcgagcacagaacgaatcaggaattcagaggaccgccagccagtcaaattggaacagtcttctacttctccttctcaacacttgtatttgctcatagggagagaattgtgaacaatttatcaagaattgcagtagttgtttggctttttgtggttctaatattgcagcagagttataccgcaagcttaagctcaattctcacggtagaacaacttcaaccaacagtcaccaatttagatgaagttatcagacgaggggattatgttggctacctcaatgattctttcatgcctaaccttttgaaaagggtgaaaattaacgaaacaaaa

SEQ ID NO: 93864 - DNA, 490 bp, Zea mays
  unsure (1)..(490): unsure at all n locations
agtgtgggtggccccagccgcgacgnattgttgtaccggtccggaattcccgggtggaggcacgcgtccggagctcctcgggaatccggtgccaggcctcgccttctcgcggcggtgctccctccctgttcgtcccccagcgacgcaggcaggcgcgcgcgcggccatgaaggggggcggtgccatgaggccgtcgcctatgttctacgtccacgaggcggacgtcgtccagatccaccacttcctcgaggagtgctccctctgcgccaaatcgctctccggcgacatcttcatgtacaggggtgacacgccgttctgcagcgaggagtgcagggagcagcagatcgaggtggacagggcgaagcaccggcggaagaagcgcgcggcggcgcacgcgctgtccgcacgcagcatggagcaccggcaccagcagcagctgcagcagcaccaccaccagcagcagcaaccgcagccgcggaatgccggcatg

SEQ ID NO: 93865 - DNA, 541 bp, Zea mays
  unsure (1)..(541): unsure at all n locations
tattntntntagcatagggggatatgtgagtactcgctcggtccggaattcccgggtcgaccgacgcgtccggcgaagccccttgaaatgaatgaaccatgcatgcatgcatgtatgcatgcgccggggtgaggtggcgttcagctcaggcgctgagcgagtctatacgtacgtcgtcaccggctggccacgcatgcgataaccatctgatatggacggaactatatattgtattcctattaatctggcattttctaagctaattgttttttttccaaatataccgtcgatggaactccaaatgtaatgtcacgcaaatgtgtgtttttcatcgattgaatggataataataaaaaggcatgctggcagttactactaaaaaaaaaaaaaaaaaaaaaaaaaaaaataaaaaaaaaaaaaaaaaagggcggccgttctagaggatccaagcttacgtacgcgtgcatgcaacgtcatagctcttctatagggtcacctaaaatcaattcactggccgtcgtttacaccggtctgactggga

SEQ ID NO: 93866 - DNA, 533 bp, Zea mays
atggtgtcgtgctcgaagagtactactgaaccgctctaccggtccggaattcccgggtcgacccacgcgtccgcccacgcgtccgggcggttcgcgatccaggtgacggggttcctgatgatgacggtgtgcgtgctggggctggccgtgccgtacgagcactggacgacgccggggcaccacatcggcttcatcgtcatgtacggcctcaccttcttcttcgccaacttcgggcccaacgcgaccacgttcatcgtgcccgcggagatcttcccggccaggctgcggtcgacgtgccacggcatctcggcggcgtcggggaagctgggcgccatcatcggctccttcgggttcctgtacctggcgcagaaccgggacccggccaagacggaccacgggtaccccgcgggcatcggcgtgcgcaactcgctgttcctactcgccggctgcaacctgctgggcctggcattcacgttcctggtgccggagtccaagggcaagtccctggaggagatgtccggcgagaacgacga

SEQ ID NO: 93867 - DNA, 493 bp, Zea mays
  unsure (1)..(493): unsure at all n locations
tatggtnttggcgtgacacagaagtacgaccgcatgcttctaccggtccgcaaaatccgggtggagccacgcgtccggtgcagaagagaagcagaaggtcacaccgcgcactgtcatgataggagggaaagcgtgggcaacatacactaatgccaaaagaatagtgaaattggtgaatgatgttggtgctgttgtgaacaatgatcccgaagttaacaaatatctgaaggttgtctttatcccaaattacaatgtatcagtggctgaagtgcttattcctggtagcgaattgtcacagcatattagtactgctggtatggaagcaagtggaacaagcaacatgaaattctctctgaatggttgtgttatcattggcacccttgatggagctaatgttgaaataagagaggaggttggagaagataatttcttccttttcggtgccaaagccgatgaagttgctgggctgaggaaagacagagaaaatggcctg

SEQ ID NO: 93868 - DNA, 491 bp, Zea mays
ttggtggtggaaatgttgtgggggagagtaatagttgtaccggtccggaattcccgggtcgacccacgcgtccgcggccgagcaccatgcgaggaaataacatgccgcggcacacgtcgccgttcctttgggccttgttggcgtcggcggcgaccctgctcagcgtcggcgacgcgttggtcgtcgacggcctgcaggtggggttctatggcaagacgtgcccggcggccgaaggcgtcatcagcgacatcgtcaacaacgaaatcgctatggaccggggcatctcccctggcctcattcgcctcttctttcacgactgcttcatcacgggttgcgacgcttccattctcctggacgagtcgcccgccggcgacgtcccagagaaggagtcgtccgccaacggcttcaccctggtcgggctcagaaccatcgacatcgccaagtccaccgtagagggcatgtgccccggcaaggtctcgtgcgcagacatc

SEQ ID NO: 93869 - DNA, 489 bp, Zea mays
ttgatgactgtgcagtggggtaggagagaatccttcgtccgcgttcggaattcccgggtggaggcacgcgttcgaaaaagtatcaatcgggtttgttaagtgatggtgttcttttatcgaactgggtaggagaagatggcagcagcggagttctaggacttgtgcgtgagaggctcctatcattgtatacttgtgctggttgtggcttggaagctgagcaccaactttgggaaatgaagcttcttggccgagaacctgatacacagctctatgatgttgtattggcaatttgtgcttctcaaggggaagctgctgctgttcgacgcttgcttgcaggagtcgagtcaaccagcgccggaagaaggaagaagtctatgtcatggctactgcgaggctatgtcaaaggtggcttcattctagacgcctcagaaacactcatacagatgctggacatgggcttgcttcctgattacctggatagagctgctt

SEQ ID NO: 93870 - DNA, 531 bp, Zea mays
  unsure (1)..(531): unsure at all n locations
aattnctgcatgtgaggatatgtagtactcgtcccggtccggaattcccgggtcgacccacgcgtccggcggttgattgatatattgaatcccgaaaacagggctgggagaataaccatcatcacaagaatgggacctgaaaacatgagggtgaaacttccacacctgatacgcgctgtccgtggggccggtcagatagtaacatgggttactgacccaatgcatgggaacactatgaaggccccttgcggactcaaaacccgctcgttcgacaggattttgggtgaggtgcgtgcgttctttgatgtccacgaacaagaagggagccaccctggaggagtgcatctagagatgactggacaaaatgttacagagtgcatcggcggttcacgtacggtgaccttcgatgatctggggtcacgctaccacacgcactgcgacccaaggctcaatgcctcacagtctctggagatggcatttatcatcgccgagcgccttaagaaaaggaagatggcctngtcgcctttgtac

SEQ ID NO: 93871 - DNA, 539 bp, Zea mays
  unsure (1)..(539): unsure at all n locations
gatgtctgtctagccccaggcctgacgaccgancgctcgtaccggtccggaattcccgggtcgacgcacgcgtccggttacagcactagcagtaaccattggctttctaagatggctttaactgctccctcttggcggcagcaactatatttgcaggtgtggtaatgtacgatgcttctggtatcagattgcatgctggaaagcaagcagcggtactgaaccaaatagtttgtgaacttccttctgaacatcccttgtctgaaacaagaccactgctagaacttttaggccatacaccaacccaggttgttgctggcgcatagcttgggtgtacgatagccacagcaggacaattattcgtttgaactccgaaggtgcaggataaatgttgtatcatttgcatcgcggagacttgagaagaagtttctctagtgttctgctactctaagtatcggtaagattttcaacttggtgctgtaatgtttgtgaatgttgtaagctctgatggaacgtgattatatgtcaaggtgactgtcacc

SEQ ID NO: 93872 - DNA, 532 bp, Zea mays
  unsure (1)..(532): unsure at all n locations
attctgctagccagcctcacgangatcgacgtactcgctcctgaattcccgggtcgacccacgcgtccgcccacacatccacatttccaataacacatttcatcgcaacatataccatccttcactggtggcatcatgaacacatgtgggtgaaacttacacacctgatacccgctgtccattctgcccgtcagatagtaacatgggttactgacccaatgcatgggaacactattaaggcccattgcggactcaaaaccctctcgttcgacaggattttgggtcacgtgcgtgcgttctttgatgtccacgaacaagaagggagccaccctggaggagtgcatctagagatgactggacaaaatgttacacagtgcatcggcggttcacgtactgttaccttcgatgatctggggtcacgctaccacacgcactgctacccaaggctcaatgccttacagtctctggagattgcatttatcatcgccgaacgccttatgaaaaggaggatggcctcgtcgcctttttacag

SEQ ID NO: 93873 - DNA, 535 bp, Zea mays
ttggtgtgcgccctagctcgatgaacgaccgctgtaccggtccggaattcccgggtcgacccacgcgtccgacgcccccgccaccggccggatcgacagcaccgatcaccctgaccgtctgcgcgcggcgggtctcactccggtgacacgcagggcgcgcataggcgagggcctccccccccggcgagggatggtgtggtcggctgggatggcaacaatgcgaggcgcctccgccgccgcgctactggtgctggcgctcgccgccgccgtggcgcgcgcggaggacccctaccacttcttcgagtggaaggtgacgtacgggacgaggaccatcatggggacggcgcagaaggtgatcctcatcaacgacatgttcccgggccctaccatcaactgctcatccaacaacaacatcctcgtcaacgtgttcaacatgctcgaccagccgctcctcttcacctggcacgggatccagcagaagaagaactcgtggcaggacggcatgccgggcaccatgtgcccgatccagcccaac

SEQ ID NO: 93874 - DNA, 489 bp, Zea mays
catgtttgagtgaaagtgggggtatgtgacgcttctaccggtccggaattcccgggtgcgacccacgcgtccgcccacgcgtccgctaccctcgtcgtcgtctcactcaccccgccttcacgcctccctcgccaaataaggtcccggcgcttttccgacattcacaggggggacaggaaatcagcggccatggcctcgattccggcgacgaccttcgccgtcatcttatccgtcctcttctgtgccgcggctggcaccgccgtcgacaacgacctccccgactacgtcatccagggccgcgtctactgcgacacctgccgcgccgggttcgtgaccaatgtcaccgagtacatcgcgggcgccaaggtgaggctggagtgcaagcacttcggcaccggcaagctcgagcgctccatcgacggggtgaccgacgcgaacggcacgtacacgatcgagctcaaggacagccacgaggaggacatctgcaag

SEQ ID NO: 93875 - DNA, 490 bp, Zea mays
  unsure (1)..(490): unsure at all n locations
gtggtggcngagcaccagataacagaggnattgctcgtaccggtccggaattcccgggtcgagccacgcgtccgaagatcccaccggctcccgccggccgtcgccgacgagcaccgcatcctgacacagaggggctgacgagccatcgcgtgcggcctcacccgggatggcgaccatggagagcctgatcgggctggtgaaccggatccagcgcgcgtgcaccgtcctcggcgaccacggcggcggcggcggtgagggctccctctgggaggcgctcccctgcgtagctgtcgttggcgggcagagttccgggaagtcgtctgtgcttgagagcatagtacggagggacttcctgccccgtggatctggtatcgtcacgaggcggcctttagtgctgcagctccacaagacagatggtgggcactagtatgctgagtttctacacgccccgcggaagcggttcaccgactctgctgctgtgaggaaagag

SEQ ID NO: 93876 - DNA, 533 bp, Zea mays
tatgtgctgactggggggatatgtaatactcgcccggtccggaattcccgggtcgaccgcacgcgtccgcaagcattgaagccgtagccgccgccgccggacgagacaggttgaggcggggcggcaatggccgccggggaccttgaggtgctcaccgcgctcgacaccgcgaagacgcaatggtaccacttcaccgccatcgtggtcgccggcatggggttcttcaccgacgcctacgacctcttctgcatctccctcgtgactaagctcctcggccgcatctactacaccgtggaggggtccgcgacgcccggcaccctcccgccgcacgtgtccgcgtccgtcaacggcgtggccttcgtgggcacgctgtcagggcagctcttcttcggctggctgggcgacaagctcgggcgcaagaaggtctatggcatgacgctcatgctcatggtcctctgctccgtcgcgtcggggctctcgttcggccacaccccggcgtccgtcatggcgacgctgtgcttcttccgcttctg

SEQ ID NO: 93877 - DNA, 540 bp, Zea mays
  unsure (1)..(540): unsure at all n locations
gatgtgtcggtgccctagcctnncgatgactactcgtactcggtccggaattcccgggtcgacggcacgcgtccgcccacgcgtccggaccaaggcgaccgtggactacgagaagatcgtgcgcgacacctgccgcgagatcgggttcacctgcgaggacgtgggcctcgacgccgaccgctgcaaggtgctggtgaacatcgagcagcagtcccccgacatcgcgcagggcgtgcacgggcacttcacgaagcggcccgaggagatcggcgcgggcgaccagggccacatgttcgggtacgccaccgacgagacccccgagctgatgccgctcagccacgtgctggccaccaagctgggcgcgcgcctcaccgaggtgcgcaagaacggcacctgcgcctggctgaagcccgacggcaagacccaggtgacggtggagtacgtgaacgagggctgcgccatggtgcccgtccgcgtgcacaccgtgctcatctncacccagcacgacgagaccgtcaccaactactagatcgccgtctg

SEQ ID NO: 93878 - DNA, 536 bp, Zea mays
gatgtgtcggtagcatcggggagtactatagatctgctctaccggtccggaattcccgggtcgacccacgcgtccgggcttctcctccccctcttaccaagtcctcttcgggttagggttacttagggttttgtggaggggcgatggcggcggctgatgtggagtaccgttgcttcgtcggcgggcttgcctgggccaccagcaacgagtcgctggagaatgccttcgcctcctaccgcgagatcctcgactccaaggtcatcaccgaccgggagacggggaggtctcgcggcttcggcttcgttaccttctcctccgagaactccatgctcgacgctatcgagaacatgaacggcaaggagctcgacggccgtaacatcaccgttaaccatgcccagtcccgtggcggtggctgtggccgcggtggctactgcggcggtcgcggcggcggcggctatggtggcgggcgccgtgacggcggttatggcggccgtggcggctaccgcggtcggcgcgagggtggtggcggcggctac

SEQ ID NO: 93879 - DNA, 535 bp, Zea mays
  unsure (1)..(535): unsure at all n locations
tgagttgtgacctagtctcatgaacgancgccgtaccggtccggaattcccgggtcgacccacgcgtccgtaactacccccgcgctggctcgccaccaccgccgcagcaggcgtgggaatctgggcagggggccgcggagaagaggaggcagcgcgctctccgtccgccatggcgggctcttccgaccccgacaagctcatgagcaaagccgacaaactaacaaaattgagttttacaagatggaatgctgattggaaaagcgctacctccttgtatgagcaagctgcaattgcgtataggttcagaaaggacaatgagaaagcaaaagatgcttttgagaaggcctcaaaaggacaggaaatgatctcctcaccatgggacgctgctaagcatatggaatctgctgctgctttagcaaaggagcttgggcgctggaatgaagtatctgatttctatcacagagcttcagaattataccgtgaatgtggaaggccacaacctgcatctgatgctctagcaaagggtgccaatgca

SEQ ID NO: 93880 - DNA, 490 bp, Zea mays
  unsure (1)..(490): unsure at all n locations
gtgggtgagngagccccagctcggacgcgactgtcgtaccggtccggaattcccgggtcgagccacgcgtccgcgcctcaacacgctccactacgtgctgacccacctggaggccctcgacagctcgctcgcggcctcgacctctcagctggaccgtgcacgcgccgcggcgcagtcgtcgatctcggccgtcgccgaggtcgccgcgcaccggctgatcttactggactcgcgccacttcttgtaccagggcctgtacgcccgcagtgtggcggacgcccgcatccgccccgcgctccgcctgctgaagcagaacctgtcgttcctggtgtgcgtgctcgcggaccgcgcgcagcccgtggcggtgcgggaggtgatgcgcgcctncttcgaggcgttcctgatggtgctcctggcgggcggcaacgagcggagcttcgtgcgcgccgaccacgccacggtggaagaggacttacggagcctgaagcgc

SEQ ID NO: 93881 - DNA, 533 bp, Zea mays
  unsure (1)..(533): unsure at all n locations
tagtactgaatggtgggatacggaatactgctccggtccggaattcccgggtcgaccgcacgcgtccgaattgcgccactgctcgttatcctcctcttgcattgcattgcaggtcgtagttgagcaggggggaccactgcacaggatgtggtggcagacgtacgtcgatgagcacctcatgtgcgagatcgagggccaccacctgagctctgccgccatagtcggccacgacggcgccgtttgggcccagagcaccgcattcccacaggtgataccaatttgcatgatccttgttcgttctagctcttgcatgccgatcagatcaatcacgcggtttccttgtgcgcatatgcatccagttcaagccagaggagatgaccaacatcattaaggacttcgacgagcctgtgtttctggccccgatcgggctcttccttggccccaccaagtacatggtcatncaaggcgagcccggcgctgtcatgcgcgggaagaaagtactgatgatcccgcgtcgtctatgctcatcatct

SEQ ID NO: 93882 - DNA, 539 bp, Zea mays
  unsure (1)..(539): unsure at all n locations
tatgttnctaggccctacttgtgacgtactgctctcgcggtccggaattcccgggtcgaccgcacgcgtccgcagcggctggaggctgctgccggggtcgccctccaaggcgaccagctgacccctttcggccggagcctcttcatgggcgcagctggcggccgcgagcatggcagtggcgctgggcgactacttcctcggccccagcctcgacgctctggtgcagcagctcgctgagaacgacgcgggacggcacgggacgccgccggccaagaaggaggccgtggaggcaatgccgaccgtggaaattgccggtggcaacgatgacgacacggacagctgccccgtctgcctggaggactacacggccggcgagcgcgctcgggagatgccctgcaagcacaggttccactccaattgcatcgttccgtggctcgagatgcacagctcctgccctgtctgccggttccagctgccgggcaccgacgacaagggctcatgcagcagcggcgaccgtggttttggcagaggccacgcgg

SEQ ID NO: 93883 - DNA, 493 bp, Zea mays
  unsure (1)..(493): unsure at all n locations
gtggntgagtgaggccagctaggacngcgatttcgtaccggttcggaattcccgggtggaggcacgcgttcggggattcctgctccgcgagtggcgccgacaaaatgctattcaccttgaggaaaaaggagaagaaggagaaggagctgaggagccaaatcatcgttgatgctgaagagtttaagaaagcttttgttgagaagagaaagctcaatgctgagacaagcaagggccaaaaccgtgacagggagaagcttttcctagcaaaccaggaaaagttccatgctggtgcggataagcaatactggaaggcgatatctgaacttatcccacatgagattgctaacatcgagaagagaggggcaaggaaagacaaggagaagaagcctgggatcgtggtgattcatggaccgaagcctgggaagccaacggacatggcacggatgctgcagatattgctgaagctgaagcacacttactcaccacacatgat

SEQ ID NO: 93884 - DNA, 486 bp, Zea mays
  unsure (1)..(486): unsure at all n locations
tggtntgactgacaggtgggggatggcacgcttctaccggtccggaattcccgggtggagccacgcgtccgcccacgcgtccgcggacgcgtgggtccgcgctcaaggacttcctggcctttgtcgtgagcgaggccaacctcaagggcgtcgacgccatgcccgaggacgtcgcccaggcggtgctctacctggccagcgacgaggcgaggtacgtcagcgcggtcaacctcatggtggacggaggcttcacagccgtaaacaataacctcagggcgtttgaggattagttgaggcatttatgccagctctgggattgggagggagtattaccactatttcttctgctgttgtgacaagtgagtgcaagactaataaactgcagcatgttcatgtatccaacagatgattgaacagaatagaaaaaaaaaagggctgccgctctagaggatccaagcttacgtacgcgtgcatgcgacgtcatan

SEQ ID NO: 93885 - DNA, 539 bp, Zea mays
  unsure (1)..(539): unsure at all n locations
aatgtnnttgactgggggtgtgactgatggctgtcccggtccggaattcccgggtcgaccgacgcgtccggtgacccgggcgcaatgccgggagccgtgatcgtgcaccaccacacgaggtacaagacgtggcgcggcgaggtcaccggcatcgccatcttctcgtgcttcatcgcctccgtcgccggctgcatcttcggctatgacatcggcctcacatccgggctgacgtcgacggagccgttcctgggtcaagnntcttccctncatctacgaggagatgaagaggcangtggtcgtaacccaagcactgcaggttcacaggcacggtcctagactttgtaagttcctcctttttctttgcccgaacgggggcaaccttttttgccggcccaaattacgggccctttggggccaagggggcccttgttcccccccgttcccgttcacggtgtgcgcgtgcatatgcggcgtgttcccgaacatttcgatgctgctcacagggcccgtgctcctttgggctccggggtgggatattt

SEQ ID NO: 93886 - DNA, 541 bp, Zea mays
  unsure (1)..(541): unsure at all n locations
tgatttntntntacaatgggatgtacgtaggactcgctcggtccggaattcccgggtcgaccgcacgcgtccggagcggaattggatgggtttgaatcccaaacaagtcaaacttcttctcaatttttttcaagccgactcaatccatgtgttttgggaataaccgaccaagcccttagtgtgtttgttacttcattccgcatggtttgggcctttgaagttaaaagaatcataagaccttgttcggttaaaaaaaaaaaaaaaaaaaaaaaaaaaaagggcggccgctctagaggatccaagcttacgtacgcgtgcatgcgacgtcatagctcttctatagtgtcacctaaattcaattcactggccgtcgttttacaacgtcgtgactgggaaaaccctggcgttacccaacttaatcgccttgcagcacatccccctttcgccagctggcgtaatagcgaagaggcccgcaccgatcgccctttccaacagttgcgcagcctgaatggcgaatgggacgcgctctgtaacggcgcat

SEQ ID NO: 93887 - DNA, 537 bp, Zea mays
  unsure (1)..(537): unsure at all n locations
cagtgtgtgagctaccgacactagtgatcgancgctctaccggtccggaattcccgggtcgacccacgcgtccggttctagatcgcgagctgcatcggtcggcgccctgtgagggagaaggatgcatatgatgcggcggctcaagagcatcgcctccggccgctcgtccgtctccgatccgggtggtgactctggctccaaaaggccaaaatttgagcaggatggagcaggggatattgttattgagccacacttaactgaggccaagcctgtccggatagaccaagaatcatcatcatcatctaatagggaggctgaggcaagcacatctactagcatgaagcctgttaaaactgaagaaccagtagcagatcttcttcccaaagaattgaatgatatgacaattagtgacgataaagctgatgaccataatgataaggaaggtgaaggtgttactcttgatgggaatggagccgagacaggacagataattgtgacaacaataggaggtcataatgggaagccaaagcagaaggt

SEQ ID NO: 93888 - DNA, 538 bp, Zea mays
  unsure (1)..(538): unsure at all n locations
tgggggnnnntnaatgactgatatcgatggactgctctaccggtccggaattcccgggtcgacccacgcgtccgcgatttttttacgcgagaaacggacaagggagttccgtgctggctgacgggacgcccttggacgctgcggctggatgatccagagctctgttcccggtcgatcgagtcgagtgcgttcagttttggacgggacgcgggggttggtggcatgtgcggctcctgatcagagatctcggcaggcatgcagcagcagctgaaggccgcaggtgcaccacgtccccccggctcagcatccgcggtggcgcctccgccggaggcccgctccccaggtccaaatcttgtcgggtccgagcagctgcctgttggccatgcacagcgcgacccggcgcatggcagcagatcgtgcctgccgcgacctgcgatgtgcacgcgccatgatcgatctggattctcgagtggaagccgtnccacgtgagcgggcggctcccttacgaaaaagatgaactatgggggtctgtcgaccc

SEQ ID NO: 93889 - DNA, 488 bp, Zea mays
  unsure (1)..(488): unsure at all n locations
gtgtntgngtgaactgggtgatatgtgatgctctaccggtccggaattcccgggtcgacccacgcgtccgctgatgggaatggcagcgaaggagcactttgtgcttgttcatggtgaagggcatggagcctggtgctggttcaagctccgctggctccttgagggtgctggctaccatgttacatgcattgacctagccggaggcggcgtcgatcctactgaccccaacacaatccggtcgttccagcagtacgacaagccactcatagacctcatttcaaccttgccggagggggagaaggtgattctaatcggacatggtgctggagggctgagtgtgattcatgcaatgcacgaatttgttgacagaatcagccaagcattttttgtggcagctacaatgctaccatttggatttcaagctgatgaagataagaaagatgggttaccaactttgcctgagaacgagattgagttgacacttggtg

SEQ ID NO: 93890 - DNA, 489 bp, Zea mays
  unsure (1)..(489): unsure at all n locations
acgantgcgtggcatgagagggatatgagtacagctgctaccggtccggaattcccgggtcgacccacgcgtccgccacgcgtccgcgcgaaaataaggaagagccgcaccatggcatcatcggccgcgcggggggtgctagccctcgcgctagtggcggccaccggcccacaggtagcggaggcaaagaagaagagagcggcggagagcggcgaggcggcggaggcgaagaagatccaggacgacttctgctcgacgctgtgcgagggcaagaaggggacggacctggtcgtgtgcaaggagtcctgcgcgctctcccagcagtccaacctggtgctgtacggcaggatccagtgcaagggcaagtgcaccgagcagaagggcatcacggcgccggccatgaagctctgccaggaggagtgcgacaaggcgtacgtggtgaaggcggccgaggtcaccaaggcctgcagcgtcacctgcgccaaggag

SEQ ID NO: 93891 - DNA, 486 bp, Zea mays
gggatgggtggtatcgaatactccgtagtaccgctgtaccggtccggaattcccgggtcgacccacgcgtccggtgacgacttctcctttacgctcaaggagggtccgactggcacttggacgcttgaggccaagaccccgctcaagtatcccctctgcatccgcttcgctgtcaagtctggtggctaccgcatcgccgacgacgtcatcccctccaatttcaaggccggcaccacctacaagaccaccctcagcatctgattagcctcttatgacgaataatattttgagagagctcatctggaccatgtgccagcgagctaatatttaatttttttctttggttatattgaggcaccacatgagccaagaaaaaagttatgctacatgtcccttctcgcgccttattgcgttaggttgatatgcatgattacatagattaaaatacacttttatttaagattttttggggagaaatatattgat

SEQ ID NO: 93892 - DNA, 486 bp, Zea mays
tgcggtgcctagccatcgaaatacatcggatcctcgtaccggtccggaattcccgggtcgacccacgcgtccgcccacgcgtccgcccacgcgtccgcccacgcgtccggctcattacaatccttcatgggagcatcactacactacactacattagagagaggtcgagcgcccctcctgcgatccgccggcccgccgagagctagctgctgatcggtcgaggagagtcatggcgacgtcaacgatgcgcgttgccgccggcgtgctgctggtcgtgtcggctctggcgaccttggccctggccgacgacctctacctgttctatcagtggaaggtgacgtacgggaccatgtccctgctgggagtgccccagaaggtcatactcatcaacggcgagttccctggccccaggatcaactgatcctccaacaacaacatagtcgtcaacgtcttcaaccagctcgaccatccgctccttttcaccag

SEQ ID NO: 93893 - DNA, 485 bp, Zea mays
  unsure (1)..(485): unsure at all n locations
atggngtggtgtgcaccgatggagcgcagcctcgtaccggtccggaattcccgggtcgacccacgcgtccggatgatctgatccgcctccagttggaaacactactagctgagaaagcacggctggggcatgagaactcagtatatgcacgagaaaacagattcctgcgggaaatagttgagtatcaccagctcactatgcaggatgtcatatatgtagacgaaggcatcgaagaggtcaccgaggtgtaccctacacaagtactacctcgcactgggtcgagcgtcagtcgtgcagccactgcagctacaccgaaatctgctccgacgtcaacataatcttgccctgtcgtacaagcttctacaaatacactttttcgcggtcatctctgagcaatagatcaaagcgcccacctccaaccttcacggaagagtaaggtggttgtttggttgtgacgggaccacataggttatgctgctactgtt

SEQ ID NO: 93894 - DNA, 480 bp, Zea mays
atgtgctggcatggaggatactgactactgcaccggtccggaattcccgggtcgacccacgcgtccggactcgagctcggaagttcgcatcgaagactgctacatcgaaagcggagacaacctggtggccatcaagagtggctgggaccagtactggatctcatttggcaagccgagcacgaacatcgtcatccagagggtttcgggcacgactacgacttgctcgggcgtaggctacggcagcgagatgtcaggaggcatatctaacgtgctcgtccgtgacctccacgtgtggaattcggcgcaggccgtgaggctcatgaccgacgtacggaggggtggctacatcaccaacatcaccatagccagtgtggccatggacaaagttaaggtgcctatgaagttcatgcgaggcacagatgaccattctgacgacaggtatgacccggccgagctgccgatgatcagcaacgtgctggt

SEQ ID NO: 93895 - DNA, 481 bp, Zea mays
atgttgcgtgatgggggtatatggaccgtcgtaccggtccggaattcccgggtcgacccacgcgtccggacggacccgtccatgctatggctcgccgacgcgccggtcatggacatcaagggtggcttgtcgcacccgtcggccgagatctccgtctccaagcctccgccgcatccgccgcagatccattttgagaacgggagcacgagcacgctcacggagaaccccagcccctccgtgcacgcgccgccaccctcgccggcgccggctgctccacagcagcggcagcaccagcaccagaatcaggcgcaccagggcccgttccgccgggagctcaatttctcggacttcgcgtccactccttccttggcggcgaccccgtcgttcttcaagcccgagttcggcgagatcctcagcttcggcgccgacagcaacgcccggaggaacccgtcgccggtaccttccgccgacaccgtcagcc

SEQ ID NO: 93896 - DNA, 483 bp, Zea mays
  unsure (1)..(483): unsure at all n locations
atgtttgctgccaccgatcacagcgtatccgtcgtaccggtccggaattcccgggtcgacccacgcgtccgcccacgcgtccggccgaccaaacatatggccaaaggatcatcttcctgagcttgaggtagcattcaaaggtcttggaaaactgatgttggaagttggcttgatgttggctcgtcattgtgatcgctatgtaatacagcgaggggtgggacaatacattggtgaaagccttgagaagacacttgctagctcaaggtgtcccaagggtcgtctgctgtactacttccccaaatcgtttagcaaacaggacgaagtttcgtcatggtgtggatggcatactgactatggatttttgacaggacttacatgtggtttgttcacgagaaaatcagaggaggtcccctgtcctgatattggaactgggctgtatgttcggactcgtgataatcaagtcgtcaaggtcacacttgtggn

SEQ ID NO: 93897 - DNA, 487 bp, Zea mays
  unsure (1)..(487): unsure at all n locations
atggtgnctgacacgtgagttgtatgtgattgtcgtaccggtccggaattcccgggtcgacccacgcgtccgcccacgcgtccggattatccatagagacttgaagtgtgataatatttttgttaatggggaccatggagaagttgagagtggagatcttggactagctacagtaatgcaaacacctagggtgaggagtgttattggtaccccagaattcatggcacctgaactttatgatgaaaattatgatgagcgtgttgatatttactcatttggaatgtgtttgttggagatctttactcttgaatatccatacagtgaatgtacgaatccagctcagatttttaagaaagtatccacaggtgttaaacctgctgcattggctagaatttctgatcttcaagtaaagcagtttattgagaaatgtttagttcctgcttctgagaggtcgtctgccaaagaacttgtgcaagacacatttctt

SEQ ID NO: 93898 - DNA, 485 bp, Zea mays
  unsure (1)..(485): unsure at all n locations
agttgctgagcccacnctggacgnatcagcggtaccggtccggaattcccgggtggacccacgcgtccgcccacgcgtccggtattctctgactgttgctatacaaaggacctgacaattctggggatcgacttgacaaaaggtggaatagttgacaatactccacaggttttccagttgcaagtggataacggcataccgattaagagctggtttgatgacccctcatatcaggaactgatcgagttgctcccgttcttggagagcctcgtggattcagaggacgtgaggccaataatttcaaagacctttcatgacaaacttgagcagaattagtttgaggcgacagatgtatcatccagtgaacctgtcgctgaagttagcttcgctccacatggtgcaggccatcattcttgggaagttagatataggatgaaaaatcacaatttctgttatgttagctgttacaaatagcaagcataaac

SEQ ID NO: 93899 - DNA, 485 bp, Zea mays
  unsure (1)..(485): unsure at all n locations
ctggntttggcatgagtgtactccactactcgcaccggtccggaattcccgggtcgacccacgcctccggccaagccttcggccaagccttccggttccccgtttccttttcaaactcaaatcatggggctccacngatcggctccaagcccgcagaagacgagcaacagcagaagcgcccgtctctcttctcgccgtaccagatgccccgcttccgcctcacccaccggtgagcctccatcgcggtggtgctggcgccgatgaccaggtgcagggcgcccgacgcgatcccaggccccgcgctcgcggagtactacgcgcagcggtccacggagggcggcttgctcatctccgagggcaccatcatctcgccgtccggccctgggttccctcgtgtccctgggatatacaatcaagaacagactgatgcatggagaaaggtggttgatgctgttcatgccaagggagctatctttttctgccaa

SEQ ID NO: 93900 - DNA, 484 bp, Zea mays
tgggttctgtgccctagcctcatcacgtatcgcagtaccggtccggaattcccgggtcgacccacgcgtccggattgaacgtggctgcatcatttttcctttcattggtcttttcagcaacagcgatcgattctcgtgggagggagagagagagagagagggagagaaatcaaagaggagagtgatcatggagcatgtgattggagggaagtataagcttgggaggaagattgggagcggatccttcggagagctatatctcggtgttaatatacagaatggagaggaagtgggaataaaattggagcctgtgaaaacaaaacatccacagctgcactatgaatctaaagtttatatgctgctgcagggtggaaacggtatcccacacctcaagtggtatggtgttgagggggagtacaatgttatggtgatcgatcttcttggcccaagcttggaagatttgtttaattcctgcaacaggaag

SEQ ID NO: 93901 - DNA, 492 bp, Zea mays
  unsure (1)..(492): unsure at all n locations
aggtntgnctngtaattgtggggaagtatgtgatatcgtcgtaccggtccggaattcccgggtcgacccacgcgtccggcgagcggcgcttttttttttttttttttttcttgttcagcatgaacctgacaatggaacatcagcccctaagtcatcgtcgatacacaagatgcgattgcgaaaggtacaagccgatttccaccatgggcaacaagcaaacgtaaggtttgcctgccctctagggtcaccttggtgacacgcccaatcaaggaactttcagccctctttacatctagcaaggcgttcgctagctacatcgctcctccatagcatgccctcacgaaacagggatctctccagcacgtccaccaccggttcacttcctcatgtgttcaggaacgatccgatggacaagctcgattgggagcccttcgagttcggctgctgtgaagtcgaacagcgctggcagcggtcgtccacttggcaagcaga

SEQ ID NO: 93902 - DNA, 485 bp, Zea mays
  unsure (1)..(485): unsure at all n locations
gatgtgctggatggggagatagagtaatagctgtaccggtccggaattcccgggtcgacccacgcgtccgcccacgcgtccgcccacgcgtccgcccacgcgtccgggtccctcaaccaacactcgtgagatgatttggaagcttgcagagactggaatgaatgtagcgcgccttaatatgtcccatggtgaccaccagtcgcaccagaaggttattgatttggtcaaggagtacaatgcacagaacactgatggcaatgttattgccattatgctggacacaaagggtcctgaagttagaagtggggatgttccagagccaatcatgctcaaggaaggtcaagagttcaacttcacgattaaaagaggggtgagcactgaagacactgtcagcgtgaactatgatgacttcataaatgatgttgaagctggcgacatactattagtggatggaagaatgatgtcgcttgctgtgaagtctaaan

SEQ ID NO: 93903 - DNA, 489 bp, Zea mays
  unsure (1)..(489): unsure at all n locations
atggtgnctgcacgtgggtttgtatgtgatctctcgtaccggtccggaattcccgggtcgacccacgcgtccgacatatccaccaatggacgtgaaactcccacacgaactgaatgtgtatcaggatatgtttaaagagttctatttgagcaagtacagtggaaggcgtttaatgtggcagaattctttgggacactgtgtcttgaaagcagactttcccaaaggcaaaaaggaactcgcggtgtcattgtttcagagtgtggttttgatgttgttcaatgacgcacaaaaattaagcttccttgacatcaaagattccactggtatcgaggataaagaattgagacggacactgcaatctcttgcatgtggtaaagttcgggttctccaaaagataccaaaagggagagatgtagaagataaggatgactttgtattcaatgaagattttagtgctcccctctatcgcataaaggtaaatgcaattca

SEQ ID NO: 93904 - DNA, 482 bp, Zea mays
  unsure (1)..(482): unsure at all n locations
gctgttctggccaccgatcagagcgcagntctactcggtccggaattcccgggtcgacccacgcgtccgcgacgcctggccgggttgcgacgcttccattctcctggacgagtcgcccgccggcgagctcccagagaaggagtcgtccgccaacggcttcaccctggtcgggctcagaaccatcgacatcgccaagtccaccgtagagggcatgtgccccggcaaggtctcgtgcgcagacatcctggccttcgcggcgcgcgacgccgccgtggccgcgggcctcccgagatacgaggtcgcggcggggcgccgcgacggcatgcgctcgaacatggacgacctcccgggcaacttccccgtgccgggccaccacgtgccgcgcctcaccgagctcttcagccagcgggggctctcccaggaggacctcgtcctgctctccggcgcgcactccatcggcggcgcgcactgcttcatgttct

SEQ ID NO: 93905 - DNA, 486 bp, Zea mays
  unsure (1)..(486): unsure at all n locations
gatgttnntgtgatgggggaggaaggtaatactcgtaccggtccggaattcccggggcgacccacgcgtcccgggcccaancggccgaaccttttggccttaagccccggccccaaacctcgaggcgggggagccgccgaggtcgatgccgcgggcgtgcttgcggatgcagcggaggcggcggcgtcagtgccagcgccgttcccaggggaggtagccgccgcggctgcggactcattcccccctgttgccgcacttcagcacattatcgacgctatccatacctttaccgggctgaactggtgggtgtgcatcgcgctgacaacatttattatccggagcgccacagtcccgttgctcgtgaaccagttgaaggccacgacgaagctaagagcaataaatccagagatggaagtcattaaagaccagatgaatagtatggatccaaaatcagtgcangagggacaagctaaaatgaaagcgctg

SEQ ID NO: 93906 - DNA, 490 bp, Zea mays
  unsure (1)..(490): unsure at all n locations
tggtntgactgacaagggggggtatgtgactactcgtaccggtccggaattcccgggtcgacccacgcgtccgaggaccgcgacgagccggcgctggggttcaagatcaacgtcacccgcgccatggacgggccctcgctctgcagcgaccccgccaccttctccgactgccccaagatcctgggcatgtcggccgacgcccccgaggcggagatcttcaaggagtacgcgaagaagcacgagagcaacaacggcaccaccattcctgccgctgcaaccggcgccgccgcggcgaccgggaagagcacgagcgcggcgccgacggcggacggcgccgggaggcagcccggcacggtcttcttctacgtcgtgtcggcgctgctcgtctccgtcgcggtcctgctgtgctgatggcttaacggccggccgcggcagcgcatgcattcatggccggccggccggcagggagatggaggtgctactgcacgct

SEQ ID NO: 93907 - DNA, 485 bp, Zea mays
  unsure (1)..(485): unsure at all n locations
tggttgnctgcatgggggtgtatgtgatctctcgtaccggtccggaattcccgggtcgacccacgcgtccggaggtgtccggggtcacgctgctcaactccaagttcttccacatgaacatgtaccggggcaaggacatgctaatcaaggacgtgaccgtgacggcgcccggggacagccccaacacggatggcatccacatgggcgactcatccgggatcacgatcaccaacaccgtcattggcgtcggcgacgactgcatctccatcggccccgggacctccaaggtgaacatcaccggcgtgacctgcggccctggccacggcatcagcatcggcagcctagggcggtacaaggacgagaaggacgtcacggacatcaacgtcaaggattgcactcttaagaagacgatgttcggcgtccgcatcaaggcgtacgaagacgccgnctncgtgctcaccgtctncaagatccactacgagaat

SEQ ID NO: 93908 - DNA, 490 bp, Zea mays
ggctgtgatagaccaccgatagggacgcacctgctcgtaccggtccggaattcccgggtcgacccacgcgtccgctgaccaatgacatcggtgttgttgttgtttcagatgatgcaggagaacctattgggggtaacatctatgttggtggtggcatgggaaggacacaccgagtggaaactacattccctcggctggctgatccattgggttatgttccaaaagaagatatattatatgctataaaggccattgtcgtcacacagagggaaaatggaagaagggatgaccgcacgtatagtaggatgaagtatatgattgaccgttggggaatagataggtttcgggctgaagttgaaaaatattacgggaagaagtttgaaagtttccgaccattgccagagtggcagtttaacagctaccttggctggcaagaacagggtgatgggaaattattctatggagtgcatgttgataatggtcgtgttgg

SEQ ID NO: 93909 - DNA, 482 bp, Zea mays
  unsure (1)..(482): unsure at all n locations
atggtgctggcatgaagatactccactactcgcaccggtccggaattcccgggtcgacccacgcctcccgaagcaactgaaaacaagccagcgatcctcttttccttttccttttcgatccattctggggcgcaacgaaataaacatgtctgaaccggcaaagatgtcgtggcaagcgtacgtggacgaacacctgatgtgcgagatcgaaggccaccacctcgcggcggccatcgtcggccacgacggtgccgcctgggcgcagagcacggcgttccccgagttcaagaccgaagacatggccaacatcatgaaggacttcgacgagccaaggcacctcgcgccgacaggcctgttcctcggacctaccaagtacatggtcatccaaggcgagcctggtgccgtcatccgtggcaaggagggatcaggaggcatcaccgtgaagaagacagggcangcactcgtcgnttgcatctacgaca

SEQ ID NO: 93910 - DNA, 480 bp, Zea mays
  unsure (1)..(480): unsure at all n locations
tgggtgcgtgtcatagtagngatgccataccgcaccggtccggaattcccgggtcgacccaagcctcccgtggaaaactttccggttccaaaggacctttggccccttccttttaagaacctacctgggtaaaccctttttgaaaaggctcctgtcctaatacttgtataaaatgaaaattatgtggtagccctatcatggaaccgaagtatcagagaagtagttgactggatgtcaaagaaaagtggtattcctgcttctgagcttaaggagcacctattcatgctgcgtgacagtgatgctacacgccatctgttctaagtatcagcaaggttggactctttggttctcggtgaacgacaaatccttgctcaagtcaaacaagttgtgaaaagttggcaaaataatggaagccttgggaagaacatcgacagaatgttcaaaggatgcaattacttgctgaaaagcttttcgctccan

SEQ ID NO: 93911 - DNA, 488 bp, Zea mays
  unsure (1)..(488): unsure at all n locations
tatgttctgattgcaatgggatgtataatgggagtgctcgtaccggtccggaattcccgggtcgacccacgcgtccgggaggaggcgatgcggaacgccatcgagggcatgaacggcaaggagctggacggcggcaacatcaccgtcaacgaggcccagtcccgcggcggccgtggaggcggcggcggcggcgggtacggtggtggccgtggaggcggcggctacggcggtggcgggcgccgtgatggcggcggcggctacggcggtggcggcggctacggtggtggcggcggcggctacggtggtggtggcggcggctacggcggtggcaaccgtggcggcggctacggcaactccgacgggaactggaggaactgagcggtggggcccgcgcggccaagttatcctgttcgctaccgtgttgtttaccctagtccagagtgtttatcttcgttcgtctcgtgtntgttgttgcccatctgtgtttn

SEQ ID NO: 93912 - DNA, 483 bp, Zea mays
  unsure (1)..(483): unsure at all n locations
atgttntgtgatgaggggtataagtgaccgtcgtaccggtccggaattcccgggtcgacccacgcgtccgagcgatgcaccagcacgagatactagccatcatgcgcctgtcgtccctcctcctgggcgtggccgccctctcggcgcgcgccgcggcgcagcaggtgccgccggtgggcggcagcgctctgaagccggactactacagccagtcgtgcccgcgcgcggagcggatcatcgcggaggtgatgcagacgaagcagatggcgaacccgacgacggccgcgggcatgctgcgcgtcttcttccacgactgcttcgtcaccgggtgcgacgcgtcggtgctgatcgcgtccacccagttccagaagtcggagcacgacgcggagatcaaccactcgctccccggggacgccttcgacgccgtggtgcgcgccaagctggccctggagctggagtgccccggngtggtgtcctgcgccc

SEQ ID NO: 93913 - DNA, 492 bp, Zea mays
  unsure (1)..(492): unsure at all n locations
atggntgnttgtgaatgggagttaattggactctcgtaccggtccggaattcccgggtcgacccacgcgtccgcatcgatctccccccagcggcgaggagagccggcggccacaggaaggagaaatgggggccgcacacaacgctctccgggtgtttttcatcctagccgtggtatgtgccgtatgcacagcgaaaaggacaggagccaacaaggaagaatcggcggcagcccccggtggcgctgctggaggcagcggcgggacgttcgacatctccaagctcggcgcgaccagcgacggcaagacggactgcacaaaggcagtccaggacgcgtggacgtcagcgtgcgaagcgaccggaagcgccacggtggtgatccccaagggcgactacctggtcggccctctcaacttcactgggccatgcaaggggagcaacatcgccatccagctggatggcaacctgctgggatcaaacgacctggacaagtt

SEQ ID NO: 93914 - DNA, 489 bp, Zea mays
  unsure (1)..(489): unsure at all n locations
gagtttgcataggnccccngatcggcgcgcatntctactcggtcctgaattaccggctcgagggacgcgtcctcccagccatgcaccagcacgagatactatccatcatgcgcctgtcgtacctcctcctcgtcgattccgaactctgggggcgcgccgcggcgcagcaggtgccgtcgtttggcggcagcgctctgaagccggactactacagccagtcgtgcccgctcgcggagcggatcatctcggaggtgatgcatacgaagcatatggcgaacccgacgactgccgcgggcatgctgcgcgtcttcttccacgactgcttcgtcaccgggtgcgacgcgtctgtgctgatcgcgtccacccagttccagaagtcggagcacgacgcggagatcaaccactcgctccccggggacgccttctacgccgtggtgcgcgccaagctggccctggagctggagtgccccggggtggtgtcctgcgccc

SEQ ID NO: 93915 - DNA, 489 bp, Zea mays
  unsure (1)..(489): unsure at all n locations
taggtnnctgcgatgttgggggtatgagtaatactcctcccggtccggaattcccgggtcgacccacgcgtccgctgcagtcatctcctccatcaccaccaaactcaacaacagccagctcgcgaaaataagggagagccgcagcatggcatcatcggccgcgctcttggtgctagccctcgcgctagtggcggccaccgccccacaggtagcggaggcaaagaagaagagagcggcggagagcggcgaggcggcggaggcgaagaagatccaggacgacttctgctcgacgctgtgcgagggcaagaaggggacggacctggtcgtgtgcaaggagtcctgcgcgctctcccagcagtccaacctggtgctgtacggcaggatccagtgcaagggcaagtgcaccgagcagaagggcatcacggcgccggccatgaaggtctgccaggaggagtgcgacaaggcgtacgtggtgaaggcggccgangt

SEQ ID NO: 93916 - DNA, 489 bp, Zea mays
  unsure (1)..(489): unsure at all n locations
gtgtntggcgtgatgttggggtgaggagagatacgttcgtaccggtccggaattcccgggtcgacccacgcgtccgcgtcacggacatcaacgtcaaggattgcactcttaagaagacgatgttcggcgtccgcatcaaggcgtacgaggacgccgcctccgtgctcaccgtctccaagatccactacgagaatatcaagatggaggactcagccaaccccatcttcatcgacatgaagtactgccccaacaagttgtgtactgccaacggcgcctccaaggtcaccgtcaaggatgtcaccttcaagaacatcaccggcacctcctccaccccggaggccgttagcctgctctgcactgccaaggtcccatgcaccggcgtcaccatggatgacgtcaacgtcgagtatagcggcaccaacaacaagaccatggctatatgcacgaacgccaagggcagcaccaagggttgcctcaaggagcttgcat

SEQ ID NO: 93917 - DNA, 489 bp, Zea mays
tatgtttgggtggatggggaatggtgatgtggagtgctcgtaccggtccggaattcccgggtcgacccacgcgtccgttttttttaaataataaaaatgttggcaatttgcatttggtcaaatccatccagatagaacaggatgcagtgaagcgcatgagcacaagtctaacacgggatgcaatgcaagcaaagggcgtaatagtagtcgcggcctctagggtggcagcgggttattattcttggcagcgaacgcggtgacgaactggcagcgcaacgtttgttgtcgtcatcatctttcctcgtcgccggtctcagaactcgacgcccttgaagaccttgcgcacctgctcgagcgtgacgaagagcacaacggtgaagggcccctggcgcatcacggtggggatgaaccccttgtacagcgccatgggtccctccgacctgacggtcttgagggcgcagtcgacggcgccggcgtagggcgggggcg

SEQ ID NO: 93918 - DNA, 491 bp, Zea mays
  unsure (1)..(491): unsure at all n locations
tggggtgnctgggccacgaatagacngtactgcggtaccggtccggaattcccgggtcgacccacgcgtccgcccacgcgtccgcggtgcttctgctcgccggcccaaaatcgcctcatcgaccacgcgcccttccaggctcccggctccatgggtctcctctcaaacaggattgggagggagagcctcaaggcgggggatcatatctactcctggagggcggcgtgggtctacgcgcatcacggaatatatgtgggcgatgataaggtgatccatttcacaagaggaagaggacaggaggtcggaacaggaactgtcgtcgatattattcttgtgagttccaccccaaaacgaagcaacacgccttgcccggtgtgcaccgacgaaaccagcgacagcagcacagagacgaacggcgtggtatcctcctgcctcagctgcttcctagctgggggtgctctctaccgtttcgagtacgcagtcaacccggc

SEQ ID NO: 93919 - DNA, 486 bp, Zea mays
  unsure (1)..(486): unsure at all n locations
tgggtgngtggccactgaaaacttagtaccgcagtaccggtccggaattcccgggtcgacccacgcgtccgggaaggatggcgtcggagccggtggcgcgggcggtggcggaggaggtggcgcgctggggcgcgatgcgccagaccggggtcagcctgcgctacatgatggagtttggggcgcgccccacggagcggaccctccttctcgccgcgcagttcctgcacaaggagctacccatccgcatcgcgcgacgggcgctcgacctcgactcgctcccattaggcctctccaccaagcccgccatcctcaaggtgaaagattggtatgtggagtcattccgtgaaatccggtcctttccagaggtgaagaaccagaaagatgagctcgccttcacccagatgatcaaaatgatcagggtacgacacaccaatgtggtgcctgcgattgcattgcgtgtgcagcagctgaagaaagacttgtgcg

SEQ ID NO: 93920 - DNA, 487 bp, Zea mays
  unsure (1)..(487): unsure at all n locations
gggggnnnnccatgacgagatatatgcaaccctcgtaccggtccggaattcccgggtcgacccacgcgtccggtgatttgaaataattgggaataaatagttcgtgaatccctgaagcgtgcatatatgtattcctgccaagataaaggtaatggagtcgtcacgcaggttccagccggccgtcatcctgcttctcctgctcattgtgtccaccgatatggcacaggcaagggaatgcgagaagtacagtgagcgatttgttggggcatgcatgatcgcagacaactgcgccaatgtgtgccgcggtgagggcttcttggccggcaggtgcagcaccttccgccgccgctgcatctgcactaggcagtgctaaacaagatcgctcgatcgctcgccatgcatcgacaacctattcttaataacgttcattatctcgttcttatatatgacgaatgtcatgtatgttctggtgactgtcatgtatatt

SEQ ID NO: 93921 - DNA, 493 bp, Zea mays
  unsure (1)..(493): unsure at all n locations
atggtnnctgagccacgcatagnacngcacctgctggtaccggtccggaattcccgggtcgacccacgcgtccgcccacgcgtccgcccacgcgtccgcccacgcgtccgcccacgcgtccgcgacaagagtgcgtgcacaaacaatgcgatgagagccttgttcctgctggtcctcttctgcatcgtgcatggtgagaaggaagagtcaaagggcatcgatgcgaaagcgtccgggcctggtgggtccttcgacatcaccaagttgggcgcctccggcaatggcaagacagacagcacgaacgctgtgcaggaggcatgggcatcggcgtgcggcggcactgggaagcagacaatcctcatacccaagggcgacttccttgtcggacaactcaactttacaggcccttgcaagggcgacgtgaccatccaggcggatggcaatctgctggcgaccacggacctaagccagtacaaggaccatggttattgga

SEQ ID NO: 93922 - DNA, 595 bp, Zea mays
  unsure (1)..(595): unsure at all n locations
gaggttattagtatgtaagtggagagagaatatgangagtggnnnaatgagtctctttcgatgacttaccggtccggaattcccgggtcgacccacgcgtccgctctctcgttctgctcacatcgacgcggttcggttccagtttcactcccactgccgtctcggcaacctcccctgttccacgcttcgtcctcgcctgccaggctgccatggccgcgacgtcccccttcgactgcgtcctcctagacctcgacgacaccctgtacccgggcgacaccggcatcggcgcggccctgaggcgcaacatcgacgagttcctccaggccaagctcggcgtgtcggccgacgaggccgccgccacgcgcgccgagctcttccgcgcgcacggcagctccctcgccgggctcatcgcgctcggctacgacgtgcacccggacgagtaccacagctacgtgcacggcaggctaccgtacgacaggatcgcgcgcgacccgcaactggcgcggctgctgcagaacattccgcaacgcgaagggctgttcaccaacttggaccccgcgcacatggaagcggcgcttgtaccgcttggcgttga

SEQ ID NO: 93923 - DNA, 580 bp, Zea mays
  unsure (1)..(580): unsure at all n locations
atttaatgattattgatttattgatttgatgnttgtagtggagtttattgaactgtgatgtacgctctaccggtccggaattcccgggtcgacccacgcgtccgcgcaacaaaggatgggacaggggttcgtgattatattcatgtggttgaccttgctgaaggagatcttttcgcattaaagaagctttttgaaagctcatctaacataggatgtgaggcgtacaaccttggaactggaaaaggaacatcagtgttggagatagtcaatgcatttgagaaggcttctggaaagaaaatccctttggtcatgggtcaacggcgtcctggtgatgctgaggttcttttttcatcgccggcaaaagcggagagagagctgcactggaaagcaaaatatggcatcacagaaatgtgcagagacctgtggaactgggctagcaagaacccttattgatacgccgcatctgaatcttccaagctgtatggcaattcacgcttgacaacaccattggtccctgtggacattactttgtcatttgacagtgtatcgctatccgggtaaaagtttatctacgtggggc

SEQ ID NO: 93924 - DNA, 535 bp, Zea mays
  unsure (1)..(535): unsure at all n locations
gcgttactgtgccctactctcactacgtatncctctaccggtccggaattcccgggtcgacccacgcgtccgcccacgcgtccggtgctgggtgctgccggtggcatcggtcaacccttgggcctgttggttaagatgtctcctctggtgtccgagctgcatctgtatgatattgctaatgtcaagggagttgctgcagatctcagccactgcaacacgcctgctcaggttcttgacttcactggaccctcagagttagccaactgcttgaaaggtgtggatgtcgttgtcatccctgccggggtcccaaggaagcctgggatgactcgcgatgacctttttaacatcaacgcaagcatcgtcaagacacttgttgaggctgttgcagacagttgcccagagcgttcatccatatcatcagcaacccggtgaattccacggtgccaattgcagctgaagttctgaagcagaaaggtgtctacaatcccaagaagcttttcggggttaccaccctggatgttgtcagggcccacac

SEQ ID NO: 93925 - DNA, 543 bp, Zea mays
  unsure (1)..(543): unsure at all n locations
cgtgcnnnttnccgatgtgggagcatgattgaagcgctctaccggtccggaattcccgggtcgacccacgcgtccgcccacgcgtccgcccacgcgtccgcccacgcgtccgcccacgcgtccgcggacgcgtggggtctgctgagctctccaagctcgctgccaacgcgttcctggcacagaggatctcctctgtgaacgccatctccgccctctgcgaggccaccggcgcgaatgtgactgaggtggcttacgccgtgggcaaggacacgaggattggccccaagttcctgaacgccagtgttgggttcggtgggtcttgcttccagaaggacatcctgaacctggtgtacatctgcgagtgcaatggcctgcccgaggtggccaactactggaagcaggtgatcaatcaacgactaccagaagagccggttcgtgaaccgcgtcgtgtcgtccatgttcaacaccgttgccggcaagaagatcgccgtcctcggcttcgccttcaagaaggacaccggcgacaccagggaagaccccggc

SEQ ID NO: 93926 - DNA, 534 bp, Zea mays
  unsure (1)..(534): unsure at all n locations
tacgtgacttgtnnccggttcgaccgctagntctgtaccggtctggaattcccgggtcgacccacgcgtccgcccacgcgtccgcccacgcgtccgcccactcgtccgcccacgcgttcgcgcacgcgtggggggtgctgagctctccaagctcgctcgcaacgcgttcctggcacataagatctcctctgtgaacgccatctccagccctctgcgacgccaccggcgcgaatgtgactgacgtggcttacgccgagggcaaggacactaggattggccccaatttcctgaacaccagtgtcgggttcggtgggtcttgcttccagaatgacatcctgaacctgaagtacatctgctagttcaatggcctgcccgacgtggccaactactgcaagcaggtgatcgatcaaccactaccataacagcctcttcaataaccgcgtctcgcggccattttcaacatcgttgccagcgagaagatcctcggacttagctatttctttgagaacgacaccgacgacaccatggctaccg

SEQ ID NO: 93927 - DNA, 610 bp, Zea mays
  unsure (1)..(610): unsure at all n locations
gatgttgtatatatgaatgtnatgatgatgtnatnntgnatttggtgagagatnatgtatgagtgggggaggaagcgataggatngctcggtccggaattcccgggtcgacccacgcgtccgcccacgcgtccgggggtgcgcgacgttctgggtcggggaggaaggggaggccccgcggcgggtggcggtgcccgtggcgcgcctgggccacccgcgaatgctggagctgctcggggaggccagggaggagtacggcttcgcgcaccagggcgccgtcgtcgtcccgtgcgccgtcgagcggttcatgcgggcggtggaagcctcggcgtcggcggggaacaggcacgagcaccaccgtcacggacaccatcaccaccactttcgcctgcctcatattcacatcgcccggtgctttagaccgtcgcacgtcgttgcttaggattcacgtcgagcgcgcgcgagtagcaaaaaaatttcattttcctttttgtttggaagtggcaagaattctggttttttttcttcttggataatcaggtgaattttggtttcgtgatccatctgtggtgaaacgggttcgccacagatcacgagtttgagcacccccc

SEQ ID NO: 93928 - DNA, 596 bp, Zea mays
  unsure (1)..(596): unsure at all n locations
gatgttttgtattattgatgatattgagnagatgntgtgagcggtgttagagggaaagtatgtatgatctaccggtccggaattcccgggtcgacccacgcgtccgcctgcagtcatctcctccatcaccaccaaactcaacaacagccagctcgcgaaaataatgaagagccgcagcatggcatcatcggccgcgctcttggtgctagccctcgcgctagtggcggccaccgccccacaggtagcggaggcaaagaagaagagagcggcggagagcggcgaggcggcggatgcgaagaagatccaggacgacttctgctcgacgctgtgcgagggcaagaaggggacggacctggtcgtgtgcaaggagtcctgcgcgctctcccagcagtccaacctggtgctgtacggcaggatccagtgcaagggcaagtgcaccgagcagaatggcatcacggcgccggccatgaaagtctgccaggaggaatgcgaccaggcgtacgttggtaaagcggccgaagtcaccaaaggctgcaaaggaacctgcgccaagggagaagaacccgggccctaacgagaactgcaaagaggtcctc

SEQ ID NO: 93929 - DNA, 576 bp, Zea mays
  unsure (1)..(576): unsure at all n locations
atttatttataattatttattgatttgatntaggttgatgtgtttttgtggagaagtattgatgtactcggtccggaattcccgggtcgacccacgcgtccgcggacgcgtgggcggacgcgtgggttcagctgtctcaaggttgaaacatgagaatgttgtccaagtcgtcggatactgcgccgaatggagcacccgcgttcttgcttatgagtatgcaactaggggatcattgcatgatatcctccatggtaaaaagggtgtcaaaggagcccagccagggccagtcctgtcatggatgcaacgagctaggattgccgtatgtgctgctcgaggtctcgaggttctccacgagaaggccgatcctcgagtggtccaccgagacatcaagtcaagcaacatactgcgttttgaccatgatgtttccaaaatcggggaccttgacatcttaaacaagcccctgacattgcttttcgccttcactttaattgcgttcttgggaccctttgcttacatgcaccaaaattttcccttacttgacaacttttcaccaaaagtggattcttacagctttga

SEQ ID NO: 93930 - DNA, 595 bp, Zea mays
  unsure (1)..(595): unsure at all n locations
gattattattattagagatgatatagatnatatgncgtgagcgtgntttatgttatgtntttgtatgtacnanctgcaccggnctggaattcccgggtcgacccacgcgtccgcaaagcaggncaatcacattatatattgttccaggtttacaaatcgtaagacaaccaaacgtgctttggggtcgaatcacaaaattatttgccaaaacgatacaataaaattatataaacaagggggaaaaaatgccgaacgaaggatgggtggtgtttaacggagcggccacgcacaatcccagggcatggagactactaattaattaatgttggcgttggtgtcgttgttcggatgcattcaatcacaggccttgctctacgaggtagtcaccgagcctctcaaccaccatgttgcactgtccaggggtcatgggctcgtcgtagatgccgatcaccagcgcctgtccggtcttcttcacaggtatgccttcagatccccttttcccgcggatgacagcgcccggcttgcctaggatgaccatgtactttgttgggccaaaggataagcctattggggccgaaacccaggctctttaaat

SEQ ID NO: 93931 - DNA, 537 bp, Zea mays
  unsure (1)..(537): unsure at all n locations
gatgttgactcgcaatcgaaactactactgcatcgctctaccggtccggaattcccgggtcgacccacgcgtccgggggcgggtgcgggtgaggggcaggtcgatgtcctcaagaaggcggaaacccgcatcgatgagctcaagcagcgtgcccaccgtcaaggactcgcaggccatctgcgacctcgtctactcgctcttcgtctccgaggaggtggacaaggtggagctgctctactccaagttcgtgtcgctggtgcgctccgaccccatcatccagacgctgctccccatgtcgcccaagggcgagatctgcgacgtcaacggcgtctgcgtggacgccacggaggacgagctcttccgcttcaccaccaaggaggggaagctcaccgtggagcgcgagaaggaagatcgagacgcagcccttctcccccgtggtgcagttcgagcaggaccccgtgcagatcctggacgcgctgctcccgctctacctcaacagccagatcctncgtgccctgcaggaatcgctcgccagca

SEQ ID NO: 93932 - DNA, 535 bp, Zea mays
  unsure (1)..(535): unsure at all n locations
gtgttncgttgccctagcctcgatgcagtagncacgtaccggtccggaattcccgggtcgacccacgcgtccgctcaagccagacatcacggcgccgggggtgaacgtcatcgcggcgtggagtggcgcgacggcgcccacggacaagtcgttcgacaagcggcgagtggcgttcaacatcctctccggcacgtccatgtcgtgcccgcacgtctccggcgtcgctggcctgatcaagaccctccacccggactggagccccgccgcgatcaagtcggcgatcatgacaagcgcgacggtgctggacgcggagatgaagccgatcctgaactcgtcctacgccccggcgacgccgttcagctacggcgccggccacgtgttcccgagccgcgcgctggacccagctcgtgtacgacatgaggacgatgaacaggggatcgttcgtgtgcccgaccacccccatgagcctacacgacctcaattacccatcaatcactgcgcacggtctttccgnctgcacgaccacgatggttcg

SEQ ID NO: 93933 - DNA, 584 bp, Zea mays
  unsure (1)..(584): unsure at all n locations
gttttattatgatttatttattgatttgatgaatnattgatttatgtagtggggagatggtatgcatgtacnggtccggaattcccgggtcgacccacgcgtccgcccacgcgtccgctaagatgaagaagggtgttcgcattataaatgttgcacgtggtggcgtaattgatgaagaagctctagtcagggcacttgattcaggggtagtagcacaggctgctcttgatgttttcactaaagaacccccagcagctgacaacaagttggtactgcacgggaatgttactgtcacacctgaccttggtgccagcacagtggaagcacaagaaggggtggctattgagatagctgaagctgtcattggagctctgaaaggggagcttggagcttctgcagtggacgcgcccatgggtcctgcttaagggcctgcaaaacttgcaccttttggttggccttcgaaaaagcttgggccccttgctttgccaccatgttcctggtggaggtgggattaaggttttagaaatgggcctattgcttttttcggggcccttgattaatcttggactcggaaccttttcctt

SEQ ID NO: 93934 - DNA, 593 bp, Zea mays
  unsure (1)..(593): unsure at all n locations
gatgtgttttataattnatatttgtntgatgatnntgtgagagttagttatgatagatcttcatcgtactgctctaccggtccggaattcccgggtcgacccacgcgtccggcggcagagagcgctccgccgcacctgctcctgatatgcttcccggggcagggccacgtgaacccgatgctccgcctggccaagcgcatcgcggccaagggcctcctggtgaccttctcctcgatctccagagtcggggcgatgctcgccgcgtccgtgggcgtgtcggccggcggtgacggcgtgcctgtgggccggggccgcgtccggttcgagttcatggacgatgaagaccccgggcctgacctggacgacctcttgcggcacctcgcgaaagacggcccgccggcgtttgccgagctgctggaacggcaagcggacgccgggcggcctgtggcgtgcgtggtggtaaacccgttcatgccgtgggccgtcgacgtggccggcgacgcggtgaacccttttgcggttctgtgggtgcaatcgtgcgcggggttcttcctctactaccaccacgtgcacaggctcgtggagttcccttc

SEQ ID NO: 93935 - DNA, 579 bp, Zea mays
  unsure (1)..(579): unsure at all n locations
atggaatgttgattgatatatagatttgatgattggggaggtgacttcttagctttatgtactgacgtacnggtccggaattcccgggtcgacccacgcgtccgcccacgcgtccgcccacgcgtccgcccacgcgtccggacaaaatcagagattttgcagaatgtagcggagttccagttttcttgtgtcctgtacaatggtgccctagagaatgcatgcagtgagcttggagcccgtatgtctgccatggacagctctagcagaaatgctggcgatatgcttgatcgtctcactcttacttacaacaggacacgccaagcatccatcaccacagagcttactgagaatatatctggtgcatcggcccttgaggggtagtgaaaaaactgcggacttcttccttttgccggatgtgtttcttttccatgaaagctttttcccttttgagtcttaatttcagcctccttcattttaccttttcttgagaaacttggtctcatgctttgttcaatatagcatgcccactactttgaattttccgtgcaacccttgcacatttgcataaagggtgtaact

SEQ ID NO: 93936 - DNA, 542 bp, Zea mays
gcggtatgactccactcagctcacctacgtactgtctgtaccggtccggaattcccgggtcgacccacgcgtccggtcctgcgtcaccctccattaaccgtagcggcagcagcgctcgtttgatccccgcggcgggggggcgtccgggtcggggagcgaggatgacggagtccctggtgcggaacaagccggggatggccagcatcaatgagatgccggtgctgcatgacgggccgccgacgggcggtttcgcgcacgtgcgctacgcgcgccggattcccacctagggccccagcgccactgccatcttcctcacggtcttcggcgccttcacgtatggcatgtactcatgtcggtcaagggaacaaggtgcgccggacactcaaagaagagaaaattgctgctcgatgctatactgccgatgctccaagctgaagaggatgaaagatctgtcaaagagtggaagatgcatctcgatgaggatgcgaagattatgaaagatgttccagggcggcaagatggctagagtgtctacattttct

SEQ ID NO: 93937 - DNA, 542 bp, Zea mays
  unsure (1)..(542): unsure at all n locations
gtgcntatgtctcgactcgtcttcactacgtactgctctaccggtccggaattcccgggtcgacccacgcgtccgcccacgcgtccgcccacgcgtccgagcgacatttcgaataacacagttgagcgcgacgatgggatccctcgctaataacatcatggtcgtgggtgtcgtccttgcagcgctcgtcgccggcgggtcatgcgggcccccgaaggtgccgcccggtcccaacatcaccaccaactacaacggcaagtggctcaccgccagggccacctggtacggtcagcccaacggtgccggcgctcctgacaacggcggtgcgtgcgggatcaagaacgtgaacctgccaccctacagcggcatgacggcgtgtggcaacgtccccatcttcaaggacggcaagttgcggctcatgctatgaagtgagatgcaaggaaaaacctgagtgctcgggcaatccagtcacggtgtacatcactgacatgaactacgagcctatcgctccctaccacttcgacttgagcggcaagggcctt

SEQ ID NO: 93938 - DNA, 578 bp, Zea mays
  unsure (1)..(578): unsure at all n locations
gattgtataattatgnatttgtgtatnatatagtagagagtcgtgtttagttagatattgattgtctgtacnggtccggaattcccgggtcgacccacgcgtccgggcgtgttcaagtacaacctcatcggggacgtgccgccctccaacacggcccccaccaagatggcgcccaacgtcatcagcgccgagttccgcacgttcatcgaggtggtcttcgagaaccccgagaagagcatcgacaccatccacatcgacggctacgccttcttcgccgtcggcatggggcccggcaaatggacggcagcgtcgcggagtacgtacaacctcctggacacggtgagccggcacacgatccaggtgtacccaaggtcgtggacggcggtgatgatgacgttcgacaacgcgggcatgtggagcgttcgctccaacatctgggagaggcagtacctcggcgagcagctgtacgtgaggcgtatctcgccggaacggtcgcttaaggaccagttcaactggccggaaccaagccttcgttcgggaaaggcctcgggcttgccattccccgtgctaacgggccg

SEQ ID NO: 93939 - DNA, 590 bp, Zea mays
  unsure (1)..(590): unsure at all n locations
gtgtttgttattatggatgttattgatgatgatantatgaagtggtnatttttgtagttctggatagtacngactgtaccggtccggaattcccgggtcgacccacgcgtccgcggacgcgtgggttaggtcactgggaggaaccatgctgtggaacatgttccagtggttttgcgctgctgcaaagggctgtggcttcggagtgttccctatctttggcctcgaggcatataaacacggattctacttcgacttctgcatgtccaacatcggcatcggcatgctgtgcccgtacaccatcaccgtgtccatgttcatcgggagcgtcgtctcgtgggggctcgtcttggcgtacctcgcgaccaaggcgggcgtctggtactcttcgcacctcagccccagcaggcctcagcggcatcaggggctaccaggtgttcaatgggggggccatgattctttggcgccggcttgttaactttctggtcattttggcggggcacgctgacaccatgcgcgagaagttcattttggagtatgcgtgtgtaattcaggcggcggcttgttttggcgttaggagatcctggacggtt

SEQ ID NO: 93940 - DNA, 592 bp, Zea mays
  unsure (1)..(592): unsure at all n locations
gattttattattattnatgttattgatgatgatgnnatgtagatggtggttaggtaggatgatcgattgcatgtaccggtccggaattcccgggtcgacccacgcgtccgcgatcaagcccattggtcgaggagcttatgggatagtttgttcatccattaatcgtgaaacaaatgagaaagtagcaataaagaagatacacaacgttttcgacaaccgtgtggatgcactacggaccttgcgggagctgaaactccttcgccatctccggcatgagaatgtcattgctttgaaggatataatgatgccaatacacaggataagctntaaagatgtgtacttggtatacgaactcatggatactgatttgcaccagataatcaaatcacctcaaggcctttccaatgaccactgccagtattttctttttcagatgcttcgaagacttaaatatcttcattcagcagaaatacttcacagagaccttaaacctggaaacctggttgtgaatgcacattgtgagctcgaaatatgtgaattttggtcttgcacgtacaaaaaggttcccaagggcagttcatgagctaataca

SEQ ID NO: 93941 - DNA, 539 bp, Zea mays
  unsure (1)..(539): unsure at all n locations
agcggttctctgtnnccgggttcancangtantcttttccggtctggaatacccgggtcgaccgacgcgtccgcccacgcgtccggccggtgaaagacggtccttatcatcgacctcctcaccgccgacggcatgtggtactacaagacatgcttgaggtgcagccactgcaagggcgtcctctcgattagcagctactcttccatggacggcgtcctgtactgcaagacgcactttgaacagctcttcaaggagacagggaccttctcaaagaactttcaaggtggagcatcttcaaacaagaacgacccggcaaaggctccaagcaagctatcatctgcattctctggaactcaagataaatgcgcggtctgccagaaaacagtgtatccattggagaaatccccgtaatgctagttctaccacaagatctgcttcaaatgctctcactgttgcttgatccttaataacttcttctactcctcctcttaatcttgtcctttacttctagatctcaattttgcatcttgtttaaatta

SEQ ID NO: 93942 - DNA, 584 bp, Zea mays
  unsure (1)..(584): unsure at all n locations
attggtttatgattgatatatagatnatgatttatgttgatgttctgcagtgggagtatgtactgatctacnggtccggaattcccgggtcgacccacgcgtccgcaggatggggctcctcgtcaagggaggcaacgtcctcgagtcgctgggcgaagtcagggtcgccgcgttcgacaagaccggcaccatcaccagaggggagttcagcatcaaggacttccatgtggttggggacaaggttgaaatgaaccagctactctactgggtatctagcatcgagagcaaatcaagccatccaatggccgctgcacttgtcgagtacgctcagtccaaatctgtacaggcgaagccggagaacgtgaccgagacctgcatctatcatggcgagggcatctacggggtgatggatgggaaacagatctacattggaaaacaaaggatcataactagggtcttgtgtcgtcatcatcaacatgcttggcaccaagaaaccgacggtcttaaaagcgtgttcttttggcacttgttcatgtgaagggaactcttggggaaaagtttggttttccaaacacttgggaccc

SEQ ID NO: 93943 - DNA, 580 bp, Zea mays
gtgagataattattgataaatatataatatgatagagaggtcgataaggaggaggttgtattgaactactcggtccggaattcccgggtcgacccacgcgtccgctatcatcatcttctccgatccatcaacaatcgccgagagcgatcgagagataaataaagatgaagaaagtggcatcatcgtcagccgttctcttcgtgctagccctgacgctagtttgtgccccgctgatagcagaggcaaagaagaagagagtcgccgccgccgccgccgaggagaagaaggtgcaggacaacttctgctcgacgctgtgcgagggcaggaaggggatggacctggtggtgtgcaaggagtcctgcgacctctcacagcgctccaacctggtgctgtacggccggatccagtgcaagggcaagtgcaccgagcagaagggcatcaccgcgccgcaaatgaaggtgtgccaagaagcgtgcgacaaggactacctggtcaaagccgctgaggtcaccaaggcctggaacaacaactgggccaaggagaagcaacctttggttaacgagaactgcaggaagttctc

SEQ ID NO: 93944 - DNA, 584 bp, Zea mays
  unsure (1)..(584): unsure at all n locations
gatttattgtataatgtatatattgatnatatnntatgtggatgtgtatggaaggatatggtatgatctaccggtccggaattcccgggtcgacccacgcgtccggcgcgacggtggagatggagtgccgtcacttcgagtcgcacgaggtccacgacaaggcggaggcgacgacggacgccggcgggtggtacaggatggagatcagcggtgaccaccaggacgagatctgcgaggtgctgctgctcaagagccccgaggcggactgcgccgagatcgagcgcacccgcgaccgctgccgcgtcccgctcacccgcaacgacggcatcaggcagagcggcatccgatacgccaaccccatcgccttcttccgcaaggagcctctcagcaactgtggcgagcttcttcgcgcttacgaccttttcaacgagacgttcgagaattcctaagcgtcattttggttttttttttttaaattcctcttccatagcacatttggtcgactgatccaccctttattatccgacctgccatttttcttaaaattaaaattaattttaaatcccaagggttagagactaccc

SEQ ID NO: 93945 - DNA, 579 bp, Zea mays
  unsure (1)..(579): unsure at all n locations
gatttcattataattnatttattgattagatagtatagatgctaagctattagaacantgtttgcatcantgctccggncttgaattcccgggtcgacccacgcgtccgcccacgcgtccggatcaaacggggccttattcgctgcttcactggccgtaaattcgcaatgttgatctggggaatgaattaacaaactccaatttttggttctctggttccttcaaggggtcgggtctgcacgccatctgctcggcatatgaaatctgctgagccgtcaacaccacttggagtaacttattcgatgagttcatgatttattgatttattgcagccagaaatcacgcagctgaggcttgttcgtttctatcggattgcacccggaatcgttccagctaatcaaagtttatataaattagagaagcaatccgggtaggaatcgttccgacccaacaattcgacacaaacgaacaaggccttaagcttgttctgtattctacctcagaattcgttcagtgtgaggaaatgtttgtgcttcatttaaaggccgttcacattattcggattgtttcagaactcat

SEQ ID NO: 93946 - DNA, 581 bp, Zea mays
  unsure (1)..(581): unsure at all n locations
gatggtgattataagtnatttgtgtataatatggtagaaggnnnnnnnatgaatgctatctctcgtananccncnncggnntnnaantcccgggtcgacccacgcgtccgcccacgcgtccgcccacgcgtccgcccacgcgtccgggtgcagcgcgcgagcgcgttcgtgcggcatggaacagaacgacggctcgttcctcgccgtgcgacgcctctccggcggcgccatccaccaccatcgccaccactcttcgccggctgaggtcgtgggcgtgtccacggcgtggatcgggaaggggcttacgtcgtgcgtgtgcgcgcaggggacggagagcgacgggcgcctctccttcgatttgagtcccattcaggaagagtgcttgcataggttgcagaaccggatagaggtgcagtatgatggttcaaatctagagcatcagaaagcactggtggccctttggcatgcttcttttcctggaactgaacttctaagattagtatcagaccagtggaaggagatgggatggcaaggggaaggatcctttacaggatttaggggtggtgggtttataattttgg

SEQ ID NO: 93947 - DNA, 547 bp, Zea mays
  unsure (1)..(547): unsure at all n locations
ggtnnatgaggtgggtgttccagcaacgagagaacgatgcactcggcccggaattcccgggtcgaccgacgcgtccggccggccatgagcgcggtggccgtggcgccacaggatacagcctcgttgggcaccttggcgaggaggtggacagcctcagcgaagatgacgcccatgcccatgtggaggtgcggctcgatatggcagtggaaggcccacacgcccgggttgtccgccacgaaccggagcatcgtccacccgtacggaaagatgaccgccgtgttccgcagcggcgggtcccggaggttgagccgcgcttcgtcggcggcgtccccgcggtacgcgccgtcgccgtagcccagcacccagaagtcgtggcccgtggaggtgcccacgggtgcacctcgctgacgttgcgcgacagcgcgttggcgtctggagccaaacgttacacggtgtgttgtccgcaaggacgtacacgtggtccccggcgcgctgtttggggttcgccggcgcaccttaacgttcgattccggcttgaacgctccgg

SEQ ID NO: 93948 - DNA, 553 bp, Zea mays
  unsure (1)..(553): unsure at all n locations
agggntaatgaggatggtgttccgcatatgggaggtagtgatgcactcgcccggaattcccgggtcgaccgacgcgtccgcggacgcgtgggtctagaaacactagtgcttccaaaattgcaagcaaatcttcctttggtgggagtgcgcctttgaagaatggtgaatttcagaagatgttggaaatggaatcacagaaaactatagtggtaaattgccctgatgtgagcatccctgtagtggaagagacaaaaccactcatatgcggaatcactgaattggatgatggccttttcaaggacaagcaactttccactaaggagattgcaacgtatggattgtatctttgccccttatggtttgtgacagagtatttatcgaatgcnagcgccttgcaagaactagtgttgccagtaccacagtgctgtcttcaacttcaggactcttcactcctttcattggtgtttacttggccaagactccataaatgctgcgaaagttattgcctgtttcattagcatggcttgccgtggtatgacaactattggcccat

SEQ ID NO: 93949 - DNA, 539 bp, Zea mays
  unsure (1)..(539): unsure at all n locations
agtgacgggnantgtctacgatacactgaggaccnttcgannnncnctnnnnnnttgaattggcgggtcgaccgacgcgtccggtttctcattcagcgcccgtacagccaccactctcaaccgagccatatccaaaggtctcaacatcgcttcgtgcagcctgcatcggtcgacgagggctgcacgaacgatggggtccgcctccgcctcagtgacgacaaccagcctgctggcgctggcgctggcagcgctggctttcgtctccagggccgcggcgcagggcaacggctgttccagcgtgatgatgaccctggccccgtgcatggacttcatctccagcaaggcgtcggagccggggatctcctgctgctcggtgctnggccggagtcgtgcagaccgacccccgctgcctctgcatggtactggacggcactgccacgtccttcggcatcgccatcaaccagaccagggcgctggagctccccggcgtctgcaaggtcaaggcgccgncgctcagccagtgcacaggcgtccctgcg

SEQ ID NO: 93950 - DNA, 535 bp, Zea mays
  unsure (1)..(535): unsure at all n locations
agattagagctnctatgaantcggggtaggaaggattgctgtaccggtccggaattcccgggtcgaccgacgcgtccgcggacgcgtgggcggacgcgtgggcggacgcgtgggcaacggtgccggcgctggtgacaacggcagtgcgtgcgggatcaagaacgtgaacctgccaccctacagcggcatgacggcgtgcggcaacgtccccatcttcaaggaccgcaagggctgtggctcatgctacgaagtgagatgcaagggaaaacctgaatgctcgggcaatcctgtcacggggttcatcacagacatgaactacgagcctatcggtccctaccacttcgacttgagcggcaagggccttcggcttccctgggcaaagcccgggctcaacgacaagcttcggcactgccgcatcatggacgtccagttcagaaaggtgccgtgcaaggacccccgctgggcaaaaaaatcgggtccacattgaaaagggcttgtaccccaaattactgggccggcctgggaaaaagtgggg

SEQ ID NO: 93951 - DNA, 563 bp, Zea mays
  unsure (1)..(563): unsure at all n locations
ggatgatttaggtagcgtnatgggtgttcgaatctctacgagatcttctcccggtccggaattcccgggtcgaccgacgcgtccgcccacgcgtccgcccacgcgtccgcgaaagaagtcgcctaatgctttcgatcgaattatgcgcgttcttcgtcccacgctccgtctttatttgtaatctgaagcttacaggaacatttgagtggatcatggacggattggtaggcctcttgaaagtccgggtggtgaggggcatcaaccttgcctaccgcgacgcatgaggcagcgatccgtatgtcgtcctacgacttggcaagaagaaacttaagacgagcgtgaagaagagatctgtgaaccccatctggcacgaggagctaactctgaccgtcacagatcccagcctagctctgaatgctgaggtgttcgacatggacacgttcaacatggacgacccgatggggggacgcggagatcgacgtggcgccgctggtggaagccgggaacgcgagcccggaagcnatcctgaagaaacggcgcattatnctgtcgttgcgccaacc

SEQ ID NO: 93952 - DNA, 544 bp, Zea mays
  unsure (1)..(544): unsure at all n locations
aggatatgggtngtagctggtaaggagcgtacggggagtttgatgtagtcccgaattcccgggtcgaccgacgcgtccggcggggagtgggtggacgtgccgcccatgcgccacgccatcgtcgccaacgtcggcgaccaggtggaggtcatcagcaacgggcggtacaagagcgtcatgcaccgcgtgctcacgcgccccgacggcaaccgcatgtccgtcgcgtccttctacaacccgggcgccgacgccgtcatcttcccggcccccgcgcttgtcggcgccgccgaggaggaccgcgccgaggccgtctacccgagcttcgtgttcgaggactacatgaacctgtacgtgcgccacaagttcgaggccaaggagccccggttcgaggccatgaagtcggccatcgccaccgcgtgagcaaatactgacttccgctgccggcttccttcgtggcgtcaagccttgaggcttgaacgaacaacgtacgtncatgtgcttatagtggcacagttatgtgtgtaactaccgatcgtggaacggc

SEQ ID NO: 93953 - DNA, 534 bp, Zea mays
  unsure (1)..(534): unsure at all n locations
nagttaaggaggtggtaccgagatggggggagcgagggaccgctccggaattcccgggtcgaccgacgcgtggggctggcgagggctcctccgccgcggccgggctccagcggcgtttgcatcgcccgcgcacatgcaagaggcgncgccgtcgcggccaggccggggacgacgaggacgacgacgacggtcgcggcggcggcggcagaggccgcttctaacgggtcagcggcggcggccgtcgcagggatcagcagcagcagcagcgcgctggtgacctcgaccgtcgggaaatcgacgaacatcctgtggcatgagtgcgccatcgggcagaaggagcgacagggtctgctgaaccagaagggctgcgtcgtgttggatcactggcctaagcggttcaaggaaaagcacgctcgcgtgcgcgctgagccgcgagctgcacggcagaggccacctcacgtacgntctcgacggcgaacaaccttaggcacggcttgacaggggcctcagcttcggagcaaagaaccgcgccca

SEQ ID NO: 93954 - DNA, 547 bp, Zea mays
ggtatcccggatgtggacagcacagacagagcgatgcactcggcccggaattcccgggtcgaccgacgcgtccgggatggtcgtatcagctacccagagttcgaattgatgatgaaaggtgggtcagactggagtgatgcctgtagacgggactcgagagagaatttcagtagcctcagtcgaaagctgtgcaaagacaccttatgaaacaagaaagtagttttgcaagcagcagttactgactgacagtaccacgccctcgactaagcagcaagcgtcggaagacaatgcaaaagcaggattactggatctggtggaactgtggaaataagggttaaaggagatttgcgtcgattgacagactccgtcaaacacaaaagcacctccttggcattgtcttgtcctttgttcttaaagtaaatttgctattcctagatacatatcaatgacctagggcctagcagatacagatgtaaggagacctcaacatccattagacctgggcatgatgcacggtacttggagtttcaatggccgtcccgttcgc

SEQ ID NO: 93955 - DNA, 549 bp, Zea mays
  unsure (1)..(549): unsure at all n locations
agatntttacggatggtttcgaaatagggggaggaagtattgctctaccggtccggaattcccgggtcgaccgacgcgtccgcccacgcgtccggcgagcggccgccctttttttttttttttttgcctccgaaaatggcatgtgtatttaacattttgcttgttttccactctttggaattcggcatacatgattagaattgcctcctaaacccaaacaaaaggattacatatactacaattcagaagtctcagtagtatatatggttagcggtgcatgctctctcatgcaatatatataaacttaattagcttgctgctgcaggtccatagcccaccgcgccggatgaatcgaagggaattcaaagtctagtagaattggacgtttggaagtgtagacggcatcgggtctccagttcggcgggatgacgtctttggcgatgaccttcttgccggactcgctggtgaggcggatggaaaaggggcccttgagcgccttggcagtgtccatccttcagatggcgccccaagagagcttcatggggcttc

SEQ ID NO: 93956 - DNA, 539 bp, Zea mays
  unsure (1)..(539): unsure at all n locations
tggtttcgttggtgtttccgaacctgggcggattgtaggtaccggcccggaattcccgggtcgaccgacgcgtccgctgatcgacccgatgtcgaaccaggcctgcgagaaggaggccggccccaacgtctccgtgaggggctacgacatgatcgaggagatcaagacggagctggagaagaagtgcccgaacgtggtgtcgtgcgcagacatcatctcggtgagcgcccgcgactcggtgaagctgacgggcgggcccgagtacgcggtgcccctgcgaccgcgcgactcgctggtgtgcaaccgccaggacgccgacaacctgncgggctcagacatcgctgtgcccaacctcatcgacgagttctacttgcacgtgcctctaacgtggaggacatggacgcgatgctgggccggacacacagactgtgctctggctgacctcattcatcgagacctggcaggggcccttccagaggagctccaccatgatcgaccacctcgcgctgctacagcttgacttcaacctctttccgaac

SEQ ID NO: 93957 - DNA, 539 bp, Zea mays
  unsure (1)..(539): unsure at all n locations
agggtagtgtggtngttatgatntccgaggctctatgtactgctctaccggtccggaattcccgggtcgaccgacgcgtccgcccacgcgtccgagcatgacccggtcgaggtcgccaaccaacttaaccgtgcagggcacagatccgtcgagaaggaggacattggcacgaggcgggagatgatggggacgacgacgaggaagtctaagttcagcgggccgtgcagggcgacgaacccgatcgaccggtgctggcggtgccggcaggactgggcgacggaccggaagcgcctggcgcggtgcgccaaggggttcgggcgcaacaccaccggcgggctggccggcaagttctacgtggtgacggacggcaccgacgacgaacgtggtgaacccgcgccccggcacgctccggtggggcgtcatccagatcgagccgctgtggatcaccttcgccaagaccatgatcatcacgctcaaggaggagctcatcatccgcggcgacaagaccattgacgggcgcggcgtgcaggtgcgcatca

SEQ ID NO: 93958 - DNA, 556 bp, Zea mays
  unsure (1)..(556): unsure at all n locations
agtnttnagagaggtgttggatacgggggggggatggaatgcttgctaccggtccggaattcccgggtcgaccgcacgcgtccgagaacctggacgccggcaaggggatcgggcggcccgcggggctcgtgatcaacggcaagaacgagaaggacgcgtcggacccgcccatgtacaacgtggaggccggcaagacgtaccggttccgcgtctgcaacgtgggcatcaaggcgtccttcaacatccgcattcagaaccacatcatgaagctggtggagatggaaggctcccacaccatgcagaacgactacgactcgctggaccttcacatcggccagtgcctgtcgttcctcgtcaccggcgaccagaagcccggcgactaacctgctgggcggtgtccacccggttcatcaaggaggtgaacagcatcacggccgtgatccgctacaagggcttcaacgccccgccgacggccaaggtgccggagagtcccagcgggtgggcctggtccattaacccagggcaggtcctttctgctggaacctgacgggggacc

SEQ ID NO: 93959 - DNA, 544 bp, Zea mays
  unsure (1)..(544): unsure at all n locations
ngtnaaggggtgggtttccgcggttggaagaccgttgctaccggcccggaattcccgggtcgaccgacgcgtccgccctcccgagtccaaaccctaaacctaaacctctcacccggcgccgccgccgccgtcgccagcgccgcggccccgaggccccatcccagcgaaaccgacttccgcctcggattgaagcaatgtcgtcggacgacgaggtcagggaggagaaggagctcgacctctcctccaacgatgtcgtcaccaagtacaagactgccgccgaaatcctgaacaacgctctgaagctggttgtgtctgagtgcaagccaaaagcaaagattgttgacctttgtgagaagggtgactctttcataagagagcaaaactgggaatgtctacaagaatgcaaagaggaagattgaaaggggcattgctttcccaacctgtgtttcggtgaacaacacagtctgccactttctccccgcttaccacaaatgatgcagttctggaagnaaaatgacatgggtaaaattgacatggggtgtca

SEQ ID NO: 93960 - DNA, 544 bp, Zea mays
  unsure (1)..(544): unsure at all n locations
aggtnnnggcggtagtggatgcgagtagggggggagatggagtcgctccggaattcccgggtcgaccgacgcgtgcgcccacgcgtccgcgaagctgtgcctcgtaccatttcgatccaatggcgccgacgtcgaagctgtcgacgggcatcaagcgcgcttcgcggtcgcacgcgtaccatcgccgtgggctgtgggccatcaaggccaagaacggcggcgccttccccaaggccgacaaggccgccgccgccgtggaacccaagttctaccctgccgacgacgtcaagccccgcgttcccagcacccgcaagcctaagcctaccaagctcaggtcgagcatcacgcctgggacggtgctgatcctnctcgcagggcgcttcatggggnaaagagagtggtgtttctcaagcagctcaagtncggcctgctccttatctctgggccttcaaggacaatggaataccgatccgccggggaaccaaaccatgtaatggtacataacccaagtgacatcttggtggtgatggcgcaggttgatgcc

SEQ ID NO: 93961 - DNA, 553 bp, Zea mays
  unsure (1)..(553): unsure at all n locations
agggcgcggtnnttagattgaatggagggagtaaggagaggaggtataggtctggaattcccgggtcgaccgcacgcgtccggcacgacgcacgcagagccgcagagatccgtcacactgcaagttttgaaaactgaactgtaagatggcatcagcagagctttcccgtgaggaaaatgtgtacatggcgaagctcgccgagcaggcagagaggtacgaggaaatggttgagttcatggagaaggtagcgaaaactgttgactcggaggagctcactgtggaggagcgcaacctcctgtctgttgcatacaagaacgtcattggagcccgccgtgcctcatggcgcatcatctcctccatcgagcagaaggaggagggtcgaggcaatgaggaccgtgtaacactcatcaaggactaccgtggcaagattgaaactgagctcaccaagatctgtgatggcatcctcaagcttctcgaatctcaccttgtgccgtcttccaccgctcccgagtccaaggtcttctatctcaagatgaaaggggactactacaga

SEQ ID NO: 93962 - DNA, 538 bp, Zea mays
  unsure (1)..(538): unsure at all n locations
ggaaagcnttntgagcgggaaggggagaggcngggaagagaagtattcctcgaattcccgggtcgaccgacgcgtccgagcacccatcagccaagagctatccatacgcacagcgatgcaccagcacgagatactagccggcatgcgcctgtcgtccctcctcctcgtcgtggccgccctctcggcgcgcgccgcggcgcagcaggtgccgccggtgggcggcagcgctctgaagccggactactacagccagtcgtgcccgcgcgcggagcggatcatcgcggaggtgatgcagacgaagcagatggcgaacccgacgacggccgcgggcatgctgcgcgtcttcttccacgactgcttcgtcaccgggtgcgacgcgtcggtgctgatcgcgtccacccagttccagaagtcggagcacgacgcggagatcaaccactcgctccccggggacgccttcgacgccgtggtgcgcgccaagctggccctggagctggagttgccccgggtggtgtnctgcgccgacatnctngcgctg

SEQ ID NO: 93963 - DNA, 544 bp, Zea mays
  unsure (1)..(544): unsure at all n locations
aggtnnacgggtatggtgtaccgacatcgcgcgtattgatgcaccggcccggaattcccgggtcgaccgacgcgtccgcggacgcgtgggggagaaaccgccggcggccgtcggcggtttcacggacacgtctacggcggccgagagcgggctcgcagatgtctgcagcggcggcgtgaaggagcttgtgccggacccgggccacttcgagtggccgtcgggctgcgatctggggtcctactggggcaccagcgtgttcgccgacaccgacccggcgctgttcctgaacctgccgtgagccgtgacaacgccacggcgtccatgctcaactaatcaaccatcacacgacccacgagatagatgagatgtgaaccgagcacgctgtagcgtcaagctcttgaaggcttgaagctgtgctgtagtntcctgagcttactagcgatctctgctggtctctgatctgataatctcttactagtcgccggttgtgctccgatctagtaacgggctacatgggtcggtggtacaagtgcatgaaacctgt

SEQ ID NO: 93964 - DNA, 555 bp, Zea mays
  unsure (1)..(555): unsure at all n locations
aggtttctcggtatggnccatggntancgantattatgtactgctctaccggtccggaattcccgggtcgaccgacgcgtccggtcagaaaatagtgggatcgagttgtttcactgcacgagcacatcctccggcgacgaccgggctccctctccgtcgtctagcgaccgaccaacgcgccgagcgaagatgtcgtggcagacgtacgtggacgagcacctgatgtgcgagatcgagggccaccacctcacgtcggcggccatcgtcggccacgacggcgccacctgggctcagagcaccgcgttccccgagttcaagcccgaggagatggctgccatcatgaaggatttcgacgagccggggcacctcgccccgaccggcctgatcctggggaggcaccaagtacatggtcatccaaggcgaacctggagctgtcatccgtggcaagaagggatccgggggcatcactgtgaagaaaacagggcagtcactcatcattggcatctacgacgagcccatgactcccgggcagtgcaacctggtggaaaggctggg

SEQ ID NO: 93965 - DNA, 548 bp, Zea mays
  unsure (1)..(548): unsure at all n locations
aggggatgggnntagcggaatggggaggtatggagaagttgtttaggtcccgaattcccgggtcgaccgacgcgtccgagaagttcaaagaaaaggttcctctgtcaatgcaaccaatcagctggtctagtgagaaatactatttgaggcagatcttgcctctagtacgaaaacacaaggttgtacgttttagcaagacagattctcgccttgcaaacaatggcctgcctctgaagctccaaaaacttcgctgtcatgttaactacaacgcattgagatttgccccatctattgaggctctaggaaacaagatgatctcaactctcaggagaactggatcttttgttgtgcttcatctgagatatgagatggatatgcttgctttctctggttgtactcatggatgttctgatgaagaaacagaagagttgacaacaatgagatatgcatatccctggtggaaagaaaaggaaatagactctgagaagaaaaggcttgagggattgtgcccccttactcctgaagaaacaactttagtactcagagcc

SEQ ID NO: 93966 - DNA, 539 bp, Zea mays
  unsure (1)..(539): unsure at all n locations
ggggtgcananttagctggtacagaatatatagagatgatgaagcagtcccgaattcccgggtcgaccgacgcgtccgcggactcgtgggcggactcgtgggcagcccccaactacccccagcctcggaaggaaccttcgagaatcgcaagactctaaaggccgtcgccttcccattcttcctcgccgcgggggtcgcctgagatcacataaacaatggtgaaggctgttgctgtgcttggtagcagcgatggtgtcaagggcaccatctttttcacccaagagggagatggccctaccgctgtcaccggaagtgtctctggcctcaagcctggcctccatgggttccatgtacatgcacttggtgacaccaccaatggatgcatgtcaactggaccacactacaatcctgcgagcaaggagcatggggcaccagaagatgagaaccgccatgctggtgatcttggaaacgtgacagctggaacagatggtgttgctaatatcaatgtcaccgacagccagatcccactgacttggcca

SEQ ID NO: 93967 - DNA, 547 bp, Zea mays
  unsure (1)..(547): unsure at all n locations
aggagtgggtntagctgactcgacgggtatagaacgcatcaccggtccgcgattcccgggtcgaccgactcttcctcccactcttcctctgactcgtgggcttctagatcgcaagtggacgcccttatggaacctttgagaatctcattacgctaaaggccttctccttcccattctttctctcctcttttgttctcctatatcacataaacaatggttaatgctgttgctgtgcttggtatcatctatggtgtcaagggctccatctttttcacccaagatggagatgtccctaccgctgtcacctgaagtgtctctggcctcaatcctggcctccatgggttccatgtacatgcacttggtgacaccaccaatggatgcatgtcaactggaccacactacaatcctgctagcaaggatcatggggcaccataagatgagaaccgccatgctggtgatcttggaaacgtgacaacttgatcagatggtgttgctaatatcaatgtcaccgacagccatatcccactgactgggccaaactcaatcc

SEQ ID NO: 93968 - DNA, 539 bp, Zea mays
  unsure (1)..(539): unsure at all n locations
agggaggaggagggttatcgatacggggagatgatgcaccggcccggaattcccgggtcgaccgacgcgtgcgcggacgcgtgggcgcgtgcatgcgcagacgttgaggtcgagggacacggtatctctgagctgcatcagggagcgacccgccaccgccacgcttggccgcaagccgagaagagtgccgggccgggagaccggacgataattgatccgtagcagattcgctaatggcggagacggcggacatggagcggatcttcaagcggttcgacaccaacggcgacggtaagatctcgctgtcggagctgacggaggcgctacggacgctggggtccacctctgccgacgaggtgcagcgcatgatnggccgagatccgacaccgacggcgacggctgcatcgacttcaacgagttcatcaccttctgcaacgccaacccggggctcatgaaggacgtcgcaaagtcttctgatccatacatcttcgtccataccaatcaatcgatgatgaacctggttatatacacacaacttc

SEQ ID NO: 93969 - DNA, 553 bp, Zea mays
  unsure (1)..(553): unsure at all n locations
agttntgcgagggttagtantcggagtagtactgattgctctaccggtccggaattcccgggtcgaccgcacgcgtccgcccacgcgtccgcccacgcgtccgggcgtcgggaatggccgtttgtgacgaatgcaaactcgagttcctggaactcaaggcgaagaggagcttccgtttcatcgtgttcaagatcaacgagaacgtgcagcaggtggtggtggacaggcttgggggaccaggtgaaagctacgatgcgttcagggcctgctttcccgccaacgagtgccgctacgcggtgtttgattttgactttgtcactgatgagaactgccagaagagcaagatcttcttcatctcttgggccccagatgcatcgagggtgagaaggcaagatgttgtacgcaagctccaaggaccggttcaagagggagctcgacggcattcaggtggagctacaagcaactgagccgagcgaaatgagcatggacatcatcaagtcgcgagccctctgaaacagcccggcatcagctcctgcatgcccgtcgattcctt

SEQ ID NO: 93970 - DNA, 529 bp, Zea mays
  unsure (1)..(529): unsure at all n locations
gggtgcnnnntaggtattacgattataagaatgtattgcagtcccaattccgggtcgaccgactcgttcgcccactcgtccgcccacgcgtccggaatgatcttcacaactgcttcggctacaccggtgagggtgtggcaattaaagttatccggaataagcagaccggacagtctgaaggatacggatttgttgagttctacagccatgctgcagctgaaagggttcttgaaggattttctggtcatattatgccaaacactgaccagccctttagattaaactgggcatcgtttagcatgggagataggcgctcagatgttgcttcggatcattccatattcgtaggcgaccttgcttccgatgtcaatgatgccacactgctggaggttttctccagcaggtactcctctgtcaaaagtgccaaagtcgttatcgatgctaacactggtagatccaagggttatggcttcgtgagatttggagatgacagtgagaggacgcatgccttgactgagatgaatggtgt

SEQ ID NO: 93971 - DNA, 543 bp, Zea mays
  unsure (1)..(543): unsure at all n locations
tgggagctttntaggggttcagcatttaagtatgtagtagcggtcccgaattcccgggtcgaccgactcgtccgcccactcgtccggcgatgagagccttgttcctcctggtcctgttctgcatcgtgcatggtgggaaggaagagtcaaagggcatcgatgcgaaagcgtccggtcctggtgggtccttcgacatcaccaagttgggcgcctgctgcaatggcaagacagacagcacgaaggctgtgcaggaggcatgggcatagtcgtgcggcggcactgggaagctgacaatcctcatacccaagggcgacttccttgtctgacaactcaacttcacaggcccttgcaagggcgacgtgaccatccaggtggatggcaatctgctgtcgaccactgacctaagccagtacaatgtccatggtaattggatcgagattctactcgtggataacctggtcatcaccggcatgggaaaccttgactggcagggcccagctgtgtggagcatgaaactctgcaccaagaagtacgactgcaatg

SEQ ID NO: 93972 - DNA, 536 bp, Zea mays
  unsure (1)..(536): unsure at all n locations
aggatgcnnnntaggtgaatggggaggtacggggggaagacagtaagtcctgaattcccgggtcgaccgacgcgtccgcggacgcgtgggtcgatcacgacaagatggcatgcacaaacaatgcgatgagagccttgtgggtcctggtcctcttctgcatcgtgcatggtgagaaggaagagtcaaagggcatcgatgcgaaagcgtccgggcctggtgggtccttcgacatcaccaagttgggcgccttcggcaatggcaagacagacagcacgaaggctgtgcaggaggcatgggcatcggcgtgcggcggcactgggaagcagacaatcctcatacccaagggcgacttccttgtcggacaactcaacttcacaggcccttgcaagggcgacgtgaccatccaggtggatggcaatctgctggcgaccacggacctaagccagtacaaggaccatggtaattggatcgagattctacgcgtggataacctgggcatcaccggcaagggaaaccttgacgggcaaggcccatct

SEQ ID NO: 93973 - DNA, 544 bp, Zea mays
  unsure (1)..(544): unsure at all n locations
aggttagcagtgtagtgatatagtanacagaatgtatgttgcaccggcccggaattcccgggtcgaccgacgcgtccgcccacgcgtccgcccacgcgtccgcccacgcgtccggaatcatccaaagaaaacaacgatccgggtcgagaagacagagagattggtgagatagaagaatgcatgaagaattgccaaaatgaagaaccacatgcttcttcattagagaagaaattcagagaagaaattagcaaagtattagaggaaagcttggacttctggttgaggttcagtacatcatatcattatatccagaaattccaaaagacatttgataaagcaaaacctgagctggatagacttactgatgcaaaagttcaggagggcttaaaacactggttctgctggtcagtctgttaaaaacaagactcggctgtccttgaaaagaacttcgtgacttgagtactgatctacaagtttggntggaaaagaatgntctatttacaggggagcttgaaagtaattcttaatgttggcaacatacaaa

SEQ ID NO: 93974 - DNA, 548 bp, Zea mays
  unsure (1)..(548): unsure at all n locations
tgtnttgaggttggtgttaagaattaggaagcattgttgctaccggtccggaattcccgggtcgaccgacgcgtccggatcttccgaagaaggaagagaccatcaccctaaggccgctgagcatggcagatctgaaggagagcaaagaaccaggtggatccatgccttaccaagtgcaatttgaaacgatgcggatgcagattaacacttttcaacttgaaaaataaactaatggcagttcgaatgttataataccctgtaaactctcaaattcaggtggctgcaagtttcgcttccgaaggtgtctgcatgagcgagctgaggcaatggaacgagttgtatggtgaaggaggctccagaaagaaggaacaattaacatancttccttctgagcaatatgaaaatctatggaccatcacacgcaaaaatgtatgggcattttggaaagtatagtgcacaaaatagtcatgaggaaataggccgaacatgtatgagaactttgggaaacgcgggagtgttaaagggacaggctccagagtgtgtcgaag

SEQ ID NO: 93975 - DNA, 553 bp, Zea mays
  unsure (1)..(553): unsure at all n locations
agattatgagtagcgtgtcgatgagntccgcatcangtacgtactgcacgtactcggtccggaattcccgggtcgaccgacgcgtccgctggctgacttgtacttgtcagttagccgggccagcggaacaatgaatctagttgaagactggccaccacgtggacgcactacaaaacataaagttcaaacagtatatggtgtgataggagttctcaaacttgcagttggatcatattttgtggtgatcacggatcgtgattgtgtgggatcctactttggacacgcaatttttaaagtgacaggactaaaagttcttccctgcaatagtgcacataacaccacctttgctgagcagaaaaaaatggaaacagaattcttagaactcctgtgaatgcttcaaagaggactattggccttcacttttcctacgatatcaacctaacactttctgcacagaggctacatgatctaggccatgagtatagaactcttcctctctggagacaggccgaaccaagaattctattgaatgcttaacttgtagaacctctan

SEQ ID NO: 93976 - DNA, 546 bp, Zea mays
  unsure (1)..(546): unsure at all n locations
aggggtagggngtagctgaatggggaggtatgaggaagtttgtatcggtccggaattcccgggtcgaccgacgcgtccgcccacgcgtccgggaggttctaccacgtggaatcgctctttaatggaactttcgctttagctggtcgtgaccaagaaaccaccggctttgcttggtgggctgggaatgccagacttatcaatttgtccggtaaactacttggagctcatgtagcccatgccggattaatcgtattctgggccggagcaatgaacctatttgaagtggcccatttcgtaccagaaaagcccatgtatgaacaagggttgattttacttccgcacttagctactctaggttggggagtaaggccggggggagaagttctagatacttttccttactttgtatccagagtacttcacttaatttcctgcgcagtcttaggcttctgtggcatttatcacgcgcttatgggacccgagactctcgaagaatcttttgcattctttggttatgtatgggaagatagaaataaaatgactacc

SEQ ID NO: 93977 - DNA, 548 bp, Zea mays
  unsure (1)..(548): unsure at all n locations
agcntaatgagggtcgttgtgnctgggctatgattgatcgtcgtaccgctcctgaattcccgggtcgaccgactcgtgcgcgcgcatcgacaccttcagctcgtgtgtccgttcgagctggcggtttcctcgccaagaactggcgcgcgggtcgggggattgaggaagagagtgtctgcngctgctgctgctacgactactgatttttctggcccgagattcctggtcaaggcaatatgaagtacgtccttgtcaccggcggggtggtgagcggcctgggcaagggcgtcacggccagcagcatcggcgtcgtcctcaaggcgtgcggcttccgcattacgtccattaagatcgatccttaccttaacaccgatgctgggactattgtcntccattcgaacatggtgaagtgtttgtgcttgatgatggttgccaggttgacttggatcttgggtattactagaggtttttggacatttaacctacttcggaccataacttaccaccggaaagatctaatancctggaattgccanggaaggaaaggt

SEQ ID NO: 93978 - DNA, 560 bp, Zea mays
  unsure (1)..(560): unsure at all n locations
ggaacgggggggnnntttgaaacactactgctcctcctattnnccgttccggtccggaattgccgggtcgacgcacgcgtgcgttcggccgacatcttctacaccaaccggagtgggctgacgaacatcgagtatcgcacgcttggagtggacgaccagcctctcttccatgggagaactgccattcagctgtatgctgattacatgaagagcttcagggagaacatggcagacttcttggatgctggtgtcgttgtggacattgaggtgggacttggccctgctggcgagatgaggtacccatcgtatccccagagtcagggatgggtgttcccaggcgttggagaattcatatgctatgataagtacctgcaagcagacttcaaagcagcagncagaagaggctgggcatnctgagtgggattgcctgatgatgctgngacgtacaatgacactcctgagaagacccagttctttgcggataaacggacataccagaccgacaaggggaagttcttcctcacatggtactcaaacanactgatcaagcacggtgataa

SEQ ID NO: 93979 - DNA, 559 bp, Zea mays
  unsure (1)..(559): unsure at all n locations
agtnnccgcgagtggggtnnnccatgatnnaccgaagtcttcattggactgcctgtaccggtccggaattcccgggtcgaccgacgcgtccgagcagaacatcgcgaccgcgcagggccgcgcggacgcgcgcgaggccacggggttcgtgctgcagaagtgcgagttccaggccgaggccgcgctccgggactccgggcgcccgcccatccgcaactacctgggccggccgtggcgcgagtgctcgcgcaccatcgtcatggagtcggagctcccggacttcatcgacaaggcggggtacttgccctggaacggcgactttgggctcaagacgttgtggtacgccgagttcggcaacacagggcccggcgccaacacggcggggcgcgtcagnctgggccggggttcaagaaggtgatcagcaaggcggacgccaccaagttcacggtcgagaacttcctgcacgcccagccatggatcgatcccacaagcacgccggtgaagtacgacctgttcacatgaggacacagctggaccggggatcggatcggagggttcg

SEQ ID NO: 93980 - DNA, 547 bp, Zea mays
  unsure (1)..(547): unsure at all n locations
agggagtgggttntagagtgatcagaaatcgaagaaaagatgctgatgtcccgaattcccgggtcgaccgacgcgtccgctgcaaagagctggcagcacagcctgatgtcgatggtttccttgtgggcggtgcttctttgaggcccgagttcatcgacatcatcaacgccgccgccgtgtgaagtccgctgaagatgttccaacccttcaccctgttgcggtgatgtgctgaagacagatcagactatttttttgtttaaccgtgcagtgctatgtaagctactaactttgcgctggtgcggatgctgatttccctccccctagctttttgtgaggctactctacagcttgattcagcttgctaataatgtttgcctctggacaaaaaaaaaataactaaaaaactaaaaataaacaaaaaaacaaacaaccaaaaaaaaaaaaaaggggcggccgctctagaggatccaagcttacgtacgcgtgcatgcgacgtcatagctcttctatagggtcacctaaattcaattcactggccggccgtttc

SEQ ID NO: 93981 - DNA, 532 bp, Zea mays
  unsure (1)..(532): unsure at all n locations
ggggtgctttnagagtgatacgctctcaagggattttatgtattgctcaactgctgggtcgacccacgcgtccgctctttgctggcatcatagcacttgtgatgagcatcgcaacgatggtccgtctgacccgcggcatgatgcctgggaaggttctcggtgctgccataggtggagctaccctctcagaaggtaaatcaaaagtacaagatcgccagctgtccaagctatcagaagaggctgtggaggaagctgaagacgccgtctctgcaaagcgcctctcggagcttgaggagaaggtcattgcactcctgacaaaacccgcatcaatgcctgctgataaggaggaagttctgcatgctgctgtctgccgcgttagtgcactggaagaggagcttgcagctacaaagaagaccttgcaggagactcttgagcgtcagttggagatcgttgcatacattgagaagaagaaagaaagcaagcgtttctttcgttggtagaagcanacatcaatgaattgttcacgcccacc

SEQ ID NO: 93982 - DNA, 548 bp, Zea mays
  unsure (1)..(548): unsure at all n locations
aggtaagctttnagagctgtctagcatctacagcatctcatcgcacggtccggaattcccgggtcgacccacgcgtccgctcgccgagtacttcaacgccagcgacggcgtgttcaagtacaacctcatcggggacgtgccgccctcgaacacggcccccaccaagatggcacccaacgtcatcagcgccgagttccgcacgttcatcgaggtggtcttcgagaaccccgagaagagcatcgacaccatccacatcgacggctacgccttcttcgccgtcggcatggggcccggcaaatggacggcagcgtcgcggagtacgtacaacctcctggacacggtgagccggcacacgatccaggtgtacccaaggtcgtggacggcggtgatgatgacgttcgacaacgcgggcatgtggagcgtccgctccaacatctgggagaggcagtacctcggcgagcaactgtacgtgagcgtcatctcgccggaagcgtcgctcagggacgagtacaacatgcccgaaaccagcttccgttgcgcaggtcgtc

SEQ ID NO: 93983 - DNA, 555 bp, Zea mays
  unsure (1)..(555): unsure at all n locations
aggtagcnctnatagtatgtgtcctcagctactcacagcatccctacgtactgtccgtaccggtccggaattcccgggtcgacccacgcgtccgcatggatatgatggtcaggggcctgaacattctagtgcaagattggaacgctttcttcagatgagtgatgacaacccttatgttatacccgagatggatccaacactgcggaagcaaatccagcagtgcaattggcaggtcgttaatgtaacaactcctgcaaattatttccatgttctgcgtcgccagatacaccgggacttcaggaagcctttgattgtgatgtccccaaagaacctccttcgccacaaggactgcaagtcgaacctatctgaatttgatgatcttgcgggccaccctggattcgacaaacaggggacacgcttcaagcgtctcattaaggaccagtataatcacaaagacctcgaagagggaatcaaccgtctaagtctttgctctggaaaggtgtactatgaactggatgaataaaagacggaagtcggaacgcacttgatgttcta

SEQ ID NO: 93984 - DNA, 556 bp, Zea mays
  unsure (1)..(556): unsure at all n locations
agganatgcnnnnnagagtcgtaatgaggctaccgaatcatgatgtacctgctctaccggtccggaattcccgggtcgacccacgcgtccgagggcctcctgtctcctctcacttcctcagtcctcgtccgtctctgctccctcctctctcggcctagctagctagccagccttcctgtagcgcggcagagatggctgcccctgcatccaccacggcggcggcggcggcggcgctgctgcttctgctcgtgtcgctcgccgcggcggcggacatgtcgatcgtgtcctacggggagcgcagcgacgaggaggcgcggcggatgtacgcggagtggatggcggcgcacggccggacctacaacgccgtcggcgaggaggagcggcggtaccaggtgttccgggacaacctccgctacatcgacgcgcacaacgccgccgtcgacgcgggcgtgcactccttccgnctcggcctcaaccgcttcgccgacctcaccaacgacgagtaccgcgccacctacctcggcgccagtaccaggccgcagagggagaggaagct

SEQ ID NO: 93985 - DNA, 546 bp, Zea mays
  unsure (1)..(546): unsure at all n locations
agggtagcnnnntagagcgaactgactctaccagcaagataagtattgctctaccggtccggaattccggggtcgacccacgcgtccgatcccgccacactgcttcgagcgctcggtgctcaagtccttctcgtacgtgggccacgacctggtgatcgccgcggcgctcctctacttcgcgctggccatcataccggcgctcccaagcccgctccgctacgccgcctggccgctgtactggatcgcgcaggggtgcgtgtgcaccggcgtgtgggtcatcgcgcacgagtgcggccaccacgccttctcggactactcgctcctggacgacgtggtcggcctggtgctgcactcgtcgctcatggtgccctacttctcgtggaagtacagccaccggcgccaccactccaacacggggtgcctggagcgcgaccaggtgttcgtgcccaagatgaaggaggcgctgccgtggtacaccccgtacgtgtacaacaacccggtcgggcgggtggtgcacatcgtggtgcagctgaccccttgggtggg

SEQ ID NO: 93986 - DNA, 550 bp, Zea mays
  unsure (1)..(550): unsure at all n locations
agtaagggnntggtgaaagaggggcacgggggaagtatgtatcntccnnnnnnnnccggagnngggngctcgacccacgcgtccgactgcctccgcatgcggcaagatcctccctcattccccaaacatgagaggagcagaggaggagagatctggcgccgccactgatgcgggaggagaggaggagaaacgggagaggagcgtcggcctgatggccggcctcatggacaaggccaagggcttcgtggtggagaaggtgacgcaaatccccaagcccgaggctgcgctggatcacgtctccttccagagcatcagccgcgagggcgtcgagctgcatagccacgtcgacatcagcaacccctactcgcaccgcatcctcatctgcgagatcacctacacgttcaagagcgccggcaaggtgatagcgtcgggcacgatgcccgaccccgggtggatcgcggcgagcggcagcaccaagctagacctgcccgtgaaggtgccgtacgacttcatcgtgtcgctgatgaaggatctcggaggggactgggac

SEQ ID NO: 93987 - DNA, 547 bp, Zea mays
  unsure (1)..(547): unsure at all n locations
tggggtgggnnnnnagagcggtatgtatctacgggggaatgaaagtactgctctaccggtccggaattcccgggtcgacccacgcgtccgcggacgcgtgggcgggcgcggcgcgcaggtgcacatcgccaacggcgccgggatcacggtgcagctggcgcaaaacgtcatcatccacaacctgcacgtgcacgacgtcaagcacaccatgggcggcctcatgcgcgactcccccacgcacatcggctcccgcaccagggccgacggcgacggcatctccctcttctccgccaccaacgtctggatcgaccacatctccatgtccaactgcgaggacggcctcatcgacgtcgtgcagagctccacggggatcaccatctccaactgccacttcaccaaccacaacgacgtcatgctcttcggcgccagcgactcctggccgcaggaccagatcatgcagatcaccgtcgccttcaaccacttcggcaggggcctggtgcaccggatgccaggtgccgctggggcctcttccacgttgtcaacaacc

SEQ ID NO: 93988 - DNA, 550 bp, Zea mays
  unsure (1)..(550): unsure at all n locations
agtttagtcttntagatgtcgtttcagctctacaagcagatcactgcacggccggaattcccgggtcgacccacgcgttcgcggacgcgtgggtcgagatcgagaacgtcgagaacctgttcatcaacggccactgcaccatcgactgggagggagccctggtgtggagcaagaaccagtgccagcattcttacaattgcaagatcctcccgaatagctcggtgctggattttgtgacgaacgtccagatccgcggcatcacgctgctcaacatcaagttctttcacctcaacatcttcgagtgcaagaacgtgctgatcgacaaagtgacggtcaaggcccccggcgacagccccaacacggacggcatccacatcggcgactccagcaacgtgaccatcagcagcaccaccatcggcgtctgcgacgactgcatatccatctgacccgggagcaagatgatccccattcatggcgtcaagtgcggtccatgccacgggaatagcgtccgcagactgatgcgctacaaggaccagaaagacgtggaaaa

SEQ ID NO: 93989 - DNA, 558 bp, Zea mays
  unsure (1)..(558): unsure at all n locations
agtttatgccttnnagagctgattacgtatctacaagcatatcatcgacggtccggaattcccgggtcgacccactcgttcgaataagatggcgtgtatagacaatgcaatgagagccttgttccttttagcgctcttctgtgtcgtgcatggtgagaaggcaaagtcaaaggacaacgatgcaaaagcgttcgggcccggtgggtccttcgacatcaccaagttgggcgcctccggcaatggcaagacggatagcacgaaggctgtgcaggaggcgtgggcatcagcgtgcggctgcaccggtaagcagacgatcctcatccccaagggcgacttactcgtcggaccactcaacttcacaggcccatgcatgggctacgtgaccatccaggtgaatggcaatctgctggcgaccacggacctaagccagtacaaggatcatggtaattggatcgagattctacgcgtggacaaccttgtcatcaccggcaagggaaaagctctacgggcatgggccaaccgtgtggaacaaggaactcctgcgtaaggaagttcaac

SEQ ID NO: 93990 - DNA, 552 bp, Zea mays
  unsure (1)..(552): unsure at all n locations
aggggtgcgtntagagcgttagaatcttcacggggatatatgtatcgctctaccggtccggaattcccgggtcgacccactcgtccggttctagatcgcgagcgcctcctgcaggaaaaggagcgaagagagagagagagagagagacgcaggcccgccggcgacgatcgaggagggaggaaccagagacccggcggcggcgacgatggctccgcgcagctcatcggcggcgacgtgcctgtgcctcgctctcgccgcggccactctggcgctggcccacggtgcgcaaggaggaggaccatcggcatcggcggcggacctggacaaggtcacggccgagaccttcttcgacatcgagatcgacggcaagcctgcaggccggatcgtgctgggactgtttggggacaccgttcctaaaactgcagagaacttccgagcactttgcacaggggagaaaggaattgccaagtccggcaagcctctgtggtacaaggngtcgacgttccacaggatcatcccggggttcatgatccatggaggcgacttcaccat

SEQ ID NO: 93991 - DNA, 542 bp, Zea mays
  unsure (1)..(542): unsure at all n locations
tgttagggnttagagggtcagctcttacagcagagtaagtatctgctctaccggtccggaattccgcgggtcgacccacgcgtccggaaaatagtgggatcgagttgtttcactgcacgagcacatcctccggcgaccgccggcctgggtctccgtcctctagcgaccgaccaacgcgccgagcgaagatgtcgtggcagacgtacgtggactagcacctgatgtgcgagatcgagggccaccacctaacgtcggcggtcatcgtcggccacgacggcgcaacttgggctaaaagcaccgggttccccgagtccaaccccgaggagatggctgccataatgaaggatttcaacaagccggggcacctggccctgaccggcctgatcctgggaggcaccaagtccatggccttccaaggcgaacctgaacctgacatccgtggcaagaagggttccgggggcatcactgtgaagaaaacagggcagtcactaatcatgggcatttacgacgagcctatgatctccggccagtgaaacctgggt

SEQ ID NO: 93992 - DNA, 541 bp, Zea mays
  unsure (1)..(541): unsure at all n locations
agggttggnnntagagcggccatntctacagaaaagtatgcatcgccntaccgtccggaattcggggtcgacccacgcgtccgcactcaccccgccttcacgccgtccttaccaaataaaggcccggccttttccgacattcacagggggggccggaaatcaaccgccattgcctcgattcccgcgaccaccttcgccgtcatcttatccgtcctcttctgtgccgcggcttgcaccggcgtcgacaaccaacttcccgactacctcatacaaggccgcgtctactgcgacacctgccgcgccgggttcgtgaccaatgtcaccgagtacatatcgggcgccacaatgaggctctagtgcaagcacttttgcaccggcaaactctagcgcttcattcaacgggtgaccgacaccaaccggacggtcaccatataactcaaagcacggcaccaagaagacacattccaaggggccttggtggaaaaccccgcaaagactgttaacacgtgcacacggacaaggaactcgccgggtttctttt

SEQ ID NO: 93993 - DNA, 548 bp, Zea mays
  unsure (1)..(548): unsure at all n locations
agtnttgcttntagagcgataaggaattaagggaaagtagtgcacggtctggaattcccgggtcgacccacgcgtccgctcaacaacagccagctcgcgaaaataatgaagagccgcagcatggcatcatcggccgcgcgcttggtgctagccctcgcgctagtggcggccaccgccccacaggtagcggaggcaaagaagaagagagcggcggagagcggcgaggcggcggaggcgaagaagatccaggacgacttctgctcgacgctgtgcgagggcaagaaggggacggacctggtcgtgtgcaaggagtcctgcgcgctctcccagcagtccaacctggtgctgtacggcaggatccagtgcaagggcaagtgcaccgagcagaagggcatcacggcgccggccatgaaggtctgccaagaggagtgcgacaaggcgtacgtggtgaatgcggtcgatgtcaccaaggcctgcagcgtcacctgcgccaaggagaagaacccgcgcctcagcgaagactgcaagaagtnctgcaccccctctcc

SEQ ID NO: 93994 - DNA, 549 bp, Zea mays
  unsure (1)..(549): unsure at all n locations
agtngtgggtgagagtgttcagctctgacagaaatatattgaattgctgtaccggtccggaattcccgggtcgaccgcactcgtccgcccactcgtccgtccactcgtccgattgtgggcgagtgcgtgcgttcgtgcagccacagagaggcgtccgggcaccatgtctttcaccggcacgcaggacaagtgcacggcgtgcgacaagaccgtccacttcatcgacctcctcacggccgacggcgccatctaccataagacatgcttcaagtgcagccactgcaaaggggtcctctcgatgtgcagctactcctccatggacggtgtgctgtactgcaagacccacttcgagcagctcttcaaggagaccgggagcttctccaagaacttcacgccaggtggcaagtcatcagacaagggtgaactgacaagggccccaagcaagctgtcgtctgcattttctggtacccaggataagtgcgcagcatgccagataacagtgtacccgctggagaagttaactctggaaagcgagtcctaccacaagag

SEQ ID NO: 93995 - DNA, 542 bp, Zea mays
  unsure (1)..(542): unsure at all n locations
agtattgctttaagagtgacctagctctacaagacatcgatgnacctgccgtaccggtccggaattcccgggtcgacccacgcgtccgcggacgcgtgggctcgggcaatccagtcacggtgtacatcactgacatgaactgacgagcggatcgctccctaccacttcgacttgagcggcaaggccttcggctccctggcaaagcccgggctcaacgacaagcttcgccactgcggcatcatggacgtcgagttcagaagggtgcggtgcatgtaccccgccgggcagaagattgtgttccacatcgagaagggctgcaaccccaactacctggccgtgcttgtgaagtttgtggcggacgacggtgacatcgtgctgatggaaatccaggacaagttgtcggctgagtggaagcccatgaagctctcttgtggcgccatctggaggatggacactggcaaggcgctcaagggccccttttcatccgtctaacagcgagtccgccagaagtcatcgccaagacgtaatccgccgactggaac

SEQ ID NO: 93996 - DNA, 548 bp, Zea mays
  unsure (1)..(548): unsure at all n locations
aggggtggnnnagagctatgtgggggacggggagttttgcaattcctcaattggngtctagttcgggggtcgacccactcgtccgcccacgcgtccgggctccaggaggaggagggaggcgcagcagggcgggtgggggagatgtgcctctgggactggttctacggggtgctggcctccctcggcctgtggcagaaggaggccaagatcctcttccttggcctcgacaacgccggcaagaccacgctgctccacatgctcaaggacgagcggttggtgcagcaccagccgactcagcacccgacgtcggaggagctcagcatcggcaagatcaagttcaaggcgttcgacctcggcggccaccagatcgcgcgccgcgtgtggaaggattactacgcaaaggttgatgctgtagtatacctggtagatgcatatgataaggagcgatttgctgaatcaaagaaggagctcgatgctctcctgtctgatgattctttggccaatgttccatttctcatccttggcaacaagatngatatcccatatgc

SEQ ID NO: 93997 - DNA, 546 bp, Zea mays
  unsure (1)..(546): unsure at all n locations
aggcttgggnnnntaggatgggtaagactctaccagacaagatatagtatctgctctaccggtccggaattcccgggtcgacccacgcgtccgcccacgcgtccgactagttctagatcgcgatctagaaccgcagatcacgctggagaacgtgcagaacgtgatcctgcacaacctgcacatccacgactccaaggcgcactcgggcggcatgatccgcgactcgaagcggcactacgggctgcgcacgcggagcgacggcgacggcgtctccgtgctgtcgtccagcaacgtgtggatcgaccacgtgtccatgtccagctgctccgacgggctgatcgacgtggtgaacgggtcgacggccatcaccgtgtccaacagccacttcaccgaccacgaccacgtgatgctgttcggcgccagcaacgacagcccgcaagacgcggtgatgcaagtcacggtggcgttcaaccacttcggccgcgggctggtgcatcggatgccgcgctgccgctacggcttctttcacgtggtgaacaacgacta

SEQ ID NO: 93998 - DNA, 547 bp, Zea mays
  unsure (1)..(547): unsure at all n locations
agtattgcttnttagtgctgtgtcgtnctctcagcccagctccgcacggtccggaattcccgggtcgacccactcgttcgggcctggccggcgaggcttgccatcgccctcggctccgccaagggcttggcttacctgcacgaagattggcaccccaggatcatccaccgtgacatcaaggcagccaacatccttctggacgagaatttcgaggctaatgtcgcggatttcggacttgccaagctgaccacagacaccaacacgcacgtcttcactcgtgtcatgggaactttcgggtatttttccccggagtacgcgtcgagcggcaagctcaccgacaagtctgacgtgttctccttcggcgtcatgctcctggagctcattaccggcaggagaccggttgatcccacgaactacatggaggacagcctggtcgactgtgccaggcccccttttgcgcgcgcgcttgtccaagacaacttttacgagctgctttacccccggctgtagaacaaagttaaccgctgtagccttatccgattttctc

SEQ ID NO: 93999 - DNA, 543 bp, Zea mays
  unsure (1)..(543): unsure at all n locations
ggtttgcannaagagtgtctagatctaaagcaggctgcgcaggtctggaattcccgggtcgacccacgcgtccgcggacgcgtgggcggactcgtgggcgcagccggcaccatctcttcccgcaccccccattcggacgccggagctcgacgaggacgaccgacgacgcacgcagagatccggcgtactgcaaattttgaaaactgaactgtaagatggcatcagcagagctttcccgtgaggaaaatgtgtacatggcgaagctcgccgagcaggcggagaggtacgaggagatggttgagttcatggagaaggtagccaagactgttgactcggaggagctcactgtggaggagcgaaacctnctgtctgttgcatacaagaacgtcattggagcccgccgcgcctcatggcgcatcatctcctncatcgagcagaatgaggagggccgaggcaatgatgaccgagtaacactcatcaaggattatcgtggcaagattgagactgagctgaccaagatctgtgatggcattctcaagctgc

SEQ ID NO: 94000 - DNA, 547 bp, Zea mays
  unsure (1)..(547): unsure at all n locations
aggtaagggnntagagcatagggattttagggggagagacggaatgctgtaccggtccggaattcccgggtcgacccacgcgtccgcccacgcgtccgctcgtggataacctggtcatcaccggcaagggaaaccttgacggtcagggcccagccgtgtggagcaagaactcctgcaccaagaagtatgactgcaagatccttcccaactcgctggtgatggacttcgtgaacaacggggaggtgtccggggtcacgctgctcaactccaagttcttccacatgaacatgtaccagtgcaagaacatgctgatcaaggacgtgaccgtgacggctcccggggacagccccaacacggatggcatccacatgggcgactcatccgggatcaccatcaccaacaccgtcattggcgtcggcgacgactgcatctccatcggccctgggacctccaaggtgaacatcactggcgtgacctgcggccccggccacggcatcagcatcggcagcctatggcggtacaaggacgagaagacgtcacggacatc

SEQ ID NO: 94001 - DNA, 555 bp, Zea mays
  unsure (1)..(555): unsure at all n locations
agtnttgcctntnagtgctgtgcctttactccagcgcataacgactgacgtaccggtccggaattcccgggtcgacccactcgtccgaaccataagtggattcgacctggacacctcttcacctgcggtcctggttcttacaaaatagcctctgtaaatgatatacctctcaatttcaaggtttctctattaaagggtgttccaaatccaaaggctattcattcttccaaagccgtgggagagccaccatttttcctaggttccgccgtcttatttgcgataaaggatgcgatctctgcggcaagggctgaggtggcgcacttggactgcttttcactcgactacccggctacaccggaaagaataagaatggcatgtgtggattccattacatagaaatttgccgtgatagattatccttccaagcttagtgtatcgcctcctgctgtattgttcacgtgtgtactattttgttttcattatacccgtatttttttagtttcatagcccattttgcttaataatattggttgttactcctcagtttttcttttt

SEQ ID NO: 94002 - DNA, 540 bp, Zea mays
  unsure (1)..(540): unsure at all n locations
aggggtgcgnnntagagctcctagctctcacagaancagtcgcacctgacgtaccggtccggaattccggggtcgacccacgcgtccggatgagtaccttctcactcgcagctacatcactggctaccaagcttccaagggtgacttggctgtctacacttcgttttcgtctgctccctcgtccaagtatatcaacgtagcaaggtggtttaatcacattgatgctctcgtgaggctgagcggaattactgcagagggccaaggtgtgaaggttgaatcctcagcagttccttcagccccaactccagatgttgctgaagcacaggccccagctgctgaggaggaggacgatgatgatgttgacctttttggtgaggagaccgaacatgagaagaacgctgctgaagagcgtgctgcagctgccaaggcttctggcaagaagaaagaatctgggaagtcatcagttttacttgatgtgaagccatgggacgatgagactgacatggccaagcttgaggaagctgttatgaatgtccaaat

SEQ ID NO: 94003 - DNA, 553 bp, Zea mays
  unsure (1)..(553): unsure at all n locations
agtagagcntatagagctgtttcagcctcatgtcagttctcctcgccggtccggaattcccgggtcgacccacgcgtccgtccacgcgtgcgcccacgcgtccgcgagaagagcatagactccctacacgtcgatggctacgccttcttcggcgtctggatgggccccgggaagtggtcgccggaggtgaggaagacgtacaacctgctggacacggcgagccggcacacgatccatgtgtacccgcggtcatggacggcaatcatgctgacgttcgacaacgcgggcatgtggagcgtgcattccaacatctgggagcggtactacctcggggagcagttctacatcagcgtcgtctagccagctcgatcactgcgcgacgagtacaacatgcccgacaacgccctacgatgcggcaaggtcgtggagctagccgtgccgccgtactacgctcactcgcgctaagacgacgaaagcctcggctgcttcatgtggactgaacatgcaatcccaactgatacgaacacatacgaaagacgcgtactggatggga

SEQ ID NO: 94004 - DNA, 557 bp, Zea mays
  unsure (1)..(557): unsure at all n locations
aggtagcgctnttagagctgtttcagctactnccagctcacctacgtacctgtctgtaccggtccggaattcccgggtcgacccacgcgtccgcggactcgtgggccggcgagcaaggagcgcatgctggggccgcaggccatcggcttccaggagggcgactaccacgcccacctccgccggctcgtctcccgggctttctcccccgaggccatccgcggctccgtgccggccatcgaggccatcgcgctgcgctcgctcgagtcctgggacggccgcctcgtcaacaccttccaagagatgaagctgtacgcgctgaatgtggcattgctgtccatcttcggcgaggaggagatgcggtacatcgaggagctgaagcagtgctacctgaccctggagaaggggtacaactcgatgccggtgaacctgccgggcaccctgttccacaaggccatgaaggcccgcaagcgcctgggcgccatcgtggcccacatcatcgaggcccggctcgagggctagcggcaagtcgggagcgaccttctgccctccttcctgaa

SEQ ID NO: 94005 - DNA, 543 bp, Zea mays
aggatatgcggtgttaggatgggcttagctcttacaagcaaagatagatctgctctaccggtccggaattcccgggtcgacccactcgtccgcttactcggtcgcttcaagtcgatacctatcattgttgagcttgacagcttgaacgtctcgggtgatgtttggttcggttctggaattgcactgaatgggaaagcgtccatcactgcaaaacctgtcgtcaagctataaattcaatacggatcactgattggtgaataatgatctcagtcgccttgaggacctttagataagaataagcgtatcaccacgtacgcttacttacccaagtgacggatcatcgctcgtggactctcctgaatatccagacaagtccgatgatactacggaccatatcaactgccagcatattgcaatcattgtacatgtatacgacttcgtcggaaatgtcttactcctcaagatcatacgagatggactagcccctctataggatccaagccaacgtactgccgctttcgactacctaggtcgtctatatta

SEQ ID NO: 94006 - DNA, 545 bp, Zea mays
  unsure (1)..(545): unsure at all n locations
gttatgctntaagagtgttcagctctaaagcatagctaggcacggtccggaattcccgggtcgacccacgcgttcgaccacacctaagtccaaatccaaacatgtcagatcatgcaccagcaacgctactttgggttgtcagccagttgtgccatcaattcagtagcactcaagacaaacggagcaatctacagagaaataaatccaacaaaacaggtttccacactaaaaataacccgggataggtgcatcgtcatcccacagttccttgaattcactcatgtccatctctgctgactcctccggcatcttttcttgcatagcctgagactcctgcatttttgacacgacagtgaaaatcctctggtactgatctcttgcttccgggtactgagccatggacttcactcttgcaagagctttctggagccgttcttcagtctggtttcgtccttcttgcagaaaatcgtaatcatctccagaagacttattttggatcgaactgctacttngttccgcactactgctctncactgatccttctt

SEQ ID NO: 94007 - DNA, 546 bp, Zea mays
  unsure (1)..(546): unsure at all n locations
agtagtgcggtnagagtgatcacgatctacaagcatagctgcgcacggtccggaattcccgggtcgacccactcgtccgattactgttttctgctacacaaacgaagtcagttaatgaccttgcaagggttagcttaagggatcctgagtatataagtgtgcacgaggaggccagaacagccacaccggatacccttgagcagtatgccatgattgtacctcttgagcagaagttaaatatgctctggagcttcattaaaaggcatctaaattcaaagacgatagtcttcttatctagtgtcaagcaggtcaaatttgtttatgaaattattaagaaacttcgtcctagtattcctttgaaatgtatgcatggactgatgaaacatgtggtacatgaggccatagttgcagatttcaatgaagctacctcagagcttttctcaactgatataacatctcgaggactagatataaagatgtggattgggtggtgcatgttgatngcgcagataacattgataattacatccacagagtttgccgtcc

SEQ ID NO: 94008 - DNA, 557 bp, Zea mays
  unsure (1)..(557): unsure at all n locations
agggatgccttnagtgggtgttacgattcctaaagcagatgatggactgctctaccggtccggaattcccgggtcgacccacgcgtccgcccacgcgtccgcccacgcgttcgcccacgcgtccgcccacgcgtccgcccacgcgtccgggcacgcgttcgcccacgcgttcgcccacgcgttcgcccacgcgttcggccgccctttttttttttttttatatcaggaagttcctttatttaatacgcgctgctaatgcaggctacgtgttacaatattattattcaaaaacacggccatgtggataccacatcgatgcagatttttggccccatcaaacaagtagcagcagatgagatcgagttgaggcacgccttctcactccgcccctaggagggcaagcataatatcctcataatctctagttgtatctttggccacagcacgctccagcggcacactgttcctcttctggtaagcctcctttatcagcttcaagtcgacctcggcgcgagtagttacgaccctggtgaggtcatcctcatctgtgcccatgc

SEQ ID NO: 94009 - DNA, 535 bp, Zea mays
  unsure (1)..(535): unsure at all n locations
ggggtgcnnnntaggtgcgtcagctctctaagcagtataagtattgctctaccggtccggaattcccgggtcgacccacgcgtccgcccacgcgtccgccacaccacacctcctcgcttccactccgctcgtctgacatctcgtccggtcctttcgtttcgaagcctcgcgagccccgacgatggccaccgccgcggtgtcggtcgacgagaagctcgacaagcttcgcgccgaggtcgccaagctcgaccagatcagcgagaacgagaagtccgggttcatcagcctcgtgtcacgctacctcagtggggaagcggagcagatcgagtggagcaagatccagacccctacggatgaggtggtggtgccctacgataccgtcgcgtcgcctcccgaagatctcgaggagacgaagaagctgctggataagctcgttgtgctcaagcttaacggagggctcgggacgaccatggtctgcactgggcccaagtctgtcattgaagtccgcaatgggttcacattccttgaccttatt

SEQ ID NO: 94010 - DNA, 552 bp, Zea mays
  unsure (1)..(552): unsure at all n locations
tggttgcnnnnagagcgatcagctctacaggatatgattgaactgacgtaccggtccggaattcccgggtcgacccacgcgtccgggccaaggtgaaggagtcgttcaacgatgggaaggagctcaccagcaacgccctggcgctcgatcgagaaggggtcatcgctcctctccgtgctaaagggcggctcgaaacgacggttgctcgaggaggagggagaaccggcgcaagccgggcctgcactcgacaaggacggcatcccggagtgggtgcccgacagtgagcggagggtgctcaagggcggcggcttcaagagcacactcacgccaaatgtggtggtggcgaaggacggcagcggcaagttcaagaccatcaacgaggcgctcgccgccatgccaaagacctacgacggaagatacgtgatccaagtgaaggagggagtgtacgaggagtacgtgaccatcaccaagactatgaaaaacgtgaacctttttaggtgacgggctccaagaggtccatcgtcaccggcaagaagagcttggccgactgaa

SEQ ID NO: 94011 - DNA, 543 bp, Zea mays
  unsure (1)..(543): unsure at all n locations
agggtatgcntntntaggagcanagcatcgactctccagncncagtancgnattgaccgctccggtctggaattcccgggtcgacccactcgttcgcccactcgtccgcccactcgtccgcccactcttccgcccacgcgtccggagagctgacaaggagacttggttcggactgccaacaagtgtctcgtgttataggcaatgaccttaacctgatttcacgcaatttacttcagggtgcaggtgcattaatttatctgctagtcttatcttggcctctcggattgtgtacaatgtttgtttgtgcaactctatcagcaattatgctagttcatggacggtttcagaaaagggcagctaaatttgcacaggagttcaccgcaaacgccaataatgttgctcaagaggtgataactttggttaggacagtgcgagtatatggaacagaaaagcaggagtttaaaaggtatgcaaactggcttgataagctgtatgatgtgagctttcggcaaacagtggcttatggaagcttgaacctgaact

SEQ ID NO: 94012 - DNA, 561 bp, Zea mays
  unsure (1)..(561): unsure at all n locations
ngcgccggttattaatcccagcncattaccgcactgacgtaccggtccggaattcccgggtcgacccacgcgtccgtgctgtcatcaagcctttctatcaaagttttggcatctggttcagtttcagcacaagttctagtgttagcttcgtgggggaaagaaaaaaaagaaggaaaaaaaatccaagaaagttcttgaaaaaagaaagaaaaatagaaaaacaatttgaaaaagcaaaaaaaaaaaagtatacaaaaatggaaaaaaaatagtgatgatgtcataggctaggaattatcccccagggtagccagcagagaatgggtcaggcacattcatggtactgatgtggagtgatatcattagccatttactggcaatagcatgttgactatgcatgcactccagaagaagtgcagcagcatttcaattcttgtggaactgttaacagagtgacaatcctgactgacaaagtttggccaccaaaaagtttttgcttatgtggaaatttgtgaaattgaaacttgtcaagaaactattaaagtgaattgatcaaaattg

SEQ ID NO: 94013 - DNA, 555 bp, Zea mays
  unsure (1)..(555): unsure at all n locations
agtttaatatctgaaaatggggggatgataagtatctacctgtccggaattcccgggtcgacccacgcgtccgcccacgcgtccgcccacgcgtccggtggagccctacaacggcagcttgccgggcctgcgctacaaccgaaactcgtggacaaaggtggcgcatattctttttgtggattcgccagttggtgccgggttttccttctccagagatgccaaaggctacaacgctggagcggtatcaaccacgctacacttggcgaagttcctcaccaagtggttcaacgaccatcccgagtaccatgcaaatcctttctacatcgatggagaatcatacgctggaaaaattgtaccattccttgcacagatgatttcagaaggtattgaagcaggaatgaagtcggcacctcgtctcaagggctatctagtgggcaactccgtncacagagggacgtattgatgttagcccttgaagtggcctgtgcttaccgggttgggaataatatacaataagtggattgaaagataatggggcaatggccatgaaaggac

SEQ ID NO: 94014 - DNA, 552 bp, Zea mays
  unsure (1)..(552): unsure at all n locations
agtgtctactttacttgcctagccctcattacagtatctacccgtcnctgatnnaacgggtcgaccgacgcattccatcatcttctccgatccatcaacaatcgccgagagcgatcgagagataaataaagatgaagaaaggggcatcatcgtcagccgttctcttcgtgctagccctgacgctagtttgtgccccgctgatagcagaggcaaagaagaagagagtcgccgccgccgccgccgaggagaagaaggtgcaggacaacttctgctcgacgctgtgcgagggcaggaaggggatggacctggtggtgtgcaaggagtcctgcgacctctcacagcgctccaacctggtgctgtacggccggatccagtgcaagggcaagtgcaccgagcagaagggcatcaccgaccgcagatgaaagtgtgcccagaggcgttcgacaaggactacctggtccaagctgctgangtcaccaaggcctgtaacaccanctgcgccaagggagaagcaatcttctgcttaacgaagaacttgcaggagggttcctt

SEQ ID NO: 94015 - DNA, 547 bp, Zea mays
  unsure (1)..(547): unsure at all n locations
tgttgttggttgccatggatggggagagtaaggactgctctaccggtccggaattcccgggtcgacccacgcgtccgcccacgcgtccgcacaggtgtttgaatgccaaaggggatgatgctggtgtttgcgaaaaatttgccaagtactacaggtccctttgccctggagaatgggttgagaaatggaacgagcagagggagaacgggacgtttccaggacctgtctgaatgtaccgcccgagacctccagttggaccagtcaacaagttggccaggcagtcctactgttccattctgcattcctacttcccgaatcgtaaatgccttttgtccctagctcttcaaccaggcaccacaaaactgttagtgatgcctctcgtacgcagctctaataatttggctacagttgccccacatgcangcctngtttgtgtgtggactgtggaccttattttgttcactttttggtaacgtctgaatggacctgcaatttctttggggcctgcaaccgggtcgtcctgtactgcggctttggtgtggaaaga

SEQ ID NO: 94016 - DNA, 543 bp, Zea mays
  unsure (1)..(543): unsure at all n locations
cgctgctntctattcctcgttagggtancgtcgtactcactcggtccggaattcccgggtcgacccacgcgtccgcggacgcgtgggctcgtctcctccactccaagagaacaggcgccggcgaaaggcgggagcagcgcgctgcccattcaccgccccctgatttcttgggagttgcggatcggtctccggggcagcgtggaacggctgggcccctcggatcgccggagatgctgccctacgcgacggcggcggaggcggaggcggcgcttggccggcccatgacgcccgccgaggcgctgtggttccggtacaccgcgggggtgtccgactaccacctctactgctgcaacatcctcttcctcttcgtcgtcttcacggtggccccgcttcccatcgcgctcctcgagtcgggccccggccgcggtctcgccgtacanactgcagccgcgggtgcggctctccagggccgagttcgtccggtgctacaaggacgtnctncgcatcttcttnctcgtcatcggcccgcttcagcttgtcttc

SEQ ID NO: 94017 - DNA, 533 bp, Zea mays
atgtgcttggccccacctgcgacgattgacttcccggtccggaattcccgggtcgacccacgcgtccgttttctttctaattaaagtaaaaagtacccacggaaatgcccaaattgcaaataaaaaaaatgaaagtaaaggatatattttaacctgaaacggatatctttgtatcttttttctttttgttatttctaactcatatttatgagataataaaatatgacaaaagctataccaaaaataggttcacgtaagaaagtgcgtattggtttgcgtaggaatgcccgttttagtttacggaagagtgcacgtagaataacaaaagggattattcatgttcaagctagtttcaacaataccattataaccgttacagacccacaaggtcgggtcgttttggtcctccgcaggtacttgtggattcaaaagctcaagaaaagcatcaccctatgctggtcaaagaacagcagtagatgctattcgtacagtgggtttgcaacgagcagaagttatgggtaaaggtgcttgta

SEQ ID NO: 94018 - DNA, 553 bp, Zea mays
  unsure (1)..(553): unsure at all n locations
nggtgatggtttattgattttggaaaaggatattattcacctgtccggaattcccgggtcgacccacgcgtccgcccacgcgtccggcaagttcctgtacgagggcatcaccatggacaatgtctnctaccccatgatcagcgaccagaaatactgccccaacaacatctgcgtcaagtccggcgcctncaangtggccgtcaacgacgtcgtcttcaagaacatccacggcaccttcaacacgccggaggccatcacgctcaactgcgccaacaacctgccatgccagggcgtgcagctcgtcaacgtcgacatcaagtacaatggatccggcaacaagaccatggccgtctgcaagaacgccatcggcaagtccatcggcttgcaaaagagctcgcctgcatctgaaccaatngactaacatgcatatnatatatatataatcactcttcgtaacctctctctttctcacgtactctcaagtctccaccgaatatataatccggttgtttggattttctttcttctttggatcatcaccaaaccaaccgat

SEQ ID NO: 94019 - DNA, 544 bp, Zea mays
gtgattatagtgccaagctaccgaacgtagtacctaactcggtccggaattcccgggtcgacccacgcgtccgatctcggacacggcaaatttaccggcaacgtacagcgaacgccagaggtccgcagccgttgagccgccaagggagaggacgaaatggcactgtccacgacgaacacgaacgcctccgagtcgcagctgcactgctccacctttgcgtcgcgctacgtgcgcaccgcgctgccgaggttcaagatcccggagcagtcgatccccaaggaggcggcgtaccagatcatcaacgacgagctgatgctggacggcaacccgcggctgaacctggcgtcgttcgtgaccacttggatggagcccgagtgcgacaagctcatccagtcctccatcaacatgaatacgtctacatggatgagtaccccgtcactaccgagctccagaaccggtgcgtgaacatgatcgcgcacctgttcaacgccccgatcggcgacgacaagacggcagtcggtgtggtgaccgtcggcttctcgga

SEQ ID NO: 94020 - DNA, 553 bp, Zea mays
  unsure (1)..(553): unsure at all n locations
nggtgagataaagtgtgagcatggggagatgatatgcattacctcgtccggaattcccgggtcgacccacgcgtccgcgcggttcctaaactcggatcctgcattttgtttcggcgatatgtgttggtgttaccagttgctgcggcgatacttccaatttctgtgccgatgggtttcctcgttttcttcttattttgtttcctcgtcgtcgcagcctgcaaattggtagtttcttggttcttatcagtggagctggctttggaatttgcaggcaccgttctgagctgcgctggtgctcctggaaaggtgttggtgcctggaggtggcagtgatgacttgctttcctccgtagagcctgtcggagacactcaacctgaagaactacaggttcgattgtccccttctgtgccttcatggtacaaatggtccaaatgtctgatgaaattaaattgggtttcagccctagcaacttcataataggccttgtgcaatggcccgtgaattggttgtttgggcaccgtgctggttcttgggctacttacaatgcttgcct

SEQ ID NO: 94021 - DNA, 554 bp, Zea mays
  unsure (1)..(554): unsure at all n locations
tgggttatgtgggtagtcatgcataggaattcatgcctcacncgtccggaattcccgggtcgacccacgcgtccggagcgctcttctgggcgcataggcatgaaaagattcgaggagatggactgggacaagaatggaacggtgaccttcaaggaattccttttcgctttcactcactgggtggggatcaataatgaagaagacgaggacgaagaagaatgagcgtgtcggctgaaggagattaggcgttccgaatcgaccgagccagccagccagccagccagcccccctcaggggaggcctccagcagctccctcctgccgtggatcagaagcggtagagctcatgtgttctctgtgtgtgccgagctgatgggtagatgtcatgttcgtataaatagaatgaaacactagccgtgtcaagggatttgcttgataaaaaaaaggttacgctggtcaaacgcttctcaattaattaggttaccttggcattaataaagtatttgcagtgtgtttggaaaaaaaaaaaaaaaaaaaaagggccgccgctctaaa

SEQ ID NO: 94022 - DNA, 577 bp, Zea mays
  unsure (1)..(577): unsure at all n locations
cggggntccggtgctgngcatgattaagcaagtcgataggactgcctcgtactcggtccggaanttcccgtggtcgactccacgtcgtctcgtcttcgtacttgagccggcaagggccttcggctttccctggcaaagcccgggcttcaacgacaaggctgtcgccactgcggcatcatggancgtcgagttcagaagggtgcggtgcaagtaccccgccgggcagaagattgtgttccacatcgagaagggctgcaaccccaactacctggccgtgcttgtgaagtttgtggcggacgacggtgacatcgtgctgatggaaatccaggacaagttgtcggctgagtggaagcccatgaagctctcttggggcgccatctggaggatggacactgccaaggcgctcaagggccccttctccatccgcctcaccagcgagtccggcaagaaggtcatcgccaaagacgtcatcccgccgaactggagacccgatgccgtctacacttccaacgtccaattctactagactttgaattcccttcgattcatccggcgcggtgggctatggacctgcacn

SEQ ID NO: 94023 - DNA, 530 bp, Zea mays
  unsure (1)..(530): unsure at all n locations
tcggtgctgggccctaggcttgactagtactcncncggtccggaattcccgggtcgaccgacgcgtccggtcgtcgtctcactcaccccgccttcacgcctccctcaccaaataaggtcccgcccttttccgacattcacaggggggacaggaaatcagcggccatggcctcgattccggcgacgaccttcgccgtcatcttatccgtcctcttctgtgccgcggctggcaccgccgtcgacaacgacctccccgactacgtcatccagggccgcgtctactgcgacacctgccgcgccgggttcgtgaccaatgtcaccgagtacatcgcgggcgccaaggtgaggctggagtgcaagcacttcggcaccggcaagctcgagcgctccatcgacggggttgtgtgatactgtgatcaagcaaggagacgacacttgaattctctacagtttggcatangtcgggagagacactctcgaccggccacaccatgtaacaaactaaccttcttcgtggcttccattaatttt

SEQ ID NO: 94024 - DNA, 553 bp, Zea mays
  unsure (1)..(553): unsure at all n locations
gggtggttnaaggctgagtggtgggggaagtattgatgcaccggtccggaattcccgggtcgacccacgcgtccggtcaagcaacatactgctctttgaccatgatgttgcgaagatcggggacttcgacatctcaaaccaggcccctgacatggctgcgcgcctccactctactcgcgttcttggcacctttggctaccatgcaccagaatatgccatgactggacagcttagcacgaagagtgatgtctacagctttggagttgtgctgctggagcttttaaccggtcgcaagccagttgaccacacactgccccgtggccagcagagccttgtgacatgggctacaccgaggcttagtgaagacaaggtgaggcaatgcgtcgatccaagactcggagatgaataccctncaaaggctgtagccaagatggctgctgtgggccgcctcttggtgccataccaaggttgaatccggtccaacatgagccttggcgtcaaggctcttaaccccttggtggacaagcggtctggcaaccggcctactggcttt

SEQ ID NO: 94025 - DNA, 556 bp, Zea mays
  unsure (1)..(556): unsure at all n locations
ggtagttaatatgtanccatcgcagccaagtacagtactgacgtaccggtccggaattcccgggtcgacccacgcgtccgcccacgcgtccgcccacgcgtccgatcgatcacgacaagatggcgtgcacaaacaatgcggggagagccttgttcctcctggtcctcttctgcatcgtgcatggtgagaaggaagagtcaaagggcatcgatgcgaaagcgtccaggcctggtgggtccttcgacatcaccaagttgggcgcctccggcaatggcaagacagacagcacgaaggctgtgcaggaggcatgggcatcggcgtgcggcggcactgggaagcagacaatcctcatacccaagggtgacttccttgtcggacaactcaacttcacaggcccttgcaagggcgacgtgaccatccaggtggatggcaatctgctggcgaccacggacctaagccagtacaaggaccatggntaatggatcgagattctacgtgtggataacctggtcatcaccggcaagggaaacctttacgggcatggcccaaccgtgtt

SEQ ID NO: 94026 - DNA, 532 bp, Zea mays
  unsure (1)..(532): unsure at all n locations
gcggtgctgtggcctacncccatcgcagtaactgcccggtccggaattcccgggtcgacccacgcgtccgctcacccctgaggccgcgcagagccactgcttgcgtctctgtctctctgtctgctcgttttgctgcttctgcgactcgtaggagggtgaggtcttgcttgcctcgcggaatggcggcggccggggcatggctggcccgtgcgacggcgacggcggtgctgggtttcgtcctggcggtggcgtcagctgaggcggcatcgggggacgtggagatggttttcctcaaggccgcggtggccaaaggcgcagtgtgcttggacggcagcccaccggtgtaccatttctctcccggctccggttctggcgccaataactgggtcgtccacatggagaggagggtggtgcaggaatcctgatgagtgtgcggtccgcaagggcaacttcaggggctcctccaaattcatgaagccactctcgttttcagggatattaggcggcaaccaaaaatccaatcctgattttn

SEQ ID NO: 94027 - DNA, 548 bp, Zea mays
  unsure (1)..(548): unsure at all n locations
cgctgatgactgatttcctganagccantntgtgaacgntctcggtcttgaattcccgggtcgaccgacgcagtccgcggacgcgtgcggctcgaattccgtctcttgtccctgtcgtccttgcccggattccccggttggtgagacgttaaagaggaggcggaggaaatggatggtgagtgacgagaggttcccggtgtgtgaggccgcgctcggcgctcgagtcgctcgacgacttcgccgctggactcgtctgtgtctacctttccatgccggactccgactactacttcctcaagttgccacgtaatctctatgaactccaaatcctcactggccatcttgagaactatactagtgactacaccctacaggtgttcctagctcattgagctgtgtacatctttatgcatagttatgatgccattgacactatttatgtaagttcttgcatgtgctctattttggcaactgatttttcttacacttgtagtcttatcttacacttgacatgctttaatgtgctattatatgtcaactattaatta

SEQ ID NO: 94028 - DNA, 533 bp, Zea mays
  unsure (1)..(533): unsure at all n locations
gtggtgactaatnccaggttggcangcagtantcttacggtcttgaattcccgggtcgacccacgcgtccggcggttcataacaataaaacgcttcaagtttatgcggtcgcaacatccttgagttccacaggtgaatttgttttgcaagctaaaaactcgatgtttatatggaatgggaatgcaagttcttttgaacaacttttgtgggctgctaaagttgctgaatttctgaagaccggtgttgctgtcaagcattgcaaggagggcactgagagctctattttctggtcttctattggtggaaagcacagttatacaaatagaaatgctgcacctgatgttgttattagagagcctcatttgtataccttctctctgaagaatgggaagctggaagtatgaaattttcaatctttcacaagatgatcttgtgaccgaatacatgatgatacttgatacacactgtgaggattttgtttggatgggtcagtgtgtggagaacaaataaaaacagattgcatttgacattta

SEQ ID NO: 94029 - DNA, 555 bp, Zea mays
cgatagaggtctgtcactgaaaggatgtatgcctgctaccggtccggaattcccgggtcgacccacgcgtccgggcatcggcgtgcggcggcactgggaagcagacaatcctcatacccaagggtgacttccttgtcggacaactcaacttcacaggcccttgcaagggcgacgtgaccatccaggtggatggcaatctgctggcgaccacggacctaagccagtacaaggaccatggtaattggatcgagattctacgtgtggataacctggtcatcaccggcaagggaaaccttgacgggcagggcccagccgtgtggagcaagaactcctgcaccaagaagtacgactgcaagatccttcccaactcgctggtgatggacttcgtgaacaacggggaggtgtccggggtcacccctgttaacttcaaagtctttcacattaacctgtaccggtgccaggacatgcttatcaaagaccttaccgttaccgctcccggggacaggcccaacaccgattgcattcacatgggccacttaatcgggatcacgatcc

SEQ ID NO: 94030 - DNA, 550 bp, Zea mays
  unsure (1)..(550): unsure at all n locations
gtgtggtaagatggtgncatggtgggaatgtattggactgctgtaccggtccggaattcccgggtcgacccacgcgtccgcccacgcgtccgcgcccggggagaaggagggctccgccgctcccggggaagagcgcgccattgccgccgccgcgctgactggggaagatggttgtccaggagttcacagttgatctcaacaagccccttgttttccaggttggccatcttgaggaacggtaccaggaatgggttcaccaaccgatcgtcagcaaggagggtccacgctttttcggaaatgatgtcctggagttcttgactcgcacgaagtggtgggctgtgccaactatatggctgcctgttgtctgctgcctgctcgtgaaatctattctgatgggtcatactgttcaggacgtagctatgatggctctgtttgggatatttatttggacgctgatcgaatacactttgcaccgcttcctgttccacatcgagaccaagacctactggtggaacacccgacattaccttcttcacggtgccaccataac

SEQ ID NO: 94031 - DNA, 532 bp, Zea mays
  unsure (1)..(532): unsure at all n locations
gcggtgcttggtnccaaactcgaacnagtanntgctgcggtcttgaataaccgggtcgacggacgcgtccgcacgtacgttgaacaaacacccaaggcctgacgagacgagatccggacctccgtcctccaagtagggcgcgcgcgcgacctcggcaccggcggcctcgatccatcgttctctcggatccccgccagtgcatgccctggaacggacggacggaatggcagcgtcgccggaccacctcttcggcctgcgcaacagcttctacgtcggcgcataccacgccgtcatcaccagcagccagtccctccccgcgcacgcgctctcccccgacgacctcgtcgagcgcgacgccctcatgtaccgctcctacatcgccatcggctcctaccagctgcatcggcgagatcgggcccagcgcggccacgccgctccaggccgtcaagctgctcgccgtgtacctctncggcgacggcgggaacagggaatcggtggtctcgaggcttcgtgagcttctgtcagacgcggt

SEQ ID NO: 94032 - DNA, 536 bp, Zea mays
  unsure (1)..(536): unsure at all n locations
agtggttnctctagccctagctcccatcgnactaactgcccggtccggaattcccgggtcgacccacgcgtccggaggatcatggagctcatcgtatgcaaactaatcaagggcgacatcagggccttggaggacctcgcgtatgccaagagaaaggacttcatctcccagcacaaactccccatcgatgagctgccgatcatctccttccacaccgaagccagcaccgcgcccacagcgctcgcgtcgctgacccgtgtcgcccaagccgagctcctcccatggctacccctgccacggttcttcctgtctgcatccgagtttgtcgagtcaatgctcgcctctctgaaggtccccgtggttgcgcctgtgtctgcagccatggcggtgacagccctccacctgcctgcgctatggggagaggagcgacgggctggtgacacggcgcgacgccgaggtgcctgggtcagtggtagttagacccgaaaggaggctggaccacgcgtggatggtgtactccacgctgaagattggca

SEQ ID NO: 94033 - DNA, 558 bp, Zea mays
  unsure (1)..(558): unsure at all n locations
gatgttggagagggtagtccccgctaccgctcgagtacagcacgcatgntactcgatctcccgggtcgacccacgcgtccgcgatgcgaaagccttcgggcctggtgggtccttcgacatcaccaagttgggcgcctccggcgatggcaagacagacagcacgaaggctgtgcaggaggcatgggcatcggcgtgcggcggcactgggaagcagacaatcctcatacccaagggcgacttccttgtcggacaactcaactttacaggcccttgcaagggcgacatgaccatccaggtggatggcaatctgctggcgaccacggacctaagccagtacaaggaccatggtaattggatcgagattctacgcgtggataacctggtcatcaccggcaagggaaaccttgacgggcaaggcccagtcgtgtggaacaagaacttctgcaccaagaagtacgactggcagatccttcctaactcgctggtgatggactttcggaaacaccgtgaggtgttccggggtaacgcttgttaacctctagttcctttacatgtaaa

SEQ ID NO: 94034 - DNA, 554 bp, Zea mays
  unsure (1)..(554): unsure at all n locations
gggggggatggtgacaatgacagaacagtanngcactgctctaccggtccggaattcccgggtcgacccacgcgtccgctgatccacgccagcggtttctgcgagaggagcgctttggtctcagtgatgggttctgacggaaccgggtgcttttggtggcgcagtgttggaacggaggtggaggggccggcggcgaaggggacggcatcgcgacggccaccatcatggtgcttggtgacacctgcacgcgcgggtgtcgattctgcgctgtgaagaccagcaacaaaccgccgccgcctgatcccctggagcctctgaacacggctttggctgttgcaagctgggggtatgatctctagtaatcctgcctggctgatcatctgctgattgtgaactgttaggttctcagaactcgtgattgatcgatgcaattgtaaatntgtaattggtgttaggccctggttgtttccatagtgctaagtttagcacaacacttttttagtaaagttcatatatggaaccaaacattcatactaaaagggcagtgctgaagn

SEQ ID NO: 94035 - DNA, 563 bp, Zea mays
cgtttaaaatgtgagccccgactccgcgaccgactgactgtctcgtccgtattcccggtcgacccacgcgtccgcccacgcgtccgcccacgcgtccgagatgtcgtggcaggcgtacgtggactagcacctgatgtgcgagatcgagggccaccacctctcggcgtgtgtctttgtttgtctcaattgatccatctgtactaatacttttgtgtcattcgtacaccttatcgacatctcttttaatcttttgtttgactgcttcctgctagtttgtttttcttatactggtttgttctttttacttctttatctattgtgtttttatctctttttttttatttatttcttatttttatttttttataatgttattttttatttttattttatgtattttgttttttttttattttgtttttttatttttttattattttattttattttcttttattattttttttttattttttttttttttttattttatttttttattttttttattttttttttttgtttttttttatttttatttttgtttgttttttattatattt

SEQ ID NO: 94036 - DNA, 535 bp, Zea mays
  unsure (1)..(535): unsure at all n locations
tgggtagtggcctagtctcgatgactgaccgcccggtccggaattcccgggtcgacccacgcgtccgaagcccgagaacgtgctcctccgcgccgacggccacgtcacgctcaccgacttcgacctctcccgccttgcgcacccgcacctnccctcgctcctcggcttcaccgagacggacgaccttctcgcgtgggccgtcccctactgctccggcggcgacctcaacgagctccgctactcgctccccgaccgcatcttctcccccgcggccatccgcttctacattgccgagatcgtctccgcggtcgccgagctccacgccgcgggcgtcgtgtaccgtgacctcaaggtcttcgacaagcgctccgccgcccgcagcaggaagcctgacgccgacccgcgcgcggtgggagatcagcgtgctctcccgccttgcgcacccgcacctnctncaccccagcaggtcgtccgcggagtcgtcgtcgcccccgcggtcagcgtcgtcccgcggccaccacaacccgccggtcgc

SEQ ID NO: 94037 - DNA, 549 bp, Zea mays
  unsure (1)..(549): unsure at all n locations
agaggtttnctgagcacgcaccggaagtagactgactgacgtaccggtccggaattcccgggtcgaccgacgcgtccgcggacgcgtgggcgtggatgtgcttgggagtccctgtcgtcttctatgcctccgggagaagtgtcataagaattcgtgagcaaagctatcgcgtgagcatcataaaggcggcaatctacccgggaaacgtgctctcactttacatgacgaagccaccaggcttcaagtacaaaagcgggatgtacatgtttgtaaaatgcccagacgtttcgcctttcgaatggcaccccttctccatcacttcggctcctggagatgactactcgagcgtgcatatccgtacgctaagtgattggacatcagaactcaagaatctgtttgggaaggcttgtgaagcttaagtaacttctaagaatgctacactagctagactcggaacatctgatgcggcacatggtcttgcacaagatactacgtttactaaagtcttcatagacgcccttactgtgcatcggcttcaaacttacggaa

SEQ ID NO: 94038 - DNA, 572 bp, Zea mays
  unsure (1)..(572): unsure at all n locations
ttggggctgacatcaagtaacancgtattgctctaccggtccggaattcccgggtcgaccgacgcgtccgatcaccgccgagttccgcaccttcatcgagatcgtcttcgagaaccccgagaagagcataggctccctccacgtcgatggctacgccttcttcggcgtcgggatgggccccgggaagtggtcgccggaggtgaggaagacgtacaacctgctggacacggtgagccggcacacgatccaggtgtacccgcggttatggacggcaatcatgctgacgttcgacaacgcgggcatgtggagcgtgcattccaacatctgggagcggtactacctcggggagcagttctacatcagcgtcgtctcgccggcgcgatcactgcgcgacgagtacaacatgcccgacaacgccctccgctgcggcaaggtcgtggggctgccgctgccgncgtcctacgcccncgcgcgctaagacgacgaatgccctcgtttcttctcgtggtctgaccattcaatccanacttcaaaagaccaaatcgaaagaagcgtattgaaggggaacaaat

SEQ ID NO: 94039 - DNA, 557 bp, Zea mays
  unsure (1)..(557): unsure at all n locations
agtatggtgtnntgattgccaaccacgatggctacgcactgacgtactcggtccggaattcccgggtcgaccgacgcgtccgagagatgatcctcgacatgctcatcgcacagactgatccacagagggtgtgcagcgaggtgggtctgtgcgtgttcgatggcgctcgatctgtcatctaggggattgaatctgtcatctggatagaaaacctgtgctcagatgtcatgtgctcagcctgtcatatggctgtcatgcggatagagaaccagctacgcgaaatacaagaccaaggagctcatacttcaatacctaactagctatgtgagcgtctgccgagcccctacagatagtcaacaactagctatcatgagatctccaagctgaccagacttgattctatgataccagacacgaccttaagctttacaccctagcacaacctatgctagtttgcaccaggttgcttaaccagcttcatcagtggtttcataacggcataatcttgcaactttgatcataaacctattatagatattaattgatctgcacatttt

SEQ ID NO: 94040 - DNA, 553 bp, Zea mays
  unsure (1)..(553): unsure at all n locations
tgtaaggtgcttgtgccttcccgatnaggtcggcctgacgtaccggtccggaattcccggggcgaccgcacgcgtccgccctggtgtggagcaagaaccagtgccagcattcttacaattgcaagatcctcccgggtagcttggtgctggatggtgtgacgaacgtccagatccgcggcatcacgctgctcaacagcaagttcttccacctcaacatcttcgagtgcaagaacgtgctgatcgacatagtgacggtcaaggcccccggcgacagccccaacacggacagcatccacatcggcgactccagcaacgtcaccatcagcagcaccaccatcggcgtcggcgacgactgcatctacatcggccccgggagcaagatgatccgcatccatggcgtcaagtgcggcccaggccacggcatcagcgtcggcagcctggggcgctacaaggacgagaaggacgtggaagacgtgcatgtgacggagtgcacgatcggcggcaccacgaacggtctgggcatcaagtcgtacgatgacttcaagtctttccg

SEQ ID NO: 94041 - DNA, 555 bp, Zea mays
atgtcctggcagttgatcacgcatctgcatggaatcgcactgccgtactgaattggaattccgggggcgacgcacgcgtacgcccacgcgtacgcctacgcgtggggcagcagatgcggctcatcgaccagactgacgcgcgtgtgcaccgcaccctgatgcgcaccgtcgtcggtcaagtgggcaggatggcggagacgatcgttctacctgtggaactactacggcagctcaagcccgcagagttcggcgacaccgatgagtaccaccaatggcagttccggcagatcaagctcctggaggccggacttatcctgcacccctccctgcgtctcgaccgtctccactctgacgtgctccggatccgcgaggtcatgcgcgcaacagatatccgtgccatcgacaccagcaagaactccgacgtgatgcgcgcactaagcaacgccgtgcacgctctctagtggcgctatggcacgatcgtgtgccgctgtacatgcgtgccactgggcctactggtaaccgcttcacgtgctacattactgatatcatcatcaa

SEQ ID NO: 94042 - DNA, 554 bp, Zea mays
  unsure (1)..(554): unsure at all n locations
nagagatgttnctatgcctgaaccgctccactacgcactgacgtaccggtctcggaattcccgggtcgaccgacgcgtccgcgtcgtcctccctctcctcatcagctcctgcttgcactccggcaggaaattagatggacacgcctcaaagcgaaaggggtccgaactccttacataaaaaaatgaattttatgctcaccatatatacgaattccactacactcaattagatgaagttgtcaattactatccacaactttaccatggtgtgcacaaatgtggtattcctatttacatataactaattgggaaagttcatacctacaaactagtgcaaataacaactattgaccgttatataaaatatcatgtcaaacagtttgagagatgtctccacatgatgtttccagcttgttctattgctgcaaaaaggcacatatactcatctactgcgatattggatcttaaaggcgttggcctaaagaactttaccaaaattgcaagaaaactaattattccctttcacaatatcaacaataacaactattcataan

SEQ ID NO: 94043 - DNA, 575 bp, Zea mays
  unsure (1)..(575): unsure at all n locations
cgaagttgctagaatagaagaaggaagtattgcatctaccggtccggaattcccgggtcgaccgacgcgtccgggcacatctcttgcctcctctttcgcgctgtccggagaggaggggcaggaggaggccgcacgcaaatctatctggggatcggagcgcgggcgacaagatgccacgcggcggcaagcccgcggcttcgtcgaagccgaacccgttcgactcggactcggactcggagtccagcaataagccggcgaacaagtccggggcgtcgtcgtaccaggcccccgccgacgccaagaagcggtacaaggacgggttccgggactcgggcgggctggagaaccagtcggtgcaggagctggagcactacgcggcgtacaaggccgaggagacgacggacgcgctcgccggctgcctgcgcatcgccgaggacatcaggcaggacgccagcgacacgctgatcacgctgcacaagcanggggagcagatcagccggacgcacgagaagggccgtcagatcgaccaggacctcgncaagagcgagaccctnctcgggagcctcggaggctct

SEQ ID NO: 94044 - DNA, 558 bp, Zea mays
  unsure (1)..(558): unsure at all n locations
cgttgagtggcgttgtgaaatctgactccgcaaggttacgtgactcacgtccggaattcccgggtcgaccgacgcggacgcggacgcgtgggctgacgcgtgggatgatgttgaggttcctgaaagcaaggaaatttaatggttgacggagcaaagcagatgtggtcagagatgcttagatggaggaaggaatttggtgctgacgatatagaggaattcgactacactgaattagatgaagttgtgaagtactatccacaactttaccatggtgtggacaaaggtggaaggcctatttacatagaactaattgggaaagttgatacctacaaactagtgcaaataacaactattgaccgttatataaaatatcatgtgaaagagtttgagagatgtctccagatgaggtttccagcttgttctattgctgcaaaaaggcacatagactcatctactgcgatattggatgtgaaaggcgtgggcctaaagaacttcacaaaagttgcangagagctaattatgcggntgcagaatatcaacaataacaactatncagag

SEQ ID NO: 94045 - DNA, 561 bp, Zea mays
  unsure (1)..(561): unsure at all n locations
tgggtgcgtgctcgatgcctgaacgggctcgnactgacagtactcggtccggaattcccgggtcgaccgacgcgtccgcggacgcgtgggtcgagaagcgcgccgggcatggcaccgccgacggcaacgaggccatctgcaccggcgaccacgacgggtgggtgctggaggagctcatgtggaccatgttctgcaacggcaagagggtgggctacgcggtgcggcgggaccccaccgaggtcggacatggacggccccgacggcgagatggcgtacatgcgcgggagcttcgagcacaccgtcgggtcccgggactcggagtcgctctacatggtcggaccgcccggcggcgactgcccggagctcgccatcttcttcgttaggctatgaattgaaccgagcgaaccatacgaatcgaacaatacagtgtacacgtcgcagtcgtggtgtctaatctctcgcctggtctcgttcgttgttcagcagcctcagctagcgtcaaataaaaaattttcttatttctttttctctttattatcttttttatttatatatattttc

SEQ ID NO: 94046 - DNA, 556 bp, Zea mays
  unsure (1)..(556): unsure at all n locations
tgttatgtgtgagttgtaacatgcatcagcatggaatgcgctaccgcgtccggaattcccgggtcgaccgacgcgtccgcccacgcgtccgcttctcctatgctgatacccagaggcaccgncttggtccaaactatctgagtgctggctgtgaatgcaccaaaatgtgcccaccacaacaaccaccatgatgggttcatgaacttcatgcacagggacgaagaggtgaactacttcccttcgaggtttgatcccgcccgtcacgcggagaaggtccccattcctccccgtgttctaacaggctgtcgtgagaagtgcatcattcagaaggagaacaacttcaagcangctggcgagagatatcgatccttcgaccctgcaaggcaagaccggttcatccagcgatgggttgacgcactgacagaccctcgcgtgacccatgaacaccataccatttggatctcctactggtcccagtgtgacgccgctcttggccaagagctggcttctaggctgaaccttgagccaacatgtangatcgacgaggaagaaagcn

SEQ ID NO: 94047 - DNA, 550 bp, Zea mays
agttggcggtgcgactgctactgtcgatgcactgactgtaccgtccggattcccgggtcgacgacgcgtccgcccacgcgtccgcccacgcgtccgcccacgcttccgcgtacgggacgaagaccatgagtggggacgcctcagaaggtgatcctcatcaacgacatgttccccggccctaccatcaactgcacatccaacaacaacatcgtcatcaatgtcttcaacatgctcgaccagccgctcctcttcacctggcacgggatccagcagaggaagaactcatggcaggacggcatgctgggcaccatgtgcccaatccagcccaacaccaacttcacgtaccactggcagcccaaggaccagatcggcagcttcttctattaccccagcaccggcatgcagcgggcggctggcgcctactggctcatcagcgtccacagccgtgacctgatcccggtccccttcgacacgcctgcctacgacttcccggtcctcgtcggctacttggacaccaaggaccacaccgtcctggccaagaacctggatg

SEQ ID NO: 94048 - DNA, 566 bp, Zea mays
gattagtgcgtgtgtctacggtttaaaccttaagtactatcgtctcggtctttaattcccgtgtcgaccgactcgtcctgcgtcaccattgattacatctagcgtcggtttatcggctcgaacaacaagaccatggctagattcacttacaccgagggcagcaccaatgtttgcctcaaggagcttgcatgcttctataccctccatctactgacccatctctctagttataatatatctctctttcttttattgcatattattttctatccatttcttacgctcaactttttatctacttacatccaacatctatattatgttctactgtttaacatcctttattttatcctatataatttcttttcttaaatctttccttttttattttctataatttatttcatatttattttttattttcttttattttcttcttatattctaattttattattattttctttttaaatatattattatttttccttatttacttatttattataatatttttacttttttttatttttttaatttttcttttttttttattttcttttttg

SEQ ID NO: 94049 - DNA, 575 bp, Zea mays
  unsure (1)..(575): unsure at all n locations
ttttttttagccgtgctgtcccccagtccnngcatgactgaccgtccggaattcccggtcgaccgcgcgtccgcaaaaatggcaaaggctctcctaggtggcctatcggcgatcctcgtcgtggcggtggtcgtcggtgtggtcgccaagcgcacccccttcggcaagaatgcccgcgaccacttcacggtcccgggggaggctttccttgccacgttcggcaagtcggtcaagttcctgtgcgcgcccaccctatacaaggagtcctgccagaagacactgtcccaaggcacccattgcacccagaaccccaaagggtgttccacacagcgtgcccaaggtggctctagactcggtccacacggcgttcgagcagtccaagtctatcggcgaggccaaggccagcgactccatgaccgaaagcgcgcgcgaggactgcaagaagcttctggagggacccctcgacaacctgatgggcattcttcatattgcccgctgcaacaataaagggctgttaactcgttccaacaccttcaataccttcctaagggccctaatacttttattgcaccttc

SEQ ID NO: 94050 - DNA, 574 bp, Zea mays
  unsure (1)..(574): unsure at all n locations
tgactggtgnctgatccccgcacctcnncgancgatctaccggtccggaattcccgggtcgaccgacgcgtccggtctcgtcttcgaggacctgctcgcgcagggcggcctcgccgaggtcgagaagaagaacgcgcgcaaggccggcgcgctctacgacaccatcgacgccagcggagggtactacgtctgccccgtcgacaagtccgtgcgctcgcacatgaacgtgcccttcaccctggccaagggcccggacttcgagaagcagttcatcgccgaggcggccaaggagggcatggtgcagctcaaggggcacaggtctgtcggcggcgtccgcgccttcatctacaatgccatgccgctcgccggcgtggagaagctcgtcgccttcatgaaggacttccaagccaggaacccttgattgccttgtgcttatggtcatttggtattgctactcagtctttcttcctagcataagtgggctcgtgcaagagctgtctcgcgttgcgcactgggatctaactgtagtattagtaccaatacgtaacggctactgtatttgccatgttttntg

SEQ ID NO: 94051 - DNA, 552 bp, Zea mays
  unsure (1)..(552): unsure at all n locations
agcggcgccgcgtgtgccagcncaagcancgnatcgcactacccgtccggaattcccgggtcgaccgacgcgtccgcgacgagacctctcgcagcgagtgggacgatcctctccaacggtggcgcagtccaagaaatggctcatattgcaaacggccgggaccatggcaactgcgtctcccttcttcgtgtcaatagcgcaaactccaaccagagcaacatgctgatcctccaggagagctgcacggacgcatcgggctcatacgtggtgtacgcgccggtggatgtggtggccatgaacgtggtgctcaatggcggtgacccggactacgtggccctgctgccgtcaggcttcgccatcctccccgacggaccgtcggcgccgggcatggctccccatcacggaggaaagggtgctgccggctgcttggaagaattggaagccgccggcgggtccctcttgacggtggcgttccagatcctggtggacttcgtccccaccgtcaaagctttgctgggctctgtagccacggggaacaggcccatcgcctgc

SEQ ID NO: 94052 - DNA, 575 bp, Zea mays
  unsure (1)..(575): unsure at all n locations
gaggagcgttactagtcatagaaagaaganggtatcgatctaccggtccggaattcccgggtcgaccgacgcgtccgcccacgcgtccgggcgcctccggcaatggcaagacagacagcacgaaggctgtgcaggaggcgtgggcatcggcgtgcggcggcactgggaagcagacaatcctcatacccaagggcgacttccttgtcggacaactcaacttcacaggcccttgcaagggcgacgtgaccatccaggtggatggcaatctgctggcgaccacggacctaagccagtacaaggaacatggtaattggatcgagattctacgcgtggataacctggtcatcaccggcaagggaaaccttgacgggcagggcccagccgtgtggagcaagaactcctgcaccaagaagtacgactgcaagatcctttccaactcgcttgtgatggacttcgtgaacaacggggaggtggtccggatcacgctgcntaactccaagtcttncacatgaacatgtaccaatgcaagaacatgctgatcaaggacgtgaccgtgaccgcgcccggtgacagtc

SEQ ID NO: 94053 - DNA, 554 bp, Zea mays
  unsure (1)..(554): unsure at all n locations
naggggccgtgngtgaaattggatgggggtggtatgtttatacccgtccggaattcccgggtcgaccgacgcgtccgcccacgcgtccgcatcgaatcgtctcgctcgtggctgccctactcgtgctgcttgccctcggcgccgtttcctccacgcgcagcgcacaaaaggagtccgtggctgacaacgccgggatgttggcaggcggcatcaaggacgtgccggcgaacgagaacgacctccagctccaggagctcgcgcgcttcgccgtcaatgagcacaaccaaaaggccaatgctcttctggggttcgagaagcttgtgaaggccaagacacaagttgttgctggcacgatgtactatctcactattgaagtgaaggatggcgtagtcaagaagctttatgaagctaaggtctgggagaagccatgggagaacttcaagcagctgcaggaattcaagcctgttgaagagggtgctagcgcctaaggatcntgtcgtctcctgtgcaatttgctgcctgaagcgcaaaactaagttacagaataaggagct

SEQ ID NO: 94054 - DNA, 553 bp, Zea mays
  unsure (1)..(553): unsure at all n locations
tgttaggcncntntcacgatccgccaggtgatagtactgctgtaccggtccggaattcccgggtcgaccgcacgcgtccgcggacgcgtgggcggacgcgtgggtcgacccacgcgtccgcggacgcgtggggcagggacgtgctgatcaaggacgtcaatgtgacggcgcccggggacagccccaacacggacggcatccacatgggcgactcgtccggggtcaccatcaccaacaccgtcatcggcgtcggcgacgactgcatctccatcggccccgggacctccaaggtgaacatcaccggcgtgacctgcggccccggccacggcatcagcatcggcagcctagggcggtacaaggacgagaaggacgtcacggatatcaacgtcaaggactgcacgcttaagaagacggccaacggcgtccgcatcaaggcgtatgaggacgccgnctncgtgctcaccgnctncaagatccactatgagaatatcaagatggaggactcgggctaccccatcatcatcgacatgaagtacttgcccaacaagttatg

SEQ ID NO: 94055 - DNA, 553 bp, Zea mays
  unsure (1)..(553): unsure at all n locations
agtnaagtgcgtgtgcgcatgatccagcagagtgactcactgctctaccggtccggaattcccgggtcgaccgacgcgtccgggccgccctttttttttttttttgatagaacgaacaatgggtgacaatagcaagagtccaggactcagaatttgggacagccacgcagttacatttttgttttcctttcctttctcagttacatatttgtaatccaggtgaagaggatttgtggtttagtgccagccagtctgcggtcgtcgacgatgtgctattactgatcgtcgtcgtcgtccgagtccaactgcttgagcagcgaggcgcagatgggcagcggcacgtccttgaagtagccgagcgggttggcggggcgcaggttgtcgctgatgccgacgttcctggtgagcaggacgccggcgcggtccctgtccgcctgcacctggtcgcagtccttgcgcgggctctccaccaagaccacctcgcagatgtcctnctcgtggctgtccttgagctcgatcgtgtacgttgccgtcgcgtcngtcaccccgtcga

SEQ ID NO: 94056 - DNA, 569 bp, Zea mays
  unsure (1)..(569): unsure at all n locations
tggctgttcgatccctcagtttntagtacgatctaccggtccggaattcccgggtcgaccgacgcgtccgcggacgcgtgggcggacgcgtgggcggacgcgtgggcggacgcgtgggggagttcctgtacgtagacttgtaaaagctgccgactcagtttcggtatgcctatctaaagggttaggcgcacccatcggatcagttgttgttggttcagaggccttcatcgacaaggctagaattcttaggaagaccctaggcggtgggatgagacaggttggagttctttgtgccgctgcttatgttgctgttcgtgacaccgtgggaaagcttgcggatgatcacaggaaggctaaagccttggcagagggcctcacgaaaattaaacagttcacggtggattcatcttcggtcgagaccaatatggtgttcttcgatatcggggatccacacatttcaccgagcaagctatgcccagtctttgaacaactgcatgttcttgcaatgccagcaaggttcaaaaagtcgctatttctcaagatcgtcctggccctatatggaactgaga

SEQ ID NO: 94057 - DNA, 714 bp, Zea mays
  unsure (1)..(714): unsure at all n locations
gagcctgtnctagtccctccattcncncgtcnacgacgtantcggtccgtgaattcccgggntcgactcganctgcgtaccggtaatctgaagccttacanggaaccatttgaggtggatcatnggacccggattggtagggcctacttgaaagggtccggagtggtgagggggcagtcanagccttgcctttaccgcgacgtcaaggagtgcagcgatcccgtaatgctcgtccctactgagctctggcatagatagaagaccttagagaacgagcccgtgaacgatagagaatctcgtngtaacccgcatcgtggctacgacggcagctagacttcgtgaccgtctacagtagtcccaaagcctaagnnctctgatagctcgtgaggtcgtntccgaatcaagggaccactgtnntgcagcatgggactgactctctgatggagggaccgccggacgaatcgacgtcggtcgcccgctttggtggaatgccgtgcgaacccgcgaagcctcggagggcgatgcctgacggaaacgtgcgccatttcatccctgtcgatgcaggtccgagccgcccacgaaacttgccttcgcncgacgaagagcgcanncgtgtgcatgganngaacgggctaagtttcgcgcagtgacattgatccctncgtgctcatggaacgtngtanaagccgnngtagattcaagcttgcaagttcn

SEQ ID NO: 94058 - DNA, 553 bp, Zea mays
  unsure (1)..(553): unsure at all n locations
tagtttgtggtgcttgatgttaaatcagatcgnatcggcatacccgtccggaattcccgggtcgaccgacgcgtgcgcgtttccccagggatctggaggcataactgttaagaagaccggacaggcgctggtgatcgggatctgaggacgagcccatgacccctggacagtgcaacatggtggttgagaggctcggtgactacctcttatagcaaggcctgtgattgaatgcatccgaacaacgacaccaactctaacattaattaattagtagtcttcatgccctgggattgtgcgtggacgctactgttacaccacccatgcttcgatcggcattttttcctccttgtatatatcattctattgtatcgtgttcacatataatcttgtgattcgattcctgagcagcaagactccggaacggtccctgtccggcttgaactggtcggagtctttgggcgggttgtcaccaagaacattttccagatttcctcctcgtggcttgtctttagctcgatcgtgtacctgccatttgggtgggtgatcccaacgt

SEQ ID NO: 94059 - DNA, 559 bp, Zea mays
  unsure (1)..(559): unsure at all n locations
ggagaggtgtgnngtcgatacgagattttaatgatctgctctaccggtccggaattcccgggtcgacgcacgcgtccgggatcaaggacatgaagtacagcaccagggtgaaggatgaggaaggctaccctgccatcggcctcgtcaacaaagccactggagaggctctcaagcattcccttggccagtcacaccctgttcttctgacccgccataatccagactccctggacgagtctgtcctgtggacagagagcagggacgttggggatgggttccgctgcattaggatggtcaacaacatctacctgaactttgatgctttacatggagacaaggaccatggtggtgtgcgcgacgggacggcccttgtgctgtgggagtggtgcgagggagacaaccagcgctggaagattgttccctggtgaacaaggaaatgtgtgaccgagcccgcaccaaggaagagctcctgccgtaataagtgaagtgattggtactgaagtttctggaaataagaggctcttctgagatgccctgttgggtgaagaattgcgtttcc

SEQ ID NO: 94060 - DNA, 578 bp, Zea mays
  unsure (1)..(578): unsure at all n locations
gagttgtgattgatccccccacctcnncgcacngnctctaccggtccggaattcccgggtcgaccgacgcgtccgcccacgcgtccgcccacgcgtccgcccacgcgtccgcccacgcgtccgggcgacggcgccacggagactgtgatcatgggccacaagagcttcatgatgaacatcaccaccaaggacacggccacgatggaggcgatcgggaacgggttcctgatgcgcgggatcggcgtgaagaacacggcgggagccaagaaccaccaggcggtggcgctgcgggtgcagagcgacatgtcggcgttctacgagtgccggttcgacgggtaccaggacacgctgtacacgcacacgagccgtcagtactaccgcgactgcgtcatcacgggcaccatcgacttcatcttcggcaacgcgcatgtggtgttccagaactgcctcattcaggtgcgcaagtgcatggacaaccagcagaacatcgtcacggcgcatggccgcaaggagaggcggtcggtgggcgggactgtcattcacaacttcaccgtctggctgtaacctgagttcgagag

SEQ ID NO: 94061 - DNA, 552 bp, Zea mays
  unsure (1)..(552): unsure at all n locations
tgtttaggcgttgtcgctgacagcacatgattgattgacgtaccggtccggaattcccgggtcgaccgacgcgtccgcccacgcgtccgcccacgcgtccgcccacgcgtccgcccacgcgtccgcccacgcgtggcgggcacgcgtccggtatagacaatgcaatgagagccttgttccttttagcgctcttctgtgtcgtgcatggtgagaaggcaaagtcaaaggacaacgatgcaaaagcgtccgggcccggtgggtccttcgacatcaccaagttgggcgcctccggcaatggcaagacggatagcacgaaggctgtgcaggaggcgtgggcatcagcgtgcggcggcaccgggaagcagacgatcctcatacccaagggcgacttactcgtcggaccactcaacttcacaggcccatgcaagggcgacgtgaccatccaggtgaatggcaatctgctggcgaccacggacctaagccagtacaaggatcatggtaattggatcgagattctacgcgtggacaaccttgtcatcaccggcaagggan

SEQ ID NO: 94062 - DNA, 563 bp, Zea mays
  unsure (1)..(563): unsure at all n locations
ggaaagtactagaaacagcatccgcancgagatcgcactgnctgtaccggtccggaattcccgggtcgacgcacgcgtccgggaaaattttgcggggcgggaatgtgcccgaccgtttgcagatttcatcaatatgtgctggaaaagtgcagcgcttcaataggttcctatccaaaccataggatcatttggcatacaaatgtatcgaaacctgttgctggggtcccagctgcttggcttgaacaatgattccatcgacgtcgcggagtcccctttcggaataacagatgggaagacatagggtaaatacagcaaagcgaagcgagcatgtaggccacagtagtcagtctgttgttccgaaagatgtgtatatatgtattagcagcatgattgttctgattatctttttactgattttcgatggtaggtctgttccatcaagtatttaactaatcatttgttgctgttggtataggtcttttgttcttttagccgtcgttttgcattgaagatatgtagccaaaattaaaaacctgtgtcgaacagttatgtagtcttggctc

SEQ ID NO: 94063 - DNA, 553 bp, Zea mays
  unsure (1)..(553): unsure at all n locations
tggnaagcgctgctgataagaaccagcaatgtattgcactgctctaccggtccggaattcccgggtcgaccgacgcgtccgagaagttccattctgatgttgctggtaggagctttcacaatgggaggtttatacagaggaggcgtcagaaagctgcgtctttgcccaatgttcaattagaacaaggaactgttacatcacttcttgaagaaaatggtactgttaaaggtgttcgatacaaaaccaagtcaggtgaagaactaaaagcttatgcgcccttgacgattgtatgtgatggctgcttttcaaatctacggcgtgccctttgctctccaaaagttgatgttccatcatgttttgttgggctggtattggagaattgccaacttccacatccaaaccatggccatgttatcttggccaatccttcgccaatcctattttacccaattagcagcacagaggtgcgctgtttggttgatgtccctggtcagaaggtgccttccatagctagcggtgaaatggcaaattatctcaaaaccgtcgttgcacc

SEQ ID NO: 94064 - DNA, 573 bp, Zea mays
  unsure (1)..(573): unsure at all n locations
tatgtgactgacctctagaaatatcgtatgcctctaccggtccggaattcccgggtcgaccgacgcgtccgctgtatgtgatctctggtgttggtggcagcttgctgtcttctctatttatggtgtcaaatatggcagtcggtgcttgaggtgcattatttggactattgggctcaatgctgtcagagctcataacaaattggacgatatatgagaacaagtttgcagcactcttgactctagttatgatcattctcatcaacttagctgttgggatccttccacatgttgacaacttcgctcaccttggaggatttatgtcagggttctgtcttggttttgtgctgctaatgcgaccacagtttggatatattaaccaaaagaactctcctcttggatttcccatgggcgtaactaaacggaagttcaagacatatcaagtcatacttttggttatttctacaatgatactangttcttggttcaccattgggatgggtgtgctatttcaaggggtcaatgctagtgagcactggtctttggtgccattatatgagctgtgtgcctacttca

SEQ ID NO: 94065 - DNA, 573 bp, Zea mays
  unsure (1)..(573): unsure at all n locations
ttgggtancgtgaccctgcactgtcntgcactgacttaccggtccggaattcccgggtcgaccgacgcgtccgcccacgcgtccgcccacgcgtccgcccacgcgtccgcccacgcgtccgctcgcggtggtgcgtgctcctcctcctccggctgctcccggggcgggcgctctcctgttcctcctcctcctgctgctggtgccagggccgggagggcggcgtggaggtggcgctcatggggctcgccggggacgggtcggcggacaccgccaacctcagtaatagtgaaaatggtcggttcagttatggagttgcaagttctcccgggaaaagagcatcgatggaggacttctatgaggcaaggatagacgacgttgacggagagaaagttggaatgtttggtgtgtatgatggtcatggaggagtcagagcagctgagtacgttaagcagcatcttttcagcaatttaatcaaacacccaaagttcatcactgataccaagggccgtattgctgaacttacaaccgcacaggatcagaatttctgaaagctgatagcactcaaactcgagn

SEQ ID NO: 94066 - DNA, 543 bp, Zea mays
  unsure (1)..(543): unsure at all n locations
acgtngctgactcccgcctcgangtaccgtactgaacgtgacccggaatggaattgcccgggtcgacccatcgcgtccggcacacgcgaccgacgacgcgtggggtacgaccaccagcaagcgtgcggattcacgtgatcaacgccactgtcgccggaatcaaactactcaactccaagttcttccacatcaacatcgacaactcagagagcatcaccgtgaaggacgtgaacatcaccgcgcccgccgacgttgagaacacggacggcgtccacgtcggaggctcctccaagatcagcatcctcaactcgaccatcggcaccggcgacgactgcgtctcgattgggcccgggtgcaacggcgtcttggtggacagcatcacctgcggccccgggcagggcatcagcgtcggctgcctatgccgctacaaggacgagaaagacgtgagcgacatcacggtgccgaactgcgtgcttaaagaacacccctacggcgtgcgcatcaagcttacgttgacccgagttcctgcttactggcttcatn

SEQ ID NO: 94067 - DNA, 538 bp, Zea mays
  unsure (1)..(538): unsure at all n locations
gttgccctagcntagctcgcgatgnacaaccgcaccggtccggaattcccgggtcgacccacgcgtccgattcctcccaacaccacctcgcctgcgatctccgtagcctccgtcgcgtcgagcatcgatcatgtcggcctactgcggaaagtacaaggatgagctcatcaagaatgctgcctacattggcacccctggcaagggtatccttgctgctgatgagtccactggcaccattggcaagcgcctttccagcatcaatgtcgagaacgttgaagagaaccgccgtgccctccgtgagctcctattctgctgccctggtgctctccagtacatcagcggtgtgatcctcttcgaagagaccctggaccagaagacccaagatggcaagccttttggtgatggcctcaaggaaggaagccgtcttcctggcattaaaggtgacaagggcaccattgaaggtggtggcactgattaggagaccaacacccaaggccatgaccacctttgcaagcgctgtgccaagtactaccaggcc

SEQ ID NO: 94068 - DNA, 495 bp, Zea mays
  unsure (1)..(495): unsure at all n locations
acggtgctccagccccagctacgnacgaacgcaccggtccggaattcccgggtcgacccacgcgtccgcccacgcgtccgtcgacccacgcgtccggaaaatagtgggatcgagttgtttcactgcacgagcacatcctccggcgaccaccggcctccctctccgtcctctagcgaccgaccaacgcgccgagcgaagatgtcgtggcagacgtacgtggacgagcacctgatgtgcgagatcgagggccaccacctcacgtcggcggccatcgtcggccacgacggcgccacctgggctcagagcaccgcgttccccgagttcaagcccgaggagatggctgccatcatgaaggatttcgacgagccggggcacctcgcccgaccggcctgatctgggaagcacaagtcatggcatccaggcgacctgagctgcatcgtgcagaaggatcgggcatatggagaacaggagcctatatgcttcacagcatatctg

SEQ ID NO: 94069 - DNA, 570 bp, Zea mays
  unsure (1)..(570): unsure at all n locations
acgantntcngcctaactgcccagctacgactagccgtaccggtcctgaattcccgggtggacccacgcgtccgcagctataacaggatcaagagcctggtgaccgaggagttgaagcagtatttccggccagagttcttgaacagattggatgagatgattgtattccggcagctgactaaattggaggtgaaggagattgctgacattatgctgaaagaagtgtttgacaggctgaaggccaaggagattaatctccaggtcacggagaagttccgagatagagttgttgacgaaggttataacccgagctatggtgccagacctttgcggcgtgctatcatgaggcttctggaggatagtctggcagagaagatgctggctggtgaggtgaaagaaggtgactctgccatcgttgatgtggattcagatggcaaggtgatagtcctgaatggtggtaacggtgttgctgagccactggaacctgctctcaatacctaaccgaggtcaaaatcatcattggtccgaaatatggccttttttacaaatcagcttggtttctcgtgaagg

SEQ ID NO: 94070 - DNA, 537 bp, Zea mays
  unsure (1)..(537): unsure at all n locations
cggtgtgnccagcctgacgcacgcactacttgtccgtatttcctgatcgacccacgcgtccgcggacgcgtgggtcgacccacgcgtccggctatgcgtccgcttgtctttcgagtattctttagagtgatcccgaggagaaaagccgtaattgctggacagtacctgatagcataaactttaaagttcggagcaagaatttcccacacgacaaatcatagatacctgcagcaagttatctaatggagcttgcagccatcgactggtttaaggacaccaaacgtatggataacgttgctatgcacaacggttgtgttgctcaggctgctggtgaaaaagggatgcatacattgaatgtcaacatacagattccttgatcaactcaatttaagctgggtcatgtattttggcaccaataccttgcaagatgggatcattaattacacggttttttgtaggccattattgaattctttaatatcgggcctaaagctttattccaattcggttcctagaggcttcttggatagggcgaat

SEQ ID NO: 94071 - DNA, 529 bp, Zea mays
  unsure (1)..(529): unsure at all n locations
atcgtgttccaggctcacgcacgatcatctgtctgnattcccggtcgaccacgcgtccgcggacgcgtgggtttcccgagccgggacgtgttggcagacggcgacgttaggaagtccggagagcgcctctgtggcctcgggaagagttatcttttctgcttaacggcccgccaaccctggaatcggttcagccggaggtagggtccagcggccggaagagcaccgcacatcgcgcggagtccggtgcgctcccggcgaatcttgaatattcagaaggcctaattccggctactcactgttgtactaatcacccaatgatgcttgtaaggttaattcactttttccaaatgttccctcattcctgggtaagtcctagaattttatccctattctcggattggcattgggcccgaggttttaaattctttttttctatctttaattaattaatctcctctttttaatttctttaattgtctccttacttggtttaattgtctgctttttctattcatcttctttttgtttt

SEQ ID NO: 94072 - DNA, 533 bp, Zea mays
ctgtgtccactgccagtatggtacgtatctatcggtccggaattcccgggtcgacccacgcgtccgcccacgcgtccgcatcgatcacgacaagatggcgtgcacaaacaatgcgatgagagccttgttcctcctggtcctcttctgcatcgtgcatggtgagaaggaagagtcaaagggcatcgatgcgaaagcgtccgggcctggtgggtccttcgacatcaccaagttgggcgccttcggcaatggcaagacagacagcacgaaggctgtgcaggaggcatgggcatcggcgtgcggcggcactgggaagcagacaatcctcatacccaagggtgacttccttgtcggacaactcaacttcacaagcccttgcaagggccacgtgaccattcaagtggattgcaatctgcttgcgaacaccgacctaaaccaggacaaggaccatggtaattggatcgagattctacgtgtggattacctggtcattaacggcaagggaaacctttacgggcaaggcccagacgcgtgga

SEQ ID NO: 94073 - DNA, 532 bp, Zea mays
  unsure (1)..(532): unsure at all n locations
atgtatgccttcacccncncgtacgnactnacggtccggaattcccgggtcgacccacgcgtccgcccacgcgtccggaagccgtggtccctgtctttctccttcggccgtgccctccaggcgagcaccctgaaggcctgggctggcaaggtggataacttggagaaggctagagctgccttcctcgccaggtgcaaggccaactctgaggctaccctcggcacctacaagggtgatgctgccgacgacaccgagagccgtcacgtcaaggactacaagtactgagctgcttctctttgcgtgcccgttttggaactccttgctacaactaaggtggcgaagcgtgcttgctacgtagagcttattttccgacattcgaaaaacatgccttctatgtgggatgatggctatctttatacttggatggtaaataagccctttgccgttaaaattcgagtcagatggtcctggcgattgacaattgaacaaaccccttggttagctctatcaactatgctccaacgctggggaa

SEQ ID NO: 94074 - DNA, 578 bp, Zea mays
gttttttgagtatgggtggtgactccacgttagcgatagactgctctaccggtccggaattcccgggtcgacccacgcgtccgcccacgcgtccgcccacgcgtccggaggtggagtcttcagacaccatctcgagggtgatagttttgccggtcagggtcttcacgaagatctgcatgcctcccctgaggcgcagcaccaagtggagggtgctctccttctggatgttgtagtcggcaagcgtgcgcccgtcctcaagctgcttcccagcaaagatgagccgctgctggtctggagggatgccctccttgtcctggatcttggccttgacgttgtcaatggtgtcagaggacctgcgcggcatgctcaacatcgggttccagctgatgaccaccatcggcatcctggcggcgaacctgatcaacttctggaccgccggcattgagggctggttgggctggcgcatcgggctggggctcgcgggcgttccggcgctcatcatcaccctgggcgcccttgtgcttcccgacacgcccacttccttatcgcccgcggtttcacgaccaccccaaggcggt

SEQ ID NO: 94075 - DNA, 577 bp, Zea mays
  unsure (1)..(577): unsure at all n locations
tggagccnnctnactcatgatacgaaagatgattgtactgctctaccggtccggaattcccgggtcgacccacgcgtccgcagagagagagagagagaccgacgcgccggcagatcccaagttcaccggagagggggaagagggcgaccgaaggcggcgatgggtttcatcatggacttcgcggagaatctgatcctccgtctgatggaggacccggacaagcgcgaccaggttcggcgggagcatgtctacaagatgaaggagcggtgcgagcgcactaaggcggcgtggagcctccctctgcgcccctacggcttctggaccttcgaccgcttcaactcgcagctctcctgggatccccagatcagccaggccgccggccgtcgggacccctacgacgacctcatcgcccgccactctggctcgccgccgtcttcctgaacacccgttccgatctttgcccagaaggtctacttgggcatcaataagaaactctttcccctcaaactgattgtggntccatcctcttctgtctggaaaatgttgtcaccaaactaccctatttcctgttccagtt

SEQ ID NO: 94076 - DNA, 533 bp, Zea mays
  unsure (1)..(533): unsure at all n locations
cgcntgtgccagctttgacncatcngacgtaccggtccggaattcccgggtcgacccacgcgtccgcggacgcgtgggcaaaaaacttcagcagtgatgccctcattggcgagggctcgtatgccagagtctattttggtgtgctgaaagatgggacgaaatctgcagtgaagaagcttgactccagcaaacagcctgatcaagaattccttgtgcacgtttcagctgtctcaaggttgaaacatgagaatgttgtccaactcgtcggatactgcgccgaaaggggcacccgcgttcttggctaataatatgccactaaggggacattggctgatattctcccttggtaaaaagggggtaaaagggcccaacccggggccatcctgtcatggattccacgagccttgaatggccgatgtgctgctctaaggctccaggttcttcaccagaagggcgcttcttgagtggtgcaccgagacattaaggtaagcgacatactgggctttgaccatgatgtttcgaagataggggac

SEQ ID NO: 94077 - DNA, 535 bp, Zea mays
  unsure (1)..(535): unsure at all n locations
nctgtgttccttaatccctcgacgnactgacgtaccggtccggaattcccgggtcgacccacgcgtccggtcaaagggcatcgatgcgaaagcgttcggacctggtggctccttagacataaccaagttgggggcatccagcaatggcaagacagacagcactacatctttgcaggatgcatgggcatcggcgtgcagcagcactggaaagcagacgatgctcatatccagaggtgacttcattgtaggacaactcaatttcacatgacgcttgcagggcggactgactatcctagcggatgggaacttgatggccaccacggacctaagctagtacaaggaccatgggaattggatcgagaatttacctgtggattacctggtcatttaccggtaagggaaaccttgacgggcatgtctcaacccttttgaacaagaacttcttgaccaaaaatttctactggaaaatcctttccaaatttctggttatggacctttttaacaatgggaaggttttcggggtaaacctttttta

SEQ ID NO: 94078 - DNA, 497 bp, Zea mays
  unsure (1)..(497): unsure at all n locations
agctgctcgnttcagttccacgtacgcactcgacgtaccggtccggaattcccgggtcgacccacgcgtccgacgggttccaggacacgctgtacgcgcactccaaggggccgttctaccggaactggattatcggcggcaccgtggacttcatcttcggcgacgcggcggcggtgttccagaactggattctggtgctgcgccggccgatggacaaccagcagaacatcgcgaccgcgcaaggccgcgcggacgcgcgcgaagccacggggttcgtgctccagaagtgcgagttccaggccgaggccgcgcttcgggacttcgggcgccgcgccattcgaactacctgtgccgtcgtggtcgagtgctcggcacatcgtatgagttgagctccggactcatcgcaagcgggtactgcctggacggcactttgggcacaaatgtgggccccagttgaaccagggccggccacacgcggggctatttgcgcgttagaa

SEQ ID NO: 94079 - DNA, 545 bp, Zea mays
  unsure (1)..(545): unsure at all n locations
ctgtgctgnttcagcctcanctacgntactgacgtaccggtccggaattcccgggtcgacccacgcgtccgcccacgcgtccgcccacgcgtccgttttcatatactatgcaatgaaaattatataatttggtgatacctgcagcagcaagctaattaagttggccgatatatatataatatataatggaagccctgggctttgattattggggaagccccaaccagaatgcggataggccaccaccccgcatgattacgttagcatttatgctggtataaccaaattatataattttcatatactatgcaatgaaaaaaatatcaaaaaaaaaaaaaaaaaaaaaaataggggggaattatttaaaaggatccaatttttatataatcaagaaaataagggtataagtttttaaaatattgaatcctaaaatcaaaaaaaagggggggcgttttttttaaaaaaccctatttaaaatcccggggttgggcaactttattttttttgttggcacgcccaaaaattaaggtgggccctttataaaa

SEQ ID NO: 94080 - DNA, 577 bp, Zea mays
  unsure (1)..(577): unsure at all n locations
gagaatgtgcgatggctgccttcacgtcgaggtaagnactgacgtaccggtccggaattcccgggtcgacccacgcgtccgcccacgttgtacaaggagtcgtgtgagaagacgctctcccaggccaccaatggcaccgagaaccccaaggaggtgttccacagcgttgccaaggtggcgctggagtcggtgaaaacagcggtcgagcagtccaagacgatcggcgaggctaatgccagcgactccatgaccgagagcgcgcgggaggactgcaagaagctcctcgaggacgccgttgacgacctcaggggcatgctcgagatggccggcggcgacatcaaggtgcttatcagccggtccgacgacctcgagacatggctcacgggcgtcatgacgttcatggacacctgcatcgacggcttcgtcgacgagaagctcaaagccgacatgcacaccgtgctgcgcaacgccaccgagctcagcagcaacgcgctcgccatcaccaacagccttggccggatccttgagaagctggacctcggcatgttcaagaaggactcgcgttgccggctcttgt

SEQ ID NO: 94081 - DNA, 584 bp, Zea mays
  unsure (1)..(584): unsure at all n locations
tggtnnnaatgagaatggctcgctgatgctacgcagtntattgcactgctctaccggtccggaattcccgggtcgacccacgcgtccgcacacgcagtcaactcgttgctgggggtgggatcccggccgagcaccatgcgaggaagtaacatgccgcggcacacgtcgccgttcctttttgccttgttggcgtcggcggcgaccctgctcagcgtcggcgacgcgttggtcgtcgacggcctgcaggtggggttctatggcaagacgtgcccggcggccgaaggcgtcatcagcgacatcgtcaacaacgaaatcgctatggaccggggcatctcccctggcctcattcgcctcttctttcacgactgcttcatcacgggttgcgacgcttccattctcctggacgagtcgcccgccggcgacgtcccagagaaggagtcgtccgccaacggcttcaccctggtcgggctcagaaccatcgacatcgccaagtccaccgtagagggcatgtgccccggcaaggtctcgtgcgcagacattctggcctttcgcgcgcgcgacggcggcgtggccgcggccttccc

SEQ ID NO: 94082 - DNA, 543 bp, Zea mays
  unsure (1)..(543): unsure at all n locations
acggctagatgctcagcctccgactgnactgacgtaccggtccggaattcccgggtcgacccacgcgtccgcggacgcgtgggcaaaggccttcctcccggcgtatttgctttggctcttctcctccacgccataagatatctagcaattggtcactcgccttaattagttcgctttgcttttgaggttgattcgaccattttgctgtagcgtgaattgcatgcatggacatgcaacgctccaatggcctttggaatgtggaatttttttccccattttctgtatttttcctataaaaaatgaactggttcttatataattcctctcaaaaaanaaaaaannnnnnnaaaanaaaaaaaaaaaaaaaaaaaccaaaaaaaaaaaaaaaaaaaaaaaaaggggggcccctttaaaagatccaagcttaactacccctgcattccaagtcataacttttcttataggggacctaaattcaattcactggcccgcgttttaaacctttggactgggaaaaccctggcgttacccaacttaattggt

SEQ ID NO: 94083 - DNA, 533 bp, Zea mays
  unsure (1)..(533): unsure at all n locations
ncgctgtgcctagcnccggatgccacgacttaccggtccggaattcccgggtcgacccacgcgtccggtcagaaaatagtgggatcgagttgtttcactgcacgagcacatcctccggcgaccaccggcctgggtctccgtcctctagcgaccgaccaacgcgccgagcgaagatgtcgtggcagacgtacgtggacgagcacctgatgtgcgagatcgagggccaccacctcacgtcggcggccatcgtcggccacgaaggcgccaactggggctaaagcaccggggtccccgagttcaagccccaagagaatgctggcatcatgaaagatttcgacgagcccgggcaacttggcccgaccgggctgatcctgggagggaccaagtacatgggcattcaaggggaacctggagctgtcattcgtggcaagaaaggatcccggggcattactgtgaagaaaacagggcagtcactcatcattggcatttacgacgagcccatgacttccgggcagtgcaacctggtggtggaa

SEQ ID NO: 94084 - DNA, 539 bp, Zea mays
  unsure (1)..(539): unsure at all n locations
acgggtttgctactgctactacgtcggtacgnccgtaccggtccggaattcccgggtcgacccacgcgtccgattggaagaggcagacgtgtccaaagccattctaggttacatcactgcaaacaagatccagagcattgcgctcggcggagccaacagaaatgcgttcaccaagaaattcaagaacgcggacgtgccgtcgaccctgatgaagtgcgctccagactactgcaacatctacgtcgtggccaagggcaagtccgtcaatgtcaggctcgccaagtgcggcgtcccgccgatgcacactggcgccgacatcgcttcggacaccgactccctccgggaatcggtgctctacatgcgacgcggctccagggggcacctgccgcgggtgacgcctgacgcctggcgcttcattgaccggcgcacaccgncggagctattcacgccggcacttgtccgcgagcgcttggtctcggcattgggcaacacccagaactttgtcctnctggcaggaaaggacaacttcgagacctctt

SEQ ID NO: 94085 - DNA, 672 bp, Zea mays
  unsure (1)..(672): unsure at all n locations
tgtctacgaatgccatgangtatgacattcntgtcttgatttctgggtcgacccacgcgtccgtggaaatttgtcgtatgtttgacagtatctacaaagagcatctggacggagtgcgccctgtcgtagaaaaagtttaccacgtcttcgacaatcaatttcctgtagctattaaacggttgcagtttgatatgcatctttttatggatattgtatctgatgcctttattcatctatcttgatttgaatctcaatccttaattatgatatttttttttttacctagggatcttcgtatctcccttatttcataatttctgttcgttaattatgtattctctatgttttcttttgatttttttcaatctttagttctttgttttttcttttatatctcttttttctttatttgtatttcttttgttatatatttcttgctatttttactttattttttattttcatttgtctttaatcactatttatttttttttttttccttttatttttttatattcttttgtcttcttttattttttatatttttgtttttatttttatttatagttttatatttatttttctatattattagtttattttttttttaaatttgtttcctttttatttatcttatctgtctatttattgttaatatatttgtttacttta

SEQ ID NO: 94086 - DNA, 539 bp, Zea mays
  unsure (1)..(539): unsure at all n locations
tggcttctcctcagcctngactgaccgcacgcacgtactcggtccggaattcccgggtcgacccacgcgtccgcaacttattgagaggcttgtatttgctgaaggtgcagaaaatggccttgatttcacaatcgggagacctttcaattggattggaccaaggatggacttcattcctggtgttgatggtcctagtgaaggtctgcctcgggttttggcttgcttcagtaacaatctgctccggagagagcccttgaagcttgttgatgggggtcagtctcagagaacctttgtctacatcaaggatgccatcgaagctgtagtgctgatgattgaaaatcctgctcgagccaactgccacatcttcaatgttgggaatccgaacaatgaagttaccgttagggagttggcccaaatgatgacagaggtctaccacaaatgtctcaggagaggcaccggtggatgagcccatgattgacgtgagctcgaatcaattctaccgccaaagatacgattatagccacaagaggatcccccac

SEQ ID NO: 94087 - DNA, 577 bp, Zea mays
  unsure (1)..(577): unsure at all n locations
tgggttntnagaagtnntgtcatgaggtggatatattgatcgctctaccggtccggaattcccgggtcgacccacgcgtccggacaggtgaaatttgtcttgatatattgaagaatgcatggagccctgcatggaccctgcagtctgtttgtagagcgataattgctctgatggcccatcctgaaccagacagcccacttaactgtgattcaggcaatctcctgcggtcgggtgacatcagaggctatcaatcaatggcccgcatgtatacaaggctggctgccatgccaaagaaaggttagatgtagaacatgtgccaagccaagagcctatgtcagtccatatgttgtcaggtttgctgtgtgctgtctgtctgtgaacttggtggttcttgtttcctaataagtcctaaccattcatgtgtgtgtattctgtattctgtatcccggattcccgatgcttggtctgtgatgtaataaatcctggaattcaacagttgntacttctgatctatttatttaagtgctcagtatttcccgtcaaaaaaaaaaaaaaaaaaggcggccggtctagagaa

SEQ ID NO: 94088 - DNA, 576 bp, Zea mays
  unsure (1)..(576): unsure at all n locations
tgtggagcggcntgctcactcccagttgaggtcagnactgatctactcggtccggaattcccgggtcgacccacgcgtccgcccacgcgtccgcccacgcgtccgcccacgcgtccgagctgatgatgagcgactacagggtggagatggtgaacgatgggatgcaggagttctttgtagaatttcgtgggcctaacgaaagcatttatcaaggaggtgtatggaaggttagagtagaattgccagacgcatatccttacaaatccccatcgattggtttcatcaataagatatatcacccaaatgtcgatgaaatgtctggttcagtctgtttggatgtcatcaaccagacttggagcccaatgtttgatcttgtcaatgtgttcgaggtcttccttccacaacttctgttatatcctaatccttctgatccattaaatggagatgcagctgcgttgatgatgcgtgatcgccctgcttatgaacaaatagtgaaagagtactgtgaaaaatacgccaaaccaggggatgctggtgtcaccccagaagagcaatccagtgacgaatagctgagtt

SEQ ID NO: 94089 - DNA, 573 bp, Zea mays
  unsure (1)..(573): unsure at all n locations
tgggatgcggctnactcatgaatagaagatgatgatcgctctaccggtccggaattcccgggtcgacccacgcgtccggtgaccatccaggtggatggcaatctgctggcgaccacggacctaagccagtacaaggaccatggtaattggatcgagattctacgtgtggataacctggtcatcaccggcaagggaaaccttgacgggcagggcccagccgtgtggagcaagaactcctgcaccaagaagtacgactgcaagatccttcccaactcgctggtgatggacttcgtgaacaacggggaggtgtccggggtcacgctgctcaactccaagttcttccacatgaacatgtaccggtgcaaggacatgctgatcaaggacgtgaccgtgacggcgcccggtgacagccccaacacggatggcatccacatgggcgactcatccgggatcacgatcaccaacaccgtcattggcgtcggtgacgactgcatctncattcgccccgggaccttcaaggtgaacantcaccgcgtgacctgcngnccttgccacggcatcagcatcggcagc

SEQ ID NO: 94090 - DNA, 538 bp, Zea mays
  unsure (1)..(538): unsure at all n locations
cgggtgtcccctcagtctcactcgacggacgtaccggtccggaattcccgggtcgacccacgcgtccgcgtcgtctcactcaccccgccttcacgcctccctcaccaaataaggtcccgcccttttccgacattcacaggggggacaggaaatcagcggccatggcctcgattccggcgacgaccttcgccgtcatcttatccgtcctcttctgtgccgcggctggcaccgccgtcgacaacgacctccccgactacgtcatccagggccgcgtctactgcgacacctgccgcgccgggttcgtgaccaatgtcaccgagtacatcgcgggcgccaaggtgaggctggagtgcaagcacttcggcaccggcaagctcgagcgctccatcgacggggtgaccgacgcgaacggcacgtacacgatcgaactcaagggcagccaccagggggacatctgccaggtggtcctggttgagaggccgcgccagggccgggnacaggttcaagccgacagggaccgggccggccttctggttac

SEQ ID NO: 94091 - DNA, 539 bp, Zea mays
  unsure (1)..(539): unsure at all n locations
cgactgatcctcacgcctncaggtaccgcactgatgtaccggtccggaattcccgggtcgacccacgcgtccgcccacgcgtccggtcgctgggtctgccggttgccgcgacggtgaactgcgcggacaacacgggcgccaagaacctctacatcatctccgtcaagggcatcaagggccgcctcaaccgcctcccgtccgcctgcgttggcgacatggtcatggccaccgtcaagaaggggaagcccgacctcaggaagaaggtgatgcccgccgtcatcgtccgccagcgcaagccgtggcgccgcaaggacggtgtctacatgtacttcgaagataatgctggagtgattgtgaatcccaagggtgagatgaaaggttccgctatcactggacctatcggcaaggagtgtgctgatctttggcctangattgctagccccacatacgctatccgttgagagcctgttgaatatggtcagacttctatatgatccatctattatcaagtgcttaaaatgctaatgggcttaattggc

SEQ ID NO: 94092 - DNA, 575 bp, Zea mays
  unsure (1)..(575): unsure at all n locations
ngggacgctnntnactcatgctcagccgacctacagnactgctctaccggtccggaattcccgggtcgacccacgcgtccgcccacgcgtccgccaaaacatagagtgtcgacttttctattggtgtgattgggggcactaaatacctaacacattgcactcagactacatatactgtgtttgtgtgttgtatgccgtatgcgtgtgtgagcttgcgcaaattggacatctaggccgtgcgtatcctgcgatgaaaggcgccgtcatcggcgcatcgaccgtcctggtcgtggcggtggtggccaccatctgcgtcgtttccttcaaaggcagcggcgatggcgggagggccgaggagggcgagatgtccacgtcggtgaagtccatcaagtccttctgccagcccgtggactacagggagacgtgcgagaaggcgctggaggcggcggccgggaacgccaccagccccacggagctggccaaggccatcttcaaggtgacgtccgaccggatcgcgaaggccgtgcgcgagtctcgcctgctcaacgagctcaagcacgaccgncgnacgtcgg

SEQ ID NO: 94093 - DNA, 534 bp, Zea mays
gcgtgctgactgcaagcccacgtacgcatctgacgcaccggtccggaattcccgggtcgacccacgcgtccgagcaaatcgaacgaacccagccgaagcgcgagctgagcaaggcggaggcggcgatggagcggctgcagcggatctttggcgcctccggcatggggcagccgccgacggactcgccgcttctcgactcctccgagcaggtctacatctcctccctcgcgcttctcaagatgctcaagcacgggagggccggcgtgcccatggaggtcatgggtctcatgctcggcgagttcgtcgatgactacaccgtcagggtcgtcgacgtcttcgccatgccgcaaagcgggactggggtcaacctccaagcccgcgaccacgtctttcaaaccaaccttcctgacatgctcaagcagaccggcaggcccaaaatggttggaagcttgtattactcacattctggcttccgtaggtggctatcaagcggtgatatcaattcttagcaaaggtttgtagcttttaaccccc

SEQ ID NO: 94094 - DNA, 533 bp, Zea mays
  unsure (1)..(533): unsure at all n locations
gctgtnctgatgacagaacgatgaagcactgctctaccggtccggaattcccgggtcgacccacgcgtccggagacaatggttacggaaattctatgaatatcaagagaaccataaaaggatatatcaatgctggttttgctggaattatgcttgaggatcaggtggcacctaaagcatgtggacatactgaaggaaggaaagtcatatcaagggaggaagctgtcatgcacataaaagctgctgtagatgctaggaaagagagtggctctgacattgttattgtagcaaggacagattctcgccaagctatttctcatgatgaagcattatggagggtgaaagcatttgctgatgctggaacagatgttctatttattgatgcccttgcttcagtagaagagatgaaagcattttgtgcgggtgcaccaaaagttccaaagatggcaaacatgttaaaaggtggtggtaaaacttccatattgagcccttgttaacctgaagaaattggnttcaggctctgagtatattctt

SEQ ID NO: 94095 - DNA, 536 bp, Zea mays
  unsure (1)..(536): unsure at all n locations
cctctattagnggcccgaatgtactnatcactcctcctgagttaaattaccgggccgaccgatacttacggagacaatggttacggaaattctaggtatattatgagaaccatataaggatatatcggggcgggttttgctgtaattatgcttgatgatcatgaggcacctaaagcatgtggacatactgaaggaaggaaagtcatatcaagggaggaagctgtcatgcacataaaagctgctgtagatgctatgaaagagagtggctctgacattgttattgtaacaaggacagattctcgccaagctatatctcatgatgaagcattatggagggtcgaaagcatttgctgatgctggagcatatgttctatttattgatgcccttgcttcagtataataaattaaagcattttgtgctgttgcaccatataatttcaaatattggtaatcatgtttacaaggtttttgttaaaacttcatattgtgccttgtttaacttgattaaattgtattaatgcttgtactaaatactt

SEQ ID NO: 94096 - DNA, 546 bp, Zea mays
  unsure (1)..(546): unsure at all n locations
cgtgttgtccccagcttngacgcactgtcgtgacgcatccggaattcccgggtcgacccacgcgtccgcgtcctgcgccaggtacctggacgagcacggcaacgtcgccgccctcgacggcgccaccgcggaccacctgagggccaccatcgacagcttcgccaacgaggcgctccggacgctgtgcctcgcctacgtcgacgtcggcgacgggttctccccgagcgaccagatcccgacggacgggtacacgtgcatcggcgtcgtggggatcaaggatcccgtccgtcccggcgtcaaggagtcggtggcgatctgcaggtccgctggcatcaccgtcaggatggtcacgggccgacacatcaacacggccaaggcgatcgcgcgtgagtgcggcattctgacttgaagcngccgtaccatcgaaaggcccagattcagagtcaagaatgagggaggaactgcatgatccggatcccaaaatacaggtaatggccagaatcttggcggttcgacaagcacactttgggtgaagcacctaccaaa

SEQ ID NO: 94097 - DNA, 532 bp, Zea mays
  unsure (1)..(532): unsure at all n locations
ncgctagtgccaagtcccacncatggcacgtaccggtccggaattcccgggtcgacccacgcgtccgcccacgcgtccgatcacgacaagatggcatgcacaaacaatgcgatgagagccttgttcctcctggtcctcttctgcatcgtgcatggtgagaaggaagagtcaaagggcatcgatgcgaaagcgtccgggcctggtgggtccttcgacatcaccaagttgggcgcctccggcaatggcaagacagacagcacgaatgctgtgcaggaggcatgggcatcggcgtgcggcggcactgggaagcagacaatcctcatacccaagggcgacttccttgtcggacaactcaacttcacaggctccttgcaagggcgacgtgactcatccaggggatggcaatctgctggcgaacaacggcctacgcccagtccaggaccattggtaatggaatcgagatttacgctggattacccgggtataaccggcagggaaaccttgaccggccaggcccaactttgttggacaa

SEQ ID NO: 94098 - DNA, 541 bp, Zea mays
  unsure (1)..(541): unsure at all n locations
ggantaacactttcagccactaccgactgccgcccggtccggaattcccgggtcgacccacgcgtccggggcgagtgcgtgcgttcgtgcagccacagacaggcgtccgggcaccatgtctttcaccggcacgcaggacaagtgcacggcgtgcgacaagaccgtccacttcatcgacctcctcacggccgacggcgccatctaccataagacatgcttcaagtgcagccactgcaaaggggtcctctcgatgtgcagctactcctccatggacggtgtgctgtactgcaagacccacttcgagcagctcttcaaggagaccgggagcttctccaagaacttcacgccaggtggcaagtcatcagacaagggtgaactgacaagggccccaagcaagctgtcgtctgcattttctggtacccaggataagtgcgcagcatgccagaaaacagtgtacccgctggagaaagtaactctggaaggcgagtcctaccacaagagctgctttaagtgctcgcacggcggctgcattctgaccacc

SEQ ID NO: 94099 - DNA, 514 bp, Zea mays
  unsure (1)..(514): unsure at all n locations
cggggannnctttgactgaagctcatccgtacgaccgtaccggtccggaattcccgggtcgacccacgcgtccgcccacgcgtccggtcgtcgtcgcccacggcgcccgacgtggagctgccgcacgccaacttcaccgtggaccgcctcatccagatgttcggcgccaaggggttcacggtgcaggagctggtggcgctgtccggcgcccacacgctgggcttctcccactgcaaggagttcgccgaccgcctctacaacttccgcaaccagggcgggaagccggagcagttcgaccccagcatgaacccgtcctacgccagggggctgcaggacgtgtgcagggactacctcagggaccccaccatcgncgcgttcaacgacatcatgacgcccgggcaagtcgacacatgtactcgtcacctcggcgcgggctcgctgctagaccgacgagactgtgacgaccacgcacagcctgtgagtcttgctcacgccagctctcacactcgcggcc

SEQ ID NO: 94100 - DNA, 577 bp, Zea mays
  unsure (1)..(577): unsure at all n locations
nagtggggnnnnnnccctggactagcntctcatagcatgcccgtaccggtccggaattcccgggtgcgacccacgcgtccgcccacgcgtccgtataaagcgcggggtctcagtctcaccggcacctcttcaatcccaggcccacacaaagtttctgctcgatcctcatctcctccctctctcgagtcaagagcagagcagctaccaaacaagctctcctttcgcttccgatccatggagctcgacgccgacaacctgagcgccaccgagctccgcctcggcctgcctgggaccagcagcagcagcagcgacgactggcagaagaagccgtcgccctccgtcggggccaagcgcgctctggacgacggcaccaagagcgaggcctcggggaccagcccggccgncagagacctcgacttcgaccacgaccacgacaccgnncgcgcctccaaagcgcaagtggtcgggtggccgncggtgagggcgtacaggaagaacacctttcaggcggcggcggcggccaagaaggtcgagcagaagcagaagcagcagcagcagggaggcctgtacgtgaagg

SEQ ID NO: 94101 - DNA, 557 bp, Zea mays
  unsure (1)..(557): unsure at all n locations
tgaggnnnnntnttcacgatacagtacggactgtatctaccggtccggaattcccgggtcgacccacgcgtccggggagagagaattcgggagcatgtacactgactgggatatccttcctcctcgtaagatcagagatgttaatgcaaaaaagccaaaagactgggatgacagggaatatattgaagatcctgatcaagttaagccagagggatatgattcaattcctaaagagatacctgatcccaaggacaaaaagcctgagtcatgggatgacgatgatgatggtacatggaagcctagaatgatacctaatccagaatacaagggaccatggaagcggaagaaaattaagaatcctaactacaaaggaaaatggaagaccccatggattgtcaatccagagtttgaggatgacccagacctatatgttctgaaacctttgcagtatgtggggaatgaagtatggcanggcaaagctgggtcaggttttgacaacaatttgaattgcgatgaaccaaactattgcagaaagttgtagaatgaaacttttcttt

SEQ ID NO: 94102 - DNA, 556 bp, Zea mays
  unsure (1)..(556): unsure at all n locations
aggcgatgtcgtgaatcggataagatcgacttctctaccgctccggaattcccgggtcgacccacgcgtccgggaatccggcggnggtggggtgcgagcagggggagggagaagagcagccgcccgccccgcgagggggcaacagctgcccaagaacctgaccggaagagttgtgggagcggcggcggaaagatggggcaggccctgcgcaggctcttcgactccttcttctccaccagggagatgagggttgtgatgcttggtctggatgcagctggtaaaacaacaatactgtacaggcttcacatgggagaggttctttcaacagtccctacagtcggttttaatgtcgagaaggttcagtataagaatgtggcattcactgtgtgggatgtgggtggacaagaaaaactcaggtcactgtggaagatgtacctgagtaattctgatgcactgatctatgtcngtgattctctggacagagaaaggatcagagatgcgaggcangagttccagaccattatcaaggacccttgatggaaaccacataatctgg

SEQ ID NO: 94103 - DNA, 552 bp, Zea mays
  unsure (1)..(552): unsure at all n locations
aggcgggtnntataaacgaattcgaagtattattactgctctaccgttccggggtcgacccacgcgtccggaaaaagatctatttgagaaatattacaagcaacacttggcaaagcgtcttctttctgggaaggctgcttctgatgattctgagagaagcatgcttgtgaagctgaagacagaatgtggctaccagtttacttcaaagttggagggcatgttcactgatttgaagacctctcaggatactacacaagggttttatgcatctacttcctcggagctgccggcagatgcccctacaatgtctgtccagatactcacaactgggtcatggccaacgcaaacctgcaatacctgcaacctcccccctgaaattgtctctgtctcagagaagtttcggtcttattaccttggcacacataatggcangaggctaacatggcaaacaaacatggggacggctgacatcaaaagtacatttggaaatggaaagcagcattgaatggacgtatcaacataccagatgtgtggtctcatgctggttaactc

SEQ ID NO: 94104 - DNA, 559 bp, Zea mays
  unsure (1)..(559): unsure at all n locations
tgggccgtngtgtataagcaatggatagtactgctctaccggtccggaattcccgggtcgacccacgcgtccgatgtgattggggctcgccgtgcttcatggcgcattgcttcttccattgaacataaggaggagtcccgtaagaacgaagagcatgtgaaccttatcaaggaatatcgtggcaagatcgaggctgaactgagcaatatctgtgatggcatcttgaagctgcttgactaccacctagtgccttcttctactgctgctgaatcaaaggtcttctacctcaagatgaatggtgactatcacaggtatcttgcggaatttaagactggtgctgacaggaaggaatctgctgagagcacaatggtggcctataatgctgctcacgacattgctctggctgaactggcacctacccatccgataaagctgggacttgctcttaatttttcagtgctctattatgagaatctgaaactcgcagacaaagcttgcaacctggcaaagcaggccgtcgatgaagctatctctgacttagacagcctttgtggagaag

SEQ ID NO: 94105 - DNA, 548 bp, Zea mays
  unsure (1)..(548): unsure at all n locations
agcggtngtgatcagctcctacgaccttctaanncccnncnnnccggaattcccgggtcgacccacgcgtccgcccacgcgtccgcctcttcatagagcgcgtcggggtcgggggaggacctgtcgatttggcatgagctgccgattcaatcatcctccggataggaatctggctattgcctctgccagaatgaagggagaatatcctgagagagcgggacagccagagtgtcagtattatctgaagactggaacatgcaagtttggccctacatgcaaatttcaccatcccagggaaaaggctggaattgcagggagggtgcagctaaacacatcaggatatccactccgcccgaatgaaaaggagtgtgcatattatntaaaaacaggacactgtaaatatgcanatactngtanattcaccatccggacttttcaatgtggtgctttcgtcacgtgggtcttcctattatacctctggacattcctctgcgagtgctggttcgcagtcctatactggaactatgccaagctggggcttttccaca

SEQ ID NO: 94106 - DNA, 555 bp, Zea mays
  unsure (1)..(555): unsure at all n locations
ggggcagggtgtatggggaggggtggtaagtgtgtaccgctccggaattcccgggtcgacccacgcgtccggtgatttgaaataattgggaataaatagttcgtgaatccctgaagcgtgcatatatatatgcctgcgaagataaaggtaatggagtcgtcacgcaggttccagccggccgtcatcctgcttctcctgctcattgtgtccaccgatatggcacaggcaagggaatgcgagaagtacagtgagcgatttgttggggcatgcatgatcgcagacaactgcgccaatgtgtgccgcggtgagggcttcttggccggcaggtgcagcaccttccgccgncgctgcatctgcactaggcagtgctaaacaagatcgctcgatcgctcgccatgcatcgacaacctattcttaataacgttcattatctcgttcttaattatgacgaatgtcatgtatgttctggtgactgtcatgtatattctgatgactgtcatgtatcttggtcatgtatgctcaaggntcatatctngttcatgtattaagatggtt

SEQ ID NO: 94107 - DNA, 561 bp, Zea mays
  unsure (1)..(561): unsure at all n locations
gaggggaaggtgtngtatgagatttgcagaagaagtattgctgtaccggtccggaattcccgggtcgacccacgcgtccgcccacgcgtccgcccacgcgtccgaccacaccgttcctccgagcccaggagcaggcccgcgccaggaggaagtttgttcttttaacaatatgtcgagggaggagaatgtttacatggccaagttggctgagcaggctgaaaggtatgaggagatggttgagtatatggagaaggtggctaagactgtagatgtggaagagctcactgttgaggagcgtaaccttctgtctgttgcatacaagaatgtgattggggctcgccgcgcttcatggcgcattgtttcttccattgaacaaaaggaggagtcccgtaagaacgaagagcatgtgaaccttatcaaggaatatcgtggcaagatcgaggctgaactgagcaatatctgtgatggcatcttgaagctgcttgactcccacctagtgccttcttctactgctgctgaatcaaaggtcttctacctcaagatgaanggtgactatcacag

SEQ ID NO: 94108 - DNA, 556 bp, Zea mays
  unsure (1)..(556): unsure at all n locations
tggccggtnntgctctcganacccgcctactacgcattgctcgtaccggtccggaattcgccgggtcgacccacgcgtccgtccacctccgcccgcgtcgagcgagggacacaccgcctccggccgcgcggcacgatctccggtccccaacatgagcacgacagaggatgagaggtccggcgccgccgcagaagcgggaggaggggaggaggagagacgggagaggagcgtcggcctgatggccggcctcgtggacagggccaagggcttcgtggtggagaaggtggcgcagattcccaagcccgaggcggcgctggatcgagtctccttccagagcataagccgcgagggcgtcgagctgcacagccacgtcgacgttagcaacccctactcgcaccgcatccccatctgcgagatcacctacaccttcaagagcgccggcaaggtgatagcgtcgggcatgatgcccgaccccgggtggattgcggcgagcggcagcacccagcttgagctaccggtgaaggtgccgaacgacttcatcctgacgctgatgaan

SEQ ID NO: 94109 - DNA, 540 bp, Zea mays
tgagcgctggtgaaatgtgagggaggggaaaagtgtaaacctctccggaattcccgggtcgacccacgcgtccgcggacgcgtgggcggacgcgtggggactcatatgtcctttctgagtcaagcttgtttatctgtcctgtgaagattgtcatcaagacctgtggcactaccaagctcctgctcaccattccaagaatccttgagcttgctgaagagctgtctatgccacttgctgctgtgaagtactcccgtgggacgttcatctttcctggcgcacagccagccccccacaggagcttctctgaggaagttgctgcacttaaccgctactttggcggcctgaaatctggtggtaatgcttatgtgattggagatccagcaagacctggacagaagtggcacgtcttctacgccactgagtacccagagcaaccaatggttaaccttgaaatgtgcatgactggtctggacaagaagaaagcttctgtctttttcaagactaatgctgatgggaacacaacatgtgccaaggaatgac

SEQ ID NO: 94110 - DNA, 541 bp, Zea mays
gggaggtggtgtatggggatagggggaatgtgttaccgctccggaattcccgggtcgacccacgcgtccgatttggttgggcgacggggtccagtacaggcagcttgcacagcaaaggagctgcgtgaaagtttaggtttgaaaaatgtccgtatttgcatcaaggcagctgatctcgtgaccacacctgcggacgaggaggagatgaggaatagtagaatacaaagaagagtttatgaattgttgtcaaaaactgcgcatgggggcaacaattacaatggccaaaaggagcttcattttgtgtttttcaggaaacctatcaggttcatccctgcagaaaatggttccacggttggtgctgttcaacttgagaagacagtattaaaaggtgatgaagtaactgggaagcaggtcgctgctggaactggtgaggttgaagacctaaaatgtgggtaagtgctttggctgtgcttatgctttctggtgtttatgactgcttaaccatgattttaggccgtctatatgcttcccctaagctggg

SEQ ID NO: 94111 - DNA, 557 bp, Zea mays
  unsure (1)..(557): unsure at all n locations
aggggagtgcagtgagtcgcggggcgggggagaggatgcaccgctccggaattcccgggtcgacccacgcgtacgctccgccttcctcttccagtccccgcgcgcgagatcgccgccccgtgtgggccctagatcgcgatggcgctcgcgccgccgcaccctgctcaaggtcatcatcctcggcgatagtggggttgggaagacttccttgatgaaccaatatgtgaacaagaagttcagcaatcagtacaaggctacgatcggcgcggatttcctcaccaaggaggtgcagttcgaggacaggctcttcactctgcaaatatgggacactgctggccagganaggtttcagagtctcggcgttgcattctaccggggagcacattgttgtgtcctagtctatgatgttaattctatgaaatcatttgacaaccttgacaactggcgagaaaagttttaattcaggcttagccatcagatcccgataattttccttttggtctgctggggaacaaagatgatgttgatggtggcaacaacccccttggattttgaaa

SEQ ID NO: 94112 - DNA, 562 bp, Zea mays
  unsure (1)..(562): unsure at all n locations
naggtnaagggttggacgtggacgcgatgggaagttttatcgctccggaattcccgggtcgacccacgcgtccgcccacgcgtccgcccacgcgtccgcggacgcgtgggtgcgaggctgccatcgcaatgtacctgaacgtctcctgcatccccgaggcgcaggcgatcatcggctcgagcgtcgctatccctttcctcgtcaatggcctaggggaaggtggctcccggagcgacacgtgccgcctggacgcgctgctcaccctgtacaacctctccctgcacgcgcccaacatcccgtccctcatggcgtccggcatcatcgagggcctccggggagtgctgacgccgtcgtccccgtggacggacaaggccctcgcggtgctgctgaacctggcgatgacccggaggggcaaggaagagatcgcggccagcgcggccatggtgggcgccatcgtgctcatcctggacaacggtgagccccggggagaagagaaggccgtgtcgtgtctgtacgtgatctgcaccggcgacgatggcagcaagcagaccgtgcttcaaga

SEQ ID NO: 94113 - DNA, 548 bp, Zea mays
  unsure (1)..(548): unsure at all n locations
aggtaggcnttnttcgttcgggttatatgtattgctgtaccggtccggaattcccgggtcgacccacgcgtccgatcagagcaagcttctcgaggtgattgatgctagtgagttgccagaaatttttggtggaagctgccgatgtgaaggtggttgcatgaaggctgacaaaggcccttggaaggaccccgaaatcatgaagatggttcaaagtggtgatgggaggtgtggatcactcggtacggcctctttcgaggctccggagaaaatgatttgtgaagacgacacgtatcctaagaaacaagctttgtttgatggggaaacacaattagctggagacgagcattctcagtcacagaaaatttcccgtggccggattgaacatcctcacgtgtcacctcttcacgaggaacttatccncacttcaattcatacccctggatcaccctattcttgtgatgtcccgatggttgaagaggccatagacgccatctgcaagagccacggaacaccaccagatgagaggattgccatcaccaaagctatta

SEQ ID NO: 94114 - DNA, 546 bp, Zea mays
  unsure (1)..(546): unsure at all n locations
tgagagcgtgcgtgccatcgaatgagacgtaattgtatactcgtccggaattcccgggtcgacccacgcgtccgcggacgcgtgggctacattgcaaaacatggtaatttagtcaaaagattctagagcttctgaggttgtgcgatatatgttaggagataagacatgcacaaggtgctcatcaacccaccttcagaagctctagaatcttttgactacattgcaaaacatggtaatttcagttttacagagaggtttgccgtgaagtatgctggtgctgcggccatgtacatggtatctaagaaactaaagaagaaatacaacataactgacgagcgtgcttcattgtatgatgctgccaatacatggatcgacgcactgaacggaagagatttcctgggtggctccaagcctaacttggcagatcttgccgtcttcggtgttctgagacctatccggtacttgagagcangaaaagatatggttgagaacactgaaatcggcgattggtaccgacgcatggaagacgcaattggagaaccatcn

SEQ ID NO: 94115 - DNA, 556 bp, Zea mays
  unsure (1)..(556): unsure at all n locations
tgtagcggtggtgtgacagcatacgacgtatctctctaccgctccggaattcccgggtcgacccacgcgtccgaaagtatttcctgcaattcgaagtttccaagaatatggtgtagagtttacaaatggtaggggtgaatcatttgatgttgtgattcttgccacaggttataagagtaatgttccttattggttgaaggagaatgaatttttttcacagcaaagtggatttccaaacaaaccaaatgaatggaaaggaaaggatggactctatgctgctgggttctcaaggcgtggtctacttggtgtgtctatggatgccaccaaaattgcggaggatattgcgcagtcttataataatatatataagctacaaagatcataagaacaaatgatatttaactatttatcaataatttagctatcaccatttgagagttntgtaaatatatgtactagtctatttgcataaattataagagatggatatgctagataacanatactatggctagcttatctatcaacgcactccatatttaattggcttacgctc

SEQ ID NO: 94116 - DNA, 563 bp, Zea mays
  unsure (1)..(563): unsure at all n locations
taggggacgaggntgaacgaaacccgcagaagatagtactgctctaccggtccggaattcccgggtcgacccacgcgtccggtaaaggaagaccaaatttccccaaagaaatccgacgaggaaacggaatcagtgttggtggagctgagcgcccgtcagatcacacttttgctatcatccatttgggctcaagcaacatcccctgaaaatactcctgtgaactatgaagccattgctcatacttacagtttgcttctactgttctctggatccaaggcatcaacttttgaggctcttacccagagttttcaggttgcattttctttgaggagctatgcgctcactgaagcagattcattacaaccgtctcggcgtcggtcattgtttactctgtcgacagccatgattattttctcgtcaagagcttacaatgtgttgccactcattccaatctgtaaacaaatgatcaatgatcgcgcggccgatccattcctttcgttggtggatgagagcaaacttacagctgtcaaagattgttcaaatgatccttcaaaatatatgga

SEQ ID NO: 94117 - DNA, 549 bp, Zea mays
  unsure (1)..(549): unsure at all n locations
tgaaagggtagtagtcccatccncggnttgcactgctctatcccgtccggaattcccgggtcgacccacgcgtccgccgggcaaagatgtcgtggcaggcgtacgtggacgagcacctgatgtgcgagatcgagggcggccagctcgcggcggcggccatcgtcggccacgacggtgccgcctgggcgcagagcacggcgttccccgagttcatgaccgangacatggtcaacatcatgaaggacttcgacgagccagggcacctcgcgccgacaggcctgttcctcggacctaccaagtacatggtcattcaaggcgagcctggtgccgtcatccgtggcaagaacggatcaggaggcatcaccgtgcagaagacagggcatgcactcgtcgttggcatctacgacgagccgattacgcctgggcagtgcaacatggtggtggaaaggctgggcgactacctgcttgaacagggcatgtaactactacgtaccaactggcatgcatgtcgacgacgatggtttcgagtttcgacttccaataatagtn

SEQ ID NO: 94118 - DNA, 541 bp, Zea mays
  unsure (1)..(541): unsure at all n locations
agactgtggtgaatggggatgtatgtactgctctaccggtccggaattcccgggtcgacccacgcgtccggaggaggaagggttaaggatttacccggtgtgagatatcgcattattcgaggaaccctaggtgctgtcgcagtaaagaatcgtcaacaagggcgttctagtgcgttgtagattcttatccaagacttgtatcatttgatgatgccatgtgaatcgctagaaacatgtgaagtgtatggctaacccaataacgaaagtttcgtaaggggactggagcaggctaccatgagacaaaagatcttctttctaaagagattcgattcggaactcttatatgtccaaagttaatatggaaattctttcagaggttttcccttactttgtccgtgtcaacaaacaattcgaaatacctcgactttttcagaacaggtccgagtcaaatagcaatgattcgaaacacttctttttccattacactatttcggaaacctaaggactcgatcgtatggatatggaaaatacangatttncg

SEQ ID NO: 94119 - DNA, 550 bp, Zea mays
tgggcggtgtgaatggggaacgatggtactctgtaccggtccggaattcccgggtcgacccacgcgtccgcccacgcgtccgctcgatcatcgacatggacgcggacgtgatcaccattgagaactcgcgggccgacgagaagctgctctccgtgttccgcgagggcgtcaagtacggcgcgggcatcggccccggtgtctacgacatccactcccccaggatcccgtcggctgaggagatcgccgaccgcatcgacaagatgctggcggtgctggacaccaacatcctctgggtgaaccccgactgcggcctcaagacccgcaagtacacggaggtcaagcccgccctgaccaacatggtctccgccgctaagctcatccgcacccagctcgccagcgccaagtgagcacctttttttgcccttttcgttccgaggaggcgtcgtcgatgccaaattgttccaataacagggctgtgcccggccgtctgttgtacttcggctgtgggtagggtaagaggtttccttaaaaaaaaaaaaaaagggccgcc

SEQ ID NO: 94120 - DNA, 566 bp, Zea mays
  unsure (1)..(566): unsure at all n locations
aggagacagcgtgtggatcgcatccggacgtagagtgcatatcngctccggaattcccgggtcgacccacgcgtccggacgggcggtgcgcgcatgtgcacatcatgttcgcgcagatcacgctgcagaacgtgcagggcgtgggcctgcacaacctgcacatccacgactccaaggcgcactcgggcggcatgatccgcgactcgaagcggcactacgggctgcgcacgcggagcgacggcgacggcgtctccgtgctgtcgtacagcaacgtgtggatcgaccacgtgtccatgttcagctgctccgacgggctgatcgacgtggtgaacgggtcgacgggcatcaccgtgtccaacagccacttcaccgaccacgaccacgtgatgctgntcggcgccagcaacgacagcccgcatgacgcggtgatgcaggtcacggcggcgttcaaccactttgagccggggctggtgcagctgatgccccgctgacactacggctttcttcaagtggtgaacaacgacttcacgcactggatcatgtacgcaattggcggatcataaccc

SEQ ID NO: 94121 - DNA, 562 bp, Zea mays
  unsure (1)..(562): unsure at all n locations
naggctgagtggtttnncctttacagatcgactaagcactgacgtaccggtccggaattcccgggtcgacccacgcgtccgcggacgcgtgggcggacgcgtggggcgaggtcgacgacgccgctacccttcttcggctccgttggcaacggtttgaggcacgactcggacagccagccctccgacgaagccttatggatcaccgatttcagaaggcacctcgcgttcggcacgtcgagcgccagatcgtctagagagtcgatcaaacggtcgaaccctttagtgatctggctctcgttgataacgccttccttcgacgccgaagaagggtagcgaggtcgacgactccgtggtgcggcagttcaaggataaggacgttttgatcataaaggagtacttctagaccggcgacatcatcgacgtcatgagctggttggaagcagaaaactactcgcattagtgctccttcaatgacttcttttgcataaactgagtaccctttcatggaccggatagcccttataaggaattgccgagatacctctatacttgatatgcatcc

SEQ ID NO: 94122 - DNA, 543 bp, Zea mays
tggaccgtgagtgactagtgatagagaaggtattgctctacccgtccggaattcccgggtcgacccacgcgtccgcccacgcgtccgcaagtcctggggtccacatgatgatgcaattactgattaggaatgagagagatggcattctgtgcccaattcctcagtaccccttgtactcggcctccatagctcttcatggtggagctcttgtcccctattaccttgatgaaaaaactgggtggggtttggagatctctgatcttaagaaacaactcgaagatgctcggtcaaaaggcattgatgttagggccttggtggttatcaatccaggaaatccgactgggcaggttcttgctgaagacaaccaatatgatatagtgaaattctgtaaaaatgagggccttgttcttctagctgatgaggtatatcaagagaacatctatgttgacaacaagaaatttaactctttcaagaagattgcaagatccatgggatacggcgaggatgatctccctctagtatcatttcagtctgtctccaaag

SEQ ID NO: 94123 - DNA, 542 bp, Zea mays
tggacgtggtgatggggggagaagtaatgctgctaccggtccggaattcccgggtcgacccacgcgtccgataagatggcgtgtatagacaatgcaatgagagccttgttccttttagcgctcttctgtgtggtgcatggtgagaaggcaaagtcaaaggacaacgatgcaaaagcgtccgggcccggtgggtccttcgacatcaccaagttgggcgcctccggcaatggcaagacggatagcacgaaggctgtgcaagaggcgtgggcatcagcgtgcggcggcaccgggaagcagacgatcctcatccccaagggcgacttcctcgtcggaccactcaacttcacaggcccatgcaagggcgacgtgaccatccaggtgaatggcaatctgctggcgaccactgacctaagccagtacaaggatcatgggtaattggatcgaagatctacgcgtggacaacctttgcaattaccggcaagggaaaagctcgacgggcaagggccaaacgtgtggagccaggacttctgcgtaaaaaaatc

SEQ ID NO: 94124 - DNA, 555 bp, Zea mays
tgtaaggtgttgctatgatatgattgtcagtggtactcgctccggaattcccgggtcgacccacgcgtccggccacgcgaccgatggatcctgcgtaagcatatgcggtctcagacagaatggtagatatagctatggctatgcaagctatcatggcaaaagggcatacatggaatacttttatgagacaaagattgattgagctgattgtcagataggtgtatctcactggagtgctgtgatagtacatggcggtgctaatgtatcatagtatgtcaaagaaaacctgttcaacaatcttgttagacatacaaagttcatcagagatactaaagtcgctatagatgatgcttatgaaagcaccaacagataattcatacaatctgactgtactgaaatcaatgctgttctactgcattgactgctgtactcgctgatgatcgactcttgaaacggaaatgtcggggactgtagggctatcatattcagggaatgacatgccttaggtgtattagaaggacacaatgttgatgaactgaataacggtattgtttt

SEQ ID NO: 94125 - DNA, 567 bp, Zea mays
  unsure (1)..(567): unsure at all n locations
atgacgagtctgtatcggatatcgaaagattgtgcgtaccgctccggaattcccgggtcgacccacgcgtccgcccacgcgtccgaccgtcaccgcgcctcgccgccggggcgtcacaatggcctaccgccggaggcctgagccccatccgcagccccagcccacgccctcgttggagcaccactacccgtcgtccgtgggccccgcctcacccgactcccttgccgcgcaggccatgcgcgccttcgccgcacaccgcgatgcctnctccctcacctccgcctactccgcctcagcctcgctggcggcctctcgccggagccaccacgagccctccgtgtccacaccgtccctggatagttcaggctatgaatacacgtccatgaagaacctcaacgaggccaagtatggattctggggcacacttgcgcggaaggcaaagtcatttcttgacgaggactgctcccccgagcaatacaaatcgccaagagatgatgtgcatgtnggtgtccagcttccacattcaaaacaattggccaggagagacgtggaaacctgagacacctt

SEQ ID NO: 94126 - DNA, 562 bp, Zea mays
  unsure (1)..(562): unsure at all n locations
tggcgagtgtgtatggggatggggggaaaatgttatcgtctccggaattcccgggtcgacccacgcgtccgcccacgcgtccgatcccgagggacgtgtgggagaagatctacacctggctcgccaagcccggggccggggtcatgatcatggacccctacggcgccaggatcagctccatcccgcaggatgcgacgccgtttccgcaccggcagggcgtgctgttcaacatccagtacgtcagctactggttcggcgagggcgacggggcgccgccgacgcagtggagcagggacatgtacgcgttcatggagccgtacgtcagcaagaaccctaggcaggcgtacgccaactacagggacctcgaccttggcgtcaacgaggtggtcggcgacgtctccacctacgacagcggcagggtctggggcgagaagtactacaatggcaacttcgagaggctcgccaggaccaaggccaaggtggacccctgcgactacttcanggacgagcagaacattccggcattgctcaagtgatcgatgatccccggtccatccagatc

SEQ ID NO: 94127 - DNA, 552 bp, Zea mays
  unsure (1)..(552): unsure at all n locations
aggaagtgctntcaacgatacccgcagtatatcggactgctctaccggtccggaattcccgggtcgacccacgcgtccgcttcggcctccacctatcaccacccgggacgtcttccatggcctcctcgtagtagagtagggctatctcaccgcaacagctgctcattacatcctttatgagaggctgatcgattggtagatacgtactcgggtggagcagagcaacgagagacatggcgacgacgacgcgtgttgccgccgccgccaccggcgtgctgctggtcctgtcggcgttggcgaccctggcgcgggccgaggacccgtacctgttcttcgagtggaaggtgacgtacgggaccaagtccctgctgggcgtgccccagaaggtcatcctcatcaacggcgagttctccggtccaagatcaactgctccttcacgaacacatcgtcgtcaacgtcttcaccagctcgaccatncgctccttttacctggaacgggatgcagcacaggaagaactcgtggatggaccggatgcaggcacgcagtgtccc

SEQ ID NO: 94128 - DNA, 571 bp, Zea mays
  unsure (1)..(571): unsure at all n locations
aggatgagactgttgaccgcaacagaacgtatcatctcattnctcgttccggtccggaattcccgggtcgacccacgcgtccgcccacgcgtccggtccatccagctccaggcgttccagaggccctgatacaggagatgttcgagcacaacccaggggtgtccagggagggcctcggcctgtacataagccagaagctggtgaaaacgatgagcggcacggtacagtaccttcgagaagccaacacctcgtcgttcatcatcctgatggagttcccagtcgcccagctcagcagcaagcggtccaagccttcgacgagtaaattctgaccctcatgctcctggaactgcagcgagtgttcggccgtgtcgaagtctcggttgtagctagccaagtggctgctactgaaacatcggttggtcggttctggtatctagcacggcctgtgtagtgcggatagaattggttgtttggctttggagagatataagctagctggctaggtgtaacgtaacgtcgaccgataactgtatgtgaatgatgatgagctgtgaggacgaataaaggcttn

SEQ ID NO: 94129 - DNA, 546 bp, Zea mays
  unsure (1)..(546): unsure at all n locations
tggatggtgcgtgtcatcgcatgcgangtgattnctctacccgtccggaattcccgggtcgacccacgcgtccgaaacagccgagcgatctcctctccctctccctctccgatccattctccagcgcagcgaagggaacatgtctgaccgggcaaagatgtcgtggcaggcgtacgtggacgagcacctgatgtgcgagatcgagggccaccacctcgcggcggcggccatcgtcggccacgacggtgccgcctgggcgcagagcacggcgttccccgagttcaagaccgaggacatggccaacatcatgaaggacttcgacgagccagggcacctcgcgccgacaggcctgttcctcggacctaccaagtacatggtcatccaaagcgagcctggtgccgtcatccgtggcaagaaaggatcaggaagcatcaccgtgaagagacagggcaggcactcgtcgtggcatctacgacgagccgatgacgcctgggcagttgcacatgggtgtgggaaaggcttggcgactaacttgtttgacagggn

SEQ ID NO: 94130 - DNA, 559 bp, Zea mays
  unsure (1)..(559): unsure at all n locations
agtcaggcgttgnngctgactgccgcatacgcacctgacgtaccggtccggaattcccgggtcgacccacgcgtccgttcaccttcgaggccggcaagacgtaccgtctgcgcgtctgcaacaccggtatcaaggcggggctcaacttccgcatgcagggccactacatgaagctggtcgagctggagggctaccacaccctgcagaacacgtacgactcgctcgacgtccacgtcggccactgcctatacgcgctcgtcgacgcctaccagagacccggccactactacatggtggcctatacgcggttcatccacgacgccaagctcaagtccgtcgttatcagctacagactgctcagtgccacgctctgcgccaaactattccgatccactgatcactctgagactttatcaattacgcatgcaatgtgcctgaatgatgcactgattttttggctcgatctcacttaccagggtgatggaatcaattactaactatgtaattatgccggttactattgattcgggacaaaccaaataacattaaaagggttggt

SEQ ID NO: 94131 - DNA, 575 bp, Zea mays
  unsure (1)..(575): unsure at all n locations
nctatggagcggtntgttcgtatntccgtgagtatattgtactgcttgtaccggtccggaattcccgggtcgacccacgcgtccgctgccatcctctccatcacgaagatggcgttcatcagcaatggcccaatggaaggcgccggccttgcccggcctgttggggtcccaatggtgtcggcttgccggccccccggcgccggtgccggtgccggaggggcgcccgtcggttccggcgggtccgctggacatcgcgcagctgggcgccaagggcgacggcaagtcggacagcaccccgatgatcctcaaggcgtggaagaacgcgtgcgaggcgacgggggtacagaagatcgtcatcccgccgggcaactacctgacgggcgggctggagctgaagggcccctgcaagtcctccatcatcatccgtctcgacggcaacctgctcggcaccggcgacctcagcgcgtaccaaaggaactggatcgagatcgagaacgtcgagaacctgtccatcaacggccacggcaccatcgacgggcagggagccctggtgtggagcaagaaccagtgccagc

SEQ ID NO: 94132 - DNA, 549 bp, Zea mays
  unsure (1)..(549): unsure at all n locations
atgggcagctgctagaatgtaggaagggatgtaactgctgctaccggtccggaattcccgggtcgacccacgcgtccgcccacgcgtccgcggacgcgtgggcagccgaactagttcacagattgagtgttctttggaatgtcctgtagtctgttcgatatcactgtacgactcttgtatggaagcaacagacagtgatcataaacctgtcaaatgcgtgttcaatttagatattgctcatgtggacaaacaaacaatgaggcagaagtatggagaaataatgagttcaaataaggaagtgcttgactcacttcagggcttggaggctttgcctgaagtagatatcagcacgaatgacatcatgctgcaagatcaaaacccttntgttgtgaaactgcattacagaagtacaaaaaaagttggcttggtttgagatcattggtcagacacccatgtcatcttgcacaagcttctcaaggttcccttcttggcttgaaggttcttccgcagtccgcattatttcttccagaccatctggtgaaatgacct

SEQ ID NO: 94133 - DNA, 655 bp, Zea mays
  unsure (1)..(655): unsure at all n locations
aggggacggtgctgagcatgacatagcatcgtagtgcatctaccgcgtccgtgaattcccgggntcgactccacgtcgtcacgtcccacagccgtccgctcactgcagccaccacgcacgcaagcgtcaacgaacagaccagcgtcgcgtaaaatagagtgaagagcgcgcagcatgaggatcatacagctcgagcatcttgggtgctacgccgctcggcgctagtcggcagggcactcgaccacacagcgtagacggatagcagaagaaagaaggagatgcgagctcgagagtcggcgaaggacggccagatgctgaaggaagcatccaccgactgagcttctgctcagaccgctgagcgaagaggcaagaatcgtgacaggacctaggtcgtcgagcaactgagtacctgcgcatctataccaggagtccaagcctgaatgctgtaaccgcatggatccactagcaaagggcatagttgcaccgaagcatcaatggcagtcacgggagccatgaccattgaaatggtcttgccatggaaggatgtgcngacnaaggccgtaccagtggcgtaccgtcgtgctgaagggcagccaacagacctgcaagcgtacacccttcngacgaaaggagagacatactcgcagccgtcatt

SEQ ID NO: 94134 - DNA, 539 bp, Zea mays
  unsure (1)..(539): unsure at all n locations
tggagcgggtagaatgttaggtgggggaaatgtataccggtccggaattcccgggtcgacccacgcgtccgcccacgcgtccgaaaagtttcatcagtgtagcaatggacattgatcctgaatggaagatgatgaaacgtgacctcggtcgaattgagaaatgggttatccgtaatgcatttgatgatgaggagaggccctatttacctaagcacattctctacaggcaaaaggaacagttcagtgatggtgttgggtatagttggatcgatggattgaaggaccatgccagccaacatgtctccgattccatgatgatgaatgctggctttgtttacccagagaacacacccacaacaaaagaaaggtactactacagaatgatattcgagaaatctttccaaagcctgcancagggtcaactgttctggaggtccaatgtgggctggaaaattgccaagcttgtggattggatgcaatcctggtccaagacccttgaccttcttggcgtgcttgctttggtggtcacgatgctgcgt

SEQ ID NO: 94135 - DNA, 558 bp, Zea mays
tgttagtgcgatccactgacaagcagactaacgacctgctctaccggtccggaattcccgggtcgacccacgcgtccgtgcccatgttcggctgcaccgacgccacgcaggtgtacaaggagctgcaggaggccatcggcgcgtacccggacgccttccaccgcgtcatcggcttcgacaacgtcaggcagacgcagtgcgtcagcttcatcgcctacaagccccccggcagcgagtagagaccgtggctagatcgaccaatggccatgtctctgcctgttgatcggatcaccttcttgcattggttcctctctctctccctccttgtttttccctttatctcatcatttctttgctactgcatgcaatggttccttttgcttccaacaattctcctgctgatgtatccagcatggcatcatccatctacaattacgtacgtagtgcaacgactgtcgattcgttgggtgaggaacatatatgtgaatgcaagctccggctaccatacatgtgtaatgggtaatagatatatatccaaaactgcccaggcgccgacag

SEQ ID NO: 94136 - DNA, 556 bp, Zea mays
  unsure (1)..(556): unsure at all n locations
tgtcgggtggtgtgccagcntccccgctatgatagtagtgaccgntaccggtccggaattcccgggtcgacccacgcgtccgatgtctgtctagcatgccgagctgactacgtcctagctagcgcaacgacgatggccaccgcgctctccttcaacgccctcgcagtggccgcgctcctgtccgtggtgtccgtcgtcacctacggcgctcgcgcacagcagcagcccagccacaacgccttcgagtcgtcgcaggacaggtnccttgtgtcctacagcagtggctggctgcccgccaaggccacctggtacggcgcgcccaccggcgcccggcccgacgacaacggtggtgcgtgcgggttcagggcccaaccagtacccgtctcgtcattactcctgtgcaacgagccaatttaaaggacggaaggcttgggctcatgctatcagatacgggcctccggagcaacaacccgcctggttcggcgtgccggagaccgtgatcataaccgcattgactactaccccgtggccaataccacttgaccttgacggacgg

SEQ ID NO: 94137 - DNA, 568 bp, Zea mays
  unsure (1)..(568): unsure at all n locations
tgttgagtggtntcaatgagnctcgacgtatatgcattgctctaccggtccggaattcccgggtcgacccacgcgtccggcgcgatgcactcgatcagtctctatagttcccccggcgtactacgcacacctggcggccttccgtgcgcgccactacatggacgatgacctctccgaccaggggtcgtcttcagtggcgagctctcgcatgaaagatggcgctgttccggtgaagcagctgccgaaagtgatggagagcgtcaagcagttcatgttctactgctgaaggtggcctttgcaggaaggaccgtcatcgacacttttgttgccatgaaatgaatcgagtaattctgggttggtgtaactatggtgaagtaaccctgaagggcgggccgcacgacctccaaatcatattttgggcctggcgagtcttctatccaaaactcgtcagaaaatgccttttatttttggtggactttcttcgtagaagtccaaggcaagtgcctgtgattttgggggttttggagggtggcacccttgtggtcatggcttttgaaatttctgcttt

SEQ ID NO: 94138 - DNA, 547 bp, Zea mays
  unsure (1)..(547): unsure at all n locations
agtgagcgtggtgtgaattgatagtgggggggaagtgatacctcnccggaattcccgggtcgacccacgcgtccgatgcagtatacttgtaaatagcttggactggtcgaaacttagaccaaatctcccgtggcttgtagaatcgggaggatgtgttttgctggattcttgtattattcttcagttcctttatttccattatcggaaacgaagggagccttcggatgagcacgacaacgcagacaaagcctgactgatatagaaactactgtttcttcttcggctcaaagaattgaagctgaaatgggtatcgataccgacctgcctnctacaacgggctctggatagcagcagcatcgttgttacctgaagatttggagcgtcgtttcactgggtgctgctttggagggtacttctcaccgcgtcatgtccctgtgagaggcttgtgaaactatnattgtctcgtagtgtccaaatgtcttggttttctattggattatatcagatatttggatgtggctggtcttgctttggtttatattctttt

SEQ ID NO: 94139 - DNA, 544 bp, Zea mays
  unsure (1)..(544): unsure at all n locations
agcgcggggnnnncctganatgactgtcatcgtactgctctaccggtccggaattccgggcacgcgtccgggaggggagccccggacggagaagagaacagaagaaaccccgcggccaccccttcctgcctatattgctctctctgtcttgcgcgacagggagagaccagcgccaacacctccggtttcttgattgggtggtgatcggtgaaggaaggagaaattaagatgagcctcttcgggcttgggagcaagaatcagaagacgttcaggcctaagaagaatgcaccgtctggcaacaagggtgtgcagctgaagaaacacatcgatgcaaccttaggaagcggngaattgagggatgctgtccgattgccaccagggggaggatctcaatgaatggctaggctgtaacactgttgatttctcaaccaagtggaccatctggattgtactctaatggaggtcttgacaccagcttcatggccaacaatgtcagctggaccaaaagttgagtatagatgggcccatggggtgcagatcagaa

SEQ ID NO: 94140 - DNA, 544 bp, Zea mays
  unsure (1)..(544): unsure at all n locations
acggtnctgtcgctgagagcgatcgcactgctcgtaccggtccggaattcccgggtcgacccacgcgtccgcggacgcgtgggcggacgcgtgggcgaccccaagtcccacgagggcctggacctcaacaaggtcaccaccagggaagtcatctccaaatacggattggaggatgatacggtggactttatcgggcatgcgctagcacttcaccgggacgacagctaccttgacgagcctgcaatcgacactgtcaagaggatgaagctctatgcagaatcactcgcacgctttcaaggagggtccccttacatctaccctctatacggtctgggagagctccctcaggcctttgcccgcctgagcgctgtttacggtggcacgtacatgctgaacaagccagaatgctaggtcgagtttgatgagagtggaaaagcgtatgggagcacttcttgaaggggagacccgccaagtgcaagaagatcggctgcgatccttcgaatttgccagacatggtgaagaaggttggaagggtggccccccc

SEQ ID NO: 94141 - DNA, 538 bp, Zea mays
  unsure (1)..(538): unsure at all n locations
atgggctggtgctgtcatagaatgggacagtactgtatacctcgtccggaattcccgggtcgacccacgcgtccgccgaggaggatcccgacgcctccgctgccgagggatgggtggacgagctccggcgactgcgcgtcgccgagctccgtcgcgacgtcgagcgatgcgatctctctatcgggacgctgcagtcaaaagtgaaacggctgaaagcggagcgggagcagagagcctccggcgaggctgtgagcgaccacgatcgcctctcaagcgaggagcccgggtgctcatgcagggagtcgaactccacagatctgaagccgcccaaacatcccagccagctaggcgacgggtctaaggaggagaaggttgcgaaacaggaagcgtccgttgagtcggcgggcgattccaaagacagcagcgaagtgcggagctcggcgagcttgtgcccgcggcggcgtggaaagcgggacgctgaaaagangangcngccgaggcngaggcatncaagtnnctctcggtaactttctgctgg

SEQ ID NO: 94142 - DNA, 544 bp, Zea mays
  unsure (1)..(544): unsure at all n locations
gcggtnnntntcgctgagatgcatagccatngcactgacgtactggaccggaattcccgggtcgacccacgcgtccggtgctctagctgctgggcattcgtgacggcggcgacgatcgagagcatcaccaaggtcacgacagggaggctggtgtcgctgtcggagcaggagctgatcgactgcgacccctacgacggcggctgcaacctgggctacttcgtgaacggctacaggtgggtgatccagaacggcgggctcaccaccgaggccaactacccgtaccaggcgcggcggtacgcgtgcagccgctccagggccgcccagcacgccgtcaccatcttcgactacgtgcagctgccggcgggcgagggccagctgcagcaggcggtggcgcagcagcccgtggccgcggccatcgagatgggcggcagcctgcagttctacagcggccgcgtcttctcggggcagtgcgggaccaggatgaaccacgccatcaccgtcgtcggctacggcgccgacttcctcctgggccttaagtactggc

SEQ ID NO: 94143 - DNA, 544 bp, Zea mays
  unsure (1)..(544): unsure at all n locations
gagggtggtctanaatggatgagatttgattgtactgctctaccggtccggaattcccgggtcgacccacgcgtccgcccacgcgtccgcgggaggcgagagtgcgtgcgtgcagccacaggcaggcgtcggcgccatgtcttctttcaccggcacgcaggacaagtgcgcggagtgcgacaagaccgtccacttcatcgacctcctcacggccgacggcgtcacctaccataagacatgcttcaagtgcagccactgcaaagggatcctctcgatgtgcagctactcttccatggacggtgtgctgtactgcaagacccacttcgagcagctcttcaaggagaccgggagcttctccaagaacttcacgccaggtggcaagtcttcagacaagggtgaactgacaagggcccccagcaagctatcatctgcgttttctggtactcaggataagtgtgctgcttgccagaaaacagtgtacccgctggagaagttaactctggaaggcgagtcctaccacangagctgcttcaagtgctcgcac

SEQ ID NO: 94144 - DNA, 536 bp, Zea mays
tggagtgtgctgcgcctgctatgcacgtatcgtagctcctgtccggaattcccgggtcgacccacgcgtccgaccccatcttgcaacagactatcgatggcaaagtactactgtaacatctgtaaattttttgatgatgaaaggactgtgtaccactgtccgttttgtaatttgtgtcgtcttgggaaaggtcttggtgttgatttcttccattgcatgaaatgcaactgctgccttggaatgaaattaactgagcacaaatgtcgggaaaaagggctagagacaaattgtccaatatgctgtgacttcctatttacatcaagtgccgcagtcagagccctcccttgtggccacttcatgcattcagcttgctttcaagcatacacttgtagtcactacacttgccctatctgctgcaaatccttgggagatatggcggtttattttggcatgcttgatgccttgttggcggctgaagagcttacggaggaataccgtgatcggtgtcaggatatactttgcaatgactgtgagag

SEQ ID NO: 94145 - DNA, 544 bp, Zea mays
  unsure (1)..(544): unsure at all n locations
tttggtngntnccgctggtcacgccctgcatcgcactgacgtaccggtccggaattcccgggtcgacccacgcgtccgacttctccgcacgtcgcgccgtccgcgtttgcgaccaacccggcggtgggggcggcgtcaccgccactcctcgagccgctcccgctcctccgcgacgtcgccgccgcagaccgtccgggcctcatcctccgcaagctccgcctcgtcgcggcgctcttcgacctctcggactcgctcaagcacccgcgagagaaggaggccaaacgccaggcgctcctcgagctcgtagattacgtgcaggctccagctcaggccgcgggcgccaacgcgcccacgcgccttccggaccacgtccaggaggcgctagtccttgccatctctgccaacatctntccgccgctgccacccgcgctgcacgagtccgccgtcgcgatcgaccccggcgccgcgcccgacgacgacgaggagccatacctggacccctcctggccacacctncagctcggctatgagctccttcttcgat

SEQ ID NO: 94146 - DNA, 542 bp, Zea mays
aggtgtgtgcgctgtccacgtacaagctaggtatcgtactgctctaccggtccggaattcccgggtcgacccacgcgtccgcccacgcgtccgggttgacggcaaagcaagtccttgagcacccttggctcaagaatgctgagaaggcttcaaatgtgtcactcggagaggttgttcggtcgaggctgaagcagttgtcgtctatgaacaagcttaataagaaggcacttggagtcgtcgccatgaatttaccgatggaagagattggcacattcaaagagatgttccatacaatggacaaaaacaaggacggtagtttgtcacttgaagagctgaaggagggttttcggatgaacgatcatcctgcttcagaggaagagataaagatgctgttacaagcggtcgatatacattgaactgacacattacattgtgaggaatgcgtgacagtcttgcttgacattagccagatgaggcatgacgagagtttacctagagctttcgagatctttgacaggtactacaatggattaactgaataa

SEQ ID NO: 94147 - DNA, 537 bp, Zea mays
  unsure (1)..(537): unsure at all n locations
aggaggtgctgcgctttcacgtcgggatagcgtgacgtactcggtccggaattcccgggtcgacccacgcgtccggttcacgccacaggcaaggcacagaggcttgtgagggagagcgaggagcggaggaggacatggtgcacgtgacgctggaggtgctgctcgttggggccaagggcctcgagaacaccgattacctgtgtaacatggatccgtatgcaattctcaagtgccgttcacaggagcagaatagcagtattgcaactggaaaaggaactacccctgagtggaatgaaaactttatcttcactgtgtctgaccggacaacagacttggtaatcaagattatggacagtgatacaggcacagcatatgactctgttggtgaagcaacgattccattggaagcaatgtatactgaaaggagcattctcccaacactctataacgttgtgaaaggcgtgaaatactgcggagaaattaaagttggattcacattcactcctttagatactcttcaagcgggacttccatatn

SEQ ID NO: 94148 - DNA, 538 bp, Zea mays
  unsure (1)..(538): unsure at all n locations
agagctgtntnaatgaatgagagtttatgtactgctctaccggtccggaattcccgggtcgacccacgcgtccgcggacgcgtgggttcaaatggagaatatgtgaaatctgggctttgtgtgctggagaaatggattgtggacactgaagagcatgcaggtgcagcttgggatgagctgcagttcattaggcaagcggttgactttctgatcattccacagaaaagcaaaaagaccattgagcagattaagaaaaatatttgcccggcattaagtgtgagacagatatatcgcttatgtacgatgtactgggacgacaaatatggtactcatagtgtatcagctgaggttgttgccagaatgagggacatggtgagtaatgacatgcaaaatcctgtctctaattcatttcttttagatgatgacttaagcattcctttcacaaccgaggaaattgcagagcaagtaccagatgttgacatgtcaaacatcgaaactcccgcatctcttcgtcatgttcattctgctcagttcttgg

SEQ ID NO: 94149 - DNA, 543 bp, Zea mays
  unsure (1)..(543): unsure at all n locations
nagggagggctangttgtaagcggatttatggattgctctaccggtccggaattcccgggtcgacccacgcgtccgctctcaaacaggattgggagggagagcctcaaggcgggggatcatatctactcctggagggcggcgtgggtctacgcgcatcacggaatatatgtgggcgatgataaggtgatccatttcacaagaggaagaggacaggaggtcggaacaggaactgtcgtcgatattattcttgtgagttccaccccaaaacgaagcaacacgccttgcccggtgtgcaccgacgaaaccagcgacagcagcacagagacgaacggcgtggtatcctcctgcctcagctgcttcctagctgggggtgctctctaccgtttcgagtacgcagtcaacccggcgctcttcctcgccaaagcgcgaggagggacgtgcacgctcgctccctctgaccctgacgacacggtggctcgccgcgccagatacctgctgagcaacggtttcaagtgctacaacctgttcaagagcaactgcga

SEQ ID NO: 94150 - DNA, 581 bp, Zea mays
  unsure (1)..(581): unsure at all n locations
tggaggctactgcgccagccaagcaaagttcnggtactcccgtccggaattgccgggtcgacccacgcgtacgcaggcggacgccccgagaaggaactagcgacagctcagaggcgccgagcacttatgccacagacagggcttgtaccaccatgaactaaagccctagaacctcctgagccacgagcacaggaacctgaaggtgtgcgacttccatctgagcgcgctcagggagtgccagaagcaggacggaatgctgcacaccagctgcgggagccccgcgtacgttgcgcctgagatcatcaacaggaagggctacgacagtgccaaggccgacatatggtcctgcggcgtcatactgttcatgctactggtcggctacctccagtgtctaggactacaagcatggtgtacgatgtacgcgcatggatcaagcagactccgacgttcaagtgcctgccgcagtgggtgcatgccgcctgagcgtcccgggcggatggattgccacaacgcattttttgaaagccggaagccccaaaccagcaatggaatcaccgatatcgaatgaaggccattgtccn

SEQ ID NO: 94151 - DNA, 551 bp, Zea mays
  unsure (1)..(551): unsure at all n locations
tatggtgcttgctacggttagnntactaagtactgactgtactcgtctcgaattcccgggtcgacccacgcgtccgggtcaatcctcatacacatcaacttaagatttgcgattttgggagcgctaagaaattggggcgtggtgagcctaacatatcgtacattagctcgcggtattatagggctcctgaactaatatttggagctacggagtataccactgcaatcgatatctggtctgttggctgtgtagtggctgagcttctgattggtcagtctcagtttcctggtgaaagtggtgttgatcatctggtcgagattatttggatatttggtactactactagcgtggtcattagtggcactagtccatgttatctcgtatctattgaccctgttttataatcttatcctttactcatgcattttcgtttagcttctgtcttactgtacccttttattttgatgttttggcttctttttatccttatttatatagtatatagcacttgtttgtatatgtattttatctttataatatttagttttttg

SEQ ID NO: 94152 - DNA, 541 bp, Zea mays
  unsure (1)..(541): unsure at all n locations
tggagtgcgntgcgatgaaaggggggtatatggatctgctgtaccggtccggaattcccgggtcgacccacgcgtccggttcgaggtggaccaagagcagaaggccagcaactcgcggttcatgacccagaaaccggcgtcggcgatagtgtcaaagctggagcagatcgctgagacagagcgcttcatggtgaagaaacaggacgggctggtgaagctgcaggggtccaagcaagggaggaaggggcagctcgcgatcgacgccgagatcttcgaggtgacaccggcctttcacgtcgtcgaggtgaagaagtcggcaggcgacacgctggagtatgagatgttctgcagcaagggcctaagaccttcactcagcgacatctgctggagcagccgatctgaggagaacatggctccttcagtggttcagccatcacaattggagccatcctcttagaccgtctccgacagtttactcacccctcttagtcgattgttatttaagtgcagtctcttcggagatgcaattacagtccatcct

SEQ ID NO: 94153 - DNA, 545 bp, Zea mays
  unsure (1)..(545): unsure at all n locations
naggcccgcnnnttccatgactaggacgtcgtagcactgctctaccggtccggaattcccgggtcgacccacgcgtccgaaactgatctgccaagcatatttttcttgcccaccatggttttcttctggagcgaagaagtttattaagcgcattctcgatcctaatcctgatacgaggataacaattgcagaaattttggaagatgaatggttcaaaaaagactataaaccaccacgttttgaacaaggtgaaggtgttagccttgacgacattgatgctgcattcaatgattcagaggaccgtcttgtggcagagaaaagagagaaaccagaatccatgaacgcatttgctcttatttcgaggtcgcagggtttcaaccttggaaatttgtttgagaaggagatgatgggaatggtaaagagggaaacatctttcacgtctcaatgcacagcacaggagatcatgacaaanatagaggatgcatgtgggccacttcgtttcaacgtgcnganacannaatacaagatgaaattgaaagtgacaa

SEQ ID NO: 94154 - DNA, 539 bp, Zea mays
  unsure (1)..(539): unsure at all n locations
cgacggntgctagtcctagctggtgaatgactgatctaccggtccggaattcccgggtcgacccacgcgtccgcccacgcgtncggcacgcaagtgtcaagagacgaaacggtcgacatggctcgcacgcaatctgccgtagcggtcgccgtggtggccgcggtgctgctgctggcagcggcggcgacgacctcggaggccggcatcacctgcgggcaggtgagctccgncatcgcgccctgcctctcctacgcccgcggcacggggtccggcccctccgcgtcctgctgtagcggcgtcaggaacctcaagagcgccgncagcaccgncgncgacaggcgcgccgnctgcaactgcctaaagaacgccgcaggggcgtagcggnctcaacgccggcaacgccgcaggaatccttccaatgcggcgtcagcatcccctacaccatcagaaccntcaccgactgttccagggtgaactaaaacctagaccacgcgcgacgaccgccgcttgatcgatcgaccaaccattccgccgcggcc

SEQ ID NO: 94155 - DNA, 540 bp, Zea mays
  unsure (1)..(540): unsure at all n locations
cgacgcgctgcttgtccatgcaaagcatagtattgcatgctaccggtccggaattcccgggtcgacccacgcgtccgctacaaccagatgggcgacgtgccccccgccgttaacgggccactccatgtcatccccaacgtcatgaccgccgagttccggaccttcatcgagatcgtcttcgagaaccccgagaagagcatagactcccttcacctcgacggctacgccttcttcggcgtcgggatggggcctgggacgtggtcgccggagatgaggaagacgtacaacctactggacacggtgagccggcacacgatccacgtgtacccgcggtcatggacggcgatcatgctgacattcgacaacgcgggcatgtggagcgntcggtccaacgtctgggagcggtactacctcggggagctagtctacatcagcggcatctcgccggcccggtcgatgtgcgacgagtgctacatgctcgacaacgccctccgcttcggcagggccctggggcttccgttgccgccatctcatgccccc

SEQ ID NO: 94156 - DNA, 537 bp, Zea mays
  unsure (1)..(537): unsure at all n locations
tggacggcgctagcgccgtccacgctcngcatgcactgacgtaccggtccggaattcccgggtcgacccacgcgtccggcggcagcgcccgacagagcgagacgcagcggcggacgaggggcagaggcgagcgcggcctgcagtccctgctaccatggacactttcttcctgtcgcacggctcgcccacgctctccatcgacgacaacatcccggcgcggcacttcttcaagtcgtgggtgccggcgaaggtcgcgggcgaccaacccccgcgcgccatcctcgtcgagtcgggacactgcgacacgggcacgccggaggtcaacgtcatccaccgcagcaacgacaccatttacgacttctatggcttacccaagcccatgtacaagctcaagtaccccgttccgggcgccgcacacctgttcctgcggaccaataggctcctgtagcaagccgagttctgtcccgctattgaagactactgtcatgccctggaccacggcttctgtgtgccgctgagctttttgatcaaacctcg

SEQ ID NO: 94157 - DNA, 543 bp, Zea mays
  unsure (1)..(543): unsure at all n locations
tagaagcggcgctgngctgcctacgccgactacgcactgacgtaccggtccggaattcccgggtcgacccacgcgtccgcccacgcgtccgagcgctgctgcctcgcccccgccgcgtcgtcgcgggtccccggggtcggttgctgctgcgctgccagcgtcatggacgggggatccggcaatgcctccagcggcggagcggcggtgtgctgctactacgcgctcctcggcgtccgcaagagcgcctccgccaccgacatacgcaccgcgtaccggaggctcgcgatgaagtggcacccggaccggtgggccagcgaccccggcgcggccggcgaggccaagcggcggttccagcggatccaggaggcatactcagttttatcggacaaagggaagaaggccatgtacgacgccgggctcttcgatcccctcgacgacgacgacgaccaggatttctccgacttcatgcaggagatgctggtgatgatggataacgtgaaaaacgagaagccggacacgctagaggacctgcagaagatgctg

SEQ ID NO: 94158 - DNA, 573 bp, Zea mays
  unsure (1)..(573): unsure at all n locations
agagcgatgcttgtcccacncctgaaatgcatgcctctaccggtccggaattcccgggtcgacccacgcgtccggtgaagcaagcagcacacgagacgatatagagggagggatcatggctctcttccgtgccgccgcgtcaggagggttcgcgctgatccttctcgcgtgctgcagcctcatcatgctggcggcggcgtctggcggcggcggcgtggacgacgacggcgtcggtggtgacaggctgatgatggaccggttcctcagctggcaggcgacgtacaaccggtcgtacccgacggcggaagagaggcagcggcggttccaggtgtaccgccgcaacattgagcacatcgaggccaccaaccgggcgggcaacctgacgtacacgctcggcgagaaccagttcgtcgacctcacgganggaggagtttcctggacctgtacacccttgaaagggggatgccccgtnccggccgtgaaccgctcggccaaggaaaccgggcccaaccgtctttcttcctttcggccaaccggcccttggaacccctcccgaaccaaggcgtttgaaat

SEQ ID NO: 94159 - DNA, 539 bp, Zea mays
cgaacggtgcttagtgcagctccgattctcatcgctctaccggtccggaattcccgggtcgacccacgcgtccgcccacgcgtccgcccacgcgtccgtggacaatgtctactaccccatcatcatcgaccagaaggactgccccaacaacatctgcgtcaagtccggcgcctccaaggtggccgtcaacgacgtcgtcttcaagaacatacacggcacctccaacacgccggaggccatcacgctcaactgcgccaacaacctgccatgccagggcgtgcagctcgtcaacgtcgacatcaagtacaatggatccggcaacaagaccatggtcgtctgcaagaacgccatcggcaagtccatctgcttggcaaaggagctcgcctgcatctgaaccaattgactaacatgcatatattatatatataatcactctttcgaacctctgtctttctcacgtactctaaagtctccaccgaatatataatccgctggtatgtataatctttcttctttggatcatcacaaaaccaaccgcg

SEQ ID NO: 94160 - DNA, 537 bp, Zea mays
  unsure (1)..(537): unsure at all n locations
tggagtgtactgcgcctgctaagcattgtattgcactgctctaccggtccggaattcccgggtcgacccacgcgtccgcctgtggtctgctgagctctccaagctcgctgccaacgcgttcctggcacagaggatctcgtctgtgaacgccatctccgccctctgcgaggccaccggcgcgaatgtgactgaggtggcttacgccgtgggcaaggacacgaggattggccccaagttcctgaacgccagtgttgggttcggtgggtcttgcttccagaaggacatcctgaacctggtgtacatctgcgagtgcaatggcctgcccgaggtggccaactactggaagcaggtgatcaagatcaacgactaccagaagagccggttcgtgaaccgcgtcgtgtcgtccatgttcaacaccgttgccggcaagaagatcgccgtcctcggcttcgccttcaagaaggacaccggcgacaccagngagaccccggccatcgatgtctgcaaaggcctgcttggtgacaggcccaaatcaac

SEQ ID NO: 94161 - DNA, 539 bp, Zea mays
  unsure (1)..(539): unsure at all n locations
ggtggcnnntgcgctgaaagggatatgtatgcacngctctaccggtccggaattcccgggtcgacccacgcgtccgcccacgcgtccggaaaaaatttcttgagtttgaaaataaactgaagagactagaggagctggaaaaagaggcaacagagctaagagcggcaaattcaaggctgcagcaggagaatgcacatcttattaggcgactggaggttacacgcctaccccctgtacctaagcccaaaactagtaaaagcattggaggaggctgatcggttgaaacaagaaactgataggttggctaaagaggttgaacaacttcagagtggcaggtttgcagatgtcgaagaattggtatatctgaaatggataaatgcctgcctacggtatgagctgagaaacaaggatgccccatcagggaagactgttgcacgagatcttagcaagaccctgagccccaagtctgaatngaggccaaacagctgataatggaatatgccaatgtgggtgccgaggacagtcactttgggcatgtn

SEQ ID NO: 94162 - DNA, 539 bp, Zea mays
  unsure (1)..(539): unsure at all n locations
tgagactggttgtcacgaatgtgattgcactgctctaccggtccggaattcccgggtcgacccacgcgtccgcccacgcgtccggtggtggtctcagtcctcgcgcagccgggcaccaacatactgctcccgaggccgggctatccgaactacgaggcgcgcgcagggctgcacaacctggaagttcgccggttcaatctgatccccgagagagggtgggagattgacatcgacggtctggagtcgatcgccgacaagaacaccaccgccatggtcatcataaaccccaacaacccttgcgggagtgtctacacccgtgagcatttggccaaggtcgcggaggtggcaaggaagcttggaatactggtcatcgctgatgaggtgtatggaaatctggtgtttggggacacccctttcgtccccatggggtgtcttggccacattgcccctgggttgaccatangatcactgtccaagagatgggtagtgcctgngtggccacttggtttggtggnccgatgtgatcccaacagggtttt

SEQ ID NO: 94163 - DNA, 538 bp, Zea mays
  unsure (1)..(538): unsure at all n locations
tggaggtgctgacccagccagcatagtacgctctaccggtccggaattcccgggtcgacccacgcgtccgcccacgcgtccgagaagctgacggaggcgggcgccgacggggtcatgatcgacgtctggtgggggctggtggaagggaaggagccgggagtctacgactggagcgcctacaggcaggtgttcaagctggtgcaggaggccgggctgaagctgcaagccatcatgtcgtgccaccagtgcggcggcaacgtcggcgacgtcggcaacatcccgatcccgcagtgggtgcgggacgtcggcaaaagcaaccccgacatcttctacaccaaccggagtgggctgacgaacatcgagtatctcacgcttggagtggacgaccaggctctctttcatgggagaactgncattcagctgtatgctgattacatgaagagcttcagggagaacattgcagacttttttggatgctgggggtccgtgtggacaatttgaggtgggacttggcccttgttggcnaagatgaagtacc

SEQ ID NO: 94164 - DNA, 534 bp, Zea mays
ggagtgtgctagtccatgaaggcgaagttatgcactactcgtccggaattcccgggtcgacccacgcgtccgatcagataggcctgggagctacgcgtaggacaccttgacactactggcgagggaagcgctagaccggcgctcaactgacgcatggagcaggaactcctgcgctagaagtatgtgtgccgagctgttgatctgctgtggtgacactgaggacaccgaggaggtgctcgtgatcatgcggctcaactccatgctcatcaacatgatcatgtacaactgcaacgacatgatgatcaacgacgtcaatgtgacggtgtccggctacagcttcaacacggacggtatacacatgggcaactcgatcgacgtctacatcaccaacaccgacatcggcgtcggcgaccactgcatctacatcggccgccggatcgccaaggagaacatcaccggtatgacctgacgccccgacacggcatcatgcatgcgagcccacggcaaggacaggacgacaaggacgtagcgctc

SEQ ID NO: 94165 - DNA, 543 bp, Zea mays
  unsure (1)..(543): unsure at all n locations
aggaggctcgttgtcccagtcaacgatngtatcgctgtaccggtccggaattcccgggtcgacccacgcgtccgggattgcagcacttcatggtgacaaggatcaagcttctcgtatggagaccctgcagaagttcaaatctgggacgtaccatgttctggttgcaactgatgttgccgcacgaggtcttgacatcaaatcgattaaaacagttgtcaactttgatatcgcaaaagagatggatatgcatattcaccgaattggaagaactggtcgtgctggtgacaaagatggcacttgcttacactctgattactcagaaggaggcacgctttgccggtgaactggttcaaaagttgattgctgctggccaggatgtacccaatgaactcatggatctggctatgaaagatgtaaggatcagagcaaaacggggactccagggaaagttttgaagaaaggtggctaaggaaaaggtggccgtcgtggtggtgcctggcgcggtcgtggtgtgcctgaagtgattttggcctcggcatangt

SEQ ID NO: 94166 - DNA, 599 bp, Zea mays
  unsure (1)..(599): unsure at all n locations
atgagatgtnctggcccctcncattgtactatggtagtactcgtccggaattcccgggtcgacccacgcgtccgcccacgcgtccgcccacgcgtccgcccacgcgtccgcccacgcgtccgagatgatctgtagagactgagccttcctttgatggttaccacatatgaatatgaggagaagctatgcactgctttaactgttacagtggatgcaaaagatggcacaactactgtagtatctgccaaggacagggcataaacagtcatgactctagcattttcggactctaatcctgaggatctcaaccggcctggtcatattttatctttgaaatacacatatagtggtgatatgaaacagtctggacacaccgaggcctctgttaactcttgtcaatgctgtactggaacgacctatctgatgcttgaacttgagcggataatttgctggaatgatggtcacaataagggctgtaatggggccttgggccttaataagtagggctgtcgtttgtaaattgtgcttataaaaatggaagaaacgttctgtaataatcatttaatgcttattaacctgggaacttcgtaatttaagag

SEQ ID NO: 94167 - DNA, 537 bp, Zea mays
  unsure (1)..(537): unsure at all n locations
cgcagatgggttggccatgatggggtagtaacgtactactccactgcnctggaattcccgggtcgacccacgcgtccggcaagaacgagaaggacgcgtcgaacccgcccatgtacaacgtggaggccggcaagacgtgccggttccgcgtgtgcaacgtgggcatcaaggcgtccttcaacatccgcatccaggaccacatcatgaagctggtggagatggaggggtcccacaccatgcagaacgactacgactcgctggacctccacatcgggcagtgcctgtcgttcctggtgaccgcggaccagaagcccggcgactacctgctggtggcgtccacccggttcatcaaggagaagagcagcaccacggccgtgatccgctacaagggctccagcgccccgccgccggccaagctgccggagggccccagcgggtgggcgtggtccatcaaccagtgcaagtccttccgctggaacctgacggccagcgcggcgcgggccaacccggcagggtcgtaccactacgggcagatca

SEQ ID NO: 94168 - DNA, 544 bp, Zea mays
  unsure (1)..(544): unsure at all n locations
agaaagtggnntgccatgataagaagatgaagtactgctctaccggtccggaattcccgggtcgacccacgcgtccgagatggcgtgcacaaacaatgcgatgagagccttgttccttctggacctcttatggatcgtgcatggtgagaaggaagagtcaaagggcatcgatgcgaaagcgtccggacctggtgggtgcttctacatcaccaagttgggcgcctgcggcaatggcaagacagacagcacgaaggctgtgcatgaggcatgggcatcggcgtgcggcggcactgggaagcagacaatcctcatacccaagggtgacttccttgtcagacaactcaacttcacaggccatagcatgggcgacgtgaccatacatgtggatggcaatctgctggcgaccacggacctaaactagtacaaggaccatggtcattggatcgagattctacgtgtggataacctggtcatcacccgcaagggaaaccttgaccggcatggcccaaccgtgtggagcaagaaactcttgcacaaataattc

SEQ ID NO: 94169 - DNA, 547 bp, Zea mays
  unsure (1)..(547): unsure at all n locations
aggaacgtgcttnaactgagtgagagggtacagtatctgctgtaccggtccggaattcccgggtcgacccacgcgtccgagatggcgtgcacaaacaatgcgatgagagccttgttcctcctggtcctcttctgcatcgtgcatggtgagaaggaagagtcaaagggcatcgatgcgaaagcgtccgggcctggtgggtccttcgacatcaccaagttgggcgcctccggcaatggcaagacagacagcacgaaggctgtgcaggaggcatgggcatcggcgtgcggcggcactgggaagcagacaatcctcatacccaagggtgacttccttgtcggacaactcaacttcacaggcccttgcaagggcgacgtgaccatccaggtggatggcaatctgctggcgaccacggacctaagccagtacaaggaccatggtaattggatcgagattctacgtgtggataacctggtcatcaccggcaagggaaaccttgacgggcagggcccagccgtgtggagcaagaactnctgcaccaagaagtaca

SEQ ID NO: 94170 - DNA, 538 bp, Zea mays
  unsure (1)..(538): unsure at all n locations
tggtgctagtccctcactgcntcgtatcgctctaccggtccggaattcccgggtcgacccacgcgtccggtacaacctgctggacacggtgagccggcacacgatccaggtgtacccgcggacatggacggcaatcatgctgacgttcgacaacgcgggcatgtggagcgtgcattccaacatctgggagcggtactacctcggggagcagttctacatcagcgtcgtctcgccggcgcgatcactgcgcgacgagtacaacatgcccgacaacgccctacgctgcggcaaggtcgtggggctgccgatgccgccgtcctacgcccncgcgcgctaagacgacgaaggcctcgatttctcctcgtggtctgaccatgcaatccaaactcaaaagaacaaatacgaaagaagcgtagtgaaggggaacaaatgaatggatatatgtaatcttgagatgcatgccctctcagatcactgtactggggttctcaaaaaaatcattggaatgggagttatatatataactttatctcaccag

SEQ ID NO: 94171 - DNA, 529 bp, Zea mays
  unsure (1)..(529): unsure at all n locations
gattggnnnnnnnnngccgaggctcatggacttacgtaccggtccggaattcccgggtcgacccacgcgtccgggcccttgcaagggcgacgtgaccatccaggtggatggcaatctgctggcgaccacggacgtaagccagtacaaggaccatggtaattggatcgagattctacgtgtggataacctggtcatcaccggcaagggaaaccttgacgggcagggcccagccgtgtggagcaagaactcctgcaccaagaagtacgactgcaagatccttcccaactcgctggtgatggacttcgtgaacaacggggaggtgtccggggtcacgctgctcaactccaagttcttccacatgaacatgtaccggtgcaaggacatgctgatcaaggacgtgaccgtgacggcgcccggngacagccncaacacggatggcatccacatgggcgactcatccgggatcacgatcaccaacaccgtcattggcgtcngtgacgactgcatctncatcggccccgggacctcn

SEQ ID NO: 94172 - DNA, 530 bp, Zea mays
  unsure (1)..(530): unsure at all n locations
gggcgagtgctgngtacggagtcgaaagtactatgtaaccctctccggaattcccgggtcgacccacgcgtccggaagaagggcctcctgtctcctctcacttcctcagtcctcgtccgtctctgctccctcctggctctacctagctagctagccagccttcctgtagcgcggcagagatggctgcccctgcatccaccacggcggcggcggcggcggcgctgctgcttctgctcgtgtcgctcgccgcggcggcggacatgtcgatcgtgtcctacggggagcgcagcgacgaggaggcgcggcggatgtacgcggagtggatggcggcgcacggncggacctacaacgccgtcggcgaggaggagcggcggtaccaggtgttccgggacaacctccgctacatcgacgcgcacaacgccgncgncgacgcgggcgtccactccttccgcctcggcctcaaccgcttcgccgacctcaccaacgacgagtaccgngccacctacctcggcgccaggaccaggccgcan

SEQ ID NO: 94173 - DNA, 538 bp, Zea mays
  unsure (1)..(538): unsure at all n locations
gggggtgtggctgggactgatcgggatctcattgcactgctctaccggtccggaattcccgggtcgacccacgcgtccgataaagcatcgatcacgacaagatggcatgcacaaacaatgcgatgagagccttgttcctgctggtcctcttctgcatcgtgcatggtgagaaggaagagtcaaagggcatcgatgcgaaagcgtccgggcctggtgggtccttcgacatcaccaagttgggcgcctccggcaatggcaagacagacagcacgaaggctgtgcaggaggcatgggcatcggcgtgcggcggcactgggaagcagacaatcctcatacccaagggcgacttccttgtcggacaactcaacttcacaggcccttgcaagggcgacgtgaccatccaggtggatggcaatctgctggcgaccacggacctaagccagtacaaggaccatggntaatggatcgagattctacgcgtggataacctggtcatcaccggcaagggaaaccttgacgggcagggcccagccgtgtg

SEQ ID NO: 94174 - DNA, 530 bp, Zea mays
  unsure (1)..(530): unsure at all n locations
cgggaggtcngttcgaccgagaccgaatctctctgcactgctctaccggtccggaattcccgggtcgacccacgcgtccgagaccgtggccatcaagcagctggacaagcatgggttccaggacaacatggcgttcctgagcggggtcgccaagctgagcaagctccaccacgagaacctcgtcgacatcattggctactgcgccgacggagaccagcggctgctggtgtacgagtccgtgcccgccggcaccttagaagaccacctgttcgatctgccggcggacaagaaaccgatggactggtgcacgaggatgaaagtggcgcacggcgcggcacaagggctggagtacctgcacgagacagcgaacccgccggtggtgtacggggagttcaagggcctccacatacttctcgacgagaggtccacgcncaagctctccgacttcgggctcgcgcagctcggccaggcggggggcagcatgccagtggcgtcgcccatgatgggctccttcggctgctgcgcgccga

SEQ ID NO: 94175 - DNA, 548 bp, Zea mays
  unsure (1)..(548): unsure at all n locations
agttaattatttcagactggtgctaaacctacgtattatcccgcnatctatagtattgctcttccgttcccggatcgacccacgcgtccgcccacgcgtccgcatcgatcacgacaagatttcgtgcacaaacaatgcgatgagagccttgtgcctcctggtcctcttctgcatcgtgcatggtgagaaggaagagtcaaagggcatcgatgcgaaagcgtccggtcctggtgggtccttcgacatcaccaagttgggcgcctccggcaatggcaagacagacagcacgaaggctgtgcaggaggcatggtcatcggcgtgcggcggcactgggaagcagacaatcctcatacccaagggtgacttccttgtcggacaactcaacttcacaggcccttgcaagggcgacgtgaccatccaggtggatggcaatctgctggcgaacacggacctaatccagtacaaggaccatggtaattggatcgagattctacctgtggataacctggtcattaccggcaagggaaaccttggacggccaggcccag

SEQ ID NO: 94176 - DNA, 533 bp, Zea mays
  unsure (1)..(533): unsure at all n locations
ggagatggtgctntcgcatcgatcaagcaaggtgactgcattcactgacggaattcccgggtcgacccacgcgtccggtcagaaaatagtgggatcgagttgtttcactgcacgagcacatcctccggcgaccaccgggctccgtctccgtcctctagcgaccgaccaacgcgccgagcgaagatgtcgcggcagacgtacgtggacgagcacctgatgtgcgagatcgagggccaccacctcacgtcggcggccatcgtcggccacgacggcgccacctgggctcagagcaccgcgttccccgagttcaagcccgaggagatggctgccatcatgaaagatttcgacgagccggggcacctcgccccgaccggcctgatcctgggaggcaccaagtacatggtcatccaaggcgaacctggagctgtcatccgtggcaagaaaggatccgggggcatcactgtgaagaaaacagggcagtcactcatcattggcatctacgacgagcccatgactnccgggcagtgcaacct

SEQ ID NO: 94177 - DNA, 530 bp, Zea mays
gatatgtgtgtgtgtacgattaagcacgtcattgtcataccgctccggaattcccgggtcgacccacgcgtccgtgattatacagtattctgtctctatagattgtagctgcagcagtctgaacatgaaattaacgaacaacctcggtactgcttggccaggatcccggtgctttcaactagttagggctcgttcggttagctctcaatccatgtggattgagtgagattggatgagtttgaatcccaaacaaattaaacttaattttttccaatcccatctaatccatgtgtattgggaataaccgaacaaggctttactgttttatctgtccagcagtaccgaggttgttggttaatttcatgataagagagcgagtttcagcaatgttcgtatactgattatacagtattctgtctctatagattgtagctgcagcagtctgaacaaacatcaatgggaatggtcacgggatcaactcctggtgtggatcctcgacaaattggcagaatatgtggcagttttaacaa

SEQ ID NO: 94178 - DNA, 539 bp, Zea mays
  unsure (1)..(539): unsure at all n locations
nggggntaactggtggaccgggacggcacagtactgctctacccgtccggaattcccgggtcgacccacgcgtccgcgatcacgacaagatggcgtgcacagacaatgcgatgagagccttgttcctcctggtcctggtctgcatcgtgcatggtgagaaggaagagtcaaagggcatcgatgcgaaagcgtccgggcctggtgggttcttcgacatcaccaagttgggcgcctccggcaatggcaagacagacagcacgaaggctgtgcaggaggcatgggcatcggcgtgcggcggcactgggaagcagacaatcctcatacccaagggcgacttccttgtcggacaactcaacttcacaggcccttgcaagggcgacgtgaccatccaggtggatggcaatctgctggcgaccacggacctaagccagtacaaggaacatggtaattggatcgagattctacccgtggttaccctgtcatcaccggcaaggaaaccctgaccggccaggccccagcgtgtggaagcaggacttctg

SEQ ID NO: 94179 - DNA, 533 bp, Zea mays
  unsure (1)..(533): unsure at all n locations
tggtagtgtcgtntgcactgagacagactccctacgcactgtctgtaccggtctggaattcccgggtcgacccacgcgtccgcccacgcgtccgcccacgcgtccgcggacgcgtggggatgtccaaacatactgggtctccgatcgaagagtgccgcccgaagatctggctgatggactccaagggcctgatcgtggtgtcacggaaggactcgctgcaggcgttcaagaagccatgggcgcacgagcacgagcccgtggcaaccctgctggaggccgtgcagtccctgaagccgacggtgctgatcggcacctcgggcaagggcggcaccttcaccaaggaggtggtggaggcgatggcgtcccagaacgagaagccggtcatcttcgcgctgtcgaacccgacctcgcactcggagtgcacggcggagcaggcctacacctggaccaagggccgcgcggtgttcgcgagctgcagccccttcgacagcggtgagctggacggcaaggtgctggtgctcgggcagtccacn

SEQ ID NO: 94180 - DNA, 535 bp, Zea mays
  unsure (1)..(535): unsure at all n locations
tggtaaaggtagatagatagcantgtatagcatctgctctaccggtccggaattcccgggtcgacccacgcgtccgcaaatttcacgaagatcttagaattccatcttcaatatttgttaagtgtgatgttagtaatgcagataatcttgctgcttgttttgagaagcatgtacagacatacaatggactagatatctgcatcaactgtgctggaattgctaataaaacactagtttatgatgatacatctgatggaactagaacatggaggcatgctgttaatgtgaaccttgttgctgtcattgatggtactcgcattgcaagtcaaataatgcgaaaccaaaagaagcccggtgtcataataaacattggttcagcggcaggtctttatcctatgttcctcgatcccgtatatagtgcggcaaaagggggtgtggntatgtttacaagatcactttctncattgaaacgccatggtggtcgtggcaatgtgctcttcccaaagttgtccaaaccaatattgccgaacaaatg

SEQ ID NO: 94181 - DNA, 527 bp, Zea mays
  unsure (1)..(527): unsure at all n locations
tgtgcgtattgattggaaccagcaagtatatgtatacccctccggaattcccgggtcgacccacgcgtccgcggacgcgtgggcaagaattgccaacatattcttggacaatcttgttaacagagttttaaggtttcccagcagagaagagcgcgtgcaaccaccacattcatataattaataagcaaggtttagagaagaggcaacatgggcacaaagatgaagaaggggatcctgaagccgttccgctatatctcaaccatcatggatggtaaggaggctgaaatgcaaattgggttcccgacggatgtaaaacacgtggcacacatcggttgggatggtcctggctccaccaacaacaataacaacaacagcaacaacaatagtggcggagcacctagctggatgaaggattaccactcggcaccgcttgactcgtcctcttttaggagtgagagntggggcacggctgctgcaaatccctgggcttctcaagagatagtcatggatgggagcaagcgtcgaaa

SEQ ID NO: 94182 - DNA, 536 bp, Zea mays
  unsure (1)..(536): unsure at all n locations
tggttgaagtgctatgcttcnncagatctgcatggcttactcgtccggaattcccgggtcgacccacgcgtccgcgacaagatggcgtgcacaaacaatgcgattagagccttgttcctcctggtcctcttctgcgtcgtgcatggtgagaaggaagagtcaaagggcatcgatgcgaaagcgtccgggcctggtgggtccttcgacatcaccaagttgggcgcctccggcaatgtgcatgacagacagcacgtatgctgagcacgaagcatgtgcatcggcgttcggcatgcactgggaagcagacaatgctgatacccaacggtgacttacttgtctgacatctcaacttctcaagcccttgcaatggcgacgtgaccatccacgtggatggcaatcagcttactacatcaaccttaccagtacaaggactatggtcattctatcgtagaatacgagtggatacactggttatgcacatccctggacttcttgagagataggcatcaatgagcaagcttggataaccttcttag

SEQ ID NO: 94183 - DNA, 540 bp, Zea mays
  unsure (1)..(540): unsure at all n locations
ngttntntttagggagtggtggtgttagggggatgggggggcagatggaatcgctccggaattcccgggtcgacccacgcgtccgagcgcgtgcaaccaccacattcatataattaataagcaaggtttagagaagaggcaacatgggcacaaagatgaagaaggggatcctgaagccgttccgctatatctcaaccatcatggatggtaaggaggctgaaatgcaaattgggttcccgacggatgtaaaacacgtggcacacatcggttgggatggtcctggctccaccaacaacaataacaacaacagcaacaacaatagtggcggagcacctagctggatgaaggattaccactcggcaccgcttgactcgtcctcttttaggagtgagagtgggggcacggctgctgcaaatccctgggcttctcaagagatagtcatggatggagcaagcgtcggagaaacctncttcagggacacgaaaagcgaggcatgcgtcgacgtcngcgggggcgaactcccaacgtcccccgtcaccc

SEQ ID NO: 94184 - DNA, 527 bp, Zea mays
tgattgtgtgaaaagcaatgcggagtaggtgtcaccggcccggaattcccgggtcgacccacgcgtccgctgccatcctctccaacacgaagatggcgttcatcagcaatgtcgcagtgaaggcggcggcggtggccgcgctgctgctggtcgcagcggtgtcgcctgccgcgcgcgctgcggcggtggcggtggcgggaggggcgccgtcggtgccggcgggtccgctggacatcgcgcagctgggcgccaagggcgacggcaagtcggacagcaccccgatgatcctcaaggcgtggaagaacgcgtgcgaggcgacgggggtacagaagatcgtcatcccgccgggcaactacctgacgggcgggctggagctgaagggcccctgcaagtcctacatcatcatccgtctcgacggcaacctgctcggcaccggcgacctcagcgcgtaccaaaggaactggatcgagatcgagaacgtcgagaacctgtccatcaacggtcacggcaccatcgacgggcagggt

SEQ ID NO: 94185 - DNA, 541 bp, Zea mays
  unsure (1)..(541): unsure at all n locations
ttaatgatctggtatgcatcgatcagcatngttacgctatacacgtccggaattcccgggtcgacccacgcgtccgtcttatacatcggcagacgcgtacgcagactcttgggcagaatacgtcttgctgctcgtccgaagatggcctcatttccttggttccttgtgactatctctacggtttgtgcgcgcacgcatatgtatttgcattattcctgatagcatctattcgctggccagatgattagagagctgaaaatatattaagaacaataccatagagagaagttcctcagtgctctcgcagcttaaggagcaaacagcgacactttacttcgttttttatactttattatagccgcactagttattactcgggctacatttgtgaacagcgactgtaatatttntctactctatattcgtagtgcgatgaataagatataaaataggggcgcccgtttaaaagatccaagcttacgtacccctgcatgcgacgtcatagctcttgtatagtgcacctaaattcaattcactggcc

SEQ ID NO: 94186 - DNA, 544 bp, Zea mays
  unsure (1)..(544): unsure at all n locations
ggttnnnnnaaaggggnnatgggtgctagttttagaagatggaagtattgctcgtaccggcccggaattcccgggtcgacccacgcgtccgaacagctattattgtaggtgaccgtttgcttgttgcaaatgttggagattctagagccgttatttctaaaggaggacaagcgattgcggtttcaagggatcacaaacctgatcagacagatgagagacaaagaattgaggacgcagggggctttgttatgtgggctgggacatggcgagtgggtggtgttcttgctgtctctcgcgcatttggtgataaactcttgaagcagtatgttgtcgctgaccctgaaatcaaggaggaggtggtcgacagctcccttgaattcctcatccttgctagtgatggactctgggatgttgtcactaatgaggaagctgttgccatggtcaagcctattcaggacccccaggaagcagcaaacaagcttctcgaagaagcgtcccgaaggggaagctctgataacatcaccgttgtcatcgtccgcttcct

SEQ ID NO: 94187 - DNA, 530 bp, Zea mays
  unsure (1)..(530): unsure at all n locations
tgagacggtgtgtacccgcaacgggaggaatgtggtaccggcccggaattcccgggtcgacccacgcgtccgaccacgctgccgatcctcgtcaagggagtgctcaccgctgaagacacgaggcttgcggtggcgaacggcgcggcggggatcatcgtgtcgaaccacggcgcgcggcagctggactacgtgccggcgaccatcagcgcgctggaggaggtcgtgaaggccgcccggggccagctccccgtgttcgtcgacggtggcgtccgccgcggcaccgacgtcttcaaggcgctcgcgctcggcgccgccggcgtattcgtcgggaggccggtggtgttctccctggcggcggcgggcgaggccggcgtgtccaacgtcctgcgcatgctgcgggacgagttcgagctcaccatggcgctcagcggctgcacctncctcgccgaaatcacccgcaagcacatcatcaccgagtccgacaagctcagcgccatcccgtcgcgcttgtagatgaggcaaaatcaatc

SEQ ID NO: 94188 - DNA, 533 bp, Zea mays
  unsure (1)..(533): unsure at all n locations
tgtatgaggtactgtgtcagtnacgtcactactgacgtacccgtccggaattcccgggtcgacccacgcgtccgcttgcacgtacgagctcagaaggaaggcagaggcaaaagcagccatggcgaactcgtcgtccggccttgcggtgaacgacgagtgcaaggtgaagttccgggagctgaagtcgcggcggagcttccggttcatcgtgttcaggatcgacgacacggacatggagatcaaggtggaccgcctcggcggaccgaaccagggctacggcgacttcaccgacagcctccccgccaacgagtgccgctacgcgatctacgacctcgacttcaccaccatcgagaactgccagaagagcaagatcttcttcttctcctggtcccctgacactgcacgcaccaggagcaagatgctgtacgccagctccaaggacaggttcaagagggagcttgacggcatccagtgcgagatccaggccaccgaccccagcgagatgagcctcgacatcgtcaggagccggaccn

SEQ ID NO: 94189 - DNA, 532 bp, Zea mays
  unsure (1)..(532): unsure at all n locations
tggggnctggtgctgattcagcatttgatagtatcgctgctaccggtccggaattcccgggtcgacccactcgtccgggaacttgtagcattgcaagagcagataggcgatgtcaatactggtttgacagaaagctatgtccaggaaaacttgaggtccagttttcatgttccaggagcagctagcatgtctgatcagttttctgagctttctttggagaatgatgcttgcataatatgccaggaggagtataaagctaaagaacttataggaacccttgaatgcggtcacaagtaccatgtgaactgcataaagcaatggttgatgatgaaaaacctgtgccccatatgcaagacgacagctttgtcatcagatagaaggaacggatgaccgtcgccaataatgttgttggttgtttaccgcgtggcaaattagcgtggattttgtatatagacatggttgcctttatttgcccgtcccctttgctgtggacataaactgagcttcgaaacactgtacagatattttgtag

SEQ ID NO: 94190 - DNA, 533 bp, Zea mays
  unsure (1)..(533): unsure at all n locations
ggggatggtgtggttgtctgcatcggaagtaattgtatactcctccggaattcccgggtcgacccacgcgtccgcggacgcgtgggggcggccggaccgggccgtgtacacgctgttccggccggaggagaacgcgcggcggatgcagcgcggcgccgagcgcatgtgcatgccggcgccgtcggtggagcagttcgtccacgccgtcaggcagacagtcctcgccaacaggcgctgggtgccgccgcaggggaagggagccctgtaccttcggcctctgctcgtggggagcggcccgatccttgggctggctccggcccccgagtacaccttcctcatctacgccgcacccgttgggaactacttcaaggagggcctggcgcccatcaacctggtggtgcatgacgagttccaccgcgcgatgcccggccgcaccggccgggtcaaagaccatcgncaactacgcgccggtgcttgaggcccaaatggacgccaagaggcaggggttcacggacgtgctgtacctggactcg

SEQ ID NO: 94191 - DNA, 526 bp, Zea mays
agaatccggtgtatttcagcatcaagatattgtggcaccgtccttgaattcccgggtcgacccactcgtccgcccactcgttctctcctgcgcagcgcaacatttacacgctaaggctggccgactacatcctggaacaggtcctgtaactactacgtaccatctgcattgcatgtccacgactatagcttctagtttagactttcaatcatactatcatcaaagcaaaggccttcctgccggcgtatttgctttgactcttgtacttcacgccattagatatctagcacttggtcactcttcttaattagttcgctttgcttttgaggttgattataccattttgatgcagcgtgaactgcatgcatggacatgcaacgctccaatggcctttgtaaagtgaaatgtttatccccattatctgcatttttcctatcaaaaatgaactggttctcatatacattctgtgatatacctgcagatcagatgatatgacagcagatactatatactgcgctgattaaaa

SEQ ID NO: 94192 - DNA, 539 bp, Zea mays
  unsure (1)..(539): unsure at all n locations
tggggaatggtgctgtagtgaccgcatccgactgtantggcataccgctccggaattcccgggtcgacccacgcgtccgatcacacacactcgcgaactccatttcgatcccatttgaaatcaacccatcctcgtttcctccgtctagcagcctctcaccctcatggccaagatcaagatcgggatcaatgggttcggcaggatcggaaggctggtggccagggtggccctgcagagcgacgacgtcgagctcgtcgccgtgaacgaccccttcatcagcaccgattacatgacctacatgttcaagtatgacactgtgcacggacagtggaagcaccatgaggtcaaggtgaaggactccaagacccttctctttggtgagaaagaagttgctgtgtttggctgcaggaaccctgaggagatcccatggggttccgttggcgctgaatatgttgttgagtctactggtgttttcactgaccaagagaaggctgcagctcacttgaagggtggtgccaagaaggttgtcatttctgctc

SEQ ID NO: 94193 - DNA, 540 bp, Zea mays
  unsure (1)..(540): unsure at all n locations
gctcatcgtgcgttgncattcccgatcgctccagcactcncgtcttgaattcccgggtcgacccacgcgtccgatcacacacactcgcgaactccatttcgattccattttaaatcaacccatcctcgtttccggcgtgtggcagcctctcaccctcatggccaagatcaagatcgggatcaatgggttcggcaggatcggaaggctggtggccagggtggccctgcagagcgacgacgtcgagctcgtcgccgtgaacgaccccttcatcagcaccgattacatgacctacatgttcaagtatgacactgtgcacggacagtggaagcaccatgaggtcaaggtgaaagactccaagacccttctctttggtgagaaggaggttgctgtgtttggctgcaggaaccctgaggagatcccatggggtttccgtggcgcttaatatggttgtgagtctactggtgttttcactgaccaagaagaggctgcagctcacttgaaaggtggtgccaagaaggttgtcatttctgctcctagcag

SEQ ID NO: 94194 - DNA, 531 bp, Zea mays
gtaaagtgtgtatgccaaatctgatgcactggcatactcgtcctgaattcccgggtcgacccacgcgtccgatcacacacaatctcgaactcgctttggatttcatttagcatcaacccatgctcgattccggcgtggagactctctcatggtaatggcccagatcaagatcgggatcaatgggttcggcaggatcggaaggctggaggccagggtggacctgcagagcgacgacgtcgagctcgtcaccgtgaacgaccccttcatcagcaccgattacatgacctacatgttcaagtatgacactgtgcacggacagtggaagcaccatgaggtcaaggtgaaggactccaagacccttctctttggtgagaatgatgttgctgtgtttggctgcacgaaccctgaggagatcccatggggtttccgtggcgctgaatatggtggtgagtctacttgtgttttcacttaccaagaaaaggctgcagcttacttgaagggtggtgccaataaagttgtcatttctgctcg

SEQ ID NO: 94195 - DNA, 538 bp, Zea mays
  unsure (1)..(538): unsure at all n locations
ggggntagctggttgctcgatacagcagatgattgcactgctcgtaccggtccggaattcccgggtcgacccacgcgtccgggtggtcaccgcgcggccacccatggggctcacgcatcacgtcgagaaggccatcgacgcgggcacctttgagcagatgctcgacatcaccgtcaaggactggcccgtcgaggaggcgctcggctacgccaagctcgcgctcaagtgcacggagatgcggcggagggaccggccggacctcgccacagtcatactgccggagctcaaccggttaaggaacctcggccacgcgtacgaggcacgcatgagcgccgncagggccaaccggtggaagtgagagagtggtgccagatcaccggggactcgacacggtgggtgggtcatgggaaaccgcgacagctaccggcgggcccgtgatcggtgtgggcggtggccccgattaatcaantagagagcgagcttttttttttgaaccggggagttaaaaaattccaaaaatcttgggtatggacaggtc

SEQ ID NO: 94196 - DNA, 537 bp, Zea mays
  unsure (1)..(537): unsure at all n locations
ttgttaagtggntnngatgatcagcagagtacagcactgctctactcggtccggaattcccgggtcgacccacgcgtccgcccacgcgtccgcaagcattgaagccgtatctcggcgtcgccggacgagacaggttgaggcggggcggtaatggccgacggtgaccttgaggtgctcagcgtgctcgacaccgggaagactcaatggtaccaatttaccgccatagtggtcggcggcatggggttcttaaccgacgcctacgacctcttctgcatctccctcggtactaaacttcttggacgtatgtactacaccgtagaagggtacgagacgcccgggagcctaccgtcgaacgtgtccgagtgcgtcaacggataggccttactgggcaacgcttcatggcagatgttattcggctggctgttcgacaagctcgggctcatgaatgtctatggcatgacgctcatgctcattggacattgatccgtcgcgtttgagctctcgatcggacacactccaggcatcgtgatggctacc

SEQ ID NO: 94197 - DNA, 543 bp, Zea mays
  unsure (1)..(543): unsure at all n locations
ttttatcttggntgtgcacgtgacggagtgtcatcgcactgctcgtaccggtccggaattcccgggtcgacccacgcgtccggcaaggcgtggcggcggtggcggcggcgtttcaagccgggccggcactcgacaaggacggggtcccggagtgggtgcccgacggtgagcgcagggtgctcaagggcggcggcttcaagaacacactcacgccaaacgtggtggtggcgaaggacggcagcggcaagttcaagaccatcaacgaggcgctcttcgccatgccgaatacctacgacggaagatacgtgatccaagtgaaggaaggggtgtacgacgagtacgtgaccatcaccaagactatgaagaccgtgaccctttaggtgaccgctccaagaattcatcctcacgggcaagagaagctttgcgaccggatcaacaacttcaaggacggaacccttaatgctcagggccaccggttcatggccaaccggattgggttccagaacactggccgctccgagaaaccacaggccggtgcgcttt

SEQ ID NO: 94198 - DNA, 533 bp, Zea mays
tgaaacggctggtgtaggtacgacatcacagatagcgatgcaccggcccggaattcccgggtcgacccacgcgtccgcggacgcgtgggcggtcaccggccggggagggctcagaaacctttcatccaatacatacatgtatctgagccctttcccgcggtgaggcccgaccggagtccacacacacacacacacggtgtcgatggcggccgtaataaggagccgccgcgtgtccgttgtcttctacgtcgtcctcgccgcagctgcagccgcggcgcaggcatccaataacgtcacctccgacgaggattactgggcggagcgcgccgaggtggctcggtcgcgcaacctcgccgcctacgtcagcgaccccgtggccgccacgaaccgcttcaacgcggacgtgctgagggccacgacgcggctggcgctggcgaggtacgatggcccgtgcatggcgaccaaccccatcgaccggtgctggcgctgccgcgccgactgggcgacggaccggaagctgctggcgcaatgcg

SEQ ID NO: 94199 - DNA, 535 bp, Zea mays
  unsure (1)..(535): unsure at all n locations
tgggtaaggtgctagtatagcatcggacttantggcctacccgtccggaattcccgggtcgacccacgcgtccgggtgctccggcccgacgcgcaccatgggaggaagcagttacagcacgaggtggaggtgctcagctgcgttcgccacccgaacatggtgctcctcctcagcgcgtgccccgagtacggctgcctcgtgtacgagtacatggagcacggtagcctcgaggaccggctgttccgtcggggcgggacgccgccgatcccgtgggcgcaacggttcccgatcgcggcggatatcgcgacggcgctggtgctcctgcaccagacaaagccggagccgctggtgcaccgggacctgaagccggacaacattctgctggaccgcaactacgtgagcatgatcagcgacgtctgactagcgcgccatgtgccctgcgtcggtgcggacagcgtgacgcagtacccgctgacagagaccgtcggcaccttatgctacatcgacccggagtaccagcatacggtgaagctgg

SEQ ID NO: 94200 - DNA, 540 bp, Zea mays
tgttatggtgtgttgactagccagctctcatcgactgccgtaccggttcccaggtcgacccacgcgtccgaaaaaacagaaggaaatcattgagttgtggcatgaatgcaatgtatctatagtacacagaacatatttcttcctcctctttagggggacactgctcacaatattcacttggaactggtgcatagtatactattccacattccacggtatcctagaggaccatctgatgcttatgctactgacacctccgatctcataagcacttcgaatgcctatcacagcggatatcgccacatctctactgcacctgctccagacaaaaccggaacctttggtacaccatgacctaaagcccgccaacattctgctggaccgctactacgtgagcatgatcatcgaccattgactggcgcctcatgccggctccggtcgttggcgacagcatcacgcaattccggcttgtctaaaaccgtgggacccttcttcttaatcaacctcgagttccaggataccttgaaacttggctttaag

SEQ ID NO: 94201 - DNA, 535 bp, Zea mays
  unsure (1)..(535): unsure at all n locations
tggtttatggtgtttcatgaacagacccctaccgactgctctaccggtccggaattcccgggtcgacccacgcgtccgcacctctgagactcctccttcacaggccggcgtcgtcggtggtcggagagatggggcaacaacgcacgttggtgtatagcttcgtggcgcgaggcaccatcgtcctagcggaccatgctgaggtctccggcaactttgcctccgttgctgcacaatgcctacagaaacctcccgncaacaacaatcgtttaacctacaatgggaatggcccccattcaacttccacatttaatatgggatcacgtactggcgtggtgctacccagtcaacctgtccgcagcttccaagtggaattattgggagaggccaaggaagtttttcccagaaatataacggaaggtaagcccaaaatgctagtgcccatggccctaaacgaggatacgggccctaactcanggagcacatgangtattgtgaccagcaccctgaggagatcgacaaacttgcaaaagttgag

SEQ ID NO: 94202 - DNA, 544 bp, Zea mays
  unsure (1)..(544): unsure at all n locations
ggggtgagggctgatacgggaacaggatgtctatgcantgccgttccggncttgaattcccgggtcgacccacgcgtccggtgatccatctcttgcttctatcttcttgatgaataatggcaagtacatcatacacaaggtgaatgacagtgagttgggtgttttactcggtgatgagtggataaagcagatgacaaatagagttcgacgctggagcatggattatcagcgggcaacatggggcaaggttacaactgtgctgcaaagtggtactccaggcattggtggactcccagccaaggcaatgctgcagaaactgcgaatgtttaatacatattttgaggagatctatgcggcacagtcagaatgggtgatagcagatgaccagctaaaggttgacattagggcagcggtggaggagacagtgatgccagtttacgcctctttaaatgccaaggtgaagtcttcttctgaaactgggcgtgatttgtacatcanataacacccagaagatgtttgaacccacattcaggacttggttgaa

SEQ ID NO: 94203 - DNA, 534 bp, Zea mays
  unsure (1)..(534): unsure at all n locations
ggantgtgggtttgatgatcagactctcatcgcactgctctaccggtccggaattcccgggtcgacccacgcgtccgcccacgcgtccgtccacgcgttcgggtgcttagctgcatccgacaccctaacatggggctggtactccgcgcatgcccggagtacggctgtctcgtgtacgagtacatggaccacggcagactctaggaccggctgctacgtctgggcggcacgcagacgctcgcgtgggcccagcggttccggatcgcggccgagatcgcgacggcgctgctgatcctgcaccaaactaagcctgagccgatggtgcaccgcgacctgaagccggacaacatcctgctggaccgcatctacgtgagcaggatcaccgacgacggactggcacgcctggtgccgncatgagtggcggacaacgtgacgcagtaccggatgacggcgatgcaggcaccttctgctacatggacccggaagtacatcagaccggccagctaggcgtcaagtcngacatctactccctgg

SEQ ID NO: 94204 - DNA, 542 bp, Zea mays
  unsure (1)..(542): unsure at all n locations
ngggtttcggaagctggtgctgtttccgcatctacgggtatctctgcacgctctaccggtccggaattgccgggtcgacccacgcgtccgcggacgcgtgggcggacgcgtgggcggacgcgtgggcactccctcgctccgtctaccagtacgaccacgtccctcctcgtcgacgatctcgtagcggcggcgcacatggcgagcgacggcgcggcggctacgccagcgaaggttaccccaaagaaggccaatctcctcgacccgcactccatcaagcaccttctcgacgagaccatctncgaggtcgtgaagagtaagggctacaccgaggacacgcggctgggcaactggaagctggggatcggagccgtcgtgattgctgtcgccctnctcgctcagttttaccccaagaagttcccgcagaaccgcgatttcctccttggctgcatcgccctgtatgtggtgctgaatgtggtgctgctgatccttagctacaccaaggagaaggatgccatnctattcacgcacnctnctatggggtc

SEQ ID NO: 94205 - DNA, 528 bp, Zea mays
cgggcttggcgttataagatcccgagtatacgtattgctctaccggtccggaattcccgggtcgacccactcgtccgcccacgcgtccgggtgccccgaggtgctgttccaaccatcccttgttggcatggaatcgcctggcgtccatgaggccacgtacaactccatcatgaagtgtgatgttgatatcaggaaggatttgtatggtaacgttgtcctcagtgggggatctaccatgttccctgggattgccgatcgtatgagcaaggagatcacgtccctggctcctagcagcatgaaggttaaagtgattgcgccacctgaaaggaagtacagtgtctggatcggtggctctattttggcttctctcagcacttttcagcagatgtggatctccaagggagagtatgacgaaactggtccgggcattgtccacatgaagtgcttctaagtttttttgggaaatttttccaaaaaaaaaaaagaagtttctggggaagttcgacatggtacgtcatgcgttaccgg

SEQ ID NO: 94206 - DNA, 547 bp, Zea mays
  unsure (1)..(547): unsure at all n locations
nggannnagagggggatggtgctgactacccgcatatccgccatactattgcattgtctctaccggtcttgaattcccgggtcgacccacgcgtccgagccactatctgctacaccagtggcactactggcacaccaaagggagctgtacttgctcatgagaacttaattgcaaatgtagcagggtcaagtttaggcattaagttttacccctctgatgtgtacatctcgtatctacctttggctcacatctatgagagagctaaccaggttgcattgcttcactatggtgttgccattggattctaccaaggggataacttgaagctgatggatgatttggctgttctgagaccaacaatattcgcaagtgttccccggttatataacaaaatttatgctgcaattacgaatgctgtgaagcagtctggggggttgagagaaaggctgtatcatactgcatacaatgccaagcgacatgccatgataaatggtagaaacccatcacctatgtgggacaagttggtatttaacanaattaaagctat

SEQ ID NO: 94207 - DNA, 536 bp, Zea mays
  unsure (1)..(536): unsure at all n locations
ggtattnttggagcgtgctatgacgaatacacgcaaatacagtatcgctctaccggtccggaattcccgggtcgacccacgcgtccgcccacgcgtccgcggacgcgtgggctgcagtcatctcctccaccaccaccaccaggctcatggacagccagctcgcgaaaataatgaagagccggagcatggcatcatcggccgcgctcttggtgctagccctcgcgctagtggcggacaccgccccacatgtagcggatgcacagagaagagagcggcggagagcggcgaggcggcggaggcgaagaagatccaggacgacttctgctcgacgctgtgcgagggcaagaaggggacggacctggtcgtgtgcaatgagtcctgcgctctctaccagcagtccaacctggtgctgtactgcatgatccagtgcatgggcaagtgcaccgagcagaatggcatcacggcgccggcatgaatgtctgccaggaggagtgcgacaaggcgtacgtagtgaatgcggtcgacgtcaccatggc

SEQ ID NO: 94208 - DNA, 546 bp, Zea mays
  unsure (1)..(546): unsure at all n locations
ggttatattttattcggcggtgctangtacgactacacgcctagtactgaattgaccgtaccggtccggaattcccgggtcgacccactcgtccgcggacgcgtgggctcccaaccattcgtccatatccccctcccaacaaaaaaaaggggaaaacgcccatcaatggcgatctgaatcaaccaaggcatctggaagcttggacatggagcggatcctcaagtcctccagggagtcgggctccctgaacctctccaatcgctccctcagggagatacccaaggaggtgtacaacaacttggacactggcagccaggatgagaaatggtgggagggagtggacctccaaaagctcattctggctcacaataatcttgaggtgttaagagaagaccttaggaacttgtcttcgcttgctgttctaaatataagtcacaacaagatatcttcccttccagcagctatcggagatctcccgttgctaacatcactggacatatctttcaatcaaataaacacttctgcccgaagagatntgcctgnctc

SEQ ID NO: 94209 - DNA, 533 bp, Zea mays
aggggatggcgttatcagaaacggggggaagatagtattgctctaccggtccggaattcccgggtcgacccacgcgtccgagctcaaggacagccacgaggaggacatctgccaggtggtgctggtggccagcccgcgcaaggactgcgacgaggtccaggcgctcagggaccgcgccggcgtcctgctcaccaggaacgttggcatctccgacagcctgcgccccgccaacccgctaggctacttcaaggacgtgccgctccccgtctgcgccgcgctgctcaagcagctggactcggacgacgacgacgaccagtaaactataccacggcggcgtcgcggacatgctgcacaaaactacaacgatacagagcgaacgcatggcatggatagcagtatctacggaaagaaaaggaagaaaaggaaaataaaaaatgtatcagagtgcttgattcacttgctgctgtcacccattccccgttcttaacataacatgtgggccggcttggcccatgcacaagcccatctaatat

SEQ ID NO: 94210 - DNA, 537 bp, Zea mays
  unsure (1)..(537): unsure at all n locations
atgggttggtgctaangccttgcacgcagtgctacgcattgaccgtatccggtcttgaattcccgggtcgacccacgcgtccgagctcacggacagccacgaggaggacatctttcaggtggtgctggtggccagcgggctcagggactgcgacgaggtccaggcgctcagggaccgcgccggcgtcctgctcaccaggaacgttggcatctccgacagcctgcgccccgccaacccgctaggctacttcaaggacgtgccgctccccgtctgcgccgcgctgctcaagcagctggactcggacgacgacgacgaccagtaaactataccacggcggcgtcgcggacatgctgcacaaaactacaacgatacagagcgaacgcatggcatggatagcagtatctacggaaagaaaaggaagaaaaggaaaataaaaaatgtatcagagtgcttgattcacttgctgctgtcacccattccccgttcttaacataacatgtgggccggcttggcccaggcacaagcccatctaataag

SEQ ID NO: 94211 - DNA, 531 bp, Zea mays
  unsure (1)..(531): unsure at all n locations
tggggnatgtgcgntagaccgatacccgcagacatagtactgctctaccggtccggaattcccgggtcgacccacgcgtccgatttgaaacagttaagaattcatatataagagtgcatatatatatatataattctgccaagacaaaggtaatggagtcgtcacgcatgttccagccggccatcatcctgcttctcctgctcattgtgaccaccgatgtggcgcatgcggcgagggaatgcgagaaggacagcgagcgattccttggggcatgcatggcgtcagacaactgcgccaacgtgtgccgcggtgagggcttctccggcggcatgtgcagcaccttccgccgccgctgcatctgcactaagccgtgctaaattaacctactcccggcagttcgatggtggacgtttattctatctattggcttacttgattctttgtcccctaacaatacgataacgcacgtgctgacatgtacgttgtgtggcatatgcttttcttgctggcttcattngctgattactgatg

SEQ ID NO: 94212 - DNA, 545 bp, Zea mays
  unsure (1)..(545): unsure at all n locations
ggttaggcggttntttagacgaaccgctctcatcgcctgacgtaccggactggagggtcgacccacgcgtacgcccacgcgttcgcccacgcgtccgaaatgaagaaaataaaaatagttgcaagaaaatttcctcgctccaacatcagctagatttatcatccaaggatcaagaagctcagcaaaatattctttctcagatagaagaagtgaagagggagaatattttactacaggcaaagaacacagaaatggaacaagagctcttaaaagctcaaaaatgtagccatgataatatggacaagttgcacgatgtggaaaagaactatgttcatctccgggataacttgaaaaacttagaggataagatctcaaatttagaagatgagaatcatttattgagacagaaggccttgaatttatctcctaggcacagccgaactgggagttatcactgcggttcttcaccatgcagcccaaaatcattcgttgaatcttcacctgtgaaacttgcacctnccnctcataaccagacagaatcaaga

SEQ ID NO: 94213 - DNA, 545 bp, Zea mays
  unsure (1)..(545): unsure at all n locations
gtttcagcgcctgcctgaagtcagctcctacatagnactgctcgtaccggtccggaattcccgggtcgacccacgcgtccgcacaggattagttcaataaggaggagctgctggagttctacctgaagcaggcggcgcgcgggaggaagctcaagttcgacatcatccccacggtgcacctgtaccggcacgacccctgggagctgccgagcctggcgcgcgtcgttggcgagcgcgagtggtacttcttcgtgccccgcgacggcggcgggcgggcggccaagcagcagcccggctccggcggccggcctagccgcaccacggagcgcgggttctggaaggccacggggtcggaccgcgccgtgcggtgcgccgtcgaccccaagcgcctcatcgggctcaagaagacgctcgtctactacgagggccgcgcgccgcggggcaccaagacggactgggtcatgaacgagtaccgtctncccgacgctgccgacgctagcagcgacgcgcgcgtgccgcatgtggacgtggtgctgtgcaaggtn

SEQ ID NO: 94214 - DNA, 557 bp, Zea mays
  unsure (1)..(557): unsure at all n locations
cggggncggcgggttanctgatgaccgtatcagcacgtgcatcgcactgtctgtaccggtccggaattcccgggtcgacccacgcgtccgcatcgccgagcgcgacggcccgggccggtacaacttcgcgggctacgcggagctcatggagatggcgcgcaaggccgggctcaaggtccaggccgtcatgtccttccaccagtgcggcggcaacgtcggcgactccgtcagcatcccgctgccgcggtgggccgcggaggagatggagagggaccaggacctctgctacaccgaccagtggggccgccgcaactacgagtacgtctcgctcggctgcgacgccatgcccgtcctcaagggacgcacgcccgtcgagtgctacaccgacttcatgcgcgcgttccgcgaccacttcgccgactacctcggcaacaccatcgtggaaatccaagtcggcatgggccccgccggcgagctgcgctacccgtcctacccggagagcaacggcacctggaagttcccaggcatcggcgccttccagtgcaacgacaggtaca

SEQ ID NO: 94215 - DNA, 527 bp, Zea mays
  unsure (1)..(527): unsure at all n locations
gtggggnnntnatccatcgaggcctcaccgtatgactctccggtcctgaattcccgggtcgacccacgcgtccgctgcaaggtgatcagcgtaaaaatgtcgctacttttctagtccaggccggaatcgtgaaaagggatagcatcaagattcacggattttagactgcaaatttgaagtgcttgtgtgtgcctatcatatgataccatatgataccaggtattgaagcttcggaagcttgttggccttcgtaacatcagtagtcgttattcatctgaatatgtgtcattatttcatttgataagactggtattgatgcaagttgtccttgcagtatgttttgtaagtgttacctgcatgaaagtatcgtttgtctgcggagctgtctgctactgatattgaataacaagagagattgctgtttgtaattcgtctatgaattattatgatctttccccagacttgagctttaaaaaaaaaaaanttnanntttaattaaaaaaaaagggctggcgctctagaggatc

SEQ ID NO: 94216 - DNA, 520 bp, Zea mays
  unsure (1)..(520): unsure at all n locations
gactgaatcgactncgatggcatctcgtccggaattcccgggtcgacccacgcgtacgcgctctggtagcaggaacagcgatggttggcctgagctcaggattcatcttcgccgcagcagtgtgagtgacctccgagctctttggaccaaacagcatcggtgtgaaccacaacatcctgatcaccaacatcccgctggggtcactcctctatgggcagatcgccgccatggtgtacgacgcgaatggacaaaggatgacactgatggataatcgcactggcatcattgacaccatgattgtgtgcatgggggtgaagtgctactcgaccaccttcctcgtgtggggttgcatcacattgctggggttagtgtcgagcgtagttctgttcataagaacaaaaccggcttatgctgctgctgctgctgttggtcggtcgagttgtaagcaccttcaccaagttttcagttaacggcggacttcttggtcaaaacaaatttctcatgctggacatcataataa

SEQ ID NO: 94217 - DNA, 548 bp, Zea mays
  unsure (1)..(548): unsure at all n locations
cgttaggtgatgccgcttgagcctggaacgtnctgcactgtcgttctcgtctcggaattcccgtgtcgacccacgcgtacgctgacgcgtgtgctgactcgtgggctgacgcgtggtcggacgcgtgggttggattgtccaggaaagggcagctcccctgcctcatgcccatcaaatcgttaaacttgttagatcggtaggcagagagaggccagactgatgggaatggcagccaaggagcactttgtgcttgttcatggtgaagggcatggagcctggtgctggttcaagctccgctggctccttgagggtgctggctaccatgttacatgcattgacctagccggaggctgcgtctatcctactgaccccaacacaattcggtcgttccagcactacgacaagccactcatagacctcatttcaaccttgcctgaagtggagaacgtgattctaatcggacatggtgctggagggctgagtgtgattcatgcaatgcacgaatttgttgtcagaattagtcaagctttttttggtgcacctacatg

SEQ ID NO: 94218 - DNA, 527 bp, Zea mays
  unsure (1)..(527): unsure at all n locations
tcgatcgctgagnccaggtcacgacgtactgacgtaccggtccggaattctctcgggccgacgcacgcgttcgtgcgcacgaccgctgattcgtcggcggccttgtctgcgccaccagcaacgagtcgctgggggatgccttcgactgctacggcgagatcctcgactccaaggtcatcaccgaccgggagacggcgaggtctcgcggcttcggcttcgttaccttctcctccgagaactccatgctcgacgctatcgagaacatgaacggcaaggagctcgacggccgtaacatcaccgttaaccaggcccagtcccgtggcggtggctgcggcggcggtggctacggcggcggtcgctgcggcggctgctatggtggcgggcgccgtgacggcggttatggcggcggtggcagctacagcggtcggcgcgagggtggtggcggcggctacggaagcggtggcagctacggcggtcctagcgagggtcgtggtggcggctacggctgcggctgcagtggcttgacn

SEQ ID NO: 94219 - DNA, 545 bp, Zea mays
  unsure (1)..(545): unsure at all n locations
tgtntgagcggtggctgatttccacttctgatgcactgtcgtaccggtccggaattcccgggtcgacccacgcgtccgcggacgcgtgcgtgcgatgagagccttgttcctcctggtcctcttctgcatcgtgcatggtgagaaggaagagtcaaagggcatcgatgcgaaagcgtgcagtcctggtgggtccttcgacatcaccaagttgggcgcctccggcaatggcaagacagacagcactaaggctgtgcatgaggcatgggcatcggcgtgcggcggcactgtgaagcagacaatcctcatacccaagggtgacttacttgccggacaactcaacttcacaggcccttgcaagggcgacgtgaccatccaggtagatggcaatctgctggcgaccacggacctaagccagtacaaggaccatggtgattggatcgagattctacgtgtggataacctggtcatcaccggcaagggaaaccttgacgggcatggcccagccgtgtggagcaagaactcctgctccaagaagtacgactgca

SEQ ID NO: 94220 - DNA, 535 bp, Zea mays
  unsure (1)..(535): unsure at all n locations
tgagctctnactgaattcactctgcatgcgatgtcgtaccggtccggaattcccgggtcgacccacgcgtccgcccacgcgtccgcccacgcgttcgcttgactattcaggaaagtaaaaggcttgcccgtgaaaatgctaaagatattatagcatgtggttttgacattgaaagaacattcattttctctgatttttcttttgttggaggtgctttttatgaaaacatgatgcaagttgccagatgtgtaactatgaataaggctattggaatatttgggttcaatcttgaggatcacataggaaaggttagctttcctccagtgcaggcagtcccatcattcccttcttcatttccccatctcttcgctggcaaggaccaactgcggtgtcttatcccatgtgcaatagatcaggatccatattttaggatgactcgtgatgttgctcctagaattggttatcagaaaccatcactgattgaatctagattttttcctgctcttcagggggagaacacaaaaatgtcagctag

SEQ ID NO: 94221 - DNA, 535 bp, Zea mays
  unsure (1)..(535): unsure at all n locations
tagtggtgactgatttagccttacatgncatgacgtaccggtccggaattcccgggtcgacccacgcgtccggaagataagagaacgaggggcagggcagccagcgccgctagctgaagcaaggcagggcaagagaatccgtacgtcgaggtgcaggtcgtaggtaggatggacgcggaccagcagggcgtggttgcggcggcggtgaagccggcgctggccaaggggacgccgtcggcgtcgttccggctccgcaacgggagcctgaacgcggtgcgccttcgccgcgtgttcgacctgttcgaccgcaacggggactgcgagatcaccgtggacgagctggcgcatgcgctggatgcgctgggcctggacgccgaccgtgccgggctgtccgtcaccgtcggcgcctacgtgcccgactgcgccgcgggccttcgcttcgaggacttcgacaagcttcaccgcgcgctcggtgacgccttcttcggcgcactgggaggccaggacgacgccaccgacgcggcggacggcgcct

SEQ ID NO: 94222 - DNA, 525 bp, Zea mays
  unsure (1)..(525): unsure at all n locations
tacggntgctaggcctagcncatcacgnactgctcttctcggtccggaattcccgggtcgacccacgcgtccgcggacgcgtgggcggacgcgtgggcggacgcgtgggcggacgcgtgggggacgaacttaggaaggcaaagaagaaaatgggggagcaaaatatacaaaaggctgtgaagtccgcaatggatgctgcagaagctgctctttcaggaaataaaccgttttgtgttactcatgtggatgtgggtcttgataccacggctgtccgtgaggcggttatcaaagtcatggaccagaagggtttgcctataatgttattcagcaccgatgaggcatcaaacaaagccgttatctatgctggtgtgcctcccaatgctcctagcggcttcaaggtgttggactggctaacaccttcaattgcgccactcaagggaagaggcggtggcggcaagaacggcgtcgcccaaggccaagggagtgacgcttctcagctcaaggaagcaatggcacttgcgaaca

SEQ ID NO: 94223 - DNA, 535 bp, Zea mays
tggggtttattgtgtcagctcgatacgcatgcacgtaccggtccggaattcccgggtcgacccacgcgttcgcccacgcgtccggtgctggaatcgaagccatcttgtcaagtaatgacctccaggtggcatctgaagataccatctatgacttcttactcagatgggcccgtgcacaatacccgaaatcagaagagagacgtgaggtccttagttctcggctgctccctcttgtgcgattcagtcatatgacgtgtaggaagctgcggaaggtcctagcctgcacagatatagaccacgagcaagcaaccaagtgtgtcaccgaggctcttctgttcaaagctgatgcaccacaccggcaacgagctcttgcagcggacgcaataacctgccggaaattcgccgagcgggcttacaagtacagaccactcaaagttgttgagtttgatcggccctacccacagtgcatagcatacttggatctcaagcgcgacgagtgctctcgactctttcctgcatggcggatatactcgca

SEQ ID NO: 94224 - DNA, 537 bp, Zea mays
tagcgctgacttgaatccagcccgagatcgcatgacgtaccggtccggaattcccgggtcgacccacgcgtccggctcagcctcctgcaccacccgaacctcgtcaagctgctgggctacagcaccgactccaaccagcggatcctggtctacgagtacatgcccaggggctcgctggaggaccatctcctggacttgcccccgagctggaagcccctgccgtggcacacgcggatgcggatcgcggtgggcgcggcgaagggcatccagtacctgcacgaggtggcaaacccgccggtgatctaccgcgacctcaaggcctccaacatcctcctggacgcggacttcaacgccaagctctccgacttcggcctcgccaagctgggccccatgggcgaccagagccacgtcagcaccagagtcatgggcacctacggctactgcgcccccgagtacgccatgaccggcaagctcaccaagatgtcggacatctacagcttcggcgtcgtgctgctcgagctcatcaccggccgccgc

SEQ ID NO: 94225 - DNA, 540 bp, Zea mays
  unsure (1)..(540): unsure at all n locations
tgggcctgcttgatgccgtccacgcngctccatagtactgctccgtaccggtccggaattcccgggtcgacccacgcgtccggctacggcggcggcggcggcggctggagggactgatgtgtgggcccatcctggcttcggccgagttatcttatctatctatagtatcgtgttaccgttcgcttctgtcaccgtgttagtgtccgttctacctttggattaggtgttggtacccctgttgttccctttggttgctcccgctatgaaacgagacgagagaagaatgagcaaggtttttgttcgcagctatttttgtccaatgatattgatatgttgttccaaaaaaaaaataaaagggcggccgctctagaggatccaagcttacgtacgcgtgcatgcgacgtcatagctcttctatagtgtcacctaaattcaattcactggccgtcgttttacaacgtcgtgactgggaaaaccctggcgttacccaacttaatcgccttgcagcacatccccctttcgccagctggcgtaatagcg

SEQ ID NO: 94226 - DNA, 536 bp, Zea mays
  unsure (1)..(536): unsure at all n locations
agcgcccgactgaagtctgttacgtnatccatagtactgtcgtaccggtccggaattcccgggtcgacccacgcgtccgcggacgcgtgggttggaccgcacgaactggaagaccaacatgctgacagctctcttggttgcttacattttcttcactctgcctaatgtgctgttttctatgatcagaggagaggtggggaaatggattgcgattattgctgttattctgcgactattttttccgcgccacttcccagattggttagagcttcccggttccatcatcctgctcacagcagccgtccccagtctgttcgcacacaccttcagggacgacctcgtcggtgtcttcatatgccttgcgatcggatgctacctgctccaagagcacatcagggcgtcagatggactcaggaacgccttcaggaagggcaatggcgtgtccaactccattggcatcctgctgctcttcatctaccctgtctggaccggcgtgctgcagatcctgtaggcgctgttgcctacgtgttcccgtc

SEQ ID NO: 94227 - DNA, 525 bp, Zea mays
  unsure (1)..(525): unsure at all n locations
ttggtnntnaatcctagcncatcactgcattgctctaccgttccggaattcccgggtcgacccacgcgtccgcggacgcgtgggtcggaaggtgatctcgttctcagatctaatgtatgtcaccaagcgcaaggtggcaaatgctgtttcaagcatgactaaacatttggagcaagtgcaaagttctcttgctgctgctaaaaggcatttgacacagcgcattgaaaagttggacgataaattggatcagcaaaaggctctatctggacatataagaaatgatgttactgatgcacgtctgaagcttgagaatattggttcagaaattaagaacatcaatgaattagtttggggactggatgggaaaattgattcaatggaagctaaacaggacttctcatgtgctggtgtgatgtacctctgccaattcatagagcaaaatggtggaaagcttacggatcgcactgaatgctccaaagtgactacaaagcgatttggacgtcaaaagttctagcagggattgcn

SEQ ID NO: 94228 - DNA, 520 bp, Zea mays
  unsure (1)..(520): unsure at all n locations
gctgtgctgagattcgaacatgattgcatgcctctaccggtccggaattcccgggtcgacccacgcgtccggtggcggtgaagcagctcaagtccgggagcgggcagggggagcgcgagttccaggcggagggggagatcatcagccgcgtgcaccaccgtcacctggtgtcgctcgtgggctactgcatcgcgggcaaccagcgcatgctcgtctacgagttcgtggccaacaacacgctggagcaccatctgtacgccaaggacggccctgtcatggactggagcacccgcatgaagatcgcgctcggctccgccaagggcctcgcctacctncacgaggactgccatcctcggatcatccaccgcgacatcaaggccgncaacatcctgctggacaacaacttcgaggccatggtggcggacttcgggctggccaagctcacgacggacaccaacacgcacgtctncacgcgcgtcatgggcacctttcgctacctggcgccggagtacgcgtccac

SEQ ID NO: 94229 - DNA, 547 bp, Zea mays
  unsure (1)..(547): unsure at all n locations
gggtaagagcgcttgacttgaatctagcttctgatcgtcatgacgtaccggtccggaattcccgggtcgacccacgcgtccgcccacgcgtccgactcgccattcctaagtcctaactacctccaaccccgcacgcacaactggccgcgccaaggcaaagctagaagaagacaacgcaaagggagaggacagaggaggagcagaggacgatgggcagcggcggcgctaacactgccccccttctcaccccctacaagatgggaaaattcgatgttacccacagggtagtcctcgcaccactgacgagacagcggtcctacggcaacgttccccagcctcatgccatactgtactatcagcagagggcgactaaaggaggtcttctgatcgctgaggccacgggggtttcagacactgctcaagggtacaaggacactcctggcatttggacccatgagcaagtcgaagcatggaagccgatcgtagacggggttcaccagaaaggagggatatttttctgtcagatttggcacgtanggagagtctc

SEQ ID NO: 94230 - DNA, 540 bp, Zea mays
  unsure (1)..(540): unsure at all n locations
atgcgctgacttgaatctacctcgacactcnactgacgtaccggtccggaattcccgggtcgacccacgcgtccgcccacgcgtccggcgcctccaaggtcaccgtcaaggatgtcaccttcaagaacatcaccggcacctgctccaccccggaggccgttagcctgctctgcactgccaaggtcccatgcaccggcgtcaccatggatgacgtcaacgtcgagtatagcggcaccaacaacaagaccatggctatatgcacgaacgccaagggcagcaccaagggttgcctcaaggagcttgcatgcttctagaccctccatcgactgacccatctctctagttataatttttctctcgtccttgcattgcccattagatgctatccattggtaacgcacaacagtaaaacgacagacatccgacagctatattatgttcgacggtgtaacaccctgaatttgagggtataaaatttcttctccaaataccaaccaaattcaagggttaaaaaaaaaaannnaaaannaaaaaaaaaaa

SEQ ID NO: 94231 - DNA, 547 bp, Zea mays
ggtccggagagcgcgattcaagctggttacgtctacaatagtactgtcgtaccggtccggaattcccgggtcgacccacgcgtccgcccacgcgtccgcggacgcgtgggggcaggggagtggaggggaggggaagcatcgcaattgcgaacccccacctcgccgctcccaccaccgcggccgggttgcgtccgtttcgattgcccaggatgagcaccgagtccggggagctgctcgggatcgaccccgtcgagctccggttcccattcgaattaaataagcagatctcctgcacgctgcagctgacgaacaagacagacaagcaggtcgcgttcaaggtgaagacgacaagcccgaaaaagtactgtgttcgcccaaacaacggcatggtggcgccccggtccaaggctgacgttgttgttacgatgcaagcgcagcgggacgtgccaccggacatgcaatgcaaggacaagttccttgtgcagagcgccaccgtcgccaaggaggtcgtgccaaaggaggtcactggagacatgtttaccaaaga

SEQ ID NO: 94232 - DNA, 527 bp, Zea mays
  unsure (1)..(527): unsure at all n locations
atggtgccgagcctagcncatggacgtactgcctctaccggtccggaattcccgggtcgacccacgcgtccgcccacgcgtccgcccacgcgtccgcccacgcgtccgcccacgcgtccgctcttcccttgcgggagcaaagagaagtagccacaagcatgtctggcatcatcgacaagatccaggagacgctccacatcgggggcgaccacaaggaggagcacgagcacaagaagggcgaggagcaccacaagaagggcgaggagcaccacaagaaggacgacggggagcacaaggagggcatcgtggagaagatcaaggacaagatcaccggcgagcacggcgacaagtccggcgaccacaaggacaaagaccatatggagaagaaagataagaagaagacgacagagaagaagcacggggaaggccatgaccatggtgatggtgacggccacagcagcagcagcagcgacagcgactgatctcgcctcgccgagcgccgtacgcacatatgcaccgngcaggtt

SEQ ID NO: 94233 - DNA, 541 bp, Zea mays
  unsure (1)..(541): unsure at all n locations
gttattgagggttgtcgtgagtccaaatcgantactatagacttctcgtccggaattcccgggtcgacccacgcgttcgcttgaagataacactatttattactaccgatgtggagggcagggtccataattccaatttagtaccccgtcctcccaatttcctttgtcattggctgttgttggtgatcttggtcagactagttggacaacatcaaccctgaatcacattaagcagtgtgagcatgatatgcttttactccctggtgatctatcttatgctgattatatgcaacacttgtgggattccttcggcacattggtggagccacttgctagcaaccggccttggatggtgacagaaggcaaccatgagaaggagcacattccattttttgagtcaggatttcaatcttataatgcacgatggaaaatgccttatgaagagagcggatctagatcaaatttgtactactcttttgaagttgctggtgcacacattataatgctaggttcatacacagattatgatgatagctcaaan

SEQ ID NO: 94234 - DNA, 540 bp, Zea mays
tgcgcctgactgaattatggaccgtcatcgcactgacgtaccggtccggaattcccgggtcgacccacgcgtccgctgacacatcgttgtgccaaccttgctcttggtttgactggttgcatgattgctgatgggtaatgccctgccttgtagttgcagggtgtaacactctaatattggtaatactagagaggctctgggccgtggtggcatcgaggacatcaagtacgtcggcagggccccgtcggctgctactgctacgggcttctactcggtgcacgtgcaggattagacggagctggtgcaaaaggccctgcagcgcgaccccatcaactacccgttctgaaagaaacgagacccctgtaaattcttggaaaattgggcaccttttgattttgatatacctctatagagagagcaggccttaaggtatgcctgtgctgctgtgcagccatttgttgaaataatcgtttcggactctacagtaccgcattatatagtatataatttcatgataaatattgtataagtaattattgg

SEQ ID NO: 94235 - DNA, 540 bp, Zea mays
cggtgccctgctgaagactgccagccatgcacgtactgacgtaccggtccggaattcccgggtcgacccacgcgtccgcccacgcgtccgcccacgcgttcgcccacgcgttcgcccactcgtccggaagatacaagagaatttgttggagagttgaatatcacactggtcaaaggcaccaacttggccgttagagacatgctaacaagtgatccatatgttgttttaacgctcggagggcagaaagttcaatcaacggttaaaaaaagtgatctgaatccggtatggaatgaagtgcttaagatatctgttcctcgaaattatggacctctaaaacttgaagtgtatgaccatgatatgttctcagccgatgatatcatgggtgaagcagagatagatcttcagccaatgatcacagccgccatggcctttggagatacttcacgtcttggtgacatgcaaattgggaggtggttcatgaccaaagacaacgccctgatgaaagatagcacggtgaatgttgtggcaggtaaggtaaaa

SEQ ID NO: 94236 - DNA, 541 bp, Zea mays
  unsure (1)..(541): unsure at all n locations
agttttgtagagccgactgacatgagttctntgcgatcgcatgtcgtaccggtccggaattcccgggtcgacccacgcgtccggaactttactgcctcgagcacggcatccagcctgatggccaagtgcctggagataagaccgcgggacatcacgatgatgccttcagcaccttcttcagccagactggtgctgggaagcacgttccccgtgcaatcttcgttgatctagaacccactgtgatcgatgaggtgcgcactggcacgtaccgtcagctcttccaccctgagcagctcatcagtggcaaggaggatgccgctaacaatttcgcccgtggccactacacaattggcaaggagattgttgatctgtgccttgaccgtattcgcaagcttgctgacaactgcaccggcctacagggcttcctggtcttcaatgccgttggtggtggcaccggctctggccttggttctctccttcttgagcgcctgtctgtggagtacggcaagaaatccaagctgggcttgactgtgtacccatt

SEQ ID NO: 94237 - DNA, 546 bp, Zea mays
  unsure (1)..(546): unsure at all n locations
agattataagatgccgataaatttgattcaggttcctcatcgtactgcacgtaccggtccggaattcccgggtcgacccacgcgtccggctggacgtcgggaacaacaacttcctgtcgggggcggccgtccccagggccaacaagcccgactacggcgtcgacttccccggcggccatcccaccggaaggttcagcaatggcgacaacacggctgacttcgtcgcgaagagcatggggttgaagagtagcccttcgccgtatctgtcgcttgcacccaacggctccagccctctgctcgcgcagactgctctcaccactggtgtcagctacgcttccgcagacgctggcgtcctcgactcaaccaacgagggcaagtgcatcccgttgtcgacgcaggtgcgctacttcaacggcaccaaggcgaagatggtcgccaagaatggcgccgtcgcggtgagcaagctgctggccgactccgtcatcctcatgggcatcgccaacaacgacctgttcgtgttcgccgtcgnctagctgttgctgggca

SEQ ID NO: 94238 - DNA, 527 bp, Zea mays
cactgtgcttagggcctgcctattgatgtatcgcatctaccggtccggaattcccgggtcgacccacgcgtccgccgttcccaaaataccccagctgctgcatgtcttgcatgcgaaccgaggagatccgcgaaacgctgaactccatcgtgtggcccgggtgcaactccgccaccagatcgctcatggtttcctcagacgacgatttgccagacggcgtattcgcagcgaatgaagaagaagacggcatggatacgtaccgtcggcggcgacgcgtggtctgcttgacgcgggccagatctccgatgaactagagcaaggagggcaggcgagcgggcgaacgggcgaacagtttcaaaatgctagggtttcacgacgcgcaaaaaggtaagaaagcctgagccacgccgactcccccctttttatacataggacgcgacgcttcaggaagcccgcagtccaacagtacacgttcatcaacggtcacaataaaacccccggaaaaccactttcagcgaaggcagtgt

SEQ ID NO: 94239 - DNA, 542 bp, Zea mays
cgaaagtcggctgctgaagccacttcgactgcacctggcatctcgtccggaattcccgggtcgacccacgcgtacgaaaacgaaccatcgagcaccgactaaacgtgtacaactacttatagaccggaaccgtcaaactgggatggggaaacagaacaaacccatcaaccatggcgaactcggcgtcggggatggccgtgagcgacgagtgcaagctcaagttccaggagctcaagtcgaagcgaagcttccgggtcataacgttcaagatcaacgagcagacgcagcaagtggtggtggacaggctggggcaaccgggcgacacctacgacgacttcaccggctccatgcccgagagcgagtgccggtacgccgtcttcgacttcgacttcaccaccgacgagaactgtcagaagagcaagatcttgttcatctcctggtccccggacacctcgagggtcaagagcaagatgctgtacgcgagctccaaagaccggttcaagaaggagctggagggcattcagcttgagcttgatgccacc

SEQ ID NO: 94240 - DNA, 528 bp, Zea mays
gctgatactaatacgatgcccgtacccgtccggaattcccgggtcgacccacgcgttcgctaccctcgtcgtcgtctcactcaccccgccttcacgcctccctcaccaaataaggtcccgcccttttccgacattcacaggggggacaggaaatcagcggccatggcctcgattccggcgacgaccttcgccgtcatcttatccgtcctcttctgtgccgcggctggcaccgccgtcgacaacgacctccccgactacgtcatccagggccgcgtctactgcgacacctgccgcgccgggttcgtgaccaatgtcaccgagtacatcgcgggcgccaaggtgaggctggagtgcaagcacttcggcaccggcaagctcgagcgctccatcgacggggtgaccgacgcgaacggcacgtacacgatcgagctcaaggacagccacgaggaggacatctgcgaggtggtcttggtggagagcccgcgcaaggactgcgaccaggtgcatgcggacagggaccgctgccgc

SEQ ID NO: 94241 - DNA, 533 bp, Zea mays
  unsure (1)..(533): unsure at all n locations
gatgcgntcgcatcgaaagaatatgactgcacgacgtaccggtccggaattcccgggtcgacccacgcgtccgcgccatcgcgcaccgcctccccgtgtcccctccttctcgcccggcaccgtcgagctcggctgtggaaacagaacaaacccatcaaccatggcgaactcggcgtcggggatggccgtgagcgacgagtgcaagctcaagttccaggagctcaagtcgaagcgaagcttccggttcatcacgttcaagatcaacgagcagacgcagcaggtggtggtggacaggctggggcagccgggcgacacctacgacgacttcaccggctccatgcccgagagcgagtgccgctacgccgtcttcgacttcgacttcaccaccgacgagaactgccagaagagcaagatcttgttcatctcctggtccccggacacctcgagggtcaggagcaagatgctgtacgcgagctccaaggaccggttcaagagggagctggagggcatccagctggagctgcaggccaccg

SEQ ID NO: 94242 - DNA, 542 bp, Zea mays
cgtatagacgtgccgctgacaactgttcggttacgtcagcactgacgtaccggtccggaattcccgggtcgacccacgcgtccgctaataatgatcagtaaatggagcacgcccccctctgcgcctttttcttcttcttcgccttaggcggctgcagcacaacctttatcgccgcatcgaagacacccttcacgtttagttgggtctttgagctgcactcgatgtagtatggcgcgcctatttgctttcttagctcctctccctgagcagtagtgataggaacagcaccaggatgatccacaaagaactgcttgtcatctcgaagatcaagctttgtccctacgagaattattggcacaccaggtgcataatgcttcagttcaggtatccacttcttcgaaacattctcatagctggctttactgatcagcgagaaagccagaagaaaaacatcagctccacgatagctcagtggtctcaggctgttgtaatcctcaagacctgcatgctcatttcctacaccttctacaccttacccaccg

SEQ ID NO: 94243 - DNA, 528 bp, Zea mays
cgtgtgcttgtcatcgtatacgacagtattgcctgcaccggtccggaattcccgggtcgacccacgcgtccggaacgtttgtgtcatctatccttaattcgcttcctggtgttgatcccaatgatccatctgtggaagatttgctggcatcgttgcacagccagggagagcaagagaagaaggaagacacgtcagacaaaacagaagacgagaagaactgatgtagccatgttcacgcctccatgcgcacaaagaaattgaagaccggtctgcgtttactctcttggtcgtggagtttgtttatcctcatataaccgtgctttgattataacttaccgccgagggaatttgtattatgacgctgcaacaatcttctctccatatatgttcaagggattttcgtgtttcaatgctctccaaaaaaaaacaacatccctaaagatatctaagcttacatacctcaatttacaacaaaaaaaaggggcgccgctcgcgatctctaagtctagatcgcgagcggccgcttta

SEQ ID NO: 94244 - DNA, 523 bp, Zea mays
  unsure (1)..(523): unsure at all n locations
gcgtgctgggccagcnctgactgcactgactctaccggtccggaattcccgggtcgacccacgcgtccgcccacgcgtccgcccacgcgtccgcccacgcgtccgcgcgggcctccgcggtgacgcctgcggcttcccttccctcgccaaatgctgcgccgcgctgcgcctgccggggctcggccgcgccgtccacgccctcgcatttctcgcgggcgctgccgtctctcgcgacgccttcgtgcgcacctatctcgtcgacatgtacgccaagtgcggcaggcttcccgacgcgcaccgtctgctcgacgaaacgccgtgctcgagccggacgctggtcggcctggaactgcatgatcctggcgtacggacggagctctcaggtcgagggggccgtcgaggtgttcaacgctatgcggcacgcggaggtcangccccaccgtgagcaccggcgatgggctactgtaccggtgtgcggactcggggtccgtgaggaacctggggaggtccgctatgggctcac

SEQ ID NO: 94245 - DNA, 519 bp, Zea mays
  unsure (1)..(519): unsure at all n locations
aggggtnttaaatatagcactttattgattgctctaccggtccggaattcccgggtcgacccacgcgtccgggagatggatcagactgaggtcctccacctgcttgagtcccctgatgccctcaagtcaaaggttgctgaggcgatggatgttctccacaatgtggcccatcagcaaaacgcaaacaccccgaccagtcagcttgctgcattatcactaaccgaaggcattatctcctaacttgaaagccataacaaactatcttcagtttgcaattgagtgatgtttccagaggttatctggcacatgacagtattgctccttttttttcttctatggttggacttgagtgctgttttcgtatttgcactctgcggtgtactgccgttaaggcaaatcagttgtttgcaagtttgagtgctattgggggccgttgattacatacctgtcttttgcaccttgtcggaagttttgctacttaattgaatgagtgagggaacttgtttgcaaaaaaaaaaa

SEQ ID NO: 94246 - DNA, 526 bp, Zea mays
  unsure (1)..(526): unsure at all n locations
cgcggtnactaagtaccccgacaactactgtatggactctcccggtccggaattcccgggtcgacccacgcgtccggcggcaccaccggcgcgtcctcggctcctcgcgtgcgtgcttaccccggcgaatattcgaccacggaagccgcataacctccgtccatcccatccccgctcgcctctcctctcctcgccccgctctagacgatcgatggccgcgacggcggcggaggagatggagaggatggtggaggcggagtgggaggaggggaagcaggggatgaggaagaggaagcggtacgggctggtggagtaccgggcgctgccggcttacctgcgggacaacgagtacatccaccgccactaccgctgcgagtggccgctcccgcaggtgctgctctccgccttctccatccacaacgagaccctcaacgtctggacgcatcttataggatttttcatctttctcgctctgaccatatacacagcatcacaagttccaaatgcagtagatatccggagcttg

SEQ ID NO: 94247 - DNA, 518 bp, Zea mays
  unsure (1)..(518): unsure at all n locations
aggggtnntnaatacgaacgaattggacggagcgctctaccgggactgaccgggtcgacccacgcgttcgcccacgcgtccgcccacgcgtccgcccacgcgtccgtgcgtttccaagtccgatacaaaccagcgccgcgccgcgcgagcacgtcgggcgacgttgcggcaggcgagatccgagaacactcctccctcgcgcccccgcacccgcatggccgccgctggccgcagatagggaggcgcaggcgggggcgtgcagatccagatccggtgggcggcgaggacgagatcgccccctaccaccatggcgggcgccgtgtcggcgctcttcctgctggacattaagggccgcgtcctcgtctggcgcgactatcgtggtgatgtctccgcgctccaggccgagcgcttcttcaccaagctcctcgacaaggagggcgactcggaagtccactcgcctgtggtctacgacgacgccggcgtcacgtacatgttcatccagcacaacaatgtcgtcc

SEQ ID NO: 94248 - DNA, 523 bp, Zea mays
tcgggtacttgtaaactagcaattactgtatggctcgtccggtccggaattcccgggtcgacccacgcgtccgcccacgcgtccgcagcaaggctgttgagcaagcacagcagcaagttaggtctgccaaaatgtgagcagcggtggtaagaaaggacggagtggatgcacaggcttctgagaaaactcaaaaatcacgcgcgatcttgggtagaagtggtgtaaatggagtagttactgaccacatccagggggtacggcctgctgctgaggcagagagaccaggatcttctgatgcagtgagtgtttgacgcacacccttgttgatcagccaccagtcgtcctgaagccttcagaacaccagtctgagcaggaggcgcttgaaatagcgatcacaaagttgctattgaagtcatattacaatattgtcaggaaaaatgtggaggacttaataccaaaagcagttatgcatttcttggtatgtgattcatatccgattgtcctttcggttaatcatacaaaa

SEQ ID NO: 94249 - DNA, 526 bp, Zea mays
  unsure (1)..(526): unsure at all n locations
gtggnnnntnacggctagcgctcactgaatgcttctaccggtccggaattcccgggtcgacccacgcgtccggcaaagcagaagagatgatctggaatctcttggttatgtgctcatgtatttcttaagaggaagtctcccttggcaaggcctgaaagctggcacaaagaagcagaagtatgataggatcagtgaaaagaaaatgctgacgccagttgaggtcctctgtaaatcatatccatcagagtttactgcatactttcattactgtagatcactacgattcgaagataaaccagattactcctatttgaagagactcttccgtgacttatttatccgcgaggggtaccaactagattatgtatttgactggaccattatgaaatatcctcagtttagagataaaagcaaaattcagtctagcggcaagatgagtgggttggcaggcccttctgcagaaaggactgatagaactgcagctgaagctttgtttagaaggactggatctggttctggtcacaat

SEQ ID NO: 94250 - DNA, 521 bp, Zea mays
gggtcgctgatataacgccaatactgtattgactctcccggtccggaattcccgggtcgacccacgcgtccgcctacgacgaagggaatctatcatggctggctgcaacagaggccgagcctgcaacaatgtcgatcgcaaagagggccatacctgaagctacatcaatcgaagaggccaaccaaatcgtccgcggcaactggctgaatgtaattgaggagcatcatctgaagtacttggggagctctcaggtaacctggacattggctgctctgttggagtaagcaccagatacctcgccgagaagttcccatcagctcaagctgttgggctcgacctatcaccgtactgtcttgctgtggcggcacaaaaggaagaaaaactgtcacggccaaagcctattcgctgggttcatgccaatggtgaagcgaccggcctgtcttcagattcatttgaccttgtctcccttgcttatgtgcacgagcgataaccggattggtgaaggaagcattcagggtcct

SEQ ID NO: 94251 - DNA, 521 bp, Zea mays
  unsure (1)..(521): unsure at all n locations
cacggtnnctngctaccaaagaccatacagatagnatctacaggtccggaattcccgggtcgacccacgcgtccggaagcataaccctgtacatagtgcttttctctaacttcaattgatggtgtgtttgtcaggcgaggggctatcatcacaaccttcattgtgtgctatgctcttacatcgtttatttctggatatgttagtggtggtctttactcaaggagcggtggtatggttctgcacacttttctttaattttcatgtttgtttgcgcaattcagtttctttgcaatatctctttccatgacgtaccttcatgttcttctatttcaaaaatagtctgcagtttaacttgtcatgtatggaatcctcacctcacaaaatatggctcttatcgattgcttcttgaattcatggcaggcaaaaactggattaaagcgatggttcttacagcatccctctttccgttcttgtgtttttcaattggtttcatgctgaatacaattgccattttctaccgn

SEQ ID NO: 94252 - DNA, 524 bp, Zea mays
  unsure (1)..(524): unsure at all n locations
cggtnnttactgcaccagcacataggatatgnatcgtccgtaccggtccggaattcccgggtcgacccacgcgtccgcccacgcgtccgcggacgcgtgggcggacgcgtgggcgcggaagcaagaggaggcgagcgagtactcgaccagccctctccgctcttgtctccgatggcggctcgcgtcctcgcggccctcgccctcgccctcgccctcgtcgccctacccgcgcccacgcgggcgtccaacgacgagggggacgcgctctacgcgctgcggcagcggctgtcggaccccaacggcgtgctgcagagctgggatcccacgctcgtcaccccctgcacttggttccacatctcctgcgaccaggtcggccgcgtcgtccgcctggacttgggcaactccaacgtctccggctccatcggccctgagctcggccgccttgtcaacctcaaatacctggagctgtacaggaacaaccttgacggcgagatccccaaggaattgggcaacctcaagaacct

SEQ ID NO: 94253 - DNA, 519 bp, Zea mays
cggtgcttattaatttaacttcgacttacgtacttttatgaatttcgggtcgaccacgcgtccgagctcgcgtgacaagcatcctgaggaccatttcatgctgatcatcgacgccttcaaccactggtgcagatgcctagtgcacaggatgccaaggtgcctatggtgcttcttccacgtggtcaacatcgactacacgcactggctcatgtactctatcggcggcagaaaggcccacaccatcatcagccagggcaaccgctacattacgccgaccaaccttgcctcaaagcaggtcaccaagcatcatgacacgccggagtccgtgtcgaagaactgggtgtggcacttcgagaacgacctctttatggacggcacctacttcaccgtcaccggctgtcatatcaacagactttttaacatgaaggacctcatcaagccctgtaacggatgctacctcaccaggcttacgcgctacgcctgctatcttaccttcacgctacacaagtcttgttagat

SEQ ID NO: 94254 - DNA, 525 bp, Zea mays
  unsure (1)..(525): unsure at all n locations
ncggtacttgttccctgccaatacagtattgactcgttccggtccggaattcccgggtcgacccacgcgtccggccaaaaggcactgaagaagccagtcaatagcgagttctactactagtagctagcctgctgatctgttctgttgtttagttcgcaaagccttctgtttcggcgaccatggaggatgagaggaacacccagcagcaccagggcggtgaggcccagcaggacgccgccgatcaggtggacgtgaaggatagggggctcctggacagccttctcggcaggaagaagcacgacgacgaccaggagaagaagaagcagacggatgagctggcgaccggcatggagaaggtcacggtgtccgagcccgagaagcacgggcacaaggaggaggagcacgaggtcgtcggcgagaagaaggagggccttctcgccaagctgcaccgcaccagttccagctccagctcgtcgagcgacgaggaagaggaggcgatcgatgagaacggcgagattatcaagt

SEQ ID NO: 94255 - DNA, 519 bp, Zea mays
  unsure (1)..(519): unsure at all n locations
tgggnnttgctgcatacgaaacantataggatcgtccgtaccggtccggaattcccgggtcgacccacgcgtccgctttcaccccagaccaccgctttcctctacgagtacgtcgctaaaggaagcatcctcgacatgctgtgtagccaggaggatttcccgctggatctacgcatgaggatcgcgatcaagaccgcggaagcgttgcagtacctgcattcgtcggaaactggcgtcaccggacacggcagcgtctcggcgtccaccatactcctcgacaacaacctcgtaccgaagctcaccgagttctcgaggtcatgtacgctgttcaagaagagcgagactacttctgttgttggtgctggagtgatgatcactggcagccttctagagaaagctctgaacgacgacccgtcccgctacggctcggtgttgatgaacctggagagcgacgtgtacaggttcggcggcgtcctgatggcgctggtcagcagggacggcgactgcgaccacgacggg

SEQ ID NO: 94256 - DNA, 522 bp, Zea mays
cgcggtacttgttagggggagataaggaatgctctacccggtccggaattcccgggtcgacccacgcgtccgggcgtgcacagacaatgcgatgagagccttgttcctcctggtcctcttctgcatcgtgcatggtgagaaggaagagtcaaagggcatcgatgcgaaagcgtccgggcctggtgggttcttcgacatcaccaagttgggcgcctccggcaatggcaagacagacagcacgaaggctgtgcaggaggcatgggcatcggcgtgcggcggcactgggaagcagacaatcctcatacccaagggcgacttccttgtcggacaactcaacttcacaggcccttgcaagggcgacgtgaccatccaggtggatggcaatctgctggcgaccacggacctaagccagtacaaggaacatggtaattggatcgagattctacgcgtggataacctggtcatcaccggcaagggaaaccttgacgggcagggcccagccgtgtggagcaagaactcctt

SEQ ID NO: 94257 - DNA, 523 bp, Zea mays
  unsure (1)..(523): unsure at all n locations
ntggtnnttactttacgccagcactagtataggatcgctctaccggtccggaattcccgggtcgacccacgcgtccgcccacgcgtccgacattattacgggaacaaaaagaaaaaaaacacgagaaaaatcaaatcaggagacggggattccagagagcccctgtcgggtagggaagggaaggagaggcgaagcggaggcgagatgggggcggccgaatccgtgccggagacctccatacacgaattcaccgtcaaggattgcaacggcaaggaagtgagcctggaaacctacaaggggaaggtcctccttgttgttaacgtcgcctccaaatgtgggttcacggagaccaattacacgcagctgacggagctttatcagaagtacagggacaaagacttcgagatattggcattcccttgcaatcagttcttgcgacaggagccaggtactgatcagcagatacaagactttgcttgcaccagatttaaagctgaatacccaggttttcagaaggtgcgcg

SEQ ID NO: 94258 - DNA, 521 bp, Zea mays
  unsure (1)..(521): unsure at all n locations
atggtnttactgtatccgacatcatcgatgcactgtcgtaccggtccggaattcccgggtcgacccacgcgtccgggaatagagaaggcacttccatttctaaaacccttgattgacttgccattcattaaagcagtcatccaagggtttcttcctggaattgctttgaagatcttccttatagtgcttccaactatactgatgtttatgtctaaatttgaaggactgatatcgaagtcttctttgaaaagggaatctgcattctaatatttcctaattctggtccttcatggaattttggggaaccgtattgccagaacctcttttgaaccagtttaaacctatcttcattcctcaacctaccgcattcccaggatcattggtggcttcattccaattgaaggcacctttttcattacctatgtgatgggtgaagggttgaccggaataactggggaaatattgagaccgaagccgcttatattctttcatctgaaaaactctttcttggtcaaaaccga

SEQ ID NO: 94259 - DNA, 520 bp, Zea mays
  unsure (1)..(520): unsure at all n locations
tggtnttnctttctaagacagtggattggaccgctctaccggtccggaattcccgggtcgacccacgcgtccgcccacgcgtccgggcaggggagtggaggggaggggaagcatcgcaattccgaacccccacgtcgccgctcccaccaccgcggccgggttgcgtccgtttcgattgcccaggatgagcaccgagtccggggagctgctcgggatcgaccccgtcgagctccggttcccattcgaattaaataagcagatctcctgcacgctgcagctgacgaacaagacagacaagcaggtcgcgttcaaggtgaagacgacaagcccgaaaaagtactgtgttcgcccaaacaacggcatggtggcgccccggtccaaggctgacgttgttgttacgatgcaagcgcagcgggacgtgccaccggacatgcaatgcaaggacaagttccttgtgcagagcgccaccgtcgccaaggaggtcgtgccaaaggaggtcactggagacatgtttaccaaa

SEQ ID NO: 94260 - DNA, 521 bp, Zea mays
  unsure (1)..(521): unsure at all n locations
gggtgcttgtgncagtgcacgacgtcngacgtacctttcctgaattcctcgggtcgacccacgcgtccggacacgcttgcatgcacacacaatgcgatgtgagccttgttcctcctggtcctcttctggggggtgcatggtgagaaggaagagtcaaagggcatcgatgcgaaagcgtccggacctggtgggtacttcgacatcaccaagttgggcgcctacggcaatggcaagacagacagcactaaggctgtgcaagaagcatgggcataggcttgcggctgcactcttaaacagacaatcctcatacccaaaggacacttccttgtcctacaactaatcttcacaggcccactcaagggcgacttgaccatccaagtggattgcaatttgctggcgaccacagacctaagccagtacacggaccattgtaatcatatccagattctactcgtctataacacgaacatcaacggctaaggaaaccttgactggcatggcccagatgcgtcgagcaagan

SEQ ID NO: 94261 - DNA, 519 bp, Zea mays
  unsure (1)..(519): unsure at all n locations
cggttnctgtacggggggataaggaaggctctcccggtccggaattcccgggtcgacccacgcgtccgcgaaaacagagcaaatccggcgagccggtgcggcggagggagacgcctgctcgagaaggaggattagcaggaggcagcggagatggatccggacgcagtgaagtcgacgctctctaaccttgccttcggcaacgtcatcgccgccgccgcccgcgacatccagaaggaaatggtggctaaagacaaggctcaagcagcacctgcaagccatgatgaagttgatcttgatgagttgatggatgaccctgaacttgagaagttgcacgcggagagaattgctgcccttaagaaagaggttgagaagcgtgaagtgctaaaaaggcaaggtcacggtgaatacagggaggtaattgaaggggacttccttggggaggttactggcagtgaaagagtcatatgtcatttctatcaccgtgaattttaccgttgcaagatcatggataagcatttt

SEQ ID NO: 94262 - DNA, 518 bp, Zea mays
  unsure (1)..(518): unsure at all n locations
gcgggcttgctgctacagaaagtatacanatcgctctaccggtccggaattcccgggtcgacccacgcgtccgctcacccctccttcacgcctccctcaccaaataaggtcccgcccttttccgacattcacaggggggacaggaaatcagcggccatggcctcgattccggcgactaccttcgccgtcatcttatccgtcctcttctgtgccgcggctggcaccgtcgtcgacaacgacctgcccgactacgtcatccagggccgcgtctactgcgacacctgccgcgccgggttcgtgaccaatgtcaccgagtacatcgcgggcgccaaggtgaggctggagtgcaagcacttcggcaccggcaagctcgagcgctccatcgacggtgtgaccgacgcgaacggcacgtacacgatcgagctcaaggacagccacgaggaggacatctgcgaggtggtcttggtggaaagcccgcgcaagtactgcgaccaggttcaggcggacaggggaccgcc

SEQ ID NO: 94263 - DNA, 523 bp, Zea mays
  unsure (1)..(523): unsure at all n locations
ccggtgcttgatacctcgacaactangatcgaaccgctctaccggtccggaattcccgggtcgacccacgcgtccgcccacgcgtccgccaaaatgatttgcatgagctatggtcattgttggagttcatgatgcctgatatatttgctactggggatgttgatctgaagaagctgctgaatgcagaagatcgcgaactaatttcacagataaagtccattttagggccatttattcttagacgtttgaagtcagatgtaatgcagcagcttgttcctaaaatccaacatgttaagtttgttgtcatgggcacagagcagtctgaagcttacaaaaatgccataaatgagtaccgtgctgcttgccaggctcgtagtgccaagtcttcagatggcatttccaataatgttgctggattgattccaaagcgacaaatatcaaactattttacacagtttcgtaagattgcgaatcaccctttgcttataaagtgtatttatggtgacaaagatgttgatcgaat

SEQ ID NO: 94264 - DNA, 523 bp, Zea mays
  unsure (1)..(523): unsure at all n locations
gtgtgcttgtcccatgccatgacgtagtgcatgctctcggtccggaattcccgggtcgacccacgcgtccgggcgggcaaaaatggcaaaggctctcctaggtggcctatcggcgatcctcgtcgtggcgggggtcgtcggtgtggtcgccaccgtcacccgctccggcaagaaggccggcgacaacttcacggtcccgggggaggcttcccttgccacgtccggcaagtcggtcaagtccctgtgcgcgcccaccctatacaaggagtcgtgcgagaagacactgtcccaggccaccaatggcaccgagaaccccaaggaggtgttccacagcgtggccaaggtggcgctggagtcggtccagacggcggtcgagcagtccaagtcgatcggcgaggccaaggccagcgactccatgaccgagagcgcgcgcgaggactgcangaagctcctggaggacgccgtcgacgacctgaagggcatgctcgagatggccggcggcgacatcaangtgctgttcagc

SEQ ID NO: 94265 - DNA, 520 bp, Zea mays
  unsure (1)..(520): unsure at all n locations
acgtngctgataagggaggataaagataggaatcactcggtccggaattcccgggtcgacccacgcgtccgcccacgcgtccgggagtcagttcaaggaaagaagcacagcatcaaatgttgaaattgaagtgcctgttccttcagatgccacaaacccaaatataagaacttcaatgggttctgctgcatatgctcctgagagagatgcaatggtctggaaagtaaaatcattccctggtggcaaggaatacatgtgcagagcagaatttagtcttcctagcataacagcggaagaaggggccccagaaaagaaggcaccaatacgagtgaaatttgagataccatatttcaccgtatcaggtattcaggtccgttatctgaagataattgaaaagagtggttaccaggcactcccctgggttagatatatcacgatggctggcgaatatgagctgagacttatatgagttttctcttttctggctgatggaagacatttatgaaactgcaagatacat

SEQ ID NO: 94266 - DNA, 525 bp, Zea mays
taggtgactgatactccgaacatatgatagaatcgctctaccggtccggaattcccgggtcgacccacgcgtccgcccacgcgtccgggagctgaagcacgtgcaccaggccatcaagtggggcaccgactacctgctgaaatgcgccgccaggaagaacaagctgtgggtgcaggtcggcgatcccaacctggaccaccagtgctgggtgcggccggagaacatgaaggcgccgcgcacgctgtacgagatcgactcgaagacgcccgggacggagatcgccgtcgagacgtcggccgcgttcgccgcctcgtccatggtgttccgcgacgacaagaagtactcgcgcaagctgctgaacaaggcgaagctgctgttcacgttcgccaagagccacctgggcagctacgacggcgagtgccccttctactgctcctactcgggctacaacgacgagctgctgtgggccgcgacctggctgtacctggcgacgaggcggcaagtgtacgcggacttcatcgtccc

SEQ ID NO: 94267 - DNA, 520 bp, Zea mays
tgggtgctgatgccgttcacaccgcactgacgtaccggtccggaattcccgggtcgacccacgcgtccgcagcaaggtgctcgccatttcacgcattatggtggcatggcaaccggttggcatatcaatgggggtcttcgacatgtgccaccggtatctgaaagaaaggaagcagttcggagtccctctggcggcgtttcagctgaaccaagagaagctcgcccggatgctcggtaacgtccagtcgatggtcctcgtcggctggcgtctctgcaagctctacgagtcggggaaaatgacgccgggccacgctagcctagggaaggcttggaactccaggacggcccgcgaggtggtctcccttggccgagagctgctgggtgggaacgggattttggccgacttccttgtagccaaggcgttctgcgacctggagcccatctactcgtacgagggcacgtacgacatcaacagcctggtgaccggcaaggaggtcaccgtgatcgcgagcttcatgccc

SEQ ID NO: 94268 - DNA, 521 bp, Zea mays
agcgttgctgattccccgaaattactgtaggactctcccggtccggaattcccgggtcgacccacgcgtccgaagcatacaaccttggaaccggaaaaggaacatcagtgttggagatagtcaatgcatttgagaaggcttctggaaagaaaatccctttgatcatgggccaacggcgtcctggtgatgctgagattctcttttcatcgccggcaaaagcagagagagagctccactggaaagcgaaatatggcatcacagaaatgtgcggagacctgtggaactgggctagcaagagcccttatggatacgcggcatctgagtctccgaagctgaatggtagttcacgctgagcaacgccgattggcccgtgtggactcacttgtacatgagactgtagtgccagccaaccaggataaatgtagatctagtcggtcggtcatacagagagaagttctataggcctaggaaagaaatgttatcctgttcctcagcataagctcccatagtggttcttccat

SEQ ID NO: 94269 - DNA, 520 bp, Zea mays
  unsure (1)..(520): unsure at all n locations
aaccgtctcgcagttttcggtntgaccangcatcgtacgttccctgatgtaccaactcgaccgacgcgttcgtacgatacgacctttcaacctgtgctggaacatctttggcggacatagtcaatgcatctacggaagcttccttatagaaaatgcctatcatcatcggccatccgcgtcctgtccatgctgagatcctctctacatctcccccaaacgcagacagagagctccactagaaagctaaatacggcatcacagaaatgtgcgcagacctatagaactgggctagcaagagcccttatggatacacggcatctgactctccgaacctcaatgctagttcacgctgaacaacaccgattgtcccatgtggactcacttgtacatgagactgtagtgccagccaaccacgataaatgtagatctagtcggtcgctcatactgagagaagttctatatgcctatgaaagatatgctatcctgctcctagcataaactcccatatttactcttgcat

SEQ ID NO: 94270 - DNA, 400 bp, Zea mays
  unsure (1)..(400): unsure at all n locations
ggtagcggtgcttgaccacccgatagnagtacggctcgtaccggtccggaattcccgggtcgacccacgcgtccgaaaagccgaacaagtacaactatccaattgggaagaggcgcatgcagccagtgggaataatagttttcgcatcagtgatgggcacacttggcttccaagtgctgatcgaatcagggcgccagctcataactcaggagcacgcggatttcaagttcaagcaagagctctggatggtcattagcatgtcctctgttgcggtcgtgaagttcttcctcatgctctactgccgaacgttcaagaatgagatcgtgagggcctacgcccaggaccatttcttcgacgtaatcacaaactctgtcggcctggtctcggcgctgctcgctgt

SEQ ID NO: 94271 - DNA, 514 bp, Zea mays
  unsure (1)..(514): unsure at all n locations
gttagtgtcggtggtgcccatgccatgagncngtcgtaccgcttcggaattcccgggtcgacccacgcgtccgcccacgcgtccgcgaagagcttcacgcgaagcaatcacaatggatcgtacctgatcaagaactacgagaatccttgaggctcgctgtagccgaagtcctgttgccagcctaccgatcttttatcaaacgctttggcaatcttgtggacaacaacaagaacccgcagaagtacgtgcggtacagcccagaagcagtggaccaacttctaggccagttcttcgaagggcagcaatgggcggagcaaaagcgctgagcaacatagagtgagagtgacggcatgagtacagccagatgccagtaagttcaacagcacagatttcttccgaagcaaccaccagttccttctcgcactacatataatatatagtgacataaacgtctgctgtgcaagcactacctagttntcttttctcagaaaaagcgcgcctaagtttcttttct

SEQ ID NO: 94272 - DNA, 518 bp, Zea mays
  unsure (1)..(518): unsure at all n locations
ggtaagtgtcggtgcttgcgctacncactcagnacgtccgtaccgcttcggaattcccgggtcgacccacgcgtccggcttaaaggacgcagctttcctgggaaggttttgctaacccggcgatccgagcctctgtcccctggctgattattctccaagctttgagagcgagcacgatgaagatgagcgcaaggagggttctcgtcaggagggagaaggtcaagcatctggaaactcatttgacaatgcaagttcaaagaaatcaaatattctgtcaacaagtagttcaaattcattgccagatgctcaggggctagtttctggggctagagctactgattctgcaagaattgctaaattcacaacggaactatctaggccagctgttatattagacaaattgcgtgaactatcttggagtggtgtgcctccatatatgcgacctaatgtatggcggcttcttttgggatatgcaccgcctaataaagatagacgagaaggtgttctaacaaggaaaa

SEQ ID NO: 94273 - DNA, 397 bp, Zea mays
  unsure (1)..(397): unsure at all n locations
gtatgggtcnntngccatggaaagaaaagttcgtcactgctgtaccggtccggaattcccgggtcgacccacgcgtccgcccacgcgtccggctcctcgggaatccggtgccaggcctcgccttctcgcggcggtgctccctccctcttcgtcccccagcgacgcaggcaggcgcgcgcgcggccatgaaggggggcggtgccatgaggccgtcgcctatgttctacgtccacgaggcggacgtcgtccagatccaccacttcctcgaggagtgctccctctgcgccaaatcgctctccggcgacatcttcatgtacaggggtgacacgccgttctgcagcgaggagtgcaaggagcagcagatcgaggtggacagggcgaagcaccggcggaagaa

SEQ ID NO: 94274 - DNA, 394 bp, Zea mays
aggaggtcattaacctaccgaaaatagctacgcagtaccggtccggaattcccgggtcgacccacgcgtccgcccacgcgtccggatgatatcaagtatgatgaggaatatgtattgaatgcacgaggaatgaatctcttcacatgccaatggagacctttgaactctgaaccaaaagctctgatctttctatgccatggatatgccatggaatgcagtatttcaatgagaggcacaggtacaaggttggcgcaggctggatttgtagtgcatggaatggactatgaaggccatggaaaatcttctggacttcaaggatatattaatagtttcgatgacattgtggttgattgctctaagtactttgcaagtgtctgtgagaaagaagagtata

SEQ ID NO: 94275 - DNA, 394 bp, Zea mays
gtggtcagtgaacctacgtatagtagctacgctcgtaccggtccggaattcccgggtcgacccacgcgtccgcggacgcgtgggctctaagtgatggtgaactaaagcctgatgagcaattggttaacgacattattcaagaggttgacaaggataaggatggtcgcatcagttacccagagtttgaattgatgatgaaaagtggatcggactggaggaacgcctctagacgttactcaacagagaatttcagcagcctcagtcaaaaactgtgcaaagatactttatgaaacaagaaagtagtttccaagcagcaattactgactgaagtaccacaccctcaacctcaactaaacagcatcaaagacaacgcaaaagcaggattactggatct

SEQ ID NO: 94276 - DNA, 400 bp, Zea mays
gtaggggtgctgagcataagacagattgctacgctcgtaccggtccggaattcccgggtcgacccacgcgtccgcccacgcgtccggcaaaaccatcagatctagcagaactctctcgacctcatcggcgttggcggagcgcgtgttgaccggagatggcgccgagcgggtggaggaggagcgcggcggcgcgggtcgcctggcgcccggccacggtttgcctgtggctcgcgctcgccgccgccgcactgacgctcgcccaggctaagaaggacctgacggaggttacccacaaggtctacttcgacatcgagatcgacggcaagcccgcaggccggattgtcatggggctttttgggaagactgttcctaagacggcagagaacttccgagctctttg

SEQ ID NO: 94277 - DNA, 525 bp, Zea mays
  unsure (1)..(525): unsure at all n locations
ggggnaagggtctggtgcctgattatagtggatgtgggggaatattggaaccgctccggaattcccgggtcgacccacgcgtccggcgaagcattggatcgactacttgagacaaacaacttccctgaatttactggacgagtatgccctgctccttgtgaggggtcatgtgttcttgggattattgagaatccggtgtctatcaaaagtatagaatgtgcaatcatagacaaaggtttcgaagagggatggatgattccacgacctccacttcaaagaacagggaaggtggccattgttggcagtggaccagctggtttggctgctgcggatcaactaaacaaaatggggcattttgtaactgtgttcgaacgtgcagaccgaattggaggtttaatgatgtacggcgttccaaacatgaagactgacaagattggcattgtccagcgccgtgttaacctaatggcagaagaaggtgtcacatttgtggtgaatgccaatgttggtagtgatcctctgtactcn

SEQ ID NO: 94278 - DNA, 395 bp, Zea mays
gtatgccatgcctgttagagatttatgcactgctcgtaccggtccggaattcccgggtcgacccacgcgtccgagcttaattgcgccactgctcgttatcctcctcttgcattgcattgcaggtcgtaggtgagcagcagcaaccactgcacaggatgtcgtggcagacgtacgtcgatgagcacctcatgtgcgagatcgagggccaccacctgagctctgccgccatagtcggccacgacggcgccgtttgggcccagagcaccgcattcccacagttcaagccagaggagatgaccaacatcattaaggacttcgacgagcctgggtttctggccccgatcggcctcttccttggccccaccaagtacatggtcatccaaggcgagcccggc

SEQ ID NO: 94279 - DNA, 402 bp, Zea mays
  unsure (1)..(402): unsure at all n locations
agtttaggccnntgcccatgataagatagtatgcattgctcgtaccggtccggattcccgggtcgacccacgcgtccgcccacgcgtccggttcacagtccccactccacctccttctacaaatacacctcagtggcagtcccccaccatatccgcttccctaccccccgcatcacctaccaacgagacgccggcgccatgggggccttcgcgaaggaggagcaccagttcctcgccgagctcggcctcgcgcagcgcaacccgggcgcgttcgcatgcggtgcgtggggcggctcaggtcccaccgtcacctccacgagcccgaccaacaatcaggtcatcgcagaggtcgtggaggcgtccgtgcacgactacgaggagggcatgcgcgcctgcttcgac

SEQ ID NO: 94280 - DNA, 404 bp, Zea mays
  unsure (1)..(404): unsure at all n locations
ngtttgtggttattgaaaataagaatanagtacggctcgtatcggtccggaattcccgggtcgacccacgcgtccggttcaaggaggtgaccaagcgggagtacacgcagtacagcgagtacaagaactgggtgtggaagtcgcaggacgacctgttcctcaacggcgccttcttcaaccagtccggcggccagaacgagcgcaagtacgacaggctcgacctcatccaggccaagggcggccagtacgccgagtcgctcaccaggtacgccggcgcgctcaactgccgcgtcggcaggaagtgctagtgcgtgtgcagctctaggctgcagctttcatcattggcgatcgatcgtaacaatgcaaggttgtgttgtatataactcttgtgtttggaatgccgn

SEQ ID NO: 94281 - DNA, 401 bp, Zea mays
gggagcgttacttgaatagaaagaattgtattgctcgtaccggtccggaattcccgggtcgacccacgcgtccgatcacgacaagatggcgtgcacaaacaatgcgatgagagccttgttcctcctggtcgtcttctgcatcgtgcatggtgagaaggaagagtcaaagggcatcgatgcgaaagcgtccgggcctggtgggtccttcgacatcaccaagttgggcgcctccggcaatggcaagacagacagcacgaaggctgtgcaggaggcatgggcatcggcatgcggcggcactgggaagcagacaatcctcatacccaagggtgacttccttgtcggacaactcaacttcacaggcccttgcaagggcgacgtgaccatccaggtggatggcaatc

SEQ ID NO: 94282 - DNA, 526 bp, Zea mays
  unsure (1)..(526): unsure at all n locations
cgtttgtaagggtgccgtgtcccagcnatacgtncacttcgtaccgcttcggaattcccgggtcgacccacgcgtccgcccacgcgtccggacgagttcgacaagcagggcttcaacgtcgaggagatggtcgcgatgctgggcggcggccacagcatcggcgtctgcaggtgcttcttcatcgagaccgacgcggcgcccatcgaccccaagtacaagaagacgatcagcgacgcgtgcgacggcaaggactcgggctccgtccccatggactccacctcgcccaacgacctggacgggagctacttcggcctggtgctggagaagaagatgccgctcaccatcgaccgcctgatggggatggacaagaagacggagcccatagtgaaggccatgtccgacaagaccaccgacttcgtcccgctcttcgccaaggccatggagaagctcagcgtgctcaaggtgctcacggngaaggaaagcgagatcaggaagacgtgctccgagttcaacaacccgcagaact

SEQ ID NO: 94283 - DNA, 517 bp, Zea mays
  unsure (1)..(517): unsure at all n locations
gtatagtncaggtgctgtccctgcctaaagcacccgctccaccgctccggaattcccgggtcgacccacgcgtccgaaggaccttcggcgcccgttcaggatccacatcttcccgagcgagttcttggttgacctcttcctcttcggaccacctccaaggctcttggtgtagcttgccactctcaccaatcaagttttcatgtctgatctcgacattcagatcccaactgccttcgatcccttcgctgaggccaatgctggggactctggtgcggcagcagggtcaaaggactacgtacacgtgcgcatccagcagcgtaatggtcgcaagagcctgaccaccgtccagggattgaagaaggagttcagctacagcaagatcctcaaagatctcaagaaagagttctgctgcaatggtacagtggtccaggacccagaacttggacaggtcattcagctccaaggtgatcagaggaagaacgtctcgaatttcctcgtccaggccggcattgtgaaa

SEQ ID NO: 94284 - DNA, 526 bp, Zea mays
  unsure (1)..(526): unsure at all n locations
agttaggtgaggtgcgtgacctcgactactcaggcactntcgtaccgctccggaattcccgggtcgacccacgcgtccgcccacgcgtccgcccatcagccaagagctacgcaaacgcacagcgatgcacaagcacgagataccagccaccatgcgcctgtccctcctcctcgtcgtcgtggccgccctctcggcgcgcaccgcggcgcagctgccgctggcgggcggcggcggcggcgccctgaagccggacttctatagccagtcgtgcccgcgcgcggagcggatcattgcggaggtgatgcagacgaagcagatggcgaacccgacgacggccgcgggcctgctccgcgtcttcttccacgactgcttcgtcagcgggtgcgacgcgtcggtgctgatcgcgtccacccagttccagaagtcggagcacgacgcggagatcaaccactcccttcccggggacgccttcgacgccgtggtgcgcgccaagctggccctgngagctgagtgccccggngtggtn

SEQ ID NO: 94285 - DNA, 397 bp, Zea mays
agtttatggctcactgagcataaccgaaaagtatgccacgctcgtaccggtccggaattcccgggtcgacccacgcgtccgcggacgcgtgggcctcgacctcaagaaaggcggcaacgggcgctacctcaagacggcggcctacgggcactttgggagggacgaccccgacttcacctgggaggtggtgaagcccctcaaggcggagaagccgtcttctgcatgaggcgcctcctctgtttcggaagaagcttttggtctggtctgcctgcgctctatcatgcttttttatggctcctacgtgttgtgattcttgatctgccccttgcttatcatttgtattgtactgtcactgtcctaataagtggtacgtgtgcggggtcgtattgtgtctgct

SEQ ID NO: 94286 - DNA, 398 bp, Zea mays
  unsure (1)..(398): unsure at all n locations
agtatggccnntgcccatgaaagaaagtatgcacgcctgtccggtccggaattcccgggtcgacccacgcgtccgcccacgcgtccggggttgcaaagcgtgccccatggctcagttggagctgttgcaggtcgtcgtgctatagctcagggaaaccctgatgaagttgctgcagcattgtgtagatattcagcaccagaagaggttgatactttaccatcaacatgtggagcctgtggaacagaatgcgtcacacgtttctttgctacaaaaatcccatatttccgggaggtgattgttatggcaacaacatgtgacatgtgtggttatcgcaattcagagctgaagcctggcggtgaaattccagctaagggaaagaaaattacactgcgtgttca

SEQ ID NO: 94287 - DNA, 400 bp, Zea mays
  unsure (1)..(400): unsure at all n locations
ggtagcgttgcttgaccatcgattanagtaggctcgtatcgtccggattcccgggtcgacccacgcgtccgggcaaaaatggcaaaggctctcctaggtggcctatcggcgatcctcgtcgtggcggtggtcgtcggtgtggtcgccaccgtcacccgctccggcaagaaggccggcgacaacttcacggtcccgggggaggcttcccttgccacgtccggcaagtcggtcaagtccctgtgcgcgcccaccctatacaaggagtcgtgcgagaagacactgtcccaggccaccaatggcaccgagaaccccaaggaggtgttccacagcgtggccaaggtggcgctggagtcggtccagacggcggtcgagcagtccaagtcgatcggcgaggccaagg

SEQ ID NO: 94288 - DNA, 518 bp, Zea mays
  unsure (1)..(518): unsure at all n locations
ggtttagtggcatgctgatccatgacatgaagctactctctaccgctccggaattcccgggtcgacccacgcgtccgccctgcccatcagcacaaccaccaccaccgccgcctggccgtaacgtcacacgctcgcgtccttccatggcgcccaggaacgctgtccccgccgccagcgccgtggccaacggcatggtgatggagccgaggttccgcggcgtccggaagcgcccgtggggcaggttcgcggcggagatccgggacccggccaggaaggcgcgcgtgtggctcggcaccttcgacaccgccgaggccgcggcgcgcgcctacgacgccgccgcgctccacttccgcgggcccaaggccaagaccaacttccccgtcgcgttcgccgcgcttccgccgccgccgcccaagaagccggccgccgtgaccgtgagccccagcagcagcagcaccgtggagtcctnctnctnctnctcccgggactcgcccgccacgccgnccagggccgcgtct

SEQ ID NO: 94289 - DNA, 394 bp, Zea mays
  unsure (1)..(394): unsure at all n locations
ggttatgggttctgatcctagtagtagntgcatcgcgtaccggtccggaattcccgggtcgacccacgcgtccgcgcttcctaccagttaaggcgacatcagatttgcagctagtacagtctgatctatataccttggttgatggcttcgttacacgtaattcagccagaacaaatctatcaaatccctcaattgaacttggtcctgagttcaagaaggttgggagcttccttggtcgcttcaagtcgatacctagcattgttgagcttgacagcttgaaggtttccggtgatgtttggttcggttctggaattgtactgaaggggaaagtgaccatcactgcaaaacctggcgtcaagctagaaatcccagacggagcagtgattgggaataa

SEQ ID NO: 94290 - DNA, 406 bp, Zea mays
ggtgagggtcggtgagcatcagaaatacagtgacgctcgtaccggtccggaattcccgggtcgacccacgcgtccgatcgaccagtacttctgcccgcagaaggtatgccctggcaagcggagcaactcctcgcatgtctccgtcaaggacgtcacgttccgcaacatcaccggcacgtcgtccacgcccgaggccatcagcctgctctgctcggagacgcagccatgcagcggcgtctccctcatcgatgtcaacgtggagtacgccggcaagaacaacaaaaccatggccgtctgcagcaacgccaagggcaccgccaagggaagcatcgaggcactggcttgcctggtctgatgatgaccttccttttgcatgcatgcatggtatctcatccttgatgatgat

SEQ ID NO: 94291 - DNA, 411 bp, Zea mays
aagatgaggggtcactgaactctgaagagagacgtaaatgcactgctcgtaccggtccggaattcccgggtcgacccacgcgtccgctcatatgtcctttctgagtcaagcttgtttatctatcctctgaagattgtcatcaagacctgtggcactaccaagctcctgctcaccattccaagaatccttgagcttgctgaagagctgtctatgccacttgctgctgtgaagtactcccgtgggacgttcatctttcctggcgcacagccagccccccacaggagcttctctgaggaagttgctgcacttaaccgctactttggcggcctgaaatctggtggtaatgcttatgtgattggagatccagcaagacctggacagaagtggcacgtcttctacgccactgagtac

SEQ ID NO: 94292 - DNA, 404 bp, Zea mays
  unsure (1)..(404): unsure at all n locations
ngttagcgtgagtgaccatcgaactancagtacgctcgtaccggtccggaattcccgggtcgacccacgcgtccgcccacgcgtccggtcgtgtgtgtgcaagtggtttgacgaggttgccaagcaggtgctgtggaaggagttctgtcatgcaagggctccaaagatgatgctggatttgcattcaggtggcagccacattgttgatgggaactggaaggcattggggaagctgctcatctattgcaatggctgcacaaaaggggggctgtttaataacattcacgttccaggccattttgtgttcaggacacgcttttctaggactgcgggcaggagtttcctgcctctgccgtgtaagtctgatgtcctgtatgtgtcagatccatgcgagcatcttgatc

SEQ ID NO: 94293 - DNA, 521 bp, Zea mays
agtttgtgagggtgttgtccatgccttgacgtctcgtacgtaccgcttcggaattcccgggtcgacccacgcgtccgcccacgcgtccggagctacaatggaggatttctatgatgtaaaactaactgaaattgatggacaagctattagcctgttcggtgtttttgacggtcatggtggatcacgtgctgctgagtatttgagggagcacttgtttgagaaccttctcaagcaccctgatttcttgacggatacaaagcttgctataagcgaaacatatcagaaaaccgatacagatttcttggaatcggaagcaagtgctttcagggatgatggttcaacagcttcaactgcaattttggtgggtgaccgtctgtatgttgcaaatgttggtgattctcgtgctgttatttcaaaagctggcaaagctatggcactttcagaagatcacaaacctaacaggattgatgagcgaaagagaatagaaaatgctggtggtattgtcatttgggctggtactt

SEQ ID NO: 94294 - DNA, 511 bp, Zea mays
  unsure (1)..(511): unsure at all n locations
agttatgaggtgctgtttttggggcctgggcanatnacagcntcggaattcggctcgacccacgcgtccgcccacgcgtccggagctacaatggatgttttctatgatgtaaaactaactgaaattgggggacgggctattagcctgttcggtgtttttgacggtcatggtggatcacgtgctgctgagtatttgagggagcacttgtttgagaaccttctcaagcaccctgatttcttgacatgatacaaatcttgctataaccgaaacatatcataaaaccgatacagatttcttggaatcggaagcaagtgctttcagggatgattgttcaacagcttcaactgcaattttggtgggtgaccgtctgtatgttgcaaatgttggtgattctcgtgctgttatttcaaaagctggcatagctatggcactttcagaagatcacaaacctaacaggattgatgagcgaaagagaattgtaaatgctgatggtattgtcatttgggctgtt

SEQ ID NO: 94295 - DNA, 524 bp, Zea mays
gtttagagagcgttccgtgtcctagcttacgacgtactcgctaccgcttcggaattcccgggtcgacccacgcgtccgcgctccctaccacttcgacttgagcggcaaggccttcggctccctggcaaagcccgggctcaacgacaagcttcgccactgcggcatcatggacgtcgagttcagaagggtgcggtgcaagtaccccgctgggcagaagatcgtgttccacatcgagaagggctgcaaccccaactacctggccgtgctggtgaagtttgtggcggacgatggcgacatcgtgctgatggaaatccaggacaagttgtcggctgagtggaagcccatgaagctctcttggggcgccatctggaggatggacactgccaaggcgctcaagggccccttctctatccgcctcaccagcgagtccggcaagaaggtcatcgctaaagacatcatcccggcgaactggagacccgatgccgtctacacttccaacgtccaattctactagactttgaatt

SEQ ID NO: 94296 - DNA, 390 bp, Zea mays
ggccagtgtatgaaagaatatatagtattgctcgtaccggtccggaattcccgggtcgacccacgcgtccgatcgcactctcctccagcctccaggcttggcaagcgtgcttcacatgaccacatccatgtcgaacagcgccgctagcgagaagcaatcgcagcaggcaggccacaggcagcggcccccggcggcgtcggccgcggacgcggagatgcagagggtgttctgccgcatcgacgcggacggcgacggccggatctccgcctcggagctggccgcggtgacgcgcgccatctccccgccagcgagctcctcgcacgggcgccgcgaggtggccgccatgatggacgagctggacacggaccgcgacggcttcgtggacctcgg

SEQ ID NO: 94297 - DNA, 408 bp, Zea mays
agttgagtgtcactgaaatatgatggagatgtaatgcactgctcgtaccggtccggaattcccgggtcgacccacgcgtccgcaccctcgtctcaccctccctccctcacacaaataataaggaaaggtcccgcccttttcctccgacatccacaaggggggaggggaaaacacgtacattcacccggcggcaataatggcctcggttccggctccggcgacgacgaccgccgccgtcatcctatgcctatgcgtcgtcctctcctgtgccgcggctgacgacccgaacctccccgactacgtcatccagggccgcgtgtactgcgacacctgccgcgccgggttcgtgaccaacgtcaccgagtacatcgcgggcgccaaggtgaggctggagtgcaagcacttcgg

SEQ ID NO: 94298 - DNA, 399 bp, Zea mays
agatataggctacttgacccagcctagcagcacgctcgtaccggtccggaattcccgggtcgacccacgcgtccgcgcgcagcgcgcccgcgcagcgattgccggcgatggcgagcctcaccctgccgccggcgatggcgaacccacggcaggacgccatcgacctccaaaaggccttcaaagggtttggctgtgacagtacaacagtgataaacatacttactcatcgcgattcagtgcagcgtggactcattcaacaggaatacagggctatgtatcatgaggaactctcccatcgcatttcatctgaactcaatggaaaccacaagaaagctatgttgctgtggattcttgatcctgctggacgtgatgcaactgttttgagagaagctctaagtg

SEQ ID NO: 94299 - DNA, 521 bp, Zea mays
  unsure (1)..(521): unsure at all n locations
agttttaggcgcgtgttgacccaggccacttcagcacgtacgtaccgcttcggaattcccgggtcgacccacgcgtccgaaggcgaccctccctccttcgctccttccgcgccgcctcccggccgtcgccgccatggtgaagtactcgcaggagccgggcaaccctaccaagtcggctaaggccatgggcagggatctgagggtccacttcaagaacacaagggagacagcctttgcgcttcgcaagttgtctttgaccaaggctaagcgataccttgaggatgttattgctcacaagcaggcaattcccttccggagatactgtgggggtgttggtcgcaccgcgcaagctaagtcgcgccactccaatgggcagggccgctggcccgttaaatcagccaggttcatcctggatttgctgaagaatgctgagagtaacgctgatgtgaaaggcttggatgtggacaacctctatgtttcacacatccaggtgaatcaagcccagaagcagaggcgccgcn

SEQ ID NO: 94300 - DNA, 526 bp, Zea mays
  unsure (1)..(526): unsure at all n locations
tgatntgttagggtgttgtcccaggccccatgtcactcgctactcgcttcggaattcccgggtcgacccacgcgtccgcccacgcgtccgcccacgcgtccgtgattgagcaattgtataagtagttcatgttatcgaaatgaaaacaataaaggatcatcatcacggttcttgcaagttgggttgcagggatacgggcaatcaatctgccgagggacctccctatcgtagtaccagtcccccaccgtcttgccagaaccgtgatgatgattgagcaattgtataagtagttcatgttatcgaaatgaaaacaataaaggatcacaacgcgcgcccgtagttgtagatgatgaattataaacacatatgactgagctcaaagttgtttaatcatcatctgttgcgaaatgaggaagacaattggtgtcttgaagctgtgttttcgactgtgtctaaagcgtaaatgtaacgtatattgtgtcttcgcctatgcttaagacattggactagttgattggtcaattta

SEQ ID NO: 94301 - DNA, 529 bp, Zea mays
agtttatggagagtccgtgtccacgattacgaagtagctcgctaccgccccggaattcccgggtcgacccacgcgtccgccaaactttcactcgaaggaaactctagcgaacaaggagttagctcctttcttaccagattcatctcgcatggctgctctcgattttatcgtatgtgataggagcgatgtctttgtgacaaacaacaatggcaacatggccagaatgttggctggtcgaaggagatattttgggcacaggaggaccataagacccaacactaagaaactttactcattatttctgaatcggaccagcatgagttgggacacatttgcatctaaagtccagacctttcaaaagggattcatgggggagcccaatgagattaaactaggaagaggcgaattccatgagcatcctgtagattgcatttgtgcaaaatcgaagggaaaaagcgtacagagcaggcctcacctagttaaaggcgcctgagaagctgtggagaaccattctattgatggggaactt

SEQ ID NO: 94302 - DNA, 517 bp, Zea mays
  unsure (1)..(517): unsure at all n locations
agttttagggcgggtggttgtccctgccactangncngtcgtaccgcttcggaattcccgggtcgacccacgcgtccgcggacgcgtgggcggacgcgtggggtttgggaaggagagggtgtcatcaagtatgggagaaaactaattggtgccacagacccacagaaatctgaaccaggaaccatcaggggtgatcttgccattgttgttggaagaaacatcattcatggaagtgatggcccagagacagcgaaggatgagatcgctttatggtttgaacccaaggagctggtctcttacaccagcaatgcggagaagtggatctatggggtgaattaacgagagagtcaatctgttttttttccttcttttgatctcggttttcacataattgccgacagacctaggcacaaggatgtaataaagtcgctaccgtcacttctgagttggattgtgaccttcaggtgtagtaaggcacaaggaaggatggaaaggaaaggaatataccgtgaaatat

SEQ ID NO: 94303 - DNA, 521 bp, Zea mays
  unsure (1)..(521): unsure at all n locations
agtttagtnttggttggtgatcccagcncactcagnacntacgtaccgcttcggaattcccgggtcgacccacgcgtccgcggacgcgtgggcggacgcgtgggcggacgcgtgggcggacgcgtggggtccccgacggcacggtgatgaagacgatccacacggagaagggcagctgcctcgccaccgacagccacatcacgtgcaaggacggcaaggtctcccaggacatcctgctcaggctcagggacaccgagaccggcgatctcgtcctgcgcctgacctgggtcaacatccccggcgtcgcgcggtgaatcatcccctcgatcggcggggacggggccagggcatgaggcggcggcgacccgactcctgcccagctgattatacatccgtttacctggtattggcataaggagacccttggatgcgtgtaatgtttgtttgcagttctgataaggtgtgcaagaaagctcatgctactgggagcaatgcttgtatctcagttntgcttctgcggg

SEQ ID NO: 94304 - DNA, 550 bp, Zea mays
  unsure (1)..(550): unsure at all n locations
nggccgtnttntaaccgacggagttatntgtatcgctctaccggtccggaattcccgggtcgacccacgcgtccggattcaagttgattaaggaagttggcgatgggactttcgggagtgtatggcgtgctataaataaacagaatggtgaagttgttgctgttaagaaaatgaagaaaaagtattattcttttgaggaatgtatgggtttgcgtgaagtaaagtctttgcggcgcatgaatcatcctaacattgtgaagctcaaagaggttatccgagaaaatgatatattatacttcataatggaatacatggagtgtaatctctaccaacttatgaaggataaggtcaagcctttctcggagtctgaagtacgcaactggtgctttcagatatttcaggctcttgcttacatgcatcagaggggctactttcatcgtgacctcaaacctgagaatctgttagttagcaaagatgtcataaagctagcagactttggtcttgcaagggaagtttcatcattgccgncatatacagaatatgtctcaac

SEQ ID NO: 94305 - DNA, 547 bp, Zea mays
  unsure (1)..(547): unsure at all n locations
ggccggctgttcggggggagaggatggaatgctctaccggtccggaattcccgggtcgacccacgcgtccgcccacgcgtccgcccacgcgtccgcccacgcgtccgagatgctaaagggcatcggcgtggtcggaatgatcgtggtgaccccggagttgttcggtccggtaatcattccgaggccgcacgccatcccgacggtgcaagtctctaacgcggcggggcagaagatcaaggcctacatccacaaggcgcggggcccgacggcgacgttcgtcttcaaaggggcagcgttcaacaccccaaggtcgccgatggtggcgcccttatcctcgcggggcccgaacaggacgagccgtgggattctgaaacccgacatcatcggccccggggtgaacatcatcgacggcgtgccctcgatcgaggacgtggacctgctgcgcaacgcggaggtgcccaggttcgacatcaagtccggcacgtccatggccgcgccgnacctgagcgggatcgtcgcgctgatcaagcacgcctacccgacctgg

SEQ ID NO: 94306 - DNA, 552 bp, Zea mays
  unsure (1)..(552): unsure at all n locations
attcactggtgncttgtacaagcatctgatcgcactgatctaccggncttgaattnnnggntcggnccaggcacgcgtccgcgcaaactctcgcccgagcccgacagatcttcaattccccattccgcccaccgatcgaccttcacgccagtctcggtctcttccgaaggcgtcgcgcgcggttgtttgagaggagaggaggaagatgagggagtgcatctccgtccacatcgggcaggccggcatccaagtcggcaacgcgtgctgggaactttactgcctcgagcacggcatccagcctgatggccaagtgcctggagataagaccgcgggacatcacgatgatgccttcagcaccttcttcagccagactggtgctgggaagcacgttccccgtgcaatcttcgttgatctagaacccactgtgatcgatgaggtgcgcactggcacgtaccgncagctctttcaccctgagcagctcattagtggcaaggaggatgccggttacaatttcgcccgtggccactacacaattggcaaggagattgtgat

SEQ ID NO: 94307 - DNA, 550 bp, Zea mays
  unsure (1)..(550): unsure at all n locations
ngggagttactagtacggcagggggacgtaaaggaactnctccnccggnctggaattcccgggtcgacccacgcgtccgcccacgcgtacgtccacgcgtacggtgatcttccccgaacccagcgccgctcccggtggacagggctaccgctaacgtcggcgtcgacgcctcaagggcacccgtgtacggctctcgcgcgaccaggttcatggcttggacgaggtcctagcggcagtcggcgtgctccgacgaagctgcgcctgcagtactgccggccatcgaggagcctcagagattgctgaagaaagtggtggccgacggcatcagtgcttgagagagctgtggcggcgcgacgggagcagcacaggacatgagtgccaccaagaaccacgtcatgtgagaccgaaagcgacgagagaagctcaacgagatgctcctcgtngctaagtcactgcttccgttcatgcacagggtgaacaaagcgtcgatcctgggcgataccatagtctacctcatggagcttcatcgaacggtgcaagagctgtagtc

SEQ ID NO: 94308 - DNA, 534 bp, Zea mays
  unsure (1)..(534): unsure at all n locations
ggtacggngctgtaacaaagaacactattattgtactgnctctaccggtccggaattcccgggtcgacccacgcgtccggtcgcgccgccgcctcaccggcacgctcttcggctaccgcgacggccgcgtgtcgctgtcgctgcagcagaacgcgcggtgccagcccacgctggtggtcgagctggcgctcccgacgcacgcgctgctccgcgagctcggcgcccacgcgggcgcgcgcatcgtgctggaggtcgagaagcgcgccgagcagggcaccgccgacggcaacgaggccatcgccaccaccgaccacgacgggtgggtgctggaggagctcatgtggaccatgttctgcaacggcaagagggtgggctacgcggtgcggcgggaccccaccgaggaggacatcgccgtgctggagacgctgtgggccgtctccatgggcggcggcgtgctccccggcaggtcggacatggacggccccgacggcgagatggcgtacatgcgcgggagcttcgagcacaccgtcgggt

SEQ ID NO: 94309 - DNA, 531 bp, Zea mays
  unsure (1)..(531): unsure at all n locations
ccgtnnntaaaaaggaacgaaatgtattgtatcgctgtaccggtccggaattcccgggtcgacccacgcgtccgacgaggcgcaccggtgctgggaggacatcttcgacgccatcagcggcgctaagcacctgatgtacatcacgggttggtcggtgtacacggagatcacgctactcaaggacggcgcccgcccacccaggcccggcagcggcgtcacgctcggcgagctgctcaagaagaaagccggcgagggcgtacgtgtgctcatgctcgtctgggacgaccgcacctgcgtcggggcgctcaagaaggacgggctcatggccacccacgacgaggagacgatgaactacttcgagggcaccgacgtacactgcgtgctatgcccgcgaaaccccgacgacttcgggagcatcgtgcatgacctgcagatctccaccatgttcacgcaccaccagaagatcgtcgtcgtcgaccacgacatgccggtgcagcggtcgcatcggcagctgaggatcctcagcttcgg

SEQ ID NO: 94310 - DNA, 524 bp, Zea mays
gctgtgtgtgaccaagacagtttaatgacgatctaccggtccggaattcccgggtcgacccacgcgtccggttttagttaatattttatgttattcgcatgtcatgatcaggaatgtgaaattcagttgtaatataaacatttttactccagtattctttgtatgatagtctaacggtttctcatatgcagagactcttgtacattcaacattggatcagtgcgacagtgctgattataccctagaagttctcttcaatatgaaaaatcacacagtgcatgtgaagaaaaggccttacctgaaagtgtttcttgagaaggttgctcagatgtttgagctcgtcattctcacagctagtcagagaatctatgctgagcatcttatagataaacttgatcctgatggaaaatatatctcacggcgtatttatcgtgaatcttgtatattctctgacggttgctatacaaaggatctgacaatcttggggatcgacttggcgaaagttgcaatagttgacaatactc

SEQ ID NO: 94311 - DNA, 543 bp, Zea mays
agggaagtgctgctacgagggggggtatggaatgctcgtccggaattcccgggtcgacccacgcgtccgggagccatgaagcatacctacttttccctgttcatctggatggtactttgtttgacaacgctaacatcatgctgtccagaagggaattctattccacagctgatgttctgcaaatattccagcagatgtgtgaagggctgaaacacatgcacagctttgatcctccatacgctcataatgatgttaagcctggtaatgttcttataacctggcgtaaaggacaagcacctgttgcaactttaatggattttggaagtgcaaggcctgcaagaaagggaaatccgtctcgttctgaggcactacagttgcaggaatgggccgctgagcattgctctgctccttaccgggcccctgaattatgggactgcccaagccatgccgatattgatgagaggacagacatctgggctctaggatgcactctttttgctatcatgtacaatgtttcaccatttgagtatgctcttggtgaat

SEQ ID NO: 94312 - DNA, 547 bp, Zea mays
  unsure (1)..(547): unsure at all n locations
ncgtgcttgaaccagacccggaagtattgtactaccncncccnntntnnnttnccgggtcgacccacgcgtccgcccacgcgtccgcggacgcgtgggtgaaacagttaagaattcatatataagagtgcatatatatatatataattctgccaagacaaaggtaatggagtcgtcacgcatgttccagccggccatcatcctgcttctcctgctcattgtgaccaccgatgtggcgcaggcggcgagggaatgcgagaaggacagcgagcgattccttggggcatgcatggcgtcggacaactgcgccaacgtgtgccgcggtgagggcttctccggcggcaggtgcagcaccttccgccgccgctgcatctgcactaagccgtgctaaattaacctactcccggcagtttcgatggtggacgtttattctatctattggcttacttgattatttttcccctaacaataagaaaacgcacgtgctggcatgtacgtngngttgnatatgctattcttgctggcttcatttgctgaatactgatgaa

SEQ ID NO: 94313 - DNA, 552 bp, Zea mays
  unsure (1)..(552): unsure at all n locations
nggaactgcttgtacgggggggggagggaaggaatactcgtccggaattcccgggtcgacccacgcgtccgcccacgcgtccgcaacgcttctcctgctggttactccgcgcgccttctctttctctcccggacgtcgatcgtgttcttcagcacgggctagctagctccctccctcccagccatggcgacgccgttgcatctccatttcgttctggaattggggcgttgcacacccatgccgtcgcgttgccttgggttgtaggacaacaaggggcacgggcatccgctgcccaagtttggggagtgggacgtgaagaatccggccacgtccgagggcttcaccgtcatattccagaaggcccgcgacgacaagaagaccaccaccggccctggggctgggaacgcgcgcgcaggcattccggcggccttcaggaacggcggcggcgacggcgggtacaggcccgacttcggcgacggcaaccagtacacgctcgccaaacggaagaagtgggccttctgtggctgctgaatcgaagctcgctgtgctgcc

SEQ ID NO: 94314 - DNA, 526 bp, Zea mays
  unsure (1)..(526): unsure at all n locations
acgggtttattccgagggggatggaatggatcgctctaccggtccggaattcccgggtcgacccacgcgtccgcggacgcgtgggcggacgcgtgggctggggcctcatcggcccgcgcaggatcttcggcgacctcggcacctactcggcggtcaactggttcttcctgggcggcgccgtcgcgcccctcctcgtgtggctcgcgcaccgggcgttcccgagccagagctggatcctgctcgtcaacatgcccgtgctcatcggctccaccggcatgatgccgccggccaccgccgtcaactacaccacgtggatcattgccgggttcctgtcggggtacgtggtctacaggtaccggcgtcactggtgggagcgccacaactacctgctctctggcgcgctcgacgctggcctggcgttcatggccgtgctcatctacctgtgcttgggcttggagaacgtcggcctcaactggtggggcaatgatctggacgggtgccctctcgcctcttgtnccactgccaa

SEQ ID NO: 94315 - DNA, 545 bp, Zea mays
tggcccgtgcttgctcgcgtgtaggacggacggaagtactcgtccggaattcccgggtcgacccacgcgtccgggactcgcccgccgtggcggacgtctggccgtccacctccgcgttcgatgggtacctctccgcgctctccccgatccagcttgttcgcagcaacagccgccgttttatgccttctcaagctgatgaagaaattcatcagttgtcctttctgcaaaagcatatggcgaatattcttactctcttggcagattctgttgagggtgagggtgacgattcactggtattgacaatggagacttttgagcaccttggatttctagttcagttctcagaaggaacttctttaaccaggctgctacatttttgcaaactcagacccagacatgcctgctgtgcctggtcctgctggtcagggtcctgattggatgtcacagaacatagcttttttcgctggaatatcctcctgagaagtccgtaactaaggaaagcaccagcaaaccatgtctgaacttgatgtgaccatggcttgagc

SEQ ID NO: 94316 - DNA, 552 bp, Zea mays
  unsure (1)..(552): unsure at all n locations
aggtgacttacgagggggggaggatggacatgcttctaccggtccggaattcccgggtcgacccacgcgtccgcccacgcgtccgcccacgcgtccgcggacgcgtgggggaagagcagtttgctgaaaattttactcccaattatactgtgtgtgctgctactcatgcttggagcccttgtctggacatgtaaaagcagaggcaaacggcaaaagaagagagttcaaaagagaaggatgctagaatacttgagttctactgatgacgctggggacaagaacataaacttcccatttattagctttgaaaacattgtcacagcaacagataatttctctgaatctaatttgcttgggaaaggaggttttggcaaagtgtacaagggaatgttggaaggcacaaaggaagtagctgtcaagagacttagcacgggttccggccaaggcaaggaggagttcaaaaatgaagtagtcctaattgcaaagttgcagcacaagaacctagttaagcttctcggttgttgtattcatgaagatgagaagctgntagtt

SEQ ID NO: 94317 - DNA, 546 bp, Zea mays
  unsure (1)..(546): unsure at all n locations
tgctgtaccgggggggtgggaagtaggtatcggtccggaattcccgggtcgacccacgcgtccgcaagttcttccacatgaacatgtaccggtgcaaggacatgctgatcaaggacgtgaccgtgacggcgcccggggacagccccaacacggatggcatccacatgggcgactcatccgggatcacgatcaccaacaccgtcattggcgtcggtgacgactgcatctccatcggccccgggacctccaaggtgaacatcaccggcgtgacctgcggccctggccacggcatcagcatcggcagcctagggcggtacaaggacgagaaggacgtcacggacatcaacgtcaaggattgcactcttaagaagacgatgttcggcgtccgcatcaaggcgtacgaagacgccgnctgcgtgctcaccgtctncaagatccactacgagaatatcaagatggaggactcagtcaaccccaatttcatcgacatgaagtacttgccccacaaagtgtgtacttgccacggcgccttcaaggcaccgtaaa

SEQ ID NO: 94318 - DNA, 524 bp, Zea mays
ctgtgctgttcgcgaggatatgtatgaatcgcctaccggtccggaattcccgggtcgacccacgcgtccgatcaaatgcttgttataagcagtggtaatgagaaatatgagataatgaatgctataaattccttaatgcttgatgggaaatggtcaaatcaagaatcttctgtcaaggaagtagtttccactgctagggtccaaagtttaaagaaactggtgaaagagaagctgcatcaatggctcatctgcaaagtaaacgatgatggaaagggtcccaatgttctgtgcaaggaaggacagggtgtgattcatttagtagcagcactgggttatgattgggctataagaccgataatgattgctggtgtcaatgtgaacttccgggatgctcatggatggactgcactccactgggctgcatctttgggaagagagcggacagttagtgtcctcatagcaaatggagctgcagcaagagcactaactgatccaacttctgagttcccttcttgaaagagtcc

SEQ ID NO: 94319 - DNA, 549 bp, Zea mays
  unsure (1)..(549): unsure at all n locations
tgtatatgggctgctacgcgggggagaggatggaaatgcttgtaccggtccggaattcccgggtcgacccacgcgtccgtgctcatggtgttttcactaatccagatctttttcccactgggcaagatctctgtgatgatatatggtggattggcatctcttatcttctgtggctatatcatctatgacacagacaatatcatcaagcgccacacatacgatcaatacatatgggcagctgtttcactctacctcgacgtcatcaacttgttcctgtctctgctgcagctgctgagggcagccgatagctgagctcattaatggagtgtttggtttgagaaatgatatagtccatcatcttctcactcctcacttttttgtttggtttgtggaatggagtgagttaatccaccaccacctcattctttataattagttgtttagtactaatatgtggaataaagtcatcccactaaaaaaaacanannanaaaaaaaaaaaaaaaaaaaaaaaaaaaaaaaaaaaaaaaaaaaaaaganaannaactaa

SEQ ID NO: 94320 - DNA, 528 bp, Zea mays
  unsure (1)..(528): unsure at all n locations
gtctggttnntttggtgaaggatgtaatggaatcgctgtaccggtccggaattcccgggtcgacccacgcgtccgcttcgtgatggtcatcgccctgcacttgtgcagcagccagcctagcagcagccgccgtgcccgcaagctcgacatggagggcctcgaggagaagtcgcccgagtacgtggccgtcaagaaggcgtcgtcgacaccgcagaagagctcctcgtggctcgggaggagggcagggtcgtcgcttggtgggcttggacacagacgggccgcttctgccgcgaaggtggacgatctaagcagcagatccgcgggggatctggtcatggtgaacgaaagcaagggcgtctttgggctcacggacctcatgaaagcggcggccgaagtgatcgggagcggtgggctcgggtcggcatacaaggcggtgatggccaacggcgtggccgtcgtggtcaagctgctccgcgacatgaaccgggcgaccaatgacgcgttcgaattcgagatgaagcggctcgg

SEQ ID NO: 94321 - DNA, 554 bp, Zea mays
  unsure (1)..(554): unsure at all n locations
gttaaaggnttgcttcgagggggaatgaagaacgctctaccggtccggaattcccgggtcgacccacgcgtccgcccacgcgtccgcccacgcgtccggcgacatttcgaataacacagttgagcgcgacgatgggatccctcgctaataacatcatggtcgtgggtgtcgtccttgcagcgctcgtcgccggcgggtcatgcgggcccccgaaggtgccgcccggtcccaacatcaccaccaactacaacggcaagtggctcaccgccagggccacctggtacggtcagcccaacggtgccggcgctcctgacaacggcggtgcgtgcgggatcaagaacgtgaacctgccaccctacagcggcatgacggcgtgtggcaacgtccccatcttcaaggacggcaagggttgcggctcatgctatgaggtgagatgcaaggaaaaacctgagtgctcgggcaatccagtcacggtgtacatcactgacatgaactacgagcctatcgctccctaccacttcgacttgagcggcanggccttcnngctccttgca

SEQ ID NO: 94322 - DNA, 549 bp, Zea mays
  unsure (1)..(549): unsure at all n locations
gttatgcgcttgtacgcgcgggagaggacgtgatgctgtaccggtccggaattcccgggtcgacccacgcgtccgggtgatcctaagggagtactaatctcgaacaagagcattgttaccattgtttcagcagtagatgagttcctcagcaactcaaacgagcagcttaacatggatgacgtttacatttcctatcttccgcttgctcatatatttgaccgggtgattgaggaggtgttcattcgtcatggtgcttcaattggattttggcgtggggatgtcaaactcttggttgaagacattggagaactcaaaccaacagttttttgtgctgttccacgtgttctagacagaatttatggaggattgcaagataaaattacagctggtggtttcctaaagaaaaccttgttcaatgttgcttacaaatacaaacaaggcaatatgttgaaggggaacaagcatgaagaggcttgtggccatgtttgatcgcctggtcttcaccaagggtgaaacggggactangtgggaagggtncggctgattctt

SEQ ID NO: 94323 - DNA, 521 bp, Zea mays
  unsure (1)..(521): unsure at all n locations
nacggttctacgggggggaatatgggacgctgtaccggtccggaattcccgggtcgacccacgcgtccgcccacgcgtccggacgacggcaccaaggtggcggtgaagcgcgggagcgcggagtcggagcagggcatcaacgagttcaacacggagatccagatgctgtcgaagctgcggcaccggcacctggtgtccctgatcggctactgcgacgagaaccaggagatgatcctggtgtacgagtacatgcacaacggcgtgttccgggaccacatctacggcagcgaggggaaggcgccgctgccgtggaagcagcggctggagatctgcatcggcgccgcccgggggctgcactacctgcacacgggcacggcgcatgggatcatccaccgcgacgtgaagaccaccaacatcctgctggacgacaacttcgtggccaaggtgtcggacttcgggctgtccaaggacgggcccgggatgaaccagctgcacgtgagcaccgccgtgaagggcatctt

SEQ ID NO: 94324 - DNA, 521 bp, Zea mays
  unsure (1)..(521): unsure at all n locations
cggctattagggggggacggaatgatttaccggtccggaattcccgggtcgacccacgcgtccgctcgtctcaccctccctccctcacacaaataataaggaaaggtcccgcccttttcctccgacatccacaaggggggaggggaaaacacgtacattcacccggcggcaataatggcctcggttccggctccggcgacgacgaccgccgtcgtcatcctatgcctatgcgtcgtcctctcctgtgccgcggctgacgacccgaacctncccgactacgtcatccagggccgcgtgtactgcgacacctgccgcgccgggttcgtgaccaacgtcaacgagtacatcgcgggcgccaaagtgaggctggaatgccagcacttcggcaacggcaagcttcagcgcgccatcgacggggtcaccgacgcgaccgggacctacacgatcgagctcaaagacaggcacgaggaggacatatggcaagtggtgcttgtggccaaaccgcgcaaagactgtgacca

SEQ ID NO: 94325 - DNA, 555 bp, Zea mays
  unsure (1)..(555): unsure at all n locations
nggttacggtnnntaaaaccgaacgaagatgtaatgatctaccggtccggaattcccgggtcgacccacgcgtccgcgcagaccgcgtcgagaagatgctcgccgtgctcgacaccaacatgctctgagtgaaccctgactgtggtctcaagacacgcaagtacacagacgtcaagccctgcctgaccaacatggtctctgtcaccaagctcatgcgcacccaacttgacagctcgaaatgaggtacctagatagctccatggtctgatagctcagaatgaaccagatgttttgacataatttgggtgatacccgctaggccatggaggaagtgatacgttagcctctcattggtgggatacaccattacaaagatgcgttctaagaacggagtgagagcttttctttgcgctatgaatctgggggtatgtgtgagctatggttataaacagagatgaaatacgcaatgttgctatagcatgagccaagtcaccaaagctgacgcagaagaagaactgcagcgacaccccttacacaccagagggaggaaacggc

SEQ ID NO: 94326 - DNA, 561 bp, Zea mays
  unsure (1)..(561): unsure at all n locations
gggaatacggnntngctatcggggggcggaaggaatgtatctctcggtccggaattcccgggtcgacccacgcgtccgcggacgcgtgggcgatcacgacaagatggcgtgcacaaacaatgcgatgagagccttgttgctcctggtcctcttctgcatcgtgcatggtgagaaggaagagtcaaagggcatcgatgcgaaagcgtccgggcctggtgggtccttcgacatcaccaagttgggcgcctccggcaatggcaagacagacagcacgaaggctgtgcaggaggcatgggcatcggcatgcggcggcactgggaagcagacaatcctcatacccaagggtgacttccttgtcggacaactcaacttcacaggcccttgcaagggcgacgtgaccatccaggtggatggcaatctgctggcgaccacggacctaagccagtacaaggaccatggtaattggatcgagattctacgcgtggataacctggtcatcaccgcaagggaaaccttgacgggcagggcccagccgtgtggagcaagaactcctgcaccaaa

SEQ ID NO: 94327 - DNA, 553 bp, Zea mays
  unsure (1)..(553): unsure at all n locations
aggtcggtnnntgctgctagccgacatcgatacgactgcacgtaccggtccggaattcccgggtcgacccacgcgtccggcaaagggcaccacatttgaggatgtcatctccatggtaaagggggtgatacctgatctgtgctgccctgtagcgcttttcacatattacaacccgatcctgaagcgtggtgtccccaacttcatgagtattgttaaagaagctggggtacacggtcttgtggtaccagatgttcctttggaagagacagatgtcttgaggagtgaggctgccaaaaacaacctagagctggtgctattgacaacaccgactacaccaaatgaaagaatggagaaaattgcacaggcttcagaaggatttatttatcttgtaagcactgttggagttactggtacacgtgcaaatgtaagcggcaaggtgcaatctcttcttcaggatatcaagaaggtgacagaaaaacccgtggctgttggctttggtgtgtcgactccagagcatgtccggcagaatgcangatggggcccagatggtgtt

SEQ ID NO: 94328 - DNA, 548 bp, Zea mays
  unsure (1)..(548): unsure at all n locations
gtgggattgtgtactccgcacnatggattgnatctaccggtccggaattcccgggtcgacccacgcgtccgcggacgcgtgggcgcttccgctccacaggatcctctgcgccacccacaaccgtgtgaccgtgcgtgctgccggcgacccctatccgccgacccgtccgtcccaccacaccccaccgccgctcgcagctatgtcgccgtcggagccgacgcgggaggagagcgtgtacatggccaagctggcagagcaggcggagcggtacgaggagatggtcgagttcatggagcgcgtcgcgcgctccgccggcggcgccggcggaggggaggagctctccgtggaggagcgcaacctgctgtccgtcgcctacaagaacgtcatcggcgcccgcagggcctcgtggcggatcatctcctncatcgagcagaaggaggagggccgcgggaacgaggcgcacgccgnctncatccgcgcctaccggttcagatcgagaccgagctcggccggatctgcgacggcatnctcggcctgctcgactccac

SEQ ID NO: 94329 - DNA, 522 bp, Zea mays
  unsure (1)..(522): unsure at all n locations
agggntgttatagtgggggagggaagcatcgctcttcctganttnnngnncgacccggcgangcgtncgcggacgcgtgggcaggcctcaagttcaccatcactgtctggaaaactggagtcaaagtggagacccagaagatgatgctggggacgttcagcccccagctagagccctatgtctacgagggcgaagaatagaccacccctgctggcatttgtgcgagaggatcttattctgccaaactaaagtgtgctgatgatgatggcaagtgcttcctggagatgagttactactttgagattagataggagtggccaggatctcaatgatgtgtggaccagcatggctgactcgtcagagtatgttagagctcatagctgagccaagcacaagatgtggactcatcttcgagaatgatttccattcgatacttcgtcttggatcgcattacaatttgctttgaatcgtcattgtacagtcgtcatgacataaaactggttattcatcacatatataaca

SEQ ID NO: 94330 - DNA, 608 bp, Zea mays
  unsure (1)..(608): unsure at all n locations
cgtgctagtgcactcagacacagagtattgtacggaccgntnccggnatcggaattctccgggtcggacccacgccgtccgcccacgccgtccgcggacgccgtgggcggacgtgtgggttcagagtcaacacagtctgagcacggacgactgggagtccctcgactaataagcatcataggatcgtgggcgcacgttccttgcggctgcttgtcgtacagcgggtcgctgcgggcgccccgaaggtgccagaccggcgcccaactatcaccaccaactacaactggcaaagtcggctcatccgcacagggccactctggtaccggtcaggcccaactggttgccggctgctcactgacgaacggccggtgtcgtgccgggatcaatgagacgtgacacctgccacgcctacagtcggcatgacgtgcgtgcggcaaccgtccccatcttcaaggacggcaagggctgtggctcatgctacgaggtgagatgcaaggaaaaacctgagtgctcgggcaatcctgtcacggtgttcatcacagacatgaactacgagcctatcggtgcctaccacttcgacttgagcggcagggccttcggctccctgg

SEQ ID NO: 94331 - DNA, 560 bp, Zea mays
  unsure (1)..(560): unsure at all n locations
ggtccggggnnnnnactgaatctcctctctcgtacnnncgnnnnnnnnttnnnnnnnngngtcgacccacgcgtccgcccacgcgtccgcccacgcgtccgcccacgcgtccgcccacgcgtccgcccacgcgtccgcaggccgagaaggacttgcagccttggattgctagagatgacgaacaaggtcagaagatgtggagagtcaaccagcgtatagtgaagcttatagctgagcttatgaggaaccatgacagccctgaagcgttggtgatactcgctagtgcctccgaccttctacttcgtgctaccgatggaatgctcgtcgatggtgaagcttgtactttgccacagcttgagcttctggaagtgaccgctcgggctgtccatcttatcatcgaatggggagattcaggtttatcagttgcagatggtctttcaaatctgctgaaggcatgccccgtcttcatctgccttcgttctcactcattcaaacgccacccatgcatncttcgtaactcaacaggttaactgaatattgtgatctgcagtgccgtctat

SEQ ID NO: 94332 - DNA, 557 bp, Zea mays
  unsure (1)..(557): unsure at all n locations
ngggactgtgctagcttcatcgccacgatatgtactgatctaccggtccggaattcccgggtcgacccacgcgtccggagcagcatttcgagtaacacagttgagcacgacgatgggatccctcgctaataacatcatggtcgtgggcgccgtccttgcggcgcttgtcgtcggcgggtcgtgcgggcccccgaaggtgccgcccggccccaacatcaccaccaactacaacggcaagtggctcaccgccagggccacctggtacggtcagcccaacggtgccggcgctcctgacaacggcggtgcgtgcgggatcaagaacgtgaacctgccaccctacagcggcatgacggcgtgcggcaacgtccccatcttcaaggacggcaagggctgtggctcatgctacgaggtgagatgcaaggaaaaacctgagtgctcgggcaatcctgtcacggtgttcatcacagacatgaactacgagcctatcgctccctaccacttcgacttgagcgggcaagcccttcggctccctggcaagcccgggctcaacgacaagc

SEQ ID NO: 94333 - DNA, 566 bp, Zea mays
  unsure (1)..(566): unsure at all n locations
agtttgggnnttcctaccgaatgcgatcgatgnaactgacggtccggaattgacgggccgggtcgaccgacgcgtccgtccacgcgtgcgcccacgcgtcgaccactttgcgcccacgcgtacgcccacgcgtgcgcgggccgagaaggacttgcagccttggattgctagagatgacgaacaaggtcagaagatgtggagagtcaaccagcgtatagtgaagcttatagctgagcttatgaggaaccatgacagccctgaagcgttggtgatactcgctagtgcctccgaccttctacttcgtgctaccgatggaatgctcgtcgatggtgaagcttgtactttgccacagcttgaacttctggaagtgaccgattcggctggtcatcttatcatcgaatgtggagaattacggttatcacttgcagatgggctttcaaatctggttaaaggcatgcccccggcttcatatgccctttgttcttactcattcaaacgccaacccttgaatcctttgtaactaaccatggttacttaatattggggacttgaatggccgctattaa

SEQ ID NO: 94334 - DNA, 531 bp, Zea mays
  unsure (1)..(531): unsure at all n locations
cggggnntanttttgggagggtagaagaacgtgatcgctcttccggtccggaattcccgggtcgacccacgcgtccggtctgatcctggtgtgttcactgagctgattcagcaaatgcaagtgaaaggtgtacaggtggaagagctttactctctcgatgtgggctctcttagtcaactgcggccagtatatgggctaatttttctcttcaagtggatacccggggagaaggatgaacggcctgttgtcagagatcctaacccaaaccttttctttgcgcaccaagtcatcactaatgcatgtgctactcaagctattctctcagttctcatgaatcgccctgaaattgacattggcccagaattatctcaattgaaggaattcacaggagcttttacacctgatctgaagggcttggctattagcaacagcgaatctatccggacatctcataacagctttgcaaggccagagccatttatttctgatgagcanagggccgcgactaaggatgatgatgtttaccatttc

SEQ ID NO: 94335 - DNA, 531 bp, Zea mays
  unsure (1)..(531): unsure at all n locations
cggggaaanaactgtttctaattttctttcgacttcccnnnncggtccggaattcccgggtcgacccacgcgtccggtcgttgtgagaattcttaattcatgagttgtagggagggacttatgtcaccacaaacagaaactaaagcaagtgttggatttaaagctggtgttaaggattataaattgacttactacaccccggagtacgaaaccaaggatactgatatcttggcagcattccgagtaactcctcagctcggggttccgcctgaagaagcaggagctgcagtagctgcggaatcttctactggtacatggacaactgtttggactgatggacttaccagtcttgatcgttacaaaggacgatgctatcacatcgagcccgttcctggggacccagatcaatatatctgttatgtagcttatccattagacctatttgaagagggttctgttactaacatgtttacttccattgtgggtaacgtatttggtttcaaagccttacgcgctctacgtttggaggaa

SEQ ID NO: 94336 - DNA, 570 bp, Zea mays
cgggtaatcagtttatattgtatgctgcaccggtccggaattcccgggtcgacccacgcgttcggcgaggtgtcccggggtcactgctgatcaactccaagtttttccacatgaccttgtaccgtggcaaggccttgctgatcaaggacgtaaccgtaactgctcccgggtcaagccccaacacggatggcatccacatgggcgactcatccgtgatcacgatcaccatcaccgtcattgacgtctgtgactactgcatcttcattggcctccgggacctccattgtgaacatcacctgcatgacctagcgaccttgtcactgcatcagcatcggtagactaacgcggtacacggacgataaagaccgtctcggacataacgtgcaggattgcactacttatgaagacgatgctcagtagtccgaatcaagccgtacgaggactccgtctcacgggttaacagctttcaagatccatttccagagtttcaaggatgaaggacttaatcgatcccgtttttcattggaccttgaatacctggcccacaaagttttggaacttgcaccggga

SEQ ID NO: 94337 - DNA, 560 bp, Zea mays
  unsure (1)..(560): unsure at all n locations
actgctagtaaacgacaatatagtatgcctgcaccggtccggaattcccgggtcgacccacgcgtccggaatcacctgtcaatattagaagtgaacctctcacgacacgtcgccgcgcccttcaatcatggatggatggcagcagcatcagtactgtcgagttccctgatgggctacctccagctccttcgagaagcaagaaggacaagctttctgaagaggaaatgcttgcgaagaaggccgaagctgctcagaggcgcatgatgcaagtggaaaaggccactaaagaaagtgaggcggaagctataaggaaaatattgggcatcgactctgagaagaagaaagaagagaggaagcagaaggagcgaggagagaaggagcgagctagcagagcacaaaacatggcggcaaactcgatccgctgggtcatggggcccaccggaacagttatttcgtttccacacgcagtagtgcctcccagcatcttcgactccaagccacacagctatcctnctncacgggagaaatgcgctgggccatcgtgcacgaacgattacaag

SEQ ID NO: 94338 - DNA, 554 bp, Zea mays
  unsure (1)..(554): unsure at all n locations
ctgtgatacagaggcgacggatagtatcgctctaccgnnnttgaattcccgggtcgacccacgcgtccgcggacgcgtgggtcaaaagttgagggagaagaacatcgattttgctgctcacagcaaccaggaggactctggttctcttctgttcaaccttattggaaatttggcattcccgcttatccttatcggtggtctgtttttactttcaagaagggcacagggtggcctcggtggacccaatggtcctggctttccccttggttttggtcaatctagggccaagtttcagatggaacccaacactggtgttacatttgatgatgttgctggtgtcgatgaagcgaagcangacttcatggaagtggttgagttcttgaagaaacccgaaaggttcactgctgttggtgctcgcattcctaagggtgtcctgcttgtcggtccttctgggacgggtaaaactttgcttgccaaggcaattgcaggataggctggcgtgccatttttctagtttcaggttctgaatttgtggaaatgtttgtgggtgtcga

SEQ ID NO: 94339 - DNA, 540 bp, Zea mays
  unsure (1)..(540): unsure at all n locations
ccgcctgactgaagtttgccaaagtnngcatngggctatttcgcactcggactgaatttccgggtcgacccacgcgtccgactaggcgcaccggtgctgggaggacatgttttacgccatcagcggcgctaagcacgtcatgtgcatcacaggttggtcggtgtgcaccgagatcacgcttcttaaggacagggtccgcccacccacgtcccgcgacggtggtactctccgcgagctgctcaacaagaaagcccgcgaaggcgtccctgtgctcattctcctctgggacaaccgcacctccctttggggggttcagaaagacggggttattgtcgcccaccacgatgggaccatttactatttttaaggggccctccttcactgtggggtattttccccaaaaccccgcaacttccggaggatttttcctgaaccgccgaaattctccactttttttccccccccccaaataatttgttgtttatcacccaaataaccctgctccagtgctaccagatacggaggaacttaattttttgg

SEQ ID NO: 94340 - DNA, 534 bp, Zea mays
  unsure (1)..(534): unsure at all n locations
nctgtactagagcccctgaaccatagtaatgcactgttccgtaccggacctgccgtttcgagccaggcgtatcgntccgattcctcctctctctactcttcaagttctcttctccgtctaccgctctacacgtatgttgtggacctggacaccgaggtggaagaaggaagcagtcagcagatggatccatggatcatccaccaaccttctctgagccttgacctgcgcgtcagcctgtcgacaatcagcctgcaccaccaggcgcctgttgccgtcgccttgcccagtcccaagctgctcgtcgaggagaacttcctactgccgcctccaaagaaagaaccagaggtcgcggctctcgagacggagctgcaacggatggtccaggagaaccggcgcctggcggaagcgctggccgaagtggcctccaagtacgatgcgctgcagcggcagtacacggagatggtggccgctgccgccaccgactgcgggaaccacccgtcgtccacgtccgatggcgggtccctttagacgtcc

SEQ ID NO: 94341 - DNA, 555 bp, Zea mays
  unsure (1)..(555): unsure at all n locations
actgctgtatagaggaggaacgacagtatcgctctaccggtccggaattcccgggtcgacccacgcgtccgaacacctatgggccaaggatgaacattgacgatggccgtgttgttagcaacttcattgctcaggctgtgcgtggcgaaccccttactgtccagaagccaggaacacagactaggagcttctgctatgtcgccgatatggttgatggtcttattaggctgatgaacggaaacaacactggaccgattaacttggggaacccaggtgaattcaccatgctggaacttgctgagaatgtgaaggagttgattaacccagatataacagtgacgatgaccgagaacactcctgatgatccccgccagaggaagccggacatcaccaaggcaaaggaagttctagggtgggagcccaagatcgtcctgaaggacggcttggtgctcatggaggatgatttccgggagcgcctggccgtgcccaagaaaaccaaggcctaaactgccctgcggtgggcgaagaatatccacgggggagcatactcatagn

SEQ ID NO: 94342 - DNA, 535 bp, Zea mays
ttgtgggtgactgccatccgacaaagagtatgcatcttcctgtcctgaattcccgggtcgacccactcgtccgagcaggttcaaggaggtgaccaagcgggagtacactcagtacagcgagtacaagatctgggtgtggaagtcgcaggacgacctgttcctcaacggctccttcttcaaccagtccggctgcctgaacgagcgcatgtactacaggctcgacctcatccaggccaagggcggcctgtacgcctagtcgctcaccaggtactcctgcgcgctcaactgccgcgtcggctggaagtgctagtgcgtgtgcagctctaggctgcaactttcatcattggcgatcgatcgtaacaatgcaaggttgttgcgtatataacgcttgtgtttggaatgccggccgctattaatggtcaaccttatatccaagatttcttgaatgtgcttcctacttgagtaaactcatgcttgtaatttggccgtaattttctgtgctagttccgtataaatttgttttccagactctttt

SEQ ID NO: 94343 - DNA, 524 bp, Zea mays
tagttctatgcattgaacatagtatgcatgcacggtccggaattcccgggtcgacccacgcgtccgtccacgcgtccggtccactgctacattctcatccgtcgccaatcccttcccgtgctcctatcgggctgaatgagaagaagagatggccggcagggccaatggccgggctatctgcatcgatctgggcacgacgtactcttgcgtcggcgtgtggcagcacgaccgggtccagatcattgtcaacgaccagggtaaccgtaccacgccctagtacgtcgccttcaccgactccgagcgcctcatcggagatgcggccaagaaccaggtcgccatgaaccccatcaacaccgtctttgatgccaagcgtctcatcggcaggaggttcagtgatgcgtctgtacagagtgatatcaagcttgggcccttcaggtcatttctgggcctggtgagaaaccattgattgatgtgcagcacatgggtgaggaggaagcatttagaagcttgagagatcttccctt

SEQ ID NO: 94344 - DNA, 528 bp, Zea mays
atggctgcacaccgacaagacagtactgactgcaccggtccggaattcccgggtcgacccacgcgtccgcggacgcgtgggccacgagaccacaagccacaccaaacccgcgttcatcgacggacgagctcgccggcgagagagcgactgagatggaggcggcggcagcggcggccggcgtggagctgggctcttcgaagccccagatcgcgacgcaggcggagatggcggaggcccgggtgccgctcgcctaccgcgaccagtgcgcgcacctcctcatcccgctcaacaagtgccgcgtcgccgagttctacctcccctggaagtgcgagcccgagcgccacgcctacgagaagtgccagtacgagctcgtcatggagcggatgctccagatgcagaagatccgcgaggcgcaggagaccaaggtcaagggcggcgccttcattggcctcatcccggccaccgtcaagctcgcctgatacgggtcccagcccgatccgcttgatttaggtctggttgttggctata

SEQ ID NO: 94345 - DNA, 553 bp, Zea mays
actgctagaacacgcagcgaaagaactgatcaccggtccggaattcccgggtcgacccacgcgtccgcggacgcgtgggcgctgggccggcggtgggagaccgacgccgcgtacgtgcagtccaaggaggcggtgaaggacgtgtcggtgcccaccagcaccatcaggttccccgacgggacgtcccggctggtggcgccggcgctggtgtacgccagcgctgccaggatggcggacgccgacgtggggagccccaacttcaacctgacgtggaaggtggacgtggacccgtccttcagctacctggtccgcctcttcttcgccgacatcgtgagcaaggccaccaacgacctctacttcgacgtgtacatcggcgggcgcaaggccgtgtccgggctggacctgtcgacggtggccggcggcgagctggcggcgccctactacaaggacttcgtggtgaactcgtcgttgctggaggacggcaagctgagcgtccaggtcgggcccatggggcatgacacggtgcggatcgacgcgctgctcaacggcatgg

SEQ ID NO: 94346 - DNA, 556 bp, Zea mays
  unsure (1)..(556): unsure at all n locations
nctgganngtccagcnccaatgactgcatcgccgtaccggtccggaattcccgggtcgacccacgcgtccgcggacgcgtgggggcccagaggcagtgccgtgaccgattcgagacgcaagagaaggatcgagacgaggcggcggttttccggggcagcatcgtctcggccacgaagatgtcttactcaaggggctcaaggtatggatctcgctcaccttactcgagaagcacaaggtaccgaagtcgctctaggagtgtcgactctagtgatgctgaaaaccctgggaacaacctgtatgtgactggtttgtcggctcgtgtaacggatcgagatctggagaagcacttctccactgagggtgaggtgattgatgcaagcgttgtgtatgatccttggacaagggaatcacgggggtttggttttgttaccatggctgctgttaaagatgcagatcgctgcattaaatatctggaccggtctgtggttgcagggtcggtcataactggtgagaatgccaagagatacgaagtggaccccaacacttggaagtttn

SEQ ID NO: 94347 - DNA, 551 bp, Zea mays
cgttactgctcacgacagagtacagtatcgctctaccggtccggaattcccgggtcgacccacgcgtccgcagcattgaggacgttcgacctgccggaggcgtgaagaagttccagtctgctgcttactccaactgcgcgaagaagccatcctgatatcccttttggcttcctcattctagtagtttaggatttcttttctgacactttgattctgaccaatctctctggcctgctgcttcctgataatcgaccagttccccagtcttgctccttgcactcctccctccatcttcagcattgtgttctgattcacctgctccaatggctgttctttctgctgctgatgcttccccggtctcagctatcgggtttgagggctatgagaagcgccttgagatcacattctctgaggcacctgtctttgtggaccctcatgggcgtggtttgcgtgccctctccagggcccagattgactctgttctggatcttgcacggtgcacaattgtgtccgagctctccaacaaggatttcgactcatatgtcctttct

SEQ ID NO: 94348 - DNA, 527 bp, Zea mays
  unsure (1)..(527): unsure at all n locations
agtanctgtacgggcggaggatgggaaggattcaccggtccggaattcccgggtcgacccacgcgtccgccgacgggcgccggtctcgacgacaacggctgcggctatgggtacaaggacgtgaacaagccctccttcaatagcatgggtgcatgcggcaacatccncatcttcaaggatggtctgggttgtaggccctgcttcaagatcaagtgcaataagcctgcagagtgctccagcaagcccatggtggtgcacatcacggacatgaactatgagcctatcgcggtgtaccacttcgatttggcaggcacggcgttcagcgccattgccaagaaggacgaggaggagaagccgtgcaaggcgggcatcgtcgacatgcagttccgaagggtcaagtgcaagtacggctccaagatcaccttccaccttgaaaaggggtgcaaccccaattacctggcgttgctggtcaagtacgtcgactgcgaccgtgacaattgtggtgtggacgtcaagggagaaggccc

SEQ ID NO: 94349 - DNA, 556 bp, Zea mays
  unsure (1)..(556): unsure at all n locations
atgtgtaaggggggggatgaagaagattactcggtccggaattcccgggtcgacccacgcgtccgtaccattccgatgggatcatgtccgtgtcaaattgaaaaaggagatagtgacgtttggagacccaggtgttatgccaactaaaatcgttgggaaatatgttaagccaaaagactggaatgacttgataagtgatccagacactgtcatcattgatgtgcgtaacatgtatgagatacgcataggaaagtttaagaaagctgtcgatccacgtacaaactcattcagagagtttcctacttgggttgacgatcaatttcaattggttcaatcaggcaccctagggtcagggggagatgataatggaactcgtgaaccatcggcagaccttaatgccagcaaatccaaacagctaccaagagttgctatgtactgcactggtggtatccgatgtgagaaggcatcnaagctntctctcgcaaggggcttaaaagaggttatcatttggaaggcgggatattgaagtatctggaggaaaatccaaaggccgaaa

SEQ ID NO: 94350 - DNA, 556 bp, Zea mays
  unsure (1)..(556): unsure at all n locations
cgttctatagcggagagaaggaaagaatcgctctaccggtccggaattcccgggtcgacccacgcgtccggggaataaatagttcgtgaatccctgaagcgtgcatatatatattcctgccaagataaaggtaatggagtcgtcacgcaggttccagccggccgtcatcctgcttctcctgctcattgtgtccaccgatatggcacaggcaagggaatgcgagaagtacagtgagcgatttgttggggcatgcatgatcgcagacaactgcgccaatgtgtgccgcggtgagggcttcttggccggcaggtgcagcaccttccgccgccgctgcatctgcactaggcagtgctaaacaagatcgctcgatcgctcgccatgcatcgacaacctattcttaataacgttcattatctcgttcttatntatgacgaatgtcatgtatgttctggtgactgtcatgtatattctgatgactgtcatgtatcttggtcatgtatgctcaaggttcattatcttggtcatgtattaaagatggtatgaataactcaatatt

SEQ ID NO: 94351 - DNA, 554 bp, Zea mays
  unsure (1)..(554): unsure at all n locations
actgtgtcttaaaagaacagaagatagtatcgctctaccggtccggaattcccgggtcgacccacgcgtccgatcgacatgaagtactgccccaacaagttatgcaccgccaatggtgcctccaaggtcaccgtcaaggacgtcaccttcaagaacatcaccggcacctcctccaccccggaggccgtcaacctgctctgctctgccaagatcccatgcaccggcgtcaccatggacgacgtcaacatcaagtacagtggcaccaacaacaagaccatggccgtatgcaagaacgctaagggcagcgccaagggttgcctcaaggagctcgcatgcttctagaaccaccatcgacccatctctctagttatacaatgtgtntggttggtggatgctgagagatnggttctcagctcagatgcaagctgcgcctagcctgtgtaggtttgtgctggtacatngagagctcctaattattnngcttgattgcaaatacccaggatgaccatagccctngttggttttgctggttttataggttgcattgacacaac

SEQ ID NO: 94352 - DNA, 529 bp, Zea mays
  unsure (1)..(529): unsure at all n locations
atggatttgtacgcgggggggaaggagaagttattaccggtccggaattcccgggtcgacccacgcgtccggtcagaaaatagtgggatcgagttgtttcactgcacgagcacattctccggcgaccaccgggcctccctctccggnctctatcgaccgaccaacgcgccgagcgaagatgtcgtggcagacgtacgtggacgagcacctgatgtgcgagatcgatggccaccacctcacgtcggcggccatcgtcggccacgacggcgccacctgggctcaaagcaccgcgttccccgagttcaagcccgaggagatggctgccatcatgaaggatttcgacgagccggggcacctcgtcccgaccggcctgatcctgggaggcaccaagtacatggtcattcaaggcgaacctggagctgtcattcgtggcaagaaaggatccgggggcatcactgtgaagaaaacagggcaatcactcatcattggcatctacgacgagcccatgacttccgggcagtgcaacctg

SEQ ID NO: 94353 - DNA, 526 bp, Zea mays
  unsure (1)..(526): unsure at all n locations
agtactgtacggggggagtaggaatgaacgnctctaccggtccggaattcccgggtcgacccacgcgtccgcccacgcgtccggcaaagggccatccgctgcggtcagtgtaggtttctgaatcatagcttggcgatgcctgaggctagacaaatactgagctagccttcagaaaaaaaaaagaaaagaaagagattgagaagcagggagaaaaaatggcactggcccattgaggaagcttgagaaccagttaacaagaattgccaacatattcttggacaatcttgttaacagagttttaaggtttcccagcagagaagagcgcgtgcaaccaccacattcatataattaataagcaaggtttagagaagaggcaacatgggcacaaagatgaagaaggggatcctgaagccgttccgctatatctcaaccatcatggatggtaaggaggctgaaatgcaaattgggttcccgacggatgtaaaacacgtggcacacatcggttgggatggtcctggctccaccc

SEQ ID NO: 94354 - DNA, 552 bp, Zea mays
  unsure (1)..(552): unsure at all n locations
tgtctaagagggaggatgagaagcattaccggtccggaattcccgggtcgacccacgcgtccgcggacgcgtgggctgaaaggagagctctgctgggagaatcaaatgaatttgttggagacaaggttgcgtatgccctgtctcagggactaaaggtcattgcatgtgttggtgagacacttgagcagagggaggctgggtctaccatggaggttgttgctgcacaaacaaaagcaattgctgagaagatcaaggactggagcaacgtagttgttgcctatgaaccagtttgggctattggaactggtaaagttgccaccccagctcaggctcaggaagtgcacgcctncctgagggattggctaaagaccaacgtcagccctgaggttgctgaatctactaggatcatttacggaggctctgtaactgncgcgaacttgcaaaagctagcaacaccagctgatttcgattggtttcttgtccgtggaacttctttgaagcctgagttcatcgacatcatcaacgcgggcaccgtgaagttccgttaagatt

SEQ ID NO: 94355 - DNA, 554 bp, Zea mays
  unsure (1)..(554): unsure at all n locations
atgctagtaaggggggaagaaggaaaggaattacttcggtccggaattcccgggtcgacccacgcgtccgacttgctagtggggaaaacaagatggagcaacgcatgcattgtagtgatccacaagatacagatccaacaacattgcctgctcaaaggccggcaatctcaaacatagtagcttataagaaaagcactcaaggaaaggaatacatagaatggggacgaagggggcccttgagcttagaagcacttccggtgaacaatcgctggtcctgactcatcgtactcagcctttgaggtaacatactgttggagagcagcttgcctgtaactatctgtaacaatgaaacagacaacacagaattgctcccagtgcaacagctggatgatattagagaagcttctgattctgcgccagagatctncatatgcgaacctaacctgtgctccagtatgaactatggcacagtgcctggaagacactccatgtcagaagagcggcagagttatttgaaaagatanngtaccctggntggcactcttcaaattctt

SEQ ID NO: 94356 - DNA, 556 bp, Zea mays
agtgttcatcgaacattagtatgcatcatccggtccggaattcccgggtcgacccacgcgtccggacccacgcgtccgggcaagggaggcaaggtcctgtaggccgacgcgcccatgctcaccttggaggcgggcaagacgtaccgcctccgcgtgtgcaacaccgggatcaaggcgtcgctcaacttccgcatccagggccacgacatgaagctcgtggagctggagggctcacataccctgcaggacgtgtacgactcgctggacgtgcacgtcggccactgactctccgtgttggtcgacgccgaccaggcgcccggcgactactacatggtggccttcacgcggttcattcacgacgcccagtacggctacgtcgtcatccgctacgccggcttcagcggcgcccacgcggcgcccaacatgaccgagccaccggtcggctgggcctggtccattaaccaggccagggtcgtccccttggacctggacgtcagcggcgtgcggcccaatccggatggcttctaacaatacgggcagatcaacaatcacccgg

SEQ ID NO: 94357 - DNA, 545 bp, Zea mays
  unsure (1)..(545): unsure at all n locations
cgggtagtgtcttactccttgattgcatcgccgtaccggtccggaattcccgggtcgacccacgcgtccggtcggtgatctggggcctgatcggtccggagcggctcttcggccggcacgggctgtaccgcaacctggtgtggctgttcctggtcggcgcgttgctccccgtgccggtgtggctgctgagcagggcgttcccagagaagaagtggatcgcgctcatcaacgtgcccgtcatctcgtacgggttcgccgggatgccgtcggccacgccaaccaacatcgccacctgtctggtgacgggcaccatcttcaactacttcgtcttcaggtaccgcaaggggtggtggcagaagtacaactacgtgctctcggccgcgctcgacgccggcaccgccttcatggnggtgctcatcttcttcgccctccagaacgcgcaccacgagctcaagtggtggggcacggacgtggatcattgcctgntcgcttcctgcacaccgtgccggcattggcttcggggctgaccgtgtctggatcctccc

SEQ ID NO: 94358 - DNA, 523 bp, Zea mays
catggttgctaagggggggaaggaaggaatgctgtaccggtccggaattcccgggtcgacccacgcgtccgcccacgcgtccgcgaagaagggcagcactaccagtagcagcagccatgcccgctcgcgctcgatggcgactcctcgcgctgccgctcgcgctcttactcgttgccgggtcggcgcatggcctcgtgaagccggaggcagccgcggcgcccaagccccccgtccccaaggccatatcggacctgagggacgcgatcgtgaaggggctgggattccaggccgaggggctcaaggtgtccgggttcgacgtgcgagacgcgctcgtggggcacgcggtggcgtacgagttcgacatcgaggtcggcaggaaggtcctaccggtgcgcctgctggaggacgtcagccggtgggacttcgtcgacctccccatcttccgttcccaggccgacgctgacgatacggcgctcgccgagatccggcgggccgggagggggagcatcgttgagcctaccct

SEQ ID NO: 94359 - DNA, 524 bp, Zea mays
gccgtgctgttccagcggggatagtacgatttaccggtccggaattcccgggtcgacccacgcgtccgcggacgcgtgggctcactaccacgcccccgctcctgtcgtctctatcttcgcctcttccatcgcaggattcagcggccatgggcggcggcaacgcccagatgtccaagatggcgcgcgagaggaacgccgagaagaacatgggcggcaaaggcagccagctggaggccaacaagaaggccatgaacatccagcgcacgatctgcatgcagaccttcatctgcaccacctgcgatgccaagtgcaaagaacatgcggaggcgaggcatcccaagaacgacctctaccagtgcttcccccacctcaagaactagtaagcagcagaagcatatgctctgctcagctaaaagacaagtactacatatatatatatatacgcttgtgtgtcaataatgggttctaggctgctgctgatgcgggtgctttcgtcgtgttgcccgtctgatatgtactgaacc

SEQ ID NO: 94360 - DNA, 551 bp, Zea mays
  unsure (1)..(551): unsure at all n locations
ctgttantctaaagcaggaaggaaagtatcgctctaccggtccggaattcccggcccgcgcgtccgcccacgcgtccggcgcgcggagcctcctcaacccttcagacctccgcctcccaccgcttccgtagcctcgcctcgcctcgcctcgcctcgtccttctcctccgtcccaaccatgagggagatcctgcacatccagggcgggcagtgcgggaaccagatcggtgccaagttctgggaggtgatctgcgacgagcacggcatcgaccacacgggcaagtacgccggcgactccgacctccagctcgagcgcatcaacgtctactacaatgaggccggcgggggccggttcgtcccgcgcgccgtgctcatggacctcgagcccggcaccatggactccgtgcgctccggcccctacggccagatcttccgccccgacaacttcgtcttcggccagtccggcgccggcaacaactgggccaagggccactacaccgagggcgccgagctcatcgactccgtgcttgacgtcgtncgcaaggaggcccn

SEQ ID NO: 94361 - DNA, 555 bp, Zea mays
agtcttctacctgaataggaaagtatcgctctaccggtccggaattcccgggtcgacccacgcgtccgcccactcgtccgagattctacgcgtggacaaccttgtcatcaccggcaagggaaagctcgacgggcaggggccagccgtgtggagcaagaactcctgcgtcaagaagtacgactgcaagatccttcccaactcgctggtgatggacttcgtgaacaacggggaggtgtccgggatcacgctgctcaactccaagttcttccacatgaacatgtacaagtgcaaggacatgctgatcaaggacgtcaatgtgacggcgcccggtgacagccccaacacggactgcatccacatgggcgactcgtccggggtaccatcaccaacaccgtcatcggcgtcggcgacgactgcattctcaatcggccccgggacctccaaggtgaccatcaccggcgtgacctgcggccccggccacggaattagcatcggaagcctaggccggtacaaggattaaaaggacgtcacggatataccgttaaggactgcccc

SEQ ID NO: 94362 - DNA, 532 bp, Zea mays
  unsure (1)..(532): unsure at all n locations
aggttatgtgctagttcgagaggagatggaaagtttttaccggtccggaattcccgggtcgacccacgcgtccgagatgatgctgcacactttcttgatgtcatccgtgctgccgaggaagctaatgtgtacaatgatttagtgaagtaccttctgatggtaaggcaaaaggcacgggaacccaaagtcgatggagaactcatctttgcatatgcaaagattgacaggctcagtgacattgaggaattcattcttatgccgaatgttgccaaccttcaaaatgttggtgaccgtctttttgaggaagaactatatgaagctgcaaagatcatctatgctttcatctcaaactgggctaagctggctgttaccctggttaagctgaagcagttccaaagtgctgtggatgctgctcgcaaggctaacagtgctaaaacatggaaagaagtttgctttgcttgtgttgacgcttaagagttccgtcttgcacaaatatgtggtctcaatattaatggtcanngtgatgacttgg

SEQ ID NO: 94363 - DNA, 552 bp, Zea mays
  unsure (1)..(552): unsure at all n locations
nctgctgttacgcgggagggggatagtatcactcgtccggaattcccgggtcgacccacgcgtctcgcccactcgtctcggcctcgaggagggagacgaggccggcgacgttggagtggacgtacgccggcgggttctccatggcatagcgcacgtcggcctgcgccgcgaggtggagcacgtgggtgaagggcacgacgtcgaagagcttggccaggaggcggccgtcgttgatgtcgccctccacgacgaaactcgtcgtggctgcccagcagcgcgcgctgcgccttcttgagcgaggggtcgtagtaggagttgaagctgtcgatgccgacgacgccgactcccggatctggcgctcccagtgcaacccgccccaggacgcccggatctgtcgcgcccggtgctggtcatgtcccactccagcaaccgcctctaccagtcgcccgcgcaccccgtgctcgtcatgtcccgctccagcaaccggctggaccagtcctnctcggccgtctcgcccgcgccagttatggcgccaatgctggtcatggcagg

SEQ ID NO: 94364 - DNA, 553 bp, Zea mays
  unsure (1)..(553): unsure at all n locations
atgtgtgaggggagagaacgatttactcggtccggaattcccgggtcgacccacgcgtccgcggacgcgtgggcggacgcgtgggcaaggacatgctgatcaaggacgtgaccgtgacggcgcccggggacagccccaacacggatggcatccacatgggcgactcatccgggatcaccatcaccaacaccgtcattggcgtcggcgacgactgcatctccatcggccccgggacctccaaggtgaacatcaccggcgtgacctgtggccctggccacggcatcagcatcggcagcctagggcggtacaaggacgagaaggacgtcacggacatcaacgtcaaggattgcactcttaagaagacgatgttcggcgtccgcatcaaggcgtacgaggacgccgtctncgtgctcaccgtctncaagatccactacgagaatatcaagatggaggactcagccaaccccatcttcatcgacatgaagtacttgcccaacaaggtgtgtaccgncaacggcgcctncaaggtcaccgtcaaggacgtcaccttcaa

SEQ ID NO: 94365 - DNA, 555 bp, Zea mays
  unsure (1)..(555): unsure at all n locations
tatgttnaataagcgggaagagggagaggtatctactggtccggaattcccgggtcgacccacgcgtccgagatgatgctgcacactttcttgatgtcatccgtgctgccgaggaagctaatgtgtacaatgatttagtgaagtaccttctgatgggtaaggcaaaaggcacggtaacccaaagtcgatggagaactcatctttgcatatgcaaagattgacaggctcagtgacattgaggaattcattcttatgccgaatgttgccaaccttcaaaatgttggtgaccgtctttttgaggaagaactatatgaagctgcaaagatcatctatgctttcatctcaaactgngctaagctggctgttaccctggttaagctgaagcagttccaaggtgctgtggatgctgctcgcaaggctaacagtgctaaaacatggaaggaggtttgctttgctttgtgtgacgctganngagtccgtcttgcacaaatatgtggtctcaatattatngntcangttgatgacttggaagaagtcaatgagtactaccaagac

SEQ ID NO: 94366 - DNA, 560 bp, Zea mays
  unsure (1)..(560): unsure at all n locations
aacgtattagcgggaggatgcagagtagtgctgctaccggtccggaattcccgggtcgacccacgcgtccggcagtcatctcctccatcaccaccaaactcaacaacagccagctcgcgaaaataatgaagagccgcagcatggcatcatcggccgcgctcttggtgctagccctcgcgctagtggcggccaccgccccacaggtagcggaggcaaagaagaagagagcggcggagagcggcgaggcggcggaggcgaagaagatccaggacgacttctgctcgacgctgtgcgagggcaagaaggggacggacctggtcgtgtgcaaggagtcctgcgcgctctcccagcagtccaacctggtgctgtacggcaggatccagttgcagggcaagtgcaccgagcagaaggtcattacggnggccggccatgaaggtctgccaggaggagtgcgacaaggcgtacgtngtgaaggctgccgaggtcaccaaggcctgcagcgtaacctgcgccaaggagatgaacccgcgcttnaccgagaactgcaagaggtcctgacc

SEQ ID NO: 94367 - DNA, 528 bp, Zea mays
gcagggctagtgtcagttcatcgtattgctctaccggtcctgaattcccggctcgacccacgcgtccgcataagcggaaataagcgattcaaatcactattctcccccatggaactacaatcccaaggatgggcggagcgggtaacccataaccaaagaggaggccatgaaagaactaattgaagtcgtcacgaagacaaagccggacaacttcactactcgcatagtagagaaaaaagatgattatatccgagttgaatatgagagtcctatatttgggtttgtagatgatgtggagttctggctcccttctggcaacaagaccatggttcagtatcggtcggcgtctcgatcaggatttatcgatatcaatgccaacaagaagagagtaaaggagctgagattggctttggaaaagaacggctgggcttcaaaaagcaacttctgaattgaagtgagaagtgtggaagacgtgcaagtgcatgctacttagacgagccagcacaactggcaactgggattgagtcg

SEQ ID NO: 94368 - DNA, 548 bp, Zea mays
  unsure (1)..(548): unsure at all n locations
cgggtgtcctacgcacatagtacgatcgctcgtcctgactcccggtcgaccccgcgtctcgtccacgcgtctcgctgccctacagatgcacaaggactgggtatcagtccatccgtcaactccgattgttgagcttncacaccttaaccgtgttgtcggatggactgtttccctgtcctacagatgcacaaggactgcgtgagagatgtcgcgtgggccccatacctgggccttacaaagtccaccatcgccagcgcctctcaggacagaacggtcgtcatctggacagcatcatgagaaggcgagcagtgggactgccggatgctgtatgatttcagaacccccgtttggaggcttgtctggtcactgactgggaacatactggcggttttcgacagcatcaactatgttaccctgtggaaggaagctgcggatggcgaatggcatcaagtgaccaatgttgagccataggtccataggggtttcgagttatttcccgactgggatttctaaataataattgcagttctcgtgtaagggtaaatttt

SEQ ID NO: 94369 - DNA, 554 bp, Zea mays
  unsure (1)..(554): unsure at all n locations
agtatatgagggggatagaaggaatgctgtaccggtccggaattcccgggtcgacccacgcgtccgatttcttgcatttctccaaacgcaggctcatgtgaacacacactaaataccttgagatacgctgatagggtcaaaagtctttccaagggtggaaacacaagaaaagagcagcccacaggaccaactaccacttctagccgggagtcttcgtcagctccatcatattcattgcctgctgaagctgaagaaattcctaaccagattcaagagaagagaccagttgatacttatcggaaaggcactgaaaattttacctccaacccttccgcggagcctgatagaaattccttcagtatggttccaaattattctaataaagggagagaagacaatggtgcagcatctggtaatgatagggagaggtatgatttgaagtccacccaaactgcttacactagtaaggcacagttggttcagaattcaacatacacacaggaggagaaagtcacaaaagtctcacctnctcggagaaaggcttataaagaaga

SEQ ID NO: 94370 - DNA, 555 bp, Zea mays
aggtatatagaggggtaggatagtatcgctgtaccggtccggaattcccgggtcgacccacgcgtccgcggacgcgtgggcggacgcgtgggtttctcagagattattgtcaaagattacgcatatccaagggcgatcgcattagcgatagctcaagtcctgatggcgatcgggcacttcaacttcgcgatggcttggcccgggacaatgtacatcggcacgctgctcgtcggagtaggctacggcgcgcactgggccatcgtgccagccgcagcctcggagctgttcggggtgaagaacttcggagcgctgtacaacttcctcacggtcgcgaacccagcaggctccctggtcttctcgggggtcatcgcgagtggcatctacgacagtgaagcagcgaagcaggctcagcagcgccacaactccacgtcgctggcgatgagtggcagagtggctggcatggtctctggagccgctccgtcgttgaagtgcgagggcgccgtctgcttcttcctctcatcgctgatcatgtccgggttctgcatcatcgctttc

SEQ ID NO: 94371 - DNA, 553 bp, Zea mays
  unsure (1)..(553): unsure at all n locations
cggggnnaacctgagtctactctcatcgcatatccccccggtccggaattcccgggtcgacccacgcgtccgcccacgcgtccgacaaaagagagaaccggcggcgagctaggagctagccatggacggacacggcgcggtctcgccgtggagcgtgctaggcggggcggcggctgtgctgttcctgtggttggcgtcgcaggtgctggagtgggcctggtgggcgccccggcgcgtgaaccgtgcgctgagggcgcagggcctgaggggcacccggtaccgcctcctctgcggcgatctcatcgaggagcagcgtctccgcgcggcggccctggcaaggcccgtccccgtggatcgaccacacgacttcctccctcgcgtcgcgcctttccttcaccgcgtcctncaagagcacgggcagctctcgtttacatgggttgggccgaccccaaagagtctaatcaccgatcccgagcttgcccnggaagtgctgtcgaataagtgtggcgactccgtgaggtcgctgctctcttcccttgcaacgctgctggtt

SEQ ID NO: 94372 - DNA, 538 bp, Zea mays
  unsure (1)..(538): unsure at all n locations
gggaggggnnaaanactgaacggtcgaaaacaagattctcattcccgtcctgaattcccgggtcgacccacgcgtccggtcgttgtgagaattcttaattcatgagttgtatggagggacttatgtcaccacaaacagaggctaaagcaagtgttggatttaaagctggtgttaaggattataaattgacttactacaccccggagtacgaaaccaaggatactgatatcttggcagcattccgagtaactcctcagctcggggttccgcctgaagaagcaggagctgcagtagctgcggaatcttctactggtacatggacaactgtttggactgatggacttaccagtcttgatcgttacaaatgacgatgctatcacatcgagcccgttcctggggacccagatcaatatatctggaatgtagcttattcatttagacctatttgaagagggttctggttactaacatgtttaacttccattgtgggtaacgtatttgttttcaaagccttagcgctctacttttggaggatcag

SEQ ID NO: 94373 - DNA, 582 bp, Zea mays
  unsure (1)..(582): unsure at all n locations
cgcgcgggnnnnagcctgatacctgagacagatcgaccggtccggaattcccgggtcgacccacgcgtccgcaggaatctgttatttctactgtcctcaagctctgcctgaaaagcttgcaagaatttgtccgtcttcagactttcaacagaagtggatttcagcagattcagctggatatggaatttctcaagacctctcttaaggaatttgtggatgatgaagcagccattagctttttactcaaagaggtgaacaatgctgcccatgagagatgtcttgacccaatccctcttgagccccccatattagataagctcataaatgcaaaactagcaaaaattaaagagagaaacccaaatatgcggtagctatgcacagattggtgtctgttactagaattcaggtctgtccatttgaatgcactattcaaagttgtgggtgcaacttcatagagtttatggcacatagcatgggtaaaaatctggagtcagactcagattttgataacactccccaaattggatactgggatactttaattgggggggtcgagcttgtacattccctctggttgtaggc

SEQ ID NO: 94374 - DNA, 529 bp, Zea mays
  unsure (1)..(529): unsure at all n locations
gaagttaggtntnntnccgctgagcatganccctcgtactgccgtaccggttcggaattcccgggtcgacccacgcgtccggttctagatcgcgagcggcgccctttttttttttttttttttttttccttctaatttctttcgaatttaacttggatcgaacacacctgtatcctgtcgttctaccctgtatgttgtaacacacggctcgtaggacgtacgttttgatcagctgcacatacatatacacattataatcacacacatgcacacacaccgggtctaggcataacgattactcttcctcgccagacaagcccaagctcaccggcgtgccagtctccggtatccagtccgcgccgtgcaagaagtgccccaccgtgaactgcagcgccctgtccttgcccatcacgtggaacccctgcatctccttccgcccggtgacgttggcgccgtcgccgccgttcctgaactctccgaagaaggccgtgcccaggttggccttgccctcccagggcatgtacccctg

SEQ ID NO: 94375 - DNA, 584 bp, Zea mays
  unsure (1)..(584): unsure at all n locations
ngactcgtgggtgttgccagcnaatatgttgcatcgtcgaaccgctccggaattcccgggtcgacccacgcgtccgaagcagcacacgagacgatatagagggagggatcatggctctcttccgtgccgccgcgtcaggagggttcgcgctgatccttctcgcgtgctgcagcctcatcatgctggcggcggcgtctggcggcggcggcgtggacgacgacggcgtcggtggtgacaggctgatgatggaccggttcctcagctggcaggcgacgtacaaccggtcgtacccgacggcggaggagaggcagcggcggttccaggtgtaccgccgcaacattgagcacatcgaggccaccaaccgggcgggcaacctgacgtacacgctcggcgagaaccagttcggcgacctcacggaggaggagttcctggacctgtacaccatgaaggggatgcccgttcgncgtgacgccggcaagaaacgggccaacggtctcctcttcggcaccgncgtggacgctccgaccaacgttgactggaggtnccagggccgcggtacgccgatcaagaacaagggcccgttg

SEQ ID NO: 94376 - DNA, 577 bp, Zea mays
  unsure (1)..(577): unsure at all n locations
gtggtntcgcatgaacacagagtcgtcatgcactgctctaccggtccggaattcccgggtcgacccacgcgtccggtcaccttcaagaacatcaccggcacctcctccaccccggaggccgttagcctgctctgcactgccaaggtcccatgcaccggcgtcaccatggatgacgtcaacgtcgagtatagcggcaccaacaacaagaccatggctatatgcacgaacgccaagggcagcaccaagggttgcctcaaggagcttgcatgcttctagaccctccatcgactgacccatctctctagttataatttttctctcgtccttgcattgcccattagatgctatccattggtaacgcacaacagtaaaacgacagacatccgacagctatattatgttcgacggtgtaacaccctgaatttgagggtataaaatttcttctccaaataccaaccaaattcaggggttacctcttgtctctctctctcttttcccttttgattaaaagtaagtgaattaggcgagggtttaattatttattttaaaaaaaaaaaaaaaaaaaaaagggcggccg

SEQ ID NO: 94377 - DNA, 522 bp, Zea mays
  unsure (1)..(522): unsure at all n locations
nggggnggggtagtgccgntngtctaaatggcggggaaaaagtaatgttgtaccggttcggaattcccgggtcgacccacgcgtccgctcctcctccttcctcggccaagcgaggagcgaggcgcgggcgcgagcgcgtcgttgagatggattcggaggcggtgcagcacggctgcgcgcattacagccgtgggtgcagcgtcgtggcgccctgctgcggccaggccttcggctgccgccattgccacaacgacgccaagaactcgctggaggtcgacccgcgcgaccggcacgagatcccccgccacgaaataaagaaggtgatctgttctctctgctccaaagaacaggacgtgcaacagaactgctccagctgtggggcctgcatgggcaagtacttctgtaaagtatgcaagttcttcgatgatgatgtctcaaagggccagtaccactgtgacggatgtggaatatgtagaactgccggcgtggagaactttttccactgtgataaatgtgggtgtt

SEQ ID NO: 94378 - DNA, 569 bp, Zea mays
  unsure (1)..(569): unsure at all n locations
ntaaattggcttatgcaagcnacctacgctacgtcgtacccgtccggaattcccgggtcgacccacgcgtccgttctggttccttaagtttgtgggccgtggctatttaatctccaactgcatccccagaagagctcgtctagatgagagactgggaactccgggattgggttggataaggtgttctgggaatggggaaccaatgcccaaacgggacccttgggagtgactactacaaccgcgccgcttccaggttcgctgatggttgccttgaggacgatcgctactctgacttgaagaagtttgacaagccatggcctgaggtgaactcgtttaagcccactgctgttggtattttgaagaggggattggatccaacgtcaatcactgaccttgaaagaacaccggcgacgataggggacatttttatcattggtcggaagcttggtcaaggccagttggcacaaacattcttttggaccgagacagtccagggtgggagtattcattcaagacatttcccaaggcgagagctcatcatccatgagggatgttagggattcctccct

SEQ ID NO: 94379 - DNA, 578 bp, Zea mays
  unsure (1)..(578): unsure at all n locations
gcatcgtggttngatgagctcgatcgtcatagcacctgccgtaccggtccggaattcccgggtcgacccacgcgtccgaaaaggaaaagaaaaggcaggagaataacgaagcaagatctgccgcggctccattttaactggtcggcgcctccgccgctgccgtcttccccctctcccctccgtaccactcgtcttcgtctagcctcccgcccgcagccaccatggcacccggcctctacaccgacatcggcaagaaaaccagagatttgctgtacaaggactacaacacgcaccagaagttctccctcaccacctgctcgccccatggcatcgcaatcacagctgcaggaacaaggaaaaatgagtccacctttggcgaatcttcacactcaaattaagaacaataaattgacggtcgatgtccaagcgaactcagaatcagatcttttgacaacaatcactgttgatgagattggtacctcagggctcaaatcaattctcaccttgggttgttccgaccagangtcaaggaagctttgaactccagtcctacatggatatactggtgggattgcacn

SEQ ID NO: 94380 - DNA, 577 bp, Zea mays
  unsure (1)..(577): unsure at all n locations
tggagtgcctggtattgcctaggcttagtttgtacagtgcaaccngctccggaattcccgggtcgacccacgcgtccggcaaatcgaagggcatactatctgtgcgcttggggatgctgcggcatggcctgtgcaggggcttatgaggcacttcaggccagagttggagcggaggatccgcgagcgagctgaaagggagctgttggcggcttctgcataatgtgccagccatgttgcccctgtactagtttcctgatctcttcctaccgaaataatacaaactgatggagctcctttctgtgtaaggaaatgtagccttcctgatttctttaaaccatcatttatttgatgcactcaagcagctggtgaattttgatggactagataaactttccaaagagaaacaaactcgagggttgtaccgtgtatgctacataatattatngtggatgtggatgtctaaaaaaaaaaaaaaaaaaagggcggccggtctagaggattcaaccttacgtacgcgttcatgccacgtcatagctcttctatagtggcacctaaatcaaattactgggcgagggtt

SEQ ID NO: 94381 - DNA, 571 bp, Zea mays
  unsure (1)..(571): unsure at all n locations
caccgtgctagtgcctgcncattacagtacgtgcaaccgctccggaattcccgggtcgacccacgcgtccggtgcaccaccccgctcaccttccaggtcggtaagggctccaagcccggccacttggtcctgacccccaacgttgccaccatctctgacgtggagatcaaggagcacggtggcgacgacttctcctttacgctcaaggagggtccgactggcacttggacgcttgacaccaagaccccgctcaagtaccccctctgcatctgcttcgctgtcaagtccggtggctaccgcatcgccgacgacgtcatccccgccaatttcaaggccggcaccacctacaagaccaccctcagcatctgattagcctcttatgacgaatgatatttcaagagagctcatccggcccatgtgccagcgagctaatatttaattgtgtttctttggatatattgagggaccacacgagccaagaaaaaaggtatgctacatggtcccggctcacgccttgtgtgcgttagggtgatatgcatgaatacttggattaacctacactttgattaan

SEQ ID NO: 94382 - DNA, 522 bp, Zea mays
  unsure (1)..(522): unsure at all n locations
agttnaggtcggtcctntcaatgagcatgtagcctacgcgatgctcgtccggtccggaattcccgggtcgacccacgcgtccgcccacgcgtccggtggatggcaatcgacatttctcactaaagataaagctgttgccgaggaaagggccgcaaagctcgggataaagctagaatggaccgacgacggcgtgaagacggtcatgggccccatccccgcggtgaagtgggacgagagccgaggacggaagatctggttcaacagcattgtcgccgcctacattgggtggaaggacgcccggaacgaccccacgaaggcggtgaccttcggcgatggctcacccctgcctgctgacgtcatcgacgcgtgcggccaggtcctagaggaggagtccgtggccgtgccatggcagcacggcgacatcctccttatcgacaattgggccgtcctgcactcccggcgctcgttcgagccaccgcgtcgcatcctcgcctcgatctgtaaatgatgtgtgtagatgcc

SEQ ID NO: 94383 - DNA, 574 bp, Zea mays
  unsure (1)..(574): unsure at all n locations
cgattgctgtgttatgcctagccttaggttgtacagtgcaaccngctccggaattcccgggtcgacccacgcgtccgcccacgcgtccgcaccactctcgcagggctgtaccggtaccgtctaggggacgtggtgcaggtggccgggttctacaactcgacgccgaagctcaagttcgtgtgccggcggaacctgttgctgagcattaacatcgacaagagcagcgagcaggacctgcagctggcggtggacagcgcggccaaggtcctggcggcggagaagctggaggtggtggactacagcagccacgcggaggtgtcgcgcgacccgggccactacgtggtgttctgggagctgaacgccgacgccggcgacgacgtgctgcagagctgctgcgacgagctggaccgcgccttcgcggacccgggctacgtcgggtcgcggagggcgcgcggcatcggcccgctcgagctgctggtgcttgaacggcggaaccttcagaaagtgctttcgcactacctcntccttcgcgccccccgtaagcaagttaaagtcgccggctgcgtcggccggc

SEQ ID NO: 94384 - DNA, 579 bp, Zea mays
cggatgggcgggctattgcctgcaactcgcctctcagtcgataccgctccggaattcccgggtcgacccacgcgtccggggggtgtaggcgggggcggcggccttggtacaggtggaggaggtggctttggaggtgggaaaggtggtggacttggcggaggtggtggccttggcagtggaggtggtgcaggcgtaggcggtggtcttggagggggtgccggtggaggcggcgaccttggaggtgggaaaggtggtggccttggtggagggggtggcctcggctgcgcgcgcgctcctctcttcggcgctctcgtaccgcctcgtcgcgtccaagccctactctttcttccccacgcagacggtccccgaggcaaaaggcgccttcatgtcgaatactttctggttctaccggttggactccggcttcgtcgtctacaaagtcgaaccttaaggactaccaggtggaccttgttcgattggggtcaattggtctggacacgctgtttaagatcaataattgactggaaccctgtgttaacttttctccgaagtgcctctagggcattttcggtaacttcg

SEQ ID NO: 94385 - DNA, 578 bp, Zea mays
  unsure (1)..(578): unsure at all n locations
cgatgtagtgcgtgttccctgcattgggttgtcagtgcaaccgctccggaattcccgggtcgacccacgcgtccggtccctgtcgtcctcgcccggtttccccggtttttgagaggggaaagaggaggcggaggagagggatggggagggacgagaggttcccggtgtgggaggccgcgctcggcgccggagtcgccgccgccttcgccgctggactcgtcggtgtctacctttccatgccggactccgactacagcttcctcaagttgccacgtaatctcgaggaactccaaatcctcactggccatcttgagaactatactagtgactacaccctacaggtgttggtaggttattgcgctgtgtacatcttcatgcagaccttcatgatcccaggggcaatattcatgtcactgcttgctggggctctatttgggcaactgcgtggccttgcactggtgggtcttgctggcactgcaaggtgcttttcgtgctatttccctgcaaagatgattggggagcccactggggttaacactgtgggcagaatagcttcagcttgtttcagatgcaaggtn

SEQ ID NO: 94386 - DNA, 521 bp, Zea mays
  unsure (1)..(521): unsure at all n locations
ggtaagggtgggccatngatgatcttagctcactcagnactgctgtaccggtccggaattcccgggtcgacccacgcgtccgcccacgcgtccgcccacgcgtccgcccacgcgtccgatcactacgttctgcaaaacggtgttctagaagagcaccagctagggagcagaataatgaacatactcagagtgagcagcttcatggttctgcaagtgagcagcaagctagagagcaacttcatggttctgtaagtaaacagcaaactgaagttcttcgctccaatgtcagcagtggcgatgcctcaaaatgtcattttggccctatagttactcagaagctgaaggaacattttgaaaaagatccatatccttgccgtgcaacaaaagagggtctggcacaagagctaggactgacatttaatcagatcagtaagtggttctctgccacccatcattattcaagagatgctgttgccaagaaccaaaaatacccaggagaaaatactactgagaataatagt

SEQ ID NO: 94387 - DNA, 576 bp, Zea mays
  unsure (1)..(576): unsure at all n locations
atatgttatgcgtattgcatcgtattagggaagtagagttgcaaccgctccggaattcccgggtcgacccacgcgtccgctccctctccgtcccccaagcaaagaaaagaagctagctagctaggcgtagaacgaatgacgacgcagggcggcaacaggtcgacgacgacgctggtcgccgccgtggccgtagttctggccgtggcggcggcgtcgtccctggccggcgtggcgtccgcggagaaggcgggcgggttcgtggtgacggggcgcgtgtactgcgacccctgccgcgccgggttcgagacgaacgtgtccaggagcgtggccggcgcgacggtggaggtggtgtgccggcacttcggcgcgtccaaggagacgctcaaggcggaggcgacgacggacgacagcgggtggtacaagctggagatcgaccaggaccaccaggaggagatctgcgaggtggtgctggcctcgagccccgacctggtgtgcgctgagatcgaggaagttcgggaccgcctcgcgtntcggtcccttccacaacgggataaggcacagggcgtccggtcgccc

SEQ ID NO: 94388 - DNA, 562 bp, Zea mays
gtttatctggttgcatgttatgttagagtaagactgctgtaccggtccggaattcccgggtcgacccacgcgtccgaggacgcgtgggcggactcgtgggcggactcgtgggcggacgcgtgggcggacgcgtgggcggactcttgggcagacgcgtgggcatcagccaagtgtaaagagtgcgaagaagcagtagcaaaaggattccattctcgagttcttggagtggtacatcgatcgagctgcgtgaaagatagagagagagagcttgctatggttacagcaggtaaggtgatcaagtgcagagccagtgtggcataggacgccggcaaaccgctgtccatcgaggaggtcgaggtagctgctgcataggccatggaagtgcgtatcacgatcctctacaccgggctttgcataccgacgtctacttctggtaggctaagggcaaactacggtgttcccgaggacttaggacactaatcgtaggcatgttgagaggctttgagagggcgttacaaatctggggcaaggttacaagtccttccggggttatcggaaagtg

SEQ ID NO: 94389 - DNA, 575 bp, Zea mays
  unsure (1)..(575): unsure at all n locations
ggactcgggatatnccatgancatgagtgctacatgcattgacgcaccggtccggaattcccgggtcgacccacgcgtccgatcggctccggcgccgcctccgtcgtgccttccgatccgctctactccgtctacgccgctaccaaagcgtatgttgaccaattctcaagatgcctctatgttgagtacaagagcaagggtattgatgtgcaatgccaggtgcccttatacgtggcgacaaagatggcatccatcaggaagtcttccttcatggtcccatctgctgacacctatgctcgtgctgccgttcgtcacattggatacgagcctaggtgcacaccatactggccacactctgtcgtgtggttcttgatctccattcttcccgagtcccttatcgacagcgtgcgcctgggcatgtgcattaagatccgcaagaaggggctggccaaggacgccaagaagaaggcgctgtgattgatgtttcagaatgcatgttcagattcgcacatttnctcatcacctgtagtagacacgtgccttgcttgagtcactttattagctaccattggctc

SEQ ID NO: 94390 - DNA, 522 bp, Zea mays
agttagtgcggtgcgatcctgagcctagctccttcgcgatgctgtaccggtccggaattcccgggtcgacccacgcgtccggttctagatcgcgagcggccgctcgcgccacgtacgtacggtggtcacatcgctgtcgaccgcgcgcgttgggagcgcatccggccgtgtgcattagccgcccatggacgacacggagagagaaaaggagaaggagaaggagaaggagaaggagaagcacgactgcgggacggacgtcgaggacgaagaagaggacgaggaaggcaacaagcgcgtcgtcgtgcttggcccccaggtccccctcaaggaacagctcgagctcgacaaggacgatgagagcctgaggaggtggaaggagcagctccttgggcaggtcgacaccgagcagctaggagaaactgcggagccagaggtcacggtgctggacctgacgatcctgtcgccgggcaagccggacctggtccttcccatcccgttccaggcggacgacaagggctatgc

SEQ ID NO: 94391 - DNA, 521 bp, Zea mays
ggtataggtggtccgatccatgagttacgaatttattgcactgctcgtaccggtccggaattcccgggtcgacccacgcgtccgcccacgcgtccgcccacgcgtccggcatcgatcacgacaagatggcgtgcacaaacaatgcgatgagagccttgttcctcctggtcctcttctgcatcgtgcatggtgagaaggaagagtcaaagggcatcgatgcgaaagcgtccgggcctggtgggtccttcgacatcaccaagttgggcgcctccggcaatggcaagacagacagcacgaaggctgtgcaggaggcatgggcatcggcgtgcggcggcactgggaagcagacaatcctcatacccaagggtgacttccttgtcggacaactcaacttcacaggcccttgcaagggcgacgtgaccatccaggtggatggcaatctgctggcgaccacggacctaagccagtacaaggaccatggtaattggatcgagattctacgtgtggataacctggtcatt

SEQ ID NO: 94392 - DNA, 524 bp, Zea mays
ggggagggcgggccgatccatgatatttgcaatagtgcgactgctctaccggtccggaattcccgggtcgacccacgcgtccgacgccgccgtccacagagctgtcagcagcagtcggcgtgagatgcgggagaggccgaggaagcacaagaagaggggcccgtgccgggcgacgaaccctatcgacaagtgctggcgctgccgcagagactgggcgacggaccggcagcgcctggcccgttgcgccagaggcttcgggcacgcgaccaccggcggcctcggcggcaagatctacgtggtgaccgaccccaccgacctcgacgtggtgaacccgcgccccggcacgctgcgctggggcgtcatccagcccggcccgctgtggatcatcttcgcgcggtccatgatcatccagctctcgcaagagctgctcatgagcagcgacaagaccatcgacgggcgcggcgcgcaagtgcacatcgccaacggcgccgggatcacggtgcagctggcgcaaaacgtcatca

SEQ ID NO: 94393 - DNA, 572 bp, Zea mays
  unsure (1)..(572): unsure at all n locations
ngcaaaactggtgtcctagctatgattgcacgtctctaccggtccggaattcccgggtcgacccacgcgtccgcactcaccccgccttcacgcctccctcaccaaataaggtcccgcccttttccgacattcacaggggggacaggaaatcagcggccatggcctcgattccggcgacgaccttcgccgtcatcttatccgtcctcttctgtgccgcggctggcaccgtcgtcgacaacgacctccccgactacgtcatccagggccgcgtctactgcgacacctgccgcgccgggttcgtgaccaatgtcaccgagtacatcgcgggcgccaaggtgaagctggagtgcaagcacttcggcaccggcaagctcgagcgctccatcgacggggtgaccgacgcgaacggcacgtacacgatccagctcaaggacagccacgaggaggacatctgctagggtgtcttgggtgaagagcccgcgcaaggactgcgaccaggtgcagtcggacaggggaccgggcggcggtcttgctaacaagaacgttggcattagcgacaccctgcgccccgc

SEQ ID NO: 94394 - DNA, 578 bp, Zea mays
  unsure (1)..(578): unsure at all n locations
ggctcggcctagtgccagcncatggatgctcattcgacctgacgtaccggtccggaattcccgggtcgacccacgcgtccgcccacgcgtccgcccccttgcaagtatagtctcggcggctctagaagacgatgggcaaggacgacgtgatcgagagcggcgctggcggcggcgagttcgctgccaaggactacacggaccctcccccggcgccgctgatcgacgcggctgagctggggtcctggtcgctgtaccgcgccgtgatcgccgagttcatcgccacgctgctgttcctgtacatcacggtggccaccgtgatcgggtacaagcaccagacggacgcgtcggcgtcgggtgccgacgcggcgtgcggcggcgtgggggtgctgggcatcgcctgggccttcggcggcatgatcttcggcctcgtctactgcaccgtcggcatctcggggggccacatcaacctcgccggcaccttcggcctctcgctggcgcgcagggtctccctggtgcgcgcgctgctctacatcgtggcgcaatgcctggcgccatctgctgcgtcggcctcgtcaagg

SEQ ID NO: 94395 - DNA, 582 bp, Zea mays
  unsure (1)..(582): unsure at all n locations
tgcacgggcntattgatcgaacatcgactctcactcgactgacgtaccggtccggaattcccgggtcgacccacgcgtccgatgagtactgggtgatatcgccgccggcgctgctgcaccagccggcgtccaccatcgtcgtggccatcgaccgggaccggaacagccaactggccgtgaagtgggtggtggaccacctcctctccggcgcctctcaaatcgtcctcctccacgtggccgtccattaccacacgacccatgggttcgccatggttgagaccacgcagggtgcgctggaggctgaaatgaaggagatctttgtcccctacagaggattcttcaaccggaatggggtaaatgtggaagtatccgaggtagtattggaagaagcagacgtgtccaaagccattctaggttacatcactgcanacaagatccagagcattgcgctcggcggagccaacagaaatgcgttcaccaagaaattcaagaacgcggacgtgccgtcgaccctgattgagtgcgcttcagactactgcaacatctacgtcgtggccaaaggaaggttcgtcaatgtcaggc

SEQ ID NO: 94396 - DNA, 530 bp, Zea mays
  unsure (1)..(530): unsure at all n locations
gtntagggcgcgtcctncccatgaattaagcagtgatggactgctcgtaccggtccggaattcccgggtcgacccacgcgtccgccgccccccgcaggagcacggagcggtacccgtcgcggctgtccagcgggtcggacggcgtggaccagcagcagcagcacagcttcgaggcgtcgcgcacgcccagccggtggggcgactcgttcggcaacgacagcacgtcgcactcccagaccagcacctcctcatggtgctcgcagcctccggacgagatggaggcggagatgaagcggctgcggctggagctgaagcagaccatggacatgtacagcacggcgtgcaaggaggcgctgagcgcgaagcagaaggcgctggagctgcagcgctggaagatggacgaggagcagcggtcgcaagagacgcggctgacggaggagtcggccatggcgctcatcgagcaggagaaggccaatgcgagggcggccatcgaggcggccgaggcgtcgcagcggctggcggacctggag

SEQ ID NO: 94397 - DNA, 567 bp, Zea mays
gaataatgggttgtgttgggaccgtacgcgctactaatgctcctgaattcccgggtcgacccacgcgtccggcgtacattaagcagagaggctatgacctttacgacgtgaaggcttatggacagatgctggaggatgctggttttcataatgtcatcgcggaagatcgcactgagcagttcttgaatgttctacagagggagctaggtgaagttgaaaagaacaaagacgctttcctggcagacttcacccaggaggactatgacgacattgtgaatggctggaacgcgaagctgaaacggagctctgccggcgagcagaggtgggggttgttcattgccaccaagtgatttggcctggcagcatgagggctcttcggaataagaatggatgtggctcttactctgctgctagaccagtgatgggtcagcttagaagcaggggatcttcatcatcagaataaaacgtgtgttggtgtgttgctgtgtctacgccactagtatttctgttggtacttatgttctaggtaaactgggcattcagagcataacttgaaaatatatcctt

SEQ ID NO: 94398 - DNA, 567 bp, Zea mays
  unsure (1)..(567): unsure at all n locations
gggtggtgcgtntggctgtctcgcctctcgatgccactgacgtaccggtccggaattcccgggtcgacccacgcgtccggccgccgcttcgccgctgcccgtttcttcgaaccactccgaagctgccccgccatggacagctccgccactgacggcgcgaggctaccgccgccaagggccgggagtcgcctctgcgtcaggtgcggcgagaggaaggccgcgctgaagcggcccaaaaccctagaacagatctgtagggaatgcttctatatcatctttgaggacgaaattcatcaaactattgtccagaattctctgtttaaagctggtgagcgtgtggcaatcggagcttctggtggaaaagattcaaccgtgcttgcatatgtgttatcggagttaaaccgtcagcataactatgggcttgatttgtgccttttatctgtcgatgaaggaatcacaggatatagagatgactcactagaaactgttaaaaggaatgaaatacagtactgtctgtcactgaagaatgtttctataaagattgattgctggacaatggataatatt

SEQ ID NO: 94399 - DNA, 583 bp, Zea mays
  unsure (1)..(583): unsure at all n locations
ctctgcggtgctagttgaaggggccatcagctacatcnattgtccgttccggtccggaattcccgggtcgacccacgcgtccggagaattcttaattcatgagttgtagggagggacttatgtcaccacaaacagaaactaaagcaagtgttggatttaaagctggtgttaaggattataaattgacttactacaccccggagtacgaaaccaaggatactgatatcttggcagcattccgagcaactcctcagctcggggttccgcctgaagaagcatgagctgcagtagctgcggaatcttctactggtacatggacaactgtttggactgatggacttaccagtcttgatcgttacaaaggacgatgctatcacatcgagcccgttcctggtgactgagatcaatatatctgttatgtggcttatctttagacctattttaagagtgttctgttactaacatggttacttcaaatgtgtgtaacgtattttggttaaaagtcttattcggctttatgttgtaggatctactaatttccactgctaagtaaaaaactttctaatggtctttcttctgtatt

SEQ ID NO: 94400 - DNA, 535 bp, Zea mays
  unsure (1)..(535): unsure at all n locations
ggttgagtggcgggtgcgtgcccatcgaataggggaccgtcgcgacgccgtaccggtccggaattcccgggtcgacccacgcgtccgcggacgcgtgggcccaggcaggcaggtcggcgaggagggcaggaagaccgaagaccgagccgtgcgggggctcgggacgggaacgggacaggaccccaaaatctcagatccttcctgcccgcccgcccgtgcccgtcgacgcgtcgttcttgccggccgcgccccacctccgccctctcctcctccagggggatcggatacgccacaggctgcgcgatggtgctgtgggtcttcggctacggctccctcatctggaaccccggcttcgacttcgacgacaaaatcctcggcttcatcaagggctacaagcgcacctttaatctcgcttgcattgaccacagaggcacaccggagcattcggcgaggacctgcacgctttgaaccgacgacgaggccatatgcctggggaatngcatattgtgtcaagggtggtccagaanaagagcta

SEQ ID NO: 94401 - DNA, 542 bp, Zea mays
  unsure (1)..(542): unsure at all n locations
agtttagtggcggntnnntatncatgaanttattgatcactacgctatgccgtaccggtccggaattcccgggtcgacccacgcgtccgcccacgcgtccgacccggccccaacatcaccaccaactacaacggcaagtggctcaccgctagggccacctggtacggtcagcccaacggtgccggcgctcctgacaacggcggtgcgtgcgggatcaagaacgtgaacctgccaccctacagcggcatgacggcgtgcggcaacgtccccatcttcaaggacggcaagggctgcggctcatgctacgaggtgagatgcaaggaaaaacctgagtgctcgggcaatccagtcacggtgtacatcactgacatgaactacgagcctatcgctccctaccacttcgacttgagcggcaaggcccttcggcttcctggcaaagcccgggctcaacgacaagattcgccactgcggcatcatggacgtcgagttcagaagggtgcgatgcangtatccccgccgggcagaagatcgtgttccacatc

SEQ ID NO: 94402 - DNA, 513 bp, Zea mays
  unsure (1)..(513): unsure at all n locations
agaagtnnttggtagcgggggagagtatgctcgtccggtccggaattcccgggtcgacccacgcgtccggggaggggaaaacacgtacattcacccggcggcaataatggcctcggttccggctccggcgacgacgaccgccgccgtcatcctatgcctatgcgtcgtcctctcctgtgccgcggctgacgacccgaacctccccgactacgtcatccagggccgcgtgtactgcgacacctgccgcgccgggttcgtgaccaacgtcaccgagtacatcgcgggcgccaaggtgaggctggagtgcaagcacttcggcaccggcaagctcgagcgcgccatcgacggggtcaccgacgcgaccggcacctacacgatcgagctcaaggacagccacgaggaggacatctgccaggtggtgctggtggccagcccgcgcaaggactgcgacgaggtccaggcgctcagggaccgcgccggcgtcctgctcaccaggaacgttggcatctccga

SEQ ID NO: 94403 - DNA, 523 bp, Zea mays
  unsure (1)..(523): unsure at all n locations
agatagccgngtggtcatgaaggagaggtatattagcattgctcgtaccggtccggaattcccgggtcgacccacgcgtccgcacaaacctaacgcggagcggcgcgggccggccgccgggcgaggtgcgcgtacctgccgtcgatcgtcgccggatccatccaccatgggcggtggcaacggccagaagtccaagatggcccgcgagcgcaacttggagaagaacaagggggccaaggggagccagctcgagaccaacaagaaggccatgagcatccagtgcaaagtgtgcatgcaaacattcatgtgtaccacgactgaagtgaagtgcagggagcacgccgaggccaagcatcccaagacagacgtgtaccagtgcttcccccatctgaagaagtgaaaggcctgaacttagcaaccagtgctggtttggccagngggcgttccttgtgttgagggtgttcattccgtggtatcttcccgtcagtcatgcgtcctgtcctatgttaacctacataagaan

SEQ ID NO: 94404 - DNA, 522 bp, Zea mays
  unsure (1)..(522): unsure at all n locations
ggtgaggcncagtgggatgatagaagtgtacgcacgctcgtccggtccggaattcccgggtcgacccacgcgtccgaagatggcaaatgctctcctaggtggcctgtgggcgatcgtcgtcgtcgcggtggtcgtcggcgtggtcgccaccgtcacccactccggcaagaaggccggcgacgacttcaccgtcccgggggaagcctccattgccacgtccggcaagtcggtcgagtccctgtgcgcgcccacgttgtacaaggagtcgtgtgagaagacgctctcccaggccaccaatggcaccgagaaccccaaggaggtgttccacagcgttgccaaggtggcgctggagtcggtgaaaacagcggtcgagcagtccaagacgatcggcgaggctaatgccagcgactccatgaccgagagcgcgcgggaggactgcaagaagctcctcgaggacgccgttgacgacctcaggggcatgctcgagatggccggccgcgacatcaaggtgcttaataancg

SEQ ID NO: 94405 - DNA, 501 bp, Zea mays
  unsure (1)..(501): unsure at all n locations
tgcggtncttgactagtggggagatagtatgctcgtccggtctcggaattcccgggtcgacccacgcgtccgcggacgcgtgggtcggttcacttctccaggtaaggaaagggttcgtactcatggcgccgccgcagccaaagtcgggcctcttcgttggcatcaacaagggtcatgtcgtcaccaagcgcgagctgcctccccgcccgtgccaccgcaaggggaaatcaacgaagagggtgtctatggtcaggggcctgatcagagaggttgctgggtttgctccttatgagaagcgtatcactgagcttctgaaggttggcaaggacaagcgtgccctgaagcttgctaagagaaagcttggaactcacaagagggcaaagaagaagagagaggagatggcgggcgtcctcaggaagatgaggtcggctggtacgcacactgacaagaagaaatagagagcatttcaagttcatggagcctgccagagattatgttcca

SEQ ID NO: 94406 - DNA, 527 bp, Zea mays
  unsure (1)..(527): unsure at all n locations
ggatagggccgagtggccatcgatcagacatcattagcatctgctcgtaccggtccggaattcccgggtcgacccacgcgtccgaagatggcaaatgctctcctaggtggtctgtgggcgatcgtcgtcgtcgcggtggtcgtcggcgtggtcgccaccgtcacccactccggcaagaaggccggcgacgacttcaccgtcccgggggaagcctccattgccacgtccggcaagtcggtcgagtccctgtgcgcgcccacgttgtacaaggagtcgtgtgagaagacgctctcccaggccaccaatggcaccgagaaccccaaggaggtgttccacagcgttgccaaggtggcgctggagtcggtgaaaacagcggtcgagcagtccaagacgatcggcgaggctaatgccagcgactccatgaccgagagcgcgcgggaggactgcaagaagctcctcgaggacgccgttgacgacctcaggggcatgctcgagatggccgcngcgacatcaggtgcttattaccc

SEQ ID NO: 94407 - DNA, 522 bp, Zea mays
  unsure (1)..(522): unsure at all n locations
gtttgccnctgaccatggagcgtagcagtancgcattgctcgtaccggtccggaattcccgggtcgacccacgcgtccgggacaggatgccccgcagcggcatttcggggaccctcaggtcgccccagatcgacgtggtcatcgacacggggaaccccttcctgaaccgcaccgtctacggcttcctcaagatcggcgttgtcggcgcctgcaaggtggcggccgaggagaccttcgactgcctccacaggggggatgtttcaaagcgcaaggttgagcatgccctgaagaagatgtgcaaggagggcgcatattgggggactgttgctggcgtctacgtgggcgtggtgtatggcgtggagagggtccgtgggcgcagtgactggaagaacgcgatggtctgaggcgccttgtccggcgcgctggtctacgacgacagcagcaaccacggagacaagatcgtcaaggacgccatcaccgncggcgccgtcgcaacggccgtcgagttcggcaactacctta

SEQ ID NO: 94408 - DNA, 513 bp, Zea mays
  unsure (1)..(513): unsure at all n locations
tgtggtcnctgaacatcaagtaaatagtagtgctcataccggtccggaattcccgggtcgacccacgcgtccgagctttcgttatcctcctcgatcttaattacaggtcatagctaagcaggtctgacaggatgtcgtggcagacatacgtcgatgagcacctgatgtgcgagatcgagggccaccacctgaccttcgctgccatagtcggccacgacggcgccggttgggcccaaaacaacggatttccaacggtcaagacagaagaaattaaccacaatattaaaggacttcaacaggcccggtttcttgccccgaaccggctttttcttgggcccaaccagttcatgggcattccaagggaacccggggctttcattcgccggaaaaacggatcttgaagctttactgttgaaaaaaccaggccagccattgttggnccggattttccaacaggcccttgaaccccgggcaatgcaacattggggggccaaaagctttgggaacttactc

SEQ ID NO: 94409 - DNA, 519 bp, Zea mays
  unsure (1)..(519): unsure at all n locations
gaaatgttcntncgcatgaagaagatatatgcattgctcgtaccggtccggaattcccgggtcgacccacgcgtccgggaaaagttatatgatgctggcaaagttcgcgctattggtgtgagtaacttctcctcaaagaaattgggcgacttgcttgctgtagctcgtgtacctccagctgttgatcaggtggaatgtcatcctggttggcagcaaactaagctccatagcttttgtcagtcaactggtgttcatctcactgcttactcaccactaggttcacctggtacaacttggatgaatggtaatgtccttaaagaaccaataatcatctcaatagctgagaaactcgggaaaacttctgcacaagtggctctgcgctggaacattcagatgggtcacagtgttcttccaaagagcacgaatgaagaaaggataaagcaaaaccttgatgtatatgattggtcaattccagatgacttgcttgcaaagttctctgagattaagcaggctaggctt

SEQ ID NO: 94410 - DNA, 502 bp, Zea mays
tatggtacttgaccatgaatgtatagtatagctcgtaccggtctcggaattcccgggtcgacccacgcgtccgcccacgcgtccgcccacgcgtccgcccacgcgtccgcccacgcgtccgagaaaatttgacagctgtattgttccattacgacgggaatgtcaatgggtggaatgatctaccatggagcaaaagtgtgatacatatagctgcttctaaccagactaaatggtggtttgcaaagaggttcctccatcctgctgttgtgtctatgtaccagtacatctttctttgggatgaagacctggaagtagataactttaatccgagaaggtacttaaatatagttagatcagaaggactggagatatcacaaccaggtcttgattctaagctttctgaaattcatcaccgaataactggtcgtaaaaatacagggacctttcatagaagagttagtcgggcttacaaacgttgtttaagagaaggaccgccttgttc

SEQ ID NO: 94411 - DNA, 520 bp, Zea mays
tgtgaggtcagtgatcatgataagaatatattgcattgctcgtaccggtccggaattcccgggtcgacccacgcgtccggcaacaactcctcattacaatccttcaagagagcagcactacactacactacattagagagaggtcgagcgcccctcctccgatccgccggcccgccgagagctagctgctgatcggtcgaggagagtcatggcgacgtcgacgatgcgcgttgccgccggcgtgctgctggtcgtgtcggcgctggcgaccttggcccgggccgaggacccctacctgttcttcgagtggaaggtgacgtacgggaccaggtccctgctgggagtgccccagaaggtcatcctcatcaacggcgagttccctggccccaggatcaactgctcctccaacaacaacatcgtcgtcaacgtcttcaaccagctcgaccatccgctccttttcacctggaacgggatgcagcacaggaagaactcgtggatggacgggatgccaagcacgcaa

SEQ ID NO: 94412 - DNA, 498 bp, Zea mays
  unsure (1)..(498): unsure at all n locations
tagtncttgacatgtgggggagagtatgctctaccggtctcggaattcccgggtcgacccacgcgtccggtttgtggcggacgatggcgacatcgtgctgatggaaatccaggacaagttgtcggctgagtggaagcccatgaagctctcttggggcgccatctggaggatggacactgccaaggcgctcaagggccccttctctatccgcctcaccagcgagtccggcaagaaggtcatcgctaaagacatcatcccggcgaactggagacccgatgccgtctacacttccaacgtgcaattctactagactttgaattgccttcgattcatccggcgcggcgggctatggacctgcagcaacaagctaattaaagtggcccatatatatataatatataatggaaaccctgggctttgattattggggaagccccaaccagaatgcggataggccaccaccccgcatgattacgttagcatttatgctggtataac

SEQ ID NO: 94413 - DNA, 520 bp, Zea mays
  unsure (1)..(520): unsure at all n locations
nggatatggtgtgaaatatagcaatgtagtattgctcgtctcggtccggaattcccgggtcgacccacgcgtccggacgatggcccggccgcgcctcctcctcaccttcctgctcgccgcggcggccgtgctgaccacggtgcccggcgtcgcgctcgccaagtcgaagctcgccaagaagagcgacgacgtcgtgaacgggcccctcctgaccgagaagatccaggcgaagaagacgctgatcgtggggccggacgaggagttcaagaccgtgcagtccgccatcgacgcggtgcccgccggcaacgccgagtgggtcatcgtccaccttcgctctggcctgcacaggggcaaagttgtgataccggagaacaagcccttcatcttcgtgaggggcaacggcaaaggccggacctccatctnccacgagtccgcctcttccgacaacgccgagtccgncgcgttcaccgtgaactcggacaacgtcatcgtcttcggcgtcagcttcaggaacagcgcc

SEQ ID NO: 94414 - DNA, 515 bp, Zea mays
ggggtgatgctgacatcgcagggaagtatgctctaccggtccggaattcccgggtcgacccacgcgtccgcgccaataactgggtcgtccacatggagggaggagggtggtgcaggaatcctgatgagtgtgcggtccgcaagggcaacttcaggggctcctccaaattcatgaagccactctcgttttcagggatattaggcggcaaccaaaaatccaatcctgatttctacaactggaatagagtaaagatcagatactgtgatggttcatcatttactggtgacgttgaggctgtggacactgtgaaagatctccgttacagagggttcagagtctggcgtgccgtcatcgatgatctacttactgtgaggggaatgagcaaggcgcaaaatgctcttctttctggatgctcagccggaagtctagcagcaatactacactgtgacagattccatgatctgtttccagcgaaaacaaaggtcaagtgtttttctgatgcttgatattttttc

SEQ ID NO: 94415 - DNA, 517 bp, Zea mays
  unsure (1)..(517): unsure at all n locations
tgaaaggcnntcntcatgatagaacatattgcatcgctgtaccggtccggaattcccgggtcgacccacgcgtccgggaaaagttatatgatgctggcaaagctcgcgctattggtgtgagtaacttctgctcaaagaaattgggcgacttgcttgctgtagctcgtgtacctccagctgttgatcaggtggaatgtcatcctggttggcagcaaactaagctccatagcttttgtcagtcaactggtgttcatctcactgcttactcaccactaggttcacctggtacaacttggatgaatggtaatgtccttaaagaaccaataatcatctcaatagctgagaaactcgggaaaacttctgcacaagtggctctgcgctggaacattcagatgggtcacagtgttcttccaaagagcacgaatgaagaaaggataaagcaaaaccttgatgtatatgattggtcaattccagatgacttgcttgcaaagttctctgagattaagcaagctaggct

SEQ ID NO: 94416 - DNA, 519 bp, Zea mays
  unsure (1)..(519): unsure at all n locations
atgcgagtggctcatgattagacanagtataggatcgctcgtaccggtccggaattcccgggtcgacccacgcgtccggtggtgacatcggtccccacctacattgatggtcatagagtctgcccttcgtttgtcagtcgggcaatttttcttgcatacaaaaaaaaaaaaaaagggcggccgctctagaggatccaagcttacgtacgcgtgcatgcgacgtcatagctcttctatagtgtcacctaaattcaattcactggccgtcgttttacaacgtcgtgactgggaaaaccctggcgttacccaacttaatcgccttgcagcacatccccctttcgccagctggcgtaatagcgaagaggcccgcaccgatcgcccttcccaacagttgcgcagcctgaatggcgaatgggacgcgccctgtagcggcgcattaagcgcggcgggtgtggtggttacgcgcagcgtgaccgctacacttgccagcgccctagcgcccgctcctttcgctttctt

SEQ ID NO: 94417 - DNA, 511 bp, Zea mays
aggtactgaatgtgggaggaggatatgctcgtccggttcggaattcccgggtcgacccacgcgtccgcccacgcgtccgggttactgaaattttcaatttttcacaagatgatctgttgaccgaagacatgatgatacttgatacacactgtgaggtttttgtttggatgggtcagtgtgtggagacaaaagaaaaacagaaagcatttgacattggccagaaatacgtacgacatgccgtggcctttgaaggtatttctcctgatgtgcctctctataaagtcaatgaagggaatgaaccttgcttcttcaggacatacttctcctgggatagcgcacgatccgtgattcatggaaactcttttgagaagaaactttcagttcttttcggaatgcgttcagagggtggcaataagggctcaggtgatggtgggccaactcaaagggcatcagccttggccgctctttcatctgcattgaatccatcgtcgcaaggaaaacagtcagatga

SEQ ID NO: 94418 - DNA, 522 bp, Zea mays
  unsure (1)..(522): unsure at all n locations
agaaagtcnntgntcatgatggaggagttattgcatcgctcgtaccggtccggaattcccgggtcgacccacgcgtccgcccacgcgtccgcccacgcgtccgcccacgcgtccgcccacgcgtccgcggacgcgtgggtcgacatgaagtactgccccaacaagttgtgtactgccaacggcgcctccaaggtcaccgtcaaggacatcaccttcaagaacatcactggcacctcctccaccccggaggccattagcctgctctgcactgccaaggtcccatgcaccggcgtcaccatggatgacgtcaacgtcgagtatagtggcaccaacaacaagaccatggctatatgcacgaacgccaagggcagcaccaagggttgcctcaaggagcttgcatgcttctagaccctcagtcgactgacccatctctctagttataatttttctctcgtccttgaattgtccattagttgctatccatttgtaacgcacaacagtaaaataatatagcttgtggat

SEQ ID NO: 94419 - DNA, 497 bp, Zea mays
  unsure (1)..(497): unsure at all n locations
atgtgctaccatgaggggagtatgctatgctggttccgaattcccgggtcgacccacgcgtccgcccacgcgtccgcccacgcgtccggtgatgagcttgatgccgtctgtgctgccgtcggaaacgtcccctttgtgtcagcgtcacctctgtatagtgatcaagctgaagcagagcgtgcatctattcttgagaactttcgtcaagaaacaactcagtggaataaaactgctaaagctaccaatattgccgaaagttctaagcttgaaagtactggctctaaaataagcattatagttgcaacagatgcttgcttgcctcaggcagcgatggcagaggcaccccttatggctcgagtgctgataaactatgagcttcccacaaagaaggaagcttacttaagacgcatgtcaacatgtttggcggcagacggaattgtgattaacatggtcgttggtggtgaggtggttacactcaaggctntaaaagagaacag

SEQ ID NO: 94420 - DNA, 510 bp, Zea mays
cgtactgacatcgatgtacagtatgctctaccggtccggaattcccgggtcgacccacgcgtccgcccacgcgtccgatacgaacgtcgtacgagaacctttctccctcctccacctttctccttttcttgccacggcaaaacaccttcgccggcgagagcatggcgatggcgtaccgtgtcctggaggtcaccctggtgtcggcaaatgacctcaagaaagtgtcgctcttctcccggactcgcatctacgccgtggcttccatctccggattcgacctccgcatcccttcccacagcacccaagcagaccacagcaacggctgcaacccctgctggaacgccgtggtacacttccccatcccggctgccgctgacacccgcggcctcgcactccacgtgaggctccgcgcccagcgtctatacctgggcgatcgcgacatcggcgaggtgtttgtgcccatcgacgaccttctgggccgcgccgacaaggtggcgatccgaggcccgt

SEQ ID NO: 94421 - DNA, 526 bp, Zea mays
  unsure (1)..(526): unsure at all n locations
tagaatagtcgnttgcgcatgagagagagtatatagcattgctcgtactcggtccggaattcccgggtcgacccacgcgtccggtgcaggacaacttctgctcgacgctgtgcgagggcaggaaggggatggacctggtggtgtgcaaggagtcctgcgacctctcacagcgctccaacctggtgctgtacggccggatccagtgcaagggcaagtgcaccgagcagaagggcatcaccgcgccgcagatgaaggtgtgccaagaggcgtgcgacaaggactacgtggtcaaggcggctgaggtcaccaaggcctgcaacaccacctgcgccaaggagaagcagcctctgctcagcgagaactgcaggaggtcctgcacccctcctccttcctgaacgcagagcacgcccgccggtcgtcgtcttctgcctgcttgcgtgacactgaatcactgatacatcatacatgcatgcatgggatgcgatgacgatttgatgcatgcatgcatgggtatacctaccaattn

SEQ ID NO: 94422 - DNA, 521 bp, Zea mays
gaatgtgattgagatgaggggaggcggtactgcactgctcgtaccggtccggaattcccgggtcgacccacgcgtccgactgcagcgaggagagaggaaagagaaaaaggaaaggaaaggacgaaggagcggcggcgaggtctatggcgtcgacggcggggtacctggcgcggcgggcggcgcagaaggagcgggtgcgcctgctctaccgcagggcgctcaaggacacgctcaactgggccgtccaccgccacctcttctaccaggacgcgtcggatctccgggacaagttcgaggccaaccgacacgtggataacctggacgtggtcgataggctcatcgacgatgcggaggctcagtacaggaacttccagcaccccgatccctacattgttccatgggcaccaggcggcactaaattcacaagaaacccccctccacctcaagggatcgagatcatctacaattatggcaaggaggaccagtaaacaagagtcctgcaagcggtgggcagaacttcc

SEQ ID NO: 94423 - DNA, 521 bp, Zea mays
  unsure (1)..(521): unsure at all n locations
ngtaaatgccgngtgcttcgtgggggggaataatgtgattgctgtaccggtccggaattcccgggtcgacccacgcgtccgcagcaattgaagggagttggtttggatcttgggcaccagagaggatgttatgggatcacattatttataaaccaatacgggcaatgctcggaggacgtctaagatttgttctttgtggtggtgcacctctgtcaagtgacacacaaagatttatgaatatatgtctaggtgtcccagtgggtcaaggctatggattgactgaaacttgtgctggagcagctttcactgaatgggatgatacaaatgtgggtcgtgttggtccaccacttgcttgctgctatgtgaagcttgtctcatgggaagaaggtggttacaagatttctgattctgcgatgccgagaggagaggtcgtggttggcggacacagtataacataaggttatttcaacaatgaagcaaagacgaacgaagtatacaaggttgatgagaggggcatacgc

SEQ ID NO: 94424 - DNA, 522 bp, Zea mays
  unsure (1)..(522): unsure at all n locations
nagctnctgaactagcgatgggcgtagtattgcattgctcgtaccggtccggaattcccgggtcgacccacgcgtccgaaggtccactactctgctgatgacgctctcatactacagcaaaaagcccaggatgttctgccttacttggatggccgttgcgtttatcttgttggaatgatgggttcaggcaaaactacagttgggaagatactatccgaagtgttaggttattcgttcttcgacagtgataagttggtagagaaggctgttggtatttcatctgttgctgagatctttcagctccatagcgaaacattcttcagagataatgagagtgaggtcctgagggatctgtcatcaatgcatcggttggttgttgcaaccggaggtggtgcagtgatccgaccaatcaattggagttacatgaagaaagggctgaccgtatggttagatgtcccactggatgcacttgcaagaagaattgctgctgtaggaaccgcgtctcgaccactcttgcatcan

SEQ ID NO: 94425 - DNA, 506 bp, Zea mays
  unsure (1)..(506): unsure at all n locations
tatgtttattgagcactgaatagtatagctgcgctcgtaccggtctcggaattcccgggtcgacccacgcgtccgatcacaataagatggcgtgtatagacaatgcaatgagagccttgttccttttagcgctcttctgtgtcgtgcatggtgagaaggcaaagtcaaaggacaacgatgcaaaagcgtccgggcccggtgggtccttcgacatcaccaagttgggcgcctccggcaatggcaagacggatagcacgaaggctgtgcaggaggcgtgggcatcagcgtgcggcggcaccgggaagcagacgatcctcatccccaagggcgacttcctcgtcggaccactcaacttcacaggcccatgcaagggcgacgtgaccatccaggtgaatggcaatctgctggcgaccacggacctaagccagtacaaggatcatggtaattggatcgagattctacgcgtggacaaccttgtcatcaccggcaagggaaagctcgacggn

SEQ ID NO: 94426 - DNA, 503 bp, Zea mays
  unsure (1)..(503): unsure at all n locations
atgccntncaatgggaggagggggaatggtactccggtccggaattcccgggtcgacccacgcgtccgctttcgttatcctcctcgatcttaattacaggtcatagctaagcaggtctgacaggatgtcgtggcagacatacgtcgatgagcacctgatgtgcgagatcgagggccaccacctgacctccgctgccatagtcggccacgacggcgccgtttgggcccagagcaccgcattcccacagttcaagacagaggagatgaccaacatcatgaaggacttcgacgagcccgggttccttgccccgaccggcctcttcctcggccccaccaagtacatggtcatccaaggcgagcccggcgctgtcatccgcgggaagaaaggatctggaggcataactgtgaaaaagacagggcaagcgatggtggtcggcatctacgacgagcccatgacccccgccagtgcaacatggtggtcgaaaggctccgcgactacctcgt

SEQ ID NO: 94427 - DNA, 513 bp, Zea mays
gtaagtcctgaattgaggggaagtatgctctaccggttcggaattcccgggtcgacccacgcgtccgcccacgcgtccggaggccgccgcccagaccgcctccccttccccgcctccggtgcccaaggccaggccaacagttttgaggtggtaatggcggaccaggctaaccaacccactgtccttcataagctaggtggccagttccacctgagctccagcttctctgaaggtgtacgggcccgtaacatctgcctttctttctcatcttatgaaaggagatttgccacgaggaactacatgacccagagcctttggggcccttcaatgtctgttagcggtggcatcaatgttccagtgatgccgactccgctttttgccaatgctccagccgagaaaggtggcaaaaacttcatgattgatttcatgatgggcggtgtttcagctgctgtttcgaagactgcagctgctcccattgaacgagtgaagctgcttattcagaatcaggatgag

SEQ ID NO: 94428 - DNA, 514 bp, Zea mays
aggtactgaatatgaagaggtagttattgctgtaccggtccggaattcccgggtcgacccacgcgtccgcccacgcgtccgcggacgcgtgggttccactttgctcatctccgccaacttcctgttttggtcccttatattcctacagaaaatcctcagctgagtgatactgcatatgaggttgcccttgttgctctaactaccaatccttctttccatgaacttctcttgactactataaaaaattggccaccaacattatactcagcctcaccggtcatatctgccattgagccacagctaaactcctcatcgatggctgattcattgaaagagtcattagctgaattgtatgtgatcaatggtcaatacgaaaaggcactttctctttatgctgaactcctgaagccagaagtattcgagtttattgagaaatacaacttgcatgatgccattcatgataagattgtcaatcttatgatagtggacaataaaagaacagttcacctactgg

SEQ ID NO: 94429 - DNA, 526 bp, Zea mays
  unsure (1)..(526): unsure at all n locations
aggttgagccgngttnctattgccaccgaacatgactgtatcgctctaccggtccggaattcccgggtcgacccacgcgtccgcacgcagtacagcgagtacaagaactgggtgtggaagtcgcaggacgacctgttcctgaacggcgccttcttcaaccagtccggcggccagaacgagcgcaagtacgacaggctcgacctcatccaggccaagggcggccagtacgccgagtcgctcaccaggtacgccggcgcgctcaactgccgcgtcggcaggaagtgctagtgcgtgtgcagctctaggctgcagctttcatcattggcgatcgatcgtaacaatgcaaggttgtgttgtatataactcttgtgtttggaatgccgcccgtaattaatggtcaactctaacactgcttgcctttgcctgccggccagcaaaaaaaaaaaaaagaattgaataaaaaaaaaaaagggcggccgctctaaaggatccaagcttacgtacgcgtgcatgcgacgtcatagct

SEQ ID NO: 94430 - DNA, 519 bp, Zea mays
tggggctgaattgaggtggggagaagctatgctcgtaccggtccggaattcccgggtcgacccacgcgtccgcccacgcgtccgcggacgcgtgggttcgaataacacaggtgagcgcgacgatgggatccctcgctaataacatcatggtcgtgggcgccgtccttgcggcgctcgtcgccggcgggtcgtgcgggcccccgaaggtgccacccggccccaacatcaccaccaactacaacggcaagtggctcaccgctagggccacctggtacggtcagcccaacggtgccggcgctcctgacaacggcggtgcgtgcgggatcaagaacgtgaacctgccaccctacagcggcatgacggcgtgcggcaacgtccccatcttcaaggacggcaagggctgcggctcatgctacgaggtgagatgcaaggaaaaacctgagtgctcgggcaatccagtcacggtgtacatcactgacatgaactacgagcctatcgctccctaccacttcgacttga

SEQ ID NO: 94431 - DNA, 522 bp, Zea mays
  unsure (1)..(522): unsure at all n locations
gagaaatccgngttgctatgaagggaggaataaaagcattgctcgtaccggtccggaattcccgggtcgacccacgcgtccgcacaagacattgaagcttctgaagtattggacctggcaatttgttattgttaggccagtatgttccattctgattattgcactccagcttcttgggctgtaccccagctgggtcagctggacgtttagtattatactgaacttttcagtctccatggccttatatgcattggttctcttctaccacttgtttgctaaagagctggcacctcacaagcctcttgcaaagttcttgtgcatcaaagggattgtcttcttctctttctggcagggttttgcgctcgatgttttaacccaagcaggcgtgatcaaatcccaccatttctggctggacgtggagcacatccaggaggcgatccagaacgtcctggtgatccttgagatggtggtgttctccgtcatccagcagtacgcataccacgtcggcccctacagcggcgc

SEQ ID NO: 94432 - DNA, 499 bp, Zea mays
  unsure (1)..(499): unsure at all n locations
agggtgctgaccatgaatgtatagtatgctcgtccggtttcggaattcccgggtcgacccacgcgtccgcccgttcgcctcttctactgcctcctgtcgggtccttaataaagagcagcagcgcaagaggttggtagagcgagcgagaagaaggcaatggcggcggagagcttcctgttcacctcggagtccgtgaacgaggggcacccagacaagctgtgcgaccaggtgtcggacgcggtgctggacgcctgcctggcgcaggaccccgacagcaaggtggcctgcgagacctgcaccaagacgaacatggtgatggtgttcggcgagatcaccaccaaggcgagcgtggactacgagaagatcgtgcgcgacacctgccgcgagatcgggttcacctccgacgacgtggggctcgacgccgaccgctgcaaggtgctggtgaacatcgagcagcagtcccccgacatcgcgcagggcgtgcacgggcacttcacgn

SEQ ID NO: 94433 - DNA, 520 bp, Zea mays
  unsure (1)..(520): unsure at all n locations
aggtggnnnnnnnncgactgagccgtacgtatagtcactgccgtaccggtctcgccggttcgacccacgcgtccgcccacgcgtccgcccacgcgtccgaccatgaacccctcgggcgagctctccagcgccggcttcagcgagaaggagctgatcagcgccatcgaccgcgaggccgtgttcacgtacgcggaggacgcggccagcgccagcctgccgctgatgcagaagctgcgcgccgtgctggtggaccacgccctcagcagcggcgacgcggagcgggagccctccgtgttctccaagatcaccaggttcgaggaggagctccgcgcggtgctgccccaggaggtggaagccgcccgcgtggcggtcgccgagggcaccgcccccgtggcgaaccggatcgcggacagccggtcgttcccgctgtaccgcttcgtgcgcgaggagctcggctgcgtgttcctgaccggcgagaggctcaagtccccccgcgaggagtgcaacaaggtgttcgtcg

SEQ ID NO: 94434 - DNA, 501 bp, Zea mays
atgttgttgaatgaaggaagatggtaatgctgtaccggtccggaattcccgggtcgacccacgcgtccgctcagtcacctgcgccgccgcttcgttcgtgtggaggggagaagagaggaaatggcggcgacccgaggcgtgctcctggggatgggcaaccccctcctcgacatctccgccgtcgtcgatgacgccttcctgacaaagtatgacatcaagctgaacaatgctattctcgctgaggagaagcacttgcctatgtatgacgagttggctagcaagagcaatgttgaatatattgccggaggagccacccagaactctatcagggttgcccaatggatgcttcaaactcctggtgcaacaagttacatgggatgcattggaaaggacaagtttggtgaggaaatgaagaaaaacgctcaagctgcaggagttactgctcattactacgaggatgagactgctcctactggcacatgtgctgtatgtgttggtggt

SEQ ID NO: 94435 - DNA, 501 bp, Zea mays
  unsure (1)..(501): unsure at all n locations
ggggatgcgcatgaagacacgtaatgccatgccgtaccggtccggaattcccgggtcgacccacgcgtccgcccacgcgtccgccgatcgatcgccacagccaacaccacccgccgaggcgacgcgacagccgccaggaggaaggaataaactcactgccagccagtgaagggggagaagtgtactgctccgtcgaccagtgcgcgcaccgcccggcagggctgctcatctcgtcgacgaccagtggattaatcggcatggcggctctggccacgtcgcagctcgtcgcaacgcccgccggcctgggcgtcccggacgcgtccacgttccgccgcggcgccgcgcagggcctgaggggggcccgggcgtcggcggcggcggacacgctcagcatgcggaccagcgcgcgcgcggcgcccaggcaccagcagcaggcgcgccgcgggggcaggttcccgtcgctcgtcgtgtgcgccagcgccggcatgaacgtcgtcttcn

SEQ ID NO: 94436 - DNA, 508 bp, Zea mays
  unsure (1)..(508): unsure at all n locations
ntggntcggtgaaatagggagggacggtatgctcatgccgttccggtccggaattcccgggtcgacccacgcgtccgcaaccctgcgactgcgagcaagaggccgtatctcgagaggaactactccgtgctggaaccttcagaagggagccagctcgccgacgacgtggaaggggaaagctctctcgagaacgtgaagaaacagcttgagatcaacaagaaggcgatggccgctctttacaaggagcttgaggaagaacggagcgcttcggcggtcgcggctagccagacgatggccatgatcaataggctgcaggaggagaaggctgcaatgcagatggaggctctgcaatacctgaggatgatggaacagcaagctgaccacgaccacctggcgattcaggacctgcacgatttgcttacggagagggagaaagagttgcttgactaggacgctgagctcgcgcactgcaggaggctcctgcagaacgatccgttcaacggcgacg

SEQ ID NO: 94437 - DNA, 493 bp, Zea mays
agtcttaaatgtgggaaggtatgctactgccgtaccggtccggaattcccgggtcgacccacgcgtccggttgccaaagaattccctcccctagccgccgccgccgctcgtctccctgagaggtgccgggaccgaggatttggccgagttctaggtagagaatcggttttacttgtctcagcccggggtctgctgcgtctggtggtggtgaaggggagaaattcgtgagatctgttccggatcaggcgtgcgagctcgggaatcaggggtttcacacatagcttcgtcgatttgaatttgatgtactaatggagtctaagggtggcaaaaagtctagcagtagtcgttctatgatgtatgaagctccccttggctacagcattgaggacgttcgacctgccggaggcgtgaagaagttccagtctgctgcttactccaactgcgcgaagaagccatcctgatatcccttttggcttctcattctagtagctta

SEQ ID NO: 94438 - DNA, 501 bp, Zea mays
  unsure (1)..(501): unsure at all n locations
tggtcctnccatagaaggggggtattgtactgctcgtaccggtccggaattcccgggtcgacccacgcgtccgcccacgcgtccgcccacgcgtccggatatgccagcaggttgctgtcaatatcgcccctgcagaaacgcaatcaagtacaagttattgggtttggagggttgattcgacttatggaaggggacgaggaggacgagaaaggggatggttcagcccactttgggttgcatttgcaattctgattggtggtctcttattggatgtgctgatatctgtttttcttggtgtttccgcacttcctgtcaatataataattggtgttcttatagttctcggattggggcaccgccttcatctagctcttgagtgctgtcacgaatggggctcaaggaggaacgttggcaatattccgaggctggagaacatagcgccgactgggtaccaccctgcagtagtataatcgttatgggacttgtaaatagcgtaagaac

SEQ ID NO: 94439 - DNA, 500 bp, Zea mays
  unsure (1)..(500): unsure at all n locations
aggccgntgngatggatggggggttgatgcgactgctcgtaccggtccggaattcccgggtcgacccacgcgtccgccaccacctccatccgtgcgcctctcgctctcgctggtggtgctcctcctcctcctcctgctcccggggcgggcggcctccttttccacctcctgctggtgccagggccgggagggcgtcgcggaggtggcgcgcatggggctcgccggggacgggtcggcggacaccgcccacctcagtaataatgaaaatgggcggttcatttatggagttgcgagttctcctggtaaaagagcatcgatggaggacttctatgaggcaagaatagacgacgttgatggagagaaaattggaatgttcggtgtatatgatggtcatggaggagtccgagcagctgagtatgttaagcagcaccttttcagcaatttaatcaaacacccaaagttcatcactgataccaaggctgctatcgccgaaacttaca

SEQ ID NO: 94440 - DNA, 505 bp, Zea mays
  unsure (1)..(505): unsure at all n locations
catgttnntnngatggaggggggatattgctctaccggtccggaattcccgggtcgacccacgcgtccggaaaccctagttcgaacgcgccgccgtcaccgtcgtcgctcgcgctctccgcccggatcggagcgagagtaggggcgtgtcggcggtgaaagcgactgcgtcagccatggcggacgaggagcattcggagaggagagaggaggcctccgagcttgcccccttcgacccgaccaagaagaagaaaaagaagaaggttgtcatccaagaaccttctgatgaagtggacaagcttgcagagaagacagaaacactggcagtcgcagaacccgctgaacttaacttcactggaatgaagaagaaaaagaagaagccggtggatcttgattcaactcttgatgagcttggagatggggaggacactcaagatgatcaagctgtagaggaacaaggggaaggcattgtgctgggaagtgtccctacatacccttgggaggga

SEQ ID NO: 94441 - DNA, 500 bp, Zea mays
  unsure (1)..(500): unsure at all n locations
atgtnctgngatgtcggtgggaaaagctgtaccggtccggaattcccgggtcgacccacgcgtccgggattttgtgacgaacgtccagatccgtggcatcacgctgctcaacagcaagttcttgcacctcaacatcttcgagtgcaagaacgtgctgatcgacaaagtgacggtcaaggcccccgtcgacagccccaacacggacggcatccacatcggcgactccagcaacgtgaccatcagcagcaccaccatcggcgtcggcgacgactgcatctccatcggccccgggagcaagatgatccgcattcatggcgtcaagtgcggcccatgccacggcatcagcgtctgcagcctgtggcgctacaaggacgagaaggacgtggaagacgtgcaggtgacggggtgcacgatcgccggcaccacgaacggcctgcgcatcaagtcgtacgaggactccaagtcgtcgctcaaggccagcaagttcctgtacgagggca

SEQ ID NO: 94442 - DNA, 503 bp, Zea mays
  unsure (1)..(503): unsure at all n locations
tatggnntgggatgtggggggacggtaagctctaccggtccggaattcccgggtcgacccacgcgtccgctcgtcaaggagccgcacctcgacgagcttgagcagcggcggcacgccgtcctcctctatgatgagccgcacctcgaggggcaggagaactgcgcgctcgccatcggcctgctgggccgcgacccggagtgcgtcgagcagatggtccaggccggggtgtgcctcgccttcgccaaggtgctcaaggagggacccatgaaggtgcaggccatgctggcctgggccgtctcggagctcgccgccaaccaccccaagtgccaggacgccttcgcgcagcacaacgtcatccggctgctcgtcggccacctcgctttcgagacggtgcaggagcactccaagtacgccgtcacgtccaagatgtcgatacactccgtgctgatggacagaaagaacaacgccgnctctgcggttcagccggacttgctggatgcagg

SEQ ID NO: 94443 - DNA, 503 bp, Zea mays
  unsure (1)..(503): unsure at all n locations
tatgccnctangctcgatagaacgtattgcacgctctaccggtccggaattcccgggtcgacccacgcgtccgcggacgcgtgggggcggaagttggcgacgactgggcgaccgccgccgccgtacgccaggtgctcaggtctccgtcagacccttcgccaggtcttcttccgcggcgagcaccgccaggtgtgcatccaatcttcttcactgggtcctccgctgcttctagtcacgcatctaaatccggagttgccagcattcgcttgaggtgcctgacaaagcacaccatcatgcaggctagcgataggttcaacataaactctcagcttgagcatcttcaagccaaatatgttggtacagggcatgctgatttgtctagatttgaatgggctgtaaacatccagagagacagctatgcctcttatattgggcactatccaatgctagcatattttgccattgctgagaacgaatcgatcggaagagaacgttacaatttc

SEQ ID NO: 94444 - DNA, 499 bp, Zea mays
gtgttttgagatgggggagagtaaggtacgctctaccggtccggaattcccgggtcgacccacgcgtccgcccacgcgtccgcaagcctcagccgccacctgagggccgtcttcctgatgccaccaagggttctgaccacctgaggcaagtctttggcaagcagatgggtttgagtgatcaggacattgttgccctctctggtggccacaccttgggaaggtgccacaaagagcggtctggttttgagggggcctggactacgaaccctttggtctttgacaactcttacttcaaggaacttctgagtggcgacaaggagggccttcttcagctcccaagtgacaaagccctgctgagcgaccctgtcttccgccctcttgtggagaaatatgctgcagatgagaaggcattctttgatgactacaaagaggcccacctcaagctctccgaactggggtatgctgatgcttaaatggtccatatcctggagcgggacac

SEQ ID NO: 94445 - DNA, 507 bp, Zea mays
  unsure (1)..(507): unsure at all n locations
tgtggcnctncaaatgagagggcgatgtatggcattgctcgtaccggtccggaattcccgggtcgacccacgcgtccgcccacgcgtccgcccacgcgtccgaaggaacttggagtgaactgtatagagctaatgccctgccatgagttcaatgagctagagtacttcagctcctcttcgaagatgaacttctggggatattccacaataaattttttctcaccaatggcaagatattcttcaagtggcataagagactctggatgtggtgccataaatgaatttaaagcttttgtaagggaggcccacaaacggggaattgaggtgatcatggatgttgtcttcaatcatacagctgaaggtaatgagaaaggcccaatattatcctttagggggatagataatagtacatactacatgcttgcacctaagggagagttttataattattctggttgtggaaataccttcaattgtaatcatcctgtagtccgtgaatttataggg

SEQ ID NO: 94446 - DNA, 505 bp, Zea mays
  unsure (1)..(505): unsure at all n locations
tgtgggnttcttaggaggaggattatggcacgctcgtaccggtccggaattcccgggtcgacccacgcgtccggaggactcagccaaccccatcttcatcgacatgaagtactgccccaacaagttgtgtaccgccaacggcgcctccaaggtcaccgtcaaggacgtcaccttcaagaacatcactggcacctcctccaccccggaggccattagcctgctctgcactgccaaggtcccatgcaccggcgtcaccatggatgacgtcaacgtcgagtatagcggcaccaacaacaagaccatggctatatgcacgaacgccaagggcagcaccaagggttgcctcaaggagcttgcatgcttctagaccctccgtcgactgacccatctctctagttataatttttctctcgtccttgcattgcatattagttgctatccattggtaacgcacaacagtaaaacgacaaacatccaacagctatattatgttcgacggtgtaac

SEQ ID NO: 94447 - DNA, 503 bp, Zea mays
  unsure (1)..(503): unsure at all n locations
tatgcnctgaaatgttgggtagggagtaatggactgctcgtaccggtccggaattcccgggtcgacccacgcgtccgaaaaaaaaaaaaaaaaaaaaaagggcgccgctgcgatcaacctcgatgatatcaaatggcatcagtgtgtacgtttggctagatttgagaatgatagaactatatcgttcatacctcctgatggatcttttgatctaatgacatacaggcttagcactcaggtaaaacctcttatctgggtcgaagcacagattgagaaacattctagaagccgtatagaactcatggtgaaggcaaggagtcagtttaaagaaagaagcacagcaacgaatgttgaaattgaagtgcctgttccttcagatgccacaaacccaaatataagaacttcaatggggtctgctgcatatgctcctgagagagatgcaatggtttggaaaataaaatcattccctggtggcaaggaatacatgtgcagagcagaattta

SEQ ID NO: 94448 - DNA, 503 bp, Zea mays
  unsure (1)..(503): unsure at all n locations
atgcgnctgagttggggagaggggggtgatgggaatgctcgtaccggtccggaattcccgggtcgacccacgcgtccgcccacgcgtccgctaaggaacgaccaagtgctgctgaggccctggcagatccatactgtaatggattagcaaataatgaacgtgaacccatagcacaacctatctcaaaacttgaatttgagtttgagaagcggaaactggccaaagatgatgtccgagaattgatttaccgagagattttggagtaccatcctcaaatgctacaagaatacctacaaggagcagaccacaatcagatgaccttcatgtatccaagtggggtggatcgcttcaggcgccaatttgctcatttggaagaaggtactgcaaagggtgaaaaacacagtccacagctgcgacagaatgtttctttgccaagggaaagagtaattggcaataaacatggagatggcaatacaggtgataagctagcgcatgcctcagtg

SEQ ID NO: 94449 - DNA, 504 bp, Zea mays
  unsure (1)..(504): unsure at all n locations
catggtnctgngatgcgggtagagatagatgctcgtccggtccggaattcccgggtcgacccacgcgtccgcccacgcgtccgcccacgcgttcgggaacatccatcgatctccccccagcggcgaggagagccggcggccacaggaaggagaaatggcttccgcacacaacgctctccgggtgtttttcatcctagccgtggtatgtgccgtatgcacagcgaaaaggacaggagccaacaaggaagaatcggcggcagcccccggtggcgctgctggaggcagcggcgggacgttcgacatctccaagctcggcgcgaccagcgacggcaagacggactgcacaaaggcagtccaggacgcgtggacgtcagcgtgcgaagcgaccggaagcgccacggtggtgatccccaagggcgactacctggtcggccctctcaacttcactgggccatgcaaggggagcaacatcgccatccagctggatggcaacctgctgggatc

SEQ ID NO: 94450 - DNA, 506 bp, Zea mays
  unsure (1)..(506): unsure at all n locations
atggnnnctgcgatagttggctggaagtatagtcactgctcgtaccggtccggaattcccgggtcgacccacgcgtccgggaagaccaacatgctgacagctctcttggttccttacattttcttcaccctgcctaatgtgctgttttctctgatcagaggagaggtggggaaatggattgcgattattgctgttattctgcgtctattctttccacgacacttcccagattggttagagcttcctggttccatcatcctgctcacagtggtcgcccctagcctgttcgcggacagcttcaggggagacctcgttggtgtcttcatatgccttgtgatcggatgctacctgctccaagaacacatcaaggcgtcaggtggattcaggaacgccttcaggaagggcaatggtgtgtccaactccatcggcatccttctgctcttcatctaccctgtctgggccggtgtgctgcaagtcctgtaggcaccattgactcagtgtttccc

SEQ ID NO: 94451 - DNA, 504 bp, Zea mays
  unsure (1)..(504): unsure at all n locations
tgtgggnntgngatgtgggggagatgtaatggcactgctcgtaccggtccggaattcccgggtcgacccacgcgtccgcggacgcgtgggtctcgctttctctctccatctcgtttcccccgcctgcgcagccagcgcaaaccctagccaacaagcgccgttctgcgaggctctcggcagcggataacttaacctgtcgcgcaaggatcgggggagagaaaccagcggcaacttacgtggatcggggttgtttggtgctgctgcggcggcgcagggatggaccggaagcgcatcaaggacgcgctcgagaagcacctgnagaggtcgtcgccgtctacttccaggggcgtcgtgtccaaggagagggagcgcctcgctgccgggaagctgccgtcatcgcttggcaaggcggaggtgtctgatggtgaggaatttgaaactgacagtgaagattctgatgtgagtggttccgagggagaggacacgtnctggatttcatggttn

SEQ ID NO: 94452 - DNA, 508 bp, Zea mays
  unsure (1)..(508): unsure at all n locations
ttgcgnngtgngtacggtgggaggaataagagtattgctcggnccggaattcccgggtcgacccacgcgtccgatttgcaagttcttgtgatcatttcgagaccacctgctaagatatttttatatgatgattggagcatgcctcatacagccgcggtactgaaattccccttcgtctgggatgaggactgcttcgaagcagcaaaagacgaactctaggtcacaagtgtttcctgcaatgtatctgcttcatccatgatcctgctggactactaaaattcacatgcactagtcgtaataaagccagtgcgcttttcatgtataattctgtattgtggctcgctaaaataaaatttggcaacggtttatgaaaaaaaaaaaaaaagggcggccgctctagaggatccaagcttacgtacgcgtgcatgcgacgtcatagctcttctatagtgtcacctaaattcaattcactggccgtcgttttacaacgtcgtgactgggaaaaccc

SEQ ID NO: 94453 - DNA, 511 bp, Zea mays
  unsure (1)..(511): unsure at all n locations
taaggtnctgcaatgtgggacaggaggaaacgtattgctcgtaccggtccggaattcccgggtcgacccacgcgtccgcggacgcgtgggctgcagtcatctcctccaccaccaccaccaagctcaacaacagccagctcgcgaaaataatgaagagccgcagcatggcatcatcggccgcgctcttggtgctagccctcgcgctagtggcggccaccgccccacaggtagcggaggcaaagaagaagagagcggcggagagcggcgaggcggcggaggcgaagaagatccaggacgacttctgctcgacgctgtgcgagggcaagaaggggacggacctggtcgtgtgcaaggagtcctgcgctctctcccagcagtccaacctggtgctgtacggcaggatccagtgcaagggcaagtgcaccgagcagaagggcatcacggcgccggccatgaaggtctgccaggaggagtgcgacaaggcgtacgtggtgaaggcggccgangtcac

SEQ ID NO: 94454 - DNA, 496 bp, Zea mays
gggtgttgtatgaggggggaatagatgacgctctaccggtccggaattcccgggtcgacccacgcgtccggcaagatcttctttatctcttgggccccggatacatcgagggtgagaagcaagatgctgtacgcgagctccaaggaccggttcaagagggagctggatggcattcaggtggagctacaagcaaccgacccgagcgaaatgagcatggacatcgtcaagtcgcgagccctctgaaacagccccggccgctgcacctgcacgctgcaggggcgcatcggctcctgcatgcccgtgggtcgtcgaatccttgcttgtgtgttgggaacggtcttgtgttttcgtgtccttgttttcctggaagcaaaagccctgcattctatatgagactgtatgccattttccatctttttctctccccatatctctgccctagtcctgctaccgctgtagactagaacttatttggtgtttgatctcgtggcattgt

SEQ ID NO: 94455 - DNA, 504 bp, Zea mays
  unsure (1)..(504): unsure at all n locations
gaaggnntgnaatgtagggggaggtaaggatgctctaccggtccggaattcccgggtcgacccacgcgtccgatagcatcaatcatgtctggtcgttcgtggacaataatggcgcctctcctggcgtcgatgctgctcgtcgggctcgccgtgggctccgaggaggaggaggacggcggcggcaaaaagaagccccacgtcaaccacggcaagtttaaggcggagccgtggacggacgggcacgcgacgtactacggcgggcgcgacgggttaactgacaccacggacggcggcgcgtgcggctacaagggcgagctggggaaagactacggcaccctgacggcggccgtgggcccgtcgctgtacaccaacggcaccgggtgcggcgcgtgctatgagctcaagggccccaagggcaccgtggtggtgacggccaccaacgaggccccgccgccggtgagcgggcagaagggcgagcacttcgacctcaccataccggcgttc

SEQ ID NO: 94456 - DNA, 506 bp, Zea mays
  unsure (1)..(506): unsure at all n locations
ngatgccnnttccgtatgtgggaagggttaattgcactgctcgtaccggtccggaattcccgggtcgacccacgcgtccgacagaatctcgttccaggccactcaggatctgtcttctctcaagaacatggcaggggaaaccgggaaaaagttgacatcgatggcatccaacatcatcactgatcttcaggaccgcatcctctgagctttaaactcacagtaaacttctgcgttgtttcagtggctggcttctcccgtcgacccgggtgacaaactggcctggcctggcctgcagatctgtctaggagttcgtaggcgtctgagaacttcctggcaatctggcatatctgtctaggagttcggaagcatctgaaaagtggcatatctgcctaggagttcgggagcagctaaaatcttgaagttagagagagagagagagaaagagagagagagggtgaaagaagagaacttatgaccaatactgtaattggctaaagtcatgtatg

SEQ ID NO: 94457 - DNA, 500 bp, Zea mays
aaggtcctgagcatagaaatgaggtacgctactgccgtaccggtccggaattcccgggtcgacccacgcgtccggctctgccttagatggacactacgacgagaagaggaaatccaatgtggaatacacagaggacgagaagaaagccgtgatcgcggctctgaaaaagaaggctttgagcgcctcacagaagtttaggcattccatgaagagggggaggaagagcagcaaggtgatgtccatctcgattctggatgagcgtgaacctgaggaggtgcaggctgtggatgccttccgccagcttcttgtacttgaagagctgctaccatcgcagcatgatgactaccacatgatgctaagatttctcaaggcaagaaagtttgatatcgagaaggcaaagcaaatgtggtctgatatgctgaagtggagaaaggagttcggtgcagataccattctcgaggaattcgaattcgaagaagctgataaggtggcagaatgct

SEQ ID NO: 94458 - DNA, 509 bp, Zea mays
  unsure (1)..(509): unsure at all n locations
atagttnattgaaaatgttggggagggagtaatggtactgctcgtaccggtccggaattcccgggtcgacccacgcgtccgggcggttgtaggggaagaggcggaggcggaggcggagacggagactgaaggcgaggcggaggcagaggtcgaggtcgaggccgaggtcgaggtggaggcggaggccggtgcatcgtctgcgaagaagaaccgtatccaggtgtccaccaacaagaagccgctctatttctacgtcaatctcgccaagaggtacatgcagaactacgacgaggttgagctctccgctctggggatggccattggtaccgtggtgaccgtcgctgagatcctcaagaacaatggcctcgccactgaaaagaagatcctcacatcaaccatcggcaccaaggatgaaggcgaaggccggcttgtccgtaaagccaagatcgagatcctgctgtgcaaatcagagaacttcaacagcatcatgtcgagcaagaagtccgagc

SEQ ID NO: 94459 - DNA, 502 bp, Zea mays
  unsure (1)..(502): unsure at all n locations
aggggtnaacgtgaggggtgtaaggaacgctgtaccggtccggaattcccgggtcgacccacgcgtccggagagagacgcaggcccgccggcgacgatcgaggagggaggaaccagagacccggcggcggcgacgatggctccgcgcagctcatcggcggcgacgtgcctgtgcctcgctctcgccgcggccacgctggcgctggcccacggtgcgcaaggaggaggaccatcggcatcggcggcggacctggacaaggtcacggccgagaccttcttcgacatcgagatcgacggcaagcctgcaggccggatcgtgctgggactgtttggggacaccgttcctaaaactgcagagaacttccgagcactttgcacaggggagaaaggaattgccaagtccggcaagcctctgtggtacaaggggtcgacgttccacaggatcatcccggngttcatgatccagggaggcgacttcaccaacggcaacggcacggggggcg

SEQ ID NO: 94460 - DNA, 510 bp, Zea mays
tatgcgcttggatgagggggggaggtatggtatgctctaccggtccggaattcccgggtcgacccacgcgtccgcccacgcgtccgatcacaataagatggcgtgtatagacaatgcaatgagagccttgtgccttttagcgctcttctgtgtcgtgcatggtgagaaggcaaagtcaaaggacaacgatgcaaaagcgtccgggcccggtgggtccttcgacatcaccaagttgggcgcctccggcaatggcaagacggatagcacgaaggctgtgcaggaggcgtgggcatcagcgtgcggcggcaccgggaagcagacgatcctcatccccaagggcgacttcctcgtcggaccactcaacttcacaggcccatgcaagggcgacgtgaccatccaggtgaatggcaatctgctggcgaccacggacctaagccagtacaaggatcatggtaattggatcgagattctacgcgtggacaaccttgtcatcaccggcaagggaaagct

SEQ ID NO: 94461 - DNA, 507 bp, Zea mays
  unsure (1)..(507): unsure at all n locations
agtgtgntcgagttggggggtggagggtatggtattgctcgtaccggtccggaattcccgggtcgacccacgcgtccgattggaccgtctaacccacaagtggaacattgaaaatttcaatactacagagcaccagatgcaagacacaccatacttgtccagtcgatataccagtagagatattctagccttgggtatcagagacttcaattcctctcaacttacttaccagcaagaacttcaacatcttgaaagttgggtgaaagaatgcaggttggaccaactaccatttgtgcgacaaaatttggcatacttcttattgtccgctgctggctgcatgtactcccctgaactgtctgaagctcgcactttgtgtgcaaaaaatggtgcgctcataactattgttgatgacttctttgatgttggaggatcaaaagaagaacttgaaaaccttgtcatgttggttgagctgtgggacgagcatcacanaattgagttttactcaga

SEQ ID NO: 94462 - DNA, 521 bp, Zea mays
tagaacggctgcttgggccctcgccttgggaagttatgctagctactcgtccgggattcccgggtcgacccacgcgtccgcccacgcgtccgcggacgcgtgggcgtgtacgcgtgggcagccacagcagcgctgtctcgtgttgctgaaacagtgtttatacacgaagctggacacctgagatgcagtcgctctgagattggtagatttgtttccatgcttcggaatccttcaccaattcttcgtgcttgtgctgactttgaccttcttcagttcacaatcccaggaggtcggcatgcaatgcatcacgcaggtctcttgcaggaagcaggggcatgtcggttgttgcgcgcagtagcggcagcgaccacagcttctattgaagctaaaatctttggcaggattgtactcaggaacttggagcaccatcagttagggatgtcaacatgaacacccagcagaggttcatcctccaataaacaaaggcctctgcatcgatgggctgcttggccaatgcagaa

SEQ ID NO: 94463 - DNA, 500 bp, Zea mays
  unsure (1)..(500): unsure at all n locations
tagggtttgaatggggagggagagagagctgtaccggtccggaattcccgggtcgacccacgcgtccgcccacgcgtccggaagccgtagccgncgtcgncggacgagacaagttgagggcgggcggcaatggccgtcggggaccttgaggtgctcaccgcgctcgacaccgcgaagacgcaatggtaccacttcaccgncatcgtggtcgccggcatggggttcttcaccgacgcctacgacctcttctgcatctccctcgtgactaagctcctcggccgcatctactacaccgtggaggggtccgcgacgcccggcaccctcccgccgcacgtgtccgcgtccgtcaacggcgtggccttcgtgggcacgctgtcagggcagctcttcttcggctggctgggcgacaagctcgggcgcaagaaggtctatggcatgacgctcatgctcatggtcctctgctccgtcgcgtcggggctctcgttcggccacaccccggc

SEQ ID NO: 94464 - DNA, 499 bp, Zea mays
ggcaatgctatgaagggagttattggactgctgtaccggtccggaattcccgggtcgacccacgcgtccgcccacgcgtccgcggacgcgtgggcgtctcgctcccctctttgcgccgcccccagatccggcaccgcccgctgctcgaacccgcaccccacgcccgcaggccgggaccggtgggcgcgcgccgggcagtaggagggagaggaagggcggcatggcggcgccgccggcgagggcccgggccgactacgactaccttatcaagcttcttctcattggggatagcggtgttggcaagagttgcctcctgttgcggttctctgatggttccttcactacaagctttattaccacaattggtattgactttaagatacggacaatagaattggatggtaagcgtataaagctacagatttgggatacagcgggccaagaacgcttccgtactattaccactgcgtactaccgtggagctatgggtatcttgctg

SEQ ID NO: 94465 - DNA, 499 bp, Zea mays
  unsure (1)..(499): unsure at all n locations
gggtggtgtaattcgaaagactgtatgctctaccggtccggaattcccgggtcgacccacgcgtccggggcaccatctgacaaaaacctgacctacgagctggtgcagaaaggtccggcgactgatgtgtccggacgtnccgtatccacagcgacgaacgcgtcgaacccgtggtggctgacgttcgagagggccatcgcctccgcgggtggggagctgtctaagcctgagatcctgtcttcgaccacggactcacgctttgcgcggcagctgggcatccctgccctcgggttttctccgatgaccaggacgcccatactgctacatgaccataacgagtttctggaagacagagtgttcctgaggggcatccaagtgtacgaacatgtcatcagagcactaagctcgttccaaggctgattcgtaaaaaaaaaagaagagaagaaggaaaagtggcagtgctgatgcgtggagtgtaacatagcaggttttgtaataa

SEQ ID NO: 94466 - DNA, 499 bp, Zea mays
  unsure (1)..(499): unsure at all n locations
aaggtngtgccatgaaagagaggtaatgcactgccgtaccggtccggaattcccgggtcgacccacgcgtccgcccacgcgtccggggttctccgccgggcttgtagacgacagcaacatcttcgagtggcaggtcaccatcatcggaccgcctgacaccctatatgatggaggctacttcaatgcaataatgaccttcccccagaactatcccaacagcccgccatcagtaagatttacttctgagatgtggcatccgaatgtttatcctgatggacgtgtttgcatttctgttcttcatccacctggtgaagatcccaatggttatgagcttgcaagcgaacgatggacaccagtgcacacggttgaaagtatagttctgagcatcatttcgatgctctctagtccaaatgacgagtctccagcgaatatcgaagctgccaaggattggagagaaaagcgggatgagttcaagaaaaaggtaaggcaatgtgtccgc

SEQ ID NO: 94467 - DNA, 513 bp, Zea mays
  unsure (1)..(513): unsure at all n locations
ttaggnctctgattgggggggggggtattctcacgccgtaccggtccggaattcccgggtcgacccacgcgtccgcctcagtatgcacgtggtttagctgctcttggacatcaattgcatgcgcttggttttatagaatctccagaactaggtttagaagctcccttggcccatcatttgatgcacttttatgagatgatgggtgacacacttgctgtacagtatagcggttctgctgctcataacaaggtattctctgcaaagagaggtcacttgaagctttttattcagtcacaagagttctttaggacacttcagcggcactacagcaacacctgtatagatgctaacaaacaggctgctataaacttgtttttgggatacttccagccacagcaggaaaaacctgcactgtgggagttagaatcatctgctgggaagcataacaataatctttttgatggccacccaagtacattgaaaagagtaaaatcagatggcactattcttcat

SEQ ID NO: 94468 - DNA, 515 bp, Zea mays
  unsure (1)..(515): unsure at all n locations
gatggggnnnnncctgagtctctgccatnccatgccgtaccggtccggaattcccgggtcgacccacgcgtccgcccacgcgtccgcccacgcgtccgcccacgcgtccggtgcaggggcagttccggtcgctggtcctgtcgtacaaccagctgacgggcccgatcccgcgcgacgacgcgcgcgacgagatcaacaccgtggacctctcccacaacaagctgacgggcgacccctcccacctgttcgccgccggccggcccatcggcaaggtggacctgtcgtggaactacctcgacttcgacctgagccagctggtgttcccgccggagatgacgtacctggacctgtcccacaacctcatccggggcaccgtgccgctgtcgctggagcggctgtccacgctgcaaaagctgacctgagctacaacccgctttgccggcccgttcccaagggaccacgcgtcatcaaacacgggtgccaggcgtacgcgcacaaccagtggcggaaagggg

SEQ ID NO: 94469 - DNA, 548 bp, Zea mays
  unsure (1)..(548): unsure at all n locations
atatgggtcgcccatccaagacacatgattgcactgctctaccggtccggaattcccgggtcgacccacgcgtccgcacggacctaagccagtacaaggatcatggtaattggatcgagattctacgcgtggacaaggttgtcatcaccggcaagggaaagctcgacgggcaggggccagccgtgtggagcaagaactcctgcgtcaagaagtacgactgcaagatccttcccaactcgctggtgatggacttcgtgaacaacggggaggtgtccgggatcacgctgctcaactccaagttcttccacatgaacatgtacaagtgcaaggacatgctgatcaaggacgtcaatgtgacggcgcccggggacaagcccaacacggacggcatccacattggcgactcgtncggggtcaacatcaccaacaccgtcatcggcgtcngcgacgactgcaatctcatcgggcccgggaccttcaaagtgaacatcaccggcgtgaccttgcgncccgggcacggcaataacatcggcagnctaaggcggtac

SEQ ID NO: 94470 - DNA, 556 bp, Zea mays
  unsure (1)..(556): unsure at all n locations
cggcggtgctaagcatgcattagcaagtacatgcactancgcaccggncttgaattcccgggtcgacccacgcgtccgcaagcgagtcgtggtgcttggcccccaggttcccctcaaggagcagctcgagctcgacaaggatgatgagagcctgaggaggtggaaggagcaactccttgggcaggtcgacacagagcagctgggagaaactgcggaaccagaggtcaaggtgctggacctgaccatcctgtcacctggcagaccggacctgatccttccgatcccgttccaggctgacgagaagggctatgcgtttgccctcaaggacggcagcccctacagcttccgcttctccttcatcgtctccaacaacatcgtgtcaggcctcaagtacaccaacactgtctggaaaactggagtcaaagtggagacccagaagatgatgctggggacgttcagcccccagctagagccctatgtctacgagggcgaagaagagaccacccctgcttgcatttttgcgagaggttcttattctgccaaactaaagtttgtn

SEQ ID NO: 94471 - DNA, 551 bp, Zea mays
  unsure (1)..(551): unsure at all n locations
tgtggtangtgggccggggccctacgtactgntcgtaccggcccggaattcccgggtcgacccacgcgtccggacccacgcgtccgcccacgcgtccgcccacgcgtccgcccacgcgtccgcaaacttacaggagtatggctatggcgacggcgaagctgaactccccggctaccagcttgctcgctggcggccgcacgcgccgatctgcgcccgcccgctgcacgacggtgatccgcgccgccgcaggctcctactcggacgagctcatctccaccgcgaaatctgttgcttcccctgggcgtggtattctggcaattgatgagtcaaatgcaacatgtggaaagaggttatcatctattgggttggacaacacagaagtgaaccggcaggcttacaagcagcttttgctgacaactgctggtcttggtgaatatatttctggcgctattcttttcgaggagaccctttatcaatcaactaccgacggcaagaagtttggtgactggttgaaggatcagaatatcatgccttgcttaaaggtgacaagg

SEQ ID NO: 94472 - DNA, 543 bp, Zea mays
  unsure (1)..(543): unsure at all n locations
ngtcgctgtcgcaatgataagaagatgattgcatctgctctaccggtccggaattcccgggtcgacccacgcgtccgaagtcagaggagagcctaggggttagcaaccaaaacatgcccagcagggcgctgacgttcagtcagctgagcgccgcaacggacgggttcagttcgcagaacctgctcggagaaggcggctttggacgggtgtacaaagggctcctcgaggacaccggagaggttatcgccgtgaagcagctgaacagggacgggctccagggcaacggcgagttcctcgtcgaggtgctgatgctcagcctcctgcaccacccgaacctcgtcaagctgctgggctacagcaccgactccaaccagcggatcctggtctacgagtacatgcccaggggctcgctggaggaccatctnctggacttgccccgagctgaaagccctgccgtgcacacgcngatgcngatcgcggtgggcgcggcgagggcattcagtacctggacgaggtggcaaacccgccgtgatctaccgggaa

SEQ ID NO: 94473 - DNA, 544 bp, Zea mays
  unsure (1)..(544): unsure at all n locations
gtctgtgtagaatggatggagantgtattgcatcgctctaccggtccggaattcccgggtcgacccacgcgtccggtcgccgccgccgccgccgaggagaagaaggtgcaggacaacttctgctcgacgctgtgcgagggcaggaaggggatggacctggtggtgtgcaaggagtcctgcgacctctcacagcgctccaacctggtgctgtacggccggatccagtgcaagggcaagtgcaccgagcagaagggcatcaccgcgccgcagatgaaggtgtgccaagaggcgtgcgacaaggactacgtggtcaaggcggctgaggtcaccaaggcctgcaacaccacctgcgccaaggagaagcagcctctgctcagcgagaactgcangaggtcctgcaccccttcttcttcctgaacgcagagcacngcccgccgtcgtcgtcttctgcctgcttgcgtgacacttgatcactgatccatcatacatgcatgcatgggatgcgatgacaattgatgcatgcatgcatggtatacctaccaat

SEQ ID NO: 94474 - DNA, 552 bp, Zea mays
  unsure (1)..(552): unsure at all n locations
ggagtgggtcgtatgccacgattaaggatgtacagtgcaacngctnccggaattcccgggtcgacccacgcgtccgcccacgcgtccgcgccattggcggcggcgacgcgccaaccatcatcagccagggcaaccggtgcataggaccaccaaacatcgccgccaaagtgatcaccaagcactacgcggaagaaggcgtgtggaagaactgggtgtggcacacggaggacgacctgttcatgaacggcgccatcttcaatccgtccggcggcgcccccaagcaggtcgacaccaacgagtgggtaaagcccaagccaggaacctacgttacaaggctcacccgcttctccggcacactgtcctgctgcacgggcaagccgtgctgaaggccggtgggcatcaggctgcttcttctagctcatggcctggccatgccaggtcgcgctggctgcgtttcatttcatggaagaaagcaaggatggatcacaggttgtcgttctgctaattaatctacatacgtttggcttcaagtactgtngtgtggcattggta

SEQ ID NO: 94475 - DNA, 549 bp, Zea mays
  unsure (1)..(549): unsure at all n locations
agtatgtcgtagtcaatgacacggatagtattgctgctaccggtccggaattcccgggtcgacccacgcgtccgaggagctggtggactgggaacacaagagccaggagagtgggaaaatgcacgcttgcggacacgacgtgcacacgacaatgcttctgggggctgccagaatactccaggatcgcaagagcgacctaatgggcaccgtgaagcttgtattccagccggcagaggagggccagggcggcgcgtactacgtgctgcaagaaggcgttcttgacgacgcgtcggccatattcggcttgcacgttgacccggccctccccgtcggagtcgtttcgtccaggccagggcccttcgcggcgacgtccggcccgttcctggcgacggtcaccggcaaaggcgggcacgccgcgatgccccacgaatccatcgacccttgtgtagctgcagccactactgtcgtcagccttcagaagatcaatctccgggaaatcgatccccttgcagggcgcggtgtgtccgtcacttttctcaaggaggagan

SEQ ID NO: 94476 - DNA, 546 bp, Zea mays
  unsure (1)..(546): unsure at all n locations
agcggctcgcncctgaatcgcccactacagcactgacgtaccggtccggaattcccgggtcgacccacgcgtccgcccacgcgtccgcccacgcgtccgggattctctacagaattttttcctgtgctgtgggctagtcctcgcatgggtggctggctagcgcattggaaagagtcactcgatgatcctgacactaagattataaggccccaacaggtatacaccggcttctggcttaggcactatacccccgtcagagaacgagtgctatcaagccagagtgaggaacttggtcaggttgccacctcaaacgcaactaggcgccgccgtgctggttctgccctgtagaagctgcagcgtataaacgcaccggcatactcaataaacatcgaccactnttgtgcttgaaaaagccacaaatggcttttagcttgggtggagttgtaagccttttggtgtcgagtatataggcaataatgcagtgagaacaccacaccgttacaatgtaaaactgtcacgaggcatcacttggctgtgtacacccct

SEQ ID NO: 94477 - DNA, 554 bp, Zea mays
  unsure (1)..(554): unsure at all n locations
nagaatggtgtngcatgtatggaggaagtattgtatctgctctaccggtccggaattcccgggtcgacccacgcgtccggagcgcacacacacacaaccagatctcccctaaatccacccgtcggcacctccgcttcaagatgcagatctttgtgaaaaccctgaccggcaagactatcaccctcgaggtggagtcgtctgacaccattgacaacgttaaggccaagatccaggacaaggagggcatccccccagaccagcagcggctcatcttcgctggcaaacagcttgaggacgggcgcacgcttgctgactacaacatccagaaggagagcaccctccaccttgtgctccgcctcaggggaggcatgcagatctttgtgaaaaccctgaccggcaagactatcaccctcgaggtggagtcctctgacaccattgacaacgtcaaggccaagatccaggacaaggagggcatcccttcagaccagcagcggctcatctttgctgggaagcagcttgaagactggcgcacgcttgccgactacaacatccag

SEQ ID NO: 94478 - DNA, 578 bp, Zea mays
  unsure (1)..(578): unsure at all n locations
agttatcagtattagccggaattccgnntactangtcatcagcacctcaatttccgggtcgacccacgcgttcgggaccttcatactcataaacacattccatactttgagatacaaaatctgactggaacaacacgttatggtaatattaatacttatcttggaatataacaaagcatgatagatgatctggagtctgttggctatcttctgctatattttataagaagaatggccttaaagctggcactaagaaacaaaagtattataaaattagtgaaaagaaaatgcttacctcggcagatattctgtgcaaatcttacccccctgagttcgtctcatatttccaactattgctctcccttcaattttaaaacctggccaaattacttttcaaatgaagaaagctttttccgtgatgtatttcattcctgtaaatgatacccaattttatatacctaattttaactggacttgcacatcaaattacccttaaaattgggcttccaacaaccaatacttctgttaaacaaacctaattgctataaattgctttgggtttgaaccacttaattttt

SEQ ID NO: 94479 - DNA, 669 bp, Zea mays
  unsure (1)..(669): unsure at all n locations
agatgccggtcgtgtgcctgcntctacgcctcacttcgcatccgccnctcggaattcccgggtccgacccacgcccgtccgcccacgccgtgccgctgcctctcgacgcttggaatctatggcgatgcggagtaacgccggaccagcctaccgcgagaggcggtgtggctacatcagccgacagcttggcagacacgcgatctcgactgggggatccgccttctaccgctcaccatagcgacggcttgcagcattcggtcattgtatgggccgaacgtagggccgccgctcggaccgtcgacgagaccgaatgacggcngctggcngcttgacaggggtcagggaggcagcgatgccgctcgacattagcgtcgggcctggacattcaaagggcgtgctggtgaaggcttgctagccccgacgacggcggtgggatccgggccctggacgcttgctttctgccggaactgggatggcctttcgtcaaactggctaactcctaccgaagggtacgaaagggattcgcataccgaatacagggtcccttctttgttcgcccttggagccttggtgttcaaatgcctcacggtacgaattgaaagaatcttggaccgacttggaccggattgcctggtgaatccaacttgctaatggcttggccctcttaag

SEQ ID NO: 94480 - DNA, 551 bp, Zea mays
  unsure (1)..(551): unsure at all n locations
agtatgggtcgccatgacaagcacagtanatcacttnccgccctgaattcccgggtcgacccacgcgtccgatggcatccacatgggcgactcatccgggatcacgatcaccaacaccgtcattggcgtcggtgacgactgcatctgcatcggccccgggacctccaaggtgaacatcaccggcgtgacctgcggccctggccacggcatcagcatcggcagcctagggcggtacaaggacgagaaggacgtcacggacatcaacgtcaaggattgcactcttaagaagacgatgttcggcgtccgcatcaaggcgtacgaggacgccgcctncgtgctcaccgtctacaagatccactacgagaatatcaagatggaggactcagccaaccccatcttcatcgacatgaagtactgccccaacaagttgtgtactgccaacggcgcctncaaggtcaccgtcaaggatgtcaccatcaagaacatcaccggcaccttctncaccgccgaggccgntaggctgctctgcactgncaagggtccatgcaccc

SEQ ID NO: 94481 - DNA, 547 bp, Zea mays
  unsure (1)..(547): unsure at all n locations
tgatggggtgtcatgtattgtattgtattcgctctaccggtccggaattcccgggtcgacccacgcgtccgagagcgttcccccgcggctcctccacggcaagagctcgcgtgcgtacggctccatctgggagtccaccgtcaggaacgtcaagttcgtgtcggacaagacggtgaagccggtgtacattatcacccccaccgaggccgcgcacatccaggccaccgtggcgtgcgggcgcaagcacgggctgcgggtccgcgtgcggagcggcgggcacgactacgagggcctgtcgtaccggtccgccaagccggagacgttcgccgtggtggacctgtccatgatgcggcaggtgcgcatcgacggcaaggccgccacggcgtgggtggactccggcgcgcagctcggcgagctctactacgccgtggcgaagatgacccccagccttcggttcccggcgggcgtgtgcgccacgatcggcgtcgggggccacttcaacgggggcggcttcggcatgctgctgcgcaagtacggcacccgncgg

SEQ ID NO: 94482 - DNA, 556 bp, Zea mays
  unsure (1)..(556): unsure at all n locations
cgtatgtgttatgnccttactgcttngnattgcactaactgcctcggtctctgaatttccgggtcgacccacgcgtcacgccacgcgtcacgtcttcctgtccctctccgatccattctccagggcagctaactatgcatgtgtgaccgtgcaaagatgtcgtggcacgcgtacttggacgagcaccctgatgtgccagatccaggggcaccacctctcggcggcgggcatcgtaggtcacaaccgtgccgcctgggcgcagaggacggcgttgactcagttcaataccggtgacatctgccacatattgaaggactctcactaggcagcgcacttctcgaccacatgactgtctattggacctaccaagtacatgttgatatcatgcaagcctcgggccgtcatatcatgtcgagaaggatcatctatggattaactaatagaaaacatgcgtggcactcgttgatttgcatatacgaccagtccaataccacctggcaacgcctcatatgtgcttgaatagcttgctactaactgctttaacaaagctattctt

SEQ ID NO: 94483 - DNA, 547 bp, Zea mays
  unsure (1)..(547): unsure at all n locations
ngaagtggtggattgtatggggtggtattgtattgctgcaccggtccggaattcccgggtcgacccacgcgtccgcccacgcgtccgtctccctctccctctccgatccattctacagcgcagcgaagtaaacatgtctgaccgggcaaagatgtcgtggcaggcgtacgtggacgagcacctgatgtgcgagatcgagggccaccacctcgcggcggcggccatcgtcggccacgacggtgccgcctgggcgcagagcacggcgttgcccgagttcaagaccgaggacatggccaacatcatgaaggacttcgacgagccagggcacctcgcgccgacaggcctgttactcggacctaccaagtacatggtcatccaaggcgagcctggtgccgtcatccgtggcaagaagggatcaggatgcatcaccgtgaagaagacagggcaggcactcgtcgttggcatctacgacgagccgatgacgcctgtgcagtgcaacattgtggtggaaaagcttggcgactacctgcttgaacaggcatngtac

SEQ ID NO: 94484 - DNA, 545 bp, Zea mays
  unsure (1)..(545): unsure at all n locations
agtatggntngccatagatcgtatagtantgctgcaccggtccggaattcccgggtcgacccacgcgtccgcggacccggcggcggcgctggccgcggcgcggcacgagttcggcgagcacggcggcgtgaacatgtccatcgaggcgtcggcgacgttcacggtgatggagccggacacgatgcggcggctgttcgcgggcgagctgggccccgaccgcggcgacatgtacatctacagccggcacttcaacccgacggtgctggcgctggggcggcagatggcggcgctggagggcacggaggcgggctactgcacggcgtccgggatgtccgccatctcgtccgtgctgatgcagctggtgggcgccggcggccacgtggtggcgtcgcggtgcctgtacggcgggacacacgcgctgctggcccggttcctgccgcgcgcctncggggtgcgcgccaccttcgtggacgccgacgacgaggccgacgtgcgcgccgcggtggtcccctgcgagacaccggtggtgtacgtggagaccatgt

SEQ ID NO: 94485 - DNA, 547 bp, Zea mays
tgccgtgtaggccactgaaaaggaagtatagtagcactcgtccggaattcccgggtcgacccacgcgtccgcggacgcgtgggctttgctgttgtgatcttcctcttccttggttcggttgagggattcagcgacgaagagccagccctgcacctatagcaaggacaagtactgcaagcctgcactgttcactgcactctttagcactgtgtccttcttgcttggagccatcacctctctggtctccggtttccttggcatgaagattgccacatatgcgaatgccagaactaccctggaagctatgaagggtgttggcaaggcttttatcaccgcttttcgctctggtgctgttatgggcttcctgcttgcatcaagtgggcttgtggttctgtacatcaccattaatgtatttaaagtgtattacggtgatgactgggagggtctttttgaagctatcactggctatggccttggtgggtcagccatggctctctttggagaagttggtgaggcatctacacaaaagctgctgaccgtggtgctt

SEQ ID NO: 94486 - DNA, 542 bp, Zea mays
  unsure (1)..(542): unsure at all n locations
cgagtntgccatacagaaagtattgatcgctctaccggtccggaattcccgggtcgacccacgcgtccggggacgtttggccaatcaagatcaggatcatgaggtaaaagaatgcgccatatcttgcatgagtttggtggtctctacttttggtgatggtcttgaaagagaattaccagcatgccttcccatactcgttgacaggatgggtaatgaaattacaagacttacagctgtcaaggcattttcagttattgcgaattcacctctacgtattgatctctcgtgtgtcctggatcatgttgtttctgagctcacagctttccttcgcaaggccaacagagctcttacgcaggcgacgttgggaactctaaattctatggttgtcacatatggtggtcagattggctcttcttcgtatgagacaataatcgcggaactttcaaccctcataagcgacatggatttgcatatgaccgctcttgcattggaactttgttgcacaataatggttgacagaaaatctattcaaaacgttggtg

SEQ ID NO: 94487 - DNA, 544 bp, Zea mays
  unsure (1)..(544): unsure at all n locations
ngtcgtgtagactcgataagaaatatattgattgctctaccggtccggaattcccgggtcgacccacgcgtccggtcgtcgacagcctcgccaactcctccgagctcgtgatccgccgcctgcgctcgctcgcggtggaacacgccaaaaacctcgcgttccacaaggttgatatccgtgacaaagatggattggaaaaggtttttgcttcaacaagatttgatgctgttattcattttgctggactgaaagctgttggagaaagtgtacaaaagcctttgctttattatgaccataatgttgttggcacaataaatcttctggaagtaatggcagctcatggatgtaagaagttagtgttctcatcatcagctgcagtttatgggtcacctaagaactcaccctgcactgaagattttcctctcactccacataacccatatggcagaaccaaacttatggcagaggagatatgccgtgatatctaccattcagatcctgaatggaatatcattttgcttaggtactttaatccagttggggc

SEQ ID NO: 94488 - DNA, 545 bp, Zea mays
  unsure (1)..(545): unsure at all n locations
ngtatggntgtttagatggggaagtacggattgctctaccggtccggaattcccgggtcgacccacgcgtccgcccacgcgtccgcccacgcgtccgcgccggacgcgccccgatccagatccaggggcgtaacatggcatcaaaacgtatcctcaaggaattaaaggacctgcaaaaggaccctccaacgtcatgcagtgctggtcctgctggtgaggatatgttccactggcaggcaaccatcatgggtcctcctgatagtccatatgctggaggtgttttcttagtgaacattcatttccccccggactaccctttcaagcctccaaaggtatcttttaagacgaaggtcttccatccaaacatcaatagtaatggaagcatatgtctcgacattcttaaggagcaatggagccctgctttgacaatctctaaggttttgctttctatctgctcccttgttactgatcccaacccaaacgatccctcttgtcctgaaattgctcacatggacaagaccgaatcggctaagtacaagcaacan

SEQ ID NO: 94489 - DNA, 547 bp, Zea mays
  unsure (1)..(547): unsure at all n locations
aggatgcgtagggctgcactcgtctgtagctgcagtaacanctgagnttccgggtcgagccacgcgtccgcttaagaagacgatgttcggcgtccgcatcttggcgtacgaggacgccgcctccgtgctcggcgtctgcaagatccactacgagaatatcaagatggaggactcagccaaccccatcttcatcgacatgaagtactgccccaacaagttgtgtactgccaacggcgcctccaaggtcaccgtcaaggatgtcaccttcaagaacatcaccggcacctcctgcaccccggaggccgttagcctgctctgcactgccaaggtcccatgcaccggcgtcaccatggatgacgtcaacgtcgagtatagcggcaccaacaacaagaccatggctatatgcaccaacgccaaaggcagcaccaaagggtgcgctaaggggcttgcatgcttctagacccttcatcgactgacccatctctttaggtataatttttctctcgtccctgcatttgccattaaatgctatccattggtaacgcac

SEQ ID NO: 94490 - DNA, 562 bp, Zea mays
  unsure (1)..(562): unsure at all n locations
agttgtctggtggtaaggnccgggctcacgctcatcagtgcatccagcncctgaattctccgggtcggacccacgccgtccgcccacgccgtccggcggcgtgcgctggtggtgtcgtgngactcgacctgtgcccancccaaggacagagtggtgcaaggccgccgcaggagcacttcgacctcagcatgcccgcgttcctccagatcgcgcaggagaaggccggcatcgtgcccatctcctatcgcagggtggcatgcgcaaagcagggcggcatccggtacaccatcaccgggaacaagtacttcaacatggtgacgatcaccaacgtgggcggcgccggcgacatcgcggcggtgtcggtgaaggggagcaagcgcgtaagggggctgagaataaagcgcaacttgggggcagtgttgcagacccgaggagacctcacctgcgagtcgcttgacgttccgggtgatgactagcgaccaccggcagggcacctcatggcacgttctcccgctgactgaaagttcgcgtcacgtcccatgcgtccaagaactcctagttg

SEQ ID NO: 94491 - DNA, 546 bp, Zea mays
  unsure (1)..(546): unsure at all n locations
agagagtagtatgcatganatagagtgctacatgcaattnccnctggaatttccgggtcgacccacgcgtccggtctggtacacctccagcttcaagttggaggtggacgacatgccgatccgccgcgacatcgagacggtgctcgaggtcaacagccacgggcacgccagcgtggcgtttgtgaacaccaaattcgtaggatgtgggcacgggaccaagatgaacaaggcgttcacgctcgagaagcccatggacctgaaaaagggcgtgaaccacgtcgccgtcttggcgtcgacgatgggaatgatggacagtggcgcttacctggagcaccgtctggccggcgtcgacagggtgcagatcaagggcctcaacgcgggcacgctggacctgacgaataacggcttgggccacatcgtccggctcgtcggcgaagcagaacagatctacaccgataaaggcatgggcagggtcacatgaaaccaaccgtgaacgacaaggccgttcacttgtacaagagcactttgacatgccggtcggagagg

SEQ ID NO: 94492 - DNA, 543 bp, Zea mays
agtccgggtggtatgaaagaaatatatagtatctgctccaccggtccggaattcccgggtcgacccacgcgtccgcggacgcgtgggcgagcaagccttaacccggcaagactccaccaccggtcttttctacgactgctccgcccacatgctctgggtcggcgagcgcacccggcagcttgatggcgtccatgtggagttcctgagggggatcgccaacccccttggcatcaaggtgagcgacaagatggagcccggcgagctggtgaagctgatcgacatactgaacccgacgaacaagcccgggaggatcaccgtcatcacaaggatgggggcagagaacatcagggtcaagttacctcaccttatccgcgcggtccgccaggctggacagagtgtcacctggatcactgacccgatgcacgggaacaccatcaagactccttgcggacgaaagactcggccatttgactccattctggccgaggtacgggccttcttcgacgtgcacgaccaagaggaagcccgcctgggaggtgtcac

SEQ ID NO: 94493 - DNA, 549 bp, Zea mays
  unsure (1)..(549): unsure at all n locations
tgaaatgggtggcgactgacatgacacatgattgcactgctctaccggtctggaattcccgggtcgacccacgcgtccgccacaaccctgtgcagagttcttgcagtcttatcaaggtgacaggaacgacataggacatggaggccaccctgtgcccgaagccccatttcgtggtcatcccatggccagccaccagccacatgatccccatcgtggacatcggctgcctcctcgccgcgcacggcgccgcggtcacgatcatcaccacgccctccagctcgcaactcgtccagagccgcgtggaccgcgccgggcaagcctcagcgggggtcacggtcaccgcgatcccgttcccgggcgcggaggccggcctgccggacggctgcgagaggacggaccacatcccatcgcctgacctcgtgcccaacttcttcgtcgccaccgcgcggttcggcgaggccgtggcgcggcactgccgccgnctgcccacggccacngcggcgcacccccgcccgagctgcgtcgtcgccgggatgtgccacacgtggg

SEQ ID NO: 94494 - DNA, 547 bp, Zea mays
  unsure (1)..(547): unsure at all n locations
tgaattgggtngccatgacaagcacatcattgcactgctctaccggtccggaattcccgggtcgacccacgcgtccgagttccctcccttattacaatcttcctcagtgccgccgctcccagacaccgagcccgactggccaaccccgatccggcgatccgtctccttcttttcctcctttctgccgtccccgatcactcgcaaccatggcggcggcagcaggcggaggcgcggtgcgtgctctgtcccagaaggagcaggacatacagatgatgctcgccgccgacgtccaccttggcaccaagaactgcgatttccagacggagcgctatgtctttaagcgccgttccgacggcatctacatcatcaatcttggcaagacatgggataaactccagcttgcagcgagggttatcgttgccatcgagaacccgcaggacatcatcgtccagtctgcccgcccatatggccagcgtgctgtcctcaagttcgctcagtacactggcgcccatgccatcgctgtgaggcacacccctggtacattcac

SEQ ID NO: 94495 - DNA, 547 bp, Zea mays
  unsure (1)..(547): unsure at all n locations
cgtcacgggntgttcccacgctgaaaagcttcgcactgacgtaccggtctggaattcccgggtcgacccacgcgtccgcccacgcgtccgcccacgcgtgcgaccacgcgtccgcccacgcgtccgcggacgcgtgggctggcagcagcgcaagctcatggccgactccgcggctgaagccacgtacaagcatgacccggtcgaggtcgccaaccaacttaaccgtgcagtccacagatccgtcgagaaggaggacattggcacgaggcgggagatgatggggacgacgactaggaagtctaagttcagcgggccgtgcagggcgacgaacccgatcgaccggcgctggcagtgccggcaggactgcgcgacggaccggaagcgcctggcgcggtgcgccaaggcgttctggcgcaacatcaccggcggactgggcggcaagtgatacgtggtgacggacggcaccgacgacgacgtggtgaacccgcgcccagggacgctagcgtggggggtcatccagatcgagccggtatggatcaccttctcc

SEQ ID NO: 94496 - DNA, 540 bp, Zea mays
gttgggttgccaggacaagactatatgcactgcctgtcagttcccgggtcgacccacgcgtccgcgctcgcccccctttcctccacctatcttcttcagacgaccagcaggaggtacgagcaagagcacctaggaggcctctctctccctctccccagccacccccgtagcgagagggagggcggaagaggatgagcgcgtccaggttcataaagtgcgtcacggtcggggacggcgccgtcggcaagacctgcatgctcatctcctacacctccaacaccttccccaccgactatgttccgacagtgtttgataacttcagtgccaacgttgtggttgatggtaacactgtcaacctcggcctctgggacactgcaagtcaagaagattacaacagactgggaaccctgagctatcgtggagctgatgtttttcttctggctttctcactgatcagtaaaggcagctatgagaatggttcgaaaaaatggatacctgaacttgaacattatgcacctggtgtgccaattattctccgag

SEQ ID NO: 94497 - DNA, 548 bp, Zea mays
  unsure (1)..(548): unsure at all n locations
atgtgtagccccagccaaganacatgatagcattgcttctaccggtctggaattcccgggtcgacccacgcgtccgatcacgacaagatggcgtgcacagacaatgcgatgagagccttgttcctcctggtggtctggtgcatcgtgcatggtgagaaggaagagtcaaagggcatcgatgcgaaagcgtccgggcctggtgggttcttcgacatcaccaagttgggcgcctccggcaatggcaagacagacagcacgaaggctgtgcaggaggcatgggcatcggcgtgcggcggcactgggaagcagacaatcctcatacccaagggcgacttccttgtcggacaactcaacttcacaagcccttgcaagggccaactgaacaatccaggggattggcattttgttgccaacaacggccttaacccgtaccagggacattggaattggatccagaatctacgcgtggattacctggtcattaaccgcaagggaaacctttacaggcaaggcccaaccctgttgaaccagaacttcttgccccaaaa

SEQ ID NO: 94498 - DNA, 529 bp, Zea mays
ggaaagccgctgagatagctcagggtagtattgctctactcggtccggaattcccgggtcgacccacgcgtccgcccacgcgtccgcgcccgtgtaccagggccacggcgacgtggacgtgtggtcgcccgtgctctccggccccggcgtccccttcgcgccctacctcgccgacgcgctccgccaggactgccaggcgggctacctcgtcctccaggtcaaggtcgacggccgcgtgcggtggaaggtcggcagctggatctccggccactaccacctcttcgtcacctgccccgcgttcctcgtcaccgccggcggcaacggcgcccccggcgcttccgggttcaggttccagaccaccacgtactgccacgtcgaggtttaattaggagcgagaggaagcagagaccatggctacctctctagctgctgctcctgcccgtgcctggtgtgggaataactctctctatctctctctctctctctgtccggtgctggcgttactactgcaggagtgcaatgatgccgg

SEQ ID NO: 94499 - DNA, 532 bp, Zea mays
  unsure (1)..(532): unsure at all n locations
gggcacgtgctngccacagtaggaggcagtatatgcactgctcgtaccggtccggaattcccgggtcgacccacgcgtccgcggacgcgtgggcggacgcgtgggcggacgcgtgggcgaggagcacaagtctatgtgctacagccttcgtgtccatgtgctacccttcttcaggttctacagaggagcacagggacgactctgcagcttcagctgtacaaacgcaactattaagaagttcaaggatgcacttgcgaagcacaagccagatagatgtagctttggcccaacccgggggctagacgaatcggagttattagccttggcagcaaacaaggaactgcagttcacctacaccagggagccagaactgactcccaggggagatacccccggggaggtcattgctcccgagcccgcaaagcttcctgccgctacaaagcctttggtcaagctggggtcggaggaaaagtcattggtctctccaggaagatgagacggtccgatgcttccggtctggatagttcatgga

SEQ ID NO: 94500 - DNA, 511 bp, Zea mays
  unsure (1)..(511): unsure at all n locations
tggtgtcttgcttagcctcacgtaagnacngnacggaccggaattgcagggccgacccaggcgtcccaactgggcttgccctctgctgagagacacgatgaggttactgaatgctgccggaccgcgctctgggcgactattacccagtgaaggcactgtaccaggcgcatcgtcgacccgtccatgtgcctgcacgaggacgctgactaccggccggtgatcagcgacgtcgtggcggcgctctccttactagccgacccgaaatactaccctaccggaggcacatgaagctgaacacatgagcacgcatagcaggacagacaacgatagcagacctcctaggacctagaaggtcacgtgagacgacgacatgaagcatagatgaccgtatagggggagctaactaacgggaaacatggcaaagggaggatctgcagagctgtctgaatgatctcttcaatctgaatttcgtataaggcacaccacgtaggcaggatgtaacatcattcag

SEQ ID NO: 94501 - DNA, 525 bp, Zea mays
  unsure (1)..(525): unsure at all n locations
gttagtgctgaatagtgggggaagtatgctctaccggtccggaattcccgggtcgacccacgcgtccgaacaactttgcgtcttcccgaatcggggcctccaccatctccaactgcaaccccacccgataccgccgccgcctccgctagggttttggagtgaggatcgccgatgtcgacggctcccaggcgccccttccgaggccgcggcgccccgccccctggcaccggctacgttcgccgcggccccgcccctgccccaggccccgccgacggcgccaagaccctgcgcaagcccgtcttcaccaccgtcgaccagctgcgcccccagacgcacggccacaccctcnaccgccgcgtcatctccgcccgcaccgtcctcgacaagcccttcacgcacatcggccgcacccgcgtcgcagagtgcctcgtcggagacagcaccggcaccgtcctcgtcaccgnccgcaacgaacaagttgaccttcttgagccagattccacagtgatctttcggaacgcttaa

SEQ ID NO: 94502 - DNA, 528 bp, Zea mays
  unsure (1)..(528): unsure at all n locations
gtaagcagtngctcatgtgggaaggagtatagcacgctcgtaccggtccggaattcccgggtcgacccacgcgtccgaggccggggcgtgccggatcgcggcgccgtcgtcgcggcccgccgccgccgccgccgcgccgtcgtcggactcatcgagctcgctgctgacgcagctcatcgcgtcgtcctccttcggcggggccgcgtcgtcgcgccgccgcctcaccggcacgctcttcggctaccgcgacggccgcgtgtcgctgtcgctgcagcagaacgcgcggtgccagcccacgctggtggtcgagctggcgctcccgacgcacgcgctgctccgcgagctcggcgcccacgcgggcgcgcgcatcgtgctggaggtcgagaagcgcgccgagcagggcaccgccgacggcaacgaggccatcgccaccaccgaccacgacgggtgggtgctggaggagctcatgtggaccatgttctgcaacggcagaaggtgggctaccacgggcggcgggacccaacgagc

SEQ ID NO: 94503 - DNA, 520 bp, Zea mays
agtgtgcatgtggggggtagtatgtatatgttgtaccggtccggaattcccgggtcgacccacgcgtccggtacggtctgttggaatggattaggtgtggctagttttggtttggtgcatcctcgtatgtgcttttgcaggaagattttcgtagggggtgtagcttgggagacaactgaagaaacattcacaaagcattttcagaagtatggagctataactgattctgtgatcatgaaggacaagcatactaggatgcctcgcggatttggatttgttacattttccgatccatctgtgcttgacagggttctagaggatgaacatgtcatagatggaagaacagttgaagtcaaaaggactgttccaaaagaggaaatgtcatcgaaagacggtcctaagacaaaaaagatctttgtgggtggtattccaccatctcttaccgaagattaattaaaagaacacttctcatcgtatgggaaggtggtgagcattaagatatgcctggacatagaactga

SEQ ID NO: 94504 - DNA, 513 bp, Zea mays
  unsure (1)..(513): unsure at all n locations
tatgtggctgaatccattagcatataatgaatgnatcgactcttccggaattcccgggtcgacccacgcgtccggcaagtaccccgctgggcagaagatcgtgtttcacatcgagaagggctgcaaccccaactacctggccgtgctggcgaagtttgtggcggacgatggcgacatcgtgctgatggaaatccaggacaagttgtcggctgagtggatgcccatgaagctctcttggggctccatgtgcaggatggacactgccaaggcgctcaagggccccttctctatccgcctcaccagcgattccggcaagaacgtcatcgctaaagacatcatcccggcgaactggagacccgatgccgtctacactttctacgtccaattctactagactttgaattgccttcgattcatacggcgcgggggtctatggacctgcagcagcaagctaattaagctggccgatatctatataatatataatggaagccctgggctctgattattggg

SEQ ID NO: 94505 - DNA, 526 bp, Zea mays
  unsure (1)..(526): unsure at all n locations
ngtaatgtgtgaatggtgggggagataatgctgtactcggtccggaattcccgggtcgacccacgcgtccgcccacgcgtccgcccacgcgtccgcggacgcgtgggatctaaagttcaacgcccgcaccgcaagcgcaacacgccaacacccgagacccgacgcggccttcgccttccctccgcgcgagggagattcgaggggagagaggttctcaccttcgcgcctgcggttgcttggcgcagagtcgtcgcagatggaccggtaccagagggtggagaagccgcgggaggagtcccctatcggcgccaacgagatccgcatcacggcgcagggccggccccgcaactacatcacctatgcgctcgccctgctccaggacaatgcaacagatgacattgtcatcaaggccatgggaaaggcgatcaacaagacagttgccatcgtggagcttcttaagagaanggatgctggtnctcaatagaataccttttttgaatccatggttttacagacactgggaggc

SEQ ID NO: 94506 - DNA, 530 bp, Zea mays
  unsure (1)..(530): unsure at all n locations
agcgnttgctatgtagggaggtagtaaaatgatagctcgtaccggttcggaattcccgggtcgacccacgcgtccgcgtttttcatccgccttcgcctccaaccgcgtgcgctccacgcctcctccaggaaagcgagagcttctgcataagaacaacaaatcaaaagcgtgatcagctcggtgccaacaaaacctcaacaaccaagtttcatgtctgatctcgacgtccagcttccatctgcctttgatccgtttgctgaggcaaatgctgaggactctggtgctggtcctggaacgaaggattatgtgcatgtgcgcatccagcagcgcaacggcagaaagagtctgactacagtccagggtctgaagaaagagttcagctataacaagatcctcaaggatctgaagaaggaattctgctgcaatggtactgtagttcaggacccagagctaggccaggtcattcagcttcaaggtgatcaacgcaagaatgttgctacttttctaagtcaggctgggaatggcaagaa

SEQ ID NO: 94507 - DNA, 507 bp, Zea mays
  unsure (1)..(507): unsure at all n locations
aaggactgtcccatcgaatcatgntcgnatcgactggtccggaattcccgggtcgacccacgcgtccgcccacgcgtccggaaagaactcgaatcaatttacaggcagtatccatttgaacctctgaaggatcgagacaaaaccttgaagctcacttatgaagaaagaattcaaatgtcgaaggaagccggaccagaaatggaccctttgggtgacctaattaccgaacttgaaaaaaaacttggtcggtttgtaagggaaaagtttaccccaaattttttaatccggattaggtatccttgggctgtacgtccgttctacacaatgccttgttatgacaacccatcgtacaccaattctttggatgccttcattcaaggaggggagataatatctgaggcacaagggatacacactccagatctggtggccaagcgcgctacagaatgtgaaatcgacgagagcactatctcggcctacatggaatccttcaactatggccggccc

SEQ ID NO: 94508 - DNA, 507 bp, Zea mays
  unsure (1)..(507): unsure at all n locations
aggctatcatcatgataatagatagcattcactcgtccggaattgccgggtcgacccacgcgtccgcccacgcgtccgcacctatggtggtgcctagtgggcctaaggtgccagccttgctcgcgtttggagattcaatcgtggacacaggaaacaacaactacctggtgaccgttgtgaaggccaacttcccgccgtacggcagggagtaccctaaccacaaggctactggcaggttctccgacggcaagatcaccgaggactttctagcgtctgcgcttgggttgaaggagacgctcccgccatacctgaacaagagcctcaccctggaggacctcaagaccggcgtcagcttcgcgtcggcggggagcggctacaacaacgccacgtgccggacgtcgtcgaccatgacgatcgagcggcagctgcagttgttctccgagtacaaggcgaaggtggngggcatccacgagagggccctcttcgtggtctgctccggcagcaaca

SEQ ID NO: 94509 - DNA, 511 bp, Zea mays
tgtgatgtgtggatgagggagggggatgtagtactcgtccggaattccggtcgacccacgcgtcgccacgctcgaagccgaccatctatgacaggtcgagctcggcgcacgctcgggcagggcaccttcgccaaggggtaccacggccggaaccttgcgttcggcgagagcgtggccatcaaggtcatcgacaaggagaaggtgatgcgcgtcggcatgatcgaccagatcaagcgcgagatctccgtcatgcgcctcgtccgccaccccaacgtcgtgcagctgcacgaggtgatggccagcaagagcaagatatacttcgccatggagtacgtgcggggcggcgagctcttcgcccgcgtcgcccgcggccggctcaaggaggacaccgcgagaaggtactttcaccagctcgtcggcgccgtcgacttctgccacaaacggggcgtctacaccgcgaccctcaacacgaggaacctcttctggaccagaccggaaccttaaaggtttt

SEQ ID NO: 94510 - DNA, 524 bp, Zea mays
  unsure (1)..(524): unsure at all n locations
ngttatgggtgaatgatggggagatatgctgtactcggtccggaattcccgggtcgacccacgcgtccgagatcacccattggaaatctgtatttctaatttgttgggggatactaggcgtatgaactagtatctatgcagtgggaactatatcagacagttattcaaaaatgtacctgaacaccaatagtacgttggagaacgttgcttcgaccaggattactatcttcgatctgaaactctgataagcagaattgaagacaaacgatcgggtacttggggaatatggaatttatttactgttggtttacctagtacttgcctaccagccaggcgccccaggggacgacggcaaagatacagtctcgggtattaggatggcaaaggcagcgatagataaattctactccaagtatatgttgggatcacgtaagctggtgcttgacccacattcaacgatctttggcaaaaggatgctngtcaaaagtgcgatcatgtgctattccaataacacaagatagatc

SEQ ID NO: 94511 - DNA, 514 bp, Zea mays
  unsure (1)..(514): unsure at all n locations
ggaaagcgntgcaatgatagacagtaagcatgctctaccgttcggaattccggtcgaccagcgtccgcatggcgagctctgggtagtagataatggccgatgccgagntatccagcccctcgtctgcgacaacggaactggcatggtcaaggctgggttcgccggcgacgacgccccgagggccgtcttccccagcatcgtggggcgcccgcgccacactggtgtcatggtcgggatggggcagaaggacgcctacgtcggtgacgaggcgcagtccaagaggggtatcctgaccctcaagtaccccatcgagcacgggatcgtcagcaactgggacgacatggagaagatctggcatcacaccttctacaacgagctccgcgtggctcccgaggagcaccccgtcctcctcaccgaggcgcccctgaaccccaaggctaacagggagaagatgacccagatcatgttcgagacctttaacacccccgctatgtacgttggcattcaaggcgtg

SEQ ID NO: 94512 - DNA, 525 bp, Zea mays
gaatgggctgcatgtgtggaggaatatggattgctctaccggtccggaattcccgggtcgacccacgcgtccgcccacgcgtccgcccacgcgtccgcccacgcgtccgcccacgcgtccgatggacaactctttagggcgcttggtgtattcgcacagaggaaaatcaacctcacaaagatcgaaagtcgtccacacaaggagaggcctcttcgagtatctgatgactgttcctcactcttaaagaattttgattacctcttttacgttgaccttgaagcatcaatggctgatccaaagattcagaatgctcttggaaatctgaaggagtttgcaacctttttaagagtcctcggaagctatcctacaaatgtgaatgaaccttagaaaacactgcagattacatgatggattagcaggaatggacgaaatggtttgagttggttctctgagcaagttgacaagtgaggacctctatgaagctgatgctaacatttacagagccaaaggatcctatatagagca

SEQ ID NO: 94513 - DNA, 510 bp, Zea mays
actggttgtccactcgatacgacttcacgactctactggtccggaattcccgggtcgacccacgcgtccgcaggttgcttttcttaaatcaagaaaaagttttgtcaagatagctatacagtctggatgtgctttagtcccagttttctgctttgggcagagctatgcatacaagtggtggaggcctggtggtaaattgtttatcaagatcgctagagcagttaaatttactcctattatcttctgggatagatttggcacaccattccccttcccaaaacccatgcatgtggtcgtgggtaaaccaattgaagtcaataagattccccatcctacaattgacgagacaattgcaacagtatgcatgttcttggcgggaaaagttgacgaaacacccagacctctgaaggatgtcatacttctttcatatgagatcatccacaaaaaggatcctgctgcagttcaacgaatgatacagaaggaagtatatgaacaacaaaaggaactaat

SEQ ID NO: 94514 - DNA, 518 bp, Zea mays
  unsure (1)..(518): unsure at all n locations
tgcatgtgctagtccatccgaatatatagctaggactcanctggtccggaattcccgggtcgacccacgcgtccgcccacgcgtccggtggggttcttgaggttgtccggatttcaagatctgggtatccaacaagagtgactcaccagaagtttgctcggcggtatggttttcttcttgaggatgttgcatctcaagatccactcagtgtttcagttgcaattcttcatcagttcaacattttacctgagatgtatcaagttggctacacaaagttgttcttccgaactggtcagattggcaaccttgaagatactcggaatcgtactctgcatggtattttaagggttcaaagctgtttcagggggcatcaagcccgtcatcatgcaagagaacgaacaagaggagttttgactcttcaatcattcattcgtggtgagaatgcacggcaaatttactcctctttgttgaggaaacatagagccgcagttgttttgcagagaaatgtgagatgttgg

SEQ ID NO: 94515 - DNA, 524 bp, Zea mays
  unsure (1)..(524): unsure at all n locations
agtcggtgagatagtgggggagggagtgcagtactcggtccggaattcccgggtcgacccacgcgtccgatcaaatccacggtttaataacgaaccgtgttaacttaccataacaacaactcaattcctatcgaattccttcctatcgaattcctatagtaaaattcctataggatagaacgtacacagggtgtacacattatatatgaatgaaacatattcattaacttaagcatactcctttttttatttaatgagttgatattaattaaatatctttttttttagatttttgcaaaggtttcatttacgcctaatccatatcgagtagaccctgtcgttgtgagaattcttaattcatgagttgtagggagggacttatgtcaccacaaacagaaactaaagcaagtgttggatttaaagctggtgttaaggattataaattgacttactacacccccgagtacgaaaccaaggatactgatatcttggcagcatttcgagtaactnctaaagtcggggct

SEQ ID NO: 94516 - DNA, 537 bp, Zea mays
  unsure (1)..(537): unsure at all n locations
ngttgttgccgantcgccactgactagaacagtacagcattgctcgtaccggtctcggaattcccgggtcgacccacgcgtccggagacaagcggcggcagcgagcagcatgccccgccggaagacgagaacaaggagaaagagcggcagctggccaaggagaaggcgtacgcggcggagaaggtcgtccagcaggagatgctcaagtacgccaaggagaagggtctggtgtccccgaccaacggcacggggtggtacaggggcatcgcccgggagttcgtggacgcccacaacgagctccgcgcgcgctacggcgtgccgcccatgaagtgggacaaccagctggcgcggcaggcgcggcgctggtccaacgccatgcgcaaggactgccagatccttcacagcggccacgagtacggcgagagcgtgttcaggagctacgacgactggaacgccaccgncagggaagccgtcttctggtggggcaaggaagaagccatctacgacaaggacaaagaaaaatgccaagtccggaaa

SEQ ID NO: 94517 - DNA, 510 bp, Zea mays
  unsure (1)..(510): unsure at all n locations
atgctgtcatacgaatatgtatgncatcactcggtcttgaattcccgggtcgacccacgcgtccgggcatcgccaagcagagctaccagctgcgcatctggctcagcgccgtgatcgcgaacatggagacgtgcgtcgacgggttccccgatgacgagttcaaggccaaggtgaaggagtcgttcaacgatgggaaggagctcaccagcaacgccctggcgctcatcgagaaggggtcatcgctcctctccgtgctaaagggcggctcgaaacgacggttgctcgaggaggagggagaaccggcgcaagccgggcctgcactcgacaaggacggcatcccggaatgggtgcccgacagtgagcggagggtgctcaagggccgcggcttcaagagcacactcacgccaaatgtggtggtggcgaaagacggcagcggcaagttcaagaccatcaacgaggcgctcgccggcatgccaaagacctacgactgaagatacgtgatccaagtga

SEQ ID NO: 94518 - DNA, 532 bp, Zea mays
  unsure (1)..(532): unsure at all n locations
atggggtgnccatgcaggggagctgtattagcactgctcgtaccggttcggaattcccgggtcgacccacgcgtccgggaagtgtggatgtcaattgtggtgcatgtgcttgggtctagtgctacaaactgtggagcacccattccaagttgtgtagtgggtttcgggtgccttggcgaatgcctttgcatcctaacacctaaagtggcggacattgcgtgaggctggcttcacagagcagcgagtaccgcccgccaccagaggtggaaggataatgagccgctatgctctaggccaattagggaacatgtgccctctatggtagaccactatcttttaaataaaaaaaaaaaaaaaaaaaaaaaaaaaaaaaaaaaaaagggcggccgctctagaggatccaagcttacgtacgcgtgcatgcgacgtcatagctcttctatagtgtcacctaaattcaattcactggccgtcgttttacaacgtcgtgactgggaaaaccctggcgttacccaacttaatccggcttgaa

SEQ ID NO: 94519 - DNA, 528 bp, Zea mays
  unsure (1)..(528): unsure at all n locations
cgccgatagcgaagtcncactctgtnatgcatgantcataccggttcggaattcccggctcgacccacgcgtccgcggacgcgtgggcgtgaacaacgtggatgtgtccgggatcactctgatcaactgcaagggattccacatgaacatgtacaagtgcaaggacatgctgatcaaggacgtcaatgtgacggcgcccggtgacagccccaacacggacggcatccacatgggcgactcgtccggggacaccatcaccaacaccgaaatcggcgtctgcgacgactgcatctccatcgaccccgagacctacaaggtgaacatcaccggcgtgacctgcggtcccggccactgcatcagcatccacagtctagggcggtacaaggacgagaaggacgtcacggatatcaacgtcaatgactgcacgcttaataagactgtcaacggagtacgcatcaaggcgtatgatgacgccgtcttcaagcttaccgtctaaagaaccacttttagaaaatatagatggggggn

SEQ ID NO: 94520 - DNA, 523 bp, Zea mays
  unsure (1)..(523): unsure at all n locations
tgggtncctagtaagggatgtatgcatagctcgtaccggttcggaattcccgggtcgacccacgcgtccgcccacgcgtccgcatcgatcacgacatgatggcgtgcacaaacaatgcgatgagagccttgttcctcctggtcctcttctgcatcgtgcatggtgagaaggaagagtcaaagggcatcgatgcgaaagcgtccaggcctggtgggtccttcgacatcaccaagttgggcgcctccggcaatggcaagacagacagcacgaaggctgtgcaggaggcatgggcatcggcgtgcggcggcactgggaagcagacaatcctcatacccaagggtgacttccttgtcggacaactcaacttcacaggcccttgcaagggcgacgtgaccatccaggtggatggcaatctgctggcgaccacggacctaagccagtacaaggaccatggtaattggatcgagattctacgtgtggattaccttgtcatcaccggcaagggaaaccttgaccggccagg

SEQ ID NO: 94521 - DNA, 506 bp, Zea mays
  unsure (1)..(506): unsure at all n locations
aggctgtcattaagattatagtatgnatcnctcggtccggaattcccgggtcgacccacgcgtccgcggacgcgtgggcggggaggtgtccggggtcacgctgctcaactccaagttcttccacatgaacatgtaccagtgcaagaacatgctgatcaaggacgtgaccgtgacggcgcccggggacagccccaacacggatggcatccacatgggcgactcatccgggatcaccatcaccaacaccgtcattggcgtctgcgacgactgcatctccatcggccctgggacctgcaaggtgaacatcactggcgtgacctgcggccccggccacggcatcagcatcggcagcctagggcggtacaaggacgagaaggacgtcacggacatcaacgtcaaggattgcactcttaagaagacaatgttcggcgtccgcatcaaggcgtacgaggacgccgncttcgtgctcaccgtcttcaagatccactacgagaatatcaagatgn

SEQ ID NO: 94522 - DNA, 531 bp, Zea mays
ggtagtcgctgggatgttgggagatattattgctctactcggtccggaattcccgggtcgacccacgcgtccgggaccaggtaagcagcagcaggaaccctagcaccgccgcatccgcagccatgggtatcgacctcgttgccggtgggaggaacaagaagaccaagcgcacagcgccgaagtccgacgatgtttatctcaagctccttgtcaagctctaccgtttcttggtcaggaggaccaagagcaacttcaatgctgtcattctcaagaggctcttcatgagcaaaaccaatcgcccaccaatctccatgcgccgccttgtcaagttcatggaaggaaaggagaagaacattgctgtgattgttggcacagtcacagatgacaagaggatccaagaggttccagcaatgaaggttactgccctgaggttcaccgagacggcaagggccaggattgtcaatgctggtggggagtgcctcacatttgaccagcttgctcttcgtgcttcacttggcgagaacacagtcc

SEQ ID NO: 94523 - DNA, 531 bp, Zea mays
  unsure (1)..(531): unsure at all n locations
gtaatgccgnntgngatgtaataggagagataattggtgtactcgttcggaattcccgggtcgacccacgcgtccgggaacgaagatggcttgtttattagttcagttgcctccagctcaaacctgtgggctttaattatggatgctggcactggttttacatctcaagtatacgaactttctagttactttcttcacaaggaatggataatggaacagtgggagagaaatttctatatcactgcactggctggtgcgaataatggaagctctttggtgattatgtcaagaggaacacaatatgcccagcagtcctacaaagtaagtgatacatttcctttcaaatggataaacaaaaaatggaaggagggcttctatgtcactgctatggcaacagctggaagccgatgggcagttgtcatgtcccgcaatgctggtttcacttctcaggtagtggagcttgatttcttatatccaagtgagggcattcacatgcgttgngacaatggctatcgcattacggcaacngtt

SEQ ID NO: 94524 - DNA, 533 bp, Zea mays
  unsure (1)..(533): unsure at all n locations
tttggagtcgantgccatgatagaagnatgatagcatctgctcgtaccggtccggaattcccgggtcgacccacgcgtccgcggacgcgtgggcggacgcgtgggcgacaagatggcgtgcacagacaatgcgatgagagccttgttcctcctggtcctcttctgcatcgtgcatggtgagaaggaagagtcaaagggcatcgatgcgaaagcgtccgggcctggtgggtccttcgacatcaccaagttgggcgcctccggcaatggcaagacagacagcacgaaggctgtgcaggaggcatgggcatcggcgtgcggcggcactgggaagcagacaatcctcatacccaagggcgacttccttgtcggacaactcaacttcacaggcccttgcaagggcgacgtgaccatccaggtggatggcaatctgctggcgaccacggacctaagccagtacaaggaacatggtaattggatcgagattctacgcgtggataacctggtcattaccggcagggaaacctttaccggca

SEQ ID NO: 94525 - DNA, 531 bp, Zea mays
  unsure (1)..(531): unsure at all n locations
tggcccantngtcatgatgggaggtntaatgagattgctcgtaccggttcggaattcccgggtcgacccacgcgtccgcccacgcgtccgcaagatcagcagagccgacgtcaagtacccgcagtggttctcccctgagctccggcggttgatgcccaagctcctcgaaccgaacccaaacaacaggatcacgatcgagaagctggtcgagcacccctggttcaagaaggggtacaggccggccgtcatgctggcacagccgcacggctccagcagcctcaaggatgtccaggtcgccttcagcaacgccgaccacaaggacagcagcaccaaggtggaacagccggcggacagctccttgaagccggcgagcctgaacgcgttcgacatcatctcccactccagagggttcgacctgtcaagcctgttcgaggtggaccaagagcagaaggccagcaactcgcggttcatgacccagaaaccggcgtcggcgatagtgtcaaagctggagcaaatcgcttagacagaacg

SEQ ID NO: 94526 - DNA, 509 bp, Zea mays
atgctaggcatccgacagtatagtatggatcacctggtccggaattcccgggtcgacccacgcgtccgcccacgcgtccgcagcttctcggcttatggtgccagagccagaccgacgtgcctagtagcggactatcttagcttcaagagaccgacccaggcaagatccattgatcgatggagctgcttcctctgctcacgtggctcctccttgcgcacgccctggcctgcctggcctggacggccgccgcgcggcgccggcagtctcggtgctacctcctggactacgtctgccacaagcccagcgacgaccgcaagctgtccacggagacggccggcaacgtgatccagcgcaacgcgcggctggggctcaccgactaccgcttcctcctccgcgtcatcgtccgctccggcatcggcgaggagacctacgccccgcgcaacatcctggagggccgcgaggactcgcccaccctgcaggacgcggtggacgagatggacgccttcttt

SEQ ID NO: 94527 - DNA, 530 bp, Zea mays
  unsure (1)..(530): unsure at all n locations
gttagggcgtgctgatcctacttgtaatgatcgctcgtaccggtccggaattcccgggtcgacccacgcgtccgcccacgcgtccggtatccttgctgctgatgagtccactggcaccattggcaagcgcctttccagcatcaatgtcgagaacgttgaggagaaccgccgtgccctccgtgagctcctattctgctgccctggtgctctccagtacatcagcggtgtgatcctcttcgaggagaccctgtaccagaagaccaaggatggcaagccttttgttgatgtcctcaaggagggaggcgtcctccctggcatcaaggttgacaagggcaccattgaagttgttggcactgataaggagaccaccacccaaggccatgacgaccttggcaagcgctgcgccaagtactacgaggccggtgcccgctttgccaaagtgcgcgctgntctcaagattgngccccatgagccatcacagcttggcattgacctgaacgctcaggtcttgcttgctatgccatcatctg

SEQ ID NO: 94528 - DNA, 523 bp, Zea mays
ctgtgttggatgtttggagggatatgagtattgctcgtccggaattcccgggtcgacccacgcgtccgcccacgcgtccgaaaagttatgggcttcagtttcactgtgcattggatatgtaactttctggtgggactattttttctggagcttgtgaacaagtttggggttggagcagtctatgcaggttttggtggggtctccctgctgacagcactctttgcctacaatttcatagttgaaacaaaaggacgttcgcttgaggaaattgagatgtccttgagcagtgctacccctggcaagcaagagtagaacatctcaattgtatggacaaactgaacaactgacgggaggaatttaataagagcagagggggcctaatcccatgaatcttcagcagcagcagtttgttgcaaacaacatcaactcctatagataatgagcacaatcaaattcagcttttctttggtagcatgagaatcgttgtacaatattaaaaagggtgaaaaaaatgcccccttaa

SEQ ID NO: 94529 - DNA, 528 bp, Zea mays
  unsure (1)..(528): unsure at all n locations
ggaggggnnnntttgattcgatcccattgcanncctcnnnngnntnngaattcccgggtcgacccacgcgtccgcccacgcgtccgcgatcacaataagatggcgtgtatagacaatgcaatgagagccttgttccttttagcgctcttctgtgtcgtgcatggtgagaaggcaaagtcaaaggacaacgatgcaaaagcgtccgggcccggtgggtccttcgacatcaccaagttgggcgcctccggcaatggcaagacggatagcacgaaggctgtgcaggaggcgtgggcatcagcgtgcggcggcaccgggaagcagacgatcctcatccccaagggcgacttcctcgtcggaccactcaacttcacaggcccatgcaagggcgacgtgaccatccaggtgaatggcaatctgctggcgaccacggacctaagccagtacaaggatcatggtaattggatcgagattctacgcgtggacaaccttgtcatcaccgggcaggggaaagctcgacnnggcagggcc

SEQ ID NO: 94530 - DNA, 526 bp, Zea mays
  unsure (1)..(526): unsure at all n locations
gtcgcgggtnnattgaatccatgcattgatgtagtatagctactgctcgtaccggaattcccgggtcgacccacgcgtccgcccacgcgtccgggtgaacggtaagctacgcgaggagcctgggttggtgaacgcaagcccgtacgagaaggggtggattatcaaggtcaagctcatcgattcacgctagctcagttcgctcatggatggtgacaagtactcgaaattctgcgaggaagaagacggtcattgaataaatcagagggtcttctgaacaccaaggacctgtgtctcaagctctatcagtgctctctggtctggagacctgctgctacaaatttaaattggcaaggttcattgcatgggataaattagttaggatttgccctattgcaccactgcttgggaaatacgagcttgcgttgtgagtggcgtggtcaagtttgattatctctttttagttgtgatctcgcgatatccttctttttgttaaacaaaaatttgtctttttcgaagaagaaataga

SEQ ID NO: 94531 - DNA, 516 bp, Zea mays
gttggttttcatcctacgctgatcgtcatgcatacctgtccggttcggaattcccgggtcgacccacgcgtccgcccacgcgtccggcagcggaggcggccggcaagcctgagtggggccacggtgggccgaccgacgctggcggctacaacaactggccggaggacaccgtcttcttccgcggcgacaacggtgggtggagcaccgagtacggcgacttcttcctgtcgtggtactcgcagatgctgctggagcacggcgaccgcatcctgtcgggcgccacgtccgtgttcggcgcggcgcccgtggaggtctccgtgaaggtggccggcatccactggcactacggcagccggtcccacgcccccgagctcaccgcgggctactacaacacgcggcgccacgacgggtacctcaccatcgcgcgcctcctggcgcgccacggcgccgtgctcaacttcacctgcgtggaaatgccggaccacgagcagccgcatgatgcgcggtgcatgccgg

SEQ ID NO: 94532 - DNA, 514 bp, Zea mays
  unsure (1)..(514): unsure at all n locations
ccgatattgaccctcagcttnagtacgccatgccgtaccggttcggaattcccgggtcgacccacgcgtccgcgaatgcccaagccattcccctccagatactccgtgacaccaccgacgacgtggagaacaacctgtacccgttcgtccacctccttcccgacgggactctgttcatcttcgccaacgaccgctccatcctgttcgaccccaggaacggccaggtcgtccgcgagttccacgttctcccaggcggtggtcggaactaccctgcctgcggcatgtcggcgctcctgcccctcgacctccgacgcggcgacgtcctcagtcccgaggtcatcgactgcggcggctcccccaagaacgccttcacgctcggcgagtccaacacgttcccgcccgacctcaaggactgctcgcgcatcaacccctttgagcccgacgcttggtgggcgctggaccagatgcccgtggcccgcaccatgggcgacctgctgatcctgcccaccggcga

SEQ ID NO: 94533 - DNA, 538 bp, Zea mays
  unsure (1)..(538): unsure at all n locations
agtagtaagtggtgcttgagcctgccataagantgagtagcacgctcgtcggaattcccgggtcgacccacgcgtccgcttgtgaccctccctcagccgcgtcgcgtcgcatcctacgatccaaagctctctctgcgcgcaggtcgcagccatggcgaagaactacccgaccgtgagcgccgagtacagcgaggctgtggacaaggccaggcgcaagctccgagccctcatcgccgagaagagctgcgccccgctcatgctccgcctcgcgtggcactccgcggggacgttcgacgtgtcgtcgaggaccggcggtccattcggcacgatgaaacatcatgctgaattggctcacggcgctaacgcggtgctggacatcgcggtgcggctgctcgagcccataaggatgagttccaaatcctctctgacgctcgattctacgaactcgctagagttgaggcccaagaaggtagccgttggtcttaaatgatcctccaatcctacagggacgtcaaaccttatcacttttttgtaggtg

SEQ ID NO: 94534 - DNA, 510 bp, Zea mays
  unsure (1)..(510): unsure at all n locations
agtaaggcgctgagccacccagatagttacgcgtncggaccggaattccggtcgactacgcgtaccgtacgcgttgcccccgcgttcgtcgacccacgcgtccggccacgcgtgcggcaaagacccagaaccctagcacccccggcccgtcgccgacgggcggcggagtagagagatggcggcggacgaggtgaactcggtctacgtcggcggacttccctacgaggccaacgaggagatgcttcgcgacgccttcgggtactacggcaccatcgtctacgtcaaggcgattaatgatcatgctgtcaaaggcaagtgttatggttttgttactttcactcaccccagagctgctgagcaagcaattgcgggcatggacggcaagaaattaggcaaccgtattgttcgagtaaatgaagtgcgtacaagaggcccccgcgattgtggccgagatggtttcagacgagatccaagaaagtatggtcgagatccatactgtgacagaaggga

SEQ ID NO: 94535 - DNA, 518 bp, Zea mays
  unsure (1)..(518): unsure at all n locations
ntgggnctgatcatgagagtagctgcatcgcacgtactggtccggaattcccgggtcgacccacgcgtccgggtgaagcaagcagcacacgagacgatatagagggagggatcatggctctcttccgtgccgccgcgtcaggagggttcgcgctgatccttctcgcgtgctgcagcctcatcatgctggcggcggcgtctggcggcggcggcgtggacgacgacggcgtcggtggtgacaggctgatgatggaccggttcctcagctggcaggcgacgtacaaccggtcgtacccgacggcggaggagaggcagcggcggttccaggtgtaccgncgcaacattgagcacatcgaggccaccaaccgggcgggcaacctgacgtacacgctcggcgagaaccagttcgccgacctcacggaggaggagttcctggacctgtacaccatgaaggggatgcccgtccgncgtgacgccggcaagaaagcggccaacgtctnctnctccgncaccgncgtg

SEQ ID NO: 94536 - DNA, 516 bp, Zea mays
aaatgccactgacctaaagaaaatgtactgcactaccggaccggaattcccgggtcgacccacgcgtccgcggacgcgtgggcggacgcgtgggcgctcgacaccaaggccccgctcaagtaccccctttgcatccgctttgctgtcaagtccggtggctaccgcatcgctgacgacgtcatccccgctgatttcaaggccggcaccacctataagaccacactcagcatctaatcagcctctgatgatgaattatatttcaaaagagctcacctggtgctcatgttagcaagacaatattttttctatggttattttgtggcaccaaaccacccaagaaatatgtgatgctacatgtcccttctgatgccttgctgtgttgggttgatattattacataaactaaatcaattatttatttaagattttaaaagaaaaaaaaaaagggcggccgctctagaggatccaagcttacgtacgcgtgcatgcgacgtcataactcttctatagagtaac

SEQ ID NO: 94537 - DNA, 521 bp, Zea mays
  unsure (1)..(521): unsure at all n locations
atgcactgatcctgcaaagaanagtacagcactgctgtaccggactcggaattcccgggtcgacccacgcgtccgcggacgcgtgggcgacatttcgaataacacaggtgagcgcgacgatgggatccctcgctaataacatcatggtcgtgggtgtcgtccttgcagcgctcgtcgccggatgctcatgcgggcccccgaaggtgccggccggtcccaacatcaccaccaactacaacggcaagtggctcaccgccagggtcacctggtacggtcagcccaacggtgccggcgctactgacaacggcagtgcgtgcgggatcaagaacgtgaacctgacaccctacagcggcatgaccgcgtgtggcaacgtccacatgtataacgaccgcaagggttgcggctcatgctatgaggcgagatgcaaggaaaaacctgagtgctcggtcaatccagtcacggtgtacatcactgacatgaactacgagcctatcgcttcctaccacttcgacttgagcggn

SEQ ID NO: 94538 - DNA, 521 bp, Zea mays
  unsure (1)..(521): unsure at all n locations
ngtcgtggcnntgaccatgataaaanagtacagcactgctgtaccggttcggaattcccgggtcgacccacgcgtccgcccacgcgtccgcggacgcgtgggcgatcacgacaagatggcatgcacaaacaatgcgatgagagccttgttcctcctggtcctcttctgcatcgtgcatggtgagaaggaagagtcaaagggcatcgatgcgaaagcgtccgggcctggtgggtccttcgacatcaccaagttgggcgcctccggcaatggcaagacagacagcacgaaggctgtgcaggaggcatgggcatcggcgtgcggcggcactgggaagcagacaatcctcatacccaagggcgacttccttgtcggacaactcaacttcacaggcccttgcaagggcgacgtgaccatccaggtggatggcaatctgctggcgaccacggacctaagccagtacaaggaccatggtaattggatcgagattctacgcgtggataacctggtcatcaccggcaagg

SEQ ID NO: 94539 - DNA, 535 bp, Zea mays
  unsure (1)..(535): unsure at all n locations
agtagtnntaggtccttgtccatgcataacgatttattttgcacgccgtcggaattcccgggtcgacccacgcgtccgccagagggcgccgccgcatgtccacgcggccccaaggaaggtggcggcggtgcgatttgtctctgctttggtcgcgtctgcccggatctagtcgggttccaggaggtgggggcgacgtgtgtggggcggcgacccttcgccggcgcggctcggcctcggcggcatcctggcggcagtgagcgcggcgttcgtatgtcacttccgggcgttgcgggtcctggctgggtgtccgcgcagcaggggggcatgcggccggccgtgggtcgcaggcgcgaagaaggtgctgtctggcgccccagggcagggagcggcgccgcgcgtggaggtctggaatctggtgcgcgtggggttcgcggcctccgcgtgccagcctttcgaggcgccagtaggctggtcccgggcatgttccgnggtggtgtttcgccgtgtgccgtcgtggcctgcgcagtccgccgga

SEQ ID NO: 94540 - DNA, 533 bp, Zea mays
  unsure (1)..(533): unsure at all n locations
tgttaaggtntaaatgtgttgacacagtacgatagtagtctcaaccgcttcggaattcccgggtcgacccacgcgtccgcccacgcgtccggaaacaacaagactgacagcgacgatgatgccacagctgcgtagcctcgtcgcgctggtcctcgtggccacggccatagccgccgctcccggcgttgggtttgtcgtcaccggccgcatctactgcgacaactgccgcgccgggttcgagacaaacgtgtcccacgccatccaaggcgcgacggtggagatggagtgccgccacttcgagtcgcagcaggtccacgacaaggcggaggcgacgacgggccccggcggctggtacaggatggagatcagcggcgaccaccaagacgagatctgcgacgtgcgcctgctcaagagccccgaggcggactgcgccgagatcgaccactcccgcgaccgctgccgcgtnccgctcacccgcaacgacggcatcaaacagagcggcgtncgctacgccaaccccatcgccttnctcc

SEQ ID NO: 94541 - DNA, 538 bp, Zea mays
  unsure (1)..(538): unsure at all n locations
ngtagttataggtcctgtgatagtaatgggggagaaggtggcaccgctccggaattcccgggtcgacccacgcgtccggcgcaccgcctccccgtgtcccctccttctcgcccggcaccgtcgagctcggctgtggagacagaacaaacccatcaaccatggcgaactcggcgtcggggatggccgtgagcgacgagtgcaagctcaagttccaggagctcaagtcgaagcgaagcttccggttcatcacgttcaagatcaacgagcagacgcagcaggtggtggtggacaggctggggcagccgggcgacacctacgacgacttcaccggctccatgcccgagagcgagtgccgctacgccgtcttcgacttcgacttcaccaccgacgagaactgccagaagagcaagatcttgttcatctcctggtccccggacacctcgagggtcaggagcaagatgctgtacgcgagctccaaggaccggttcaagagggagcntgagggcatccagctggagctgcaggccancgaccccaa

SEQ ID NO: 94542 - DNA, 525 bp, Zea mays
  unsure (1)..(525): unsure at all n locations
gttagtantccgtgctgaccacgaatagaagtattcgtaactctctcggaattcccggtcgacccacgcgtccgacgggattcaccacgcaggccttctcgggcctcggcaccttcttcaagctctcggcagcgtccgccgtcatgctgtgcttggagacttggtacttccagatcatcgtgctcatcgccggcctgctcaagaacccggagctctctctcgactccctctccatatgcatgaacgtgaacgcatgggtgttcatgatctccgtcgggttcaacgccgcggcgagcgtgcgggtcgggaacgagctcggcgcgggcaacccgagggcggcggcgttctcggtgctcatggtgacgtcgctgtcgttcatcgcggcgacggtgtgtgccgtcgtcgtgctgtgccttcgcgaccagctgagctacttcttcactggcggcgaagccgtggcgcgcgccgtgtccgacctcttgccgctctcngccgcaaggtggtcctaaacggatacagccagtc

SEQ ID NO: 94543 - DNA, 522 bp, Zea mays
  unsure (1)..(522): unsure at all n locations
aatgggntngtccatgatcgtactcgntcgnacgtaccggttcggaattcccgggtcgacccacgcgtccgcggacgcgtgggtttgtacttaaatttaaattgtattttaataagtaaaagaagtcaggtaattcattaaggctatgtttataccgtgtatcaatggtcaagaaggttccattggaacaattattatttatttcaagctatttcggctctttcttaatcttcaaaaagaaatgaattccgtaatggtaacacgaaaaaagaaaaaaaaaggaagtgtggaaaaaatgacaagaagatattggaacatcaatttgaaagagatgatagaagcgggagttcattttggtcatggtattaagaaatggaatcccaaaatggccccttacatctcggcaaagcgtaaaggtactcatattataaatcttgctagaacagctcgttttttatcagaagcttgtgatttaagtttttgatgcagcangtcaagggaaaaagcttcttaattgttgga

SEQ ID NO: 94544 - DNA, 517 bp, Zea mays
  unsure (1)..(517): unsure at all n locations
gttctgtactgacatagaaggtantgttatgctataccggtccggaattcccgggtcgacccacgcgtccgcccacgcgtccgcccacgcgtccgcggacgcgtgggctattttcctccttcactgcaccacttgagtttgctctacatgggaacaaatgatatgcaaatactgtttccatatgctactgcacttaagaagttagaccttcagtttacattcctttccacagaggatcattgtcagatagttcaacgctgctccaatctggaaaccttagaggtgagggatgtcataggggatcgtggactacaagttgttgcacagacctgcaagaaattgcataggctcagagtagagagaggagatgatgatcaaggaggtcttgaggatgaacaaggtaggatttcacaggtggggttgatggctatagcccaaggctgccctgagttgacatactgggcgatacatgtatcagacattacaaatgcagctttagaggcagttggtacatgcc

SEQ ID NO: 94545 - DNA, 514 bp, Zea mays
  unsure (1)..(514): unsure at all n locations
ctacgccntntcatgatagagcgtacgtactgccgtaccggtccggaattcccgggtcgacccacgcgtccgcccacgcgtccgggtgaacggtaagctaagcgaggagcctgggttggtgaacgcaagcccgtacgagaaggggtggattatcaaggtcaagctcagcgattcaggcgagctcagttcgctcatggatggtgacaagtactcgaaattctgcgaggaagaagacggtcattgaagaaatcagagggtcttctgaacaccaaggacctgtgtctcaagctctatcagtgctttctggtctggagacctgctgtgacaaatttaaattggcaaggttcattgcatggaataaattagttaggaattgccctattccaccagggctttgggaatcccgacttgtgttgtgagtggcgttgtcaaagtttgattatctctttttagttgtaatctcgtgatttccttctttttttaaaaaaaaaattatctttttgaaaaaaaaaaa

SEQ ID NO: 94546 - DNA, 519 bp, Zea mays
  unsure (1)..(519): unsure at all n locations
aggcactgctatcgttagccagttagtactgctgtaccggtccggaattcccgggtcgacccacgcgtccgcccacgcgtccgcctgcagtcatctcctccaccaccaccaccaagctcaacaacagccagctcgcgaaaataatgaagagccgcagcatggcatcatcggccgcgctcttggtgctagccctcgcgctagtggcggccaccgccccacaggtagcggaggcaaagaagaagagagcggcggagagcggcgaggcggcggaggcgaagaagatccaggacgacttctgctcgacgctgtgcgagggcaagaaggggacggacctggtcgtgtgcaaggagtcctgcgctctctcccagcagtccaacctggtgctgtacggcaggatccagtgcaagggcaagtgcaccgagcagaagggcatcacggcgccggccatgaaggtctgncaggaggaatgcgacagggcgtacgtggtgaatgcngccgangtcaccaatggcttgagcg

SEQ ID NO: 94547 - DNA, 519 bp, Zea mays
  unsure (1)..(519): unsure at all n locations
tgtctgcantgtatgatagaacagttagtactgctcgtccggtccggaattcccgggtcgacccacgcgtccgccctcgtcgtcgtctcactcaccccgccttcacgcctccctcaccaaataaggtcccggccttttccgacattcacaggggggacaggaaatcagcggccatggcctcgattccggcgacgaccttcgccgtcatcttatccgtcctcttctgtgccgcggctggcaccgccgtcgacaacgacctccccgactacgtcatccagggccgcgtctactgcgacacctgccgcgccgggttcgtgaccaatgtcaccgagtacatcgcgggcgccaaggtgaggctggagtgcaagcacttcggcaccggcaagctcgaccgctccatcgacggggtgaccgacgcgaaccggacgtacacgatcgagctcanggacagccacaaggaggacatctgcgaggtggtcttggtggagagcccgcgcaaggacttgcgaccagtgcagn

SEQ ID NO: 94548 - DNA, 534 bp, Zea mays
  unsure (1)..(534): unsure at all n locations
tgtnnatggatgctgagtttgatatgagagtatatgcaaccgcttcggaattcccgggtcgacccacgcgtccgcccacgcgtccgcccacgcgtccgtgcagaagggactataaggtgccatgataatcaaattaacttgtcaccaggacttgcaaacacaacaactaaattgaacaacagcccaagccgtaaagcgttttcagttcaggataagctctggtcaatttatgctgccggcaacactgtaccaataccatttcttaaggcaattgacatttcaccactagctctagtatcagaaaatgaatcaggaaatggcctggctgggtcaagtacaaatgatgctttggaggcagttagggagctgttcagtggtgatgggcaggcaaagaaaggacggaaagggcaaaacgaagtccctcttcctccgggtgtgcatcacaggctgatgacaagccccacattgatgaacctggcccaagctctagcttatcacaaaacgtgctatgangacatgccgctacaaagatca

SEQ ID NO: 94549 - DNA, 513 bp, Zea mays
  unsure (1)..(513): unsure at all n locations
ggagccatgcctgaaagatcgctacgcatgctgtaccggtccggaattcccgggtcgacccacgcgtccgcccacgcgtccgagggccacctggtacggtcagcccaacggtgccggcgctcctgacaacggcggtgcgtgcgggatcaagaacgtgaacctgccaccctacagcggcatgacggcgtgcggcaacgtccccatcttcaaggacggcaagggctgtggctcatgctacgaggtgagatgcaaggaaaaacctgagtgctcgggcaatcctgtcacggtgttcatcacagacatgaactacgagcctatcgctccctaccacttcgacttgagcggcaaggccttcggctccctggcaaagcccgggctcaacgacaagcttcgccactgcggcatcatggacgtcgagttcagaagggtgcggtgcaagtaccccgctgggcagaagatcgtgttccacatcgagaagggctgcaaccgcaactacctggccgtgctggtgan

SEQ ID NO: 94550 - DNA, 516 bp, Zea mays
  unsure (1)..(516): unsure at all n locations
gtcgccntgatatgtcagtncatacgcactgcctgtaccggccggaattcccggtcgacccacgcgtccgggaatacgaacgtcgtacgagaacctttctccctcctccacctttctccttttcttgccacggcaaaacaccttcgccggcgagagcatggcgatggcgtaccgtgtcctggaggtcaccctggtgtcggcaaatgacctcaagaaagtgtcgctcttctcccggactcgcatctacgccgtggcttccatctccggattcgacctccgcatcccttcccacagcacccaagcagaccacagcaacggctgcaacccctgctggaacgccgtggtacacttccccatcccggctgccgctgacacccgcggcctcgcactccacgtgaggctccgcgcncagcgtctatccctgggcgatcgcgacatcggcaaggtgtttgtgcccatcgacgacctcctgcccgccgccgacaaggttggcgatccgaggcccgtgagctacca

SEQ ID NO: 94551 - DNA, 529 bp, Zea mays
  unsure (1)..(529): unsure at all n locations
gttaagagatctgtgcctgcacttgtcnactcgcagcacgctcggaattcccggtcgacccacgcgtccgcccacgcgtccgcccacgcgtgcgcccacgcgtccgagcttaattgcgccactgctcgtggtccgtgctcttgcattgcattgcaagtcgtagttgagcagcagcaaccactgcacaggatgtcgtggcagacgtacgtcgatgagcacctcatgtgcgagatcgagggccaccacctgagctctgccgccatagtcgggcacgacggcgccgtttgggcccagagcaccgcattcccacagttcaagccagatgagatgaccaacatcattaaggacttcgacgagcctgagtttctggccccgatcggcctcttccttggacgcaccaagtacatggtcatccaaggcgagcccggcgctgtcatccgcgggaagaaaggatctggaggcataactgtgaagaagaccggacaggcgctggtgatcggcatctacgacgagcccatgaaccctggaa

SEQ ID NO: 94552 - DNA, 529 bp, Zea mays
  unsure (1)..(529): unsure at all n locations
tgtnttgcggtcctgaccacgacaaagaagtatatgcaactgcttcggaattcccgggtcgacccacgcgtccgcccacgcgtccggtgatttgaaataattgggaataaatagttcgtgaatccctgaagcgtgcatatatatattcctgccaagataaaggtaatggagtcgtcacgcaggttccagccggccgtcatcctgcttctcctgctcattgtgtccaccgatatggcacaggcaagggaatgcgagaagtacagtgagcgatttgttggggcatgcatgatcgcagacaactgcgccaatgtgtgccgcggtgagggcttcttggccggcaggtgcagcaccttccgccgccgctgcatctgcactaggcagtgctaaacaagatcgctcgatcgctcgccatgcatcgacaacctattcttaataacgttcattatctcgttcttatttatgacgaatgtcatgtatgttctggtgactgtcatgtatattctgaagactgtcatgtatcttgctcatt

SEQ ID NO: 94553 - DNA, 523 bp, Zea mays
  unsure (1)..(523): unsure at all n locations
ggttacggtgctgaacctagttgtantgcatngctcgtaccggtccggaattcccgggtcgacccacgcgtccgcccacgcgtccgcccacgcgtccgccccgtttccctctccaactccaatccatggcctgcacggatcgctccacgccggcggaggacgagcaacagcagaagcgcccgtctctcttctcgccgtaccagatgccccgcttccgcctcacccaccgggtggtgctggcgccgatgaccaggtgcagggcgcccgacgcgatcccaggccccgcgctcgcggagtactacgcgcagcggtccacggagggcggcttgctcatctccgagggcaccatcatctcgccgtccggccctgggttccctcgtgtccctgggatatacaatcaagaacagactgatgcatggagaaaggtggttgatgctgttcatgccaagggagctatctttttctgccaactatggcatgtaggccgagcttctcaccaagtatatcagcccggggctgctgg

SEQ ID NO: 94554 - DNA, 516 bp, Zea mays
  unsure (1)..(516): unsure at all n locations
gttagccnntatatgctagcttactacgtactgctgtaccggtccggaattcccgggtcgacccacgcgtccgcctgcaccaagaagtacgactgcaagatccttcccaactcgctggtgatggacttcgtgaacaacggggaggtgtccggggtcacgctgctcaactccaagttcttccacatgaacatgtaccggtgcaaggacatgctgatcaaggacgtgaccgtgacggcgcccggggacagccccaacacggatggcatccacatgggcgactcatccgggatcacgatcaccaacaccgtcattggcgtcggtgacgactgcatctncatcggccccgggaccttcaaggtgaacatcaccggcgtgacctgcggcccttgccacggcatcagcatccgcagccctaggcggtaccaggacgaagaggacgtcacggacattaacgtcaaggattgcactcttaagaagaccatggtccgcgttcggattaaagcttaccaagacccc

SEQ ID NO: 94555 - DNA, 521 bp, Zea mays
  unsure (1)..(521): unsure at all n locations
ggaaggcnctgctatgcttagtcagtaagtactgcctgtaccggccggaattcccgggtcgacccacgcgtccggtaagaagtcgtctaattcgattggatcgaattagacgccttcttcgtccctcgcttgattagcacgctaaccagcttgtaatctgcaggatctaagcaaagacttgattcagttatggacggattggtaggcctcttgaaagttcgtgtggtccggggtatcaaccttgcctaccgcgacgcaagaggcagcgatccgtatgtcgtcctacggcttggcaagaagaaactgaagacaagcgtgaagaagagatccgtgaaccccatatggcaagaggagctaactctgaccgtcacagatcccagccaaccactgaagctggaggtgttcgacaaggacaccttcagcagagacgaccccatgggagacgcggaagtggacgtggcgccactgatggangcggtgagcatgaacccgcgggaagagagtctgacgaacggcgccat

SEQ ID NO: 94556 - DNA, 535 bp, Zea mays
  unsure (1)..(535): unsure at all n locations
cgtatggaggtgcttgagccacgatatcgatagcacagtcgcaatgcgntcggaattcccgggtcgacccacgcgtccgcttcgacatcgagatcgacggcaagcctgcaggccggatcgtgctgggactgtttggggacaccgttcctaaaactgcagagaacttccgagcactttgcacaggggagaaaggaattgccaagtccggcaagcctctgtggtacaaggggtcgacgttccacaggatcatcccggggttcatgatccagggaggcgacttcaccaacggcaacggcacggggggcgagtccatctacggcagcaccatcttctccgacgagaacttcaagcacacccacgctaaagccggtacgctgtccatggctaactacgggcccgactccaatggctcccagttcttcatcaccaccgtagacgaaaaccggttgcccaagaagctggacgggcgccacgtggtgttcggcaaggtggtgaaaaggatggacggtgcgcaaggaggaggaccatcggcatt

SEQ ID NO: 94557 - DNA, 521 bp, Zea mays
  unsure (1)..(521): unsure at all n locations
cgtaggctncntgtaatcgattgatatgcatngncgtancggttcggaattcccgggtcgacccacgcgtccgccacgcgtccgcgtcgccggagacacctcgggatccgtacatgaagtacgtctcgccggaggttgtcgagacacctccgtcgggggaaggggtggcgttgagggacaaggggaagaagaaagccgtgaagctcaggattaaggttgtgaatcatcacctcaagaggctgatcagtggagcactcgcaggcacagtgtcaagaactgctgttgcacctttggagacgatcagaacgcatttgatggttgggagtaatgggaattcgtcgacggaggtgttccagtctatcatgaagcatgagggatggactgggttgttccgtggtaactttgttaatgtcatccgggtagccccaagcaaggcaatcgagctttttgctttcgatacagctaacaagttcttgacccccaaatctggggaggaacggaagatccccagtccttcttca

SEQ ID NO: 94558 - DNA, 521 bp, Zea mays
  unsure (1)..(521): unsure at all n locations
agctccttgacatgaagagaanttcatcgctcgtaccggtccggaattcccgggtcgacccacgcgtccgcgtaattaaaccatgatgatgaccgggcgaagggaacctctttaacccgaatagctgtcttccctctgcatatatacaaccgtgtttcaaacttttcctcttcaggctttttgaacccagaggcaaaaccaccctccaaaggtataatgcaaggcttgaagtatgacaagaatttgtcagattcgtaaccttggagttccctatgttgaattgcacgacccccaaggatggcatcaagttcaactgtcttgatggctgcagtcccagcttcatcttgactcgaatctttcccaatccagaagtggatatcgcatagataggcaccacctttagtacaggtcgtctgcagaactatgtatgaatctacacagtagaatttaccataatcagattttggcaatgcaactggcttaaaatcttcaatccgccatatttctggtccaactttctg

SEQ ID NO: 94559 - DNA, 531 bp, Zea mays
agttatgcaggtgctgagccagcatatgacgcacgtgcaaccgcttcggaattcccgggtcgacccacgcgtccgcccacgcgtccgggcgagggcgacggggcggcgccgacgcagtggagcatggacatgtacgcgttcatggagccgtacgtcagcaagaaccctaggcaggcgtacgccaactacagggacctcgaccttggcgtcaacgaggtggtcggcgacgtctccacctacgacagcggcagggtctggggcgagaagtactacaatggcaacttcgagaggctcgccaggaccaaggccaaggtggacccctgcgactacttcaggaacgagcagagcatcccgccattgctcaagtgatcgatgatacccggtcccatccagatcctttcgaccgcgccaagcaaaaggacgacgagtcgtacatgattctgctgattatattaattagatggatccttgcttgcatgcgttgaagccagtgctttgcatggcgaggtagctacgtagttggcatcaccc

SEQ ID NO: 94560 - DNA, 535 bp, Zea mays
  unsure (1)..(535): unsure at all n locations
agtataggtaggtccgtgtcctagtttaacgttccatgcgcatcttctnccggaattcccgggtcgacccacgcgtccgaccacgcgtccggcgatttgaaataattgggaataaatagttcgtgaatccctgaagcgtgcatatatatattcctgccaagataaaggtaatggagtcgtcacgcaggttccagccggccgtcatcctgcttctcctgctcattgtgtccaccgatatggcacaggcaagggaatgcgagaagtacagtgagcgatttgttggggcatgcatgatcgcagacaactgcgccaatgtgtgccgcggtgagggcttcttggccggcaggtgcagcaccttccgacgccgctgcatctgcactaggcagtgctaaacaagatcgctcgatcgctcgccatgcatcgacaacctattcttaataacgttcattatctcgttcttatttatgacgaatgtcatgtatgttctggtgactgtcatgtatattctgaagactgtcatgtatcctggtcatgg

SEQ ID NO: 94561 - DNA, 520 bp, Zea mays
  unsure (1)..(520): unsure at all n locations
ttcggtncttgtatagtatagtagtgcatngctcgtaccggtccggaattcccgggtcgacccacgcgtccgcgacaagatggcgtgcacaaacaatgcgatgagagccttgttcctcctggtcctcttctgcatcgtgcatggtgagaaggaagagtcaaagggcatcgatgcgaaagcgtccgggcctggtgggtccttcgacatcaccaagttgggcgcctccggcaatggcaagacagacagcacgaaggctgtgcaggaggcatgggcatcggcatgcggcggcactgggaagcagacaatcctcatacccaagggtgacttccttgtcggacaactcaacttcacaggcccttgcaagggcgacgtgaccatccaggtggatggcaatctgctggcgaccacggacctaagccagtacaaggaccatggtaattggatcgagattctacgcgtggattacctggtcatcaccggcagggggaacctgacnggcannggcccaccgtgtggagca

SEQ ID NO: 94562 - DNA, 519 bp, Zea mays
  unsure (1)..(519): unsure at all n locations
cggtncntgcatgataagaacgtacagcactgctgtaccggtccggaattcccgggtcgacccacgcgtccggtagataaaaagaacacccatttaccagggttgctcttcttcatcctgctaatccaaaccaactgacacctccttgccattgctaacgcaccatcagaagctgtcaacaaacaaaaacatcatcatctgacgattagcagccaaaagcatgtcctgctcgtctcttggtgtcagacgcggctttgttcaccgtccgtcgtggacgctctgctcagtgggcgatccaggggagaagggcacgaacccgcggccgccaaacatgggccgcatgagcgcgtcgtcgaacttgcgccagtagtagtgcaccgtgtgggttggcttgcttaggagcatccggaggctggacgggctcacaatctgtgccgaccccgtctcgatgtccgagccctggttctagatcgcgagcggncgctctagaggatccaagcttacgtacgcgtgcatgca

SEQ ID NO: 94563 - DNA, 524 bp, Zea mays
  unsure (1)..(524): unsure at all n locations
agagtggtgctgaagatggactcgatacnatagncgtgcccgtccggaattgccgggtcgacccacgcgtccgctacaagatggcgtgcacaaacaatgcgatgagagccttggtcctcctggtcctcttgtgcatcgtgcatggtgagacggaagagtcacagggcatagatgcgaaagcgttcgggcctgctgggtccttcgacatcaccaagctgggcgccttcggcaatggcaagacagactgcacgaaagctgtgcatgatgcattggcatcggcatgcggcggcactgggaagcagacaatcgtcatacccaagggagacttccttgtcggacaactcaacttcacaggcgcattgcaaggtctacgtgaccatgcaggaggatggcaatctgctggcgaccacggacctacaccgagtctggaccatggtaattggatcgagaatgtactcgtcgatcacctgcacatcaccggcaagggaaacgttgacaagcacgtcccagccgtgtagatcaag

SEQ ID NO: 94564 - DNA, 520 bp, Zea mays
gcgtcctgacatgtatggagcgctacgcactgctgtaccggtccggaattcccgggtcgacccacgcgtccgcggacgcgtgggcggacgcgtgggtgaacatgtaccggtgcaaggacatgctgatcaaggacgtgaccgtgacggcgcccggggacagccccaacacggatggcatccacatgggcgactcatccgggatcaccatcaccaacaccgtcattggcgtcggcgacgactgcatctccatcggccccgggacctccaaggtgaacatcaccggcgtgacctgcggccctggccacggcatcagcatcggaagcctagggcggtacaaggacgagaaggacgtcacggacatcaacgtcaaggatggcactcttaagaggacgatgttcggcgtccgcatcaaggcgtacgaggacgccgcctccgtgcttacggtttccaagatccactacgagattatcaagatggaggactcagccaaccccatcttcatcgacatgaagtactgccc

SEQ ID NO: 94565 - DNA, 526 bp, Zea mays
  unsure (1)..(526): unsure at all n locations
gggtagtccgtgctgacatagaatgggagtaagctcaacaccttcggattccgggtcgacccacgcgtccgcccacgcgtccgccccaaaccccgggccactgctccgctcctcctccttgccgccgtgcggttgagcgccgacgagcaagcccgacgccaccctatggctatggaggtccgccgcagggttccgccgccgcacgggagcgccccacggcgccagcaggcgaccggcggcgaggggcagcgggtgcgtgtgcaggcggnggacgcgctgccgctgccgatccggcacacgaacctcatcttctcggcgctgttcgccgcgtcgctggtgtacctgatgcggcggtggcgggagaagatccgctcctccacgccgctccacgtggtctccctcgccgagatcttcgccatctgcggcctcgtggcgtcgctcatctacctnctcagcttcttcgggatcgccttcgtgcaatccgtcgtcttccacagcgacgacgaggaggacttcattatcgact

SEQ ID NO: 94566 - DNA, 529 bp, Zea mays
  unsure (1)..(529): unsure at all n locations
agtcttgtagggcctgttgcagcngccgggactaactaccgcttcgaatttccgggtcgacccacgcgtccgccacgcgtccgcccacgcgtccgcccacgcgtccgtctagatcgcggctggccacgcatgcgatgaccatctgatatggacggaactatatattgtattcctattaatctggcattttctaagctaattgttttttttccaaataagaaaaacaagaaaaaaggacaaaagaaaaagaaaaaaaaagggcggccgctctaaaggatccaagcttacgtacgcttgcatgcgacgtcatagctcttctatagtgtcacctaaattcaattcactggccgtcgttttacaacgtcgtgactgggaaaaccctggcgttacccaacttaatcgccttgcaatacatacccctttcgccagctggcgtaataacgaagaggcctcgaccgatcgcccttcccaacaattgtgcagcctgaatagctaatgggacccctcttgaacggngcattaaacgccg

SEQ ID NO: 94567 - DNA, 533 bp, Zea mays
  unsure (1)..(533): unsure at all n locations
agtattagtggtctgttgcagcncactacgctnatacgatcggctgtcggaattcccgggtcgacccacgcgtccgctcgtcgtcgactcactcaccccgccttcacgcctccctcaccaaataaggtcccgcccttttccgacattcacaggggggacaggaaatcagcggccatggcctcgatttcggcgacgaccttcggcgtcatcttatccgtcctgttctgtgccgcggctggcaccgtcgtcgacaacgaccttcccgactacgtcatctaagggcgcgtctactgcgacacctgccgcgccgggttcgtgaccaatgtcaccgagtacatcgcgggcgccaaggtgaggctggagtgcaagcacttcggcaccggcaagctcgagcgctacatcgacggggtgaccgacgcgaacggcacgtacacgatcgagctcaatgacagccactaggaggacatctgctaagtggtctatggggaaagcccgcgcaaggactgcgaacaggtgcaagccgacagggaccc

SEQ ID NO: 94568 - DNA, 539 bp, Zea mays
  unsure (1)..(539): unsure at all n locations
aggnnaggtagcgtnctgacgcttgatctctagacagtacagtactgccgtaccggtcccggatcgacccacgcgtccgcggacgcgtgggcggacgcgtgggatccttcccaactcgctggtgatggacttcgtgagcaacggggaggtgtacggggtcacgctgctcaactccaagttcttccacatgaacatgtaccggtgcaaggacatgctgatcaaggacgtgaccgtgacggtgcccggggacagccccaacacggatggcatccacatgggcgactcatccgggatcacgatcaccaacaccgtcattggcgtcggtgacgactgcatcttcatcggccccgggacctccaaggtgaacatcaccggcgtgacctgcggacctggccacggcatcagcatcggcagcctagggcggtacaaggacgagaaggacgtcacggacatcaacgtcaaggattgcactcttaagaagacgatgttcggcgttcgcattaaaggcgtacgaaggaacgccgcttcgggcttaacgt

SEQ ID NO: 94569 - DNA, 555 bp, Zea mays
  unsure (1)..(555): unsure at all n locations
atagagatattagattttagttatnttcactgaatcatagcatgccgntccggttcggaattcccgggtcgacccacgcgtccgcaataagatggcgtgtatagacaatgcaatgagagccttgttccttttagcgctcttctgtgtcgtgcatggtgagaaggcaaagtcaaaggacaacgatgcaaaagcgtccgggcccggtgggtccttcgacatcaccaagttgggcgcctccggcaatggcaagacggatagcacgaaggctgtgcaggaggcgtgggcatcagcgtgcggcggcaccgggaagcagacgatcctcatccccaagggcgacttcctcgtcggaccactcaacttcacaggcccatgcaagggcgacgtgaccattcaagtgaatggcaatctgctggcgaccacggacctaagccagtacaaggatcatggtaattggatcgagattctacgcgtggacaaccttgtcattaccggcaagggaaaagctcaagtgcaagggccaaccctgtggaacaagaaattctggtttaaaaaata

SEQ ID NO: 94570 - DNA, 555 bp, Zea mays
  unsure (1)..(555): unsure at all n locations
tatattgtttagatgataccgggntgaagatcgagctgcatcgtatcgctatgctgtaccggattgcagggtcgacccacgcgtccgcttccaccaccgcctcctcccccgccctctcctcgtccgcgtccgtccccagtctccggcgggcgaacccgaagccgacgctggtgacgaagcgtgccgccatgagcgcggcgaagctggtgccgagcgacatggcgagcgcgccggccatgaggaaggcgttggcgagcacgatggtgcggcggcggcccaggtggtcggccacccagccggcggcgaggatggacgcgaccatgaacacgttcatggaccccgccagcacctcgacctcgccgtcagtgagccccacgtnctcccgcatgaacagctccgcgtcgctcatcagcgtcaggtctgcagggcacgtatatggatcggtcggaagcatgagtttagcacatcgatctctcttcgtgattaattggatgcatggtgggtaagaacggttctacaggaagcaatctttctatggtggtggttcacccatcc

SEQ ID NO: 94571 - DNA, 560 bp, Zea mays
  unsure (1)..(560): unsure at all n locations
ttatgtataactcatggagatagggtcacgtgactgcncctgctcagcncgctacgtcatgccgtaccggttcggaattcccgggtcgacccacgcgtccgcccacgcgtccgcccacgcgtccggttctagatcgcgagcggccgcggccgccgagcgggccgtccccgcctcccccaccgggcacgacgagaagcgctgcagcttcatcacgccctactcagaccccctgtatgtcgcgtatcacgacgaggagtggggagtgcccgtgcacgacgacgagttgctattcgagatgctcacactgtctggcgtgcaagtcggggccgactggacttccatcctcaagaaaagacacgtgtacagggaggcgttctccggcttcaacgtggatgcggtcgccaagtacaccgagaagcagatggcgtcgctgagcgccgactacgggctggaattgggcaccgtcagaggaaccggcaacaacgcctggcggataatcgaagtgccgagggacttgggctcgcttgacanggacttgttggccgttcgtgaacaacagg

SEQ ID NO: 94572 - DNA, 531 bp, Zea mays
  unsure (1)..(531): unsure at all n locations
gtgagcgtgctgtcctgcacgcnagtacgtcgtgcctgtaccggttcggaattcccgggtcgacccacgcgtccggtggtatgcgtcaaagaagcattggcttgcaaacaatgtcctgggattggctttctgtattcaggggattgagatgctgtcattgggatcatttaaaactggagccattctcttgggtggactttttgtgtatgacattttctgggtgttcttcactccagttatggtcagtgtggctaaatctttcgatgctccaataaagcttctgtttccaactgcagacgctgaacggtcattctccatgcttggccttggtgacattgtaatacctggtatattcgtcgcacttgccttgcgttttgatgtctcaagaggtaccaagaagcgttacttcaacagtgcattttttggatacgctgggggtatgactgtgaccatcggtgtnatgaactgggtttaagcggcgcagtctggtctactataccttgttcctgggtgtaattggttttggccttt

SEQ ID NO: 94573 - DNA, 544 bp, Zea mays
  unsure (1)..(544): unsure at all n locations
tgtagatttacgggtggttgcgcccagcncactangnccatncntacnactctnccggttcggaattcccgggtcgacccacgcgtccggcgacgcctgcgacggcaaggactcgggctccgtccccatggactccacctggcccaacgacatggacgggagctacttcggcctggtgctggagaagaagatgcccctcaccatcgaccgcctgctggggatggacaagacgaccgagcccatagtcaaggccatgtcggacaagactaccgacttcgtccccatcttcgccaaggccatggagaagctcagcgccctcaaggttctcacggggaaggacggcgagatcaggaagacgtgctccgagttcaacaacccgcagaacaccagcggcagcacgtcggtgatacggatcagctccatcgacgccgaccagatggccggnctgtcgcagccagggtcgacgtccaggaaagtgggcggccgctctagaggatccaagcttacgtacgcgtgcatgcgacgtcatagctcttctatagtg

SEQ ID NO: 94574 - DNA, 534 bp, Zea mays
  unsure (1)..(534): unsure at all n locations
ggtttatgctggccttcgnctgcaccccgctcacatcacnagtgatgtaccggttcggaattcccgggtcgacccacgcgtccgcccacgcgtccgcccacgcgtccgcccacgcgtccgcccacgcgtccgcccacgcgtgcgcagggaacaagctgcgattggcaggagtactggacagatggataacgtgatatcacaagctcaggcaacacttggttctctcatgacccaacggtcaacattcggtggcatcactacaaagataagcaacgtcagcagccagcttccaacaattaaccacgtcctctcatcgatcagaaggaagaaatccatggataccatcattctttcgctcgttgcatctgtctgcacgtttctcatcttcatctactggctgtcgaagtaggtttaccagagcaaagatattacagtgttgtaagcttgggaccacaccaccagtaccggtacagatagtcttcattggtgtttgtacaatattattggttgattgaatgctgttacgattcgggc

SEQ ID NO: 94575 - DNA, 539 bp, Zea mays
  unsure (1)..(539): unsure at all n locations
agtagttcgacgtnctgatcaccgaacaaagactcatcctacnactgtaccggttcggaattcccgggtcgacccacgcgtccgccggttatcccccggcctccacctgaccgctaccaccacccgggacgtcttgcatggcctcctcatagaataagctctatctcaccgcaacaactcctcattacaatccttcaagagagcagcactacactacactacattagagagaggtcgagcgcccctcctccgatccgccggcccgccgagagctagctgctgatcggtcgaggagagtcatggcgacgtcgacgatgcgcgttgccgccggcgtgctgctggtcgtgtcggcgctggcgaccttggcccgggccgaggacccctacctgttcttcgagtggaaggtgacgtacgggaccaggtccctgctgggagtgccccaagaggtcatnctcatcaacngcgaagttccttgcccccaggatcaactgctcctccaacaaacacatcgtcgtcaacgtcttcaaccagctcgacct

SEQ ID NO: 94576 - DNA, 560 bp, Zea mays
  unsure (1)..(560): unsure at all n locations
attggagtatttgttagattgggtcgttgtgcatgatctagtcgtagagcactgccgttcggaattcccgggtcgacccacgcgtccggttctcaaaccaacctaggcaattcgccgcagcctctcaccctcgcgagtcccgacctgccgcagccgccgcacagatggcacccaaggcggagaagaagccggtggccaagaagcccgcggaggaggagcccgcgacagagaaggtggagaaggctccggcggggaagaagtccaaggccgagaagcgcctcccggcgggcaagtccaaggagggcggcgagggcaagaaggggaaaaagaaggcgaagaagtccgtggagacctacaagatctacatcttcaaggtgctgaagcaggtgcaccccgacatcggcatctcgtccaaggccatgtccatcatgaactccttcatcaacgacatcttcnagaaactcgcgggcgagtccgncaagctggcgcgctacaacagggagcccaccattnaccttccgcgagattccgaaccttggggcggcttgtgcctcccggga

SEQ ID NO: 94577 - DNA, 538 bp, Zea mays
  unsure (1)..(538): unsure at all n locations
atgagaatttcttgactcgaaaggagatgtatgctctaccggttcggaattcccgggtcgacccacgcgtccggaccaggagctcgagaatgccaagagcagctcaatctgtggagaagagctacgagctgcctgatggtcaggtgatcaccattggggcagagagggttcaagatgcccctgaggggtcctctttccagcccttccttcattggtatggaagctcctggcatccatgagaccacctacaactccatcatgaagtgcgatgtcgacatcaggaaggacttgtatggtaacattgtgctcagtggtggcacgaccatgttccctggtattgcggaccgtatgagcaaggagatcactgcccttgcgccgagcagcatgaaaatcaangtggtggcaccgnctgagaagaaatacagtgtctggataggaggatccatncttgccttcctgagcactttcaacaaatgtggatctcaaaagctgagtatgacgagtcaggacctgggattgtcattggaatgcttttaac

SEQ ID NO: 94578 - DNA, 552 bp, Zea mays
  unsure (1)..(552): unsure at all n locations
tattaattaaatggtatatagaagtggctgagcctacgtttattgcatngctcntccggttcggaattcccggctcgacccacgcgtccgcccacgcgtccgctctctcgcgcgcgcattacttgcacgtacgagctcagaaggaaggcagaggcanaagcagccatggcgaactcgtcgtacggccttgcggtgaacgacgagtgcaaggtgaagttccaggagctgaagtcgcggcggagcttccggttcatcgtgttcaggatcgacgacacggacatggagatcaaggtggaccgtctcggcggaccgaaccagggctacggcgacttcaccgacagcctncccgccaacgagtgccgctacgcgatctacgacctcgacttcaccaccatcgagaactgccagaagagcaagatcttcttcttctcctggtcccctgacactgcacgcaccaggagcaagatgctgtaccccaggtccaaggacaggttcaagaaggaactggacggcatccaatgcgaaatccaggcaacggacccaaggagatat

SEQ ID NO: 94579 - DNA, 557 bp, Zea mays
  unsure (1)..(557): unsure at all n locations
atattttggattgagcgtcacctgcctgagcctgcactgttccgtacagctaancccttcggaattnnnngtncnggctcgacccacgcgtccgcgcacgggcagctggcgctctcggaggacggcgtggagatgaccttcgccaccaactgcctgggccacttcctgctgacgaagctgctggtggagcggatggcggagacggcggcggccacgggcgtgcagggccgcatcgtgaacgtgtcgtccagcgtgcacggctggttcgccggcgactgggccgagtacctgcacctcgtcacccgccgcaagataccctacgacgcgacgcaggcgtacgcggtgtccaagctcgccaacgtgctgcacacccgcgagctcgccgcgcgcctgcaggaaatgggcgccaacgtgacggccaactgcgtacacccgggcatcgtcaggacgcgccttaaccgcgaccgtgacggcgtcctaaccggagagggaactgacagcgcgcagtcagcttgctgactcagtcctctggaatctgaatgggagggccaagtaaa

SEQ ID NO: 94580 - DNA, 552 bp, Zea mays
  unsure (1)..(552): unsure at all n locations
aataattatatggtttatagattgcgctgaccctgcacgtccagtatgncatgccgtaccggttcggaattcccggctcgacccacgcgtccgcccacgcgtccgaaaatggcaaaggctctcctaggtggcctatcggcgatcctcgtcgtggcggtggtcgtcggtgtggtcgccaccgtcacccgctccggcaagaaggccggcgacaacttcacggtcccgggggaggcttcccttgccacgtccggcaagtcggtcaagtccctgtgcgcgcccaccctatacaaggagtcgtgcgagaagacactgtcccaggccaccaatggcaccgagaaccccaaggaggtgttccacagcgtggccaaggtggcgctggagtcggtccagacggcggtcgagcagtccaagtcgatcggcgaggccaaggccagcgactacatgaccgagagcgcgcgcgaggactgcaagaagctcctggaagacgccgncgacgacctgaggggcatgctcgaaatggccggcggtgacatcaaggtgcttgtcaaccgt

SEQ ID NO: 94581 - DNA, 529 bp, Zea mays
  unsure (1)..(529): unsure at all n locations
ggttagttaaacgcctgtcccctcacccgccacttagnattgccgtaccggttcggaattcccgggtcgacccacgcgtccgtgcctttcagcagcatgatccaggagatgaagggcaagatcggcgccatctggttgcgcggcgtgctacggttccggccggggggccacgccggggccgggcgagcgccggcagccgagccggacgaggcgtcgcgggagggctgctgggcgcagttgcctttcgagcttctacgtatggtgctggtcagggtcgaggaccaggagtcacggtggccggcccgcagcgccatcgtggtgtgcgcctgcgtctgccgctgctggagggccgccgtcaagattgtgcgcgtgccggaggcttctgggaaactcaccttccccatctctcaagcagccttggccaagggatgccactgtcaaatgtttcatcaggaaggaccgggctgctcactcgtattctgtgtgccttgaatcactgatgggttagctgaggatgggaatttctact

SEQ ID NO: 94582 - DNA, 534 bp, Zea mays
  unsure (1)..(534): unsure at all n locations
agtntatggtcnttcgactggacaagacactccgcatgctcgtaccggttcggaattcccgggtcgacccacgcgtccggaaggacgtcacggacatcaacgtcaaggattgcactcttaagaagacgatgttcggcgtccgcatcaaggcgtacgaggacgccgcctccgtgctcaccgtctccaagatccactacgagaatatcaagatggaggactcagccaaccccatcttcatcgacatgaagtactgccccaacaagttgtgtactgccaacggcgcctccaaggtcaccgtcaaggatgtcaccttcaagaacatcaccggcacctcctccaccccggaggccgttagcctgctctgcactgccaaggtcccatgcaccggcgtcaccatggatgacgtcaacgtcgagtatagcggcaccaacaaccagaccatggctatatgcacgaacgccaagggcagcaccaaaggttgcctcaaggagcttgcatgcttctaaaaccttaatcgactgacccatttctctt

SEQ ID NO: 94583 - DNA, 549 bp, Zea mays
  unsure (1)..(549): unsure at all n locations
aataatataatggttatgtatgtgctatcctagtttatctcatngctgtaccggttcggaattcccgggtcgacccacgcgtccgcatatttgaaacagttaagaattcatatataagagtgcatatatatatatataattctgccaagacaaaggtaatggagtcgtcacgcatgttccagccggccatcatcctgcttctcctgctcattgtgaccaccgatgtggcgcatgcggcgagggaatgcgagaaggacagcgagcgattccttggggcatgcatggcgtcggacaactgcgccaacgtgtgccgcggtgagggcttctccggcggcaggtgcagcaccttccgccgacgctgcatctgcactaagccgtgctaaattaacctactcccggcagttcgatggtggacgtttattctatttattggcttacttgatttttttttcccctaacaataagaaaaacgcacgtgcttcaatgtacgttgtgtngaaaatgctnttcttgctggcttcatttgctgattactgatgagtggtaagg

SEQ ID NO: 94584 - DNA, 539 bp, Zea mays
  unsure (1)..(539): unsure at all n locations
atgatccgttnctgatgccagcttgcacagnatngccgtaccggttcggaattcccgggtcgacccacgcgtccgggtgctcagctgcatccgccaccccaacatggtgctcctcctcggcgcatgcccggagtacggctgtctcgtgtacgagtacatggaccacggcagcctcgaggaccggctgttccgtcggggcggcacgccgccgctcgcgtgggcccagcggttccggatcgcggcggagatcgcgacggcgctgctgttcctgcaccaaacgaagccggagccgctggtgcaccgggacctgaagccggtcaacatcctgctggaccgcaactacgtgagcaagatcagcgacgtcgggctggcacgcctggtgccgncgtcngtggcggacaacgtgacgcagtaccggctgacggcaacggcgggcaccttttgctacattaaccccgagtaccagcagactggcaagctgggcgtgaagtcggacatctacttccttggctggcttctgcttgaggtgggaaccggcg

SEQ ID NO: 94585 - DNA, 543 bp, Zea mays
  unsure (1)..(543): unsure at all n locations
aatctgtttcggaaaagcatangctctacgctttatagcatgctcgtaccgtctcgaattcccggctcgacccacgcgtccgcccacgcgtccgcggacgcgtgggcggtcgcgtgggatcgaagctcagcttggtgacggatgcatcttccctcagaaactcggaaccccttttccacaaaatttcaaggaagttgtgaagacaatctttaagcgacttttccgtgtttatgctcatatttaccactcacattttcaaaagattgtcagccttaaggaggaagcacatcttaacacttgcttcaagcattttacattgttcacttgggaattcacgttgattgacaaggctgagcttgcaacacttattgatctaattgaattcattgtgtcagtttgttggcatgacatcaatgattattaggatcattgtggtatttttggagatgcaggagttgacacctaagggtcagtttaagggtgagacttagatgggcaacagtttttgtttggtatttatgagggttgtgactttacagtgtc

SEQ ID NO: 94586 - DNA, 528 bp, Zea mays
cgaatccggtccttcgcatgagccagacatatagcatgctcgtaccggttcggaattcccgggtcgacccacgcgtccgcccacgcgtccgaataaagcatcgatcacgacaagatggcgtgcacaaacaatgcgatgagagccttgttcctcctggtcctcttctgcatcgtgcatggtgagaaggaagagtcaaagggcatcgatgcgaaagcgtccgggcctggtgggtccttcgacatcaccaagttgggcgcctccggcaatggcaagacagacagcacgaaggctgtgcacgaggcatgggcatcggcatgcggcggcactgggaagcagacaatcctcatacccaaaggtgacttccttgtcggacaactcaacttcacaggcccttgcaagggcgacgtgaccattcaggtggatggcaatctgctggcgaccacggacctaagccagtacaaggaccatggtaattggatcgagattctacgcgtggataacctggtcatcacccgcaagggaaacttt

SEQ ID NO: 94587 - DNA, 577 bp, Zea mays
tatgatagataatttgtttataatgtcctgatgccctgcactgtttcgctcagctataccggttcggaattcccgggtcgacccacgcgtacgcgatcaagcttgcatacagctagtacgttgaacctatgagtgcttgtagaaagctattgcattggttaaacctggagttcggatccgagaggtctgtgaaatcataaatagacatgcttcgatgtcaggtttatctgtagggaaatcctattgcggccatggcataggggaactgcttcactgtgccccaaacattcctgattattcaaaaaacactgctgaatgtatcatgaaggctgggcagacatttacaattgaaccagtgtataatgcattctcaatcatcacgccacagacgatcattccaaacagcctgatctagatcgacgagcggacccctcttagaggatccaagctttacgtacgcgaagcttgctgacgtattagctattcagatagaaaagagcctaaattcaatttacttgccctttagttctacaacaggcctaacttggaaagcccctgtgggctacccaaagtaaac

SEQ ID NO: 94588 - DNA, 580 bp, Zea mays
  unsure (1)..(580): unsure at all n locations
tttgaataattttgttatcgtatccgctgctgagccctacncgtagttgcatngncantactggtctcggaatttcccgggntcgactccacgtcgtctcgacatgcctcggcttcgtttgggatccccgcgtgtgagccttctagttccgccaagccgtgcgtactcggcgtcgcggatctcgggactcgaagatgactgtgagtccctggtgccggaacaaggccggggatggccagcatcaaggagatgccggtggtgcaggacgggccgccgccgggcggtttcgcgcccgtgcgcttcgcccgccggatccccacctcggggcccagcgccaccgccatcttcctcaccaccttcggtgctttcgcatatggcatgtaccaggtcggtcaggggaacaaggtccgtcgggcgctcaaagaagagaaaattgctgctcgcagtgctatactgccgatgctccaagcagaagaggatgaaagatttgtcatagagtggaagaagtatcttgaggaagatgctaggatcatgaaagatgttcagggtggaaggtctgccaaagcgtgtacaattccgt

SEQ ID NO: 94589 - DNA, 552 bp, Zea mays
  unsure (1)..(552): unsure at all n locations
tatagataatttaggttaggttgccantgngactgtcacgccgtattgcattgnctgtccggttcggaattcccgggtcgacccacgcgtccgaattaaaattgttcattaggattaatctattctaagcactaaataatttcggaaattcgtaacttaataatcgtagctccgaatttagtggttcttatttataggatctcgttatgcagcgtagaatattattatatagtttattcctatgtttggtgtaatgttaattttgcctataccatgtttgtctgtattgctacgtttagcagtgaggacacatgtcatctgaagagcaagttggtacctggaatctcaagtgctaggcaagttgtgcccttgatcacttttttttacccagtcatgttctgattaatcataatgatctgcataggttaattttgatgggacccaacaagttaccctaatttggatatctttataccttgacttcactaaactttttgggtagaacctgctattgctttatgtggtttggggtttaaagattacacttttcat

SEQ ID NO: 94590 - DNA, 521 bp, Zea mays
tggtatggtcttggcctacttaagacatactgcattgctctaccggttcggaattcccgggtcgacccacgcgtccgcccacgcgtccgcccacgcgtccgcccacgcgtccgcgatcacgacaagatggcgtgcacaaacaatgcgatgagagccttgttcctcctggtcctcttctgcatcgtgcatggtgagaaggaagagtcaaagggcatcgatgcgaaagcgtccgggcctggtgggtccttcgacatcaccaagttgggcgcctccggcaatggcaagacagacagcacgaaggctgtgcaggaggcatgggcatcggcgtgcggcggcactgggaagcagacaatcctcatacccaaaggtgacttccttgtcggacaactcaacttcacaggcccttgcaagggcgacgtgaccatccaggtggattgcaatctgctggcgacacggacctaaccagtacaagaccatggtaatggatcgagatttaccggtggataacctggtcatcaccg

SEQ ID NO: 94591 - DNA, 534 bp, Zea mays
  unsure (1)..(534): unsure at all n locations
agataagtggtcctgtcgcctgcatcttgctcccatacncacgactgctaccggttcggaatacccggctcgacccacgcgtccgcaattactatgtacgagatacaatgagtggaacatgaaaagcacgttctccgtgggaatttggatatggttgaacttccacggacaacgatttccttggaatcgccaccggcaagacgaatccacagattgcattcatccgaggggcgattaaaatcaaggggagcatcagtgcggcgcagaagttcacccctgacatcttccccaagcctgccaagctgtagaacgttagattgtattacttggtcgaggtgaataataatgtttgcaagcttcaattactatgtacgagatacaatgagtggaacatgaaaagcacgttcttcgtgggaatttggatatggttgaacttccacgtagatcaaaaatagaaattcacttttacaatggtacaatcttgctttcctcttttaacttatgtataaatataaaaaagggccgcccgtttaa

SEQ ID NO: 94592 - DNA, 531 bp, Zea mays
  unsure (1)..(531): unsure at all n locations
cggtggagggccgttcaactgataagaagactcagnatctgccgtaccggttcggaattcccgggtcgacccacgcgtccgatcctctccctctccgtcccccaagcaaagaaaagaagctagctagctaggcgtagaacgaatgacgacgcagggcggcaacaggtcgacgacgacgctggtcgccgccgtggccgtagttctggccgtggcggcggcgtcgtccctggccggcgtggcgtccgcggagaaggcgggcgggttcgtggtgacggggcgcgtgtactgcgacccctgccgcgccgggttcgagacgaacgtgtccaggagcgtggccggcgcgacggtggaggtggtgtgccggcacttcggcgcgtccaaagagacgctcaaggcggaggcgacgacggacgacagcgggtggtacaagctggagatcgaccaggaccaccaggaagagatctgcgaggtggtgctggcctcgagccccgaccccgggtgcccggagatcgaggagtttcgcgaccgggc

SEQ ID NO: 94593 - DNA, 555 bp, Zea mays
  unsure (1)..(555): unsure at all n locations
taatgcagagtagnaagttagccagctgctgaacctccactcttagctacgccgtaccggttcggaattcccgggtcgacccacgcgtccgcccacgcgtncggataaggcgaacgatgtccacctagaaaccctagttcgaacgcgccgncgtcaccgtcgtcgctcgcgctctccgcccggatcggagcgagagtaggggcgtgtcggcggtgaaagcgactgcgtcagccatggcggacgaggagcattcggagaggagagaggaggcctccgagcttgcccccttcgacccgaccaagaagaagaaaaagaagaaggttgtcatccaagaaccttctgatgaagtggacaagcttgcagagaagacagaaacactggcagtcgcagaacccgctgaacttaacttcactggaatgaagaagaaaaagaagaagccggtggatcttgattcaactcttgatgagcttggagatggggaggacactcaagatgatcaagctgtagaggaacacggggaaggcttgtgctgggaaggggccttacttccccttg

SEQ ID NO: 94594 - DNA, 561 bp, Zea mays
  unsure (1)..(561): unsure at all n locations
tatgtgtgattattatatatagtaccgtcgctgagcctacctgtaacatgtattgctatancgcttcggaattcccgggtcgacccacgcgtccgcggacgcgtgggcgctggggcagacgccgacggaggaggagctgcagggcatggtggacgaggtggacgcggacggcagcggcgccatcgacttccaggagttcctcaccctgatggcgcgccagatgcgggaggccagcggcgccgacgaggaggagctgcgcgaggccttccgcgtcttcgaccaggaccagaacggcttcatctcccgcgacgagctccgccacgtgctccagaacctcggcgagcgcctctccgacgacgagctcgccgagatgcttcgcgagggcgacgccgacggcgatggccagatcaactacaccgagttcaccaaagtcatgctcgccaaacgaaagaaccaagaactggaaaaccattggagtgagtcatctcactccaagaaactctgccccttctggacaattccttggaaacttatactaacttggcaacttaaagttttagc

SEQ ID NO: 94595 - DNA, 559 bp, Zea mays
  unsure (1)..(559): unsure at all n locations
tatcnattagatgatatattataaatgtcgntgccgcctccagtccntagtacagcagtactggntcggaattcccggctcgacccacgcgtccgcccacgcgtccggtggcatcaacggggtggtcatgccggngcagtgggagttccagggcggaccgtccgtcggcatctcttcgggcgatcaggtgtgggttgctcgctacattcttgagaggatcaccgagatcgccggcgtggtggtgacgttcgacccgaagccgatcccgggcgactggaacggcgcgggcgcccacaccaactacagcaccgagtccatgaggaaggagggcgggtacgaggtgatcaaggcggccatcgagaagctgaagctgcggcacaaggagcacatcgcggcctacggcgagggcaacgagcgccggctcaccggcaggcacgagaccgncgacatcaacaacttcagctggggagtcgccaaccgtggcgcgtcngtgcgcgtgggccgcgagacggagcagaaacgctagggctaatttaaggacttccggccggggtcaaac

SEQ ID NO: 94596 - DNA, 561 bp, Zea mays
tattaacgttaatgtttaatagtaaatgtcctgaagcatgagaagcacagtattgcagagctctaccggttcggaattcccgggtcgacccacgcgtccgaggagttcgagaagaactttgctgttaagttcccagcttgctcaatcgccgcgaagcaccatattgaccagagcacaacaattcttgacgtgcaaggagtggggatgaagcaattcagtaaagctgcaagggagctcattggcatgcttcagaagattgatggtgacaattatccagagaccctgtgccgcatgttcatcatcaatgcaggccagggattccggcttctatggggcaccgtcaagagctttcttgacccaaagaccactgcaaagattcatgttctgggtaacaagtatcagagcaagcttctcgaggtgattgatgctagtgagttgccagaaatttttggtggaacctgccgatgtgaaggtggttgcatgaaagctgacaaaggcccttggaaggaccccgaaatcatgaagatggttcaaaagtgtgatgggaagtgtgggaccctc

SEQ ID NO: 94597 - DNA, 528 bp, Zea mays
  unsure (1)..(528): unsure at all n locations
cgtatggagacctttgactgatacagacatactgcattgccgtaccggttcggaattcccgggtcgacccacgcgtccggtgccgccgccatggctgctctgggccgtggcctgcccctcctcctcctgctgctcctgctcgccgtatcgggggccgccaacgccgcggcggcgcccggcggcatgtccatcatcacctacaacgaggagcacggcgcgcgggggctggagcggacggagccggaggtgcgggccatgtacgacctctggctcgcggagcacggccgcgcctacaacgcgctgggcgagggcgagggcgagcgcgaccgccgcttcctcgtcttctgggacaacctccgcttcgtcgacgcgcacaacgagcgcgccggcgcccgcggcttccgcctcgggatgaaccagttcggcgacctcaccaacgacgagttccgcgccgcgtacctcggggccatggtccccgncgcccggcggggagcccgcgtgggggagaggaccggcacgaccgcgccg

SEQ ID NO: 94598 - DNA, 534 bp, Zea mays
  unsure (1)..(534): unsure at all n locations
acgtnatggagggcctgttcctagtttaagggattatatcattgctctaccggttcggaattcccgggtcgacccacgcgtccgcgagatttgaagtcatctaatctgctagtcgacaagaactggactgtgaaggtggcggactttggcctttcacgtctcaagcgcgaaactttcttgacaacaaaaacgggaaaaggaacaccgcaatggatggcgccagaggtgctgcgcaacgaaccttccgatgaaaagtctgatgtgtatagctacggggtgatcctgtgggaactcgttactcagaagataccctgggaaaacctgaactcaatgcaggtcattggcgcagtaggttttatgaaccaaaggttggatatcccaagcgaagtagatcctcagtggagatcaattatcctgaactgttgggaaagcgacccgcagcaacggccgtcgttccaagagcttctggaaaggctccgcgagcttgaaaggcgttacgccatccagcaacggaacgcgaagaacagcgtcgag

SEQ ID NO: 94599 - DNA, 536 bp, Zea mays
  unsure (1)..(536): unsure at all n locations
agtntatggaggtcctaaccactganatgaggcacttagtactgctcgtaccggtccggaattcccgggtcgacccacgcgtccgcccacgcgtccggccggagctcgacgaggacgaccgacgacgcacgcagagatccggcgtactgcaaattttgaaaactgaactgtaagatggcatcagcagagctttcccgtgaggaaaatgtgtacatggcgaagctcgccgagcaggcggagaggtacgaggagatggttgagttcatggagaaggtagccaagactgttgactcggaggagctcactgtggaggagcgaaacctcctgtctgttgcatacaagaacgtcattggagcccgccgcgcctcatggcgcatcatctcctccatcgagcagaaggaggaaggccgaagcaatgaggaccgagtaacactcatcaaagattatcgtggcaagattgagactgagctgaccaagatctgtgatggcattctcaagctgcttgagacccatcttgtgccgtctttncactggcc

SEQ ID NO: 94600 - DNA, 546 bp, Zea mays
  unsure (1)..(546): unsure at all n locations
aattttagatattatatatagccgttgcactgccaggctttatgcacgncgtaccggttcggaattcccgggtcgacccacgcgtccgcggacgcgtgggcggacgcgtgggaggaaacggcagtgaagtcgccggcgccgccgcgacaggaggaaggagggagtagcagcggcaggggaggtccggcgatctcggctgctgtggcgcggtaagggaggaagcggagccgcgacaggatgcactcgtttgggcaccgcgccaacgcggtggcaacgtttgcggtcaccatactggccgcgatgtgcttcgccgtctccttctccgacaatgttaacaccctgacacccaccgcatccgtcaagatcttgaatataaactggttccagaaggaggccaacggcaatgacgaggtcagcatgaccgctgaacatttcgggtgacctttcatctcttttcacgtggaacacaaaacaagtatttggttttgtggcaacagagtatgagactcgacaaaagctttaaatcagtttgctcttgggaaggct

SEQ ID NO: 94601 - DNA, 537 bp, Zea mays
  unsure (1)..(537): unsure at all n locations
ggganatggccgtcctnttgcatgacatgggggggttatagcattgctctaccggttcggaattcccgggtcgacccacgcgtccgcccacgcgtccggatggttcaaggcaagttcaggcacctgccggtggtggataacggcgaggtggtggccatgctggacatcgccaagtgcctctacgacgccatctcccggatggagagggcgtccgagaaggggaaggcggcgatcgccaacgtcgcggctggcgacgacaagtactccatcgtcgaagctctcaaggagcaaatgttcaggccctgcttgtctgccattattggcgaagactcaacagtcgtcatggtgtcgcctggggattcccgccttgcagctaccaagaaggatgtggaagcgcatgcgaacttaatcggagtggccgtcgggaaccaagcgcaaggcattccgactttaaaggaaatcttggagccccctgatcgttagaaccttgtcangggacccaaattccgtatgacaaggtaatgacccctgaccttc

SEQ ID NO: 94602 - DNA, 530 bp, Zea mays
  unsure (1)..(530): unsure at all n locations
agtaaggagggccatccatgagtcagctcgtaagtactgccgtaccggttcggaattcccgggtcgacccacgcgtccgcccacgcgtccgtctagatcgcgagcggcgcccttttttttttttttttattccgaaggacccattttattccggaaacagatgcccaggctttctccgggtcctctgatagaagcaaacataggttcacagttcagacttgacttacaaacagtcgcacaaaacatacagcactctgttctaactcgggacacgaaatcctctctttctctctccctctccctctccgctcactgcctcaatctaggaagactgccggagctccgggcgcacaaagtcggcgttggcaggcacagagatgtcgacggtgggcctcagctcggcgcagacctcaatggcaccatggacagggtccgacaagaagttgctgatgaggtcctggttgatcggggcgtccttgtccaccgncacaaaggcctgctgcgtcaggatgtaatcgaagcgaggcgcc

SEQ ID NO: 94603 - DNA, 551 bp, Zea mays
  unsure (1)..(551): unsure at all n locations
tattgggtatgtatagttggtccgatcgttgagcatgccacgcccgctacgcataccgtccggattccgggtcgacnacgcgtccgatcgaggagactacctacggccatggctaggagaaggcttctcgcgctcgcctcccggctctacgggaggcctcaggcgacgcagccgtggcggcgacccccgccccggtttctctcctcagctgcgtccggcaccctcgatcacctgaagtcgccgcctttcgcgcgtccggctgcccggaaccccgcctcctatccatgggatcgattcggaggagggcagaagaggaccatgttcatccagacacagtcgaccccgaacccgcagtcactcatgttctatcctggaaagccagttatggagattgggagctctgatttccctaatgctcggactgcgatgacatcccctttggctaagtcgctttttgctattgatggagtaaccagtgtattctttggatctgattttgtaactgttacaaaatccagagaaaccttcctggaatggcctaaaacctgggt

SEQ ID NO: 94604 - DNA, 538 bp, Zea mays
  unsure (1)..(538): unsure at all n locations
agtntatggccggtcctgttgatcgatgtcctagtccctccgtaantctgtnccggtttggaattcccgggtcgacccacgcgtccgcccacgcgtccgcccacgcgtccgcggacgcgtgggattgctggagctggtgagcttcatcttgagatttgcctgaaggatctgcaggaggacttcatgggtggtgctgaaattattgtttccccacccgtcgtctccttccgtgaaacggttcttgagaagtcctgccgtactgtcatgagcaagtctcccaacaagcacaaccgtctgtacatggaagcgcgccccttggaggagggtctcgctgaggccatcgatgacggccgtattggcccacgtgatgatccgaaggtgcgctcccagatcctctctcaggagtttgggtgggacaaggacctggccaagaagatttggtgttttggacctgagaccactggcccgaacatggttgtagatatgtgcaagggaatgcagtatctcaatgaaaacaaggattcntgtgtggctcgtn

SEQ ID NO: 94605 - DNA, 504 bp, Zea mays
agggtacttgggttagccgtagagtcgctctaccgtccggaattcccgggtcgacccacgcgtccgcccacgcgtccggcctttgtgagctcgcgagtggagagaaaaaaaggagcagcgaagagcgaacgaccgagatgctggagaagctgtgggacgacgtggtggccgggcctcgcccggagacaggcctcgagaagctccgcaaggccaccaccgcccgcccgctcgtcgtcgtcgacaaaggtgcgttttgttgcagtcgatgccgtcgaccccgacgacgccggtgacgccttctacgacgacgacgccgcgcggcgccagcaacgtgtggcgcagcgtgttccacccggggagcaacctggccaccaagggcatgggcgccaacctcttcgaccgtccacagtccaactcctccaccgtctacgactggctctacagcgacgagaccaggagcaaccaccgttagatcggaacggacgaatcgggtggtagtggtgg

SEQ ID NO: 94606 - DNA, 509 bp, Zea mays
  unsure (1)..(509): unsure at all n locations
attgtgctgagcccttacctttgnagtcactaccggtccggaattcccgggtcgacccacgcgtccgcccacgcgtccgcggacgcgtggggcatttcgagtaacacagttgagcacgacgatgggatccctcgctaataacatcatggtcgtgggcgccgtccttgcggcgcttgtcgtctgcgggtcgtgcgggcccccgaaggtgccgcccggccccaacatcaccaccaactacaacggcaagtggctcaccgccagggccacctggtacggtcagcccaacggtgccggcgctcctgacaacggcggtgcgtgcgggatcaagaacgtgaacctgccaccctacagcggcatgacggcgtgcggcaacgtccccatcttcaaggacggcaagggctgtggctcatgctacgaggtgagatgcaaggaaaaacctgagtcctcgggcaatcctgtcacggtgttcatcacagacatgaactacgagcctatcgctccctaccact

SEQ ID NO: 94607 - DNA, 513 bp, Zea mays
catctatggttggttccatttcgaagtcatgcataacgtttcgttcgaattcccgggtcgacccacgcgtccgggactacttcaagaggttgttcatctttttgaaggataaggatggctattggagggggtttgctgtcaacctggcctctggtggtgctgctggtgctttctctttattatttgtgtactacctatactacgcgagaacatggttatctaatgactcgatatgctgtcaagggaggaggtgaaactcattactatgtgcacggttatctatgccttatgacactgaagttttatagtatcgttggtctataccgcatgtataacatttcctgtggtgtaatcattgcttatcgcgttctaccttaagggctctatgtgtccattttgcctgcattgcttactgtctttctagctgtcatttttaattgatcgctttcgatttaggttttgacagagccttcctgatatcttaaatcgattgaattattactatatatcctt

SEQ ID NO: 94608 - DNA, 506 bp, Zea mays
  unsure (1)..(506): unsure at all n locations
tggtggttggattgaagggangctangccatnacncccncnnntcggaattcccgggtcgacccacgcgtccgcccacgcgtccggagaaggtactagatcgtggtgaaaaaatcgaacttcttgtggataaaacggaggatctccgagcacaggcacaagatttcaggcaacagggaacgaagatacgaagaaagatgtggtgggagaatatgaagatgaagctcatcgttttcggcatcgtggttgcactgatcctcctcattgtcttgacagtttgcaaggacttcgattgctgataagatgcaggaacatgaaaggaaagaacatgagaaaaaatgtagggggagtgtagtgccatgacaccgcgggaccaaaatccatcatttgtgtgatgttgttggcattggccacaatgttcttagctacgcctagaacgatgggctcaaattaagttataacagggctctctaatattttaaataattgtaatagtagcaaatatcg

SEQ ID NO: 94609 - DNA, 508 bp, Zea mays
  unsure (1)..(508): unsure at all n locations
agccgcttggccagcttagcatgtatagctatactcgtaccggttcggaattcccgggtcgacccacgcgtccggcctcctgcacaccgcgtgcggcacgccggcgtatgtcgcccccgaggttctcttgaagactggctacgacggcgcgaaggcggacatctggtcatgtggcgtgatcctcttcgtgctcctggcaggctacctcccgttcaacgacaccaacctgatactggtgtaccggaagatcacacagagcaactacaagtgcccaccgtggttctctgtcgaggcgcgcaagctcctcgccaggctgctagaccccaaccccaggactaggatctccatctcaaaggtcacggcaaatccctggttccagaaaggactctgccctctcaccaccgacaagcccctcgacttgtgggagacctccgaggtgctcggcaaggaaaaagcctgcaggtgccgncaccaccagcgcgacgacgccgacgccgacgccgacgac

SEQ ID NO: 94610 - DNA, 508 bp, Zea mays
  unsure (1)..(508): unsure at all n locations
agtgattgtggccccactcnncgnacgnacagacgttcttgacttgaattcccgggcggacgcgtgggcggacgcgtgggtgaaacgtgaccacaaatcaacattaacattatggaatgggattacagatatgcgactagcataatgaataagttccaagattgtgaggcgtcggtctaataataattacatcggttggttttgagatgatccaaagaagaaagaaaatacaaaccagcggattatatattcggaggagacttgagagtacgtgagaaagagagaggttacgaagagtgattatatatataatatatgcatgttagtcaattggttcagatgcaggcgagctcctttgccaagccgatggacttgccgatggcgttcttgcagactgccatggtcttgttgccggatccattgtacttgatgtcgacgttgacgagctgcacgccctggcatggcatgttgttggcgcagttgaacgtgatggccttcggcgtgttgg

SEQ ID NO: 94611 - DNA, 508 bp, Zea mays
  unsure (1)..(508): unsure at all n locations
atggctgctgcctcggactgncgtacgnatcagacacaccggaccggaattcccgggtcgacccacgcgtccgcgggctcccacttccttcccagcagctacctgttcagccccaaggacaagagcgacgtcatggtgtcaaccacctgctggtgcatcatgctcgcctccctcctcgccatggcgtgcgcgttcggcccactccaggtgctcaagatgtacggcatcccatacctggcgttcgtgatgtggctagacctggagacgtacctgcaccaccatgggcaccatcagctatctctgccctggtaccacggtcaggaatggagctacctgcgcagcggccttaccacggcggacagggactacagctggatcaacaacgtccaccacgacatcaggacccacgtgattcatcagctgttgcagcagatcccgcactaccatctcgtcgaagctaccaatgcagtcgagccggtgctggggcgatactaccgtgagccgccac

SEQ ID NO: 94612 - DNA, 508 bp, Zea mays
  unsure (1)..(508): unsure at all n locations
atggtgtccatccgcaacacgtacgnatcgaccgtaccggacttgaattcccgggtcgacccacgcgtccgcggacgcgtgggtgggcgactcatccgggatcacgatcaccaacaccgtcattggcgtcggggacgactgcatctccatcggccccgggacctccaaggtgaacatcaccggcgtgacctgcggccctggccacggcatcagcatcggcagcctagggcggtacaaggacgagaaggacgtcacggacatcaacgtcaaggattgcactcttaagaagacgatgttcggcgtccgcatcaaggcgtacgaggacgccgcctccgtgctcaccgtctccaagatccactacgagaatatcaagatggaggactcagccaaccccatcttcatcgacatgaagtactgccccaacaagttgtgtactgccaacggcgcctccaaggtcaccgtcaaagatgtcaccttcaagaacatcaccggcacctgctccaccccg

SEQ ID NO: 94613 - DNA, 484 bp, Zea mays
ccgcggactaccggtctcggaattcccgggtcgacccacgcgtccggaggaagaactcgtggcacgacggcatgccgggcaccatgtgcccgatccagcccaacaccaacttcacgtaccactggcagcccaaggaccagatcggcagcttcttctactaccccagcaccggcatgcagcgggcggcgggcgcctacgggctgatcagcgtacacagccgtgacctgatcccggtccccttcgacacgccggccgacgacttcccggagctcgtgggcgactggtacaccaaggaccacgccgtgctggccaagaacctggacgccggcaaggggatcgggcggccggcggagctggtgatcaacggcaagaacgagaaggacgcgtcgaacccgaccatgtacaacgtggaggccggcaagacgtaccggtttcgggtgtgcaacgtgggcatcaaggcgtcctttaacatgcgcattcagaa

SEQ ID NO: 94614 - DNA, 508 bp, Zea mays
  unsure (1)..(508): unsure at all n locations
aggcctgagatagtaagggaggtatgctctaccggttcggaattcccgggtcgacccacgcgtccgccgactacctcatgaagatcctgactgaacgcggctactccttcaccaccactgctgagcgggaaattgtcagggacatgaaggagaagctcgcctacattgccctggactacgaccaggagatggagactgccaagaccagctcttctgttgagaagagctacgagctgcctgacggacaggtcatcaccattggtgctgagcgcttccgctgccctgaggtcctcttccagccatccttcattgggatggaagctgctggtatccacgagaccacctacaactccatcatgaagtgcgacgtggatattaggaaggatctgtatggcaacatcgtcctctccggtggtaccactatgttccctggcattgctgacaggatgagcaaggaaatcaccgncctggctcctagcagcatgaagatcaaggtggttgctcctcc

SEQ ID NO: 94615 - DNA, 485 bp, Zea mays
  unsure (1)..(485): unsure at all n locations
ccgagcaactactggtccggaattcccgggtcgacccacgcgtccgcccacgcgtccgctctacccttccctcgcgccgccgccaccgcaagagtatctcaactgcgcctcgagacctccccccctcgctggtctcagccatggtgaaatattcgacggagccgtccaaccccaccaagtccgctaaggccatgggccgtgacctacgtgttcacttcaagaacacacgtgagacagcttttgcccttaggaagttgtcactcaccaaggccaaaagttaccttgaggatgtgatcgcccacaagcaggccatcccgttccgcaggtattgtggtggtgttgggcgcactgctcaggctaagtctcgccactcaaatggtcagggacgctggcctgtcaagtctgctaaattcattctagaccttctcaagaatgcagagagcaatgctgaggtgaaaggactngatgtggataccctctatgtg

SEQ ID NO: 94616 - DNA, 510 bp, Zea mays
  unsure (1)..(510): unsure at all n locations
ctagccgctgaggcatgccatgcaggtattgcaggaccgtaccggttcggaattcccgggtcgacccacgcgtccgatgggccttcaccaacaggaaggatccaccaaggagtttgttcaacatggatgaagaatacaattcctctggaatatagcgaagaatgcagctgggctcccatctttgtgaggcagtcaaatttcaagttacctgctgatccgtccactcctattatcatgattggtcctgggacagggctggctccttttagaggcttcttgcaggaaaggttagcattgaaacaatctggggcagaattgggcacttcaatccttttctttggatgcaggaaccgtaatatggactacatatatgaagatgagttgcaaactttccttgaggagggggcgctttctgagctaattgttgcattctctcgggaagggccaacgaaagaatatgtgcagcataagatggtggaaaaggccacagatatttggaacatcatctan

SEQ ID NO: 94617 - DNA, 509 bp, Zea mays
  unsure (1)..(509): unsure at all n locations
agtgntnaaactcaccgatctaatcattaccgctccggttcggaattcccgggtcgacccacgcgtccgcccacgcgtccgcccacgcgtccgaaccactacgatacacccgttataggttgttatcggtaaacttttaacggtcattctatttcaaaagttttgcattttgcactaaaaaaaaaaaaaaaaaaaaaaaaagggcggccgctctagaggatccaagcttacgtacgcgtgcatgcgacgtcatagctcttctatagtgtcacctaaattcaattcactggccgtcgttttacaacgtcgtgactgggaaaaccctggcgttacccaacttaatcgccttgcagcacatccccctttcgccagctggcgtaatagcgaagaggcccgcaccgatcgcccttcccaacagttgcgcagcctgaatggcgaatgggacgcgccctgtagcggcgcattaagcgcggcgggtgtggtggttacgcgcagcgtgaccgctacan

SEQ ID NO: 94618 - DNA, 507 bp, Zea mays
  unsure (1)..(507): unsure at all n locations
tgggctagacctcagccctcacgtacgnatcgacgtaccggtccggaattcccgggtcgacccacgcgtccgcccacgcgtccgccacctccatccgtgcgcctctcgctctcgctggtggtgctcctgctggtgctcctgctcccggggcgggcggcctccttttccacctcctgctggtgccagggccgggagggcgtcgcggaggtggcgcgcatggggctcgccggggacgggtcggcggacaccgcccacctcagtaataatgaaaatgggcggttcatttatggagttgcgagttctcctggtaaaagagcatcgatggaggacttctatgaggcaagaatagacgacgttgatggagagaaaattggaatgttcggtgtatatgatggtcatggaggagtccgagcagctgagtatgttaagcagcaccttttcagcaatttaatcaaacacccaaagttcatcactgataccaaggctgctatcgccgaaacttacaan

SEQ ID NO: 94619 - DNA, 507 bp, Zea mays
aggttatcgctagcttcactaccgacgactgtccggacttgaattcccgggtcgacccatcgcgtccgcgtcactggggagttctccatggccgtggttcatgccaaccagctcctcgaggaccagagcgcaagtagagtccggatcgctctccctggctgacccgggcccacagggcaccttcgtcggcgtctatgatggccatggcggcccggagacgtcccggttcatcaatgaccacctcttcaaccatctcagaaggtttgcaactgatcacatgtttatgtcagcggacgtgatccggaaagctttccaagcaactgaggagggctatctttctctagtcagcaaggaatggtctttgaagcctcagatcgcttcagtgggctcctgctgccttgttggcgtaatctgtgctgggactctctatgttgcatacgtgggcaactcacgtgcagttctaggaaggctagttaaggcatctggagaggctgtggccatgcagtt

SEQ ID NO: 94620 - DNA, 510 bp, Zea mays
  unsure (1)..(510): unsure at all n locations
agctggttgagcctcccgccaatagtaggtaactancggttcggaattcccgggtcgacccacgcgtccggaaaaaatctacgtccagttcatccaatgtgcagattgaggaaagcagggaagcaagacagaaattctcaaaagcgaaatcaatttcttcctctcagttttttggtgatcaggccagttttgaaaaggacgctcaagtctctctccaaaagttttctggttcctctgcgatatcaagtgctgacctatttggccatccggcaaacaattctagcgtggatctcagtgcttcagatttgatcaacagaatctcgttccaggccactcaggatctgtcttctatcaagaacatggcaggggaaaccgggaaaaagttgacatcgatggcatccaacatcatcactgatcttcaggaccgtatcctctgagctttaaactcacagtaaacttctgcgttgtttcagtggctggcttctcccgtcgacccgggtgacaaactgg

SEQ ID NO: 94621 - DNA, 513 bp, Zea mays
  unsure (1)..(513): unsure at all n locations
agatggcnatgangnncccagctcncggaangcatgnctgtactcggttcggaattcccgggtcgacccacgcgtccgcctgattcaagaagtgcaacacacagattgtcattcctcacctaacagagaactatggggcatccagagatccaccagaaaagcaggcacctatgtgcactgtacattcgtttcctcacaacattgatcactgcctgacatgggctagatctgagtttgaaggtctacctgagaagactcccactgaagtaaacgctttcctgtcgaaccctggtggatatgcaacggcagcaagaactgctggtgatgcacaggctagggaccaacttgagcgagttattgaatgccttgagacagacatgtgtgagacatatcaagattgcattacctgggcccggctgaagtttgaggattatttcttcaaccgtgtaaagcatctgacattcaatttttctgaagatgcattaactagctctggagctaccttttgtggtt

SEQ ID NO: 94622 - DNA, 513 bp, Zea mays
  unsure (1)..(513): unsure at all n locations
gatgcctgctcccttggggncgcatgcatgtctgtccggttcggaattcccgggtcgacccacgcgtccgggcaaaggctctcctaggtggcctatcttcgatcctcgtcgtggcggtggtcggcggtgtggtcgccaccgtcacccgctccggcaagaaggccggcgacaacttcacggtcccggtggaggcttccttgccacgtccggcaagtcggtcaagttcctgtgcgcgctcaccctatacaaggagtcgtgcgagaagacactggccccaggcaaccaatgggacccagacccccaaggaggggttccacaacttgcccaaggtgccccttgagtcggcccaaacggcggtcgaccattccaagtcgatcggcaaggccaaggccacgacttcctgaccgatagcgccccccaaggctttaaaaaacttcttggaagaccccctcgactaacctatggggatacttccagaaggcccgttgcgacacttaaggggctgtttaaact

SEQ ID NO: 94623 - DNA, 515 bp, Zea mays
  unsure (1)..(515): unsure at all n locations
gtagcgctgcgccttcgtaacagtacgcattgctctaccggtctcggaattcccgggtcgacccacgcgtccggtcaaccgtcatcgctttctccccctcccccgtctcttctccctcgagggaataagcccgccgcgtgaagcttcttcttgcatccgagtgcggattcacctccaatctgcccctcgggccgccggcgccgatggagaaggtgaagaacatgctcaagccgcggccgacgccgcagcagcagctgcgcgagtggcagcgccgcctccgcaacgagtgccgcgtcctcgaccgtcagatccgagatgtgcagagggaggagaagaacgtggagaaagccatcagggaggctgccaagcgcaatgacatgggatctgcaaaggctcttgctaaggaacttgtaagatcaagacgtgctgttaatcgtctttatgagaacaaggctcaactaaattcagtatcaatgcaccttggagaaattgtcgcaactgcaagaacagtgggn

SEQ ID NO: 94624 - DNA, 507 bp, Zea mays
  unsure (1)..(507): unsure at all n locations
actggttctggccttgcnccactacgtactgacgtaccggtctggaattcccgggtcgacccacgcgtccggtcgtcgtctcactcaccccgccttctcgcctccctcaccaaataaggtcccgccctgttgggacattcacaggggggacaggaaatcatctgccttggcctcgattccggctactaccttcgccgtcatcttatccgttctattctgtgccgcggctggcaccgtcgtctacaacgaccttcccgactacgtcatccatggccgagtctactgcgacacctgccgcgcccggttcgagaccaatgtcaccgagtacatctcggacgccaaggcgaggctggagtgctagctcttcttcaccggcaagctcgagcgctccatcgacagtgtgaccgacgcgatccgcacgtactctatcgtgctcaacgacagggacgatgatgacatctaccaagtggtcctggtggaaagccctaccaggactgcgaccatgtt

SEQ ID NO: 94625 - DNA, 504 bp, Zea mays
  unsure (1)..(504): unsure at all n locations
tgctgttnnccgattccgcacgacgatcactcatgacttcgaataccggcccgaccgatcgcgtccgggctgttcttcaatcaagaaaacgtctcgttttgataactatacaatctgcatgtggggaagtccctcatatctgcttcgggcagagctatgcatacaagtggtggacgcctgctggtaaattgtttatcaagatcgctcgagcatataaatttactcctattatcttctaggatagatttggcacaccattccccttcccaaaacccatgcatgtgatcttgggtaaaccaatcgaagtcaataagattccccatactacaatcgacgagacaattgcaacagtatgcatgttcttggcgggaaaagttgaacaaacacccaaacctctgaaagatgtcatacttctttcatatgagatcatccacaaaaaggatcctgctgcaattcaacgaaataaacagaatgaaatatattaacaacacaagggaccttatg

SEQ ID NO: 94626 - DNA, 506 bp, Zea mays
  unsure (1)..(506): unsure at all n locations
agtgctgagncctccagtttttcnacttagtaccggtccggaattcccgggtcgacccacgcgtccgcggacgcgtgggctctcgtcgtcaagcatgatgtgagaggagccggcggcggaggtgagtggcgggtggagtaccactgctgctcggcggcctntttcgagcacatcgtcatcatcatcgtgctcgtgctcttcgcgggcctcatgtcgggcctcaccctgggcctcatgtccctcagcctcgtcgatctcgaggtcctcgccaagtacggcaccgagcaagatcgcaagcacgcagctaagattttacctgttgtgaagaaccagcaccttctgctatgcactcttctaatctgcaatgcggctgcaatggaggctttgcccatattccttgatagcttggtgacagcttggggtgctattttaatatcagtgacactgattctgctttttggtgggatcttaccacagttcatctgctcacattatgggctggctan

SEQ ID NO: 94627 - DNA, 507 bp, Zea mays
  unsure (1)..(507): unsure at all n locations
agagcgntgccgcatccagcaacgatagtatggctccaccggttcggaattcccgggtcgacccacgcgtccgatgccagtggtcgtaccacaggtatcgtgctcgactcgggagatggtgtcagccacactgtccccatctacgagggatacgccctcccccacgccatccttcgtctcgacctggctggccgcgacctcaccgactacctcatgaagatcctgactgaacgcggctactccttcaccaccactgctgagcgggaaattgtcagggacatgaaggagaagctcgcctacattgccctggactacgaccaggagatggagactgccaagaccagctcttctgttgagaagagctacgagctgcctgacggacaggtcatcaccattggtgctgagcgcttccgctgccctgaggtcctcttccagccatccttcattgggatggaagctgctggtatccacgagaccacctacaactncatcatgaagtgcgacgtg

SEQ ID NO: 94628 - DNA, 504 bp, Zea mays
  unsure (1)..(504): unsure at all n locations
agggtttccatcgctatacgatgnatcgctctaccggtccggaattcccgggtcgacccacgcgtccggagctcctcgggaatccggtgccaggcctcgccttctcgcggcggtgctccctccctcttggtcccccagcgacgcaagcaggcgcgcgcgcggccatgaaggggggcggtgccatgaggccgtcgcctatgttctacgtccacgaggcggacgtcgtccagatccaccacttcctcgaggagtgctccctctgcgccaaatcgctctccggcgacatcttcatgtacaggggtgacacgccgttctgcagcgaggagtgcagggagcagcagatcgaggtggacagggcgaagcaccggcggaagaagcgcgcggcggcgcacgcgctgtccgcacgcagcagggagcaccggcaccagcagcagctgcagcagcaccaccaccagcagcagcaaccgcagccgcggaatgccggcatggacacccgncacccgg

SEQ ID NO: 94629 - DNA, 507 bp, Zea mays
cgtgctgacatcgcgaagagagtaatgtactaccggtccggaattcccgggtcgacccacgcgtccgggcgagcgagtgcggctgccgcttcctctgcgagtcaggcgccatttaataattcaattggacccccaagcccacgcttccgaattcaccgactcctcctacacgccgcgtcgagatcgctcaggccttcgcttccagcaactccaccactcagcccacccgccggagcaatggggagcacggggcgcgagccggaggttacccgcgccgactttcccgatggcttcgacttcggcgttggcacctgcgtgtaccagattgagggagcgagaagggagggaggcaaaagagacagcatatgggatgtatttacagatgacaaagaacatgtcttagacagaagcaatggagatattgcagttgatcactaccatcgatacaaggaagacattgagctcatggcaagtctacgttttagcgcatacagaatttctatatct

SEQ ID NO: 94630 - DNA, 515 bp, Zea mays
  unsure (1)..(515): unsure at all n locations
ntgcgcttgagactggggagagggggatagtagtactcgtccggaattcccgggtcgacccacgcgtccgcccacgcgtccgcccacgcgtccgcccacgcgtccgagaccgaccccgtggccgtcgtgcagcgcttcaacgacggcgtgcacagggcgacggcgacgcggtcgcggtccctggcgcacagggcgcggggcccctgcacggcgaccaaccccatcgaccagtgctggcggtgccgccgcgactgggcccgcgaccgcaagcgcctggccaggtgcgccatgggcttcggccacaggaccaccggcgggctggccggcaagttctacgtggtgattgaccccagcgacgacgccgtcgacctcgtcacccccaggaagggcacgctccggcacgccgtgacccgggcccgggcgctgtggatcaccttcgcgcgcgacatggtgatcgagctctgccaggagctcatcgtgagcagcgacaagaccatcgacgggcgccgagcgca

SEQ ID NO: 94631 - DNA, 511 bp, Zea mays
  unsure (1)..(511): unsure at all n locations
atggtcttnnccaggttcacgnacgnatgatcacatcattgatggaattaccggactcgacccatcgcgtcaggccacgcgtacagcatctcgctagcttttcttatgcattcagatcctctctctacaagagaagttcttaagcaagatggaccgcccggcagacacacacctgactgacctgatgaccatcactcaggtcattcttaactaacaaatcccttacctctattgccgctactacttcaccattctgctctaccacatcatcctatgctacaagtatatcacctccgtcagtcaacaaggccgagctctcccagctcatctgactcaccggcgtgaccaacataccaggacactagcagaaaatactgaacgttcttgacaactaggtgttcttcaaagccctcattagcaacatgataacctttgtccttgcgttcgacaaggactatgaaacaactctcttagaccctatacttcttgaaagtactggaatctgcttttg

SEQ ID NO: 94632 - DNA, 514 bp, Zea mays
tggctgctcatcagatttatagtatgcatcgactcgaccggacttgaatgcccgggtcgaccgacgcgtccggccacgcgtccgcccacgcgtccgctcacgcgtccgcccacgcgtccgtccacgcgtgcggaagagcgtcagccggttcaggaccttgctgggccgcccgtggaaggagcactcgcgcacgctctacatccagtcggagatcggcgggttcatcgacccgcaaggctggctgccgcggctcggcgacttcagcctcagcacctgctactacgccgaggaggaaaaccacgggcccggcagccaacatgaccagacgcgtcaagtggagggggatcaagaacatcacctaccagcacgcgctgcagaagtacaccagctagagcttcatccaatgccagcactggctcccacagctcggcgtgccattcataccggggctgctgccgcagcagcaatcgggcatgatacactgacatctaatgaagatgatatatgatcggca

SEQ ID NO: 94633 - DNA, 517 bp, Zea mays
cgaggcggttgcgactgaatagcatgtatgctagactcgtctcggaattcccgggtcgacccacgcgtccggccgagcgatctcctctccctctccctctgcgatccattctccagcgcagcgaagtaaacatgtctgaccgggcaaagatgtcgtggcaggcgtacgtggacgagcacctgatgtgcgagatcgagggccaccacctcgcggcggcggccatcgtcggccacgacggtgccgcctgggcgcagagcacggcgttccccgagttcaagaccgaggacatggccaacatcatgaaggacttcgacgagccagggcacctcgcgccgacaggcctgttcctcggacctaccaagtacatggtcatccaaagcgagcctggtgccgtcatccgtggcaagaagggatcaggaggcatcaccgtgaagaagacagggcaggcactcgtcgttggcatctacgacgagccgatgacgcctgtgcagtgcaacatggtggtggaaaggctggc

SEQ ID NO: 94634 - DNA, 521 bp, Zea mays
  unsure (1)..(521): unsure at all n locations
cgttgcgnntggccctcccgtggtgggtatggtattactcgtactcgaattcccgggtcgacccacgcgtccgcccacgcgtccgctctactgcatgggtcatcctcacaggtgccatggtcctcctcgccgttcctttcatcatccctgcctgctccagttgctcatatgtggatacagatggccctgaccctgcatcgccactaaaccatgatgacccacataagccactcctaataagtaacaatcatcagatggagtccaatgccatgatgcaaaatccaaaggagaaccagatgcagggcaattgttgtggaacagtgatgggcaagggccgcctggcgacactcggtgaagaacacagtgcaaaaaagctcattcggtgtgtggacttttggctctactacacagcctacttctgtggagccactgttggcctggtatacagcaacaacttggggcagattgcgcagtcattgaaccagcagtcacagctcaccatgctccttgctgtctactcn

SEQ ID NO: 94635 - DNA, 508 bp, Zea mays
agcggtggtgactcaccgacagtgatgcatagacgtaccggttcggaattcccgggtcgacccacgcgtccgcttcaagggatctctgggccacaaaggtttcagatacataaggcctacggcagcacgaaccatctgccttcagctcatacttgctttaaccaactagacttgcctgagtacacatccaaagagcagctccaggagcggttactgttggcaatccacgaagcaaatgaaggtttcggatttggctaatcagttatactcgtttgtccgtgccctgagaactgcaaataggcgagcagcacgtgtgtggctgatctcattctgaactccacgtgtgtgatgagagatggccggagagaacatgtccaggatagacgaatgcccgtgggagaggtactactgttaagagagagagcgacgattttgtgtttataatctttgtccgtttgtagtttttgccttacattggtcgttgcttcgaagtttttccccttctttt

SEQ ID NO: 94636 - DNA, 531 bp, Zea mays
  unsure (1)..(531): unsure at all n locations
tcgtgactgggccttagccctcgcttgncatgatcatactcggttcggaattcccgggtcgacccacgcgtccgcggacgcgtgggtcgcggacgcgtgggctgacgcgtgggcggacgcgtgggcgacaggcatccgacagctatattatgttcgacggtgtaacaccctgaatttgagggtataaaatttcttctctaaataccaaccaaattcaggtgttaaaaaaaaaaaaaaaaaaaaaaaaaaaaaaaaaaaaaaaaaaaaaacaaaaaaaaaaaaaaaaatgaaaaaaaaaaataaaaaaattaaaaaaagctaatgaagatatcacagaaaaaatcagtggcaatgaccttaaaataacaaaaaggggccgccgctttaaaagaacccagcttttcttcctctgtatggatcacataatgcttttctcttaggagaactccagaatgaaatctcgtggtcgcttttttccacaggcgtgattgggaaaaaccctgggttaacccaactttataaagcttggcc

SEQ ID NO: 94637 - DNA, 507 bp, Zea mays
agcgatgatcatgatggaaaggatagtatagctctaccggttcggaattcccgggtcgacccacgcgtccgctctatgcagaatcactcgcacgctttcaaggagggtccccttacatctaccctctatacggtctgggagagctccctcaggcctttgcccgcctgagcgctgtttacggtggcacgtacatgctgaacaagccagaatgcaaggtcgagtttgatgagagtggaaaagcgtatggagtcacttctgaaggggagaccgccaagtgcaagaagatcgtctgcgatccttcgtatttgccagacaaggtgaagaaggttggaagggtggcccgcgcgatatgcatcatgaagcatcctatcccggacaccaaggactcgcactccgtgcagatcatcctccccaagaagcagctaaagcgcaaatccgacatgtacgtgttctgctgctcctacgcccacaacgtcgcgcccaaaggcaagttcatcgccttcgtct

SEQ ID NO: 94638 - DNA, 509 bp, Zea mays
  unsure (1)..(509): unsure at all n locations
ntgctctgccatcgatacacctacgnatctgacgtaccggtccggaattcccgggtcgacccacgcgtccgcccacgcgtccgctcttggtgctgatcacctcaccgcggggcagcctgtgggacccgaacgctggcttcatggttgagggtgctacactcgagacagtcactcctattccttatgatgcggtcaacgatctcaagggcggttactagagagaattcttgtaccttcagcagttcaaacgagctggcaaacttatctgaatctttttgataattggctagttcttctgttctggtgttatgaactcatgtggctattgctgctggcgtcaaaagattccttttattgccatggttgagataaacaaataaagggcggtcgctctagaggatccaagcttacgtacgcgtgcatgcgacgtcatagctcttgtatagagtcacctaaattcaagttactggccgtcgctttacaacgtcgtgactgggaaaaccctggtc

SEQ ID NO: 94639 - DNA, 504 bp, Zea mays
  unsure (1)..(504): unsure at all n locations
tcgtgctgagcatccgaaatagtatgctctacggttcggaattcccgggtcgacccacgcgtccggaggagggagtgtacgaggagtacgtgaccatcaccaagactatgaagaacgtgaccttcttaggtgacggctccaagaagtccatcgtcaccggcaagaagagcttcgccgacgggatcacgactttcaagactgcaaccttcactgcgcaaggcgacggattcatggcgatcgggatggggttccaaaacacggccggcgcggagaagcaccaggcggttgcgctgctggtgcagtcggacaagtccatcttcctcaactgcaagatggacgggttccaggacacgctgtacgcgcactccaaggcgcagttctaccgcaactgcatcatctccggcaccgtggacttcatcttcggcgacgcggcggcggtgttccagaactgcatcctggtgctgcgccgnccgatggacaaccagcagaacatcgcgaccgcgg

SEQ ID NO: 94640 - DNA, 543 bp, Zea mays
cgtgctgtgttcaggtacataagtacgtagtcacaggtccggaattcaccgggtcgacccacgcgtccggctgcacatcgcgtcctggtggttgcacctcggcgatcggatcgcgacgagacgccgcgcggtccgacctaggctgacgccaacgaccactctcgccggcggcggtcatggcgtacggcgaccgcgttaccaccttcgaggactcacagaaggagagcgagtacggctatgtccgcaaggtctctggacctgtggttgttgctgatggaatgggtggtgctgccatgcatgaacttgtccgcgtcgggcatgataacctcatcggggaaattatccgccttgagggcgattcaactacaatccaagtttatgaggaaacaggtggactgatggtgaatgaccctggtttgggaacgagaaagcccttatcagttgaattgggacctggaaattcttggaaatatctctggagggatccaacggcctctaaaaaccatggcattaaagtacgagaagggattattcccttggagt

SEQ ID NO: 94641 - DNA, 541 bp, Zea mays
  unsure (1)..(541): unsure at all n locations
aggntctatgtcaccgcactacgtattgcatctactggtccggaattcccgggtcgacccacgcgtccgggtaattggatcgagattctacgtgtggataacctggtcatcaccggcaagggaaaccttgacgggcagggcccagccgtgtggagcaagaactcctgcaccaagaagtacgactgcaagatccttcccaactcgctggtgatggacttcgtgaacaacggggaggtgtccggggtcacgctgctcaactccaagttcttccacatgaacatgtaccggtgcaaggacatgcttatcaaagacgttaccgtgacggcgcccggggacagccccaacacggatggcatccacatgggcgactcatccgggatcacgatcaccaacaccgtcattggcgtcggtgacgactgcatctncatcggccccgggaccttcaaggtgaacatcaccggcgtgacctgcggcctggcccacgcaataacatcggaagctaaggccgtccatggacataaggactgtacggacatcaacg

SEQ ID NO: 94642 - DNA, 550 bp, Zea mays
  unsure (1)..(550): unsure at all n locations
tcgtnttattgacgaacgcgtgactgaatgcaccgactcggcccggaattcccgggtcgacccacgcgtccgctcgcgtgggcccagcggttccggatcgcggcggagatcgcgacggcgctgctgttcctgcaccaaacgaagccggagccgctggtgcaccgggacctgaagccggccaacatcctgctggaccgcaactacgtgagcaagatcagcgacgtcgggctggcacgcctggtgccgccgtcggtggcggacaacgtgacgcagtaccggctgacggcgacggcgggcaccttctgctacatcgacccggagtaccagcagacgggcaagctgggcgtcaagtcggacatctactccctcggcgtgctcctgctgcaggtggtcaccgcgcggtcacccatggggctcacgcatcacgtcgagaaggccatcgacgcgggcacctttgagcagatgctcgacatcaccgtcaaggactggcccgtcgaggatgcgctcgctacgccaagctcgggctcaagtgcacggagattccgcggag

SEQ ID NO: 94643 - DNA, 544 bp, Zea mays
atgtgttatgttattgaaatatgtattgtatctactggtccggaattcccgggtcgacccacgcgtctcgtcacgcgtgcgtacacgcgtccgcccacgcgtgcggccatcgctaacaatatttggaaatgactacgcaacaaaggatgggacaggggttcgtgattatattcatgtggctgaccttgctgaaggacatcttttcgcattaaagaagctatttgaaagctcatctaacataggatgtgaagcatacaaccttggaaccggaaaatgaacatcagtgttggagatagccaatgcattcgagaaggcttctgaaaggaaaatcctttgataatggccaacgggctactggtgatgcttaaaatcttttttcattgaccgcaaaagccgaatagagagctccactggaaaggcgaatatgcattcccaggaactgtcctgagactctgtgaactgggctagcaggagcccttattgatactccggatctgagtctccgaaactgaatggtagtccaggctgaccaccgccatttggg

SEQ ID NO: 94644 - DNA, 547 bp, Zea mays
  unsure (1)..(547): unsure at all n locations
agttggttattgctgacgctatgatcgactgacgtaccggtccggaattcccgggtcgacccacgcgtccgggcaattctgtccacgcaggccgtcaggatcgccaccaaggccgagcagcatgagcgcttcatctttaaggtcacacacttgctgggtgttcttggatttgggggattttgctatctcttgggtgccagaccacaggatgtgccatatgtgtactgcctgttctatgtcatatttgttccgctccgctggatttactaccgctacaagaaatggcattactaccttctggacttctgctactatgccaacacctttctccttgtaatgattctcttctacccagaggatgaaaaactttttatggtttgcttctcgtttgcagagggtccgcttgctttggcattaattgtgtggcgttgcaacttggttttcagttcatttgacaaactnngtaatgtcctgatacatctctaacctgggatnngtctattcactatcccgtggtggaatcacaaacatttgcttgcatgcaccc

SEQ ID NO: 94645 - DNA, 544 bp, Zea mays
  unsure (1)..(544): unsure at all n locations
ngatgggttattcatgcagccgtcgtccgacctgacgtaccggtccggaattcccgggtcgacccacgcgtccgcccacgcgtccgcatcgtcgtcgtcaacgaatccgcacaaggaaaagatggagaagaagccgaccatcctcatgaacaggtacgagctcgggcgcacgctcgggcagggcaccttcgccaaggtgtaccacggccggaacctcgcgttcggcgagagcgtggccatcaaggtcttcgacaaggagaaggtgatgcgcgtcggcatgatcgaccagatcaagcgcgagatctccgtcatgcgcctcgtccgacatctcaacgtcgtgcatctgcacgaggtgatggccagcaagagcaagatatacttcgccatggagtacgtccggtgcggcgagctcttcgcccgcgtcgcccgtggtcggctcaaggagacgccgcgagaaggtacttccaccagttcgtcggcgccgtcgacttttgcacagccggtgcgtttactaacgtgaccttaagcccggagaacttcttgt

SEQ ID NO: 94646 - DNA, 553 bp, Zea mays
  unsure (1)..(553): unsure at all n locations
gtatgtnttnctaactccagcgtcgtcatcggactgcccgtaccggtccggaattcccgggtcgacccacgcgtccgcggggagcgcggccgacctggcctccgggggcaggaggtcgtccggcgtgccggtgttcgtcatgatgccgctggacaccgtcaaggagtgcggcaccgcgctgcaccgtcgcaaggcggtgcaggccagcctctccgcgctcaagagcgcgggcgtcgagggcgtcatggtggacgtgtggtggggcatcgccgagcgcgacggcccgggccggtacaacttcgcgggctacgcggagctcatggagatggcgcgcaaggccgggctcaaggtccaggccgtcatgtccttccaccagtgcggcggcaacgtcggcgactccgtcagcatcccgcttgccgcgtgggccgccgaggagatggagagggaccaggacctctgctacaccgaccagtgtggcccgtcgaactacgagtacgtctcgctcggctggacggcatgcncgtnctcaggtacccacgcncgtcgagtgcta

SEQ ID NO: 94647 - DNA, 553 bp, Zea mays
gagcggctaattccacgtagcgtccgatcgcacgtaccggtccggaattcccgggtcgacccacgcgtccgggtgaagcaagcagcacacgagacgatatagagggagggatcatggctctcttccgtgccgccgcgtcaggagggttcgcgctgatccttctcgcgtgctgcagcctcatcatgctggcggcggcgtctggcggcggcggcgtggacgacgacggcgtcggtggtgacaggctgatgatggaccggttcctcagctggcatgcgacgtacaaccggtcgtacccgacggccgatgagaggcagcggcggttccaggtgtaccgccgcaacattgagcacatcgaggccaccaaccgggcgggcaacctgacgtacacgctcggcgagaaccagttcgccgacctcacgggggaggagttactggacctgtacaccatgaagggggatgcccgttcggcgtgacgccggccagaaaccggcccaacgtttcttcttcagcaaccggctgggacacttcgaccagggtcgactggacgttcaag

SEQ ID NO: 94648 - DNA, 551 bp, Zea mays
  unsure (1)..(551): unsure at all n locations
ggagggtctgttgctgccgtcgacggtacgacgtaccggtccggaattcccgggtcgacccacgcgtccgttggctaccctcgtcgtcgtctcactcaccccggcttctcgcatcgctgaccaaatataggggccggccttttccgacattcacaggggggacacgaaatcagcggccatggtctctattccggcgacgaccttgagcgtcatcttatacgtcctcttgtgtgcctcggctggcaccggccttgacaacgacgctatgcgactacgtcatccagggccgcgtatactgcgacacctgccgcgccgaggttcgtgaccaatgtcaccgagtacatgctgggcgccaaggtgaggctggagtgcacgcacttggcaccggcaagctcgagcgctccatcgactgggtgaccgacgcgaacgggacgttcacgatcgagctcaagacatgtccctggtggacatcttgcaaggggttctcggggataagccgggcaaaggactgcaaccaggttccgccagacagggaccgtccgggttctcan

SEQ ID NO: 94649 - DNA, 550 bp, Zea mays
  unsure (1)..(550): unsure at all n locations
attgttgtagttcacgctangtccgtatgcacgtaccggtccggaattcccgggtcgacccacgcgtccgcccacgcgttcgctgtgaagttgacattgaacagatggaactccttctgtgccaactgagcggtacggacattaccgagctcattgccgtcggcagggagaagtttgcttcagtcccatgtggcggcggcggtgtggctgtcgcggcagctgtccctgctgctggcagcgctcctgcagctgaggccaataaagaagagaacgtggacgagaacgaagaaagcgatgacgacatgggcttcagcctcttcgactaagcttgtgcaatagtcaagaatattgttcttgagtcgctgaagcagaggggattaaaatcttaatcatgtttggactttaactntcgtttactgtggaaagtacttgaaaaaactttatctgtggtaattctaggcgtaggttgctgtgctggttggggtttactggtggaccagagttnttctatcccactttgaattggtacctaaggtaacccggaggttac

SEQ ID NO: 94650 - DNA, 552 bp, Zea mays
  unsure (1)..(552): unsure at all n locations
gcggctactgcctgacgtcgctcgatagcacgtaccgtcctgantcccgggtcgacccacgcgtccgcggacgcgtgggcggtggcgttgacactggaccgatggaactcgtcatgtccgaactgagcggcacggacattaccgagctcattgccgtcggcagggagaagttggattcagtcccatgtggcggtcggcggtgtggctgtagaagcagctggccctgctgctggcagcgctcctgcagctgaggcgaagaaagaagagaacgtggacgagaaggacgaaagcgatgacgacatgggcttcagcctgttggactaagcttgtgcaatagtcaagaatattgctttagagtcgctgaagcagaggggattaatatcttaatcatgtttggactttaactttgtactatgttggaaagttcttgaaaagactttttctggggttattatacggctatgttgcttttctgggtggggtttactggttgaaccagactttctctatccaattatgaatagtgtactttaagttactggatgttcatcg

SEQ ID NO: 94651 - DNA, 547 bp, Zea mays
  unsure (1)..(547): unsure at all n locations
cggtntattgctgcagcntgtcgatggaccgacgtaccggtccggaattcccgggtcgacccacgcgtccgcgacgcccgtgcaggccgtggccgagcccgacctaaaggtgaccatgtacgcgccaccgttcacgacgcacggctactccatgaaccagcggctgctggtgctgtccgtcaccgcgttcgcggccaacgggcataggtacacgataacggtcgacgctccgggaaagcctgagctcgcgccgccgggatactatctgttgtacgtcatagcgaaaggcgtgccgagcaaggccgcgtgggtgaaggtacacaaatgagaacgaaggcggctcggagacgaatgccagtcgcgtttggcacgacaatacacatgtgtccaccggagtagctggacctctcgcaaccgtaccgtaggaggacgtgcaggcgtagcttgacttgtgcatcggatttcgtatgtttctccatgaatttgcatcgcgtggtagtgctccctaatatttggggcaaacatatgtttagtacaaggatatggg

SEQ ID NO: 94652 - DNA, 551 bp, Zea mays
gcggtgtgttatgagagatatcgatcgactgcacgtaccggtccggaattcccgggtcgacccacgcgtccgatcacaagtaaaggtatgtttctaagccttagtacattggttttgtgtactaacatgttgtctaagtgttagaaacaggagaaagaagaaaagaaaagaagtggagagtggctgtgtacagccaaaggctgcttcgggctggggcaccggactgtccggtgtgcaccggacagtgtccggtgcgccagaccagcgcggagcaaaccagccgctatcgggtttttctccggcgacttcggctaaaattcaccggactgtccggtgtgcaccggactgtacggtgagccaacggtcagccgagccaacggtcggccgcacgatcggctcgcgacacgtggtccgagccaaacggtccggagaagcacaggactgttcggtgtgcaccggtcatgttcggttcgccaacagttctcatatctgcatacgacagcaaccgtgggattcacctgttatgggaaccaaatgggcacggtgccatt

SEQ ID NO: 94653 - DNA, 550 bp, Zea mays
  unsure (1)..(550): unsure at all n locations
gcgggntgttgctgaagtcgacggtaggaacgtaccggtccggaattcccgggtcgacccacgcgtgcgagctggcggacggaacgacgacgatggcgaggagcggcggcgggatggaaggcaacaagtgggcgcgcatcttcaagcacctctcacgaaggacggacaacgagatcaagaactactggaacacgcgcttgaagcgccggcagcgcgcgggcctgccgccctacccgacggacgtcgagcggcagatcaagctgctgcgcgcgcagaacgtcaacccgttcgcagacgcagacgccgacgccggccacgccaacgccagcgccggccttccggggccgccgctcctgtacgacgtctgaaacccgttcgcgttgctctacagcataccgtcactgtcgcagacgggcttgcactcgcactcggcactgatcaatcagaactacccgcttctgaaccagatgcaggtggttcancacctcggtggcagtcaacagtcgttgtttcaccaggacggcaactcggcgcttttcgtgacatgtct

SEQ ID NO: 94654 - DNA, 548 bp, Zea mays
  unsure (1)..(548): unsure at all n locations
atgggtgtgcatggatcatcgtactgcacgtaccggtccggaattcccgggtcgacccacgcgtccggggtaaaagaaagcgaagaagtccgtggagtcctacaagatctacatcttcaaggtgctgaagcaggtgcaccccgacatctgcatctcgttcaaggccatgtccatcatgaactccttcatcaacgacatcttcgagaagctcgcggccgagtccgccaagctggcgcgctataacaagaagcccaccgtcacctaccgcgagatccagacctcggtgcgcctcgtactacccggtgagcttgccaagcacgccgtctccgagggcaccaaggccgtcaccaagtacacttcttcttaggctcatagtactaggctgggtggtgttggtagacgtggctcaattgaatctgtagagtgtgtgatggatgatatgatctgcgtctattgagcagttaagactgatgaacatttgtccacgtcacggtgagtatggatgggcattgtncaaatcacggtggtaaaactgcagaactgtttcc

SEQ ID NO: 94655 - DNA, 552 bp, Zea mays
  unsure (1)..(552): unsure at all n locations
ctggnnnntattgctgatatcgatagtactgtcttaccggtcttgaattcccgggtcgaccctcgcttccgcccacgcgtccgcagtctcgtgggacacactgctcataggttaagagctcaaaagctacctgtctatttatctacttcactcaggtgaatccctgctgtgctgttatattgtttcttctttttaccgttggctattttctttgctccaagaagatcatcgtcatgccaaagtgcgttttttaacgtacataataatgtggtactttgctgatgctaaaatgtaagtgtggagctcatttggaacatacgttctatggggtactcgacgaagaacattgattatacatgtttctggcacattctcatgttaagaataagcacccgctattatttttcgcattcatgtaaaaaaattttacataacatataataaaaaaaagggcggccgctctagaggatccaagcctacgtacgcgtgcatgcgacgttatagctcttctatagtgtcacctaaattcaattcactggccgttcttttaag

SEQ ID NO: 94656 - DNA, 517 bp, Zea mays
  unsure (1)..(517): unsure at all n locations
gcgtgattgagttcattcgcactgacgaactttcggtcctgattcccggtcgaccacgcgttcgggacgcgtgggctcgccagccatgggcaagatcaagatcggaatcaacggcttcggaaggatcggcaggctcgtggccagtgtcgccctgcagagcgaggatgtcgagctcgtcgccgtcaacaaccccttcatcaccacggattacatgacctacatgttcaagtactacaccgtgcacggccaatggaagcacagcgacatcaccctcaaggactccaagacgctgatattctgcgagaagccggtcaccgtatttggcatcaggaaccccgaggagatcccgtggtgcgaggctgctgctgagtatgtcgtggagtccaccggtgtcttcactgacaaggacacggctgctgcacatctgaagggtggtgccaagaaggttgctatctctgccccaagcgaagatgcacccatggttgatgatggtgtcaacaggacaagtccacctccn

SEQ ID NO: 94657 - DNA, 521 bp, Zea mays
gtgtgcttatacgggggggaaggaagtatcgactcgtccggaattcccgggtcgacccacgcgtccggtcgcctactgttgcttgtggttgtggccagtccttcccctctcatcccgggccccggggaaaattttgccccctgaaaccctatcgcgtcggatcacaagcaagggcaaaattttctgcgactccggctgaaggacgctgcggcacctatgtcggacgacactggccgcactatacccaagttcggcgaatgggacgtgaacaacccggcctctgccgacgggttcacggtgatcttcagcaaggccagggatgagaagaaagccccggcccaaggccacatcagggacaggtcggcgtcggccgacagctaggactccaggtccagggatgagaagatgacctcctacagctccaggaccaacgcatcgaagaaatggttctgctgtgtctcgcccagtcccacacagtcttgagggagctaatgagccgtgcagtgctgcattttctgtga

SEQ ID NO: 94658 - DNA, 526 bp, Zea mays
  unsure (1)..(526): unsure at all n locations
gcggtncttgatgtccgccagctancgtacgacttacaggtcccggaattcccgggtcgacccacgcgtccggtcgcctgctgttgtttgcggttgtggccagtccttcccctttaatcccgggccccggggaaaattttgccccctgaaaccctagcgcgtcggatcacaggcaagggcaaaattttctgcgactccggctgaaggacgctgcggcacctatgtcggacgacactggccgcactatacccaagttcggcgaatgggacgtgaacaacccggcctctgccgacgggttcacggtgatcttcagcaaggccagggatgagaagaaagccccggcccaaggccacatcagggacatgtcggcgtcggtcgacagcaaggactccaggtccagggatgagaagatgacctcctacagctccaggaccaacgcatcgaagaaatggttctgctgtgtctcgcccagtcccacacagtctttgaggagctaatgagccgtgcagtgctgcatttctgtgan

SEQ ID NO: 94659 - DNA, 523 bp, Zea mays
gcgtattatttacaagacagtataagtatctctctaccggtccggaattcccgggtcgacccacgcgtccgggtaatcggatcgagattctacgcgtggataacctggtcatcaccggcaagggaaaccttgacgggcagggcccagctgtgtggagcaagaactcctgcaccaagaagtacgactgcaagatccttcccaactcgctggtgatggacttcgtgaacaacggggaggtgtccggggtcacgctgctcaactccaagttcttgcacatgaacatgtaccggtgcaaggacatgctgatcaaggacgtgaccgtgacggcgcccggggacagccccaacacggatggcatccacatgggcgactcatccgggatcaccatcaccaacaccgtcattggcgtcagcgacgactgcatctccatcggacccgggacctccaaggtgaacatcaccggcgtgacctgcggtcctggccacggcatcagcatcggaagcctatggcggtacaaggacat

SEQ ID NO: 94660 - DNA, 551 bp, Zea mays
  unsure (1)..(551): unsure at all n locations
agcggttgnttgtcactgagncctacngctcatagtactgacgtaccggtccggaattcccgggtcgacccacgcgtccgcccacgcgtccggaacgacagctgcatggagttcctcagggccatgaagatcgtggaggtgcccactttcgtcttcatcagggacggccagatcgtcggccgctacgtcggctccggcaagggggagctcgtcggtgagatcctccgatacaacggcgtcagggtcacctactgaagtgaagtagtgaacaacaaaccagtcagagtcagagcaagcgcaagccgacaagcaacgcttcgatacaaaattgaagacgatacanaattttagattactgcgacatccatcgacgatgggccgaatgttagactggttatggtgtaccattaccatactttgcccgtaatcgctactaatcaatagtnatagtaagcttttggtaggctaagcactgcttggctgttttgaactttaaatctgggttggtgatctatcagcttgattgtcaactagtggcttgcaaggttcaa

SEQ ID NO: 94661 - DNA, 558 bp, Zea mays
  unsure (1)..(558): unsure at all n locations
cggggagagccgganttactgaactcagcctctcatacgactgacgtaccggtccggaattcccgggtcgacccacgcgtccgcgagctcctcgggaatccggtgccaggcctcgccttctcgcggcggtgctccctccctcttggtcccccagcgacgcaggcaggcgcgcgcgcggccatgaaggggggcggtgccatgaggccgtcgcctatgttctacgtccacgaggcggacgtcgtccagatccaccacttcctcgaggagtgctccctctgcgccaaatcgctctccggcgacatcttcatgtacaggggtgacacgccgttctgcagcgaggagtgcagggagcagcagatcgaggtggacagggcgaagcaccggcggaagaagcgcgcggcggcgcacgcgctgtccgcacgcagcagggagcaccggcaccagcagcagctgcagcagcaccaccaccagcagcagcaaccgcagccgcggaatgccggcatggacacccgncacccgtgggtcgacgccgggttcgccaggcccagggcgcccgcn

SEQ ID NO: 94662 - DNA, 529 bp, Zea mays
cgcggttactgatgtatgatcgagtactcatcgtacctaccggtccggaattcccgggtcgacccacgcgtccgtaattaggttgacaaaagagaaggaggattatagaaatactattatgaatcttaagcaggaatttgaatcattaagatcgtcatatgaggagagatgtaagttgttagaatctaagaaggaagatgtagttaaacttgtcgcagacaaggaaatgaatgacaacatagttttgcaactcaggcaacaacttgaggcaacaaaaaagttccatgaggcagagacaaaagagaaggaggattatagaaatattaatatgaaacttaagcaggaattcgaatcattaagatcgtcatatgaggagagcagcaagttgttagaatctaagaaggaagatgtagttaaacttgttacagacaaggaaacgaatgacaacataattttgcaactcaggcaagaacttgaggcatcaaaaaagttgcatgaggcagagactcagcaattagagaccaaagct

SEQ ID NO: 94663 - DNA, 530 bp, Zea mays
  unsure (1)..(530): unsure at all n locations
tgagtggtnacttgtgcccagccttcgactgacgcacgttccggtccggaattcccgggtcgacccacgcgtccgcccacgcgttcgcccacgcgtccgattgcaagcaataataatggagacgacgactaagctccggtggagccggcccggctccttcctcctcgtcgccgcggcgttcctggcgtccgccgccgcgtcgggcgtcaacgtcggccagttcgacgaccacttgcagaagcggaaggagctcgccgaggcgtcggcgagggaggcgtacaggcccgacccgtacaacgtcaccaacagcttcaacgccgccgtccacagagctgtcagcagcagtcggcgtgagatgctggagaggccgtggaagcacatgaagaggggcccgttccgggcgactaaccctatcgacaagtgctggcgctgtcgcagagactgggcgacngaccggcatcgcctggcccgttgctccagatgccttgggcacgcgaccaccggtctgccttgcgggcaagatctacgtg

SEQ ID NO: 94664 - DNA, 528 bp, Zea mays
  unsure (1)..(528): unsure at all n locations
gtagtgcgnttactgatgccaccagtgatggcactgcacgtaccggtccggaattcccgggtcgacccacgcgtccgcggacgcgtgggcagagttttaaggtttcccagcagagaagagcgcgtgcaaccaccacattgatataattaataagcaaggtttagagaagaggcaacatgggcacaaagatgaagaaggggatcctgaagccgttccgctatatctcaaccatcatggatggtaaggaggctgaaatgcaaattgggttcccgacggatgtaaaacacgtggcacacatcggttgggatggtcctggctccaccaacaacaatatcatcaacagcatcatcaatagtggcggagcacctagctggatgaaggattaccactcggcaccgcttgactcgtcctcttttaggagtgagagtgggggcacggctgctgcaaatccctgggcttctcaagagatagtcatggatggagcaagcgtcggagaaacctcttcagggacacgaatagcgaggcagg

SEQ ID NO: 94665 - DNA, 528 bp, Zea mays
  unsure (1)..(528): unsure at all n locations
cgcgcgaattattgctggtaatngtcgtagtatcgtcgttccggtcttgaattcccggagtcgacccactcgtgcgcggtctcgtggtctcagttgtaaggcttgacagctagcaagagcgcgtgcatccaccacatggatataattaataagcaaggtttagagaagaggcatcatgggcactaagatgaagaaggggatcctgaagccgttccgctatatctcaaccatcatggatggtaaggaggctgaaatgcaaattgggttcccgactgatgtaaaacacgtggcactcatcagctgggatggtcctggctccaccaacaacaataacatctacagcatcaactatagtggcggatcacctatctggatgaaggattaccactcggcaccgcttgactcgtcctcttttaggagtgagagtgggggcacggctgctgcatattcctgggcttctcaagagatagtcatggatggagcaagcgtcggagtaaccttcttaaaggactctaaatgccaggatgn

SEQ ID NO: 94666 - DNA, 527 bp, Zea mays
  unsure (1)..(527): unsure at all n locations
gagtgcgnttagtgctgcacgcagatgantgtactgactntaccggtccggaattcccgggtcgacccacgcgtccgcccacgcgtccgcagagataggcgtcttcgtactcgcctacctccgcggctcaaacctttcccccttctcccaattcccgccgccgctccatcccgtaacgcgacaccatgagggagtgcatttcgatccacatcggccaggccggtatccaggtcggaaacgcgtgctgggagctgtactgccttgagcatggcattcaggctgacggtcagatgcccggtgacaagaccattgggggaggtgatgatgctttcaacaccttcttcagtgagactggtgctgggaagcacgtgccccgtgctgtttttgttgaccttgaacccactgtcatcgatgaggtgagaactggcacctaccgccagctcttccaccctgagcagctcatcagtgggaaggaggatgcagccaacaactttgcccgtggtcactacaacattggcaaggagatn

SEQ ID NO: 94667 - DNA, 555 bp, Zea mays
  unsure (1)..(555): unsure at all n locations
ggtggtagtcgtaatctcctaggnccaactccctctgtactgcccgtaccggtccggaattcccgggtcgacccacgcgtccgcccacgcgtccgcaccctcgtctcacccttcctccctcacacaaataataaggaaaggtccggcccttttcctccgacatccacaaggggggaggggaaaacacgtacattcacccggcggcaataatggcctcggttccggctccggcgacgacgaccgtctccgtcatcctatgcctatgcgtcgtcctctcctgtgccgcggctgacgacccgaaccttcccgactacgtcatccagggccgcgtgtactgcgacacctgccgcgccgggttcgtgaccaacgtcaccgagtacatcgcgggcgccaaggtgaggctggagtgcaagcacttcggcacctgcaagctcgagcgcgccatcgactgggtcaccgacacgaccggcacctacacgatcgagctcaaggacagccactatgaggacatctgccaagtggtgcttgtggccagcccgtgcaaggactgcaacn

SEQ ID NO: 94668 - DNA, 575 bp, Zea mays
  unsure (1)..(575): unsure at all n locations
tgagtccgnttccctaaacctaatgtctaatgtactgatcgtaccggtccggaattcccgggtcgacccacgcgtccgtaattatttaactattttgtatagaactccattatatattaaggatgtgacgttcatttcaaaaaaaaaaaaaaaaaaaaaaaaaaaaaaaaaaaaaaaaaaaaaaaaaaaaaaaacaaaaaaaaacaaacaacaacaaaaacatcaactaaaaatcgtgcacctaatgatctaacatggtagagctacttcatacacctaatgctcactaaacacggcagacctcttttccaaactactgcctgatccaaaacctcttaaagccactttgatgttgcacccacttggacttttcagaaaatgtcttgtcgacacactccatactatttaattaattaaaaatggacggataatatatgaattacgaaatcttcacactaaaaaaaacattcttataatgacacttatgtaaccagtaaaatacacaagatgacatgagaaataaaaattgaaatcattataaaataataaagtcattttaagaatatcctacattt

SEQ ID NO: 94669 - DNA, 527 bp, Zea mays
agtgcttattaatctcgatgtttcttcgtctgcacgtaccggtccggaattcccgggtcgacccactcgtccgccctcctccacctttctccttttcttgccacggcaaaacaccttcgccggcgagagcatggcgatggcgtaccgtgtcctggaggtcaccctggtgtcggcaaatgacctcaagaaagtgtcgctcttctcccggactcgcatctacgccgtggcttccatctccggattcgacctccgcatcccttcccacagcacccaagcagaccacagcatcggctgcaacccctgctggaacgccgtggtacacttccccatcccggctgccgctgacacccgcggcctcgcactccacgtgaggctccgcgcccagcgtctatacctgggcgatcgcgacatcggcgaggtgtttgtgcccatcgacgaccttctggccggcgccgacaagggtggcgatccgaggcccgtgagctaccatgtgcgcatgccgcactctggccgggcccacggcgtcc

SEQ ID NO: 94670 - DNA, 528 bp, Zea mays
  unsure (1)..(528): unsure at all n locations
nggtggattactgaatacgtacgcatcctcgtatgacgtaccggtccggaattcccgggtcgacccacgcgtccgcgacaagatggcgtgcacagacaatgcgatgagagccttgttcctcctggtcctcttctgcatcgtgcatggtgagaaggaagagtcaaagggcatcgatgcgaaagcgtccgggcctggtgggtccttcgacatcaccaagttgggcgccttcggcaatggcaagacagacagcacgaaggctgtgcaggaggcatgggcatcggcgtgcggcggcactgggaagcagacaatcctcatacccaagggcgacttccttgtcggacaactcaacttcacaggcccttgcaagggcgacgtgaccattcaggtggatggcaatctgctggcgaccacggacctaaaccagtacaaggaacatggtaattggatcgagattctacgcgtggataacctggtcatcatcgggcagggaaaccctgactggcatggcccaaccgtgtggagcatgaa

SEQ ID NO: 94671 - DNA, 522 bp, Zea mays
  unsure (1)..(522): unsure at all n locations
gaggcnnttataatgagggagttgatggactgccctaccggtccggaattcccgggtcgacccacgcgtccgcccacgcgtccgcaagatggcaaatgctctcctaggtggcctgtgggcgatcgtcgtcgtcgcggtggtcgtcggcgtggtcgccaccgtcacccactccggcaagaaggccggcgacgacttcaccgtcccgggggaagcctccattgccacgtccggcaagtcggtcgagtccctgtgcgcgcccacgttgtacaaggagtcgtgtgagaagacgctctcccaggccaccaatggcaccgagaaccccaaggaggtgttccacagcgttgccaatgtggcgctggagtcggtgaaaacagcggtcgagcagtccaagacgatcggcgaggctaatgccagcgactccatgaccgagagcgcgcgggaggactgcaagaagctcctcgaggacgccgttgacgacctcaggggcatgctcgagatggccggcggcgacatcaaggtgcc

SEQ ID NO: 94672 - DNA, 528 bp, Zea mays
  unsure (1)..(528): unsure at all n locations
gtgcntttctattctcgacagaaccttcatccgactgcacgtaccggtccggaattcccgggtcgacccacgcgtccgcccacgcgtccggaataacacaggtgagcgcgacgatgggatccctcgctaataacatcatggtcgtgggcgccgtccttgcggcgctcgtcgccggcgggtcgtgcgggcccccgaaggtgccacccggccccaacatcaccaccaactacaacggcaagtggctcaccgctagggccacctggtacggtcagcccaacggtgccggcgctcctgacaacggcggtgcgtgcgggatcaagaacgtgaacctgccaccctacagcggcatgactgcgtgcggcaacgtccccatcttcaaggacggcaagggctgcggctcatgctacgaggtgagatgcaaggaaaaacctgagtgctcgggcaatccagtcacggtgtacatcactgacatgaactacgagcctatcgctccctaccacttcgacttgagcggcaaggccttcggct

SEQ ID NO: 94673 - DNA, 560 bp, Zea mays
  unsure (1)..(560): unsure at all n locations
agagcgagtcgtnttaaatgagnccttcngctcgtacgacctgcacgtaccggtccggaattcccgggtcgacccacgcgtccgcccacgcgtccgcccacgcgtccgcccacgcgtccgggacgccgcctccgtgctcaccgtctccaagatccactacgagaatatcaagatggaggactcagccaaccccatcttcatcgacatgaagtactgccccaacaagttgtgtaccgccaacggcgcctccaaggtcaccgtcaaggacgtcaccttcaagaacatcactggcacctcctccaccccggaggccattagcctgctctgcactgccaaggtcccatgcaccggcgtcaccatggatgacgtcaacgtcgagtatagcggcaccaacaacaagaccatggctatatgcacgaacgccaagggcagcaccaagggttgcctcaaggagctggcatgcttctagaccctncgtcgactgacccatctctctagttataatttttctctcgtccttgcatggcatattagttgctatccattggtaacgcacaaca

SEQ ID NO: 94674 - DNA, 531 bp, Zea mays
  unsure (1)..(531): unsure at all n locations
tgtggtnttcttgaattccactcgatcgctcgtctgcacgtaccggtccggaattcccgggtcgacccacgcgtccgcgacggggtgttcagctacaaccagatgggcgacgtgccccccgccgtgtacggtcccctccatgtgatccccaatgtcatcaccgccgagttccgcaccttcatcgagatcgtcttcgagaaccccgagaagagcatagactccctccacgtcgatggctactccttcttcggcgtcgggatgggccccgggtaagtggtcgccggaggtgaggaagacgtacaacctgctggacacggtgagccggcacacgatccaggtgtacccgcggtcatggacggcaatcatgctgacgttcgacaacgcgggcatgtggagcgtgcattccaacatctgggagcggttctacctcggggagcagctctacatcatcgtcgtctcgccggcgcgatcactgcgcgacgagtacaacatgcccgacaacgccctncgctgcggcaaggtcttggggct

SEQ ID NO: 94675 - DNA, 527 bp, Zea mays
agtgcgttactagtagactgccgactgcacgtctgcacgtaccggtccggaattcccgggtcgacccacgcgtccgcggggcggcattggccgtcggggaccttgaggtgctcaccgctctcgactcctcgaagactcactggtaccacttcaccgccatcgtggtctccgtcatggggttcttgaccgtcgcctactacctcttgtgcatctacctcgcgactaagctcctcggccgcatctactacaccgtggaggggtccgcgacgcccggctcccttccgtcgcacgtgtccgcgtacgtcaacggcttgtccttcttgggcacgctgtcagggcagctcttcttcggctggctcgtcgacaagctcgggctcaagaaggtctatggcatgacgctcatgctcatggtcctctgctccgtcgcgtctgggctctcgttcggccacaccccgtcgtccgtcatggcgacgctgtgcttgttccgcttctggctcgagttcggcatcggcggcgactacccgctt

SEQ ID NO: 94676 - DNA, 528 bp, Zea mays
  unsure (1)..(528): unsure at all n locations
gagccgaattacagctgccactnctcgctgcgactgcacgtaccggtccggaattcccgggtcgacccacgcgtccgcccacgcgtccgccgttcctcgtcgtctcgtgttgtttctcgcgttgccattgccccagctgtccgcccgcgcccgcggcaatggcaggcggcgtggtggtgaacgcggccgggggcaagacgtaccccggccgcatgacgccgttcgtgttcttcacctgcctggtggcgtcatcgggcggcctcatcttcgggtacgacatcggcatctccggcggtgtcacgtccatggcgtcgttcctcaaggagttcttcccttccgtgtacgccaaggcggcggcgaacaaggacacgaaccagtactgcaagttcgacagccagctgctgacgctgttcacgtcgtcgctgtacctggcggcgctggcgacgtcgttcgtggcggcgtccgtgacgcgggtgttcgggcgcaagtggtccatgttctgcggcggggtgacctttctggccnggn

SEQ ID NO: 94677 - DNA, 556 bp, Zea mays
  unsure (1)..(556): unsure at all n locations
gctgatggccntctgcatgaccatgagactcttggactgcacgtaccggtccggaattcccgggtcgacccacgcgtccgggagtcctgcgcgctctcccagcagtccaacctggtgctgtacggcaggatccagtgcaagggcaagtgcaccgagcagaagggcatcacggctccggccatgaaggtctgccaggaggagtgcgacaaggcgtacgtggtgaatgctgtcgaggtcaccaaggcctgcagcgtcacctgcgccaaggagaagaacccgcgcctcagcgagaactgcaagaggtcctgcacccctcctccttcttgaagcgaacccccttgaaatgaatgaaccatgcatgcatgcatgtatgcatgcgccggggtgacgtggcgttcagctcaagcgctgagcgagtctatacgtacgtcgtcaccggctggccacgcatgcgataaccatctgatatggacggaactatatattgtatttctattaatcttgcattttctaagctaaatggtttttttgcaaatataccgttcattggacctcc

SEQ ID NO: 94678 - DNA, 554 bp, Zea mays
  unsure (1)..(554): unsure at all n locations
ggagagccgaattaatgaacccagcncactacgtactgacgtaccggtccggaattcccgggtcgacccacgcgtccgcccacgcgtccgcccacgcgtccgctccctctccgtcccccaagcaaagaaaagaagctagcgtagctaggcgtagaacgaatgacgacgcagggcggcaacaggtcgacgacgacgctggtcgccgccgtggccgtagttctggccgtggcggcggcgtcgtccctggccggcgtggcgtccgcggagaaggcgggcgggttcgtggtgacggggcgcgtgtactgcgacccctgccgcgccgggttcgagacgaacgtgtccaggagcgtggccggcgcgactgtggaggtggtgtgccggcacttccgcgcgtccaaggtgacgcttaatgctgatgcgacggccgacgacagctggttttacatgctggagatcgactaggaccattaggaggagatcttgcaaggggttttggactggatctctgactaggtgtgtgccttgattgaggagtttcgtggctgtggtcgtct

SEQ ID NO: 94679 - DNA, 559 bp, Zea mays
  unsure (1)..(559): unsure at all n locations
ngtgtgatgcgtnttnattgaacatgatactcgtacgcactgcacgtaccggtccggaattcccgggtcgacccacgcgtccgcccggattcagacaggtgctaccattcgatttgatttggcgtggagcactttcctatggccgcctccatcgcggcctcgtccttctttccagggtcaccggcgccggccgctcctaagaacggccttggggagcgcccagatagcctggacgtccgcggcgttgcggcgaagccgggagcctcgtctagtgccgtgagggcgagcaagacgcgcgcccacgctgcggtccccaagatgaacggtgggggcaagtccgcggtggctgatggggagcacgaaaccgtaccttcttcggtgccgaagacttttacaaccagctttccgactggagcatgctccttgcggccatcaccactatcttcctggccgcatagaagcagtggaccatgcttgactggaagcctatgaggcctgacatggctactgacacgtttggggttgggccggatcatacatgattggcctatggtcaggc

SEQ ID NO: 94680 - DNA, 533 bp, Zea mays
  unsure (1)..(533): unsure at all n locations
ngatccggntatactattagtacagaangctggtacgcactgcacgtaccggtccggaattcccgggtcgacccacgcgtccgggcaaatgctctcctaggtggcctgtgggcgatcgtcgtcgtcgcggtggtcgtcggcgtggtcgccaccgtcacccactccggcaagaaggccggcgacgacttcaccgtcccgggggaagcctccattgccacgtccggcaagtcggtcgagtccctgtgcgcgcccacgttgtacaaggagtcgtgtgagaagacgctctcccaggccaccaatggcaccgagaaccccaaggaggtgttccacagcgttgccaaggtggcgctggagtcggtgaaaacagcggtcgagcagtccaagacgatcggcgaggctaatgccagcgactccatgaccgagagcgcgcgggaggactgcaagaagctcctcgaggacgccgttgacgacctcatgggcatgctcgagatggccggcggcgacatcaaggttgctatcagccggtccgacgc

SEQ ID NO: 94681 - DNA, 526 bp, Zea mays
tggccgtattataactgcagccgctgctgcgactgcacgtaccggtccggaattcccgggtcgacccacgcgtccggggttggcttctcctccccctccggttcgggttcgggttcgtgaggttctccggggttcggtttcgtgggtgagcggatcgagatggcggcgtctgatgttgagtaccgctgcttcgtcggcggcctcgcctgggccacggacgaccactccctccacaacgccttcagcacctactgcgaggtcctcgagtccaagatcatcctcgatcgggagacgcataggtcccgcggcttcggcttcgtcaccttctccacggaggaggcgatgcggaacgccatcgagggcatgaacggcaaggagctggacggtcgcaacatcaccgtcaacgaggcccagtcccgcggcggccgtggatgcggctgctgcggctggtactgtggtggccgttgatgctgcggctactgcagtggcgggcgccgtgatggcggcggctgctacggccgtcgcc

SEQ ID NO: 94682 - DNA, 529 bp, Zea mays
  unsure (1)..(529): unsure at all n locations
aatgggnnnnnnnnacctgcacgtacactcgtgcgactgcacgtaccggtccggaattcccgggtcgacccacgcgtccgatctcttcctcctctctcatctaagccggtggccagggggcataacccagccgacggggtacggcggcgtgggggtataacccggccggcgaccacggaccgcgactacgatcttcatagtcgaggccctgctaccttgggccccgaggtccttgacatttcaatgtggagaaaaggatataccgtgcctttattttgaataatagttatccaagaatttgttctaggcgaattcgatgacgacgcgactgctgcataccatgaaaatatcacttctgagttagttgacgatgaccatcatgtgaaagatatatctcagaggtatcatgttcacttgtatacaaatgggactgtatgcgatctcacagatattccgcgggagacagaggttagatttgtctgctcggagcctactgtactgattagttcagtcaaggagatctcttccn

SEQ ID NO: 94683 - DNA, 561 bp, Zea mays
  unsure (1)..(561): unsure at all n locations
tgagagatgtcgtattacctgaanccaacngctcgtacgactgacgtaccggtccggaattcccgggtcgacccacgcgtccgggcgcatgctgggaaacattaggttaattggagagttgtacaaaaagaggatgttgacggaaaggattatgcatgaatgcattaaaaaattgtttggaaatcatgatgatcctgatgaggagaacattgaagcattatgcaaattgatgagtacaattggtgatatgattgatcatgtaaaggcaaaggagcacatggatgcctattttagtatgatgcagatgatgtcaacaaatcagaagttgtcttctcgtgtaaggtttatgttgagagattcaatcgacctcaagagaaataaatggcagcaaaagcgtaaagtcgaaagtcccaagaagattgatgaggttcacagagatgcagcacatgaaagacatgcccaatcgagtaggttgggacgtggtcagctgttaagtctgttccaagaagagcacatnctatggattatggccctcgtggaccatctgcattaacattcttc

SEQ ID NO: 94684 - DNA, 567 bp, Zea mays
  unsure (1)..(567): unsure at all n locations
ngggatagatgccnntnttnccttgattttagtaaactcgttgcgactgacgtaccggtccggaattcccgggtcgacccacgcgtccggaaccactcaagcaagctgagctgaaagcagttagaaacgagataaaaccagatcctatgtccacgatgagggcaccccaagttccttccatgctaccttttaacaatcttgcttttggcgcaacatttggtggtccagctagtctgaagcccatgacaatggctccaatgccaatggccatgcctatgtcaccagctcctctcacaaagaagccaactccagcagcagcaactcctctttgtggtaaaagtgataccgataacttgaagatggctaaacaggtgctgaatgaagatatctcaaagttgcaatctcaggttaataaactgaaacaaaaatgtgatgcccaagaagagcaactgcagaaagcggaaaggagagctgaacattctgnctctacagctgcagaagagtcttcaaggcgtaatggtgtcttggagttcattangttccttgacaatgagctcaagagcatcg

SEQ ID NO: 94685 - DNA, 525 bp, Zea mays
ggcgttgagtgaagttccccgatcaagatcgtctttccggcttgaattacgggtcgaccgacgcattcgttcgcgcacgcgtacgctgacgcttgcggcgattcgaaataatcgggtataaatagctcgggagtgcctgaagcgcgcacatatatattcctgccaagataaaggtaatggagtcgacacgcatgttccagcacggtcgtgatcctacttatactgatcattgtgtacaccgatatggcgcacgcaagggaatgcgagaagtacagtgagcgatttcttggagcattcatgatcgcagacaactgcgccaatgtgtgccgcgctgagggcttcttggccggcaggtgcagcaccttccgccgtcgatgcatctgcactatgcagtgctaaacaagatcgatcgatcgctcgacatgcattgacaacctattcttaataacgttcattatctcgttcttatctatgactaatgtcatgtatgtcctcgtgactgacatgtatattacgatgactgcg

SEQ ID NO: 94686 - DNA, 527 bp, Zea mays
  unsure (1)..(527): unsure at all n locations
gtggnttcgtgattcagccgatgatcgcatgcacgtaccggtccggaattcccgggtcgacccacgcgtccgagtcggtccagacggcggtcgagcagtccaagtcgatcggcgaggccaaggccagcgactccatgaccgagagcgcgcgcgaggactgcaagaagctcctggaggacgccgccgtcgacctgaggggcatgctcgagatggccgtctgcgacatcaaggtgctgttcagccggtccgacgacctcgagacctggctcacgggcgtcatgacgttcatggacacctgcgtcgacggcttcgtcgacgagaagctcaaggccgacatgcactccgtgctgcgcaacagcacctagctcagcagcaacgcgctggccatcaccaacaagtctagcaggatccctgataaaatggacctcatgcatgttcagcaaggactcgcgccgcctactgctgtcgtaggatcatgattagaaaggctggcccgtgtggatgcngtcaccgtagaggaagctgcc

SEQ ID NO: 94687 - DNA, 564 bp, Zea mays
  unsure (1)..(564): unsure at all n locations
aggtgaggtccttattccctgaaaactgacagcggctgcgactgacgtaccggtccggaattcccgggtcgacccacgcgtccgggcaaaggctctcctaggtggcctatcggcgatcctcgtcgtggcggtggtcgtcggtgtggtcgccaccgtcacccgctccggcaagaaggccggcgacaacttcacggtcccgggggaggcttcccttgccacgtccggcaagtcggtcaagtccctgtgcgcgcccaccctatacaaggagtcgtgcgagaagacactgtcccaggccaccaatggcaccgagaaccccaaggaggtgttccacagcgtggccaaggtggcgctggagtcggtccagacggcggtcgagcagtccaagtcgatcggcgaggccaaggccagcgactccatgaccgagagcgcgcgcgaagactgcaagaagctcctggaggacgccgtcgacgacctgatgggcatgctcgagatggccggcggcgacatcaaggtgctgttcagccggttcgacgacctcgagacctggctcacgggcgtcatgan

SEQ ID NO: 94688 - DNA, 526 bp, Zea mays
  unsure (1)..(526): unsure at all n locations
ttggcttctgaataagacgatgttcgcttgcacgtaccggtccggaattcccgggtcgacccacgcgtccgatcgatgcgaaagcgtccgggcctggtgggttcttcgacatcaccaagttgggcgcctccggcaatggcaagacagacagcacgaaggctgtgcaggaggcatgggcatcggcgtgcggcggcactgggaagcagacaatcctcatacccaagggcgacttccttgtcggacaactcaacttcacaggcccttgcaagggcgacgtgaccatccaggtggatggcaatctgctggcgaccacggacctaagccagtacaaggaacatggtaattggatcgagattctacgcgtggataacctggtcatcaccggcaagggaaaccttgacgggcagggcccagccgtgtggagcaagaactcctgcaccaaagagtacgactgcaagatccttnccaactcgctggtgatggacttcgtgaacaacggggaggtgttcgggatcacgctgctcac

SEQ ID NO: 94689 - DNA, 527 bp, Zea mays
  unsure (1)..(527): unsure at all n locations
gtgcnttagtgaagctagccgatatcgataggactgtcgtaccggtccggaattcccgggtcgacccacgcgtccgagaaggacttcacggacatcaacgtcacggattgcactcttaagaagacgatgctcggcgtccgcatcaaggcgtccgaggacgccgtcttcgtgctcaccgtctccaagatccactacgagaatatcaagatggaggactcagccaaccacatctccatcgacatgaagtactgccccaacaagttgtgtactgccaacggagcctccaaggtcaccgtcaaggatgtcaccattaagaacatcaccggcacctcctacacacgcgaggccgttagcctgctctgcactgtcaaggtcccatgcaccggcgtcaccatggatgacgtgaacgtcgagtatagcggcaccaacaacaagaccatggctatatgcacgaacgccaatggcagcaccaacggttgcctcaaggagcttgcatgcttatagaccctgcatcgactgacccatct

SEQ ID NO: 94690 - DNA, 529 bp, Zea mays
gtggcttttactaactgccacgcagctcatccgactgcacgtaccggtccggaattcccgggtcgacccacgcgtccgcccacgcgtccgggtgggttggcttctcctccccctccggttcgggttcgggttcgtgaggttctccggggttcggtttcgtgggtgagcggatcgagatggcggcgtcggatgttgagtaccgctgcttcgtcggcggcctcgcctgggccacggacgaccactccctccacaacgccttcagcacctacggcgaggtcctcgagtccaagatcatcctcgatcgggagacgcagaggtcccgcggcttcggcttcgtcaccttctccacggaggaggcgatgcggaacgccatcgagggcatgaacggcaaggagctggacggccgcaacatcaccgtcaacgaggcccagtcccgcggcggccgtggaggcggcggcggcggcgggtacggtggtggccgtggaggcggcggctacagcggtggcgggcgccgtgatggctgctgcgg

SEQ ID NO: 94691 - DNA, 534 bp, Zea mays
  unsure (1)..(534): unsure at all n locations
tgtgtctctcntgaangccgtaaagcccgtagatagcgacgtacgtacctgtccggaattcccgggtcgacccactcgttcgcccacgcgtccgacaaagcagtcgaaaagaatgaatggaagccattgcctctaattcaggaagcttttattggtctgactgctggagcaattggtgcttgttttggtagtcctgctgatctggcactcattagaatgcaagccgactcgaccctgccagctgcacaacgacgcaactataagaatgctttccatgcactctaccgtatcagtgctgatgagggagtccttgcgctttggaagggtgcatgttcaactgtggcgagagctatggcactcaatatgggtatgcttgcttcctatgaccagagtgtcgagctatttagggacaaatttggcgcatgagaaatttctactggtgttggagccagagcttgttctggattctttgactgagcatgcagtttgacctttgactatgggaagacacagattcagaatatgccacctgtn

SEQ ID NO: 94692 - DNA, 558 bp, Zea mays
  unsure (1)..(558): unsure at all n locations
tgtgagtgtcgtgttcatgatcatgatgctcatagnactgactgtccggtccggaattcccgggtcgacccacgcgtccgcccacgcgtccgcccacgcgtccgcggacgcgtgggtgggggcttcgcgctcggcctggccatgaaccactgcatgttcgacggcatcggcgccatggagttcgtcaactcgtgggcggagacggcgcgcggcgtcgccgagctcaccgtgccgccgttcctggaccgaagcgtcctgaaggcgcgcgacccgcccgtgcccaccttcccccaccacgagttcgccgagatccccgacgtctccgacacggcggcgctctacggcgcgcaggagctgctgtaccgctccttctgcttcgacccggaccggctggagcgcgtgcgcggccttgcgctcgccgacggcgccctgggccgctgcaccaccttcgaggcgctgtcggggctggtgtggcgcgcgcgcaccaaggcgctggggcttgcgcccgagcagcgcaccaagcttgttgtcgccgtggacggggcgcgncggttcgcg

SEQ ID NO: 94693 - DNA, 523 bp, Zea mays
  unsure (1)..(523): unsure at all n locations
tgggtnctataactgcagccgactacgtaccgacgtaccggtccggaattcccgggtcgacccacgcgtccgggagagaactagcaaagggaaaatggctgcttccacaaacaacactctcagggtgctgttcaccctaatggttgcatgcgccgcagtatgcacagcgaaaaggaccgtatcaaagacaggagacttggcgccagtccctgctgcattaggagcaggaggcgccaccgcagccccagaaggtgcagctagagccagcaggacgttcgacatatcgaagttcggcgcgaccagcgacggcaagacggactcgacacaggtggtccaggacacgtggacgtcagcgtgcggagcgatgggagacgcatcgatgctcatccccaagggcgactacctggtgggccctctctacttcagaggcccgtgcatgggggacatcaccatccagttcgatggcatcctgctgggatccaacgacctgtccaagtacacggcgagttggatccagtgtcgc

SEQ ID NO: 94694 - DNA, 523 bp, Zea mays
  unsure (1)..(523): unsure at all n locations
gtggnttnctggtcgcagctgatgaatgaccgacgtaccggtcctgaattcccgggtcgacccacgcgtccgatgtgcttgcactggcagtctaaagtatgctcataggacttgtgtacatcgatggtgcaatgagaaaggagatgtaacatgtgaaatatgtcatgagccttatgaacatgggtacactgcacctcccagaggccatcctgatgaaactaccattgatataagtggtgggtggacaattaccggtaccgtatttgacttgcgtgatcctaggatacttgcagtggcacaaaaccacatcatggaagctgaatatgatgattattctgccacaaatgcgagcactgctgacttctgccgctctgctgctcttgttttaatggctctcttattgttgagacacgcactgactctaactgatgaagatgacgacgacactttagcgatgttttcactttttctgttgcgtgctgctggtttcctgcttccgttctacatcatggcttgggcaatc

SEQ ID NO: 94695 - DNA, 557 bp, Zea mays
  unsure (1)..(557): unsure at all n locations
tggantatataattgaacttgaaagcggtacgactgcacgtaccggtccggaattcccgggtcgacccacgcgtccgcggacgcgtgggcggacgcgtgggaaagccagctatgagaatgtttcgaagaagtggatacctgaactgaagcattatgcacctggtgtgccaataattctcgtagggacaaagcttgatcttcgagatgacaagcagttctttgtggatcatcctggtgctgttcctatcactactgctcagggagaggagctaagaaagcaaataggcgcgccatactacatcgagtgcagctcaaagacccaactaaacgtgaaaggtgtcttcgatgcggcgataaaggttgtgctgcagccgcctaaagcgaagaagaagaaaaaggcgcagaggggggcgtgctccattttgtgatctaataatgatcagtagacaaaagaaaacaaggcgaaagtgccatggttctattatcgncgcgtcttgcttcagcgaaacaacaatggatgatcccaaccncttccccctagattttattgccggctg

SEQ ID NO: 94696 - DNA, 589 bp, Zea mays
  unsure (1)..(589): unsure at all n locations
gtattatttattatgtgattgtttgttncctaaactgattgtatntcttcctnccgtcctgaattcccgggtcgacccacgcgtccgcccacgcgtccgcaagaacatggggttccacaacacggccggcgcggagcggcaccaggcggtggcgctccgggtgcagggggacctcgcggcgttctacaactgccggttcgacgcgttccaggacacgctgtacgtgcacgcgcggcggcagttcttccgtaactgcgtggtctccggcaccatcgacttcatcttcggcaactcggcggcggtgttccagaactgcctcatcatcacgcggcggcccatggacaaccagcagaactcggtgactgcgcacgggcgcaccgaccccaacatgaagtccgggctcgtcatccagaactgccgnctggtgcccgaccagaaactgttcccggacccgttcaagatcccctcgtacctgggccgtccctggaaagagttctcgtgcctcgtcataatggagaggcacattggccgctttttcaaccataatgggtacatgccctggaacggtgacttttgcctttaagactct

SEQ ID NO: 94697 - DNA, 587 bp, Zea mays
  unsure (1)..(587): unsure at all n locations
gatatgatgttatatatatgatgtaaatatgagctagtnntgtanagtagcgtagcactcgactgaactggaatttccgagcccagagcgtccgcgtggatttaacatctactgtgtcggaatcatcgtttatcgtggtctgtactttgggctctgtgattccatcaagccagttgtccttactggcaacctccaggacaatttctttgccagtttcgctctgggttggctgatcactaatggtgctggtcttgcatcttaccccatcgataccgtccgcagaaggatgatgatgacatctggtgaggctgtcaagtacaagagctccttggacgcgttccagcagattcttaagaaggaatggcccaagtccctgttcaagggtgctggtgctaacattcttcgtgccattgctggtgctggtgtgctgtctggctatgaccagctgcagatcctcttcttcggaaagaagtcggctccggcagtgcttaaatggagtaatatgattacgaacaaaagcagtgtgtgtttccggcctttccaatcaggatcttgtgaaatttttggccttcatatcgaccaaatta

SEQ ID NO: 94698 - DNA, 590 bp, Zea mays
  unsure (1)..(590): unsure at all n locations
tatatgatgttatatatatgatataatatgtctcagcttagtatgtagtcctcctacnccctnnnnntnnnnaacnaancagacccacgcgtccgctccgatccatcaacaatcgccgagagcgatcgagagataaataaagatgaagaaagtggcatcatcgtcagccgttctcttcgtgctagccctgacgctagtttgtgccccgctgatagcagaggcaaagaagaagagagtcgccgccgccgccgccgaggagaagaaggtgcaggacaacttctgctcgacgctgtgcgagggcaggaaggggatggacctggtggtgtgcaaggagtcctgcgacctctcacagcgctccaacctggtgctgtacggccggatccagtgcaagggcaagtgcaccgagcagaagggcatcaccgcgccgcagatgaaggtgtgccaagaggcgtgcgacaaggactacgtggtcaaggcggctgatgtcaccaaggccttgcacaccacctgcgccaaggagaagcaacctctgctcaaccagaactgcatgaagttctgcaccccttcttctttctttacgcatagcacgc

SEQ ID NO: 94699 - DNA, 567 bp, Zea mays
  unsure (1)..(567): unsure at all n locations
atatgagtatggatgatgtcctgtggttaggatgagagtcactcgtcttgaattcccgggtcgacccacgcgtccgcccacgcgtccggcggatgagtgcgacggctacgaggccggcccgctggtcgccgccgctggaaccggaaccggaaccattcccggttgaacccggaaccccccggcggtgcggtcccgggccgccgcgtgggcgctgttcgtggaggagtcgcggaggctgtgggcgatcggcgcgcccatcgccctgaacatcatctgcctctacggcaccaactccacgacgcagatcttcgcggccacatcggcaacctggagctctcggcngtggccgttggcctcttcgtcgtcttcaacttctncttcggcttcctnctcgggaatggcagcgcgctggagacgctgtgcggnncagcgttcggggccggccaggtgtncatgctgggcgtctacatgcagcgctccttgatcattctcgncggcttcgncgggcttctcaaggccggtttacgtgtacccgggggccgttcttcggctgctggggcaagaacc

SEQ ID NO: 94700 - DNA, 583 bp, Zea mays
  unsure (1)..(583): unsure at all n locations
gtatgattgttatatatnatatgtnngaagatgttagtaatctaagggaagatagtcctcgccttgaattaccgggtcgacccacgcgtccgcccacgcgtccgcccgtggccgccacgaactgcttcaacgcggacgtgctgagggccacgacgcggcgtgcgctggcgaggtacgatggcccgtgcttggcgaccaaccccatcgaccggtgctggcgctgccgcgccgactgggcgacggaccggaagcggctggcgcagtgcgcgcgcgggttcggccacaggagcgtcagctgcgcggccggcaagctgtacgtggtgagggacccgagcgacgacgagatgatcatcccgcggaagggcacgctgcggcacgcggtgatccaggaccggccgctgtggatcgtgttcgcgcgcgacatggtgatcgagctgcggcaggagctgatcgtgaaccacaacangacgatcgacgggcggggcgcgcaggtgcacatcatgttcgcgcagatcacgctgcagaacgtgcagaacgtgatcctggacaaactggacatncacgactccaatggcaactcggc

SEQ ID NO: 94701 - DNA, 508 bp, Zea mays
  unsure (1)..(508): unsure at all n locations
naganaaagtgtgtgncattgaattacgnatgctatgcctctacttgcttcgaattcccgggtcgacccacgcgtccgggtgaaggtgttcagcaggcattgctgataatgctggaaggcacgatagtcaacgttcctgaaaaaggagcaaggaagcatcctcgtggtgataatatacagatagataccaaagatattctttttatatgtggtggcgctttcgtggatttggagaaaactatatcggagagacggcaggattcttctattggcttcggcgcaccagttcgtgcaaacatganggtcggtggcacttcaagtgctcaagtgacatcgtncttgttggaatcggttgagagtggtgatctaatagcttatggacttatcccagaatttattggacgtttccctatccttgtgagcctaaccgctctaaatgaggaccagcttgttcaggttctcactgagccaaagaatgccctgggtaagcaattcaagaaatgtttac

SEQ ID NO: 94702 - DNA, 570 bp, Zea mays
atattatgggtgtaagatctcatgatttagaagaggattcctcctccggaattcccgggtcgacccacgcgtccgcccacgcgtccgtccacgcgtccgcccacgcgtccgcgcgtggttcgttaggaaaggaaatggaggcccccagcatctgatctcttcggtgctagagaaatataggccgccgccgcctactactcattcggtgaaaggtgcgcagttagggttgggagatctcttgcctcacgacacgagcagcagaatttgtcgagggccgctggttgctgcgagaggtccgggccttcgtgggatcttgaaaattgaatgttctaatggagtccaaaggtggcaaagaagaagtctagcagtagacggtcctccctgatgtacgaagctaccctctgctacagcatcgatgatatccgcccttgcagctgcatcaagaaattcttcgctgcttactcgaactttgcgaggtagcccttctcgaattctctggtggcattcccatcccattagcctttaaacccaactgcaatttcaatttggactcccaaatccctccggtaa

SEQ ID NO: 94703 - DNA, 584 bp, Zea mays
gatatgtatttatatatataatgggttttatggttatgtttttgaggatggatgcctcgtcctgaattcccgggtcgacccacgcgtccgcccacgcgtccgcccacgcgtccgcccacgcgtccgggagcaactccttgggcaggtcgacacagagcagctgggagaaactgctgaaccagaggtcaaggtgctggacctgaccattctgtcacctggcagaccggacctgatccttccgatcccgttccaggctgacgagaagggctatgcgtttgccctcaaggacggcatcccctacagcttacgcttctgcttcatcgtcttcaacaacatcgtgtcaggcctcaagtacaccaacactgtctggaaaactggagtcaaagtggagacccataatatgatgctggggacgttcatgcagcagctagagccctatgtctacgagggcgattaagaaaccacccctgcttgcatttttgcgagaagttcttattttgtcaaactaaagttggatgatgatgattgcgaagtgcttcatgaggttgatttctactttgagactacaaagggatgggcctgaa

SEQ ID NO: 94704 - DNA, 560 bp, Zea mays
  unsure (1)..(560): unsure at all n locations
atttataggtaaatgctcccgtacctgnngtagcancggtctcgattcccgggtcgacccacgcgtccgtccacgcgttcgtccacgcgtccgcccacttttccgggagcaactccttgggcaggtcgacgcagagcagctgggagaaactgctgaaccagaggtcaaggtgctggacctgaccattctgtcacctggcataccggacctgatccttccgatcccgttccaggctgacgagaagggctatgcgtttgccctcaaggacggcatcccctacagcttacgcttctgcttcatcgtctccaacaacatcgtgtcaggcctcaagtacaccaacactgtctggaaaactggagtcaaagtggagacccataatatgatgctggggacgttcaatccccagctagagccctatgtctacgaaggcgaagaagaaaccacccctgctgggcattttgctagaggttcttattctgtcaaactttaagttgttgatgatgatggcaagtgcttactggagattagttactactttgagatacgaaggaatggccttg

SEQ ID NO: 94705 - DNA, 588 bp, Zea mays
  unsure (1)..(588): unsure at all n locations
gatatgatttatatatatcatgtgntaaatagnnttttctactttcttcttactcgcttcctccggactggaattcccgggtcgacccactcgtccgcccacgcgtccgccgaggagatggctgccttcatgaaggatttcgacgagccggggcacggggcccttaccggcctgatcctgggaggcaccaagtacatggtcattcaaggcgaacctggagctgtcatccgtggcaagaatggatccgggggcatcactgtgaagaaaacagggcagtcactcatcattggcatctacgacgagcccatgactcccggtcatagcatcttgtgggtggaaaggctggtctactacctgtcttaactgggtgtggaacaacttcttattttcgggattgcttgttgattattatgtatgtttctatattctccatagttatatattctacctattctatgacctttctatccatttttttatctttatctggttttttaattgtttaattttatgttttagtgtactgataatatattattttcaaaaatctgtatatttatgattgtttataggttgttgtttttnttt

SEQ ID NO: 94706 - DNA, 582 bp, Zea mays
  unsure (1)..(582): unsure at all n locations
gatattatttatatatatnatgttggttatttncattagaaaatgtatagtatcgctctaccggtccggaattcccgggtcgacccacgcgtccgactacatgttgcgtttgttctgcatcggcttcaccaagaggcgcccaaaccaagtcaagagaacctgctatgctcaggcatcccagatccgtcagatccgccgtaagatggttgagattatgatcaaccaggcttctacatgtgacctgaaagaacttgtttcgaagttcattccagaagttattggtaaagagattgagaagtctacctccagcatcttcccacttcaaaacgtcttcatccgcaaggtgaagatactcaaggcccccaagttcgatcttgggaaactcatggaggttcatggcgactacaaagaggatgttggtgtgaaacttgagaggcctgtcgagggagatgaggctgggcaagaggttgctgctgcccagtattttgtttgctacttctgtatctaggccagtctggacattaggttgcttatgacgtgaacttattgagtggcttggctacgtggtttaatctggcccta

SEQ ID NO: 94707 - DNA, 581 bp, Zea mays
  unsure (1)..(581): unsure at all n locations
tatatgatatattatatnatggggtaatgtcctacgttaaagtaagtagctancggtcttgaattcccgggtcgacccacgcgtccgtccttcccggtctcctccgcccgttgccttcgtcccctccatctccggctgcgacgccggcgagcccgacaccgcgaatcggatccgccgacaaggcgagagggaagagatggggctcacgttcaccaagctgttcagccggctgttcgccaagaaggagatgcggatcctgatggtgggactcgacgccgccggaaagaccaccatcctctacaagctgaagctcggcgagatcgtcaccaccatccccaccatcggattcaatgttgaaactgtggagtacaagaacatcagcttcactgtctgggatgtcgggggccaggacatgatcaggccactgtggaggcattacttccaagacacccagggtctcatctttgttgtggacagcaatgatggggacccttttgttgaagcatgggatgagcttaaccgaatgcttaatgaggattagttgcctgatgcctgtgtgcttgtgtttgctaacaagccag

SEQ ID NO: 94708 - DNA, 583 bp, Zea mays
  unsure (1)..(583): unsure at all n locations
tatattatttntatatataatgaagtaatatggcctgtcgagggggttngtggctaccggtcctgaattcccgggtcgacccacgcgtccgcacccgtctgccgctgtgccgcacggccctcaccccgcacgagacccgtccttgaggggcacgtcctatatcggtggctcctgcctctcgccgccgatacagtgcctctcgcggtctcgctcccactcacaggtctattggtttttttagttcctaccttagcttcttggaggtgtttgttgccgtctcacccgcagttcttgagacatgcagagccagatagtgtgccacgggtgcaggacccttctgatctacccaagaggtgctccgagcgtgtgttgtgcggtatgccatgtggtcaccaatgttgccgcttcagcaatggagatggctcgacttatatgtcgtggcttgcagacattattgatgcatgctcgcagtgcaacaactgtaaaatgctcatgttgtgacacaattaatcttgtcagaccagtgagtatcataaaccatgttgactgtggcccattccaaacaaggttaatggatccaacc

SEQ ID NO: 94709 - DNA, 577 bp, Zea mays
ttatgatttaatatggttgttgtaaaatgtctagtttggtgagatgtatcactcgccctgaattcccgggtcgacccacgcgtccgcaagatggcaaatgctctcctaggtggcctgtgggcgatcgtcgtcgtcgcggtggtcgtgggcggggtcgccaccgtcacccactccggcaagaacgccggcgacgacttcaccgtcccgggggaagcctccattgccacgtacggcaagtcggtcgagttcctgtgcgcgcccacgttgtacaaggagtcgtctgagaagacgctcttccatgccaccaatggcaccgagaaccccaaggaggtgctccacagcgttgccaatgtggcgctcgtgtcggtgaaaacagctgtcgagcgaatcaagactatcagcgaggcctatgccagcgacttcatgaccgaaagcgcgcggcaggactgcaagaagcgttctcgaggacgccgatgacgacctatggggcatgctcgagatagtcggtggcaacattcaagtgcttatcagtcggtcgtcaacttcggacatggctcacgggcgtaaatacctcctt

SEQ ID NO: 94710 - DNA, 589 bp, Zea mays
  unsure (1)..(589): unsure at all n locations
gatattatgtaatatatatgnatgtggttattatgtctccatgcttatagtatcgtagcactcgcctggnctggaattcccgggtcgacccacgcgtccgcggtgccaggcctcgccttctggcggcggtgctccctcgctcttcgtccgccagcgacgcgggcaggctcgcgcgcggccatgaaggggggcggtgccatgaggccgtcgcctatgttctacgtccacgaggcgtacgtcgtccagatccaccacttcctcgaggagtgctacctctgcgccaaatcgctctactgcgacatcttcatgtacaggggtgacacgccgatctgcaacgaggagtgcaaggagcagcacatcgaggatgacagggcgaagcacctgctgaagaagcgcgcggcgactcacgcgctgttcgcacgcatcagggagcaccggcaccagcagcagctgcagcagcaccaccactagcagcagcaacctgcatctttgaatgccgtcatggacactctgaacctctagttggacgccagggttgtcaggcccagtgcgcccgtactgcgcgttttgacataagaattagctcgcc

SEQ ID NO: 94711 - DNA, 504 bp, Zea mays
  unsure (1)..(504): unsure at all n locations
agttaaattttgtcactgagtgagggagggagagcatgcccgcctcggaattcccgggtcgacccacgcgtccggtcctcgaccatccctgcaaattaccgctatggctcccaagatcctagtcatccttgtgttcctcgccgtggcctcaccggctgctctggccgccttcgatgtgatagagatgctggccgacaagcccacgtactccacgttcctgaagctcctgcaggacaccaaggtcgcgggcgaggcgaatcagctccggtcggcgacgctactggtcgtccccgacaaacttgccaagcctctggcgtcgctgcccgccgataaggtgcggccggcggtggagaaccacgtccttctcagttacttcgaccccatcaagctggacgagatgaagacacgcaccgtcatcctncccacgctgctctccgtcaccgacaagaaactcggcgtcctcaactacaccagggccgacgacgggcagatgtacttcggcgc

SEQ ID NO: 94712 - DNA, 511 bp, Zea mays
  unsure (1)..(511): unsure at all n locations
ntggggggatggttgtccacgaggatataggatggtagcctggcccctgntcggaattcccgggtcgacccacgcgtccgggcgaagggcaggcccggctccgtcccgttccatgaaggcctaacccgagcgggcaggcttttaagtagggcgcgagtgagagcgagcggccaatcggccgggagcgaagccagcgctagctgccgcctccctccccggtcctcgggtccgccgcgcgcgcgccggccgccaccaccgcacgacgccgaccaccacaattagctagcagcggcgtcgactaataaacgacaatggcgtccatctccctcgaggacgtccgcaacgagaccgtcgacctcgagaccgtcccggtgcaggaggtgttccagcacctgaaatgcagcaaggaggggctctccagcgccgagggagacaatcggctcaagatcttcgggcccaacaagctgangagaagtcggagagcaagctgctcaagttcctgggcttcatg

SEQ ID NO: 94713 - DNA, 587 bp, Zea mays
tttatgatgttatatatataatggggaaagatgctcctacttgatatatttattgtgctgccccggtccggaattcccgggtcgacccacgcgtccgcccacgcgtccgccagcccgcccctcaacctcacccagcgcgacgaagccggggggcgagggctccagcgccgccgcgccagcgacctcaccccccgggagccgccggcggtacccccctccctatcacgcctcatcgaatcctcaggtctaagtttttttttgttttgtgagttatccaaagttggaccgcaaagatgagtactgctaatcactatcagcacatcaagtgaaccaagcctgttgtaggcaaagcaagaaaattgaaggatctcatgataaaaagtgataataggatatgtgctgactgttgtgcacctgatcccaaatgggcatctgctaatattggagtgtttctttgcttaaaatgtggagatggtcatagggcaactggacctgacatttacaaggttttatttgggacttcggatgataggtcagaccgtgatatggacttcatgggtgaaggttgtggaaaactgaatatccaa

SEQ ID NO: 94714 - DNA, 508 bp, Zea mays
  unsure (1)..(508): unsure at all n locations
aggggaatgttctaagtaattatgaggagagaggagatgcaccggttcggaattcccgggtcgacccacgcgtccgcttctcccccgcggccatccgcttctacattgccgagatcgtctccgcggtcgccgagcgccacgccgcgggcgtcgtgtaccgtgacctcaagcccgagaacgtgctcctccgcgccgacggccacgtcacgctcaccgacttcgacctgtcccgcctcctccaccccagcaggtcgtccgcggagtcgtcgtcgcccccgcggccagcgtcgtcccgcggccaccacaaccgccggtcgcgcgtccccgcgcggagcgactcggttctcagccagcaggtcaagtcgtactccaactccaacaactccaggccccctcaccagccctggtccgcggcgtcgtcgccgcggcagcagctccagagcctggtccgctacatcatggggagcggcgacgggaccggngtgggcaggaagagcaagtcggcgcc

SEQ ID NO: 94715 - DNA, 578 bp, Zea mays
  unsure (1)..(578): unsure at all n locations
gtatgatgttttatgtgattatgtaatggcctcgttggaaaggagtagccttctcctgaattcccgggtcgacccacgcgtccgcagccccatatccatgttccaggtgacttttctcaagtgcggcggcgtggtgctaggaaccgccatccaccacgcggccatggacggcgtgggcgcgttccagtttatgcagacgtggtccggggtggcacgcggcctggacgtggcggaggcgtgcgggccgcagccgttccacgaccggacgctcctgcacgcgcggcgcccgccgtgcccgacatccgaccacttcgtctactccccggcgttcctcagcgtgccgtcncngcccttcnttncttgcctcttcttctggtttgtttagcgttttttagggagtttcttgtttccttcgtcgtcgtttcggggctttctcgcgttggttgctggggtgtttgttcttgttttttttgtttgatgtcgtttaattctgtgcttacttgtgttattngtatttttgaattttttagaatgtatctttagtcttgttaacgcatgggaacttgttgaatgatttg

SEQ ID NO: 94716 - DNA, 568 bp, Zea mays
atattaggggttatgtggtcagcccttgggagtgctgcactcgtcctgaattcccgggtcgacccacgcgtccgatcaccgcggccagcgactacaaccagtcgctgcagttccgggacctggacagggagaagaagaagatcgacatgcaggtcacccgcgacggctaccgccagatagtgtccatatatgacattgtcttcggggatatcgtccacctgtccatcggcgaccaggtgccagcggacggcctgtacatcgacggctactcggtagtggtcgacgagtcgagcctatccggcgagagtgagccagtgcatatgtacagtgcaaaacctttcctgctcggcggtaccaaggtgcatgacgggtcggccaggatgctggtcaccgcggtcgggatgcgaactgagtggggaaacctcatggaaacgctgagccaaggctgtgaggacgagacgccgctgcatgtcaagctcaacggcgtggccaccatcatcggcaagatcggtctggtattcgcggtgctaacgttcaacgttctcatggcacggtttcttgtgggcac

SEQ ID NO: 94717 - DNA, 580 bp, Zea mays
  unsure (1)..(580): unsure at all n locations
gatattattgattatgtnatgtttttatgtgctagtggaatggattgtatctctctcttgaattaccgggtcgacccacgcgtccgcccacgcgtccgagcagcatctcgagtaacacagttgagcacgacgatgggatccctcgcgaataacatcatggtcgtgggcgccgtccttgctgcgcttgtcgtcagcgggtcgtgcgggccccctaaggtgcctcccggcacccaacattaccaccaactacaacggcaagtggctcaccgccagggccacctgttacggtcagcccaacagtgccggcgctcctgacaacggcagtgcgtgcgtgatcaagaacgtgaacctgccacgctacagcggcatgacggccttcagcaacgtgcccatcttcaaggaccgcaagggctgatgctcatgctacgaggtgagatgcatggaaaaacctgagtgctcgggcaatcctgtcacggtgttcatagcagacatgaactacgagcctatcgctacctaccacancgacttgagcttgcaagccctcgggtccctggcaatcccgggcttaatcacaagcttc

SEQ ID NO: 94718 - DNA, 569 bp, Zea mays
atgattatgtaagaatgggcataggggtgggggatagtatcactcgtcctgaattaccgggtcgacccacgcgtccgggacggacgggtacttcgtgccggcgctgttcctgaacccggcgtaccaggacgagctcgacgggatgttccctcggaaggactcggtgttctacctcctggcgcactacctgttccacccgacgaacgaggtttgggggctggtgacgaggttccacaggtcgtacctgaggggctcggacgaaaggctgggcatccaggtgagggtgttcgacggagacgccccgttccagcacatcctggaccagatcctcgcctgcacttcgcaggaacacctgctccccgacgtggcggtgacgcaagagccgtcggcgggccgcggcgcgcggtccaaggccgtcctgatgaccggcctcagctcgtggtactacgagaagatacggtggaagtactggcagtcggcgactgccaccggaaaggtcgtgagcgtgtaccagcccagccacgaagagcacccactctccggttcacgacccacgacatgaaggccgt

SEQ ID NO: 94719 - DNA, 585 bp, Zea mays
  unsure (1)..(585): unsure at all n locations
gatatgatggatatatgtnatagaaagtgttcaactgatcncgacncgtgcacttncgtgctccttaggattaccgggccgacccacgcgtccgatcgacggcaagctccgctacggcttcaacggcatctcccacagggacaccgagacgccggtcaagctcgccgagtacttcaacgtcaccgacggggtgttcagctacaaccagatgggcgacgtgccccccgccgttaacgggccactccatgtcatccccaacgtcatcaccgccgagttccggaccttcatcgagatcgtcttcgagaaccccgagaagagcatagactccctccacctcgacggctacgccttcttcggcgtcgggatggggcctgggacttggtcgccggagatgaggaagacgtacaacctactggacacggtgagtccggacacgatccaagtgtacccgcggtcatggactgcgataatgctggcattggacatcgcgggcatgtagaagcgtcggtcaaacgtattggagcggtacttccttgggggacagtgctacattaacgtaattttggcggcgccagtacttgtttt

SEQ ID NO: 94720 - DNA, 510 bp, Zea mays
  unsure (1)..(510): unsure at all n locations
atggaaatggtgtgnncctttgcaccnttgcncgtcaactaccggctggaattaatggtccgacccacgcgtccgattgaagaggcgaagtggtcgccgaatgttcgcatgaagtcggcgtagcactggatgggggtgcgtcccttgagcactggcatcgcgtctcatcccatggagacgtactcgtagttccatcggtcaatctataggatccaagcttacgtacgcgtgcatgctacgtcatagctcttctatagtgtcacctaaattcaattcactggccgacgttttacaacgtcgtgactgatttaaccctttcgtgacccaacttaatcaactagcatcacatactactttatccagttggcatcttaacgaataggtctttaccgatcgcccttcacaacaatttgctcagcctgaaatgccaattggacgccgccctgtattgactctattatcaattacttaagtgtaatttacacccaatttgacctctaaactttaaaa

SEQ ID NO: 94721 - DNA, 511 bp, Zea mays
  unsure (1)..(511): unsure at all n locations
aagggaagtgtgcccccgggttaaaacntangctacgtcactactcgggtcggcattaccggctcgacccacgcgtccggtgttccattccttgacaaaagtttcatttttgtagcaatggacattgatcctgaatggaagatgataaaacgtgacctgggtcgaattgagaaatgggttatccgtaatgcatttgatgatgaggagaggccctatttacctaagcacattctctacaggcaaaaggaacagttcagtgatggtgttgggtatagttggatcgatggattgaaagaccatgccagccaacatgtcttcgattccatgatgatgaatgctggctttgtttacccagagaacacacccacaacaaaagaagggtactactacagaatgatattcgagaaattcttttccaaacctgcagcaaggtcaactggtcctggaggttctagtgtggcctgcatcactgcccaagctgttgaatgggatgcattctggtccaagaacc

SEQ ID NO: 94722 - DNA, 509 bp, Zea mays
  unsure (1)..(509): unsure at all n locations
naggattactggtgtcatgaggaacgaatatagtaatgctctaccggttcggaattcccgggtcgacccacgcgtccggttcagatcataacaaaaatggctgctgccaatggagtaagacgtgtttgggttggacaaaacagtctcatgtctactcctgctgtatctgctgtcatccgtgaaagaattggtgcagatggatcaaaggctactggtgccttcatcttgacagcgagccataacccaggtggtcctacggaggactttggtatcaaatacaatatgggaaatggtggacctgcccctgaatccgttaccgacaagattttctctaatacaacgacaatctctgaatacctcatctctgaagaccttccagatgttgatatttctgttgtcggtgtcaccagcttcagtggacccgaaggcccctttgatgtggatgtctttgactctagtgtaaattacataaagttaatgaagacaatttttgacttcgaagcaataaa

SEQ ID NO: 94723 - DNA, 518 bp, Zea mays
  unsure (1)..(518): unsure at all n locations
attgtaaccccgcactgnncgnacgacctcccccggttccggaaacccggcgcgacccacgcgtccggcacacagctcatcagttcttcttcgttgtcttggctagctgcctagctagctagctggttcctcactcctctccgagaaccccctttttcatctctctctctcgcctagctcctttcgcgatgttatcttctctgctggcctcacaactcgagagagactcgtgaaaagaatccagatatataaagagatcgagggcagctagcttaattattagcatgtcgatgagcttcttgagcatggtggaggcggagctgccgccggggttccggttccacccgagggacgacgagctcatntgcgactacctcgcgcccaagctcggcgccaagccccgcttcntccggctgccgcccgcccatggtcgacgtcgacctcaacaaggtcgagccatgggacctccccgtggngcnttcgttgggccgncggaattggtccttttcaagcttaag

SEQ ID NO: 94724 - DNA, 521 bp, Zea mays
  unsure (1)..(521): unsure at all n locations
aatgtgncccccgcccagnccgcccgacctcctcccggttcggaattcccgggtcgacccacgcgtccgcgctcgtcgcggcctggctgcccggcacggaggcgcagggcatcaccgacgtgctgggcggggactatgggttcacggggaagctgccgcgcacgtggttcaagtccgtggaccagctgcccatgaactacggcgacaagcggtacgacccgctgttcccgttcggcttcgggctcaccaccaaggctgccgcgagtcacgattagcaattagagttagactctgcttttgctttttcggtgttgatgaaatagttagcgggaacggcaaataagcacttttttttgtagaagatacacaaagctttttttttgtaggtgtagttaaaaaagaatgataaaataattgatttaggcctaaaaaaaaaaaaaaagggccggccctctagaagatccaagctacgtacgcgtgcatgcgacgtnataacttttttattggggaactaaattaac

SEQ ID NO: 94725 - DNA, 515 bp, Zea mays
atgtgctgggggcatcgggggcatctccggctcgaaacccgggtcgacccacgcgttcgatcaccggacgccttgtccgtttggcgtttaatttggactggccaagaaaatgcaaggggccctgcttgtgctgcaccttccgcaaaataaatgggtaggaagcccaaagggtaatggaaatggcaaaggaacagcacttcgtgcttgttcatggcgaaaggcatggggcctggtgctggttcaagctccgctggctcctcgagggcgctggccaccgtgtcacgtgcgttgacctggccggaggcggcgtcgatcctaccgaccccaacaccatccggtccttcaagcagtacgacaagccgctcatagacctcatctccaacttgccagacggagagaaggtgattctgatcggacatggcgctggagggctgagtgtgatccatgcaatgcatgaatttggtgacaggatctgtcaaacctttttcgtgggccccacaatactttcccctggg

SEQ ID NO: 94726 - DNA, 517 bp, Zea mays
agttccccgccctgccgccgacctctcaccggttcggaattcccgggtcgacccacgcgtccgcccacgcgtccgcggacgcgtgggtttggctaccctcgtcgtcgtctcactcacccggccttcacgcctccctcaccaaataaggtcccgcccttttccgacattcacaggggggacaggaaatcagcggccatggcctcgattccggcgacgaccttcgccgtcatcttatccgtcctcttctgtgccgcggctggcaccgccgtcgacaacgacctccccgactacgtcatccagggccgcgtctactgcgacacctgccgcgccgggttcgtgaccaatgtcaccgagtacatcgcgggcgccaaggtgaggctggagtgcaagcacttcggcaccggcaagctcgagcgctccatcgacggggtgaccgacgcgaacggcacgtacacgatcgagcttcaggacagccacgaggaggacatttgcgaggtggtctttgtggagagacctc

SEQ ID NO: 94727 - DNA, 519 bp, Zea mays
  unsure (1)..(519): unsure at all n locations
atgtggccccggactggccgcagacctctcccggttcggaattcccgggtcgacccacgcgtccgcccacgcgtccggtctcggatgccatataggagttggtcctcatggactgcggccaggacggcgttgttccacggcctgaacaccaggcgccgcccaattgctgcgccaccgaggtcccgcagagcccgacgctctcttccgaagaattcctccagttcaagaggaaggccaccacgatcgtggaggagtacttctccacggacgacgtcgccgcgacggcgaacgagctgcgggagctccgcgtcccgtgctaccacttctacttcgtcaagaagctggtctccgtggcaatggaccgccacgacagggagaaggagaaggcggcggtgctgctgtcctcgctctacggcgacgtcgtcgaccgcccgcagctctgcaaggccttctgcaagctcaccgagtcctgcgacgacctgtncgttgacacaccccgagcccgttacatttcttgcc

SEQ ID NO: 94728 - DNA, 520 bp, Zea mays
  unsure (1)..(520): unsure at all n locations
aagtgttcncccccagccctcccncccgcaccggttcggaattcccgggtcgacccacgcgtccgggcgacggcaagacgacgctgcttcactttgttgtccaggagatcattcggtcagacgacgtgcgtgcggttcgggccgccaaagagcagagcaacagcagcatatccagcgtgacttctgacgatctcaccgaggatgtcagcgacgacacggagcactacaagcagctaggcctgggcgtcgtttccagcctgggagacgacctccagaacgtgcggaaggcggcaatcctggacgccgatgcgctgaccatctcggtggcgagcctggggcacaagctggtgaaggcgaacgagttcttgaacacgggcatgaagagcttagacgaggacagtgggttccatcgcaagcttggcgagttcatcgagcagtcccaggtgcgcgtgacccagcttctggaggaggaaaaagaagctaccggcgcttggtcccacaaatgtataacttcttcaag

SEQ ID NO: 94729 - DNA, 503 bp, Zea mays
  unsure (1)..(503): unsure at all n locations
atgtcccccgatcccgccatcaccggntcgaaaaccggccgaccacgcgtncncgcagcgttcgattaaccaccttagtgttggatgagttccatcattaaagatttgggcttgttataccaaccaggctgcctttggctaaccttgtccggagtggtgggaggttcatatatgcatcactgntgcgtctcctcgtattgaagtttgtcctgagcatgtcagcaagtaaggacgtgcttgcccttgcttcactcgaggtggacctctccagcattgagccagggaccacggtgactgtgaagtggcgtggaaagccagtcttcatcagacgccggacggacgacgacatcaagcttgccaacagtgtggatgtggcatccctgcgccacccagagcaggatgcaaagcgtgtgaagaatcccgagtggcttgtggtcattggcgtgtgcactcacctcgctgnattccactatcgaacacgcgggacttttccgggtgtggtt

SEQ ID NO: 94730 - DNA, 518 bp, Zea mays
  unsure (1)..(518): unsure at all n locations
natgcccccgcccaaaccgccgncctcctccggttcggaattcccggctcgacccacgcgtccgcgtggagatcaaagagcacgggggcgtttacttctcctttacgctcaaggagggtcggaccggtacctggacgctcgacaccaaggccccgctcaagtaccccctttgcatccgctttgctgtcaagtccggtggctaccgcatcgccgacgacgtcatccccgccgatttcaaggccggcaccacctataagaccacactcagcatctaatcagcctctgatgatgaattatatttcaaaagagctcacctggcgctcacgttagcaagacaatattttttctatggttattttgtggcgccaaaccacccaagaaatatgtgatgctacatgtcccttatgatgccttgttgtgttgggttgatattattacataaactaaataaattattcatttaagattttnannnnaanntnnnnttttnnnnnnnnttttttttaaaaaaaaggggg

SEQ ID NO: 94731 - DNA, 521 bp, Zea mays
  unsure (1)..(521): unsure at all n locations
aatgcccccgccattccgncgcgtcctcaccggttcggaatacccggctcgacccacgcgtccggcggagcccacgccttgactcgctcctttcgagtggagcgcacaggcaccggccgtgtaccagttagggagcggatcgagggggctcggcttgagtggaggagatggaccgcaaggatgtctggatcctcgccatggacatctacttaccgtcctcctgcgtgcagcaggaagcacttgaggcccatgatggggcgagcaaaggcaagtacaccattgggcttgggcaagattgcatggccttttgcagcgaggtggaggatgtcatctcaatgagtttgactgttgtcaattctctgctgaaaaaatacaagattgatcccaagctaattggtcgcttggaggtgggaagtgtaacagttttagacaaaagctaattcattcaaacttggctgatacacatttttgagggaagtgaaaaatactgacacttaatggtgtttaaatcagcaaatccc

SEQ ID NO: 94732 - DNA, 513 bp, Zea mays
agtgccccgccttcccgccccctccccggttcggaattcccggctcgacccacgcgtccgcccacgcgtccgcccacgcgtccgatgtctgtgaaagaaattgagcctgcacttgggagcagctcatcatctccaccgtcctgatgatttttggtattgctctaatcagctggttggcccttccagctaagttcaccatctacaacttcggtactcagaaggaggtttccaactggggtttgttcttctgtgtttcaattggtctgtgggctggtttgattattggttttgtcacagaatactacactagcaatgcatacagtcccgtgcaagatgttgcggattcgtgcagaactggtgctgccactaatgtcatttttggtcttgctcttggatacaagtcggttatcatcccgattttcgctattgctgttagcatctatgtcagtttctccattgctgcgatgtacggcatttcaaattgcccttttttgtatgcttagcacaaattca

SEQ ID NO: 94733 - DNA, 509 bp, Zea mays
  unsure (1)..(509): unsure at all n locations
natgataagggggactcgggcagcctcggctggaatcccggtcgacccacgcgttccaggttgaggtggtaatggcagaccattcttaccaacccactgtcctttataagctaggtggccagttccacctgagcttcaacttctcttaaagtgttccggcccgtaacatctggctttctttctcatcttattaaaagagatttggcacgaggaactacattgaccaaaacctttggggcccttcaatgtctgttagcggtggcattaatgttccagtgattccgactccgctttttgccaatgcttcagccgagaaaagtggcaaaaacttcatgattgatttcatgatgggcggtgtttcagctgctgtttcgaagactgcagctgcttccattgaacgagtgaagcttcttattcagcatcangatgagatgatcaagtctggtaagctatcataaccctacaagggttttggtgatttgttttaaactaccctctagggtatgggt

SEQ ID NO: 94734 - DNA, 518 bp, Zea mays
  unsure (1)..(518): unsure at all n locations
aatggttcccgcactcggccncctgcaccggttcggaatatcccggctcgacccacgcgtccgcggacgcgtgggcggacgcgtgggcgctagcgagcgagagagacgcacatctatctgcgagcttacgccgcggcctcgatcagagtcagaggcgaacacccccatggcggcggctggcggcggcgcacgagggaaggtatccttcaagatcatcctcacctccgaccccaagctccctttcaaagtgttcagcgtgcccgaggcggcgccctttaccgcggtgctcaagtacgccgcggaggagttcaaggtcccgcctcagaccagcgccatcatcaccaacgatggaattggcatcaacccccagcaaagtgcaggcaacgtgtttctgaaacatggttcggagctgcgtctcatccctcgcgatagggttggagctgtagtcatgtcttccggtaagaggtatatacacggcaattgctattgcgccaaaaatgtgataaaaaaaaaagttt

SEQ ID NO: 94735 - DNA, 515 bp, Zea mays
  unsure (1)..(515): unsure at all n locations
atgccccgcctccgccgccctctcaccggttcggaattcccggctcgacccacgcgtccgcccacgcgtccgctcaacagggagaacatcagtgaccggcatcctattcaggcataggcagtgatggcagggagtttcttgagcgcatgtcattgttaattatccttggcatgggaaaggtctttctggtcaggcctgttctcttctagctttccatttgttgcttcttctagtgccttattctgtttcaacacctcttccaatttcttcctgagccttcgattttctttgacatagttgtgcagccggtcaatgactaaagcaaggaataaggagtatcccatgagtgacgcctcgaggaggtgtcgcgcaagaaggacctggtcggtgggggtgagccccacgaccccggagccgtcgagctccccttcggcgtggccgcggatcttggccatgctgtggagactggatgcgagcacgacaagcacngtgggcgcgatagtgcgcaccactag

SEQ ID NO: 94736 - DNA, 517 bp, Zea mays
  unsure (1)..(517): unsure at all n locations
attacccccgcctgccgccgccgtctaccggttcggaattcccggctcgacccacgcgtccgccctccctccctcacacaaataataatgtaaaggtcccgcccttttcctccgacatcggcaaggggggaggggaaaacacgtacattcacccggcggcaataatggcctcggttccggctccggcgacgacgaccgccgccgtcatcctatgcctatgcgtcgtcctctcctgtgccgcggctgacgacccgaacctccccgactacgtcatccagggccgcgtgtactgcgacacctgccgcgccgggttcgtgaccaacgtcaccgagtacatcgcgggcgccaaggtgaggctggagtgcaagcacttcggcaccggcaagctcgagcgcgccatcgacggagtcaccgacgcgaccggcacctacacgatcgagctcaaggacagccacgaggaggacatctgcncagtggtgcttggggccagcccccgccaagactgtgaccagagtca

SEQ ID NO: 94737 - DNA, 515 bp, Zea mays
  unsure (1)..(515): unsure at all n locations
agtgccccnnnnatggggnnnngnacgnaccggatcgganaacccggctcgacccacgcgtccgcccacgcgtccgactagatctgatatctcatgttgaatcttcccatggggatatgtggacagattaacaaaatgaacttattgaatcacctgctgagatgctctatggatcgattcatgttcggtctactactacaagtgaagggctgtccgcattgctggataagtacaggaacgttgagttcggcagatgccctctagtgtattgcagcggccaaccatgcctttctgtcgggcaatcggatgtttctcgtacaagtacggcgaagatttactgccctacatgtgaagacatctacactgcaagatccaaatatgtaagcaacatcgacggcacttactgtgtgacaacattcccccacttgttcctgatgacatacccgcatctgaagccccagaagccctgcaggaataatttcccagggtttttgggttaaaaatcccaacccttg

SEQ ID NO: 94738 - DNA, 520 bp, Zea mays
  unsure (1)..(520): unsure at all n locations
natgctccgcccatccgncgcgctgctaccggntcggaattcccgggtcgacccacgcgtccgcggacgcgtgggccgacgccttggcgctttgagccgangccgccaacaaaaaccaggtgggcgttacccctcggcctgccaatgccttcatcggcctcatgtacgggctgttccgggtcatgggctacgtcccgttcggggacgccacgcgggacatcatcaccaccaacctcggagcccggtggctgtcggccgccgtgcagctggggctctgcatcaacctcttcttcacgatgccggtgatgatgaaccccgtgtacgaggtcgccgagcgcctgctccacggcaagcggtactgctggtggcttaagtggctgctggtcgtcgtcgtcggactcgccgccatgtacgtgcccaacttcacggacttnctggcgctcgtcgggagcagtgtctggcgtcctcctcggtttcggcttgccggcttttttcaaacttaaaggttttgccgccccca

SEQ ID NO: 94739 - DNA, 515 bp, Zea mays
attgcccggagtggcgagggatgcttctccggttcggaattcccgggtcgacccacgcgttcggccacgcgttcgattccaggaagccagtttgatggtgctgggacttaattgggcaccgagtctttatggtattttactggctgacccccccaccaactctggcggaaacacaaagttttgatttgcaggcattccgttttagtgcacacatagagtttctgaggcaatcaagagttgttcgaccggcgcttctggtgtcaatattatgtgcttacaagaagcctggacaatgccttttgccttctgcacacgcgagaaaagatggtgtgaatttgctgaaccagttgatggagaatctactcaattccttcaggaacttgcacagaagtataacatggtaatagtgagcccaatccttgaaagggatataaaccatggggagactattggaatactgctgtttgtattggaaacaacgccacataatttgcttcattttgagaatatatttt

SEQ ID NO: 94740 - DNA, 518 bp, Zea mays
  unsure (1)..(518): unsure at all n locations
acgtgttggggcagncgnncgncctcctcccggtccggaatacccggctcgacccacgcgtccgcccacgcgtccgctccgatccatcaactatcgccgagagcgatcgagagataaatgagtatgtataaagtggcatcatcgtcagccgctctcttcgtgctagccctgacgctagtttgtgccccgctgatcgcagaggcaaagaagaagagagtcgccgccgacgccgccgaggagaagaaggtgcatgacaacttctgctcgacgctgtgcgagggcaggaaggggatggacctggtggtgtgcaacgagtgctacgacctctcacagcgcttcaacctggtgctgtacggcctgatccagtgcaagggcaagtgcaccgagcagaagggcatgaccgcgccgcaaattaatgtgtgacaaaatgcattcgacatggactacttggtcaanggcggtgatgtcacaaagacttgagcaactcttttgccaataagaaaaacactttcttttca

SEQ ID NO: 94741 - DNA, 520 bp, Zea mays
  unsure (1)..(520): unsure at all n locations
agtgcccggggctttcggcgncctcctccggttcggaatatcccggctcgacccacgcgtccgcggacgcgtgggcggacgcgtgggcggtcgcgtgggcggacgcgtgggctccgacggggactttaagcacacccacgctgaagccggtacgctgtccatggctaactacgggcccgactccaatggctcccagttcttcatcaccaccgtagacgaaaaccggttgcccaagaagctggacgggcgccacgtggtgttcggcaaggtggtgaaagggatggacgtcgtgcgcaagatcgaagccgagggccagctcaccggtgtgctcaaggccaaagtcgtcatagccaacagcggccagctgccagcgcccgccgacggcggccatcgtgacctctgatcgatgacgaggagaacgactcacgatccatcaatccgatcgatctgtcttgttcgttaagaaacccaaacggtggattggtaaatatataaaagagcggtcttcttttaggaatgg

SEQ ID NO: 94742 - DNA, 519 bp, Zea mays
  unsure (1)..(519): unsure at all n locations
atggtttcccccagggcttttcacgcacacggttcggaaaacccggcgcgacccacgcgtccgctgtatcgcattgcttgcgcgagcgctgataggcacacacgtacagccatggcgaacgcgtcgttcggcctggcggtgagcgacgagtgcaaggtgaagttccgggatctgaaggcgcggcggagcttccggttcatcgtgttcaggatcgacgacaaggacatggagatcaaggtggaccgcctcggcgagccgaaccagggctacggcgacttcaccgacagcctccccgccgacgagtgccgctacgccatctacgacctcgacttcaccaccgtcgagaactgccagaagagcaagatcttcttcttctcctggtcccctgatactgcacgcacccggagcaagatgctgtacgccagctccaaggacaggttcangagggagctggacngcattcagtgcgagatccaagccaccgcccccgcgagaatagccgcttccattttaaaagac

SEQ ID NO: 94743 - DNA, 520 bp, Zea mays
  unsure (1)..(520): unsure at all n locations
atggttttccccgggcttttnnagcaatgcggtccggatacccggcgcgacccacgcgtccgcggacgcgtacgcggacgcgtgggctgtcgagacctgattcgacatcgagatcgacggcaagtttgcaggccggatcgtgctggcactgtttggggacaccgttcctaaaactgcagagaacttccgagcactttgcacaggggagaaaggaattgccaactccggcaagcctgtgtggtacaaggggtcgacgttccacaggatcatcccggggttcatgatccagggaggcgacttcaccaacggcaacggcacggggggcgagtccatctacggcagcaccatcttctccgacgagaacttcaagcacacccacgctaaagccggtgcgctgtccatggctaactacgggcccgactccaatggctcccagttcttcatcaccaccgtagacgaaaacctgtttgccaaaaagattgaccggcgccacatgggggtttcccaagggggggaaaac

SEQ ID NO: 94744 - DNA, 512 bp, Zea mays
  unsure (1)..(512): unsure at all n locations
agtgctccgccagtcgccgccatctccggttcggaaaccgggccggccaagccgtccggagtcaataacaccaggatgccatgcattaccatggcgataagaagcctgttcttccgggnccttttctgcatcgtgcatggtgagaaggaagagtcaaagggcatcgatgcgaaagcgtccgggcctggtgggtccttcgacatcaccaagttgggcgcctccggcaatggcaagacagacagcacgaaggctgtgcaggaggcatgggcatcggcgtgcggcggcactgggaagcaaacaatcctcatacccaagggcgacttccttgtcggacaactcaacttcacaggcccttgcaagggcgacgtgaccatccaggtggatggcaatctgcttgcgaccacggacctaagccagtacaaggaccatggtaattggatcgagattctacgcgtggataacctggtcatcaccgggcagggaaacctttaagggacgggccacatttgtgg

SEQ ID NO: 94745 - DNA, 516 bp, Zea mays
  unsure (1)..(516): unsure at all n locations
agtannnnnnnccggttttngaggcangggatcggatacccggctcgacccacccgtccgccgaaaataacaataagatgacatccataacacaacgcaaacaaacccttgtccctctggcaccttttaaaaatcgggcatgccaacaagaaaaagtcaaaggccatcgatccgaaaccttccggccctggtgggtcctccgacatcaaccaattgggcgcctccggcaatggcaagacagacagcacgaaggctgtgcangaggcatgggcatcggcgtgcggcggcactgggaagcagacaatcctcatacccaanggcgacttccttgtcggacaactcaacttcacaagcccttgcaagggcgacgtgaccatccaggtggatggcaatctgctggcgaccacggacctaagccagtacaaggaccatggtaattggatcgagattctacgcgtggataacctggtcatcacccgccaaggaaacctttaccggcacgctccaaattttttt

SEQ ID NO: 94746 - DNA, 519 bp, Zea mays
  unsure (1)..(519): unsure at all n locations
atggttntccccacggcccncccatctcancggatcggaaaacccgccgcgacccacgcgtccgctcggcgtcaagtccgacgtctactctttcggcgtcatgctgctgcagatcatcacggggaagtcgcccatggggctgtcgcaccacgtcggccgcgccctggagcgcggcgagctgcaggacatgctggaccccgccgtgcccgactggcccctggaggaggcgcagtgcctcgccgaaatggcgctccggtgctgcgagctgcgccgcaaggaccggccggacctcggcgccgtcgtgctcccggagctcaaccggctgcgcgcgctcggcgaggacaacatgcagtactgcggcgccatcatcagggggggcagcggcagcggcngcngcatgcacagctcgtcgccgttccacagcaacatctcacggtcacacgccgagatgatgatcgatttccagtacccaaaatcagtgtctaaattaagagagggggcaattcccccatgcccccg

SEQ ID NO: 94747 - DNA, 516 bp, Zea mays
  unsure (1)..(516): unsure at all n locations
atgtanncccgcccactccgcccccgcaccggttcggaatacccggctcgacccacgcgtccgggaccttcggcgcccgttcaggatccatatcttcccgagcgagttcttggttgacctgttcctcttcggaccacctccaaggctcttggtgtagcttgccactctcaccaatcaagttttcatgtctgatctcgacattcagatcccaactgccttcgatcccttcgctgaggccaatgctggggactctggtgcggcagcagggtcaaaggactacgtacacgtgcgcatccagcagcgtaatggtcgcaagagcctgaccaccgtccagggattgaagaaggagttcagctacagcaagatcctcaaagatctcaagaaagagttctgctgcaatggtacagtggtccaggacccaaaacttggacaggtcattcagctccagggtgatcaaaagaagaacgtttcgaaatttcctcgtcaggccgcatttttaagaaagggcccacttaa

SEQ ID NO: 94748 - DNA, 585 bp, Zea mays
  unsure (1)..(585): unsure at all n locations
ttttaatgatatgnagtcgcgtgtggctgggactgcagtcatacactgcctgaccggtccggaattcccgggtcgacccacgcgtccgatcctgagtggttctggttctcatatgcgcacgcatatttttgttcttattcctatgtctgcatttcggtcagtggaagcaattgagcgcggttcctaaactcggatcctgcattttgtttcggcgatatgtgttggtgttaccagttgctgcagcgatacttccaatttctgcgccgatgggtttcctcgttttcttcttattttgtttcctcgtcgtcgcagcctgcaaattggtagtttcttggttcttatcagtggagctggctttggaatttgcaggcaccgatctgagctgcgctggtgctcctggaaaggtgttggtgcctggaagtggcagtgatgactagctttccttcgtagagcctgtcggggacactcaacctgaagaactacaggctttgcactttcatatcaagcaatgagcagtgcctcgtgaataggtggttaaggcaccggggctggatcattgggcttcttggcatgcttagctgtgga

SEQ ID NO: 94749 - DNA, 583 bp, Zea mays
  unsure (1)..(583): unsure at all n locations
tgttaaatggatgatggggggcgctggtgnaatggcttagcctcatcatagaactgctcgtaccggtccggaattcccgggtcgacccacgcgtccgggagagccaggtccccaggatgtgcctggacctgtacagggagtatgggaccacaatggccggcctcaaggttttggggtacggtttcgactacgacgacttccacgcctgcgtgcacgcgacgctgccgtacgagaaggtgaagcctgacccggtgctcaggcagctgctgctttccctgccgcagaggaagatcatcttcaccaactccgacaaggcccacgcggccagagtcctggagaagctcggcctccaggactgcttccaagggatcgtctgcttcgagacactgaacccgccaccaaccgagaagaacagtggcggcagtgctgggacgatcctgtgcaagncctcgctggcgtncatggaagccgtcatcgagatcggcaagctcgacgccgaaagaacggtgttcttgacgacagcgcgcgcaacatcgcgcagggaaggccgccggtttcgcacctcatcgtgggagctcgcnct

SEQ ID NO: 94750 - DNA, 548 bp, Zea mays
  unsure (1)..(548): unsure at all n locations
tgatggtgtgatctcgcantactgctgcactacgcactgacgtaccggtccggaattcccgggtcgacccacgcgtccgcccacgcgtccgccccgctctgtgctaatgctcctgctgagaaaggaggcaagaacttcatgattgatttcatgatgggcggtgtttcagctgctgtttcaaagactgctgctgctcccatcgagcgtgtgaagctgcttattcagaaccaagatgagatgattaagtctggtaggctatcagagccgtacaagggtattgttgactgcttcaaacgtaccattaaggatgaaggtttctcttccttgtggaggggtaacactgctaatgttattcgttacttccctactcaggctttgaactttgcatttaaggactacttcaagaggttgttcaacttcaagaaggatagggatggctattggaagtggtttgctggcaacctggcctctggtggtgctgctggtgcttcctcttntgtttttgtgtactccctggactacgcgagaacaaggttggctaatgacgc

SEQ ID NO: 94751 - DNA, 578 bp, Zea mays
  unsure (1)..(578): unsure at all n locations
tgttatttatatnttaaatttccctcctagancgaacagattgctctaccggtccggaattcccgggtcgacccacgcgtccggcgcgttccagtgccgaagtcatcaccctcaccgaagagaccttctccgacaagataaaggagaaggacacggtgtggtttgtgcagttctgcgtcccctggtgtaaacactgcaagaaccttggaacactatgggaggacctgggaaaggttatggaaggtgcggatgaaattgagattgggcaagttgactgtggtgtcagcaaaccagtatgctcaaaggtcgatatacactcctacccaacattcaaggtgttttatgaaggcgaagaagtagtaaaatataaaggacctaggaatgtggaatcgctgaagaacttcgtgttgaatgaagctgaaaaagcaagtgaagcaaagcttcaagctgattgaagcatgggagtttcagcaagcatgtggcgtaaacaaggaacaatgctgtgcaacattgtcttctatcctgtcattacaaagccaatttacaggaaagaaatgatcttatgaccccgtatcaag

SEQ ID NO: 94752 - DNA, 579 bp, Zea mays
  unsure (1)..(579): unsure at all n locations
tttgaattatattntttagtggatggtatgccgagtaagtactgctcgtaccggtccggaattcccgggtcgacccacgcgtccgagcctgccctgccctgccttgttaagcaaagcaacccagctgcgagacacgagagctagctagagagagatggcggccacggtttcgtccttcccggtggtgaacatggagaagctggagaccgaggagagggccacggccatggaggtcatccgcgacggctgcgagaactggggcttcttcgagctgctgaaccacggcatctcgcacgagctgatggacgaggtggagcggctgaccaaggcgcactacgccaccttccgggaggccaagttccaggagttcgcggcccggacgctggaggccggcgagaagggcgccgacgtcaaggacgtggactgtgagagcaccttcttcgtccgncaccttccgggcttcaacctcgccgaccttctcgacgtcgacgaccgctacaagcaggtgatggaacagttcgcatccgagatccgtaagctgtcngagaggctgctggaccttctgtgcgagaacgtggg

SEQ ID NO: 94753 - DNA, 578 bp, Zea mays
tttgatttaatattagaaattgtgtcctgaccagaagatgactgattgctccaccggtccggaattcccgggtcgacccacgcgtccgcgcgcctgcaaccttgcaaaacaggccttcgatgaggcgatctctgagctagacagcctgggagaggagtcctacaaggacagcactctgatcatgcagctcctgcgcgacaacttgaccctatggacttccgacaccaacgaggatggcggcgacgagatcaaggatgctgctgccccgaaagaatctgcggagggtcagtaagatggattcagtctcacgacctgctgctgctgatgttgaggagtgaccagaaccagaaccgtcgtcctcgattctgatagattatcttctagtataccttgtgttgtcgttgtcgtcggcgcgacgatcgtcgtcgtcgtcgcgccggtgtatgcgatgaacctgccattgctgctgtttaattaagcattctagatggtataccgcatgctttgtttcggtttctatgtcgttaaatggaggccggatgcctgtttttcggcttccaagccggcaccaaaaagag

SEQ ID NO: 94754 - DNA, 549 bp, Zea mays
  unsure (1)..(549): unsure at all n locations
ngtgcagtgccgttgcatgataacagaagtatatagaactgctctaccggtccggaattcccgggtcgacccacgcgtccgcccacgcgtccggcaatcttcttttgaatgcaaggcttcaagtcacggtgaagaacatttgctgaatgtatatacttcaagccacgaagaatttgataaagaaaatactgacagtgctcctctgacaaagcttgatttgaacgaataatttgatgcagatcagtatccatcaattcatatgcaatatacacatcattgaatgcagccctctgcgcaggaggtatgatatcccttattgcatatgaattgatggatactgacagtgctcctctgacaaagcttgatttgaacgaataatttgatgcagatcagtatccatcaattcatatgcaatatacacatcattgaatgcaagcctctgcgcaggaggtatgatatcccttattgcaacaatattctcgtggtccatgtggcggagcaacttgatctcgccgaacgtgcgcttggcattgatcttggtgtcgaggg

SEQ ID NO: 94755 - DNA, 548 bp, Zea mays
  unsure (1)..(548): unsure at all n locations
aggtgtgcgtaggcaatcccaaagantagtaatgcactgactcctccggtcttgaattcccgggtcgacccacgcgtccgtgcaagggagctcattggcatgctttagattatcgatggtgacaattatccagaggccctgggccgcatgtacatcatcaatgcaggccacggataccggcttctatgggacagcgtctagagcaaccttgacccaaagaccactgcaaagattcatgttctgggtaacaagtatcatagcaagcttctcgaggtgattgatgctagtgagttgccagaaattttaggtggaacctgccaatgtgaatgtgggtgcatgaaggttttcaaaggcctttgcaatgaccccgaaatcatgacgatggagcacagtggagatgggaggtgttgatcactcagtaccgtctcattcgaggatccgcagagaatgatttatgtagacgacaagtatactaagatacgagcatttgttgatgtggaaacacaattagctggagacgagcattctnagtcacagaaaatctccct

SEQ ID NO: 94756 - DNA, 586 bp, Zea mays
ttgtttatggatatttagatttgtggccatgcaggggaagtattgctgtacccgtccggaattcccgggtcgacccacgcgtccgcacgtacgttgaacaaacacccaaggcctgacgagacgagatccggacctccgtcctcccgactagggcgcgcgcgcgacctcggcaccggcggcctcgatccatcgttctctcggatccccgccagtgcatgccctggaacggacggacggaatggcagcgtcgccggaccacctcttcggcctgcgcaacagcttctacgtcggcgcataccacgccgtcatcaccagcagccagtccctccccgcgcacgcgctctcccccgacgacctcgtcgagcgcgacgccctcatgtaccgctcctacatcgccatcggctcctaccagctggtgatcggcgagatcgggcccagcgcggccacgccggtccagggccgtaagctgctcgccgtgtaccctctccgcgacggccggaacaggggaatcggtggtctcgaggctttttgagctcctgtcagacgcggccggtcgggagcaattcgaatcttccggtggtggccg

SEQ ID NO: 94757 - DNA, 584 bp, Zea mays
  unsure (1)..(584): unsure at all n locations
ttgtgaatgaatatgaaagaaaatgtgggaatgataagaagagtattgtactgctctaccggtccggaattcccgggtcgacccacgcgtccgcgtagaaaagcaagacgatgatgaaattcatccaaggcgggtacctgccgttctgcttctggcttgtcctcatggccttgatgatcacatggcactacgtccacgtgatgaagtactggtacgagctggaccacgtcgtgccagccaacgaagtgacaacgctgcttgagaagcatgaggtgcggcggatccccggggtgggcctcctttactcggacctggtccaaggcatcacccccgtgtttccacgtctggtgcagaggataccctccgtgcacgcggtcttcctgttcatgtccatcaagcacctgccgatcccacacgtggcccctgtggagcggttcctcttccggcaggtcggcccgagggagcaccggatgttccggtgtgtggcgaggtatgggtactgtgacaagctagaggagtcggggctggtaaaaggttcctcatggagagcctaaagacgttcattcaagangaggctgcgtttn

SEQ ID NO: 94758 - DNA, 549 bp, Zea mays
  unsure (1)..(549): unsure at all n locations
tgtgtagtgcgntngctgagtccagctcactacgnattagctccaccggtccggaattcccgggtcgacccacgcgtccggctaccctcgtcgtcgtctcactcaccccgccttcacgcctccctcaccaaataaggtcccgcccttttccgacattcacaggggggacaggaaatcagcggccatggcctcgattccggcgacgaccttcgccgtcatcttatccgtcctcttctgtgccgcggctggcaccgccgtcgacaacgacctccccgactacgtcatccagggccgcgtctactgcgacacctgccgcgccgggttcgtgaccaatgtcaccgagtacatcgcgggcgccaaggtgaagctggagtgcaagcacttcggcaccggcaagctcgagcgctccatcgacggggtgaccgacgcgaacggcacgtacacgatcgagctcaaagacagccacgaggaagacatctgcgaggtggtcttggtggagaagccgcgcaaggactgcgaccaggtgcangcggacagggacccgccccg

SEQ ID NO: 94759 - DNA, 579 bp, Zea mays
  unsure (1)..(579): unsure at all n locations
tttgatttatgttgcgttttgtggccctgcacgtttgnattcnatactcgtccggaattcccgggtcgacccacgcgtccgcaacgagtgggtaaagcccaagccaggaacctacgttacaaggctcacccgcttctccggcgacactgtcctgctgcacgggcaagccgtgctgaaggccggtgggcatcaggctgcttcttctagctcatggcctggccatgccaggtcgcgctggctgcgtttcatttcatggaagaaagcaaggatggatcacaggttgtcgttctgctaattaatctacatacgtttgccttcaagtactgtgttgtggcattgttacacatcacagtacagtttggtcaaattttttttccacagaggaagtanggattgatntaatcattgatttaatcccacacgcgtgtatctacgtatacagtntgtataacatgaaccacctctgtttgcgattggtcttaaaataaatataatacttataaaaattaaatattttttatttttgtattttatttttaatttttttttattgtttatatgttttatttatttatgttt

SEQ ID NO: 94760 - DNA, 587 bp, Zea mays
  unsure (1)..(587): unsure at all n locations
tttgtatgatgtttataatatgttcccccaccctcngcacngnatacncgtcctgagttcccgggtcgacccacgcgtccgactagttctagttccgtcgtgctggaccttgtcagagggtgtattttgagtcagaagaagcgaaagcttgcattgtaacctgtggaggcctttgccctgggctcaatactgtcatcagagagttggtttgtggcttgtcccacatgtacaacgttagcaatgtcttcggaatacataatgggtacaaggggttctattcgagcaattatcttcccatgacaccaaagagtgtgaatgatatccacaaacgaggtggtacagttcttggaacattattaggtggccattataccaaaaatgatcgttgtcaacatttcaagatcgtttgtatttatcatgtattcattattttgaggtgtttttattttttatggggtctttatgttatttatatggttttttgttatctttttttataagtattttttgttggtttttgaatttttttatattattttttgtcatgttttgtcttttttttttttgtataatttgnttatttttag

SEQ ID NO: 94761 - DNA, 586 bp, Zea mays
  unsure (1)..(586): unsure at all n locations
tgatattgaagattgagaatagttggccctccatcgcncgttanagcattgacagtaccggtccggaattcccgggtcgacccacgcgtccgcaccacctctgctgaacgcgaaattgtaagagacatcaaggaaaagcttgcatatgtggcgcttgaatacgaccaggagctcgagaatgccaagagcagctcatctgtggagaagagctacgagctgcctgatggtcaggtgatcaccattggggcagagaggttcagatgccctgaggtcctcttccagccttccttcattggtatggaagctcctggcatccatgagaccacctacaactccatcatgaagtgcgatgtcgacatcaggaaggacttgtatggtaacattgtgctcagtggtggcacgaccatgttccctggtattgcggaccgtatgagcaaggagatcactgcccttgcgccgaacagcatgaaaatcaaagtggtggcaccgcctggaaagaaatacaatgtcttgataggatgatccatncttggcatcctgagcacctttcaacagatgtggatctcaaaagctgagtattactagn

SEQ ID NO: 94762 - DNA, 550 bp, Zea mays
  unsure (1)..(550): unsure at all n locations
cggaagcgngttcgccctgcactcgtccgagtacagcagtgctctaccggtctggaattcccgggtcgacccacgcgtccgcggacgcgtgggcggacgcgtgggcggacgcgtgggagcgagcacccggcgtcgggcgacggtggcgccatgggtggctgccactccgccatcgcggccaccaagctgaagattctgcgccgcggaggccggggtgccgctgccgtcctccccgtcaccaaccacgacggcccgtgctgctcctccgaccacggcagcaaggagaagaagaagaaaaagaagggcgccaggaagggcaggaaacgcgcctccatcctgggcgacgccggcaccttcgacccggacttctcgcggcggtaccggctcggcgcggagctcgggcgcggcgagttcggcgtcacgaggcggtgcgaggacgccgtcacgggggaggccctggcgtgcaagacgatccggcggaagcggctgctcctgcgcctcgccgggcccgacgcgaccgacgtgcagcgcgaggtggagatcacgcggc

SEQ ID NO: 94763 - DNA, 546 bp, Zea mays
  unsure (1)..(546): unsure at all n locations
tgaatgcagtgcgctgtgagggggggagatagtattgctcgaccggtccggaattcgagggacgacccacgcgtacggccactgcttgcgtctctgtctctctgtctgctcgtgtttctgcttctgcgactcgtaggagggtgaggtcttgcttgcctcgcggaatggcggcggccggggcatggctggcccgtgcgacggcgactgcggtgctgggtttcgtcctggcggtggcgtcagctgaggcggcatcgggggacgtggagatggttttcctcaaggccgcggtggccaaaggcgcagtgtgcttggacggcagcccaccggtgtaccatttctctcccggctccggttctggcgccaataactgggtcgtccacatggagggaggaaggtggtgcaggaatcctgatgagtgtgcggtccgcaagggcaacttcaggggctcctccaaattcatgaagccactctcgatttcacggatattaggcggcaaccaanaatccaatcctgatttctacaactggaatagagtaaagatcagat

SEQ ID NO: 94764 - DNA, 582 bp, Zea mays
ttttatttatataagtatcgtatgccgaatcgcacgcgctgcatactcgtccggaattcccgggtcgacccacgcgtccgctgtggttcaaggaacacagatttatgcctgcatgtatcgcttccaaatcgatatgtcgaggtacggaatcttgtagaggctccatgatgcatacatgcaaattcccgcattccaagccgcgctttctaaaaatcaaccagactcaccttcatgataaacatcaatattatctcaatcattctcatgtcattttgcaataatttgtatagggagccactgctttctttataccgttgtttatcaaaagggcgaacgattgtcgcttctgttttgtattatcttacattgcgcgtttaggactacaagtcttgctacacaacttttgttttatatgttgttgttgttactcttttattgatttatctttggatttgcgctttattctaataataccttatatttattgttggttattatcattcattgtttctaagatcttatatttctttatgcttttacaaaattcatgcaaatatatatttttttaatatattttgtttg

SEQ ID NO: 94765 - DNA, 587 bp, Zea mays
  unsure (1)..(587): unsure at all n locations
tgtttattggatatttcggatcgtgtggcccgcatccgncagactggcgtactcgtctcgaattcccgggtcgacccacgcgtccgcggacgcgtgggcggacgcgtgggcggactcgtgggggcgcgtgctacaagatcgtcctgagtgtgaccatctcggtgatcacgtcgtgctgcaccttcggcttgccgtggctgacggcgtgcaccccctgcccgccggagctcgccagtaagtgcccgaccatcgggcgctccggcaatttcaagaacttccagtgcccgccggggcagtacaacgcgctggcgtccctcttcttcaacaccaacgacgacgccatccgcaacctcttcagcgccgggtacgacagggagttcggcgtgttcacgctcctcaccttcttcaccacggtgtacaccctgggcctagcttacttatcgcgtggtcgttcccgtgggcctttgtatccccgtcatcctgtctggcgccttgttttgtccattgggccgtaactcttgttggcttcttttggtggttttgaccagggcttctagagtgtgattggcttctttgtcttttgtttg

SEQ ID NO: 94766 - DNA, 586 bp, Zea mays
  unsure (1)..(586): unsure at all n locations
tagtttattatgattagnatcctgtgggatggttatgcngagtacagaactgctcgtaccggtccggaattcccgggtcgacccacgcgtccgcttcgagaaccccgagaagagcatagactccctccacctcgacggctacgccttgttcggcgtcgggatggggcctgggacgtggtcgccggagatgaggaagacgtacaacctactggacacggtgagccggcacacgatccaggtgtacccgcggtcatggacggcgatcatgctgacattcgacaacgcgggcatgtggagcgtccggtccaacgtctgggagcggtactacctcggggagcagttctacatcagcgtcatctcgccggcgcggtcgctgcgcgacgagtacaacatgcccgacaacgccctccgctgcggcaaggtcgtggggctgccgctgccgtcatcctacgcccacgggccgctaagacgacgaaagcgccgatttcacctcgtggtctgaccatccagtctaactaatccatccctgtgctgtcggcaaaataaaatcatcaaaaagtgacaagtaccaaggaagcctagtgga

SEQ ID NO: 94767 - DNA, 585 bp, Zea mays
  unsure (1)..(585): unsure at all n locations
tgggttaggatatngagaattgtgaaatggtacggagatgactgattgctccaccggtccggaattcccgggtcgacccacgcgtccgcaccgaacagcacgaccagaccagttgcccggctcaccaaatccaggcgtggccgtgcgacgcatccctcccctcatggcgtcatcggcggcgcgatccctcgcgctcgtcgcgtctgcctcggcatcgctcggcgtcgggcagcggtcgtgggctcgcttggctgtctcttcctcttcggctgggtcggccctccccaagctccgcgggctccgctcgttcgccgcctccgcagggggcgccgtgatggggaagccaggccccggggtcgttgacgccgacgccgggatggacgccgtccagcggcggctcatgtttgaggacgagtgcattttagtggatgaacaagacaatgtcatcggccacgagtccaagtataactgccatctcatggagaagatagaagctggaaatgccctgcacagagctntcagtggtttccttttcaactccaaatatgagttgctactgcagcanaggtcttgcacanaagtgac

SEQ ID NO: 94768 - DNA, 548 bp, Zea mays
cgtcctgctgttgctcgtattgggggagagatagcattgctcttccggtctggaattcccgggtcgacccacgcgtccgcagctcgcgcgagctccatcggggacaaggccatacctcaacggagtgcaaggtcggccgggccgttcgggagcgatggatgcgcatagctggtggtgcgggcatgggtaccggcacacggcgcaactctcttttttcttgtgataacagatcaataacatatcataccttccaattgcatagctgaatcgaaacatgtcgcgtaggatagttcggctaggccggagacctgctgttggggacttgttctcaaatgctatgagttaagaacaaggcaacacaaaaatgttaatggttaaagtccttcgtccttcgaagcattatctcccttaggatataatgatcttcagacgaaggtcatgaaggatgtaccttcatcatcacagtatataaaaaaaaaaaaaaaagggcggccgctctagaggatccaagcttacgtacgcgtgcatgcgacgtcatagctcttcta

SEQ ID NO: 94769 - DNA, 547 bp, Zea mays
  unsure (1)..(547): unsure at all n locations
ggtggtgtgcgatgaatganaccagacgatgacgcattgctccaccggtccggaattcccgggtcgacccacgcgtccgcaccgaacagcacgaccagaccagttgcccggctcaccaaatccaggcgtggccgtgcgacgatccctcccctcatggcgtcatcggcggcgcgatccctcgcgctcgtcgcgtctgcctcggcatcgctcggcgtcgggcagcggtcgtgggctcgcttggctgtctcttcctcttcggctgggtcggccctccccaagctccgcgggctccgctcgttcgccgcctccgcagggggcgccgtgatggggaagccaggccccggggtcgttgacgccgacgccgggatggacgccgtccagcggcggctcatgtttgaagacgagtgcattttagtggatgaacaagacaatgtcatcggccacgagtccaagtataactgccatctcatggagaagatagaagctggaaatgccctgcacagagctttcagtggtttccttttcaactccaaatatgagttgctac

SEQ ID NO: 94770 - DNA, 548 bp, Zea mays
  unsure (1)..(548): unsure at all n locations
tggagtgcgttgctagtaaaggggggtantatagtattgctctaccggtccggaattcccgggtcgacccacgcgtccgcggacgcgtgggcggacgcgtgggcggacgcgtgggtgaacgcgctgtcaaactggctggtgaacccgcgccgcaacccgctcgcgcgcctccacatgaacgccgtctcctcgcgcctcaggaaatacgggctgaggtacgatgacctgtacgacccctatttcgacctggacatcaaggaggcgctcgggaggctgcctagggaggtggtcgacgcccgcatccagcgcctcaagcgcgccatggacctctccatgaagcatcagtacctccccgaggacctccaggcacagcaggtcccattcagaggatatttgagtgacatgttggctctggtgaaaaaggaaagcgctgagcgtgaagcactgggagcccttccactttaccagagaacgcttccctaaattgctggctaaacatggctgcaagtcttctctttacgccaaatcagaatgcatgcaataaaatg

SEQ ID NO: 94771 - DNA, 543 bp, Zea mays
  unsure (1)..(543): unsure at all n locations
agagcggcgttgctcgatagcgggatatagattgctctaccggtccggaattcccgggtcgacccacgcgtccgactacctggcgttgctagtcaagtacgtcgacggcgacggtgacattgtggcggtggacgtgaaggaaaagggctccgacacgtacgagcccctcaagcactcctggggcgccatctggaggaaggacagcgacaaaccgcttaagggacccctcaccgtccgcctcactaccgagggaggcaccaagaccgtctacgacgatgtcatccctgccaactggaaggccaacaccgcctacaccgccaaataattaactttagtgctgacaatactttaagtcggcctatgctagctatactagattgggttggatcccaagcaatgcattacacatgcatgcattggaccgtgatatctatttgctaccactaccctattacgacagtgatgctggcgccaacaataatggcgtcatcctncttctncatcttctccatctccatatatagctagagtgagacttcgttg

SEQ ID NO: 94772 - DNA, 583 bp, Zea mays
tttgtattatatttgtaatgtggccctgcatgctcgtatcgttagtacccgtccggaattcccgggtcgacccacgcgtccgcatgcatgcatgtatgcatgcgccggggtgacgtggcgttcagctcaggcgctgagcgaggctatacgtacgtcgtcaccggctggccacgcatgcgataaccatctgatatggacggaactatatattgtattcctattaatctggcattttctaagctaattgttttttttccaaatataccgtcgatggaactccaaatgtaatgtcacgcaaatgtgtgtttttcatcgattgaatggataataataaaaaggcatgctggcagttactactagaaaagaaaaaaaagggcggccgctctagaggatccaagcttacgtacgcgtgcatgctacgtcatagctcttctataggggcacctaagatcaattcaatggcccgcgttttacaacgttgtgtctgggaaaacccctgcgttacccaacttaattggcttgcacacaatcccctttatgcagctggcgtaatagcgaaaaagtccggaccgattggcctttc

SEQ ID NO: 94773 - DNA, 585 bp, Zea mays
  unsure (1)..(585): unsure at all n locations
tttgtatgatatntagtaaagtatgcctgcattgcnagagtcgcactgacgcaccggtccggaattcccgggtcgacccacgcgtgcgcccacgcgtccgctaatatatagataatcgaaatcgaaaagaactgtcttttctggatacgttccccgttctattgctaccgcgggtcttatgcaatcgatcggatcatatagatatcccttcaacacaacataggtcatcgaaaggatctcggacgactcaccaaagcacgaaagccagttagaaaatggattcctatttgaagagtgcctaaccgcatggataagctcacattaacccgtcaattttggatccaattcgggatttttcttgtgaagtttcgggaagaaattggaataatatcgattcatacagaggaaaaagttctctattgatgcatacgctgtacctagaggatagggatagaggaagaaggataaatcgaaatgaaatanataaagaataaagcccaaaaaataagtcgaagatagaagagcccagaatcaaaatgaagaaatggaaactcgaaaatgatccttctgattctcaaaaaatgg

SEQ ID NO: 94774 - DNA, 558 bp, Zea mays
  unsure (1)..(558): unsure at all n locations
tgagcatgtgcngtatcaaactgagngtcatgctagctcatgctataaccgctccggtctggaattcccgggtcgacccacgcgtccggcgacgccaccaccacacgttcacggtagctagagcttatcgtcgtcggcggcgaagatggggtcgctgaagctgcagaagcggctcgccgcgagcgtcctcaagtgtgggaaaggcaaagtctggcttgaccccaatgaagtcagcgagatctccatggctaactcccgccagaacatccggaaattggttaaggatgggtttatcatcaggaagcctcagaaggttcactctaggtcccgtgcaagaagggcacatgaggccaagcagaagggaaggcactctggatacggcaagcgcaggggtaccagggaagctaggctccccaccaagattctgtggatgaggaagatgcgtgttctgaagcgcctgctccgcaagtaccgtgaggccaagaagattgacaagcacatgtatcatgacatgtacatgaaggtcaagggtaatatggttaggaacaagnaggactt

SEQ ID NO: 94775 - DNA, 552 bp, Zea mays
  unsure (1)..(552): unsure at all n locations
agtgatgtgcgttggcctgcgttccgtncgacgtangnacttgacgctctcggtctggaattcccgggtcgacccacgcgtccggcgatgagagccttgttcctcctgttcctcttctgcatcgtgcatggtgagaaggaagagtggaaggtcatcgatgcgaaagcgttcgggcctggcgggtccttcgacatcaccaagttgggcgccttcggcaatggcaagacagacagcacgaacgctgttcaggaggcatgggcatcggcgtgcggcggcactgggaagcagacaatcctcatacccaagggtgactaccttgtcggacaactcaacttcacacgcccttgcaagggcgacgtgaccatccatgtggatggcaatctgctggcgaccacggacctaaagcagtacaaggaccatgggaattggatcgagattctacgtgtggataacctggtcatcaccggcaatggaaaccttgactggcatggcccatgcgtgttgagcaaggacttctgcaccaggatttccactgcatgatccttcccactt

SEQ ID NO: 94776 - DNA, 583 bp, Zea mays
  unsure (1)..(583): unsure at all n locations
tattttattatatgnattaattaatcatgatggggcagagagtgatacccgtccggaattcccgggtcgacccacgcgtccgcccacgcgtccgaacgggctctggccttggttccctcctcctagagcgcctgtctgttgactacggcaagaaatccaagcttgggttcactgtgtacccttccccccaagtttctacttccgtagttgagccatacaacagtgtactgtccacccactccctcctcgagcacactgatgtggctatactgctggacaatgaggccatctacgacatctgccgccgatcccttgacattgagcgcccaacctacaccaacctcaacaggcttgtgttccaggtcatctcatcccttactgactccctgaggttcgatggtgctctgaacgtggatgttaacgagttccagaccaacctggtaccctacccgaggatccacttcatgctttcttcgtacgcctcagtcatctctgctgagaaagcctaccacgagcagctctctgtggctgagatcaccaacagtgcctttcagccatttttcatgatgccaagtgcaacccc

SEQ ID NO: 94777 - DNA, 585 bp, Zea mays
  unsure (1)..(585): unsure at all n locations
ttatttatgaatatntagaagagtggcccacncaagctagtangcttactccccccggaattcccgggtcgacccacgcgtccgtgatacacacgagttacaaacaatcactctcgactacagaagggagtgtcaacaggatgagatagtggattctcttacttgcatagaggaaggagaggagaaaagcatgaacggctctgcttctgcagcagcgcctcacaaagaagagcggcagcagttcctgcattgcttgagatttgcagccaacggacacgagatcaaccgtggccgtaccgtgtggaggaagctagctagataaaagtgttctttcgtcataaatgatctcctccatttctctgctcacggctggcggcccttgtaccacaattttgtgatgtattgttgccctttggaatgtactcagccatgtatcggtgccgatttgtgacatttcttggagctgtagctgtctgtcccgtttgtaccagtggacaatggttgtgacatgcaataaactgcggttcttcggcaaaaaaaatanataatattttttaatgaaaaaaaaaagggcggccggtttag

SEQ ID NO: 94778 - DNA, 578 bp, Zea mays
  unsure (1)..(578): unsure at all n locations
tttatattatatagtctggtgtatgccgcactgcncgcagtgcaacacgcctgaattcccgggtcgacccacgcgtccggtcaggcggcaacgcttacgtgatcggggactctgctaagcccggtcagaagtggcacgggtactgggccactgagcaccctgaggagcctgtcgttactctggagatgtgcatgactgggctggacaagaagaaagcttctgtcttgttcaagaccactgctgatggttactcgctgtgcgccaaggagatgaccaagctctctggtatctcggacatcattccagagatggagatctgtgacttcgacttcgagccctgtggctactccatgaatgctgttcatggccctgctttgtcgaccattcatgtgaccccaaaggacggcttcaactattcaagcttcaaggtcatggtctttaacccgggctctttctctatggtgacctgggtaaaagggtgctgaagggctttgggtccaactgagattctctgttgccctgacacaatttaggtgatcgggaccattcgatgaacttgggggacaaaactgagtacg

SEQ ID NO: 94779 - DNA, 585 bp, Zea mays
  unsure (1)..(585): unsure at all n locations
tttgattgaatatgagtaaagtatgccacccaagcatgaaatcgatacncgtccggaattcccgggtcgacccacgcgtccggtccggtggcaatgcttatgtgattggtgactctgcgaagcccgggcagaagtggcacgggtactacgccgctgagcaccctgaggagcctgtcgttactctggagatgtgcatgactgggctggacaagaagaaagcttctgtcttcttcaagaccactgctgatggttactcgctgtgcgccaaggagatgaccaagctctctggtatctcggacatcatcccagagatggagatctgtgacttcgacttcgagccctgtggctactccatgaatgctgttcatggccctgctttgtcgaccattcatgtgaccccagaggacggcttcagctatgcaagctacgaggtcatgggcttcaacccgggctctttctcttatggtgacctggttaagagggtgcttaggtgctttggtccaactgaagtctctggtgccgtgaccatctttagtgaaccggacaattgcgagaccttggggacgaaaactgatgcttaggcct

SEQ ID NO: 94780 - DNA, 591 bp, Zea mays
  unsure (1)..(591): unsure at all n locations
ttgtgaatggatatgnggtttgctgttnccatgagataagaagtnatatgattgctctccggaattcccgggtcgacccacgcgtccgatcgacctgacggggcagggccacgaaaagctcctctccccagttaccgacgttaagtacgtcccgaaccagtggtgcgtgttcgacgacggggccgaggacaagtccaagctgcctagcaacgtccagtatgcatgtgcgagcggcgactgcacggcactcggctatggctgctcctgcaatgggctggacgagaagagcaacatctactacgcgttcaacatgtactttcagatgcaggaccaggatgtgcgcgcctgcgacttcgaagggcttgccaagatcacagacaagaacgccttcacgcgcggctgcctgttcccggtccagataatcagtgccagtgctcgggtggcgccagctctattgatggcggggctattggcattgcttgtgaatgtgaatgtgttcgtgtagagtggggaattcgtcacttcgtggtaaactgggttcgcgttgaccaaaaaatatatggattccttggtggcttaaaaaaaaaaaag

SEQ ID NO: 94781 - DNA, 588 bp, Zea mays
  unsure (1)..(588): unsure at all n locations
tggtgaatgaagatgggtncaggnancctgaaatcgacgtcactgattgctctaccggtccggaattcccgggtcgacccacgcgtccgcccacgcgtccgcccacgcgtccgcccacgcgtccgaggggggtcaaggacggcgccatggacctcatcaacaaatggcagcaggtggcgccgtccctccccgatgacctcatgatccggatcatggccatggagcaggatgccatgttcgaggccctgtacctgggcacgtgcaaggacctcctcccgctgatggccagccgcttcccggagctgggcgtcaaacaggaggactgcaacgagatgccgtggatccagtccgtggccttcatccccatgggcaagtcggacaccgtgatggacctcctcaaccggacgttcaacatcaaggccttcggcaagtacaagtctgactacgtgaaggaccccatcccgagggacgtgtgggagaagatctacacctggctcgccaagcccggtgccggngtcatgatcatggacccctacggngccaggatcagctncatcccgcaggatgcgacgccggttccggaccgcc

SEQ ID NO: 94782 - DNA, 558 bp, Zea mays
  unsure (1)..(558): unsure at all n locations
agcactgttgtattncctttgttacgtacatcaatnatccgctcctgaataatcgggcacgccnaccgattcacgcttgcgaacggattcatcacaccttccgtttttaatttagcttcaaggccgccctacacggggcatggtccaatctaactgagccaatggcactgaaccctatgtctcgcgaacatcactaacatagctcttcgccacatcatatcatatcacctttgctatcttggattctgacttatacgcgtccagacataatccgtcacactgaatcttcactccactttatcaccaaccaatctctattaccaaatttgtcaatcaacatctccactaatactatgaacaattactatcgctgtccttttatcactaactaaaaactaacctttctcaccacattctaaccccaactcacaatacctaatgatttatgaacaatccaacacttgtaaaattcttctttcacaataaataataaaaacccaaccattaatgatcaaaaagcaacttcccttattaacgcttctattttcataatccatt

SEQ ID NO: 94783 - DNA, 552 bp, Zea mays
  unsure (1)..(552): unsure at all n locations
tcggtgnctgccatgatncctacagtcatngcactgacgcaccggtccggaattcccgggtcgacccacgcgtccgcggactacttcacggcgtacggcgtcgtattccggaacgacgcgccgctggccaagcccggcgccaagggcggccaggcggtggcggtgcggctgttcgggaccaagacgcagatctacaactgcaccatcgacggcggacaggacacgctgtacgaccacaagggcctgcactacttcaagggctgcctcatccggggcagcgtcgacttcatcttcggcttcggccgcagcttctacgaggactgccgcatcgagtcggtggtcaaggaggtggcggtgctgacggcgcagcagcgttccaagtccatcgagggcgccatcgacaccggcttctcgttcaagaactgcagcatcggcggcgtcaagggcggacagatctacctgggccgcgcctggggggactcctcccgggtggtctactcgtacacgaagatggnggangaagtggtccccgtgggctgngacggctgccaa

SEQ ID NO: 94784 - DNA, 562 bp, Zea mays
  unsure (1)..(562): unsure at all n locations
ggagcgtgccgctcgcgatcgattagcctcanctcggcactgacgtaccggtccggaattcccgggtcgacccacgcgtccgcggacgcgtgggcggacgcgtgggtgggaagcagacaatcctcatacccaagggtgacttccttgtcggacaactcaacttcacaggcccttgcaagggcgacgtgaccatccaggtggatggcaatctgctggcgaccacggacctaagccagtacaaggaccatggtaattggatcgagattctacgcgtggataacctggtcatcaccggcaagggaaaccttgacgggcagggcccagccgtgtggagcaagaactcctgcaccaagaagtacgactgcaagatccttcccaactcgctggtgatggacttcgtgaacaacggngaggtgtccggggtcacgctgctcaactncaagttcttncacatgaacatgtaccggttgcaggacatgctaatcaaggacgtgaccgtgacggcgccccgggacaagcccaacacggatggcatccacatgggcgactcattcgggatcac

SEQ ID NO: 94785 - DNA, 549 bp, Zea mays
  unsure (1)..(549): unsure at all n locations
cgagcggatggctgaacctagctcatgatcgactgctctaccggtccggaattcccgggtcgacccacgcgtccgcccacgcgtccgagctcctcgggaatccggtgccaggcctcgccttctcgcggcggtgctccctccctcttcgtcccccagcgacgcaggcaggcgcgcgcgcggccatgaaggggggcggtgccatgaggccgtcgcctatgttctacgtccacgaggcggacgtcgtccagatccaccacttcctcgaggagtgctccctctgcgccaaatcgctctccggcgacatcttcatgtacaggggtgacacgccgttctgcagcgaggagtgcagggagcagcagatcgaggtggacagggcgaagcaccggcggaagaagcgcgcggcggcgcacgcgctgtccgcacgcagcagggagcaccggcaccagcagcagctgcagcagcaccaccaccagcagcagcaaccgcagccgcggaatgccggcatggacacccgncacccgtgggtcgacgcccggttcgccaggccca

SEQ ID NO: 94786 - DNA, 560 bp, Zea mays
  unsure (1)..(560): unsure at all n locations
tgatgcgtgctagtccatgaatagattgtactgctctacccgtccggaattcccgggtcgacccacgcgtccggtgaacatcaccgcgcccgcggacgtcgagaacacggacggcgtccatgtcggcgggtcctgcaatgtacgcatcaccaactcaaccattggcaccggcgacgactgcgtctccatcggccctgggagcgacggtgtcatggtgaacaacatcacctgtggccccgggcagggcatcagtgtgggctgcctaggccgctacaaggatgagaaggacgtgagcgacgtgacggtgcgggattgcgtgcttaggaacaccaccaacggcgtgcgcatcaagtcgtacgaggatgccgagtctgtgctcacggcgtcccatctcaccttcgagaacatcaggatggangaggtggccaaccccatcatcatcgaccagtactctttgccccaagaggtcctgccccgcaagcgaagcaactnctcgcatgtctccatcaaggacgtcaccttncggaacatctncggcacgtcgtccacgcccgaaagcg

SEQ ID NO: 94787 - DNA, 547 bp, Zea mays
  unsure (1)..(547): unsure at all n locations
gggtgctagtccctcacggctcgtacgtgcactcgtctcgantcccgttcgaccacgcgtccgcccacgcgtccgcccacgcgttcgcggacgcttgggcggacgcgtgagtgccaacttcacgagcttgtgtgaatagtctggggtaccgactgcataaattactgcagattgcgacacctgtaaaagttacacaagaacatcttgatcgagcttaccaggcaaccaaatctgcagatctgatgaacttggaatcaaggtctatagcatctgaagatattggaagacaggttcttacttatgtggaaaggaagcccatctagtatttcctgaaaacagatgacgagatcactttgaatgacattgtcgtaaccgcaaaggagatgatgtgtacaccactcactatggcatctagccgcgacgttattcatgaacctagattcgagtctgttagccgtcaggtttcactacgaagtgagaagatccagcatgacctgattcaacaactgatgtgaagcctgctatggtcctcaagtggaacacctcc

SEQ ID NO: 94788 - DNA, 557 bp, Zea mays
  unsure (1)..(557): unsure at all n locations
ggagtgcgctgccatgataagcagatgattgcactgctctaccggtccggaattcccgggtcgacccacgcgtccgcccacgcgtccgaccgagacccccctcaagctcgccgagtacttcaacgtcaccgacggggtgttcagctacaaccagatgggcgacgtgccccccgccgttaacgggccactccatgtcatccccaacgtcatcaccgccgagttccggaccttcatcgagatcgtcttcgagaaccccgagaagagcatagactccctccacctcgacggctacgccttcttcggcgtcgggatggggcctgggacgtggtcgccggagatgaggaagacgtacaacctactggacacggtgagccggcacacgatccaggtgtacccgcggtcatggacggcgatcatgctgacattcgacaacgcgggcatgtggagcgtncggtccaacgtctgggaacggtactatcctcgggagcagttctacatcagcgtcatctcgccggcgcggtcggtgcgcgacgagtacaacatgcccgacaacgccc

SEQ ID NO: 94789 - DNA, 546 bp, Zea mays
  unsure (1)..(546): unsure at all n locations
agtgtacggtcgtgttgcctagctttacgctcatcgtcgaaccgctccggaattcccgggtcgacccacgcgtccgggcttctcctccccctcttaccaagtcctcttcgggttagggttacttagggttttgtggaggggcgatggcggcggctgatgtggagtaccgttgcttcgtcggcgggcttgcctgggccaccagcaacgagtcgctggagaatgccttcgcctcctaccgcgagatcctcgactccaaggtcatcaccgaccgggagacggggaggtctcgcggcttcggcttcgttaccttctcctccgagaactccatgctcgacgctatcgagaacatgaacggcaaggagctcgacggccgtaacatcaccgttaaccaggcccagtcccgtggcggtggcggtggcggcggtggctacggcggcggtcgcggcggcggcggctatggtggcgggcgccgtgacggcggttatggcggcggtggcggctacggcggtcggcgcgagggtggtggcggcggctactgaagcggtn

SEQ ID NO: 94790 - DNA, 544 bp, Zea mays
tgggatgcggtgctgagataagataaggaggatagtggctaccgctccggaattcccgggtcgacccacgcgtccggaaggtggccgggatccactggcactacggcacccggtcccacgcggcggagctgacggcggggtactacaacacccggtcgcacgacgggtacgcgcccatcgcgcgcatgctggcgcgccacggcgccgtgctcaacttcacgtgcgtggagatgcgcgaccacgagcagccgcaggacgcgcagtgccgccccgaggcgctggtgcagcaggtggccgccgcggcgcgggaggccggcgtgggcctggccggcgagaacgcgctgccgcgctacgacgacacggcgcacgaccaggtggtggccacggtcgtcgacagggccgtcgaggaccgcatggtggccttcacgtacctgcgcatggggcccgacctgttccaggccgacaactggggcccgttcggcggggtcggtaagcgcatgacggaacccggccccccggaagcgttcccggagcaaggtgaacc

SEQ ID NO: 94791 - DNA, 553 bp, Zea mays
  unsure (1)..(553): unsure at all n locations
tggctcgttgtccatgcataagcatgtanatggatacncgtccggaattcccgggtcgacccacgcgtccgcccacgcgtccgaacgacctggccaagtacacggcgagttggatccaggtgtcgcacgttgacaacatcgtcatcaacggctccggcacgctcgatggtcagggcaccgcagtatataccaagagcaagactgacgtcgtcaaggcgatgcccaacacactagtgttgttctacgtgaccaacggcactatttccggaattaaactactcaactccaaattcttccacatcaacatcgacacttctaaggacatcaccgtgaaggacgtgaacatcaccgcgcccgcggacgtcgagaacacggacggcgtccatgtcggcgggtcctccaatgtacgcatcaccaactcaaccattggcaccggcgacgactgcgtctncatcggccctgggagcgacngtgtcatggtgaacaacatcacctgtggccccgggcaaggcatcaatgtgggctgcctaagccgctacaggatgaaaaggac

SEQ ID NO: 94792 - DNA, 561 bp, Zea mays
  unsure (1)..(561): unsure at all n locations
cggagcgtggtagtccatgcatagnatcgtagtgctctacccgtccggaattcccgggtcgacccacgcgtccggatcgggattgtgggcgagtgcgtgcgttcgtgcagccacagacaggcgtccgggcaccatgtctttcaccggcacgcaggacaagtgcacggcgtgcgacaagaccgtccacttcatcgacctcctcacggccgacggcgccatctaccataagacatgcttcaagtgcagccactgcaaaggggtcctctcgatgtgcagctactcctccatggacggtgtgctgtactgcaagacccacttcgagcagctcttcaaggagaccgggagcttctccaagaacttcacgccaggtggcaagtcatcagacaagggtgaactgacaagggccccaagcaagctgtcgtctgcattttctggtacccaggataagtgcgcagcatgccagaaaacagtgtacccgctggagaaggtaactcttgaaggcgagtcctaccacaagagctgcttcaagtgctcgcacggggggttgattctgaccacctt

SEQ ID NO: 94793 - DNA, 555 bp, Zea mays
  unsure (1)..(555): unsure at all n locations
cgtagcgccgnttcactggctacgccgactacgcactgacgcaccggtccggaattcccgggtcgacccacgcgtccggcaaggaacgcaccccgaatcccaactcctgtgtccgccatcgcctcgtggcggtcgctcctgctcctgctgctgctgctgctcccccagccgctcccgcccggagcacgccgccggcgccgacgccggcgcgtcgcatggatatggcccccgcgtctgtctacttcaatccgcgctcggtcgaggaaatcttcaaggacttctccggccgccgcgcggggctcgtccgcgccctcacctccgatgtggacgatttctgcagcttgtgcgacccagataaggagaatttgtgtctctacggccttcccaacgggagctgggaggtgtcgccgccggcggaagaggttcctccggagttgcccgagccggcgctcggcatcaactttgcgcgcgacggcatgcagcgccgcgactggctcacactcgtcgccgtgcactctgactcgtggctcatctccgtcgcattcttctacggtg

SEQ ID NO: 94794 - DNA, 554 bp, Zea mays
gctggccggtggaatgaaaagcatcactccgactgacgtaccggtccggaattcccgggtcgacccacgcgtccgcccacgcgtccgcccacgcgtccgcggacgcgtgggtcgcaaagtcgcaataacttgtcttctcgaatcggctgcaaccccaccccagaccccaccgccgccgccgctagggttttggggtgaggatcgccgatgtcgacggctcccaggcgtcccttccgaggccgcggcgccatgccctcgggcaccggctacgtccgccgcggccccgccccaggctccgccgacgccgccaagcccctgcgcaagcccgtcttcaccaccgtcgaccagcttcgcccccagacacacggtcacactctcacagcccgcgtcattgccgtccgcaccgtcctcgacaagccctccacgcacctcggccgcacccgcgtcgccgagtgcctcgtcggagacagcaccggcaccgtcctcgtcacccgccgcaacgaacaggttgaccttttgaagccagatacaacagtgatcttccgcaatgccaa

SEQ ID NO: 94795 - DNA, 558 bp, Zea mays
  unsure (1)..(558): unsure at all n locations
ggagtgccgatgggactgactaggcagatgattgcactgctctaccggtccggaattcccgggtcgacccacgcgtccgcgccccttatcgccctcgttatttacatcgctgccaccctcctctccgccgtcgccgccgccgccggggatggggggagcgcaattccccggcgacaacgacgtcgcggaagtagacgcggcccgcgacggagaggtggaccgccgtgacgtgggcaagatgaagcacgggtgcgagcattaccggcggaggtgcaagatcgtggcaccgtgctgcaaccaggtgttcccctgccgccactgccacaacgaggctacggcttccggagatcggcatacaatatgtcgtcaggatgttgaaaaagtagtttgcctactctgtgaaacaaaacagccagtgtcacaagtgtgcataagctgtggagtcaatatgggagagtacttttggatatatgcaaatttatgatgatgatacagaaaagggcagtaccattgcatcgattggtgcatatgcannggtggttgcaagggaaacttctt

SEQ ID NO: 94796 - DNA, 546 bp, Zea mays
aggagcggtgctgatattgaatatcgatagcatcgttgctaccgctccggaattcccgggtcgacccacgcgtccggtgcccagaatgttgcaggtctatcaccgccaagctattcagctggagtgcagtctgagggactggatgacctttcacattcccataagtttgccgttggtactagagttcaagctgtgtggagtgaagatggagaatggtataatgcaaccgttgaagctttgacaccaaatggatactatgtagcctacgatggctggggaaacagtgaagaggtggacccagataatgtgaggctgcttgaggaagaagcagctgatgccttgggacaagctgaaaaggaagctgaagctacaaaaatggcaataaagaggaaaattgaacaagcagcaacatctgattttcaggcgcgtagcttgccggccaaacttcgtatcgaaccaagtgaccctgaggatgtaaaagctgcaaagcgtaagaaaatacatgctttcaaatcaaaatcccgctttgagcagcttgaatttgcc

SEQ ID NO: 94797 - DNA, 560 bp, Zea mays
  unsure (1)..(560): unsure at all n locations
tgagacggtgcttgatcccagcnatagatatcantgctctacccgtccggaattcccgggtcgacccacgcgtccgcccacgcgtccgcccacgcgtccgcccacgcgtccgcccacgcgtccgggggctctcccaggaggacctcgtcctgctctccggcgcgcactccatcggcggcgcgcactgcttcatgttctccaaccgcatctacaacttctcccaggacgccgacgtcgaccccacgctggacccggagtacgccaagtggctgcgccagatgtgcccgccgcggcagcccggcgacgaccccgagcaagcgcccaaggtgaagttcgacgcgcagacggnggagcggctcgacgtcgcgtactactccgagcttgctcgccgccgcggcctgctcacctcggacaacgccctcatcgaggacccgcagacgagggcgatggtggagaaacttcgccggaacgagccactgtggcaacaaaaagtttcccaagcgatgcaaaaggtcgggatgcttgacgtgctcatcngcgaaggcaanggcccacgtagg

SEQ ID NO: 94798 - DNA, 558 bp, Zea mays
  unsure (1)..(558): unsure at all n locations
tgaggtgctgtcatgcatagatagtacctggctaccggtccggaattcccgggtcgacccacgcgtccgcccacgcgtccggcgacacctgccgcgccgggttcgtgaccaatgtcaccgagtacatcgcgggcgccaaggtgaggctggagtgcaagcacttcggcaccggcaagctcgagcgctccatcgacggggtgaccgacgcgaacggcacgtacacgatcgagctcaaggacagccacgaggaggacatctgcgaggtggtcttggtggagagcccgcgcaaggactgcgaccaggtgcaggcggacagggaccgcgccggcgtactgctcaccaggaacgtcggcatcagcgacaacctgcgccccgacaacccgctcggctacttcaaggacgtgccgctgcccatctgcgcctcgctgctcaagcagttggactcggacgacgacgacgatcagtaatagcacatcgtcgacgaccgcagactggctggcactaaaccacaaatcctcttcacctggattacaaatatgtcactgagaaagggaaggn

SEQ ID NO: 94799 - DNA, 558 bp, Zea mays
  unsure (1)..(558): unsure at all n locations
agatgtgcgaatgcgctggctacgccgactacgnactgacgtaccggtccggaattcccgggtcgacccacgcgtccgcacacgcacccacacgacacatccagatgatgcttagggtttccccgtccccggccgccgcggtgccaacccagctctccggtgcgcccgcgacccctgctcccgtcgtcagggtggcggcgccgcgcggagtcgcctcgccgtccgctggcgccgcgtgcagggccgcgggcaaggggaaggaggtgctcagcggggtcgtgttccagcccttcgaggagatcaagggggagctcgccctcgtgccccagtccccagacaagtcgctcgcgcgccacaagttcgtcgatgactgcgaggctcgcctcaacgagcagatcaacgtggagtacaacgcctcgtatgcataccactccctcttcgcctatttcgaccgcgacaacgtggctctcaaaggatttgccaagttcttcaaagaatccaacgacgaagagagggagcacgcttgaaagctcatggagtaccagaaccaacgtggan

SEQ ID NO: 94800 - DNA, 558 bp, Zea mays
  unsure (1)..(558): unsure at all n locations
cgggtgccgntttcaactgcgaaagccatgcatgnattgacgcaccggtccggaattcccgggtcgacccacgcgtccgactgtggccagtgccaaacagtgttgatgtatccatacggagcaccgtctgtcaaatgtgctgtttgcaacttcattacaaatgttggcggggtgactcccatgatacctttgccaccaccagcactacctgcatcaagtggaacttcatatatcatcccgtcaatttccgtgccgacgaatcaaccgcggaatgtaactgttgtcgttgaaaacccaatgacagtagatgacaagggaaaattggtgagcaatgttgtagtaggggttacgagcggcgggaaaaagtgacggcatatcacaaccgtgtgtagctttgtccaaactatctaaaaagggtttaagaatacataccttgtatcatactgctgtttggcgatcggctgctcgacggaggaatcccccctcctggaaaacgtagtggcaaagcaacgaggctttcggcactgcgaacgagccaaaataaaacgaagtgcgggt

SEQ ID NO: 94801 - DNA, 544 bp, Zea mays
tgagagggttgtgagctatgaataagaagtatcgtgcaccgctccggaattcccgggtcgacccacgcgtccggggatggggttcaaaaatgaagtttcaaataaatctattgttgagcccactcttgaatttgcaattgtacaagatgcagatcgcttggatgcaattggggcaattggtattgcaagatgttttacatatggtggtagcaagaacagcgcattacatgatcctagaattctgccacgtgatagcttgtcgaaggaaaagtacatgtccaaggaagagaagcagacatcaatcaatcattttcatgagaagctctttaaactgaaggacatgatgaagacagaggccgggaaaaagagagctgagaaaaggcataggttcatggaggaatttgggggctgaattctacgaagagtggagtggcagagcttgaggttgaacaaccaggttttgagcctatgtcaaagtgtgcagttggcgaaccatttctcaacaacccatgatgatgttgtctaactggcctactttttgccg

SEQ ID NO: 94802 - DNA, 543 bp, Zea mays
  unsure (1)..(543): unsure at all n locations
tgtgagggtgctgtcgccaaaagactangncnaatcaaccgctcttgaattcccgggtcgacccacgcgtccggaaagatgcattcctggaaacaccatcgccgtccaagctgacatgccatacagtggcctgggatcggtcggaacagcatttttgtccaagttcgaatgttctcagatgccacatccactgttagagcacgtgaccttcgtggacactccaggagttttatcaggggagaagcagcggacgcagcgcagctacgatttcaccggagtcacgtcgtggtttgcggccaagtgcgacctcatccttctcctgtttgatccgcataagctggacatcaacgatgagttcaagcgtgtgatcgggtctctccgcgggcatgatgacaagatacgcatagttctcaacaaggccgaccaagttgatgcacagcagctgatgagagtgtaccgagcactgctgtggtcgctcgggaaagtcctgaacacacccataagtcatgcgtgtctacataggttcattcaacgacaagccgt

SEQ ID NO: 94803 - DNA, 562 bp, Zea mays
  unsure (1)..(562): unsure at all n locations
agggtggtgctagtcatagcagtaaatagtagtcatgctacccgtccggaattcccgggtcgacccacgcgtccggattttagccgccgccgctgctcatctcacatccctcgagaagacgcctgctcctcgccgatcgatacgatggccgtcttctccgacctccacaccgccgacggcctcaagtccctcgaggctcacctcgccggcaaaacctatgtgtctggtgactccattactaaggatgacattaaggtcttcgccgcggtgccgtcgaagcctggcgctgagtttcctaatgccgcccgctggtacgagaccgtctctgcggctgtagcctcaagattccctggtaaggctgttggtgtaaatctgcctgcgggatcagctcctgcggcagctgctcctgcggatgaagctgangatgatgatgaccttgatctttttggtgatgaaactgaggaagacaagaggcagctgatgagcgtgccggcgctgccaagggctctttctaaaaggaagaaagtgggtaatcctccggccttatggatgtcaaaccatg

SEQ ID NO: 94804 - DNA, 559 bp, Zea mays
  unsure (1)..(559): unsure at all n locations
ngagggcgcatgcactgaaaagcagatgaatgcactgctctaccggtccggaattcccgggtcgacccacgcgtccggctggagctatcgtggcaggaggaaagggtactgcccaggacaaaatcaaggcactcagagaggcaggtgttaccgttgtcgagtcaccagcgaagattggctctaccatgtttgaaatcttcaagcagcgtggaatggtagaatagacgatggagacattgagaaaccgcattttgatgctcatgggcaattgcgagcaattccttccatggcctcaaacaaaactaatgaggctaccttttcttacgtgccttctgtttggaagatggcctcttcacctggatcaccttccaatgagctcatttccaataagacgtttcagagccatggacatgcttggagtcaatgtgaatgcctaatttcgaatttttattgtttacacatgtcaatctaggtttaccaatctggttccttgtattatatngtgcggtaaaatgccccacagctgaggacgattgctttgctcggtgtcatngttgaa

SEQ ID NO: 94805 - DNA, 558 bp, Zea mays
  unsure (1)..(558): unsure at all n locations
tggtggccgntcgaatcgaatacgaagcactacgcactgctctaccggtccggaattcccgggtcgacccacgcgtccgcccacgcgtccggcctgaggaggtggaaggagcaactccttgggcaggtcgacacagagcagctgggagaaactgcggaaccagaggtcaaggtgctggacctgaccatcctgtcacctggcagaccggacctgatccttccgatcccgttccaggctgacgagaagggctatgcgtttgccctcaaggacggcagcccctacagcttccgcttctccttcatcgtctccaacaacatcgtgtcaggcctcaagtacaccaacactgtctggaaaactggagtcaaagtggagacccagaagatgatgctggggacgttcagcccccagctagagccctatgtctacgagggcgaagaagagaccacccctggtggcatttttgcgagaggttcttaatctgccaaactaaaagttggtgatgatgatggcaagtgcttnctggagatgagttactactttgagattggaaaggagtgn

SEQ ID NO: 94806 - DNA, 564 bp, Zea mays
  unsure (1)..(564): unsure at all n locations
ggtccgctgctgagatgtataagcaagtataatgatctgctctaccggtccggaattcccgggtcgacccacgcgtccgcagacaatcagcagctagaccaaaagaaagaaaggctcgttatatgacagaccttgagcggaaggtccaaactcttcagactgaagccaccaccctgtcagctcaacttacactatttcagagggacacgaccggactttctacagaaaatgcagagcttaagataagtttacaggccatggagcaacaggctcaactccgtgatgctctgaatgatgcactaaagcaggagctggagaggcttaaacatgctactggtgagatgaccaattccagcgaggcatataacatgagattccaacatgttccatacaattcttccttcttcccgctttcccagcaaaatgcatccncacaccttggtagcacccagctgccactgccgttccacccaccccatcccaacgtgccaaaccaccagatgcgaaacactcttccggacataatgcagcaagagtctctcggacggctgcanggtttggacc

SEQ ID NO: 94807 - DNA, 541 bp, Zea mays
cgaggaggtgctgagccatgataagacgtatcgtgctaccgctccggaattcccgggtcgacccacgcgtccgctcccgagtcccgatcgcaaccgccccccacattccccagagttagcccgatcagatcgttgttccctcgaggtgagagtaagatgagggagatcctgcatatccagggagggcagtgcgggaaccagatcggctccaagttctgggaggtggtgtgcgatgagcacggcatcgacccgacggggcggtacatggggacgtcggacgtgcagctggagcgcgtcaacgtctactacaacgaggcttcgtgtggtaggttcgtgccgcgcgcggtgctcatggaccttgagcccggcaccatggacgccgtccgcacgagcccctacggccagatcttccgcccagacaacttcgtcttcggccagtccggcgccggcaacaactgggccaaagggcactacaccgagggggcggagctcatcgactccgtccttgacgtcgtccgtaaggaggccgagaactgcgact

SEQ ID NO: 94808 - DNA, 550 bp, Zea mays
  unsure (1)..(550): unsure at all n locations
atggagccggtgcttgtgatagtagatgcggggagagtggctaccgctccggaattcccgggtcgacccacgcgtccgatcgcggcggtgtcggtgaaggggagcaagcgtgtcaagtggacggagatgaagcgcaactgggggcaagtgtggcagaccggggaggacctcacctgcgagtcgctgacgttccgggtgatgaccagcgaccaccgcaaggccacctcatggcacgttctccccgctgactggaagttcggtgtcacgtaccaggcatccaagaacttctaagtagccacttttcctcctcttcttcaacctgcatatgcccacaagcaaccatgcagatgataacatgcatcatgcatgcatattcattctttcgctcatgcattccgatatggtgccggagttaaaaaaatgtaaatcaatgtgcaaactcaaatgacatcttaaccagttgtgatcaaaanaaaaaaaannnannnnnaanaananaanaaaaaaaaaaaaaaaaaaaaaaaaaaaaaaaaaaaaaaaaaaaaaaaaa

SEQ ID NO: 94809 - DNA, 541 bp, Zea mays
  unsure (1)..(541): unsure at all n locations
cgagaggtgctgaagcatgctatgacgtatcgtgcaaccgcnccggaattcccgggtcgacccacgcgtccgctccttctgctcggaacgcacacaccgaccggtacccgatctccgatccgctcgtcgatccgaagatgcagatcttcatcaagaccctcactggaaagactattaccctcgaggtggagtcttatgacaccattgacaacgtcaaggccaagatccaggacaaggagggcatccccgcggaccagcagcggctcatctttgctggcaagcatcttgaggacgggcgcacacttgccgactacaacatccagaacgagagcaccctcgaccttgttctccgcctcaggggaggcatgcagatcttcgtcaagaccctcactggaaagactatcaccctcgatgtggagtcttctgacaccatcgacaacgtcaaggccaagatccaggacaaggagggcatccctgcagaccagcagcggctcatttttggcggcatgcagctcgaggaccggcgcacgctgggcgactc

SEQ ID NO: 94810 - DNA, 550 bp, Zea mays
  unsure (1)..(550): unsure at all n locations
naggaagccggttgctagcaatggtggatggggagacaagatgcaccgccccggaattcccgggtcgacccacgcgtccgctcctccatcgagcagaaggaggagggccgcgggaacgaggcgcacgccgcctccatccgcgcctaccgctccaagatcgagaccgagctcgcccgcatctgcgacggcatcctcgccctgctcgactcccacctcgtcccatccgccggcggcgccgagtccaaggtcttctacctcaagatgaagggtgactaccacaggtaccttgctgagttcaagtctggtgcagagaggaaggatgctgcggagagcaccatgaatgcctacaaagctgctcaggacattgctcttgcagatctggctccaacccaccccatcaggcttggccttgctctcaacttctcagtgttctactacgagatcctgaactccnctgatcgcgcctgcaaccttgcaaaacaggccttcgatgaggcgatctctgagctagacagccttggagaggagtcctacaaggacagcactctga

SEQ ID NO: 94811 - DNA, 556 bp, Zea mays
agggaggtgctagtatagaaacagattgtaatggtatacccgtccggaattcccgggtcgacccacgcgtccgcggacgcgtgggcggacgcgtgggcggcgacgtctccacctacgacagcggcagggtctggggcgagaagtactacaatggcaacttcgagaggctcgccaggaccaaggccaaggtggacccctgcgactacttcaggaacgagcagagcatcccgccattgctcaagtgatcgatgatacccggtcccatccagatcctttcgaccgcgccaagcaaaaggacgacgagtcgtacatgattctgctgattatattaattagattgatcctgctttgcatgcgttgagccaggtgctttgcatggcgagttagctacgtagttggcatcagccacatgcatgacattaaaacacaagctgacagccggctacccaaagtaaataagatacgcgacatacacttgcgtgccaattagtatggctggttcttcttttttaatattattagtcaacattttatttcattttccttgtaccgatgc

SEQ ID NO: 94812 - DNA, 556 bp, Zea mays
  unsure (1)..(556): unsure at all n locations
gggacggcgctcggatcgataagaccactaagcacctgacgcaccggtccggaattcccgggtcgacccacgcgtccgcccacgcgtccgcccacgcgtccggtgatttgaaataattgggaataaatagttcgtgaatgcctgaagcgtgcatatatatattcctgccaagataaaggtaatggagtcgtcacgcaggttccagccggccgtcatcctgcttctcctgctcattgtgtccaccgatatggcacaggcaagggaatgcgagaagtacagtgagcgatttgttggggcatgcatgatcgcagacaactgcgccaatgtgtgccgcggtgagggcttcttggccggcaggtgcagcaccttccgncgncgctgcatctgcactaggcagtgctaaacaagatcgctcgatcgctcggcatgcatcgacaacctattcttaataacgttcattatctcggtcctatttatgacgaatgtcatgtatgttcttgtgactggcatgtatattctgatgactggcatggatcttggtcatgtatgctcaaag

SEQ ID NO: 94813 - DNA, 549 bp, Zea mays
  unsure (1)..(549): unsure at all n locations
nggaggcggtgcgtgcgaatagtaatgaggggagagtggctaccgctccggaattcccgggtcgacccacgcgtccgcccacgcgtccgcccacgcgtccgcccacgcgtccgaaaaaaagaaaaaaaaagagcagaggaagtagagtagactacgacagcgtccggcgaggaggcggaggcgaagatgaggaagaagctcggcacccggttccccgcggctcgaatcaaaaagataatgcaagcagatgaggatgttggaaagattgcactagcagttcctgttttagtttcgaggtctcttgaattgtttttacaagatttaattgaccgtacttatgaaattactcttcaaagtggagcaaagacactgaattccttccacctgaagcaatgtgtgaagaggtacagttcttttgatttcctaactgaagttgtcagcaaggtaccagatcttggtggcgctgattcctgtggagatgaaagaggattacctagaagaaggtaaggtcatttgtaatcaacattttatgattcaattggctcacgt

SEQ ID NO: 94814 - DNA, 547 bp, Zea mays
  unsure (1)..(547): unsure at all n locations
atggatgcggtgcttgacatcgaataagaaagtatcgtggcaccgctccggaattcccgggtcgacccacgcgtccgatgagttgaggcgcttacacaaactttcattccggcctcttgttccatagtttttcttgcatgttacatctcaccgatgaataaaatgtatgtatcagacttgtctcgtttttttgcccatccaagcagcaaattagccgctggcacagcatgcggtaataatcttgtcacagtgctgtaattgggagcgtttttcttgttagaagtgtttctggtttgtttgagcatttacggatcgatttttctttctgaagagtatataaacattttactcacctgtaaaaaaaaaaaaaaaaaaaaaaaaaaaaaaaaaaaaaaaaaaaaaaaaaaaaaaaanaaaaaaaaaaaaaaaaaaaaagggagaaaggttttagaggatnaaaggttaagaaagggttaattgaaattaaaaaatttttttatagggtacctaaatttaatttactgggcctggttttaaaacgtcggga

SEQ ID NO: 94815 - DNA, 559 bp, Zea mays
  unsure (1)..(559): unsure at all n locations
cgtctggggtgctagtccctacntctgactgtantcgctatcncgtccggaattcccgggtcgacccacgcgtccggagccatccccaggctcttgcgcaatgtgaacacacattaacaggactaggaattgaacatagagaggctgttgacgacactgctggtgcagcaaagattgttgcagaacatatggtccaggatactggtgctattgctagttcattggctgctaaactctatggattggatgttcttgctgagaatattcaggatggcaaaaataatgtcacccgtttatgatgctagctcgaaaacccaacattcttcgcaatgatagaccatttaagacaagcatagtcttttcactagaagaaggacatggacaactctntagggcgcttggtgtattcgcacagaggaaaatcaacctcacaaagatcgaaagtcgtccacacaaggagaggcctcttcgagtatctgatgactgttccttactcttaaaagattttgattacctcttttacgttgaccttgaagcatcaatggctgatccaaagatt

SEQ ID NO: 94816 - DNA, 556 bp, Zea mays
  unsure (1)..(556): unsure at all n locations
ngtgggtgcgntgngatgaataagcagatgattgcactgctctaccggtccggaattcccgggtcgacccacgcgtccgatcaaatccacggtttaataacgaaccgtgttaacttaccataacaacaactcaattcctatcgaattccttcctatcgaattcctatagtaaaattcctataggatagaacgtacacagggtgtacacattatatatgaatgaaacatattcattaacttaagcatactcctttttttatttaatgagttgatattaattaaatatctttttttttagatttttgcaaaggtttcatttacgcctaatccatatcgagtagaccctgtcgttgtgagaattcttaattcatgagttgtagggagggacttatgtcaccacaaacagaaactaaagcaagtgttggatttaaagctggtgttaaagattataaatggacttactacaccccggagtacgaaacccaagatactgatatcttggcagcattccgagtaactnctcaactcggggttcccgctgaagaagcangagctt

SEQ ID NO: 94817 - DNA, 564 bp, Zea mays
  unsure (1)..(564): unsure at all n locations
ngtaggcgttgcatagtatagggaagtacgtgnatacgctcgccggaattcccgggtcgacccacgcgtccatctgagttaaaggagtacttatgctggtgagactgcaacatcaaagaaaaagagaagaactcctgcgtggtgtgacagaatattgtggcgtggtgatgggattgtacagttatcctactaccgcggggagtctagattttctgatcaccgttctgtttgtggaaccttcgctgttgaggttgaggtgcgaaacaagaagacaaacaggcgctcatcaaatgctgacatgagaattgatgctgaagagctcttacccacgggcaagggtaaaagagatgagaatcatgttgcacgcgaggaggataggctagtattgcagccggactcgcagatgccgtacgttcccttctcattgatgttccaacggccagcgctcaagatggacggacgattcaccggctcggcccacaacaagctcatcaccacccatggtttcctcttaacaaccgtgccaaacagncaattcattcgaagcaccggtaccgtgcgccg

SEQ ID NO: 94818 - DNA, 539 bp, Zea mays
aggatgggtcgctagccttgataagacgtatcattctaccgctccggaattcccgggtcgacccacgcgtccgataagatggcgtgtatagacaatgcaatgagagccttgttccttttagcgctcttctgtgtcgtgcatggtgagaaggcaaagtcaaaggacaacgatgcaaaagcgtccgggcccggtgggtccttcgacatcaccaagttgggcgcctccggcaatggcaagacggatagcacgaaggctgtgcaggaggcgtgggcatcagcgtgcggcggcaccgggaagcagacgatcctcatccccaagggcgacttcctcgtcggaccactcaacttcacaggcccatgcaagggcgacgtgaccatccaggtgaatggcaatctgctggcgaccacggacctaaaccagtacaaggatcatggtaaattggatcgagattctacgcgtggacaaccttgtcatcaccggcaaaggaaaagctgacgggcaggggccaaccgtgtggagcaagaactctgcgtaaagaa

SEQ ID NO: 94819 - DNA, 555 bp, Zea mays
  unsure (1)..(555): unsure at all n locations
tgagggtgctgtcatagcataggtacgtattgctctacccgtccggaattcccgggtcgacccacgcgtccgcacaaggttgcttatggattatttgaatgattatgcttatgacgcgcaagttgctggcctctattatgttgttaagccaaatgacactggttttcaggtaactatggttggcttcaatgacaaaatgagaacccttttggagactgttattggaaaaattgcagaatttgaagttaaggctgaccgtttttctgtgataaaggaagctatgacaaaggagtatgagaatttcaagtttcggcagccataccaacaagtcctatattattgttcgctaatactggaggaccaaacatggccatgggatgaggaattttctgcactttctcaccttgaagctagtgatcntgngaattttttgccccaattgctatcaaaaaccttcatcgaagtgtattttgcaggtaatattgaacccaatgaaacanacaatatcggtcaaacatgtgaagatgtcttattcaatgcaccaattagtgcttt

SEQ ID NO: 94820 - DNA, 561 bp, Zea mays
  unsure (1)..(561): unsure at all n locations
gggcgtnnntttatgagnatgatagtcatacattgccgttccggtccggaattcccgggtcgacccacgcgtccgcccacgcgtccgagcggctcttgtccgcgccacaagataccaattgttgcgctgggaatattcagttacgatgacccgctttagttcagttttttttttgggggggttggttcgatcatttggctgtagcgtgaatcgcatggacaacagactccaattactaagcaaatatttttgttctgcatatattggaagaaccttgttcaggcccccctttcgaaatgaaatgcgtgaaattttgttcttgttcaaacaagggctctgcgtgctgcaccggataaaaagggcggccgctctagaggatccaagcttacgtacgcgtgcatgcgacgtcatagctcttctatagtgccacctaaattcaattgactggccgtcgttttacaacgtcgtgactgggaaaaccgtggcgttacccaacttaatcgccttgcagcacatccccctttcgccagctggcgtaatagcgaanaggcccgcaccgat

SEQ ID NO: 94821 - DNA, 559 bp, Zea mays
  unsure (1)..(559): unsure at all n locations
gtatggtgcgnntgcaatcgataagcagaggtaagcactgctctaccggtccggaattcccgggtcgacccacgcgtccgcccacgcgtccgcccacgcgtccgcgcgtccctcgctcctgcgccgcccgtccgatccggtcaccggccggggagggctcagaaacctttcatccaatacatacatctatctgagccctttcccgcggtgaggcccgaccggagtccacacacacacacacacggtgtcgatggcggccgtaataaggagccgccgcgtgtccgttgtcttctacgtcgtcctcgccgcagctgcagccgcggcgcaggcatccaataacgtcaccttcgacgaggattactgggcggagcgcgccgaggtggctcggtcgcgcaacctcgccggctacgttagggaccccgtgggccggcacaaccggtttaacgccgaccttcttagggccaagaccccgcgggcgcttgccaagtaccaatggccgtgcatggcgaccaaacccattgaacggtgcttgcgcttgcgcgccgactgggcgacagac

SEQ ID NO: 94822 - DNA, 563 bp, Zea mays
  unsure (1)..(563): unsure at all n locations
aggcggnnnaactctgagtcttacagcgatacgactgcccgtccggtccggaattcccgggtcgacccacgcgtccggtcacgcgtccgagcgggtcttgtccgcgccacaggataccaattgttgcgctgggaatattcagttacgatgacccgctttagttcagttttttttttgggggggttggttcgatcatttggctgtagcgtgaatcgcatggacaacagacttcaattactaagcaaatatttttcttctgcatatatttgaagaaccttgttcaggcctccctttcgaaatgaaatgccggaaatttttttcttgttaaacaaggtgttcggcgtgctgcaacagatataaaagggcgcccgctctagaggacccaagttttacgtactcttcgattgcagaacattagtcttattttggggcacctcaaattaattgcatggccggaattttacaacggtgtgaattggaaaaacctggccgttcccaactttatcgccttggagaaattccccttttcccggctgggtaattcggaaaaggcccgccccttt

SEQ ID NO: 94823 - DNA, 547 bp, Zea mays
agaggcggtggtatgatgttgatgtgggaataatgaaccgctccggaattcccgggtcgacccacgcgtccgcccacgcgtccgtggggcttccacaaccggtaacactgcatttcaagataaggggtttgatgctacaggatgggaactcgcccttgttaccgcaccgagcaacacgacttcatctgcgtctgtcggtcaattgggtggtggatttgacaagctcattttggacagcctttatgatgacggggcctacaggcagaggcaacagcaacaggtgtatggttcagcagtgcctaatccattcatgtcaaatgatcctttcgtgatgtcaaaccaagttgctcccccaccatcagttcaaatggctgccatgtctcagcagcatcagcagatccccacgatgatgcaaccaaatccttttggaccacctatgcagccacaggtaggcatgggtccagcaacaaacaatccctttctggatgctggattcggggcattcccagtggcgaacaatggccatcagcaacacaacccatttggc

SEQ ID NO: 94824 - DNA, 609 bp, Zea mays
  unsure (1)..(609): unsure at all n locations
gttaataggggnanaaagtggggagnnaggaggaggtgtagttatgatcatcactgctcatcgcactgctcgtaccggtccggaattcccgggtcgacccacgcgtccggcggaccgggccgggagaaacaaaactgacaaggacgatatggtgcgtagcctcgtcgcgctgatcctcgtcgccacggccgtagccgacgtggccacagccgcaccctcgccggggtttgtcgtcaccggccgcgtctactgcgacaactgccgcgccgggttcgagaccaacgtctcccacgccatcgaaggcgcgacggtggagatggagtgccgtcacttcgagtcgcaggaggtccacgacaaggcggaggcgacgacggacgccggcgggtggtacaggatggagatcagcggtgaccaccaggacgagatctgccaagtgctgctgctcaagagccccgaagcggactgcgccgagatcgagcgcaaccgcgaacgctgncgggttccgcttaaccggaacgacggcatcaggcaaaacgggatacgatacgccaaccccattggctttttccgcaaggagcctctcagcaactgtggcgagattcttcgccc

SEQ ID NO: 94825 - DNA, 550 bp, Zea mays
  unsure (1)..(550): unsure at all n locations
agatgaggggccnttttcccctgagtcaggctccctacgaactgacgtaccggtccggaattcccgggtcgacccacgcgtccgcccacgcgtccgcccacgcgtccgcccacgcgtccgcccacgcgtccgctcgcattcagcgcagcgcaggtgtgaaggaagggggacgcggaggaagatggggctcgcgttcgggaagctcttcagccggctcttcgccaagaaggagatgcggatcctcatggtcggcctcgacgccgccggtaaaaccaccatcctctacaagctcaagctcggcgagatcgtcaccaccatccccaccatcggtttcaatgttgaaactgttgagtacaagaacattagcttcactgtctgggatgtcgggggtcaggacaagatcagacctctttggaggcattacttccagaacacccagggtcttatttttgttgtggacagcaatgaccgtgaccgtgttgttgaagccagagatgagctccacaggatgctgaacgaggatgagctacgtgatgctgtgctgcttgtt

SEQ ID NO: 94826 - DNA, 546 bp, Zea mays
  unsure (1)..(546): unsure at all n locations
tgtnaatgtgccgtatggatcgagacggggggattatagcactgctctaccggtccggaattcccgggtcgacccacgcgtccggcaaaagccatcgtttgaattgtctggaaagcttgctgaggagaccaacagagttgcaggtgtaaatctattatattcagaacccccagaggctcgaaagtcagagattagatggaggctctatgtatttaaagatggtgaaccactgaatgaaccactgtatgttcatcggatgacctgctacctttttggaagagaaaggaaagttgcagatgtccccacagatcatccctcctgcagcaagcaacatgcagttcttcaatacagacttgtggagaaggagcaactagatggcatgatgacaaagaaaataaggccttatctgatggatcttgatagtacaaatggaactttcatcaatggaaatcgcattgagcctcggcgatattatgagttatttgaaaaggacacaatcaagtttggcaatagtagccgggagtatgttttgctccacgaaaattc

SEQ ID NO: 94827 - DNA, 574 bp, Zea mays
  unsure (1)..(574): unsure at all n locations
agttaatgagctggtcctcgttaagacgatcatggaccgctctaccggtccgaattcccggtcgacccacgcgtccgcgctccgcgctgcgcctnccccaaagcttcagtggctgctgcgacccttctgttctccgctcttggtcttgggtgatcgccggcggtacttgtagcgggcctttgtaggtatttatctgagggaagaagaaactatacaattcatcatgtcaggagggtcgtctgaatcttccccgttatctggacaaaatagccttagttctctatcaatttccaaggacaatgaactatcttcagagtctggctgcttgtccattgttgtactaggcgcttctggagaccttgctaagaagaaaactttcccagcgctctttcaccttttccagcaaggatttctgcaatctggagaagtccatatatttgggtacgcaagatcaaatctttctgatgatgggataagagaacgcattcgtggataccttaagggagcctcaaatgaacatcttttttcagttttgcagttagtaaaatatggtaatggcttccatgatagggtg

SEQ ID NO: 94828 - DNA, 598 bp, Zea mays
  unsure (1)..(598): unsure at all n locations
tggggaaataaatgttatgatagatgctcgtgganaatgatacgaggagtctanaggatcgctcgtaccggtccggaattcccgggtcgacccacgcgtccgcccacgcgtccgggtcatccaaggcgagcctggtgccgtcatccgtggcaagaagggatcaggaggcatcaccgtgaagaagacagggcaggcactcgtcgttggcatctacgacgagccgatgacgcctgggcagtgcaacatggtggtggaaaggctgggcgactacctgcttgaacagggcatgtaactactacgtaccagctggaatgcatgtcgacgacgatggtttcgagtttcgacttccaataatagtaacaacaaagcaaaggccttcctcccggcgtatttgctttggctcttctccttcacgccataagatatctagcaattggtcactcgccttaattagttcgctttgcttttgaggttgattcgaccattttgctgtaacgtgaattgcatgcatggacatgcaaagcttcaatggcctttggaatgtggaattttttttcccaatttctgggtttttcctatataaaatggactcggtctt

SEQ ID NO: 94829 - DNA, 568 bp, Zea mays
  unsure (1)..(568): unsure at all n locations
gtattttgtgggacgagcgttcgctagttaaagcaagtatttagtattgctcgcaccggtccggaattcccgggccgacccacgcgtccggccaccctcgtctcaccctccctccctcacacaaataataaggaaaggtcccgcccttttcctccgacatccacaaggggggaggggaaaacacgtacattcacccggcggcaataatggcctcggttccggctccggcgacgacgaccgccgccgtcatcctatgcctatgcgtcgtcctctcctgtgccgcggctgacgacccgaacctccccgactacgtcatccagggccgcgtgtactgcgacacctgccgcgccgggttcgtgaccaacgtcaccgagtacatcgcgggcgccaaggtgaggctggagtgcaagcactttcgcaccggcaagctcgagcgcgccatcgacggtgtcaccgacgcgaccgtacctacacgatcgagctaagggacgttcactagaggacaattgccagttgtgctgtggccaagccgggcaagacttcnaccaggtcaggccttagggacggc

SEQ ID NO: 94830 - DNA, 543 bp, Zea mays
  unsure (1)..(543): unsure at all n locations
agggtgcggccgtgtggatcgtataccgatattaatgactgctctaccggtccggaattcccgggtcgacccacgcgtccgcccacgcgtccgcccacgcgtccgggacactttagatgaaccagaggctaaggcatccatgatttggataattggagaatatgctgaaagaattgacaatgcagatgaacttcttgagagcttcttggaaacattccctgaagaaccagcattagttcaactgcagctgctaaccgctactgttaaattgtttcttaagaagccaactgaggggccacaacagatgattcaggctgttctcaataatgcaacagttgaaacagataatcctgatttgagggacagagcttacatatattggcgacttctgtctactgatcctgaggctgcgaaagatgttgttttggcggagaaacctgtgatcagtgatgactctaaccagcttgactcatcacttcttgatgagctgctagcaaacatttctactctttcatcagtttatcataagcccccagaatcatn

SEQ ID NO: 94831 - DNA, 598 bp, Zea mays
tggggtttattatagtgggaggatgtatgaggcactgttgatgaggaaggggggagtattgaacgctcccggaattcccgggtcgacccacgcgtccgggctaatgcaggtcactacaatggatcgctgtgtcaagaaccatgtcaaggagttcgagaagaactttgctgttaagttcccagcttgctcaatcgccgcgaagcaccatattgaccagagcacaacaattcttgacgtgcaaggagtggggatgaagcaattcagtaaagctgcaaggtagctcattggcatgcttcagaagattgatggtgacaattatccagagaccctgtgccgcatgttcatcatcaatgcaggccagggattccggcttctatggggcaccgtcaagagctttcttgacccaaagaccactgcaaagattcatgttctgggtaacaagtatcagagcaagcttctcgaggtgattgatgctagtgagttgccagaaatttttggtggaacctgccgatgtgaaagttgttgcatgaaagctgacaaaggccctttggaggaccccgaaatcatgaaaataggtcacagtggtgattggaggtgg

SEQ ID NO: 94832 - DNA, 582 bp, Zea mays
taatgtagatggccgagtgtatccatgattatgaagtacgtggctaccgctccggaattcccgggtcgacccacgcgttcgcccacgcgttcgattcaaaccagcactggtttgtgctgatacatttagggctggtgcttttgatcagttaaagcaaaatgcaacgaaggccaagattcccttttatggaagctacatggaatctgatccagtgaaaattgctgttgaaggtgtggagaggttcaagaaagaaaactgtgatctcatcattgtggacacaagtggaaggctcaaacaggaagcaagactctttgaaaaaatgcggcaagtttcagaagcaccaaaaccagacctggtgatttttgtgatggacaatagtatttgtcaggctgcatttgatcaagcacaggcatttaaaccaaagtgtttctggttggtgctgtgaatattacaaaaaatggatggtcacgccaaaaggccgttgttgcccttaccgccgtttgcaggaccaaaaaaggcctggataattaaattggaactggcaaagcccattgacaagttttgaagtttttgaattggaaa

SEQ ID NO: 94833 - DNA, 548 bp, Zea mays
  unsure (1)..(548): unsure at all n locations
cgtatggtgccgtatcgccagcnaccagcagatgatttcactgctcgtaccggtccggaattcccgggtcgacccacgcgtccgcggacgcgtggggcaagaactcctgcaccaagaagtacgactgcaagatccttcccaactggctggtgatggacttcgtgaacaacggggaggtgtccggggtcacgctgctcaactccaagttcttccacatgaacatgtaccggtgcaaggacatgctgatcaaggacgtgaccgtgacggcgcccggggacagccccaacacggatggcatccacatgggcgactcatccgggatcacgatcaccaacaccgtcattggcgtcggtgacgactgcatctccatcggccccgggacctccaaggtgaacatcaccggcgtgacctgcggccctggccacggcatcagcatcggcagcctacggcggtacaaaggccgagaggacgtcacggacatcaacgtcaaggattgcactcttaagaagacgatgttcggcgtccgcatcaaggcgtacgaggacgcc

SEQ ID NO: 94834 - DNA, 545 bp, Zea mays
  unsure (1)..(545): unsure at all n locations
aggagcggtcgtgtgcacgcaaaaagantagactgactgctctaccggtccggaattcccgggtcgacccacgcgtccgcttaagaagacgatgttcggcgtccgcatcaaggcgtacgaggacgccgcctccgtgctcaccgtctccaagatccactacgagaatatcaagatggaggactcagccaaccccatcttcatcgacatgaagtactgccccaacaagttgtgtactgccaacggcgcctccaaggtcaccgtcaaggatgtcaccttcaagaacatcaccggcacctcctccaccccggaggccgttagcctgctctgcactgccaaggtcccatgcaccggcgtcaccatggatgacgtcaacgtcgagtatagcggcaccaaccaccagaccatggctatatgcacgaacgccaagggcagcaccaagggttgcctcaaggagcttgcatgcttctagaccctccatcgactgacccatctctctagttataatttttctctcgtccttgcattgcccattagatgctatccat

SEQ ID NO: 94835 - DNA, 576 bp, Zea mays
  unsure (1)..(576): unsure at all n locations
tgtaagtgtccgcggattaatgattaagatgttcatagcaccgctgtaccggtccggaattcccgggtcgacccacgcgtccgcccacgcgtccgggagctcaagatgatgagcttgatgaagaagactttaaggaggaacagaactctgtagcgcgtctcattcacatgctgcacaatgatgatcctgaagagatgctgaagatcttatgtactgtacagaagcatatacttcagggaggcctcaagcgtctaactttcactgtgccttcgttagtattctcttctcttaagctggtcaggcgattacaaggccaagatggagatgtcactggggaggatgttcctgcaactccaaagaaaatattccagatattgcatcagactattgaagcactttcttgtgttccttccccagagttagctctgagactatatttgcagtgtgcagaggctgccaatgactgtgatttggaaccagttgcttatgagttctttactcaagcgttcattttatatgaaggngaaatcacggattcaaaggctcagatcactgcaatttacctgataatgggga

SEQ ID NO: 94836 - DNA, 571 bp, Zea mays
  unsure (1)..(571): unsure at all n locations
ttaattatggtgtatgcgatgccatagtctagcngatgattgactgctctaccggtccggaattcccgggtcgacccacgcgtccgcccacgcgtccgttgtacgccaagaaggactacaagaccccctcatggaagaggtatttgcagatctcgcggcggttcttcttggagggggtcttgtacgccaagaaggactacaacctggccaagcaccccaagcttgatgtgcccaacttggaggtgattaagctcatgcagagcttcaagtcgaaggagtatgtgagggaaaccttctcatggcagtactactactggtacctcaccaacgatggcattgagcaccttcgcagcttcctcaacctgccatcagagggtgtgcctaataccctcaagaagtcttncaagcccncgtctcgccccttcggctctggcccacctggtgacccgcccangggcccttcttcgtatgaaggtgacaggcctaagtttggtgataaggatgggtacagaggaagtccaacgtgcgcttccagtgactttggtggtgatataggttgtgcttcctccaa

SEQ ID NO: 94837 - DNA, 578 bp, Zea mays
atgtttatattgtagcagcggattgcatgagtaaaaaagatgattgcactgctcgtaccggtccggaattcccgggtcgacccacgcgtccgcggacgcgtgggccggcgactacctgctggtggcgtccacccggttcatcaaggagaagagcagcaccacggccgtgatccgctacaagggctccagcgccccgccgccggccaagctgccggagggccccagcgggtgggcgtggtccatcaaccagtgcaggtccttccgctggaacctgacggccagcgcggcgcggcccaacccgcaggggtcgtaccactacggccagatcaacatcacccgcaccatcaagctcgccatgggccgcggcaaggtcgacggcaaggagaggttcgccttcaacggcgtgtcgcacgtggacccggaaacccccgtcaagctcgccgagtacttcaacgccagcgacggcgtgttcaagtacaacctcatcggggacgtgccggccttcaacacgggccccaccaagatggcacccaacgtcatcagcgccgagttccgcacgttcatcgaagtgggcttcc

SEQ ID NO: 94838 - DNA, 545 bp, Zea mays
agtggcggctcgtatcgtatgataaagaagatgactgactgctctaccggtccggaattcccgggtcgacccacgcgtccgcccacgcgtccgcaaagaaacaagcgcacaagatcaaatacctcgccgccaacaatggcctccaggtcctccatcctgctcgccatggtgatgctggctgcgctattcgttgttggtttgtgcaccacccccctcaccttccaggtcggcaagggatccaagcctggccacctgatcctcacccccaatgttgccaccatatccgacgtggagatcaaagagcacggtggcgatgacttctcctttacgctcaaggagggcccgactggcacctggacgctcgacaccaaggccccgctcaagtaccccctttgcatccgctttgctgtcaagtccggcggctaccgcatcgccgacgacgtcatccctgccgatttcaaggccgacaccacctataagaccacactcagcatctaatcaatctctggtgatgaattagatttcaaaagagctcatctagcgca

SEQ ID NO: 94839 - DNA, 578 bp, Zea mays
attattatgaccgaggtatgctagtttaggatgtatcgtgcaaccgctccggaattcccgggtcgacccacgcgtccgcccacgcgtccggacggcgtctcgccgctcgcttcgtttccgccttccccctcccgcaagtcgccgccggctcgcattcgtggttccgcgtggggggtccgtggaaacgcgacaagagaggcggaagcgatggcgaagtcgtgcaaggggttggccatggagctcgtcaagtgtctcagcgagaccgactgcgtcaaggtgcagaaaaggccgtacaaggagtgcgctggggagaaggtgccaaacattaccagcgagtgcgttggcctgcgggagacctacttcaactgcaagaggggccaggttgacatgcgggcccgaatacgcgggaacaagggatactagtgatgtgcctgcaatatccacaatcaggtttggtttctagccatgcttctgtgacattgaggtgttatgataacatggtttaaattggccgtggtctggttttgataagggagggggaactttcaacacacatggggttaattggtgaagggagg

SEQ ID NO: 94840 - DNA, 569 bp, Zea mays
tgtattatgatgttgcggtgactagtccagccatgaatgactgactgcaccggtcttgaattcccgggtcgacccacgcgtccgggcgacaacttcacggtcccgggggaggcttcccttgccacgtccggcaagtcggtcaaggccctgtgcgcgcccaccctatacaaggagtcgtgcgagaagacactgtcccaggccaccaatggcaccgagaaccccaaggaggtgttccacagcgtggccaaggtggcgctggagtcggtccagacggcggtcgagcagtccaagtcgatcggcgaggccaaggccagcgactccatgaccgagagcgcgcgcgaggactgcaagaagctcctggaggacgccggcgacgacctgaggggcatgctcgagatggccggcggcgacatcaaagtgctgttcagccggtccgacgacctcgagacctggctcacgggcgtcatgacgttcatggacaacctgcgtgaacgcttcattgaccagaagcttaaaggccacattcacttcgtgcttggcaacggcaccgagcttagaattgaagcgcc

SEQ ID NO: 94841 - DNA, 548 bp, Zea mays
aggaggaggccgtatggataggaatggggggagatagtatctgctctaccggtccggaattcccgggtcgacccacgcgtccgcgaagactggcgggcaccaataaccctgttcctacaggggtactatcatccaactgacgtcagtgaggcaaagcgcctcagacatcgaagccgggacttcgcactgattgagggccaattatacaagaaaggggtcagtcagccaatgctcaaatgcgtcaccgaaaccgaaggcatgcagatcctacgcgaagtccacagtggcacgtgcggctcgcacgcagggccaagggccctggctgccaaggtgatccgacaagggttttactggcccgcaatgatctgcgccgcaaatcgggtcacgaggtcctgcgaagcctgccagaagttctctcctcggtcatgcaacccctcgcaatatacaaagctgatcgcccatacatggcctatccagcgctggggcctggacatcgtcgggcccctgcccaccgctcatgggaaccttaagttggccttcgtagccgc

SEQ ID NO: 94842 - DNA, 659 bp, Zea mays
  unsure (1)..(659): unsure at all n locations
tgtattatgattgtcgtgtgtcctagcttacgactgtacagtgcacaccgcgtctcggaattctccgggtcgactccacgcccgtctcgtctcgtggtcacttanncaccattggcaagggagaattgggttgacctggtgccttgactcgcatcanggagagcttggcgagataattgcacctggtgctccagnnggcttcctcnngtcttcaacgcnttgttggtggagggaacccgggctctgggacttggtgtctcttcctcctggagccgcctagtctgttgaccctatggcaagaagtccaagctttcggtttcaccgtgtacccccatccccccaggtggtccaacatccgtggttggagcccatacccaacagtgtcctgtccacccacttctcttcctcgagcacacntgatgnttgctgtccttgctcgacnaatgaggccatctatgacnatctgtccgccgcttcccttgacatttgaagcgcccaacctacatnccaaccttaacaaggctttgtgtccccaagtcaatcttataccctgacatggtttcccttgaaggtctcatggtgcttcttgaacgctttatgttgaaccaaatttcagacacaaacctggtggcctaacctatgggaacacattaatggtt

SEQ ID NO: 94843 - DNA, 571 bp, Zea mays
  unsure (1)..(571): unsure at all n locations
attagtgatgatgcgcgtgtatgcctagttattgtcgtacatcgcaccgctccggaattcccgggtcgacccacgcgtccgcccacgcgtccggcagccgccgcatccgtcaccttcacaccgcgtgcgtgctctctctcgccctcccgcctctccgtgcgacgactgggtgggctaccgccgccctacgcaaggtgccgagaacttcgccgatatctgcgccggagaagagcgcccaccagatcaggcgcttagaaggcgcgctggccggtggatgacgatggcgggtggcgggggactgaaccggtcttcatcgagggggcagctgccgccgcaagagctgcttgacgatctctgcagccggttccttctgaatgtgcccaaagaggagctggagtcgttcgagcggatcctgttcctgctggagcaagcgcactggttctatgaagacaacttcgttgagcacaaccccaaccctaaagtcctctncttcaaagacttcacattccttatgttcaaaactgcactggctcttcggcctacattgggcacctggatgatatctaccagg

SEQ ID NO: 94844 - DNA, 578 bp, Zea mays
  unsure (1)..(578): unsure at all n locations
atgatggatggtccgacgtgtgtcaatganactgactgtatcgtgcgaaccgctccggaattcccgggtcgacccacgcgtccgcacacattcatactgttgcttggattatgctcaggacctgtggcacaggcactggatgacagggcttgggtgagagacatctccaccactctctctctacaaggaatacattaatacctcatgctttgggatatcatggaagggttggtgctttctcaagaagaagatcatcatatttggagacacgaggcttcgggaaggttttcttctaaatcctgttacaagtcattcttcagaggatccatcacttttgaaccttggaggagggcgtggaaatctgggcacctctgaaatgcaaagtattcttatggttggccattaagaataagtgttggactgcggataggctggagcggcgtgggatgttcacccgacagcctgcctgttctgtgatcaagagcatgagacgggccaacatattctaactaggtgtggctttgccctcaaatttggcgtgaactggctggtcccctgggcatttggggcttttcccc

SEQ ID NO: 94845 - DNA, 577 bp, Zea mays
  unsure (1)..(577): unsure at all n locations
atgtaagatgatgtacggatgcatgatacagggatgtctttgcatcgctctaccggtccggaattcccgggtcgacccacgcgtccgactacacggagctggcggaactggtggagaaggcgctgctcctgcagacgctggaggacgccgtcgggaagcacaacgtcaccatcttcgcgccgcggaacgaggcgctggagcgggacctggacccggagttcaagcgcttcctgctggagccgcgcaacctcaggtcgctgcaggcgctgctgctctaccacgtcctcccctcgcgcctgccctccgactcctggcccgcggcgtcccaccccacgctgtccggcgaggaggtcgagctcgcccccgccgccggcgccggcatgcgcgtcggccacgccgncgtcacgcgcccggacgccgtgctcaagcccgacggggtcattcacggcatcgagcgccttctcgtgccgcgcttcgtgcaggaggactttaaccgccggcgcaaacctcgggcgaaatttggcgtgctggccacaggcgcgcccgaagtggacccgcggcgcaccggctaagaaaa

SEQ ID NO: 94846 - DNA, 583 bp, Zea mays
  unsure (1)..(583): unsure at all n locations
attgatatatggatagtagagttngctatgagaagggaggtttattgtatctgctctaccggtccggaattcccgggtcgacccacgcgtccgatatcgcatagtttttcgagatgccaagacatgatgcacttaaagctcttgaaatctacagaagggctggccaacaggtgactccagagttcacaagaggatgatcattaaagtatccgagactctaaaaggtcaagacactatgaacatgtactcttatttaggttattcgacacatttcaggctgggaatctatctgatttctacgagaattgccggggattagaacttgctaggaattttcagattcccactctgagggaggagagggcttgtactctgactagtcttcgctatgtgcactggattatgatatgacatcttttacatgagaaaattctcagccaccacaaacatttcttgctactatggaggactatgttaatgaagcttcacgcatggtccctgttcgagaacccctgatcatcgtatgagtactggaataaggtcaatttatcagaaaacaatttcatcacggactttctgagag

SEQ ID NO: 94847 - DNA, 572 bp, Zea mays
atgtatatatgatgctggcaattccactgaggtcagtcgtacatcgactgccgtaccggtccggaattcccgggtcgacccacgcgtccggtgaaagcttagcggttcgggatctatccaatctggtaaaaccggacgatatgatcaccgcgtaacatcttgtgacacttcttgcaatcgatcccaagtactcccaaaacgactggctgtaaagctatgagacacttgatacatttgtggtacctatgtcatctaaaaagctctatgaagacaacgaatatgctctctacactgtgacactatgcgctaaggttgctgacaactttaaggtccgtgctcgcgagaagggtactcagatccgtgatttctagtccaggcctgaatcacaagaaagccggatgcaggagatggagaagctactgcgagaccaagaagctatgaggaccactcttcttcagtggagttatgccagctacagcgaggatttcagtacctggatgcccttatgagctgagcatttctttgtgaaaagcatccttaaaatgggcttgacggcataatttctggttggt

SEQ ID NO: 94848 - DNA, 546 bp, Zea mays
  unsure (1)..(546): unsure at all n locations
agattgcggtcgtgtggcacgcatcaagaantactatagcattgctctaccggtccggaattcccgggtcgacccacgcgtccgcccacgcgtccgcccacgcgtccgggagtacgtcaccaaggtgaacgatctcatcggtgccggcaagtcgtaccgcacgctgagcgacatcctcgacaaggacatccagaacgactgcgtgaagaagcagggaagccactcccggaacctgcgcagggtccgtctcggcctcggcctcatcaaggccctcttcgagcaattcctcgccaccgagggttcattgtatgatgctgctacgacagcttacgggcaggtgtgcgcgccgtttcatagctgggcgatcaggaaggctgttggcgctggcatgtacacccttccaaccagggagcagttggtagtgcggctgaacgaaactgatctctcggtgcagaagcagatgaggagatacattgacgcttctagtcctatcatagagtacatcgataaccttttcctctcgaggaacattaatctagattggtn

SEQ ID NO: 94849 - DNA, 579 bp, Zea mays
  unsure (1)..(579): unsure at all n locations
attgattatggaccgcggtatgccatggtactgacgtatcagtgcaacngctccggaattcccgggtcgacccacgcgtccgctgccatcctctccaacacgaagatggcgttcatcagcaatgtcgcagtgaaggcggcgggcgtggccgcgctgctgctggtcgcagcggtgtcgcctgccgcgcgcgcggcggcggtggcggtggcgggaggggcgccgtcggtgccggcgggtccgctggacatcgcgcagctgggcgccaagggcgacggcaagtcggacagcaccccgatgatcctcaaggcgtggaagaacgcgtgcgaggcgacgggggtacagaagatcgtcatcccgccgggcaactacctgacgggcgggctggaactgaagggcccctgcaagtcctccatcatcatccgtctcgactgcaacctgctcggcaccggcgacctcaacgcgtaccaaaggaactggatcgagatcgagaacgtctagaacctggccatcaacgggcacgggaccatcgacgggcaaggaacccttgtgttgagcaagaaaccatgccagcttttttac

SEQ ID NO: 94850 - DNA, 575 bp, Zea mays
  unsure (1)..(575): unsure at all n locations
attatatatgatcggagggntngcatgagaaggggggagtacagtatctgctctaccggtctcggaattcccgggtcgacccacgcgtccgttccacgacgccaacctggtggagatgtaccgcaagatcagcagagccgacgtcaagtagccgcagtggttctcccctgagctccggcggttgatgcccaagctcctcgaaccgaacccaaacaacaggatcacgatcgagaagctggtcgagcacccctggttcaagaaggggtacaggccggccgtcatgctggcacagccgcacggctccagcagcctcaaagatgtccaggtncgcttcagcaacgccgaccacaaggacagcaccaccaaggtggaacagccggcggacagctccttgaagccggcgagcctgaacgcgttcgacatcatctcccactccagagggttcgacctgtcaagcctgttcgaggtggaccaagagcagaaggccagcaactcggcgttcatgacccagaaaccggcgtcngcgatagtgtcaaagcttgaagcagatcgctgagacaagaccgctcattgta

SEQ ID NO: 94851 - DNA, 552 bp, Zea mays
  unsure (1)..(552): unsure at all n locations
agatgccggtagtatnccatgagacgtggggtantattgtattgctctaccggtccggaattcccgggtcgacccacgcgtccgcccacgcgtccgggacggaggagggggagacggggaaaccgatctcaacgaggctcttacgtcgcaggtgcgccgccttgccatggagatccggcaacttgctaattcacgaccaataactgttctcaatggaggttctggacaatcaggagtatcaggcctgatagtacctgcagcaactgttggagcactaggttatggttatatgtggtggaaagggatctcgttctcagacctaatgtatgtcaccaagcgcaacatggcaaatgctgtttcaagcatgactaaacatttggagcaagtgcaaagttctcttgctgctgctaaaaggcatttgacacagcgcattgaaaagttggacgataaattggatcagcagaaggctctatctggacaaataagagatgatgtcactgatgcacgtctgaagcttgagaatatnggttcagaaatcaagaacatcaaaga

SEQ ID NO: 94852 - DNA, 572 bp, Zea mays
tatggatatatggccccgagtgtagtcctagtcactactgacgtccaaccgctccggaattcccgggtcgacccacgcgtccgcccacgcgtccgattggttcttcatttaattgggattcaaacaaggacttaggggctaacaatttaattccaattgaaattgctctcaaaattgcaaataagattaaggcaaatgaaaggttttctgcatacatagtggtacctatgtggcctgagggtaatccaactggggctgcaacacaacgaattctttactggcagaataaaaccatgcaaatgatgtacgagacaatatacaggaccttgaaagaagaaggcctggatgatatgtatgagcctcaggattatttaaacttcttctgtcttggcaaccgtgaagttgctgacagcactagcacttcaaacgcttcgaatacagcaaataatcctcaggaacaagctaggaaaaattggaaaatcatggtctatgtacattcaaaaggcttattgtgataatgaaatggtatcaattggtcagctaatattaaccgagatccttggaggaataaa

SEQ ID NO: 94853 - DNA, 572 bp, Zea mays
  unsure (1)..(572): unsure at all n locations
ttatagatgattggtggtattcatgaactctgctgactaagcattgctcgtaccggtccggaattcccgggtcgacccacgcgtccgcccacgcgtccgcggacgcgtgggcttgaaatgaatgaaccatgcatgcatgcatgtatgcatgcgccggggtgacgtggcgttcagctcaggcgctgagcgagtctatacgtacgtcgtcaccggctggccacgcatgcgataaccatctgatatggacggaactatatattgtattcctattaatctggcattttctaagctaattgttttttttccaaatataccgtcgatggaactccaaatgtaatgtcacgcaaatgtgtgtttttcatcgattgaatggataataataaaaaaggcatgctggcaggtactactaaaaaaaaaaaaaataaanaaaaaaaatanataaaaaaaaaaaaaattaaaaaaagatggtaaataaaaaaaaaaaaaaaagggcggcccgtttagaggatccaagcttacgtacccgtgcattgcaagtatagcttttctataggggcccctaaattcaattc

SEQ ID NO: 94854 - DNA, 571 bp, Zea mays
  unsure (1)..(571): unsure at all n locations
ttgtattatgtacgtgggatgactggtaaagacgatgactgcattgctcgtaccggtccggaattcccgggtcgacccacgcgtccgcggacgcgtgggcaaacaactagaaattccccagcccggttctttgcgtgcggttgatctcgtcggaggcccggccgcggttccccaatccgccatcgaattcgatggcggccaacgccgggaataagatccgcaacgccaagctggttcttcttggagatgtgggcgctggcaaatctagcttggttcttcggtttggtaagggacagtttgttgaattccaggaatcaacaattggagcagccttcttttcccagaccttagcggtcaatgatgagactgttaagttcgaaatctgggatactgccgggcaggagaggtatcatagcttggctcccatgtactataggggtgcagctgctgccattggtgtctatgacattacaaattcgggcttcttcacccgtgccaagaatgggtttcaagactttaaacttcaagaaatcagaatacaataatgctctttgctggaacanggctgttt

SEQ ID NO: 94855 - DNA, 545 bp, Zea mays
tgaagcggtgctgagcctagtacggggagactacgcacctgctctaccggtccggaattcccgggtcgacccacgcgtccggtcgcgcgtctaggttcactctctcactatagcgcccgctctgtcgcccttcgtgtacctgttcttcctcttctcactgcctgccactgagagcgtaagtcaaaggcacgaagtggctcagagcatacgccctgagagaccattgtaactaggcctgtcggcaggatagtagccgtcgactaatccctacaaggaacagatggagaagaaggcgcacatcctgatgaacaggtacaagcttgggcgcacgctcatgcaaggcacctatatcaaggggtaccacagacggaacctggctttcagagagagcgcgtgcatgaaggccatcgacaaggagaaggtgatgcgcgatggcatgatcgaccagatcaagcgcgagatctacgtgatgcgccgtgtacggcaccccaacgtgatcgcagtgcacgaggtgaatgacaacaagagcgcgatctacttcaaca

SEQ ID NO: 94856 - DNA, 555 bp, Zea mays
  unsure (1)..(555): unsure at all n locations
ngatgccgggccgtgtagatgcgagttggggggtactaattcactgctctaccggtccggaattcccgggtcgacccacgcgtccgcccacgcgtccgctgaagctgaacagccaaaggacactaagaccagtgtctcattccttgggtcggctgatgatggtaacacattcttgcattcctcagtctacatgccaagtgctccaccagtacttgatgaagaagccttaaattacaacatttatagggctgtactggaagcagagccaccagaatggcttcctgacagttatgctagtgcgtgtatgcagtgcgctgctctttttactgcccttacacgtggaaggcatcattgtcgattctgtggagggatattttgcagggcatgctcaaagggacgatcgctgttgcctgccaagttccgtgagcggaatccgcaaagagtctgtgatgcttgttatgataggcttgatccattgcagaacttattgattaattctgtcagcaatgcctcacaaactgcaaagcatgatgtcatggattggacttgtgcaaa

SEQ ID NO: 94857 - DNA, 514 bp, Zea mays
  unsure (1)..(514): unsure at all n locations
tgccgtctgaaatagatgagagagattgtactcctctaccgaaccgcaggttcgacccacacgtacgctttcggctacgtcattctagtagtttaggatttcttttctgacacatcgattctgaccaatctctctggcctgctgcttcctgataatcgaccagttccccagtcttgctccttgcactcctccctccatctccagcattgtgttctgattcacctgctccaatggctgatctttctgctgctgatgcttccccggtctcagctatcgggtttgagggctatgagaagcgccttgagatcacattctctgaggcacctgtctttgtggaccctcatgggcgtggttggcgtgccctctccagggcccagattgactctgntctggatcttgcacggtgcacaattgtgtccgagctcttcaacaaggatttcgactcatatgtcccttctgagtaaagcttggttatctatcctctgaagaattgcatccaaaacctgtgcactcc

SEQ ID NO: 94858 - DNA, 532 bp, Zea mays
  unsure (1)..(532): unsure at all n locations
ncggnttactaggagctatttgtattggtctactcgtccgattcggagtttccgggtagacctacgcgtccgctatgcggatcgagcggaggagaagcttctggtggtggtggctctcgtcgtcaagcacgaggtgagaggagccggcggcggaggtgaatggcggtggagtaccactgctgctcggcggcctttttcgagcacatcgtcatcatcatcgtgctcgtgctcttcgcgggcctcatgtcgggcctcaccctgggcctcatgtccctcagcctcgtcgatctcgaggtcctcgccaagtccggcaccgagcaggatcgcaagcacgcagctaagattttacctgttgtgaagaaccagcaccttctgctatgcactcttctaatctgcaatgcggctgcaatggaggctttgcccatattccttgatagcttggtgacagcttggggtgctattttaatatcagtgacactgattctgctttttggtgagatcttaccacagtccatctgctcacattatgggc

SEQ ID NO: 94859 - DNA, 538 bp, Zea mays
  unsure (1)..(538): unsure at all n locations
gttggggntnttatgtgtctatatggagagattcaccggtccggaattcccgggtcgacccacgcgtccggacgaaagaagtcgcctaattctttcgatcaatttaggcccttttttcgtccaaggctcgggcttaattggtaatctgaacctaacaggaccatttaagtggatcatggccggatgggtaggacttctggaaagtccgggtggtgaggggcaatcaaccttgcctaccgcgacgcaggaagcagcgatccgtatgtacgcctacgacttggcaagaagaaacttaagacgagcgtgaagaagagatctgtgaaccccatctggcacgaggagctaactctgaccgtcacagatcccagcctagctctgaagctggaggtgttcgacaaggacacgttcagcagggacgacccgatgggggacgcggagatcgacgtggcgccgctggtggaggcggcgaacgcgagcccggatgcgagcctgaggaacggcgccatcattctgtcngtgcggtcgagcgccacgaact

SEQ ID NO: 94860 - DNA, 530 bp, Zea mays
  unsure (1)..(530): unsure at all n locations
nttatggcttgaaataggggacaagggattgatctactcgtccggaattcccgggtcgacccacgcgtccgcccacgcgtccgcccacgcgtccgcccacgcgtccgcccacgcgtccgcggacgcgtgggcgggcaacggcgtcgtcaccgccggtgagaagctaggcgtggagcggatcgagctgccgctgatctacatctcgctgtcgcggaaggagaaggaagacgatttccttgcgatgaagggcaccaagctgccccagcggctccatgaaaagggctaagaacgtggaccagaccctgcaatctgtcttgccggagatgtggctgtccgatttgacgaggggacggtacgaggtgcgggagaagatatgcgtgacgaagacgcgaagagggctgaaagggatggagagcattgacagcgactcggagcctatagatggacgcncagcgcacccatctttcatggcgggtgagaggtcacgaagaatgggccctanaggaggagacgttcagggcaaaaatgaa

SEQ ID NO: 94861 - DNA, 529 bp, Zea mays
agtgctgactagtaggaagagtattgaatcgctctaccggtctcggaattcccgggtcgacccacgcgtccgcctgatttctctggttccttgtgactattactaccgtttgtgcgagcacgcaaatgtatgggttgcattattgctgatagcatctgttcgttggccagatgagtagagagctgaaaaaatgttaagaacaccatagagagaagtccatccgttctctctcaacttaaggagcaaacagcaacacttaattttttttctgctttactgtttattagtcgcgttacatttgtgaacagttattgtaatatctttttttaactctgtattcgtagtgagatgaaattcgtgtgtgggcaacaaaaaatacaaagataacgaacgaatgcatgcaacgacataacaataatatagagaaaactaaaagggcggccgttctagaggatccaagcttacgtacgcgtgcatgcgacgtcatagctcttctatagtgtcacctaaattcaattcacttgccgtc

SEQ ID NO: 94862 - DNA, 549 bp, Zea mays
  unsure (1)..(549): unsure at all n locations
gaagtgcttgcgcctgaattgcncctgnatagcactgactcataccggtcttgaattcccgggtcgacccacgcgtccgcctgatttctctggttccttgagactattactaccgcttgtgcgagcacgcaaatgtatgtgatgcattattgctgatagcatctgttcgttggccagatgagtagagagctgacaaaatgttaagaacaccatagagagaagtacatccgctctctctcaactcaaggagcanacagcaacacttaattatgagtctgctatactgattatcagtcgcgtaacatttgtgaacaagttattgaaatatctctttttaaacttctgaatcataatgagaagaaattccgcatgggggcacacataaaccaactgctaccgaacagtcacctgttgcagttgcaaggaagaaaattgaaaatgaaaaagggcggctccttctaaatgatccgagttaacgaccgcttgcatgcaattgatagcttcttaaatcgggaaccgtaatcctattgcacgggccatggcttataa

SEQ ID NO: 94863 - DNA, 529 bp, Zea mays
  unsure (1)..(529): unsure at all n locations
ttatggntgctatgatggggttgtatggatcgctctaccggtccggaattcccgggtcgacccacgcgtccgcacaacacaaggagaaggggaagggcggcgagggaagggctccgcgtcgtgtccctgctcgtcctcctcctctctccaacaccccatccatcagcgctgccctccgcattgctcttgataccatccagtacatcgattctccccccaagatcaaaggccggagaaggaggaagaaaggttagggagtcggctatgggatgcttttcatgctgctgtgtggcagatgacgacaacgttggcaggaggaagaagcatgacgatccctatgttcctatccctgctcatgtttataattttggacctagccggttcccagccccaacccctgtcatctccactggcagagctcagccaattgcagtaccggccattcatctggaagagctgaaggaaattacaaaaaacttcagcagtgatgccctcattggcgagggctcgtatgccagagtctattttg

SEQ ID NO: 94864 - DNA, 533 bp, Zea mays
tagtggtgtatgtgagggggagggagaatgtaaccgctccggaattcccgggtcgacccacgcgtccgctcagcgcgctcagggagtgccagaagcaggacggcctgctgcacaccacctgcggaacccgggcgtacgtcgggccgaagatcatcaacaggaagggctacgacggggccaaggccgacatctggtcctgcggcgtcatcctcttcgtgctcctcgccggctacctcccgttccacgacgccaacctggtggagatgtaccgcaagatcagcagagccgacgtcaagtacccgcagtggttctcccctgagctccggcggttgatgcccaagctcctcgaaccgaacccaaacaacaggatcacgatcgagaagctggtcgagcacccctggttcaagaaggggtacaggccggccgtcatgctggcacagccgcacggctccagcagcctcaaggatgtccaggtcgccttcagcaacgccgaccacaaggacagcagcaccaaggtggaacaagccgcggac

SEQ ID NO: 94865 - DNA, 533 bp, Zea mays
  unsure (1)..(533): unsure at all n locations
ngtaggtnatatgatggagttgtattgatctgctgtaccggtccggaattcccgggtcgacccacgcgtccgatccaagtgaaggaaggggtgtacgaggagtacgtgaccatcaccaagactatgaagaacgtgaccctcttaggtgacggctccaagaagtccatcgtcaccggcaagaagagcttcgccgacgggatcacgactttcaagacagcaaccttcactgcgcaaggcgacgggttcatggcgatcgggatggggttccagaacacggccggcgcggagaagcaccaggcggttgcgctgctggtgcagtcggacaagtccatcttcctcaactgcaagatggacgggttccaggacacgctgtacgcgcactccaaggcgcagttctaccgcaactgcatcatctccggcacggtggacttcatcttcggcgacgcggcggcggtgttccagaactgcatcctggtgctgccgcngcccatggacaaccagccgaacatcgtgaccgcgcatggccgtgcgga

SEQ ID NO: 94866 - DNA, 530 bp, Zea mays
  unsure (1)..(530): unsure at all n locations
nggtgtctgtatgaggggggatgtaatgatactgctctaccggtccggaattcccgggtcgacccacgcgtccgcccacgcgtccgggcacacgatccaggtgtacccaaggtcgtggacggcggtgatgatgacgttcgacaacgcgggcatgtggagcgtccgctccaacatctgggagaggcagtacctcggcgagcagctgtacgtgagcgtcatctcgccggagcggtcgctcagggacgagtacaacatgccggagaccagcctccgctgcggcaaggtcgtcggcctgccgatgccaccgtcctaccgcgccgtctagagcgtcgaccgatcgcgcacggtgctgtacacaactaaaggagagcgagaggggactttttctcgcgtttccttctctagccagccttgtctgtcccctcctcgtttattctctctctctcttttttcgttcgcttccgaagaataatacccaaacaaaaaaaacaaaggggctcaagacttcatcatgcatgcatgcataacac

SEQ ID NO: 94867 - DNA, 530 bp, Zea mays
tgtatgtgctagagactggatggggactggatcgctgtaccggtccggaattcccgggtcgacccacgcgtccgcccacgcgtccggaagcaactgaaaacagccgagcgatctcctctccctctccctgtccgatccattctccagcgcagcgaagtaaacatgtctgaccgggcaaagatgtcgtggcaggcgtacgtggacgagcacctgatgtgcgagatcgagggccaccacctcgcggtggcggccatcgtcggccacgacggtgccgactgggcgcatagcacggcgttccccgagttcaagacctaggacatggccaacatcatgaaggacttcgacgagccatggcacctcgcgccgtcaggcctgttcctcgtacctaccaagtacatggtcatccaaggcgagcctggtgccgtcatgccgtgcatgaaggatcaggaggcatcaccgtgatgaagcagggcaggcactcgtctttgcatctacgacgagccgatgacccctggcagttgcacatggtg

SEQ ID NO: 94868 - DNA, 530 bp, Zea mays
tttggtgctcatcaagaaagtaagatcgctgtaccggtccggaattcccgggtcgacccacgcgtccgatggctgcaatgcttgagaagcagtataacagtgagatcaattcattatctcatctgtacgacaagaatgtgatcaagcttgtagcagcctacaaatgcccaccagttttttacattattaccgagttccttcctggaggctcaataaggtcatacctaaacaatccagagaaccaccccatccctctagagagaaccatatccatcgctctcgatgtcgcccgtggcttggaatacatacattctcaggggatcgttcaccgtgacatcaagcccgagaacattctcttcgacgagaacctctgcgtgaagatcgctgatttcggcattgcctgccaggaggccttatgcgatgtgctcgtggaggacgaaggcacttacaggtggatggcgcccgagatgatcaagcagatagcgtacaaccgaaaggtcgacgtctacagcttccgactgctctggtgg

SEQ ID NO: 94869 - DNA, 536 bp, Zea mays
tggagggctatatgtaggaggagggagaattttcacccgtccggaattcccgggtcgacccacgcgtccgcccacgcgtccgacggtcgctcccacctttccgcccggcgaaaccctagcccgtcccgactggccgactgcgatgggcgctgcatgatcggtgcgtccccttggaaccgactgccttctggcatcgccaagcccgctgccgcggctgccgtcgtcgtagcggcgctcgcgtcctccttcctcgccctcccgcgtcctcgcgccgccccgcccccagcgggatccgggcccctcatgtcgaaggcaaaggtctacaccgacgtcaacgttctgcgtcccaaggagtactgggactacgacgcgctcaccgtccaacggggtgagcaggatgactatgaagttgtcagacaagttggaagacgtcaatatagtgaggtctttgaaggcatcaatgttgacaattatgagaaatgcatgattaagatccttaagcctgtcaagcagaagacgatcagaacggagatcac

SEQ ID NO: 94870 - DNA, 533 bp, Zea mays
gaagtgctgccattagtggagatgtattgctctactcggtccggaattcccgggtcgacccacgcgtccgcccacgcgtccgcccacgcgtccgcccacgcgtccgggagaagaagaaaaggaacatttagacctgcctcactcacttaggcgtcttggagagtgtacattttatgatgatggcactgctaagggagagttgcctgaaacagtttattgctttgatggtgtcttctataattactttagcataggaatggatgctcaagtggcttatgggtttcaccaattacgtgatgaaaagccatttcttgcaagtggacctttatccaataagttgatttacgcaggatatacctgcaagcaaggatggttctttacgcaatgtattagtgatcctgagttaaagggattggaggacattatctggttaatcaatccagaaggttgaccagctcttagtgggaaaacctttcctgtccaatcgagtgtgagggcaatcgttgcattaaatcttaacaatattgcaagtg

SEQ ID NO: 94871 - DNA, 539 bp, Zea mays
  unsure (1)..(539): unsure at all n locations
ngatatgtcttgcacatgagggaggatgagactgcatcactcggtccggaattcccgggtcgacccacgcgtccgcccacgcgtccggactagttctaggacggcttcacctcggcgtcttcacaaacgccggcgcgaactctggcccgagcccgacagatcttcaattccccattccgcccaccgatcgaccttcacgccagtctcggtctcttccgaaggcgtcgcgcgcggttgtttgagaggagaggaggaagatgagggagtgcatctccgtccacatcgggcaggccggcatccaagtcggcaacgcgtgctgggaactttactgcctcgagcacggcatccagcctgatggccaagtgcctggagataagaccgcgggacatcacgatgatgccttcagcaccttcttcagccagactggtgctgggaagcacgttccccgtgcaatcttccgtgatctagaacccactgtgatcgatgaggtgcgcactggcacgtaccgncagctcttcaccctgagcagctcatcaggg

SEQ ID NO: 94872 - DNA, 539 bp, Zea mays
  unsure (1)..(539): unsure at all n locations
atgggcgtggtgtcatcaggggaggggagacagcgtactcctctccggaattcccgggtcgacccacgcgtccggcatcgatcacgacaagatggcatgcacaaacaatgcgatgagagccttgttcctcctggtgctctggtgcatcgtgcatggtgagaaggaagagtcaaagggcatcgatgcgaaagcgtccgggcctggtgggtccttcgacatcaccaagttgggcgccttcggcaatggcaagacagacagcacgaaggctgtgcatgaggcatgggcatcggcgtgcggcggcactgggaagcagacaatcctcatacccaagggcgacttccttgtcggacaactcaacttcacaggcccttgcaagggcgacgtgaccatccaggtggatggcaatctgctggcgaccacggacctaagccagtacaaggaccatggtaattggatcgagaatctacgcgtggataacctggtcatcaccggcaaggggaaccttgaccggcanggcccaactgtgtggagcaggaccc

SEQ ID NO: 94873 - DNA, 536 bp, Zea mays
tgggcgtggtgaagagagggggggaagaagttataccgtctccggaattcccgggtcgacccacgcgtccgcttaaatacatctaagtggatagaggaagttcgcactgagaggggcagtgatgttatcattgtgcttgttgggaacaaaactgaccttgttgacaagaggcaagtctcaatagaggaaggggagggcaaggcgaaggaccttggagtcatgtttattgaaaccagtgctaaggctgggtttaacattaaggcgctgttccgtaaaattgctgctgcacttcctggaatggagacgctctcatcagcgaagcaggaagacatggttgatgtgaacttgaggtccggcaaatgcaaactcgtcccagtctcaggctcaggctgggggatgcagttgttagttgcagtctctgacacttgcttgctcatgatctttgggactctgagcatcagaaagcgttatcactgatgcttctcttcggaagaagagttgattgcctctcgccagtgaacacaccatagtcttta

SEQ ID NO: 94874 - DNA, 538 bp, Zea mays
  unsure (1)..(538): unsure at all n locations
agatatgggtgccccagttcgacatcgcatggctacactggtccggaattgccggctccgggtcgacccacgcgtccgcggacgcgtgggcggacgcgtgggaagcaagaaaactagaaaaggctcctcccgaccgcagcgcccctcatctccctcgaccccgacatccccgacccgatggcgcccaaggcggagaagaagccagcggagaagaagccggcggccgaggagaaggcggagaagacgaccgcagggaagaagcccaaggccgagaagcggctgcccgcgtccaagtcctccggcaaggagggcggcgagaagaaggggaagaagaaggccaagaagagcgtggagacctacaagatctacatcttcaaggtgctgaagcaggtgcaccccgacatcggcatatcctccaaggccatgtccatcatgaactccttcatcaacgacatctttgagaagctggccggcgaggccgccaagctggcgcggtacaacaagaagcccaccatcacgtcccgcgagatccagaccn

SEQ ID NO: 94875 - DNA, 529 bp, Zea mays
agtcttgaaatcgggtatatgatgatgcagtactggtccggaattcccgggtcgacccacgcgtccgcccacgcgtccgcccacgcgtccggcaggatcgagccgaatcctccggaactcgccgccgggacgaaccgacctcacactattgatcgaggatgtcgtacgcctacctcttcaagtacatcatcatcggcgacacaggcgtggggaagtcatgcctgctgctgcagttcacggataagcgcttccagcccgtgcacgatctcaccatcggcgttgaatttggcgcccgcatgatcaccatcgacaacaagcccatcaaactccagatttgggacacggctggccaagaatcattcagatctattactaggtcatactacagaggagctgctggagcccttttggtttatgatatcactaggagggagaccttcaatcatctcgcaagttggctagaagatgccaggcaacatgcaaatgctaacatgacagtgatgctgatgggaaacaaatgtgacccttc

SEQ ID NO: 94876 - DNA, 508 bp, Zea mays
aagttatatcgttccggaattcccgggtcgacccacgcgtccgcccacgcgtccgcccacgcgtccgctaaaaacaagttatccaggcgctcatattgggccagagcctacaacggacaggtttgttgtcatcacttctggaccagacgaaagatgcattcctggaaacaccatcgccgtccaagctgacatgccatacagtggcctgtcatcgttcggaacagcatttttgtccaagttcgaatgttctcagatgccacatccactgttagagcacgtgaccttcgtggacactccaggagttttatcaggggagaagcagcggacgcagcgcagctacgatttcaccggagtcacgtcgtggtttgcggccaagtgcgacctcatccttctcctgtttgatccgcataagctggacatcagcgatgagttcaagcgtgtgatcgggtctctccgcgggcatgatgacaagatacgcatagttctcaacaaggccgaccaagttgat

SEQ ID NO: 94877 - DNA, 537 bp, Zea mays
  unsure (1)..(537): unsure at all n locations
atgaagtgctgcatggaggtgggagggataattttcaccgctccggaattcccgggtcgacccacgcgtccgctcaccccgccttcacgcctccctcaccaaataaggtcccgcccttttccgacattcacaggggggacaggaaatcagcggccatggcctcgattccggcgacgaccttcgccgtcatcttatccgtcctcttctgtgccgcggctggcaccgccgtcgacaacgacctccccgactacgtcatccagggccgcgtctactgcgacacctgccgcgccgggttcgtgaccaatgtcaccgagtacatcgcgggcgccaaggtgaggctggagtgcaagcacttcggcaccggcaagctcgagcgctccatcgacggngtgaccgacgcgaacggcacgtacacgatcgagctcaaggacagccacgaggaggacatctgcgaggtggtcttggtggagagcccgcgcaaggactgcgaccaggtgcaagcggacagggaccgcgccggcgtcctgctcaccagga

SEQ ID NO: 94878 - DNA, 538 bp, Zea mays
agaacagtggttgtttgatgaggtgggggaggattgatacctctccggaattcccgggtcgacccacgcgtccgcagcggatgagtgcgacggcgacgaggccggcgcgctggtcgccgccgcctgcaccggcagcggcagcgataccggctcgacccgggacgcgccggcggtgcggtccccgcgcgccgcgtgggcgctgttcgtggaggagtcgcggaggctgtgggcgatcggcgcgcccatcgccctgaacatcatctgcctctacggcaccaactccacgacgcagatcttcgcgggccacatcggcaacctggagctctcggcggtggccgttggcctctccgtcgtctccaacttctccttcggcttcctcctcgggatgggcagcgcgctggagacgctgtgcggccaggcgttcggggccggccaggtgtccatgctgggcgtctacatgcagcgctcctggatcatcctcgccgccttcgccgcgctgctcacgccgctctacgtgtacgcggcgccgcttctgcgg

SEQ ID NO: 94879 - DNA, 539 bp, Zea mays
  unsure (1)..(539): unsure at all n locations
agtgntnnccatgatatgggattgtaatgagagtgctgcgtccggaattcccgggtcgacccacgcgtccgagaagggctacgacggcgccaaggccgacatctggtcctgcggcgtcatcctcttcgtgctgctcgccggctacctgccgttccacgacgccaacctggtggagatgtacacgcatgatcagcagagccgacgtcaagtacccgcagtggttctcccctgagctacggcggatgatgcccaagctcctcgaaccgaacccaaagctcaggatcacgatcgagatgctggactagcactcatggttcatgatagggtacaggccggccgacatgcatgcacagacgtacggctacagcagcctcaatgatgtacaggtcgtactgagcaacgccgaccacaatgacagcatctccaatgcggcacaagtcgacggacaagctccttgagtcggctagcctgaacgcgtncgacatcatctcccacttcagaagagtacgacctgtcaagccttgtccgatgtggaccaa

SEQ ID NO: 94880 - DNA, 524 bp, Zea mays
  unsure (1)..(524): unsure at all n locations
ngaaatggtgagatgagaggttgagggtagagagaagctgctaccggtccggaattcccgggtcgacccacgcgtccgcccacgcgtccgaacgaattgtttgtccaggagaaggcccccgacgggattattctttcgccccgcgtgctctctatctctcccctctttctctccctctgcccgacgactaggccgccgccgtcaccgtcccgccgacgtcgtcggcgtcgtgcccaggtctntgtcggtccttgttcggcaacgagcaccctacagatggctgggaggcacagccatattctgatgcagccatctcaaaataaggcttctagaacatttatggattacaattcgattaatcatgccttggatggaatctgggggctttatggaaaggaaattaagggttttaacccaatggtccccaaccttacctaatgccttagcgagctttattaccttattggatggccaacccgcctttatggccctggttaaggaccattcaatcaggcctttccgcc

SEQ ID NO: 94881 - DNA, 516 bp, Zea mays
  unsure (1)..(516): unsure at all n locations
gaaaggtaggatgatgggaagggagagttaaacctctccggaattcccgggtcngaccacgccgtccgtggcactaagaaccaaaagtatgataaaattagtgaaaagaaaatgcttacctcggcagaggtacttctttttgccaacacgaacattgtaatcctgtcatggtagctgttgcagacactgtttgaactaacattgtcttaaacagattctgtgcaaatcttacccgccggagttcgtctcatatttccactattgtcgatccctgcgatttgaagacaggccagattactatccaatgaagaagctctttcgtgatgtatctatacgggatggataccaatttgattacgcatttgactggactgcactcaagtacccttaaatgggctccaacaacaagctagttcaacaaccaagtgcaagaatggcttgggttggaccatcagttgagagaacagacaaagcttacatggggcaagagatccaggataggttcactggtgctgt

SEQ ID NO: 94882 - DNA, 537 bp, Zea mays
atgagatgcgttgccatgaaagtgggggagatagtagtgctctactggttttcggttcgacccacgcgtgcggaagtgcatcattctgacatgcagcttcaccccaggatcttgctcgttgactgcatacaaggtgacgccaagcggttacgagtggggacgcagcaacaaggacaacggaagcaatccacatggataccttccaactcactacgagaaggtccagatgcttctgagcgaccgcttccttggattctacatggttccggataacgctccttggaacttcaacttcatgggagtgaagcacgacccacagatgaagtacaacatgaagctgggcatgccccgggacttctatcacgaggaccacaagccaacacacttgctcgagttcagcaacattgaagatggtgaggccgctgaaagcgatagggaggacacattcacgtatgcgcctgttagaaactgctctgttttaacggcagtgtgtgtagctgtaaactgacttgacgggtgtcatctgttcgcctgtgg

SEQ ID NO: 94883 - DNA, 534 bp, Zea mays
  unsure (1)..(534): unsure at all n locations
tgcagtggtgaatggggggggagggaaagctgacccgctccggaattcccgggtcgacccacgcgtccgcccacgcgtccgcacgccacaggcaaggcacagaggcttgtgagggagagcgaggagcggaggaggacatggtgcacgggacgctggaggtgctgctcgttggggccaagggcctcgagaacaccgattacctctgtaacatggatccgtatgcaattctcaagtgccgttcacaggagcagaagagcagtattgcaactggaaaaggaactacccctgagtggaatgaaaactttatcttcactgtgtctgaccggacaacagacttggtaatcaagattatggacagtgatacaggcacagcagatgactttgttggtgaagcaacgattccattggaagcagtgtatactgaaaggagcattccaccaacactctataatgttgtgaaaggtgaaaaatactgcggngaaatcaaagttggtctcacattcactcctgaggatactcgccagcggggtctcc

SEQ ID NO: 94884 - DNA, 517 bp, Zea mays
  unsure (1)..(517): unsure at all n locations
atgcttgcttgtatggagagggtatgaaattgctgtaccggtccggaattcccgggtcgacccacgcgtccgcgccatcgagatcagaaacttcctcggcgagaagaaggtcaggaaggtggacatgcttgatggcgtgaccatcctccggtccgagaaggtcaaggatgagctcatccttgacggaaacgacgtcgagctcgtatctcgctccgccgccctcatcaaccagaaatgccatgtgaagaagaaggatatccgaaagtttttggacggtatctatgtgagcgacaagggcgtcatcgaagaggagcagtgagcgacagtgtagccgaaatgccaggagatgaatatgaatgtcgtttgagttgcaattttgcgagactgaatgtgaacctttttctcattccttaaatagttgactgccantgttcgtgggttcaaacgaaatttagncttattaactgaatttgcgatttcaaaaggattgctgggttcccgggtatgtgtttaaaat

SEQ ID NO: 94885 - DNA, 535 bp, Zea mays
  unsure (1)..(535): unsure at all n locations
tgaactggtgatagggagggagggataaggtacaccgctccggaattcccgggtcgacccacgcgtccgcccacgcgtccgcccacgcgtccgggggcttgcccttcactttagcagttcaataaatatagagctcagatgtcaaaacgaagtatacaccacaaagatcaaaaggagaatcatccagtcatccgctactactacttcgtcatgtctactacctttgatataaaattttcacctcctggctactacggatgatctggatttctccgtcgtttcttgctggaaatcttaatttaataatgttctgcttcagattgcggagctgagaacaccgtgaagctagtagacgtcgtccagtgccgtgaatgtggccaccgcatcctctacaagaagcggacccgtcggattgtccaatttgaagcacgctgaagagtgacgacaggggaaaaacactggagatggttgatctattactcgccactcacctatgtaaagagtcttgtgagggaaatgaaagtgtcagacatan

SEQ ID NO: 94886 - DNA, 506 bp, Zea mays
  unsure (1)..(506): unsure at all n locations
ggttagggtgaatgtggggggatagtatgcatgtctcggtccggaattcccgggtcgacccacgcgtccgcccacgcgtccgcccacgcgtccggttgagcacgacgatgggatccctcgctaataacatcatggtcgtgggcgccgtccttgcggcgcttgtcgtcggcgggtcgtgcgggcccccgaaggtgccgcccggccccaacatcaccaccaactacaacggcaagtggctcaccggcagggccacctggtacggtcagcccaacggtgccggcgctcctgacaacggcggtgcgtgcgggatcaagaacgtgaacctgccaccctacagcggcatgacggcgtgcggcaacgtccccatcttcaaggacggcaagggctgtggctcatgctacgaggtgagatgcaaggaaaaacctgagtgctcgggcaatcctgtcaccgtgttcatcacagacatgaactacgagcctatcggtccctaccactccgactngagc

SEQ ID NO: 94887 - DNA, 512 bp, Zea mays
  unsure (1)..(512): unsure at all n locations
gatatgtngctgttttggggggaggattattgcaggctcgtaccggtccggaattcccgggtcgacccacgcgtccgcccacgcgtccgagagcatcaaggattctgactgcccaactgagcttgtgccggctgatgagaaatctatagtgaatgtgaatcttgtccggacggaagaagaatttactgagccagtcaagcgtgctgctccttttgaaggggaacgaagaaacctcatggaaccttctgataataatacttccaatgctgctgctgctgctgctgcttccagtagtgcaactgcttctcggacaatcacagtggacgattctttgccatcaacctccctccaaatcaggttcgcagacggcagtcgcttggttgcccgtttcaacacaagccacaggattagtgacgtgcgggcatttatcgacgcgacaaggccaggagccagtgattacacgctgcangccgggttccccccaaagccggttgaagacacgggccaagaca

SEQ ID NO: 94888 - DNA, 515 bp, Zea mays
  unsure (1)..(515): unsure at all n locations
gttatgtcgctgncatagatgggaggtagtatagcatcgctcggtccggaattcccgggtcgacccacgcgtccgcccacgcgtccgtcgagacgcatacatgctcaagatatttgaagacaacccggcagggcttccaggttggtgcaacgcatacactgacaagctgactttttgccagattctcggagagtacagaatggagttaccagagtacaacacgattgaaccttatgcgaaaatgaacgagaactgtacagccttgcccgcaacgtacaaacgagccagacgctgctgactacgagattgtctactatgtatctcactgctgctgcttcatatacacagcggcagtagagtgttgtagctatgttctcgaagtaagagacactatatatataggcgcttggtagatggtagctcttaccagtaatgcctatgcgatgtatttaggttcacggctttcaagcgatcagttgtgaagccacagcgtttgttgacaatattaagggtaa

SEQ ID NO: 94889 - DNA, 504 bp, Zea mays
  unsure (1)..(504): unsure at all n locations
atggctgctttgggggggggcggtaagcatgtctcggtccggaattcccgggtcgacccacgcgtccgcggacgcgtgggcggacgcgtgggcggacgcgtgggccgacgacggccgcgggcctgctccgcgtcttcttccacgactgcttcgtcagcgggtgcgacgcgtcggtgctgatcgcgtccacccagttccagaagtcggagcacgacgcggagatcaaccactccctgcccggggacgccttcgacgccgtggtgcgcgccaagctggccctggagctggagtgccccggggtggtgtcctgcgccgacatcctcgcactggcgtcgggcgtgctgattaccatgaccggcgggccccggtacccggttccgctggggcgcagggactcgctgtcgtcgtcgcccacggcgcccgacgtggagctgccgnacgccaacttcaccgtggacccgctcatncagatgttccgcgccaanggggttcacggtgcaggaa

SEQ ID NO: 94890 - DNA, 515 bp, Zea mays
  unsure (1)..(515): unsure at all n locations
gaatatgtggtngcttatgaggggaggaaggacggcatcgctcggcccggaattcccgggtcgacccacgcgtccggtcctcgaccatccctgcaaattaccgcgatggctcccaagatcctagtcatccttgcgttcctcgccgtggcctcaccggctgctctggccgccttcgatgtgatagagatgctggccgacaagcccacgtactccacgttcctgaagctcctgcaggacaccaaggtcgcgggcgaggcgaatcagctccggtcggcgacgctactggtcgtacccgacaaacttgccaagcctctggcgtcgctgcccgccgataaggtgcggccggcggtggagaaccacgtccttctcagttacttcgaccccatcaagctggacgagatgaagacacgcaccgtcatcctacgcacgctgatctttcgcaccgacaagaaactcngagtgctgaactacacccaggcccgacgaccggcanatgtactacggtgctcccggcc

SEQ ID NO: 94891 - DNA, 508 bp, Zea mays
gaaatgtgttatcagtacgataagtcagcatcgctctaccggtccggaattcccgggtcgacccacgcgtccgcggacgcgtgggcggacgcgtgggctgacgcgtgggtgaatttgagggtataaaaggtcttctccaaataccaaccaaatttaggggttaaaaaaaaaaaaaaaaaaaatgaaaaaaaaaaaaaaaaaaagggcggccgatctagaggatccaagcttacgtaaacgtgcatgaaacgaaatagctcttctatagtgatacctaaattcaatgcactggccgacgttgtacaacgtcatgactggtaaaaccctggcgatacctaactgaatcaccttgcagcacaaactgatatcgccagctggcgtaataaccaaaaggcccaaaccgattgcccttgccaacagatgtgcagcctgaatggcgaatgtgacacgccctgtaccggcacattaagcgcggaagatgtggtggttacgattcatcattcccgct

SEQ ID NO: 94892 - DNA, 506 bp, Zea mays
  unsure (1)..(506): unsure at all n locations
gtatgtgctgatttgagaggaattgtatgctgtactcggtccggaattcccgggtcgacccacgcgtccgggcgataagagcaacgcaggcggcttcgccaccttcgcctcagccaccttctctgctgagggcaacgggttcatctgcaagtcgatggggttcgtgaacacggcggggccggaggggcaccaggcggtggcgatgcacgtgcagggcgacaagtcggtgttctacaactgccggttcgaggggtaccaggacacgctgtacgtgcacgccaaccggcagttcttccgcgactgcgaggtgctgggcaccgtggacttcatcttcggcaactcggcggcgctgttccagaactgcctcatgacggtgcgcaagcccggtgacagtcagtccaacatggtgacggcgcaagggcggacagaccccaacatgcccacaggcatcgtgctccatggctgtcgcatcgtgccggagcatgcgctcttccccgaccgnctcc

SEQ ID NO: 94893 - DNA, 508 bp, Zea mays
  unsure (1)..(508): unsure at all n locations
gaaactggtctgcatgggggggggtagaaaggaacgctgtaccggtccggaattcccgggtcgacccacgcgtccggtcgtggtcgagttccagcacggcggcacgctgaagacgctgctgtacaaccaccgcgacaagaagctttcctacaggaaggtcgtccggctcgcgctcgacctcgccagagggctgagctacctgcactcgaagaaggtgatgcaccgcgacgtgaaggcggagaacatgctgctggaccggaagcggacgctgaagatcgccgacttcggcgtggcgcgcgtggaggcgcagagctgcgaggtgacggggcagacgggcacgctgggctacatggcgccggaggtgctgcaggggaagccgtacgaccacaagtgcgacgtgtacagcttcggcatcctgctctgggagacctactgctgcgccatggcctaccccaactacagcctcgccgacatctnctaccacgtcgtcaaacttggcattcgggcc

SEQ ID NO: 94894 - DNA, 506 bp, Zea mays
  unsure (1)..(506): unsure at all n locations
agaatgtnttgtcatgatggaangtaagtacngctcgtaccggtccggaattcccgggtcgacccacgcgtccggtggtgctctctgtgccgccttttgcaggggaagggggtctgggttgcgtacaggggaaaggcacgcgccgccgctgccgcgcgagcctcttcgtgcccatcgtcgcgcagatggatccgtcgttggagcccatgtacgcgcaggtcgagccgtacgactccgggttcctcaaggtctacgatgtgcacaccatctactacgagcagtccgggaacccgcacggccatgcggccgtgtgtctccacggcggtcccagagccggcacgtcgcccgtcaacaggaggttctttgacccgcagttctacaggatcgttctgtttgaccagaggggtgcaggcagaatcactgccaatgcttgcttagagcagaacactacttgcgacttggttgctgacattgacaaggctcaggagcatcttggcatccctgaa

SEQ ID NO: 94895 - DNA, 505 bp, Zea mays
gaatgtgctgaattgaagataatgcacgctcgtccggtccggaattcccgggtcgacccacgcgtccggtgtgcatgatctccaactccaccagtgttgtggaggtcttctcccgcattgaccacaagttcgacctcatgtacgccaagcgcgccttcgtgcactggtacgtcggtgagggtatggaggagggcgagttctccgaggctcgtgaggatctggctgcgctcgagaaggactacgaggaggtcggtgctgagtttgacgagggtgaggacggcgacgagggtgacgagtactagacgctctactggcgcggcgtcgtcgggcttgtgtgccactgctatcctgtgatctgccctgagtggctcctatcgtgttatgtttctgtcggttcttatctatctgtcgttgtgtggtttacaacttacgttgtaagactttattcccccgctttgctactgggttattaagttttggcgttaaaaaaaaacaccaaataaaa

SEQ ID NO: 94896 - DNA, 502 bp, Zea mays
  unsure (1)..(502): unsure at all n locations
ngtagtgttgtatgtgggggatgtaatgctctcccggtccggaattcccgggtcgacccacgcgtccgcccacgcgtccgcgatcacgacaagatggcgtgcacaaacaatgcgatgagagccttgttcctcctggtcctcttctgcatcgtgcatggtgagaaggaagagtcaaagggcatcgatgcgaaagcgtccgggcctggtgggtccttcgacatcaccaagttgggcgcctccggcaatggcaagacagacagcacgaaggctgtgcaggaggcatgggcatcggcgtgcggcggcactgggaagcagacaatcctcatacccaagggtgacttccttgtcggacaactcaacttcacaggcccttgcaagggcgacgtgaccatccaggtggatggcaatctgctggcgaccacggacctaagccagtacaaggaccatggtaattggatcgagattctacgtgtggataacctggtcatcaccgccagggaaa

SEQ ID NO: 94897 - DNA, 502 bp, Zea mays
  unsure (1)..(502): unsure at all n locations
ttatgcntgtcatagaatgatgtatgcacgctcgtaccggtccggaattcccgggtcgacccacgcgtccgcccacgcgtccgaactgaacgggcacatcaatagtctctggcctccaagggaaattgggaaattcagattgaacgtggctgcatcatttttcctttcattggtcttttcagcaacagcgatccattctcgtgggagggagagagagagagagagggagagaaatcaaagaggagagtgatcatggagcatgtgattggagggaagtataagcttgggaggaagattgggagcggatccttcggagagctatatctcggtgttaatatacagaatggagaggaagtgggaataaaattggagcctgtgaaaacaaaacatccacagctgcactatgaatctaaagtttatatgctgctgcagggtggaaacggtatcccacacctcaagtggtatggtgttgagggggagtacaatggtatggtgatcgacc

SEQ ID NO: 94898 - DNA, 503 bp, Zea mays
  unsure (1)..(503): unsure at all n locations
tggttgatgccctgacccttgntagcctctactgtatcggtccagaattccgcgaggcgacccacgcgtgcgcccacgcgttcgtactgaactgtcacatcaatagtctctggcctccaagggggatggggaaattctgatcgagcgtggctgtatcattagttctttcattggtctattcagcagcagcgatccattctcgtggaaggcagagagagagatagagggagagaaattaatgatgagagtgatcatggagcatgtgattggacggaagtataagcttgggaggaagatcgtgagcggatccttcagagagctatatctatgtgttaatatacagaatggagaggaagtgcgaatcaaatcgtagcctgtgaaaacgaaacatccacagctgcactatgaatctaaagttcatatgctgctgcaggatggaaacggtatcccacacctgaagtggtatggtgttgacggggaattcattgttatggccaacggac

SEQ ID NO: 94899 - DNA, 502 bp, Zea mays
atggttgataagggggaatgtgatatagcatctctcggtccggaattcccgggtcgacccacgcgtccgaattgttctctcgtccttgcattgcccattacatgctatccattggtaacgcacaacagtaaaatgacagacatccgacagctatattatgttcgacggtgtaacaccctgaaaaaaaaaaaaaaaagggcggccgctctagaggatccaagcttacgtacgcgtgcatgcgacgtcatagctcttctatagtgtcacctaaattcaattcactggccgtcgttttacaacgtcgtgactgggaaaaccctggcgttacccaacttaatcgccttgcagcacatcccactatcgccagctggcgtaatagcgaagaggcccgcaccgatcgcccttcccaacagttgcgcagcctgaatggcgaatgggacgcgccctgtagcggcgcattaaagcgcgcgagtgtggtggttacgcgcagcgtgaccgctaa

SEQ ID NO: 94900 - DNA, 513 bp, Zea mays
  unsure (1)..(513): unsure at all n locations
gtaatggnntgatcttgtggggggatagtacagcatntctcggtccggaattcccgggtcgacccacgcgtccgcccacgcgtccgcccacgcgtccggccggtccgacgacctcgagacatggctcacgggcgtcatgacgttcatggacacctgcatcgacggcttcgtcgacgagaagctcaaggccgacatgcacaccgtgctgcgcaacgccaccgagctcagcagcaacgcgctcgccatcaccaacagcctcggcgggatcctgaagaagctggacctcggcatgttcaagaaggactcgcgtcgccggctcctgtcggagcaggacgaaaaaggctggccagtgtggatgaggtcgccggagagaaagctcctggcggcgggcaaccagcctaaagcgaacgcggtggtggccaaggacggcagcggccagttcaagaccatncagcangccgtggacgccatgcccaagggccagcangggaggtacgtcatctacgtgaaggc

SEQ ID NO: 94901 - DNA, 504 bp, Zea mays
  unsure (1)..(504): unsure at all n locations
aggttataatgagggtaaagtatagcatcgctgtactcggtccggaattcccgggtcgacccacgcgtccggagaaaagaaaaatgaatacaaatgtttctgtttctgaagatgttggtaagaatgttggagttaagaaaggaggatccatggaaggggagcttgtagaaggagttaggaggagcagcaggttggagtctaatgatgaaatgaagattgcagataaggcagcagcaagagcaatggctaaagatgcattcattaacaaagatcatttctaacggctccttttaccattaaggagattaaaaaagtggttttcgagatgaaacataatagtgctcctggtccggatggttttcctgcggaattctttcaaaacttttgggatttgattcaaatggatgtttggaacttattcaaggatttttatgttggaaatcttgatattgaaagactgaaaaaaaaaaannnttaannanaaaannaaanaaaaaataaaaa

SEQ ID NO: 94902 - DNA, 510 bp, Zea mays
agggccagtggctgaccgcagctcccaccgcatgcctgtaccggtccggaattcccgggtcgacccacgcgtccgcccatgtatacattgttcctgtttgtttcgactttttgtagcttctggccaccaaagactgctgccaactgccaaacactcagcttttcagccagcttctataaaaatccgttggataaaacccttccaaattaaccataacatattatccggtgaatcctcgcaattataggtaatccgcactttattggaccctaaccccaatggcaaatttaattttcccccgttccaaccatgggaaaaaaaaaatattttttttattataatattttatttttataaaaaaaaaaaaggcgggccacttttaaaggaaccagcttttagtacccctggcttcccaaagttaaaattttttttaaggggccccttaattcaaatctatttgcccttatttttaaaaaaatgtggccgggaaaaacccgggcttcccccaac

SEQ ID NO: 94903 - DNA, 510 bp, Zea mays
  unsure (1)..(510): unsure at all n locations
atggggcgctgtggatcgccgtcaagtcccctacgtactgctgtaccggtccggaattcccggcgtcgacccacgcgtccgcggacgcgtgggtgcatgttccagtgaaggccgcgccatccatgtcggacgccggggtggggaagctaagcctaggcgcgaaggcgctgtcggagggcggcttcgagaagctgtacaagcagacgttctcgtccagccccgacgagcacctgaagaagacgttcgcttgctacctctccacggccacggggcccgtcgccggcacgctgtacctgaccaacctgaacgtcgccttctgcagcgaccgcccgctctccttcgccgcgccgtctggccagaccgcctggagctactacaaggttatgatccnccttggcaagatcgcgacggtggagccggtgacgatgaatgagagcccgccggagaagtacgtncacgtcgttaccgtcgactcccacgacttctggttcatgggcttcgtcagctacc

SEQ ID NO: 94904 - DNA, 506 bp, Zea mays
  unsure (1)..(506): unsure at all n locations
tggcctgttgtgactgcacgcactacgtacgcctgtaccggtccggaattccgggtcgacctacgcgtccggcggagcgcgccgaggtggctcggtcgcgcaacctcgccgcctacgtcagcgggcgggtggccgccacgaaccgcttcaacgcggacgtgctgagggccacgacgcggcgggcgctggcgaggtacgatggcccgtgcatggcgaccaaccccatcgaccggtgctggcgctgtcgcgccgactgggcgacggaccggaagcggctggcgcagtgcgcgcgcgggttcggccacaggagcgtcagcggcgcggccggtaagctgtacgtggtgagggacccgagcgacgacgagatgatcattcagcggaacggcacgctgcggcacgcggtgatccaggaccggacgatgtggatcgtgttcacgcagatcacgctgcagaacgtgcaggacgtgatcctgaatcacctgcacatncactactcgaaggcgtgg

SEQ ID NO: 94905 - DNA, 510 bp, Zea mays
  unsure (1)..(510): unsure at all n locations
tggtgtgttgaccatgatgcataacgtaggactgcccggtccggaattcccgggtcgacccacgcgtccgacttactcccagggctgcgtgaatatttttcccaaacagatgatattcatataacggcaaggattcctgcaatggagagcatggctgatgtgaatttagcacaaaaggacgagaagcttaaagaagttgactccaaaactaaaccagaagatcaacaacaagcagaaaataaaaatatgggaacaattgatgaagaatcagatgacgatgaggactatcatgttcctgaagctgatatagaggtgaaatcactaacaaatctgacaatgaagctaaacacacagatgagcctccagaaaaaattgatttatcttgcttttctgggatacttcatcatgatccggatgagaaaagccgcaactgttggacagtacctgatagcaagcttttcaaagttcgtagcaggaaattcccaaatgacaaatcgaaggtctaaatgn

SEQ ID NO: 94906 - DNA, 505 bp, Zea mays
  unsure (1)..(505): unsure at all n locations
tgggcgtggtgagcccaccggatancgtacgcctgtccggtccggaattcccgggtcgacccacgcgtccgcccacgcgtccggcatggcgggcacccctagccaggcaagcctcctgctccagaagcagctcaaggatcttgcgaagaaccccgtggatgggttctccgcagggcttgtagacgatagcaacgtcttcgagtggcaggtcaccatcatcggcccgcccgacaccctatatgacggaggctacttcaatgcaataatgaccttcccccagaactatcccaacagcccgccatcagtaagatttacttctgggatgtggcatccgaatgtttatccggatgggcgtgtttgcatttctattcttcatccacctggtgaagatcccagtggttatgagcttgcaagcgaacggtggacaccagtgcacacggttgaaagtatagttctgagcatcatttcaatgctctctagtccgaatgacgagtctncagcaaat

SEQ ID NO: 94907 - DNA, 515 bp, Zea mays
  unsure (1)..(515): unsure at all n locations
gttagaagtaggaataatatcgcttaacctaagtacatctgtaccgctccggaattcccgggtcgacccacgcgtccggagtcgctctgcactgcacgactcctcccccatctaccactacctgtctacctaccgagcccatcgactgcccctcgcaacgcaatggcgctcgccaccaactccgccgctgccgcagcagctgccgtatccggcggcgcggcatcccagccgcaccgcgcggccacgttcctcccgctgaagaggcgcaccatctccgccatccacgccgccgacccgtctaagaacaacgggcccgccgtccccgcggccgccgccgctaagtcatctgcctctgcggtggccacgccggagaagaatccggcggcgccggtaaagtgggcggtcgacagctggaagtcgaagaaggcactgcagctcccagagtacccgaaccaggaggagctggacacngtgctcangaccatcgagacgttcccgcccgtggtgttcgcccn

SEQ ID NO: 94908 - DNA, 512 bp, Zea mays
  unsure (1)..(512): unsure at all n locations
tgtttagcagtgagcgtnctgtcgactgataagatagattgcaccgcgttcggaattcccgggtcgacccacgcgtccgcccacgcgtccggttctagatcgcgagcggtcgccctttcttttcttttttatatggtatcggtcgctttgaaaccatcaaatttgatctccttccatatttcacaagctgcggctagttcagcactccatttgcaagctgctttgataatttcattaccttcactagcaagatcgcgcccttcgttactagcttgtacacaggcttctaaagccacacgattagctgctgcaccaggtgcatttccccaaggatgtcctaaagttcctccaccaaattgtaatacggaatcatctccaaagatttcggtcatagctggcatatgccaaacatgaatacccacagaagccaccggtataacacctggcatggatacccagtcctgagtgaacaagataccgcgagaacgatcttnttcaatgaaatcatcgcc

SEQ ID NO: 94909 - DNA, 516 bp, Zea mays
  unsure (1)..(516): unsure at all n locations
agagtggtcctcgttgctgactgcccagctcagtaccgtactgccggtaccggtccggaattcccgggtcgacccacgcgtccgcccacgcgtccgcccacgcgtccggataaaattagtgaaaagaaaatgcttagctgggcagagattctgtgcaaatcttacccgccggagttcgtctcatatttccactattgtcgctccctgcgatttgaagacaggccagattactcttcaatgaagaagctctttcgtgatgtatttatacgggaaggataccaatttgctcagcgcacaactgtgtgtcttgatttttcttctgtttatcacggcattagtgccatgccgttttatgttacagtgttgtgtgctcgcaagcatccgaaaatatgcgtctgagtttagggttgggtcaaacttgtcgaatttggggttctgttataatatgttgagcatgaataaagatggatgctggtgactctgtcgccatcgccgtccatcatgagtgtcctgtan

SEQ ID NO: 94910 - DNA, 507 bp, Zea mays
  unsure (1)..(507): unsure at all n locations
atggctgtggctgactacgaaatactgagtancgccgtaccggtccggaattcccgggtcgacccacgcgtccgcttccgcaagaaagggaggggcgcggacaagaagctgctctcgcggcgggacatcggcttcgatttggatggcagaagcggcgacaggatggacctcttggagacgtccgccgctgtccgcaagagcttctcagatcggcactgcacgacgcggatcgagaacctgacgctgagctgcctggattctcccaggagacccaatgtcgacacccgggagtaccgggtgtttgtaggcacatggaacgtgggagggaagcctcctgacagcagcgttaacctccaagagtttctgcagatcgaaggcttgcccgatatatatgtcttggggtttcaggagatcgtgcctctgaacgcgggcaacgtgctggtcgtggaggacaacgagccggcgggcaagtggatggacctcatctaccaggccctcaacaggccg

SEQ ID NO: 94911 - DNA, 515 bp, Zea mays
  unsure (1)..(515): unsure at all n locations
cggtttagtngtaagctgtcctgtgcatcgataaagaaatagctgcatagcgctcggaattcccggggcgacccacgcgtccgaaaagttaggaggggaacccatcagtcaagagctacgcaaacgcacagcgatgcagaagcacgagataccagccaccatgcgcctgtccctcctcctcgtcgtcgtggccgccctctcggcgcgcaccgcggcgcagctgccgctggcgggcggcggcggcggcgccctgaagccggacttctatagccagtcgtgcccgcgcgcggagcggatcattgcggaggtgatgcagacgaagcatatggcgaacccgacgacggccgcgggcctgctccgcgtcttcttccacgactgcttcgtcagcgggtgcgacgcgtcggtgctgatcgcgtncacccagttccagaagtcggagcacgacgcggagatcaaccactcccttccccgggacgccttcgacgccgtggtgcgcgccaagctggacctggagt

SEQ ID NO: 94912 - DNA, 508 bp, Zea mays
  unsure (1)..(508): unsure at all n locations
ggctctggtgtccagcgtacanagtactgccgtaccggtccggaattcccgggtcgacccacgcgtccgggagctacttcggcctggtgctggagaagaagatgcccctcaccatcgaccgcctgctggggatggacaagacgaccgagcccatagtcaaggccatgtcggacaagactaccgacttcgtccccatcttcgccaaggccatggagaagctcagcgccctcaaggttctcacggggaaggacggcgagatcaggaagacgtgctccgagttcaacaacccgcagaacaccagcggcagcacgtcggtgatacggatcagctccatcgacgccgaccagatggccggcctgtcgcagccagggtcgacgtccaggaaggtgggcggccgctctagaggatccaagcttacgtacgcgtgcatgcgacgtcatagctcttctatagtgtcacctaaattcaattcactggcccgtcggtttacaacgtcgtgactgggaan

SEQ ID NO: 94913 - DNA, 516 bp, Zea mays
  unsure (1)..(516): unsure at all n locations
ggtaggggctgttgacgcctagcccagatagnactgactgtctcggtccggaattcccgggtcgacccacgcgtccgcgacaagatggcgtgcacaaacaatgcgatgagagccttgttcctcctggtcctcgtcggcatcgtgcatggtgagaaggaagagtcaaagggcatcgatgcgaaagcgtccgggcctggtgggtccttcgacatcaccaagttgggcgcctccggcaatggcaagacagacagcacgaaggctgtgcaggaggcatgggcatcggcgtgcggcggcactgggaagcagacaatcctcatacccaagggtgacttccttgtcggacaactcaacttcacaggcccttgcaagggcgacgtgaccatccaggtggatggcaatctgctggcgaccacggacctaagccagtacaaggaccatggtaattggatcgagattctacgtgtggataacctggtcatcaccggcaagggaaaccttgacgggcaaggcccaatn

SEQ ID NO: 94914 - DNA, 510 bp, Zea mays
  unsure (1)..(510): unsure at all n locations
ggctgtgggtgatcatcgcatactacggnactgctcgtcccggtccggaattcccgggtcgacccacgcgtccgcccacgcgtccgctaagctgtcgtcgcagaatcgcacgtacgcgcgatcgagaaggcaggaccaggacgacgatggcccggccgcgcctcctcctcaccttcctgctcgccgcggcggccgtgctgaccacggtgcccggcgtcgcgctcgccaagtcgaagctcgccaagaagagcgacgacgtcgtgaacgggcccctcctgaccgagaagatccaggcgaagaagacgctgatcgtggggccggacgaggagttcaagaccgtgcagtccgccatcgacgcggtgcccgccggcaacgccgagtgggtcatcgtccaccttcgctctggcctgcacaggggcaaagttgtgataccggagaacaagcccttcatcttcgtgaggggcaacggcaaaggccggacctncattctccacgagtccgccttttccg

SEQ ID NO: 94915 - DNA, 512 bp, Zea mays
  unsure (1)..(512): unsure at all n locations
ggantaagttgttggcgtgctgtgctagtatagactgtattctcgatctcgtccggaattcccgggtcgacccacgcgtccgcccacgcgtccgcggacgcgtggggttcgcggagatccaggcggccacccagaaggtcnacgagaaggccatcatcggcgtgggcgggttcggcaacgtgtacgtcggggagatcgacgacggcaccaaggtggcggtgaagcgcgggagcgcggagtcggagcagggcatcaacgagttcaacacggagatccagatgctgtcgaagctgcggcaccggcacctggtgtccctgatcggctactgcgacgagaaccaggagatgatcctggtgtacgagtacatgcacaacggcgtgttccgggaccacatctacggcagcgaggggaaggcgccgctgccgtggaagcagcggctggagatctgcatcggcgccgnccgggggctgcactacctgcacacgggcacggcgcangggatcatncaccgc

SEQ ID NO: 94916 - DNA, 515 bp, Zea mays
  unsure (1)..(515): unsure at all n locations
tgtatatggctgttgtggacttcagtccagtancgtactgctgtaccggtccggaattcccgggtcgacccacgcgtccggcacatctcttgcctcctctttcgcgctgtccggagaggaggggcaggaggagggggcaccaaatctatctggggatcggagcgcgggcgacaagatgccacgcggcggcaagcccgcggcttcgtcgaagccgaacccgttcgactcggactcggactcggagtccagcaataagccggcgaacaagtccggggcgtcgtcgtaccaggcccccgccgacgccaagaagcggtacaaggacgggttccgggactcgggcgggctggagaaccagtcggtgcaggagctggagcactacgcggcgtacaaggccgaggagacgacggacgcgctcgccggctgcctgcgcatcgccgaggacatcaggcaggacgccagcgacacgctgatcacgctgcacaagcagggggagcagatcagccggacgcacgaga

SEQ ID NO: 94917 - DNA, 520 bp, Zea mays
  unsure (1)..(520): unsure at all n locations
ngctggtatgggtcngtgtcgaaccttgactcggctttgtcatgtctgtaccggtccggaattcccgggtcgacccacgcgtccgggctcttgggagccaagtagtatgaaggttgcgagcatctggccgtccttatgggggctatcacccaggactgcttagagatactctagcttttcatggttgtgctgaactgttccaggatattcatacagaacttattcagtatagaaggaatcagatgattaaacgaggaacagtaaaggagcagctaacagttgattcagtgtccaggaagatggctgggttgtgtccactcatgccagaagaggttggacttctacttcaagcattaggttacccaccaactacaataatattcttggctggttccgagacttttggtggacaaagaatgcttattcctctacgagctatgtttgctaacctagtcgatcgaacttcattatgtattcagagggagctgtttgatttatttgggtcagaagatcctctaac

SEQ ID NO: 94918 - DNA, 513 bp, Zea mays
  unsure (1)..(513): unsure at all n locations
tatgccagttgtggnncccagcctcgngacagnnacgntcgtaccggtccggaattcccggggggacccacgcgtccggagtgtttatcttcgttcgtctcgtgtttgttgttgcccatctgtgtttttggttgaaggtcgctctgtgtcagttgttagtgctgtgttcatcctctgctccagcagacccatgcatcaaccagcatggactgcggatcgatgggtgctgttacccccgtcaggctttattctaagttaaatcctaaggaaaaaaatggtgcttcttggtgctgcaaaatggttgtgctcatttgaaaaactacatactctcgctttgagtgcgaatcaaggcaaaggttgccagtttttcaaacagctaatagcaacagctgattacaacaaacttatgccataaaaaaaaaagggcggccgctctagaggatccaagcttacgtacgcgtgcatgcaacgtcaataggttttctatagtgttacctaaaattaattcattgc

SEQ ID NO: 94919 - DNA, 518 bp, Zea mays
  unsure (1)..(518): unsure at all n locations
ggtaatatgggctgctgatgaatcgatttattcgtaacgctcgtcccggtccggaattcccgggtcgacccacgcgtccgcccacgcgtccgcaaggattcacggtgcctcagtcacatgtttgctgctgaaattggcatgcatcgtttcttgctctcgagtgctgtccggacactaaatcccaaggaagctgattggttctatacaccagtttacactacttgcgatttaactaacgctggactgcccttgccgtttaagtcaccacgggtgatgaggagcgcgatccaatatatttcaaacaaatggcccttctggaataggactgatggagcagatcatttcttcgttgttccgcattttgcagcatgcttccactatcaggaagaaaaagctatcgagcgtggaattcttccattgctgcgacgtgcgacattggtccaaacctttggacaggagaatcatgtttgcctgaaggagggttccatcattattccaccctatgctactccgcagan

SEQ ID NO: 94920 - DNA, 509 bp, Zea mays
  unsure (1)..(509): unsure at all n locations
tatgtgntggtgtcatcgacaatattgtatcactcgtcccggtccggaattcccgggtcgacccacgcgtccggcctccttccgcattggccggcggagccacagcactcagccagcctctccatctggctgcagtccccacgcgctgttccatccaaccctagccaccgttggtgcctcggcggcatgccctcgtttgccttcgtctccgctcggtacgccgcggatgcggaggcggacttcctccgcatctccgcctcgcaggaagaccttctcgcccgcgcccccttcatcaccttcaacccggaggaggaggaggaggaggaggccgaggtgtccagcacgccgcctctcacacaccaggccccgcagaggcagggggaagagggcatcgccatgtgctccatgcccttcacccagccttcctccccttctncggctccctccccttccttggggagtccgaagtcggaggcgtttcccctccctcggagactccgattcggagc

SEQ ID NO: 94921 - DNA, 502 bp, Zea mays
  unsure (1)..(502): unsure at all n locations
agttaggggcgcgtggtgtgctgacctngacgttacctacatacccgtccggaattcccgggtcgacccacgcgtccgcccaaggtcgtcgacgcgttgagggaggagcacgacgcgatcgccaagaacaggaggggcccggatgcccccgtcacgtgggccgagtacagatcgatgaccttcaccaatcaggtcatcatggagatggtgaggcttgcgaacatcgtgccggggatatttcgaaaggccctgcaagacgttgagatcaaaggctatacgattccggcgggatggggcgtcatggtgtgcccaccggcagtgcacttaaaccccgacatctatgaagaccctctggcgttcaacccgtggagatggcagggcaaacctgaaatcaccggtgggacgaaacacttcatggcgtttggaggtggcctcaagttttgcgttggcactgatcttagcanggtcttgatggcaacattcattcacaggctggttacan

SEQ ID NO: 94922 - DNA, 510 bp, Zea mays
aaggctgttgtggccatcgaacattggtgcatcgctcgctaccggtccggaattcccgggtcgacccacgcgtccgcatgcatgaagaacgaccaaccaatttaattaattaaggagtgtgtgcagtggatgggcatgccacgacacgacgtaccacgacgactgagtccctggcggagagcgcgaggacgtcggagcaggacacgactgcgccaccgcactccttctggaggcggtcgtggatgtcgctgatggacttgaacgcggtggggcgcaacgtgaggttgggcggcgcctgctgctcgcccgggccggtggctgagccgtacaggagcacggacgcgttgcagccctggacgaagcagtcgtggaagtggatgcggatgacgccggcggcgaagacggcgtacatgcgcacggtgtactgcacgaacctacgcacgacggacttcgacctggggcgacttcgcttttagaaataccaaggacaaggctgggccccggcgcctc

SEQ ID NO: 94923 - DNA, 508 bp, Zea mays
gggggtggttgtcatagatatatagtagcgctcgtccggtccggaattcccgggtcgacccacgcgtccgcgaggagatgcatgacgccgagttaggttgcagtttgaagaccaatgggccaggagtagcctacttctactgggttacaagagagcaaggctccttcgagtggttcaaaggtgttatgaactacgttgccgatagtgatcgcgacgatgtaatcgagatgcgcaattacctgaccagcgtgtacgaggaaggcgacaccaggtcagccctgattgccatggtccaatcacttcagcatgctaagaatggcgtggatatcgactcatgcagcaagattcgaacgcattttgcaaggccaaactggagaaaagtgttctctgattcggccaatgcccacaagaactcacgcatcggcgttttctactgtggatcttcaacactgaccaagaccctgagagatctttcgatagagttcagcagtaccacgacgactcggtt

SEQ ID NO: 94924 - DNA, 506 bp, Zea mays
  unsure (1)..(506): unsure at all n locations
aggcctgctgacgaattggacgcttganagtgatgtctcggtccggaattcccgggtcgagccacgcgtccgtgaccatccaggtggatggcaatctgctggcgaccacggacctaagccagtacaaggaagatggtaattggatcgagattctacgcgtggataacctggtcatcaccggcaagggaaaccttgacgggcagggcccagccgtgtggagcaagaactcctgcaccaagaagtacgactgcaagatccttaccaactcgctggtgatggacttcgtgaacaacggggaggtgtccgggatcacgctgctcaactccaagttctttcacatgaacatgtaccagtgcaagaacatgctgatcaaggacgtgaccgtgacggcgcccggggacagtcccaacacggatggcatncacatgggcgacttattcgggatcaccatcaccaacaccctctttgggtttgcgactactgattcatcatcggccctgggacct

SEQ ID NO: 94925 - DNA, 520 bp, Zea mays
  unsure (1)..(520): unsure at all n locations
tgtataattgttgtngtnnttgactgacgtgacccgtagcctctcccggtccggaattcccgggtcgacccacgcgtccgcccacgcgttcgctcacacgtccgcacacgcgtccgcccactcgttcgcccacacggccgatctttccatttccctatctgccactatacaattcgcgagttcttccttctctgccgccatggcgctctatgtggacaacacctcgtatggacgggagtacaacgtccaggatctctagcaagcgcacttagctcgccttgagattgatctggcccaggtcgaaatgcccgaactcatggcctgccccgcccagtttggcccgtccaagccctttgccggcgctaggatctccgcgtctcttcacatgaccattcacaccggcgaactgatcgagacccttaccgcgctcgatgccgaggtccgttggtgctcctgcaacatcttcttcacacaggaccacgctttacgtgccatcgggcgcgactcgggcgcataattc

SEQ ID NO: 94926 - DNA, 508 bp, Zea mays
  unsure (1)..(508): unsure at all n locations
ggttaagtgagtggaggtgctgaacctacttacgcccatcccatacctgtccggaattcccgggtcgacccacgcgtccggcacggacgagaaggcgctgatcgagatactgggccaccggacggcggcgcagcgcgcggggatcgccgtggcctacgagggcctctacaacgaacccatcatcgacagactccactccgagctctccggcgacttccggagcgcgatgatgctgtggacggtggacccggcggcgcgtgacgccaagctcgcccacaaggccatgaagaagcagggcgagcggtacgtgtgggtgctcatcgaggtcgcctgcgcgtccgcgccggaccacctcgtcgccgtcaggaaagcctaccgcgaggcctactccgcctncctggaggaggacgtcgccgcgtgcccgctctacaaggacccgctcctcaagcagttcttggtgcggctcgtgagctcgtaccggtacttcggcgagctcgtcgatgacgan

SEQ ID NO: 94927 - DNA, 504 bp, Zea mays
tgtagttgtaggtgctgttccctgacctgacgctagctcaataccggtccggaattcccgggtcgaccgacgcgtccgcccacgcgtccgcccacgcgtccgcccacgcgtccgaaactcttgaagcagtatggtgtcggtgaccctgaaatcaaggaggaggtggtcgacagctcccttgaattcctcatccttgctagtgatggactctgggatgttgtcactaatgaggaagctgttgccatggtcaagcctattcaggacccccaggaagcagcaaacaagcttctcgaagaagcgtcccgaaggggaagctctgataacatcaccgttgtcatcgtccgcttcctatatggaactaccggtgataaatcaagcgcagacaaagagaccaccaatgaccaaaactcctaattacctcctgtagggatccctcatgcgtgtgttttcttcttgcttgtgtatctgatgcttaaaagtaaatgctccgtgtgtcttcccctg

SEQ ID NO: 94928 - DNA, 509 bp, Zea mays
  unsure (1)..(509): unsure at all n locations
agcggttggtgatttcccgggcctcncgnagggctgttctggtctcggaattcccggggggagccacgcgtgcgggcaaatggcaggctccgccgtcctgaggagccccctgtccgtcctcctctacatggtgggcgtcgtgcccgccacggccgcggctacgccgaccgacgccgccatcgacgaggcgtacgcgcatgtggtcaacctcaccgctaaccaggagtactgggcggagcgcgctgaggctgcgcacgcgtacaaccgcgcggtgtaccagaccgaccccgtggccgtcgtgcaacgcttcaacgacggcgtgcacagggcgacggcgacgcggtcgcggtccctggcgcacagggcgcggcgcccctgcacggacaccaacctcatcgaccagtgctggcggtgccgacgcgactgggctcgcgagcgtaagcgactgggcaggtgcgccatgggctttggtcacaagaccaccggagggctggccggcaggttttact

SEQ ID NO: 94929 - DNA, 511 bp, Zea mays
agaattagtaatgtgggcgggcctgtagctcacttctgtccatcgctataacggtccggaattcccgggtcgaccgacgcgtccgggacaggcgctggtgatcggcatctacgacgagcccatgacccctggacagtgcagcatgggggttgagaggctcggggactacctcgtagagcaaggcctgtgattgaatgcataccaacaacgacaccaacgccaacattaattaattagtagtctccatgccctgggattgcgcgtaggctctacgttcaacaccacccatccttcgttcggcattttttcccccttggttatataattacattgtatcgttttggcaaatcattttgtgattcgaccccaaagcaagtttggttgtcttacgatttgtaaacctggaacaatatataatgtgattgaactgctttgtctcaaaaaaaaaaaaaaaagggcggacgctctaaaggatccaagcttacgtacgcgtgcatgcgacgtcataact

SEQ ID NO: 94930 - DNA, 504 bp, Zea mays
  unsure (1)..(504): unsure at all n locations
agaagtnggcgtgcctgtcccctcccaacgaccagtcgcatacccgtccggaattcccgggtcgacccacgcgtccgcggacgcgtgggcggacgcgtgggatacgaacgtcgtacgagaacctttctcccggctccagctttctccttttcttgccacggcaaaacaccttcgccggcgagagcatggcgatggcgtaccgtgtcctggaggtcaccctggtgtcggcaaatgacctcaagaaagtgtcgctcttctcccggactcgcatctacgccgtggcttccatctccggattcgacctccgcatcccttcccacagcacccaagcagaccacagcaacggctgcaacccctgctggaacgccgtggtacacttccccatcccggctgccgctgacacccgcggcctcgcactccacgtgaggctccgcgcccagcgtctatacctgngcgatcgcgacatccgcgaagtgttttgggccatcgacgaccttcttggcc

SEQ ID NO: 94931 - DNA, 577 bp, Zea mays
  unsure (1)..(577): unsure at all n locations
cgaggcccnctactcacccctgcacgtagacgtagagcgactgccctgtaccggttccggtaattcccgggtgcgactccactgcgtctcgtcgtcaatggtgaccggcgcctcgggtgacagtccccaacatcggacggcgatccatcatgggcgacnntcgtctcggggtcaccgatcatccagacaccgtcatcnnggcgtcgtgcgacgacctgcatcgtccatcaggcccccgggactctccaaggntgaacatcactcggcgtgacccctgcggccccggccacggcgatcagcatncgtgcagcctagggccggtacaatggatgagaaggacgtcacttgatatcaaccgtcaagggactgcacgcttaagaagacgtgccaatgggcgtccgcatcaaggcattatgaggacgctgcctccgtgcctcaaccgcctgcaagaatccactttatgagaatatcaagaatggagggaactcgggcctaccccatcatcatncgacatgnaagtacttgccccaacaaggttatgcaccgncaaatggtgccctccaaggtcaccgtcaan

SEQ ID NO: 94932 - DNA, 516 bp, Zea mays
  unsure (1)..(516): unsure at all n locations
tgtggngtgggtgatcccacgccttagtcggtagcgctcgtactcgtctcggaattcccgggtcgacccacgcgtccgcccacgcgtccgctcacgcgatcgcccacgcgtccagatccaattcgcgagttctggctgctctgccgccatggcgctctctgtggagaagacctcgtctggacgggagtacaaggtcaaggatctctcgcaggcggacttcggtcgcctcgagattgagctggccgaggtcgaaatgcccggcctcatggcgtgccgcgccgagttcggcccgtccaagcccttcgccggcgctaggatctcggggtctcttcacatgaccatccagaccgccgtcctcatcgagaccctcaccgcgctcggcgccgaggtccgctggtgctcctgcaacatcttctccacgcaggaccacgccgncgncgncatcgcgcgcgactcggccgtcgtgttcgcctggaaagtggagacccttgaggagtactggtggtgcaccgagcg

SEQ ID NO: 94933 - DNA, 512 bp, Zea mays
  unsure (1)..(512): unsure at all n locations
cggggtggcttggtgtcgaaggactgcaaagntatgccgtaccggtctcggaattcccgggtcgacccacgcgtccgctgggcctgtccacggtggtgaccatgatcttcgcccgcgaggtgccgctggaccgggcggcggcggcgaagcatgacgaggccggggagtcgtcgggcccgttcgccgttttcaagggcatgaagaacatgccccccggcatgcctcaggtgctcatcgtcacgggcctcacctggctctcctggttccccttcatcctcttcgacaccgactggatgggccgcgagatgtaccacggcaggcccgacggcagccccgaggaggtggccaggttccaggagggcgttcggcaaggcgccttcggactgctcctcaactccgtcgtcctcggagccagctacttcctcatcgagcccatgtgccgcaagctcaacgtcaaggtcgtgtggctcatgagcagcttcctcgtttgcggctcatggccttggtcaccn

SEQ ID NO: 94934 - DNA, 511 bp, Zea mays
  unsure (1)..(511): unsure at all n locations
ggcaagtttgtggcgggccgtgtcgactgcatcgatgcgatcgctatacctgtccggaattcccgggtcgacccacgcgtccggccatcgactgcggcgcgagctgctcgtaccgttgcagcaagtcgggacggcccaggatgggcctgagggcgtgcggcacctgctgccagcgctgcggctgcgtcccgccgggcacctccggcaacgaggacgtctgcccctgctacgccaacatgaagacccacgacggccagcacaagtgcccgtgatccatccaccgtggttcccagcatcagcagctttgccaaaaagacatgatacctacatatatataagagtacctagctgctgctgctctactaccttgctggttcattatattgtgcgcgtgcatgcatgaataaataaatgaacatattacggcatgtacaatccagatacggctgcacggtactccaagttcaagatacaactgaaacacaacacaatacagtggtcatgtctaaan

SEQ ID NO: 94935 - DNA, 543 bp, Zea mays
  unsure (1)..(543): unsure at all n locations
ngtggnnnnnnnngccagcnaacagatagaactgacctgtaccggtccggaanttcccgggtcggacccacgccgtccgcgcgacgcgtgggcgagtaccttcgcaaagatgaacgaatggtgtgacggatcatcaacgttgggcatggggtggagtgactcgacgaatacgcatctggtacagggcgcgtgactcgcggcaaagtctgctcaggcgtgctcttgatgtcttcaccgtggagcccccgcccaaggacagcaagctggagttgcatgagaatgtcactgtaacaccccaccttggagctagtactgtcgaggctcatgaaggcgtcgctatcgagattgcggaagccgggggtggtgcactgacaggggagctcgcagcaaccgctgtgaatgcgcccatggttccagctgaaaatcctgtatagcttgctccataaggttctctggccgagaagcttcggaggcttgccgttcagcctggtgcccgcgaaaacggcattaaaggcgtgaaagttgttgacaccacaacgccgg

SEQ ID NO: 94936 - DNA, 542 bp, Zea mays
  unsure (1)..(542): unsure at all n locations
atgcctgggtgagcatccagaatacagctacgnacgtanctggtccggaatttcccgggtcgactcgacgcgtcncgcccacgccgttccgcccaacgcgttccgcccacgccgtccgggacatgacccgcaagcatgctctgcgttggtttcaacgcttggagtgaagccagagatttgcttgttgcaacaagattggatgccaccacacccaagtactccaaggcccgttatgatgagattgtgaaggaagtctcttcctacctgaagaaggttggatacaaccctgacaagatccactttgttcccatctctggtttcgaaggtgacaacatgattgagaggtccaccaaccttgactggtacaagggcccaaccctacttgaggctttggacttgatcaatgagccgaagaggccttcagacaagcccctgcgtctccccctacaggatgtgtacaaaatgggtggtattggaactgttcctgttggccgtgttgaaactgtaataatcaaccctggaatggttgtaaccttgggtcc

SEQ ID NO: 94937 - DNA, 521 bp, Zea mays
  unsure (1)..(521): unsure at all n locations
actgggntgatgcagtgacgtacagcagtngcantaccgcactggnctggaattcccgggtcgacgcacgcgtccgcctcggcatgttcagcaaggactcgcgccgccgactgctgtcgtcggagcaggatgagaagggctggcccgtgtggatgcggtcgccggagaggaagctgctggcgtcgggcaaccagcccaagccgaacgcgatcgtggccaaggacggtagcgggcagttcaagagcatccagcaggccgtggacgccgtgcccaagggccatcaggggaggtacgtcatctacgtgaaggccggcctctacgacgagatcgtcatggtccccaaggacaaggtcaacatcttcatgtacggcgacgggcctaagcaaagccgcgtgaccggccgcaagagcttcgccgacggcatcaccaccatgaagacccgcacctctncgtcgaggcgtccgggtcatctgcaggaacatgggttncacaacacgggcngcgccgagcggcacaagcgg

SEQ ID NO: 94938 - DNA, 538 bp, Zea mays
  unsure (1)..(538): unsure at all n locations
tagtgctagaccatgcactttgaaagtatcgtatgaccgctccggncttgaattcccgggtcgaccgacgcgtccggggatcgtcatccgtcccacccacaactgctccagatccaggcacggcacggcacggcaggggggccaacccaagcccggcttctcttctctctcgtccgtcccgcactcgccgcgacgtgacaagacaacgcgacgcgcgcgcatacgtcgtccaaggcacgcaggggccagccaagccaaccaatcgcgtccgtccgggtctggtggtggccggaatgggcctcctcgatcagctctgggacgagactgtggccggcccgcgaccggactccggcctcggcaagctccgcaagtactcctgcttctccccctactcctcctcctcctcgtcgtccatcctggcccccgcgccggcgccggcgccgtcggtgacgcgcagcatcaccatcgcccgcccgccgtcgctctccgtcgagtcctacagctcctcctccgtgccgtcctgcccggccagcacgcc

SEQ ID NO: 94939 - DNA, 534 bp, Zea mays
  unsure (1)..(534): unsure at all n locations
taaaggngtgtcatgcaggggggggatagtatgctctaccggtccggaattcccgggtcgaccgacgcgtccgccggtgcggaggtctgtcattggagggaggctcctctccgctgcgcgcgcgcgtcgcggcctgggcgagtttcctgctggttcctcgtccctcgggagagattttgcgatccttggcgttactgttcgattgcaaacagtattgctgcttctctgaggaggcattagggctatgggcagttgaactgaaccgccgcggcagaaatccattcgtgggagagagaaatcaaagaggagagtgagtgatcatggagcgcgtgattggagggaagtataagcttgggaggaagattgggagcggatcttttggggagctatatctcggtgttaatatacagaatggtgaggaagtgggaataaaattggagcctgtgaaaacaaaacatccacagctgcactatgaatctaaagtttatatgctactgcanggtggaaatggtatcccacacctcaagtggtatg

SEQ ID NO: 94940 - DNA, 529 bp, Zea mays
aagtacgtactcgagcatcgcgtgtgggggggcaagttattgctcgtccggaattcccgggtcgaccgacgcgtccgcccacgcgtccgggcttgctgagctggagctgatggatctagggtttgggttgcggtgatggtcctgcagcgcaggaggagctcatggcggaagctccggcgagccctggcggcggcggcgggagccacgagagcgggagccccaggggaggcggaggcggtggcagcgtcagggagcaggacaggttcctgcccatcgccaacatcagtcgcatcatgaagaaggccatcccggctaacgggaagatcgccaaggacgctaaggagaccgtgcaggagtgcgtctccgagttcatctccttcatcactagcgaagcgagtgacaagtgccagagggagaagcggaagaccatcaatggcgacgatctgctgtgggccatggccacgctggggtttgaagactacattgaacccctcaaggtgtacctacggaagtacagagaggtgcgtac

SEQ ID NO: 94941 - DNA, 523 bp, Zea mays
taagtcttgaatgcgagggtgagggtatagtaatactctactggtccggaattcccgggtcgacccacgcgtccgcaagcattgaagccgtagccgccgtcgccggacgagacaggttgaggcggggcggcaatggccgccggggaccttgaggtgctcaccgcgctcgacaccgcgaagacgcaatggtaccacttcaccgccatcgtggtcgccggcatggggttcttcaccgacgcctacgacctcttctgcatctccctcgtgactaagctcctcggccgcatctactacaccgtggaggggtccgcgacgcccggcaccctcccgccgcacgtgtccgcgtccgtcaacggcgtggccttcgtgggcacgctgtcagggcagctcttcttcggctggctgggcgacaagctcgggcgcaagaaggtctatggcatgacgctcatgctcatggtcctctgctccgtcgcgtcggagctctcgttcggccacaccccggcgtccgtcatggcgacgctgt

SEQ ID NO: 94942 - DNA, 536 bp, Zea mays
  unsure (1)..(536): unsure at all n locations
taatgggtgngcatgccagtggggagatgttacgctctactcggtccggaattcccgggtcgaccgacgcgtccgcggacgcttgggcggaaatgtggcatcaaagagtataaaactattggagttcgctgggccgggaggttaaaccagacactattagaaacatcatggacatgaaggcaaacttcgggtcatttgctgctgcactcaaggagaaagacgtatggttgacgaatgttgagccacatgatgaaccatgcaccctcaagataatctatgatagagggctgatcggcagcaatcacgactggtgtgaagccttctcaacctatcctataacatacgatcttctacacgcatgggcagtcttttctgaccttgataaaagaggctgcagtgccgatgacctgctccatgaaatggatcgtatcctcaagccgactgagtatgccatcgtgaggtacatgggcaacctcattgagtacatcaagaagtaccttcacgcacttaacttggaagcattgactgtcatggcc

SEQ ID NO: 94943 - DNA, 520 bp, Zea mays
  unsure (1)..(520): unsure at all n locations
tccgtctagatgtttggtgaaaagatcatcacctcgtccggaattcccgggtcgacccacgcgtccggatgggtcagtgtgtggagacaaaagaaaaacagaaagcatttgacattggccagaaatacgtacgacatgccgtggcctttgaaggtatttctcctgatgtgcctctctataaagtcaatgaagggaatgaaccttgcttcttcaggacatacttctcctgggatagcgcacgatccgtgattcatggaaactcttttgagaagaaactttcagttcttttcggaatgcgttcagagggtggcaataagggctcaggtgatggtgggccaactcaaagggcatcagccttggccgctctttcatctgcattgaatccatcgtcgcaaggaaaacagtcagatgagaagcccacaagctcagatgacagcgagcatactcaacgagcttcagcaatggctgccttgtcctctgnccttaatccatcgacaaaacctagcagcacacaggcaca

SEQ ID NO: 94944 - DNA, 525 bp, Zea mays
atgtgagtgaccatgatggagatagtacgcagtgctctaccggtccggaattcccgggtcgaccgcacgcgtccgcggacgcgtgggcgcgatccgacaacgcctccatccctagccgactgctgcaagcttcagggctcaagagtcagggcgccatggcgacagagacggagaccttcgcctttcaggctgagatcaaccagctgctctcactcatcatcaacaccttctattccaacaaggagatcttcctccgggagctcatttccaactcttccgatgcgttggacaaaatcaggttcgagagcctcactgacaagagcaagctcgatgcgcagccggagctgttcatccacattgtaccagacaaggcttcgaacacgctctccatcatcgacagcggcatcggcatgaccaagtccgaccttgtcaacaacctcggtaccatcgccaggtccgggaccaaggagttcatggaagcccttgctgctggcgctgatgtgtctatgattgggcagttcggtg

SEQ ID NO: 94945 - DNA, 527 bp, Zea mays
  unsure (1)..(527): unsure at all n locations
taatgtgactgagcatgacggaggatagtacgcactgctctaccggtccggaattcccgggtcgacccacgcgtccgagcgcctcacagaagtttaggcattccatgaagagggggaggaagagcagcaaggtgatggccatctcgattctggatgagcgtgaacctgaggaggtgcaggctgtggatgccttccgccagcttcttgtacttgaagagctgctaccatcgcagcatgatgactaccacatgatgctaagatttctcaaggcaagaaagtttgatatcgagaaggcaaagcaaatgtggtctgatatgctgaagtggagaaaggagttcggtgcagataccattctcgaggaattcgaattcgaagaagctgataaggtggcagaatgctaccctcaaggttaccatggggttgataaggaaggcaggcctgtctactttgaacggcttggacagatcgatgtgaataggctaatgcangtcactacaatggatcgctttgtcaagaaccatgtcaag

SEQ ID NO: 94946 - DNA, 530 bp, Zea mays
atatgggtgaatggcacggggggagaagtattactctaccggtccggaattcccgggtcgacccacgcgtccgcaaagctctctggcatctctgaaatcatccccgagatggagatctgcgattttgactttgaaccctgtggctactccatgaatgcgatccatggctctgcattctccacaatccatgtgacgcccgaggacggtttcagctatgccagttatgaggttatgggcttggatgccactgctctgtcttatggtgaccttgtcaagagggtccttcggtgctttggcccctcggagttttccgttgccgtgaccatcttcggcgggcgtggccatgccgggacatggggaaaggcacttggtgcagaggtctatgactgcaacaacatggtggagcaggagctgcctggaggcgggctcctcgtgtaccagagcttctgtgctgctgaagacgctgttgctacctcgcccaaatctgttttccactgctttgacggcgagaacgtggagagtgctcctcc

SEQ ID NO: 94947 - DNA, 538 bp, Zea mays
  unsure (1)..(538): unsure at all n locations
agaaaaggngtgccatgatgggtggggggagagtattgctctaccggtccggaattcccgggtcgacccacgcgtccgcccacgcgtccgggtgccaggccttgccttctcgcggcggtgctccctccctctgcgtccggcagcgacgcacgcaggcgcgcgcgcggacatgaaggggggcggtgccatgaggccgtcggctatgttctacgtccacgaggcggacgtcgtccagatccaccacttcctcgaggagtgctccctctgcgccaaatcgctcttcggcgacatcttcatgtacaggggtgacacgccgttctgcagcgaggagtgcagggagcagcagatcgaggtggacagggcgaagcaccggcggaagaagcgcgcggtggcgcacgcgctgtccgaacgcagcagggagcaccggcaccagcagcagctgcagcagcaccaccaccagcagcagcaaccgcagtcgcggaatgccggcatggacacccgccacccgtgggtcgacgccgggttcgccaggcccagg

SEQ ID NO: 94948 - DNA, 530 bp, Zea mays
  unsure (1)..(530): unsure at all n locations
agtatgtnctgtaaagtgtgggagagagggatattgatgacctcgtccggaattcccgggtcgacccacgcgtccgcttacgctatcctcctcgatcttaattacaggtcatagctaagcaggtctgacaggatgtggcggcagacatacgtggatgagcacctgatgtgcgagatcgagggccaccacctgacctccgctgccatagtcggccacgacggcgccgtttgggcccagagcaccgcattcccacagttcaagacagaggagatgaccaacatcatgaaggacttcgacgagcccgggttccttgccccgaccggcctcttactcggccccaccaagtacatggtcatccaaggcgagcccggcgctgtcatccgcgggaagaagggatctggaggcataactgtgaagaagacacggcatgcgatggtggtcggcatctacgacgagcccatgacccacggccagtgcaacatggtggtcgagaggctcggcgactacctcgtagagcaaggcctgtgaat

SEQ ID NO: 94949 - DNA, 519 bp, Zea mays
  unsure (1)..(519): unsure at all n locations
gataggtngatgaggagaatatggattgctctaccggtccggaattcccgggtcgaccgacgcgtccgcccacgcgtccggcgcccgacaagcccaaccccaacgagctcaccggcgccatcgtcggcgggcccgacaagaacgacggcttcgtggacaagcgcggcaactcctcctacaccgagccctgcacctacatcaactccctcgccatcggcccgctcgccgcgctcgccgtccgaggcgtgcagctcgtcgccacgcagtgatctatccccatggccatgcgtgtgtgtcccgctgtttcgtttcttccctgacatgacatgatttctactccgttactgatgattcattgattccggccgnccccgcattggtcattatattaggtcgacgtctgncggcgcgtgcgggggatccatcccaaatttttactctgctattggttctgtacgtccaagattataatgatactcataataatctcgtcgcataaaaaaaaaacaaaaaaaggaa

SEQ ID NO: 94950 - DNA, 534 bp, Zea mays
cgaatgggtgccatggaggggggggatggattgctctaccggtccggaattcccgggtcgaccgacgcgtccggcctactcgcttcaagcaacacccgaagcggtaacagcaaccaccaccaccaccggacctggcgtacgaccccttggcttgccactccactgaagcagggcgagagggagagagaggaaggaggaggagaagccatggcgaacgacggcgacgggaagggccgcgtctcgacggcgccaggggcagggtacgggtacgcggcgtacggaggctaccagggggcggaggagcggaagtggtggccgcggctcgtgcccaccgtcatcgtcgtctgcatcgccgtgttcgtcgtcgagatgtacgataacaactgccccaagcacgggagcccgctcggcggctgcgtcgccggcttcctccgccgcttctccttccagccgctccgcgagaacccgctgctcggcccgtcctcctccactttggagaaaatgggagctcttgactggaataaaattgtccat

SEQ ID NO: 94951 - DNA, 535 bp, Zea mays
agaaaggggtgccatgatgagggggagacagattgctctaccggtccggaattcccgggtcgaccgacgcgtccgcggacgcgtgggctgcatcccggttatgggcggcgtgcttgagcttggcacaactgacacggtgccggaggccccggacttggtcagccgagcaaccgcggctttctgggagccgcagtgcccgacgtactcggaagagccgagctccagcccgtcagaagcaaacgagaccggcgaggccgcagcagacgacggcacgtttgcgttcgaggaactcgaccacaataatggcatggacatagaggcgatgaccgccgccgggggacacgggcaggaggaggagctaagagaagccgaggccctgccagacgatgcaagcctggagcacatcaccaacgagatcgaggagttctacagcctctgcgaggaattggacctgcaggcgctaccgctaccactagaggacggctggaccgtggacgcgtccaatttcgaggtcccctgttcttccccgaacccg

SEQ ID NO: 94952 - DNA, 528 bp, Zea mays
  unsure (1)..(528): unsure at all n locations
ngaagtgctgaatgttgaggagatgaatatgctgcacccgtccggaattcccgggtcgaccgacgcgtccgcggacgcgtggggcatatctatctggctgtgtcctgcaagcaggcctagtacgccgcctgcggcgttcctcctattacacatataggcccctccctgcgtgtatgcttgttaccgtcgtgtcgaaccttgtactacgaggctccatcgaacatcgatggcttgcttctttatcagaacatgtttgaataaacgctatttggtaaaaaaaaaaaaaaaaaaaaaaaaagggcggccgctctagaggatccaagcttacgtacgcgtgcatgcgacgtcatagctcttctatagtgtcacctaaattcaattcactggccgtcgttttacaacgtcgtgactgggaaaacccttgcgttacccaacttaatcgccttgcagcacaatcccctttcggcaagctgcctaataaccaaaaagcccggaccgatcggcctttccaaccagtgggcaagctga

SEQ ID NO: 94953 - DNA, 529 bp, Zea mays
  unsure (1)..(529): unsure at all n locations
agaatggcgtgcgctgcctagtccactacgcagtgacgtaccggtccggaattcccgggtcgaccgcacgcgtccgcccacgcgtccgctccgtcccccaagcaaataaaagaagctagctagctaggcgtagaacgagatgacgacgcagggcggcaacaggtcgacgacgacgctggtcgccgccgtggccgtagttctggccgtggcggcggcgtcgtccctggccggcgtggcgtccgcggagaaggcgggcgggttcgtggtgacggggcgcgtgtactgcgacccctgccgcgccgggttcgagacgaacgtgtccaggagcgtggccggcgcgacggtggaggtggtgtgccggcacttcggcgcgtccaaggagacgctcaaggcggaggcgacgacggacgacagcgggtggtacaagctggagatcgaccaggaccaccaggaggagatctgcgaggtggtgctggcccggagccccgacccggggtgcgcggagatcgaggagttccgcgaccgcgcn

SEQ ID NO: 94954 - DNA, 524 bp, Zea mays
  unsure (1)..(524): unsure at all n locations
tgaaagctgtccatcgtaggggtgatgctctactcgtccggatttgcatttccgggtcgaccgcacgcgtacgggagcagcatcaggacgccgccgaggaggtgtaccacgtggacgatgtcgacgagggcaggggtgacggccgtggccacggcggcgccggccaggggaagctgtgcgccaggggccactggcgccccgccgaggacgccaagctcaaggagctcgtcgcgcagttcgggccccagaactggaacctcatcgccgagaggctggacggcagatcagggaagagctgccgcctgcggtggttcaaccagctggacccgcggatcaaccggcgcgccttctcggaggaggaggaggagcggctcctggcggcgcaccgcgcgtacggcaacaagtgggctctcatcgcgcgcctcttcccgggccgcaccgacaacgccgtcaagaaccactggcacgttctcatggcgcgcaggcagcgggagcactcgggcgcgctccgncgncgcaagccn

SEQ ID NO: 94955 - DNA, 543 bp, Zea mays
  unsure (1)..(543): unsure at all n locations
ntgaaagcgtgtgaaactggatggttgggggagaagggagtgctgctaccggtccggaattcccgggtcgaccgacgcgtccgcccacgcgtccggcaggaaaaggagcgaagagagagagagagagagagacgcaggcccgccggcgacgatcgaggagggaggaaccagagacccggcggcggcgacgatggctccgcgcagctcatcggcggcgacgtgcctgtgcctcgctctcgccgcggccacgctggcgctggcccacggtgcgcaaggaggaggaccatcggcatcggcggcggacctggacaaggtcacggccgagaccttcttcgacatcgagatcgacggcaagcctgcaggccggatcgtgctgggactgtttggggacaccgttcctaaaactgcagagaacttccgagcactttgcacaggggagaaaggaattgccaagtccggcaggcctctggggtacaaggggtcgacgttccacaggatcatcccggggttcatgatccagggaggcgacttcaccaacggcac

SEQ ID NO: 94956 - DNA, 537 bp, Zea mays
  unsure (1)..(537): unsure at all n locations
ttaatattggtgngatgttgattgggagggatagtatgactccaccggtccggaattcccgggtcgaccgacgcgtccgcccacgcgtccgcacaacctcttctcccctgtttcctctcgtgcgttctccgcaggagcgaggagggctcgcggcagcggcagggtctccggtgtttttgttccagaatctgtagcaaatggttgacggcgaggacatccatccccttgtttgtgacaatggaactgtcatggtcaaggctggttctgctggtgacgatgcgccaagggctgttttcccaagcatcgttggacgcccacgtcacactggcgtgatggttgtcatggggcagacggatgcgtatgtcgtcgatgaggctcagtccaacaggggtatcctgactgcgaagtacccgatcgaacatggcattgtcaacaactgagatgatatggccaagatctggcaccacaccatctattacgaactccgcagtgtgcctgaagagcacactgtgctgctgaccgaatccccatcaaccc

SEQ ID NO: 94957 - DNA, 534 bp, Zea mays
  unsure (1)..(534): unsure at all n locations
cgaatatgtgcgtgaatgttgagaggaagaatacgcatctactcgtccggaattcccgggtcgacccacgcgtccgcgctcgggcaccagtttgaaccgcttcccttcccttcgattccggggttcctccttacccgattgcccccgaaggaccgggccggcggcggcaaaggcaaaggcaaaggcaaaatgttcggccccccgccgaaaaaaagcgacaccaccaagtactatgagatcctcggggtgcccaagtcggcgtcccaagacgacctcaggaaggcctaccgcaaggccgctatcaagaaccaccccgacaagggcggtgaccccgagaagttcaaggagctcgcacaagcctatgaggttttgagtgatccagagaaacgtgagatttatgatcagtatggtgaagatgcccttaaagaaggaatgggtggttgtggatcccatgctgatccatttgacattttctcatcattctttggaccctattttggaagaagtcngtgaaaccacatgggaagaagggaa

SEQ ID NO: 94958 - DNA, 525 bp, Zea mays
tgaaatatgggtgaatgatttttggagggagaatgaataactcgtccggaattcccggtcgaccacccgtccaaccggaccaagcttctaatggaggtaatcctaacttgcatgggaaggacctgtgaaaatcgatggccaggtccaaggaccaggaccatgccctttttgtggactgagaactggacagcacagtccagagtattcggtgacccaccatcccagcgttctgctgaggacattgcatttgccgtggcgcgcttcttctccgtgggcggtactatgacaaactactacatgtaccatggtggaacaaactttggaaggacatctgctgcctttgtgatgccaaaatactacgacgaggcacctctcgatgaattcggtctgtacaaggagcctaagtggggccatctgagggacctgcacctggcgctgaagctgtgcaagaaagccctgctcttggggaagacatcgacggagaagctgggcaagcagttcgaggcaaaggtgttcgagatcccc

SEQ ID NO: 94959 - DNA, 512 bp, Zea mays
tgaaggtgacctccggaaagtatgatgctcaccggccggaattcccgggtcgaccgcacgcgtcgcgcatgggcgtctccaagtccacctccaagtgcgccaccgcgcatccagggcatcggctgtccttcggcggcatgatcttcgccctcgtctactgcaccgacggcatctccggcgggcacatcaacccggcggtgaccttcgggctgttcctggcgaggaagttgtccctcaccagggcggagttttacatcatcatgcagtgcctgggcgccatctgcagcgcgggcgtcgtcaaggggttccagcaggggctgtacatggtcaacggcggcggcaccaacgtcgtcacgcacggctacaccagaggcgacagcactcggcgccaagatcgtctgcaccttcatcctcgtctacaccgacttctccgtcatccgacgcaagaggaacgccagggactcgcatgtgccgatcctggacgcttttcattcggattggccgagttcttc

SEQ ID NO: 94960 - DNA, 528 bp, Zea mays
tgtgaagggtgccatgcgtggagacggtatgagtattgctctaccggtccggaattcccgggtcgacccacgcgtccgggcgatgtcaatactggtttgacagaaagctatatccaggaaaacttgaggtccagtttggatgttccaggagcagctagcatgtctgatcagttttctgagctttctttggagaatgatgcttgcataatatgccaggaggagtataaagctaaagaacttataggaacccttgaatgcggtcacaagtaccatgtgaactgcatacagcaatggttgatgatgaaaaacctgtgccccatatgcaagacgacagctttgtcatcagatagaaggaacggatgaccgtcgccaataatgttgctggctgtttaccgcgtggcatattaccgtggattttgtatatagacatggttgcctctatttgcccgtcccctttgctgtggacataaactgagcttcgaaacactgtacagatattctgtaggatgctttagacgttaaatggca

SEQ ID NO: 94961 - DNA, 528 bp, Zea mays
tggaaatggtagaatgtttgtttgtggggaaggatatacttgtccggaattcccgggtcgacccacgcgtccgcccacgcgtccgcccacgcgtccggcagttcctcgtcgtggcggtggaagccgccaagagcgccggcgagattattcgcaagggattctaccagaccaagaacgtcgagcacaagggccaggtggatttggtgacggagacggacaaggcctgcgaggacctcatcttcaaccacctccggaagcacttcccggaccacaagttcatcggggaggaggagtccgcggcgctcggggccaccgctgacctcaccgacgaccccacctggatcgtcgatcccctcgacgggaccactaatttcgtccatggtttcccatttgtatgtgtctccgttggcctcaccattgggaaaattcccactgtcggagtcgtcttcaacctcatcatgaacgagcttttcacggcggttcgtggaaaaagggctttcctgaatggctctccaaattaagcatcat

SEQ ID NO: 94962 - DNA, 531 bp, Zea mays
  unsure (1)..(531): unsure at all n locations
gtagaagggttgaacgtgaggtggacggcttcgtaatactcttcngnncttganttccngggtcgacgcacgcgtccgttccacgacgccaacctggtggagatgtaccgcaagatcagcagagccgacgtcaagtacgcgcagtggttctcccctgagctccggcggttgatgcccaagctcctcgaaccgaacccaaacaacaggatcacgatcgagaagctggtcgagcacccctggttcaagaaggggtacaggccggccgtcatgctggcacagccgcacggctccagcagcctcaaggatgtccaggtcgccttcagcaacgccgaccacaaggacagcaccaccaaggtggaacagccggcggacagctccttgaagccggcgagcctgaacgcgttcgacatcatctcccactccagagggttcgacctgtcaagcctgttcgaggtggaccaagagcagaaggccagcaactcgcggttcatgacccagaaaccggcgtcggcgatagtgtcaaagctggan

SEQ ID NO: 94963 - DNA, 529 bp, Zea mays
agaaatgggtgagcatgatggtggtggtatagcagcgctctaccggtccggaattcccgggtcgaccgacgcgtccgcccacgcgtccgggcgggcggcctccttttccacctcctgctggtgccagggccgggagggcgtcgcggaggtggcgcgcatggggctcgccggggacgggtcggcggacaccgcccacctcagtaataatgaaaatgggcggttcatttatggagttgcgagttctcctggtaaaagagcatcgatggaggacttctatgaggcaagaatagacgacgttgatggagagaaaattggaatgttcggtgtatatgatggtcatggaggagtccgagcagctgagtatgttaagcagcaccttttcagcaatgtaatcaaacacccaaagttcatcactgataccaaggctgctatcgccgaaacttacaaccttacagaatcagaattcttgaaagctgatacctgtcaaactcgaaatgctggctcaactgcttaaccagttataatggaa

SEQ ID NO: 94964 - DNA, 527 bp, Zea mays
  unsure (1)..(527): unsure at all n locations
tgagagtttaccatgaaggcggggtgaagtattactcctctngnnctggaattcccgggtcgaccgcacgcgtccggtcgggcgccacgtccgtgttcggcgcggcgcccgtggaggtctccgtgaaggtggccgggatccactggcactacggcagccggtcccacgcccccgagctcaccgcgggctactacaacacgcggcgccacgacgggtacctcaccatcgcgcgcctcctggcgcgccacggcgccgtgctcaacttcacctgcgtggagatgcgggaccacgagcagccgcaggaggcgcggtgcatgccggaggcgctggtccggcaggtgggcgccgcggcgcgcgccgtcggggtgggcctcgcgggcgagaacgcgctgccgcggtacgacggcacggcgcacgaccaggtggtcaccacggccgccgagcgcgccgacgaggaccggatggtggccttcacgtacctgcgcatggtgcccgacctcttccactcggacaactggcggcgcttc

SEQ ID NO: 94965 - DNA, 537 bp, Zea mays
  unsure (1)..(537): unsure at all n locations
atagacgcctgtatgttagtagggggatatggattgctccaccggtccggaattcccgggtcgaccgacgcgtccggcccagcgtcggagatctccgccgccatggagacgctggccagcgccatgcggcgcgagaaccgccggtccaaggccccgccctcctcctctgcttcctccgccctcgcctcggtcagggtccctctcgtcatggccttcctctcctgcctcgcctggctctacgtctccggccgtttgtggcaggacgcgcagacccgggcgatcctgtccggcctactcgagaagagctctaccagcgtcccgaaggtgctctcggtggaggacangcttaggaacctagggtgcaaggcgattggaaggaaaattgctgaggcggagatggacctgaccaatgccaagagcgaggtgtacctgtgggggacaggactgcagctgtggactccgacatgagcaacagcttcttgaccgcctttgaagttacaactggataggcttccggcttcagacggacggccttcc

SEQ ID NO: 94966 - DNA, 525 bp, Zea mays
  unsure (1)..(525): unsure at all n locations
gggcgtggtggatgtacatggtagggacatgataatgctctactganntccaattcccgggtcgacgtacgcttacgcatgatgtcatcgcagccattggtgatcttatggatgagattgactcatgctatgacccgatttctgagcaagctgtggaacttattcaccaaaatgaggtaatcctaactctaggtcgttctagaaccgtcaaggagttcctgtatgccgcgaaagaaaagaaacgatcttttcgtgtatttgttgctgaaggtgctccaagatatcagggccatgttctcgcaaaagagctggttgagaaaggtgtacaaactacagttataacagattcagcagtttttgctatgatatctcgagttaacatggtcatcgttggagcgcatgctatcatggcaaatggtggagtcattgcaccagtagggatgaacatggttgcacttgctgctcaaggcatgctgtgccttttggtgtggttgcttgtagtcacaagctgtgtccgttgtatcc

SEQ ID NO: 94967 - DNA, 524 bp, Zea mays
  unsure (1)..(524): unsure at all n locations
tggcggctgaatgtttgtagagggaaatgatcactcgtccggaattcccgggtcgacccacgcgtccgcccacgcgtnccgcgtctaactcacccggccttcacgcctccctcaccaaataaggtcccggccttttccgacattcacaggggggacaggaaatcagcggccatggcctcgattccggcgacgaccttcgccgtcatcttatccgtcctcttctgtgccgcggctggcaccgccgtcgacaacgacctccccgactacgtcatccagggccgcgtctactgcgacacctgccgcgccgggttcgtgaccaatgtcaccgagtacatcgcgggcgccaaggtgaggctggagtgcaagcacttcggcaccggcaagctcgagcgctccatcgacggggtgaccgacgcgaacggcacgtacccgatcgagctcaaggacagncccgangaagacctctggcaaggtggcttggtggaaagcccgcgcaagactgcgacccagtgcangcngacagg

SEQ ID NO: 94968 - DNA, 528 bp, Zea mays
  unsure (1)..(528): unsure at all n locations
atgaaagctggntggcctgcnatgatcgtattcttcaactccctgaattccattccgggctcgaccgacgcataacgttaattggttgtccaccacatttttcattggccatctaggttttaaaatccggtgttcggcgaaaacgctacccgtgaggactataaccctgaaggtggattcgtttgacaccattgacaacgttaaggccaagatccaggacaaggagggcatcccccaaaaccaggacgggctcattttcgctgccaaacagcttgaggacggttgcacgcttgctgactacaacatccagaacgagagcacactccaccttgtgctccgtctcacgggaggcatgcagatatctgtgaaaaccctgaccggcaagactatcaccctagtggtgtagtcctctgacaccattgacaacgtcaaggccaaagatccaggacattgagggcattcctccagaccaatagcggatgatatttgctgtgaacaggttcattaacggcgcacgctttgcgactt

SEQ ID NO: 94969 - DNA, 529 bp, Zea mays
  unsure (1)..(529): unsure at all n locations
ggggacgggtacgatgataagantatattgcactgctctaccggtccggaattcccgggtcgaccgcacgcgtccgctcgccctcgttgcggtcgtccacatccttttctctcctcctcgccggcccaacctgattgttcttcaaccaagaggaagaaaggaaggaagggaccggaagcatcagccatgtcgaactcggcgtcgggaatggccgtctgtgatgaatgcaagctcaagttccaggagctcaaggcgaagaggagcttccgcttcatcgtgttcaagatcaacgagaacgtgcagcaggtggtggtggacaggctaggggagccaggcgagagctacgacgccttcacggcctgcttccccgccaacgagtgccgctacgccgtgttcgattttgacttcgtcactgacgagaactgccagaagagcaagatcttctttatctctggggccccggatacatcgagggtgagaagcaagatgctgtacgcgagctccaaggaccggttcaagagggagctgg

SEQ ID NO: 94970 - DNA, 548 bp, Zea mays
  unsure (1)..(548): unsure at all n locations
agggcgacggggnnnnnnctgaagacgactctcgatgcattactcgcccggtccggaattcccgggtcgaccgacgcgtccgcccacgcgtccgcccacgcgtccgcccacgcgtccgcaaggagatgcagctgatgaagctggaggaggagcgtcggctggaggaggccaggcacgccgaggagactgctctggcactggccgagatggagaaggccaagtgccgcgcggccatggaggcagccgaggcggcgcagaggctggccgacctggaggcgcagcggcgccgcaacgccgaggtgcgcgcgcgccgggaggccgacgagaaggtgcgcgcgctggatgccatctncaaccacgacttccggtaccgcaagtaccacatcgacgagatcgagatggncacggagcgcttctccgacgagctcaagaatcgcgagggcggctacggccccgtctaccgcgcctccctggaccacacncccgtcgccatcaaggtgctccggcccgacgcgcaccaggggaggaaagcagtccagcangaggtg

SEQ ID NO: 94971 - DNA, 495 bp, Zea mays
  unsure (1)..(495): unsure at all n locations
aggggnnnnaacctagtactattacctcagactctcncggttcggaattcccggctcgacccacgcgtccgcggacgcgtgggcgggttcgtcacccacggcaaggccatccccacgcacgccgtcggcgggggcatcagcgagctggagggcgtcgtgttcgaggtcgtcatcaccttcgtgctcgtctacaccgagtacgccaccgacgccgacccctagaagggctcgctcggcaccatcgcgcacatcgccatcggcttcatcgtcggcgccaacatactagccgcggggcccttcagcggccgctgcatgaaccccgcccgcttcttctggcccggcgtcatcgcggacaacttcgacggacactgaggctactgggtctgggccgctcgttcgagagcggactgcgatgacctctgtctacgggcgacggtctagatccgcggcttcttaacatcacggtacatgaactagtgactactccctaatgtt

SEQ ID NO: 94972 - DNA, 472 bp, Zea mays
  unsure (1)..(472): unsure at all n locations
cagttnctggaagtggggaggagggaggaatctcccggtccggaattcccgggtcgacccacgcgtccggccttgcccggtgtgcaccgacgaaaccagcgacagcagcacagagacgaacggcgtgggatcctcctgcctcagctgcttcctagctgggggtgctctctaccgtttcgagtacgcagtcaacccggcgctcttcctcgccaaagcgcgaggagggacgtgcacgctcgctccctctgaccctgacgacacggtggctcgccgcgccagatacctgctgagcaacggtttcaggtgctacaacctgttcaagagcaactgcgaggacttcgcgatatactgcaagactggccttcttgtcgctgagcagggcgttgtcgggcagagcgggcaggctatctccatcatcggtggacctctcgccgcggtggtctcgaccccattccgcttggctaccacgaac

SEQ ID NO: 94973 - DNA, 480 bp, Zea mays
  unsure (1)..(480): unsure at all n locations
gtggtnntaatattgggggggatgagggcatgctccaccgctccattcccgggtcgacccacgcgtccgcgctctctaccgtccgagaccccaagcaccagcgcggcggcgggggcggaggcggcggcgaccatggctgtcggaaagaacaagaggatctccaagggaaagaagggtggcaagaaaaagaccgtcgaccctttctctaagaaggattggtatgacatcaaggcaccgtcggtgttcagtgtgcgcaacatcgggaagactctcgtatccaggacacagggtaccaggattgcttctgagggtctgaagcacagagtctttgaggtttgcctagctgatcttcagggcgacgaggatcaagcttacaggaaaatcaggctccgtgctgaagatgtgcagggcaagaatgtgctcacaaacttttggggcatgaattttaccactgataaactcagatccctagtgaagaan

SEQ ID NO: 94974 - DNA, 469 bp, Zea mays
gtgtgctgattgggggagggagatcgctctaccggtccggaattcccgggtcgacccacgcgtccgcccacgcgtccgcccacgcgtccgcgaataacacagttgagcgcgacgatgggatccgtcgctaataacatcatggtcgtgggtgtcgtccttgcagcgctcgtcgccggcgggtcatgcgggcccccgaaggtgccgcccggtcccaacatcaccaccaactacaacggcaagtggctcaccgccagggccacctggtacggtcagcccaacggtgccggcgctcctgacaacggcggtgcgtgcgggatcaagaacgtgaacctgccaccctacagcggcatgacggcgtgtggcaacgtccccatcttcaaggacggcaagggttgcggctcatgctatgaggtgagatgcaaggaaaaacctgagtgctcgggcaatccagtcacggtgtacatcactg

SEQ ID NO: 94975 - DNA, 476 bp, Zea mays
ttgatctgtgttgctcggcgatagggggattcatctaccggtccggaattcccgggtcgacccacgcgtccggcgggatcagcgttgctcaacgctctcgtcctccgcgcgccatccccgtcgctctgggcctcgtctaaggtccgcagcgccggcgcctttgtgttctcgaacccaccgcgcttcccatccctgcgttctgagcgccgcgtcgcccttccgcgggcggcggcgggcggtgaccccgaggacgagtgggtgccggagcctgacggtgggtccgctgtcactgggaccgcggtggctgaggcgccggaggcgggagaggtcgcagagctcaaggcgcagctaaaggatgcgctgtacggcacagagcggggcctgcgggcgtccagcgagtcgcgggccaaggtgttggagctcatcacgcagctcgagacgcgcaaccccacgccggcgcctaccgaagcgctgac

SEQ ID NO: 94976 - DNA, 472 bp, Zea mays
agtggctgctccgtaggattagatattcgctctaccggtccggaattcccgggtcgacccacgcgtccgaaggagtcctgggcgctctcccatcagttcaacctggtgctgtacggcaggatccagggcaagggcaagtgcaccgagcagaacggcatcacggcgccggccatgaaggtctgccaggaggagtgcgacaaggcgtacgtggtgaaggcggtcgaggtcaccaacgcctgcagcgtcacctgcgccaaggacaagaacccgcgcctcatcgagaactgcaagaggtcctgcacccctactccttcttgaagcgaaaccccttgaaatgaatgaaccatgcatgcatgcatgtatgcatgcgccggtgtgacctggcgttcagctcaggcgctgagcgagtctatacgtacgtcgtcaccgactggccacgcatgcgataaccatctgatatggacggaactat

SEQ ID NO: 94977 - DNA, 480 bp, Zea mays
  unsure (1)..(480): unsure at all n locations
ttgttcnctgttattgttggggaatgaagatactcctcgcggtccggaattcccgggtcgacccacgcgtccgcacaccacaccacacctgctcgcttccactccgctcgtctgacatctcgtcccgtcgttgcgtttcgaagcctcgcgagccccgacgatggccaccgccgcggtgtcggtcgacgagaagctcgacaagcttcgcgccgaggtcgccaagctcgaccagatcagcgagaacgagaagtccgggttcatcagcctcgtgtcacgctacctcagtggggaagcggagcagatcgagtggagcaagatccagacccctacggatgaggtggtggtgccctacgataccgtcgcgtagcctcccgaagatctcgaggagacgaagaagctgctggataagctcgttgtgctcaagcttaacggagggctcgggacgaccatgggctgcactgggcccaagtatgtcattga

SEQ ID NO: 94978 - DNA, 476 bp, Zea mays
  unsure (1)..(476): unsure at all n locations
ttgtnctgagaagttggagggaaggaggagactctcccggtccggaattcccgggtcgacccacgcgtccgcccacgcgtccggtgatttgaaataattgggaataaatagttcgtgaatccctgaagcgtgcatatatatattcctgccaagataaaggtaatggagtcgtcacgcaggttccagccggccgtcatcctgcttctcctgctcattgtgtccaccgatatggcacaggcaagggaatgcgagaagtacagtgagcgatttgttggggcatgcatgatcgcagacaactgcgccaatgtgtgccgcggtgagggcttcttggccggcaggtgcagcaccttccgccgccgctgcatctgcactaggcagtgctaaacaagatcgctcgatcgctcgccatgcatcgacaacctattcttaataacgttcattatctcgttcttatttatgacgaatgtcatgtatgt

SEQ ID NO: 94979 - DNA, 477 bp, Zea mays
  unsure (1)..(477): unsure at all n locations
agttgnctgttctgtgggcgtaagggagtgattgctgtaccggtccggaattcccgggtcgacccacgcgtccgcccacgcgtccgacctcatgtaccccttgtgttgtatataaatggaaatggaggggtacttgagcgcatgaaggacacaagagttgatgttattgggcttgactggacagtggacatggctgatggaaggaagcgccttggtaatggaattagtgtacaagggaatgtggatccagcatttctgttctcaccattaccagtactgactgatgaaattcgtagggttgtgaaagcagctggtacaaaaggtcacatacttaacttgggccacggtgtacttcagaaaacacccgaagaagctgtagcacatttctttgatgtcacaaggagcttgagatatgacacccatttccaaggttctgttgctgaaggattgcagcctgtagcttgattcgtagtgttn

SEQ ID NO: 94980 - DNA, 475 bp, Zea mays
  unsure (1)..(475): unsure at all n locations
ttgttnttgccatcgactataggcatctctcgtaccggtccggaattcccgggtcgacccacgcgtccggtgaatcgcagttcaatacaagttggcatgacagcaatcaagtacatccctcaggcgagtcatgaacttcaggcggaagagcacaattggttggagcgttggcaatatattacttgatctcacaggaggggtgctgaatttttgtcagatgggtgtgcagtctatagatcaacatactttggtgaatttctatggaaacattgtgaaaacccttctttcattggagacggttttctttgatgtcctgatcattatccaacactacgtgttgtaccctgtctagaaggacgagaatggtaaggcaatcatttctgaaagggtatccccccttatcaaggcttcggaccagccttaaaaagatcacgtatgaactagctgtggttatattgccggcaatgcattcacc

SEQ ID NO: 94981 - DNA, 472 bp, Zea mays
  unsure (1)..(472): unsure at all n locations
cgttnttngattgtggggaatgggtgtactctcccggtccggaattcccgggtcgacccacgcgtccggcgaagcgagcaaacccagccatggagaaggcgatcgatcggcagcgggtcctcctggcgcacctcctcccctccccctccgccgcctcctcgcagcctcagcttgcggcgtcggcgtgcgcggccggggacagcgccgcctaccagaggtcctcctccttcggggacgatgtcgtcgtcgtcgctgcctacaggacgccgatatgcaaggccaagcgaggaggcttcaaggacacctacccagaggacctcctcactgttgttctcaaggctgatctggacaacactagaatcaatccagctgacatcggtgacatcgtcgatgggacggtgctcggccctggttcccagcgtgcaaacgagtgcaggatggctgcgttgtttgctggcttccctgaaaccgc

SEQ ID NO: 94982 - DNA, 473 bp, Zea mays
agtcctctgatggcggaggatggggaggattgctgtaccggtccggaattcccgggtcgacccacgcgtccgcgccatgggattcggaatggggaataataacaacggggcgagctcctcgtcgtcgcggctggaccccgcggcgccgctgctgccgcgccacggcagcagcgggggccgcgagggtggtggcctgtcgtcgcagcccaagacgttcgccaacgtcttcatcgcggcggtcggcgccggcgtgctggggctgccgtacaccttctcgcgcaccgggtgggcggcggggtcgctgctgctcttctccgtcgccgcgctcaccttctactgcatgatgctgctcgttgcgtgccgacgccgcctcgccgacgagcaccctaagatcgcctcgttcggggacctgggggacgccgtgttcggcgcgcacgggcggttcgccgtggacgtgatgctggtgctcagcc

SEQ ID NO: 94983 - DNA, 481 bp, Zea mays
  unsure (1)..(481): unsure at all n locations
tagttnctgtgtaggggggggatggaggattgctctaccggtccggaattcccgggtcgacccacgcgtccgcccacgcgtccgcaagacggtgctcgaggtcaacagccacgggcacgccagcgtggcgtttgtgaacaccaaattcgtaggatgtgggcacgggaccaagatgaacaaggcgttcacgctcgagaagcccatggacctgaaaaagggcgtgaaccacgtcgccgtcttggcgtcgacgatgggaatgatggacagtggcgcttacctggagcaccgtctggccggcgtcgacagggtgcagatcaagggcctcaacgcgggcacgctggacctgacgaataacggctggggccacatcgtcggcctcgtcggcgagcagaagcagatctacaccgataagggcatgggcagcgtcacatggaagccagccgtgaacgacaggccgctcacctggtacaagaggcacttc

SEQ ID NO: 94984 - DNA, 484 bp, Zea mays
  unsure (1)..(484): unsure at all n locations
atgtgtgtntggtattgctagggatggtagtactgttgtaccggtccggaattcccgggtcgacccacgcgtccgcccacgcgtccgagtccactcttctggtcctctcgcttttgcgctcccttggtcgtgttcgtcccctgctcgtctcccgtccgttttcggatgcccactccgaccaaaaccctagctacttcgtgaaggtggaggggaggagatggcggcagcggatgggcgcagcggcgacttccgggtcaggggtggcagcgttgggggtcggatcgaccgactggtggtggagaacttcaagtcgtacaagggtgagcagacgattgggcctttcgtcgacttcacagccatcatcggccctaacggcgccggcaagtccaacctgatggacgccatcagcttcgtgctgggcgtgcgctcaacgcaccttcgaggcgcgcagctcaaggacctcatttacgccctcgacgaccgc

SEQ ID NO: 94985 - DNA, 479 bp, Zea mays
  unsure (1)..(479): unsure at all n locations
ctgtngtggcatccgactatgtanactgcatcggttcggattcccggtcgacccacgcgtccgncaaccgtcggccaagcgtccgatcttcatcgacatgaagtactgccccaacaaggggtgtactgccaacggcgcctccaaggtcaccgtcaaggatgtcaccttcaagaacatcaccggcacctnctgcaccccggaggccgttagcctgctctgcactgccaaggtcccatgcaccggcgtcaccatggatgacgtcaacgtcgagtatagcggcaccaacaacaagaccatggctatatgcacgaacgccaagggcagcaccaatggttgcctaaagagcttgcatgcttctagaccctncatcgactgacccatctctctagttataatttttctctcgtcaaaaaaaaaaaagcaactttaaagcttcgccattaaaggaccttatataaaaaaaaagggccgcccgttta

SEQ ID NO: 94986 - DNA, 470 bp, Zea mays
acgtctgacatagaaatatagtatgctcgcccggttcggaattcccgggtcgacccacgcgtccggaccgagagtatcgaagctgtcaggatgtccaagcgcgccggatggggagtgatggcaagccacaggagtggcgagacagaggacaccttcattgctgacctctcagttggcctgtctacgggccaaatcaagacgggagctccttgccggtctgagcgcctggccaaatacaaccagctgctcaggatcgaggaagagctcggtgatgccgcggtctacgccggagcaaagttcagggcaccagtggagccctactaagaaaggaagaggatggggatgttttcttgtggagctatactagctcgctgctgccttttgttacaatgtttgtacggtcgcaataaatgtatggtcgtgtttgctcgagagctactcaggtgattttgtcgtgggagcaccaaaag

SEQ ID NO: 94987 - DNA, 504 bp, Zea mays
  unsure (1)..(504): unsure at all n locations
taggtgctgtgctagtagagggacggtatgctcgtcccggtccggaattcccgggtcgagccacgcgtccgcgcggctctcctctgccccgcaccggcaccgctagggttttgccgccgacctctcggtggcttccgggctccgcgaggcaaccgtccggaccggccggtcgaaatggtggatgtggaggaggtcgggaacaagatgcaatcgcagatgcgcctgcacgcggagccggatgacgccgccgccgacctccccctcccggcgctcttcgacagggcgtcgcggcttcacgccctggcctccagctccgccctcgaccaggatgggatccgcaccggggttgagctgctgcggcgctgcgacgagatggtcggcaggctcggtcttttctcccccaacgagaccaatgacgacgtcttcaccgcaaacctcaagtacctactcgttccataataccttgggggaatgaccgaaaaagattgcgcanggnggatctgt

SEQ ID NO: 94988 - DNA, 520 bp, Zea mays
  unsure (1)..(520): unsure at all n locations
nagttcattagtggtngctgagcctacgctctatttgtatgttagcactcccactggttcggaattcccggggcgacccacgcgtccgggcttcggcatcatggccggcggcctcgtggccatcgtcgtgtccgcgtggggcagggccagtttccccgccccggcctacgccgtcgaccccgccgcgtccacgccgccgcaggccgacttcgtgtggcggatcatcctgatgctgggcgcgatgcccgcggcgctcacctactactggcgcaccaagatgcccgagacggcgcggtacacggcgctggttgccaagaacgccaagcaggccgcggctgacatgtccaaggtgctgcaggtggagatctcagccggcgccgccgaggagggcgccgcggctgcgactgcgactgcgactgagcctgcgccggcgtccgcgtccgcgtcttttgggctcttctccggggagttccttcgncggcacgggcttgaccttctgggcacgttcctgaactgggtt

SEQ ID NO: 94989 - DNA, 501 bp, Zea mays
  unsure (1)..(501): unsure at all n locations
tatgttngtgtaatgtggggaggaaggatagtatcctccggtccggaattcccgggtcgagccacgcgtccgctttcgttatcctcctcgatcttaattacaggtcatagctaagcaggtctgacaggatgtcgtggcagacatacgtcgatgagcacctgatgtgcgagatcgagggccaccacctgacctccgctgccatagtcggccacgacggcgccgtttgggcccagagcaccgcattcccacagttcaagacagaggagatgaccaacatcatgaaggacttcgacgagcccgggttccttgccccgaccggcctcttcctcggccccaccaagtacatggtcatccaaggcgagcccggcgctgtcatccgcgggaagaagggatctggaggcataactgtgaagaagacagggcaagcgatggtggtcggcatctacgacgagcccatgaccccccgccagtgcaacatgggtgtcgaaaggctcgcgactn

SEQ ID NO: 94990 - DNA, 495 bp, Zea mays
  unsure (1)..(495): unsure at all n locations
catgtnctgtatggtggaggaatggatgatatcctccggtccggaattcccgggtggggccacgcgtccgcccacgcgtccgaacacccccaccaagacccgtgggcttggagctggcaaggctgggcgcctcacctactgggagagcgctgcccgcatgattgcggatgtctccaagtctgacaagattgttgttgagaagtccactgtccctgtcaagaccgctgaggctattgagaagatcttgacccacaacagcaagggcatcaactaccagatcctttccaacccagagttccttgcggagggcactgccattgaggacctgttcaagcctgacagagtgcttatcggtggccgggagacccctgagggcaagaaggccgtccaggctctcaaggatgtgtacgctcactgggttcccgaggacaggatccttaccaccaacctgtggtctgctgagctcttcaagctcgtgcaacgcgtccttgcaca

SEQ ID NO: 94991 - DNA, 502 bp, Zea mays
  unsure (1)..(502): unsure at all n locations
nagggtgtattgactgcggaggaaagaaggtagtgctcgtaccggtccggaattcccgggtcgacccacgcgtccgatccaatccagtcgcctgattgcattgggatcccatggccaagctcgccgtcgtggtcctcctcgccgtggccgcgtccgccacagtgccggcgcacggccgcgataccccgactgagatcaagctcatcaaaggcacggacgcctccggcgtgggcgacgacagcatggagtgcgtgtacacggtgttcatccggacggggtcgatcttgaaggccgggacggacgcgaacgtcacgctggagctggccgccgcggacggcaacggcgtggggatctcgaacctgcccgcctggggcgggctcatggggcagggctactcctacttcgagcgcagcaacctggacatcttcagcggccgctctagaggatccaagcttacgtacgcgtgcatgcgacgtcataactcttctatagtgtcacctaa

SEQ ID NO: 94992 - DNA, 506 bp, Zea mays
  unsure (1)..(506): unsure at all n locations
agttntagaggtggtgnccatgcgggaggggaaggcatctactcgtccggaattcccgggtcgacgcacgcgtccgcccacgcgtccgggaacgcacacaccgtccggtccccgatctccgatcccctcgtcgagccaaagatgcagatcttcgtcaagaccctcactggaaagactatcaccctcgaggtggagtcttctgacaccattgacaacgtcaaggccaagatccaggacaaggagggcatccccccggaccagcagcggctcatctttgctggcaagcagctcgaggacgggcgcacacttgccgactacaacatccagaaggagagcaccctccaccttgttctccgcctcaggggaggcatgcagatcttcgtcaagaccctcactggaaagactatcaccctcgaggtggagtcttctgacaccatcgacaacgtcaaaggccaagattccagacaaggaggcattccttcagaacagcagcggttcattttggc

SEQ ID NO: 94993 - DNA, 510 bp, Zea mays
  unsure (1)..(510): unsure at all n locations
gggtntaagagggngttgctcatggggggggagagatagagcatcctcggtccggaattcccgggtcgacccacgcgtccggacccacgcgtccgcccacgcgtccgcccacgcgtccgcccacgcgtccgcccacgcgtgcggccacgcgtccgcccacgcgttcgcccacgcgtccggacagggcgaggaaatggaataagacggctattccaatcctaatcgggacaaagttcgatgactttgcccagcttcctcttgaaatgcaatggaccattgttaaccaggccagagcatacgcaagagcgatgaaggcgaccctcttcttctcgagcgcgacgcacaacatcaacgtgaacaagatcttcaagttcatcacggccaagttcttcgacctgccgtggacggtggagcgcaacctcaccatcggcgagcccatcatagacttctgacgacctnctnctctagctaagtaattaggcagcacacacgacgaccctttgtcgtatg

SEQ ID NO: 94994 - DNA, 510 bp, Zea mays
  unsure (1)..(510): unsure at all n locations
tagtttttatccggtggctgaanncccgaactcncgnagnatctgcacggttcgtaattcccggcgggagccacgcgtccgctcgtcgttggcatctacgacgagcttattacgcctgggcagtgcaacatggtgtgcggggatgctaacgactacgtgcttgaacagggcatgtaactactacgtaccagctggaatgcatgtcgacgactatggtttcgagtttcgactttcaataatagtaacaacaaagcaaaggccttcctcccggcgtatttgctttggctcttctcctccacgccataagatatctagcaattggtcactcgccttaattagttcgctttgcttttgacgttgattcgaccattttgctgtaacgtgaattgcatgcatggacatgcaacgctccaatggcctttggaatgtggaaaaaattaaagattataaataatctattctttatttatccaaaaaatagatgctctttctaaagatacaccatacttt

SEQ ID NO: 94995 - DNA, 501 bp, Zea mays
tagtgtgtcttccatgagatgaatatagtcatcgctcgtaccggtccggaattcccgggtcgacccacgcgtccggacaggcgttgctggaggtatgatgcacgcatacgatatgggcggattccctgggggggatactgccttatcctcggctgcccaaattgcgactctgacttctgaccttgcaaatgctaatcctgaacagcaaccaacgatccttggtgaaaacctatacccactgattgagcaactggaaccaaaccaagcggcaaaggtcactggaatgcttttggagattgatcacactgaagcacttcaactgcttgagtaccctgatgccctcaagtcaaaggtagctgacgcgatagatgttctacacaatgcgtcccatcagcaaaacgcaaacacttggaccagtcagcttgctacattatcactaacgccaagcattatctactaactagaaagccattacgaactatcttcaagttgcaattgaag

SEQ ID NO: 94996 - DNA, 517 bp, Zea mays
  unsure (1)..(517): unsure at all n locations
tagtttttaataaggcggtgcctgatgctggggggaatgacgtgatcgctcgtaccggtccggaattcccgggtcgacccacgcgtccggtcgagcaggaggccaaccacaactccggcacgttcctcgaccgcttcaccgagtcgctgcactactactccaccatgttcgattctctcgagggcgccggcgccggctccggccagtccaccgacgcctccccggccgcggccggcggcacggaccaggtcatgtcggaggtgtacctcggccggcagatctgcaacgtggtggcgtgcgagggcgcggagcgcacggagcgccacgagacgctgggccagtggcgcagccgcctcggcggctccgggttcgcgcccgtgcacctgggctccaatgcctacaagcaggcgagcacgctgctggcgctcttcgccggcggcgacgggtacagggtggaggagaaggacnggtgcctgacccttgggtggcatacgcgcccgctcatcgcaccttcgcg

SEQ ID NO: 94997 - DNA, 513 bp, Zea mays
  unsure (1)..(513): unsure at all n locations
agttttttcttncaaacgggtgnctgccctagctcacgatgtcatcactcgctaccggtccggaattcccggggcgagccacgcgtccgcccacgcgtccgcccacgcgtccggaacggagggaccctgaacagcgcaaggggagcttctcttctgaaggaagctatacatgttatcagctgcggctacgaagacaagaccgactggggaaaagagattggctggatttacggatcgatcacagaggatatcttgactggatttaagatgcactgccatggctggcggtctatttactgcatcccgaagcggcctgcattcaaaggttctgcgcctctgaacctttccgaccgtcttcaccaggtccttcgctgggcccttgggtccgtcgaaattttcttcagcaagcactgtccactttggtactgatacggcggcgggctaaaattcctggaaaggatttcttatatcaactncatcgtttatcccttgaccgccattcctcttcttgct

SEQ ID NO: 94998 - DNA, 512 bp, Zea mays
  unsure (1)..(512): unsure at all n locations
aggtnttngagatggtggctgtcatagcaggaggaaagtaatgcttctaccggttcggaattcccgggtcgacccacgcgtccgcccacgcgtccgcccacgcgtccgaagaaatcttacatgccatcccagagaaaacaacgcaaattctgcaattgcccagtggaaatggccaagaaatcctacaaagatgcttgcttttggtgtccacaagcatatgccaatgacatggactcctcagaagaggatgaattggatgacaatttgaatgatatttttggccttaatgatgatggcattacttcgtctgtttctgcctccagggaccagctaaagtataacctcatatcttgcaaacaaatggttggtatttttgtcacagtctgggcaaagaaagaattaatgcagcatattggacatttgagaacgtcctgtgttggtcgcggaataatgggatatcttggaaataagggatgtatatcagtaagcatgacactataccagacaagctt

SEQ ID NO: 94999 - DNA, 509 bp, Zea mays
  unsure (1)..(509): unsure at all n locations
nggtnnntagaagggtgggtgcgcatggggtgggatgagtatgctctaccggtccggaattcccgggtcgacccacgcgtccgggacagcgagcgattccttggggcatgcatggcgtcggacaactgcgccaacgtgtgccgcggtgagggcttctccggcggcaggtgcagcaccttccgccgccgctgcatctgcactaagccgtgctaaattaacctactcccggcagttcgatggtggacgtttattctatttattggcttacttgattttttttcccctaacaataagaaaacgcacgtgctggcatgtacgttgtgttgtatatgcttttcttgctggcttcatttgctgattactgatgagttgtaaggtccctgcacgatccatttcacatggatatgatgcttaattgtattcctgcttatatggtatctatatttaattaattaatgatggaccatcgagtttattttgtatttttgacatattcgaaaaaaaaaaaa

SEQ ID NO: 95000 - DNA, 499 bp, Zea mays
  unsure (1)..(499): unsure at all n locations
ggtantttagggtncgtgacatagattagaagtatgctctaccggtccggaattcccgggtcgacgcacgcgtccgctaccctcgtcgtcgtctcactcaccccgccttcacgcctccctcaccaaataagggcgcggccttttccgacattcacaggggggacaggaaatcagcggccatggcctcgattccggcgacgaccttcgccgtcatcttatccgtcctcttctgtgccgcggctggcaccgccgtcgacaacgacctccccgactacgtcatccagggccgcgtctactgcgacacctgccgcgccgggttcgtgaccaatgtcaccgagtacatcgcgggcgccaaggtgaggctggagtgcaagcacttcggcaccggcaagctcgagcgctccatcgacggggtgaccgacgcgaacggcacgtacacgatcgagctcaaggacagccacgaggaggacatctgcgaggtggtcttggtggagagccc

SEQ ID NO: 95001 - DNA, 489 bp, Zea mays
  unsure (1)..(489): unsure at all n locations
aggcctgtattgaagaaatgtacgctcgcccggtccggaattcccgggtcgagccacgcgtccgaaaataatttacttcatcctcccagcttacaagttaaaaaaccatcaaaagtttcagcagctgcgacagacaagaacgcgcacgtcgcacgctgtggcgtcgcagctgcgggaacacgacaacattcacatgaacttacttcagctactaataatacaaggcgacggtagatatagagagcatcttctgctagtctggttgtaaataaacgatcttgaaacgctgtcttgagccgctatacttttgtttttccttctttgtgcggagcaggtgcgtgcagctcagctgagctcagcagagcggcaggggcgcgccgttccactccttgaggcactcgagcagcgggtcgatgtgcttgcgctggttgatggccacgagcacctttgtgagctcctcgccggggacctggtnctctcgcggtcang

SEQ ID NO: 95002 - DNA, 504 bp, Zea mays
  unsure (1)..(504): unsure at all n locations
agtattttttaatcttnntgactcagctcagtatgtcacgctgtaccggtccggaattcccggggcgacccacgcgtccgcttcttcccaacccaacagaagcgaagcatctcttctccccccttcccaatcgggcggcggcatatccccttctccgtcctcccgcctgccgccatgtcttcgccttcgccctcgccgccggcgccggcggaagaggagggccgggcgccgaccaagtacgtgctgatcaccggcggcgtcgtcagcggcctcggcaagggcgtcaccgccagcagcatcggcgtcgtcctcaaggcctgcgggctccgcgtcacttgcatcaagatcgatccatacttgaacacagatgctggtacaatgtccccctttgagcatggcgaggtgtttgttcttgatgatggtggagaggttgacttggatttggggaattatgagcgtttcatagatgttactctgacaaggataacaacattaccacttgaa

SEQ ID NO: 95003 - DNA, 513 bp, Zea mays
  unsure (1)..(513): unsure at all n locations
agggtttnntnaaatatggtgctgttatgttggaggaatgataggatgctcgtaccggtccggaattcccgggtcgacccacgcgtccgcagcgagcgagagcgagagagacagagagattgtccgcgcgtcagcgactccgggcgaagacgatggggaaggggttcgcatcctacctggcgatgaagacggggccggagggcggcgacgcggcggcggcgcagcaggctctgatcgacgcggacctgcgggagctcggcgtcgccgcgcggaagctcgccaaccacgcattcgtcctcggcggcgggctggggttcggcacctccttcctcaaatggctggccttcctcgccgcagtgtatctcttgatattggatcgcacaaattggaagaccaacatgctgacagctctcttggttccttacattttcttcaccctgcctaatgtgcntgtttctctgatcagaggagaggtggggaaatggattgcgattattggctgtattctgcgtn

SEQ ID NO: 95004 - DNA, 505 bp, Zea mays
cgtttttaatgagggtggtgtcctcgatagtacgtatcctcgtcccggtccggaattcccgggtcgacccacgcgtccgcccacgcgtccgcggacgcgtgggcttcaccatatgggaacaccttgcatcacagggagaattctacagttggtcaatttgcattcacaaccgcagaagctggaaactacgttgcatgcttctgggttgatagtgcagagaaaggatcaggagtatctgtgaatcttgactggaagattgggatcgcaacaaaagattgggatgctattgctaagaaggaaaaaattgagggtgtagaactagagcttcggaaacttgaagtggcagtacaggccattcatcagaacttgatatacctcaaagaaaaggaagcagagatgcgaactgtgagtgagacaacaaattcaagggtcgtctggttcagtactctgtcgctatgggtctgcattgcggtatcggttttgcaagtccgacaccttcaaggtt

SEQ ID NO: 95005 - DNA, 512 bp, Zea mays
  unsure (1)..(512): unsure at all n locations
cgttttattttccgggtgcgtgtccacgcatgatcgtagcgctcgtctcggtccggaattcccgggtcgagccacgcgtccggaaacaacaagactgacagcgacgatgatgccacagctgcgtagcctcgtcgcgcgggtcctcgtggccacggccatagccgccgctcccggcgttgggtttgtcgtcaccggccgcatctactgcgacaactgccgcgccgggttcgagacaaacgtgtcccacgccatccaaggcgcgacggtggagatggagtgccgccacttcgagtcgcagcaggtccacgacaaggcggaggcgacgacgggccccggcggctggtacaggatggagatcagcggcgaccaccaggacgagatctgcgacgtgcgcctgctcaagagccccgaggcggactgcgccgagatcgaccactnccgcgaccgctgncgcgtnccgctacccgcaacgaccgcatcaagcagagccgcgttcgttaccgcaaccccat

SEQ ID NO: 95006 - DNA, 498 bp, Zea mays
ggttttataaatgtgctgatctcgataaatagtagtcttctcccggtccggaattcccgggtcgagccacgcgtccgggtggtcttagtttatcatgtatcgctcgcagtttaatttagcggtttaggtgtggatctgtgaaccccatggcgcctctgcttgattcgtgtttcacctgttatgttctgagattcatgataatgctatgagaactgaaattcccgtttaaaaaaaaaaaaaaaaaaaaaaaaaaaaaaaagggcggccgctctagaggatccaagcttacgtacgcgtgcatgcgacgtcatagctcttctatagtgtcacctaaattcaattcactggccgtcgttttacaacgtcgtgactgggaaaaccctggcgttacccaacttaatcgccttgcagcacatccccctttcgccagctggcgtaatagcgaagaggccgcaccgatcgcctttccaacagtgcgcacctgaatggcgatgggac

SEQ ID NO: 95007 - DNA, 509 bp, Zea mays
  unsure (1)..(509): unsure at all n locations
ggtttttaaaatgtgtgtgtctgccctcactcttntactgcatcgcggtactggtccggaattcccgggtcgagccacgcgtccggctgtggatggaagctatgttttcaacaagggaaagatccacaaggttcctgggggtgacatggaagctctcaagtctcccctgatgggattgtttgagaagcgaagagctgggaaattcttcctttatgtccaagattataaggaaaatgacccaagtactcataagggttacaaccttactaaactaacgacaaaagaacttatctcaaaatatggtttggatgataatacgatagacttcattgggcatgcagtggctcttcatagagatgatagctacttgacagaacctgcaattgacactgtaaaacggatgaagctttatgcagaatcagtggctcgctttcaaggaggatcaccatatatttatcccttgtatggtttatgagaactgccacanggttttgcaagacttagcgctt

SEQ ID NO: 95008 - DNA, 495 bp, Zea mays
  unsure (1)..(495): unsure at all n locations
ttggtnnctgagcatcgattagatagtaggctcgtaccggtccggaattcccgggtcgacccacgcgtccgatcagtacgcagatggccatggagggtcgtcgtcgtcgtcgtctcgttctgtggctcgggatatccgcgcaaacaatgctagttgccgccgcggccggcgccaagcggcaggcgccggtgatgttcgtgttcggcgactcgacgctggacgtcgggaacaacaacttcctgtcgggggcggccgtccccagggccaacaagccccactacggcgtcgacttccccggcggccatcccaccggaaggttcagcaatggcgacaacacggctgacttcgtcgcgaagagcatggggttgaagagtagccctccgccgtatctgtcgcttgcacccaacggctccagccctctgctcgcgcagactgctctcaccactggtgtcagctacgcttgcgcagacgctggcgtactcgactcaaccaacg

SEQ ID NO: 95009 - DNA, 504 bp, Zea mays
  unsure (1)..(504): unsure at all n locations
agggtttgtggagctgtggctgatcctcagacagaagtaggctcgtaccggccggattcccgggtcgacgcacgcgtccgcccacgcgtccgcccacgcgtccgcccacgcgtccgggctgcccctgcatccaccacggcggcggcggcggcggcgctgctgcttctgctcgtgtcgctcgccgcggcggcggacatgtcgatcgggtcctacggggagcgcaacgaccaggaagccccgcggatgtacgcggagtggatggcggcgcacggccggacctacaacgccgtcggcgaggaggagcggcggtaccaggtgttccgggacaacctccgctacatcgacgcgcacaacgccgncgtcgacgcgggcgtacactcctttcggcttgggcttaaccggttcggcgaccttaccaacgacgagtaccgggccaactaacttggcgccaggaccaagccgcagaaggagaagaagcttggcgccaggtccacgccggcgaca

SEQ ID NO: 95010 - DNA, 513 bp, Zea mays
cgttttattatttagggtgctgatccctgacttttcgtagcgctcgcccggtccggaattcccgggtcgagccacgcgtccggttcctcgtcgtctcgtgttgtttctcgcgttgccattgccccagctgtccgcccgcgcccgcggcaatggcaggcggcgtggtggtgaacgcggccgggggcaagacgtaccccggccgcatgacgccgttcgtgttcttcacctgcctggtggcgtcatcgggcggcctcatcttcgggtacgacatcggcatctccggcggtgtcacgtccatggcgtcgttcctcaaggagttcttcccttccgtgtacgccaaggcggcggcgaacaaggacacgaaccagtactgcaagttcgacagccagctgctgacgctgttcacgtcgtcgctgtacctggcggcgctggcgacgtcgttcgtggcggcgtccgtgacacgggtgttccggcgcaaatgggccatgttctgcggccgggtgacccttctgg

SEQ ID NO: 95011 - DNA, 494 bp, Zea mays
  unsure (1)..(494): unsure at all n locations
atgctnttgctcatgaatgccatagtcgccatcgacagtcccggacttacttctcggctcgacccacgcgttcggaaacagttaagaattcatatataagagtgcatatatatatatataattctgccgggggaaaggtaatggagtcgtcacgcatgttccagccggccatcatcctgcttctcctgctcattgtgaccaccgatgtggcgcaggcggcgagggaatgcgagaaggacagcgagcgattccttggggcatgcatggcgtcggacaactgcgccaacgtgtgccgcggtgagggcttctccggcggcatgtgcagcaccttccgccgccgctgcatctgcactaagccgtgctaaattaacctactcccggcagttcgatggtggacgtttattctatttattggcttacttgattttttttcccctaacaataagaaaacgcacgtgctggcatgtacgttgcgttgtatatgcttttcttgc

SEQ ID NO: 95012 - DNA, 500 bp, Zea mays
  unsure (1)..(500): unsure at all n locations
atagtcnnttgatcccatcgatacacngtacgtatctactggtccggaattcccgggtcgacgcacgcgtccgatcaaagagcacggtggtgatgacttctcctttacgctcaaggagggcccgactggcgcgtggacgctcgacaccaaggccccactcaagtaccccctttgcatccgctttgctgtcaagtctggcggctaccgcatcgncgacgacgtcatccccgccgatttcaaggctggcacaacctattagaccacactcaacattctaataaacctctcatgatgaaatatatttcaaaagaactcaactaacgcatgtgttacaagacaatattattttttcaatggctttttttggcaccagaccacccaagaaataagttatgctacatgtctcttctgaccccttgttgtgttgggttgatattattacataaactaaatacattatttatttaagattttaggagaaatatgttgatctgatccac

SEQ ID NO: 95013 - DNA, 517 bp, Zea mays
  unsure (1)..(517): unsure at all n locations
agtnttttactaatactggtggctgtccctacgtctgattcgcattcctcgtcccggtccggaattcccgggtcgagccacgcgtccggtgaggatcattatcttaattatttatgtaccatgttcaaaatgctcttgttttggggaatctgctccggagagagcccttgaagcttgttgatgggggtcagtctcagagaacctttgtctacatcaaggatgccatcgaagctgtagtgctgatgattgaaaatcctgctcgagccaacggccacatcttcaatgttgggaatccgaacaatgaagttaccgttagggagttggcccaaatgatgacagaggtatgccatatattgttgaccctgactggtgtacttgttacttgtttctattgtaagtcatctattgtgatcttgtcacgaggttctagtattttcgcaacggacaaaagagtttgagagtactacctatattcgaaaggtcttgatgtttgccaaatgattgtagtagtgttaaa

SEQ ID NO: 95014 - DNA, 505 bp, Zea mays
  unsure (1)..(505): unsure at all n locations
gagtttagacggtnctgatcctcgattgatcgttacgctcgtcccggtccggaattcccgggtcgagccacgcgtccgcccacgcgtccgcgccctctcgctccagccgcttcacagcgccgccgctcgcctgtgcgaccgccgcgagaatgccgttcaagaggttcgtggagatcgggcgcgtggccctggtgaactacggcaaagactatggccgcctcgtcgtcatcgtcgatgtggtcgaccagaacagggcacttgtggacgcccctgatatggtcaggtgccagattaacttcaaacggctctcacttactgacatcaagattgacatcaaacgcgttcccaagaagtcaaccctgatcaaggctatggaggaagctgatgtgaagacgaagtgggaaaacagctcatggggcaagaagctgattgtccagaagaggagggctgcgctcagtgactttgacaggttcaaggtcatgctgggcaggatcaagaggggtgn

SEQ ID NO: 95015 - DNA, 503 bp, Zea mays
  unsure (1)..(503): unsure at all n locations
gggttaaggtgnctgtcctccgaaaatagtatgtctcgtctcggtccggaattcccgggtcgagccacgcgtccgcccacgcgtccgcgccctctcgctccagccgcttcacagcgccgccgctcgcctgtgcgaccgccgcgagaatgccgttcaagaggttcgtggagatcgggcgcgtggccctggtgaactacggcaaagactatggccgcctcgtcgtcatcgtcgatgtggtcgaccagaacagggcacttgtggacgcccctgatatggtcaggtgccagattaacttcaaacggctctcacttactgacatcaagattgacatcaaacgcgttcccaagaagtcaaccctgatcaaggctatggaggaagctgatgtgaagacgaagtgggaaaacagctcatggggcaagaagctgattgtccagaagaggagggctgcgctcagtgactttgacaggttcaaagtcatgcntggcagggatcaagaggggtgn

SEQ ID NO: 95016 - DNA, 511 bp, Zea mays
  unsure (1)..(511): unsure at all n locations
ggtcttttntaaagctgtnatgcctacgtcattgaatcancgtcgtaccggtccggaattcccgggtcgacccacgcgtccgcccacgcgtccgcaggcaggcaggtcggcgaggagggcaggaagaccgaagaccgagccgtgcgggggctcgggacgggaacgggacaggaccccaaaatctcagatccttcctgcccgcccgcccgtgcccgtcgacgcgtcgttcttgccggccgcgccccacctccgccctctcctcctccagggggatcggatacgccacaggctgcgcgatggtgctgtgggtcttcggctacggctccctcatctggaaccccggcttcgacttcgacgacaaaatcctcggcttcatcaagggctacaagcgcacctttaatctcgcttgcattgaccacagaggcacaccggagcatncggcgaggacctgcacgctttgaaccgacgacgaggccatatgctggggaaatgcctattgggtcaagggtgg

SEQ ID NO: 95017 - DNA, 505 bp, Zea mays
  unsure (1)..(505): unsure at all n locations
tgtttttttatttccnttttcctcagacatcatagcacgccgtaccggtccggaattcccgggtcgagccacgcgtccggtgacgatcattatcttaattatttatgttccatgttcaaaatgctcttgcgggggggaatctgctccggagagagcccttgaagcttgttgctgggggtcagtctcagagaacctttgtctacatcaaggatgccatcgaagctgtagtgctgatgattgaaaatcctgctcgagccaacggccacatcttcaatgttgggaatccgaacaatgaagttaccgctagggagttggcccaaatgatgacagaggcatgccatatattgttgaccctgactggtgtacttgttactagtttctattgtaagtcatctattgtgatcttgtcacgaagttctagtcttttcgctacggacaaatgagttggagagtactacctatattcgaaaggtcttgatcgtgccaaattgattgtagcagtggc

SEQ ID NO: 95018 - DNA, 491 bp, Zea mays
tgtaggggtgctgagaatcgaatatagtacgctctacggtccggattcccgggtcgacgcacgcgtccggggctgggctcatgctacgaggtgagatgcaggaaaaacctgagtgctcgggcaatgctgtcacggtgttcatcacagacatgaactacgagcctatcgctccctaccacttcgacttgagcggcaaggccttcggctccctggcaaagcccgggctcaacgacaagcttcgccactgcggcatcatggacgtcgagttcagaagggtgcggtgcaagtaccccgctgggcagaagatcgtgttccacatcgagaagggctgcaaccccaactacctggccgtgctggtgaagtttgtggcggacgatggcgacatcgtgctgatggaaatccaggacaagttgtcggctgagtggaagcccatgaagctctcttggggcgccatctggaggatggacactgccaaggcgctcaagggcccc

SEQ ID NO: 95019 - DNA, 501 bp, Zea mays
  unsure (1)..(501): unsure at all n locations
taaggcnnttgactcctccagcaacatagtagtgctctacaggtccggaattcccgggtcgacgcacgcgtccgggcgctctccgaccgctcccgcgagtcgctcctcccgagcttcctctacgcctcctcggcgcgctctttcgctgccacaggagccgccgcgcgcctccctgtctcctccccagcgcctgccacggctggagcaagaggcggcgtgccgttctcgatccaagcgcccaaagagaagatcgagaagtactcgcccggcttctatgccggctgcactggccgaagaatcgccaggtgccggcttacccacatgggcgtcacgccttttgaccttggcaagggccatatgccgattgacccaaccaaatacaagagtatctcatctggatttggtatcctgttaaaggagcaaggggccaggggtttcttcaggggatgggtgcctactttgcttggttacagtgcctcaggggcttgcaagtttggcttc

SEQ ID NO: 95020 - DNA, 496 bp, Zea mays
  unsure (1)..(496): unsure at all n locations
aggtaaggtnctgagcatcgttagatagctacgctctaccggtccggaattcccgggtcgacgcacgcgtccgcccacgcgtccgccgagatcttcgaggtgacaccggcctttcacgtcgtcgaggtgaagaaggcggcaggcgacacgctggagtatgagatgttctgcagcaagggcctaagaccttcactcagcgacatctgctggagcagccgatctgaggagaacatggctccttcagtggttcagccatcacaattggagccatcctcttagaccgtctccgacagtttactcacccctcttagtcgattgttatttaagtgcagtctcttcggagatgcaattacagtccatcctctctttcttttcccctttctcaaagagctaggaccttgttcgactgaccttaaggctgtagggctctttgggaccatcttttgccagtttcctcttggtaccaaaagtggttggccttggaactccggttcct

SEQ ID NO: 95021 - DNA, 499 bp, Zea mays
  unsure (1)..(499): unsure at all n locations
tatggcngntnngtcactcagcacatagtatgcactacgtaccgggaattcccgggtcgacggcacgcgtccgagcaggcgggcgcggagggccaccgcgacgccgcgggggtgtggtacgtgccctactgggagggctacgacgacggcttcgaccgcgacgcgcacgacgccacgcactacatggagcagatcaagctcgtgggcgccgccacgttgggggccgtcctcgaccgcctccacggcgtgggccgccccgtcacgctcgtcgtgtacacgctgctgctgtcgtgggtggccgacgtggcgcgcgcccgctccgtgcccgccgcgctctactggatccagccggccaccgttctcgccgtgtacctccacttcttccgcgccacggacggcgtcgaccgggccatcgccgcggcgggcggcgacccgtgggcgagcgtccggttcccgggccttccgtcgctccgcgtacgagacctgccgtcgttcatcn

SEQ ID NO: 95022 - DNA, 500 bp, Zea mays
  unsure (1)..(500): unsure at all n locations
aggtcctgagcctagctcgatgccacgctcgtcccggtccggaattcccgggtcgagccacgcgtccgcccacgcgtccgcgagaatatcaagatggaggactcagccaaccccatcttcatcggcatgaagtactgccccaacaagttgtgtactgccaacggcgcctccaaggtcaccgtcaaggacgtcaccttcaagaacatcaccggcacctcctccaccccggaggtcgttagcctgctctgcactgccaaggtcccatgcaccggcgtcaccatggatgacgtcaacgtcgagtatagcggcaccaacaacaagaccatggctatatgcacgaacgccaagggcagcaccaaaggttgcctcaaggagcttgcatgcttctagacccttcgtcgactgacccatctctctagntataatttttctctcgtccttgcatttgccattacatgctatccatttgtnacgcacaacaggtaaacgacagactttcg

SEQ ID NO: 95023 - DNA, 499 bp, Zea mays
  unsure (1)..(499): unsure at all n locations
taaagtgtgctgtgcatccgcaacaagtacgcatcactncgttcggaattcccggcgggagccacgcgtccgaacctgcagtcatctcctccatcaccaccaaactcaacaacagccagctcgcgaaggtgaggaagagccgcagcatggcatcatcggccgcgctcttggtgctagccctcgcgctagtggcggccaccgccccacaggtagcggaggcaaagaagaagagagcggcggagagcggcgaggcggcggaggcgaagaagatccaggacgacttctgctcgacgctgtgcgagggcaagaaggggacggacctggtcgtgtgcaaggagtcctgcgcgctctcccagcagtccaacctggtgctgtacggcaggatccagtgcaagggcaagtgcaccgagcagaagggcatcacggcgccggccatgaaggtctgccaggaggagtgcgacaaggcgtacgtggtgaangcggccgangtcaccaaggg

SEQ ID NO: 95024 - DNA, 498 bp, Zea mays
  unsure (1)..(498): unsure at all n locations
atgcgtgnctgcctagcccactancgatctgtgtaccggtccggaattcccggggcgagccacgcgtccgcaaggaccttcggcgcccgttcaggatccacatcttcccgagcgagttcttggggggcctcttcctcttcggaccacctccaaggctcttggtgtagcttgccactctcaccaatcaagttttcatgtctgatctcgacattcagatcccaactgccttcgatcccttcgctgaggccaatgctggggactctggtgcggcagcagggtcaaaggactacgtacacgtgcgcatccagcagcgtaatggtcgcaagagcctgaccaccgtccagggattgaagaaggagttcagctacagcaagatcctcaaagatctcaagaaagagttctgctgcaatggtacagtggtccaggacccaagacttggacaggtcattcagctccaaggtgatcagaggaagaacgtctcgaatttcctcgtcagcn

SEQ ID NO: 95025 - DNA, 499 bp, Zea mays
  unsure (1)..(499): unsure at all n locations
tggaatccngttgtgatgaaagcatagtaaccatcacctgtccggtccggaattcccgggtcgacccacgcgtccggttccccgagggaccttttctgaaggttcttggataggggagatgcaacaagcatgtgataaatctgtcataatcagtgaaattttggaccccaggacaaaaaatttgttgtcagtgtcaaaaattagtgactacgttctttcaaatgaattagtgagcatggcattggcaatggtcgccgaagatcggcagataaataatgtcttggaggagctcttcgctgaacaaggaaatgaaatgcaaatacgaccttctgatatgtaccttagagaagaagaggaattaaatttctttgaggtcattctgcgagctaggcagaggaaagagattgtcattgggtaccgtcttgaggcagctgagcgtgccataatcaatccaatagacaaagtttcaaggcgaaagtggtcacccaaagatgttttn

SEQ ID NO: 95026 - DNA, 494 bp, Zea mays
  unsure (1)..(494): unsure at all n locations
aggntnctggccatcgttagtagtactgctcgtaccggtccggaattcccgggtcgacccacgcgtccgcccacgcgtccgcacacgctcgccttctgctcccgtgcccatccagatgatgcttaggggtgtctcgtctccggccgccgtggtggccaaccatatctctggtggggccgcggcgaccacggctcctgccacggtgacggcgcatcgcaacggcgtctcggtgtccgccgtcggcgtcatcggcaaggggaaggaggtgctcatcatggtggagtaccagcccttcgaggagatcaagggggagctcgccctcgagccccagtacctcgacaggtcgctcgagcgccacaagttcatcgacgactgcgaggcagccatcaacgagcagatcaatgtggagtacaacgcctcgtatgcgtaccactccctcttctgctacttcgaccgcgacaacgtggccctcaaaggatgtgccaagttcttac

SEQ ID NO: 95027 - DNA, 492 bp, Zea mays
  unsure (1)..(492): unsure at all n locations
gggtcctgaatttgacaagttgtatcgctcgtaccggtccggaattcccgggtcgacccacgcgtccggtccgctcaccggggcgggctcagcatcctttcgaagaagtaacacttctccgtgaggcctgagcccctcgccgcggtgagccaagccggcgcacgtcgccccggggctcacgctcaccaccgagccccaaccaattaataatatatatatatagctaggatcgatcgtcagtaaaatggcaggctccgccgtcctgaggagccccctgtccgtcctcctctacatcctcgccgccgtgcccgccaccgccgcggcgacgccgaccgacgccgccatcgacgaggcgtacgcgcatctcgtcaacctcaccgctaaccaggagtactgggcggagcgcgcggaggcggcgcacgcgtacaaccgcgcggcgtaccagaccgaccccgtggccgtcgtgcagcgcttcaacgacggcgtgcacan

SEQ ID NO: 95028 - DNA, 499 bp, Zea mays
  unsure (1)..(499): unsure at all n locations
aggcacangtgactcatgacaaagaatatattgcacctgtcgtaccggtccggaattcccgggtcgacccacgcgtccgtggccatccacagaagagatagccgaggttgtcaagtcaagtgtgctccctgacatgttcaagagcacatatgagtcaatcaccaaaggaaatcctatgtggaatgagctgccagtctcaacaagcactctctacccctgggatccatcatctacatacatccatgagccaccttacttcaaggatatgaaaatgagtcctcctggcccgcggcctgtgaaggatgcatattgccttttgaattttggtgacagcatcacaaccgatcacatctcacctgccggaaacattcacccagacagcccagctgcaaaatatctgaaggagcgtggcgttgaaaggaaggacttcaactcatatggtagccgaagaggaaatgatgagatcatggctaggggaacctttgccaacattcgtctt

SEQ ID NO: 95029 - DNA, 498 bp, Zea mays
  unsure (1)..(498): unsure at all n locations
agttngtgctcatcttgaaatatgcactgcggtaccggtccggaattcccgggtcgacccacgcgtccggtccatgaaggatgatgcgtctgtggtattcgcctattacaaggatggtgccgactaatccgacattcctctatttctctcatggtcttaaggagatcaagtgctaggcgtgcggcgaaattagttacccatgttgggtactatctatgtactattattatatccaaaactatagttgtcctggctgaattgaactcaaaagggtttgtttgagaaaaaattgtcccaaaaaaaaaaaaaaaaaaaaaaaaaaaaaaacaaacaaaaaaaaaataaaaaaaaaagaaaacacaaaaaaaacaaactcacaaataaccaaaaagacaaaaaaaaaacacacaaaaaaaaaaacacacaaaaaaaaaaggggggggcctttttaagggccccagtttatcatcccgggctttcaaaccatatgtttttttc

SEQ ID NO: 95030 - DNA, 494 bp, Zea mays
ggtgaggagggtgtgtgatgtaagcatgatgcacgctctaccggtccggaattcccgggtcgacccacgcgtccgcggacgcgtgggcggacgcgtgggcgattccatttctaccccgagacctccagcgcggcgcccctgaaccctcagccttctccgtcccgcctcggcactcgacggccgccggcacacaccgcgcagtctcgagacaggaaccggaggaacgaggatggaggatgactcgccgctgacgaagacgatgaagggtgcggtgacaggactcgccgcggggaccatctggggcaccgtcgtcgccacctggtacgacgtgccccgtgtggagcgccacgtcgcgctccctggccttatccggacgctcaagatgtgcggcacctacggggccaccttcgccaccatcgggggcctctacatcggcgtcgagcagctcgtgcagagccagcgcaagaagcgcgacttcgtcaacggggccgtcg

SEQ ID NO: 95031 - DNA, 487 bp, Zea mays
  unsure (1)..(487): unsure at all n locations
tggnntgcaatgattgaatttatgcacgctctaccggtccggaattcccgggtcgacccacgcgtccgcccacgcgtccggctagctctctgtctcctgctcagagtcgcagttcgctttgttgtgctagagcgctgagcagatctttccttgtttcttcattccggtacgaaggggaggggtccaagtgaagagaagagaaggcctgcgagcgatgggcatcgtcgacgtcgtctccgagttctgctccttgccgaggactcgccggcatctcaagaagaggaagcagttccagacggtggagatgaaggtgcgcatcgactgcgaagggtgcgagcgcaaggtgaagaaggcggtggagggcatgaagggcgtgagctccgtggaggtggcggccaagcagaacaaggtgacggtcacgggctacgtggacgccaccaaggtcatgcgccgcgtcgcctacaagacaggcaagcgggtggagccc

SEQ ID NO: 95032 - DNA, 510 bp, Zea mays
  unsure (1)..(510): unsure at all n locations
gattttctattggagcggctnnctgcgcctccctgaaaatagtattgctgtaccggtccggaattcccgggtcgacccacgcgtccgctcaggtttggggggaaaaggcctcgcgggtcgcaaaccgctctctgttgatttgggatttgggaggcgctcgagttttcaggtaaaccatagtttagtgaccaatggctcgtactaagcaaactgctcgcaagtccactggagggaaggctcctaggaagcaacttgccaccaaggctgctcgtaagtctgcacccacaactgggggagtaaagaagcctcatcgttaccgccctggaactgttgctcttcgtgaaatccgcaagtatcagaagagcactgacctgctcataaggaagcttccgttccaaaggcttgtcaaggagattgcccaggatttcaagactgatcttcgtttccagagccatgcggtgcttgcgctgcangaggctgcggangcgtacctggtgggtctattcgagn

SEQ ID NO: 95033 - DNA, 504 bp, Zea mays
  unsure (1)..(504): unsure at all n locations
gggttnttngtgaggggtccgtgagatggggatggagatattgctcgtccggtccggaattcccgggtcgacccacgcgtccgcgaactgctcgcggagaggcagaagcttggcccgttcgtcccagtgatcccgcatggtgtacgcttgctgaatcaagaaattttacgtgtttccacactattggagaacgcatcccttttaaatcaaagtggccttgaacatggtagtccactaacaacaggaggattatattcaaatggagcagctactgacatgaatgtgtggacatcagcatttcaaccagaaagttcaccagcttatagctggcttggaggatcccagggcagctcctctggacttattgtcaaaacaatgaaggtcgatatcccagtagacaaatatccaacattcaatttcgttggccgcatccttggtccaagaggaaattccttgaagcgggtggaggcaaatacggactgccgtgtgctaataagaggtcgt

SEQ ID NO: 95034 - DNA, 495 bp, Zea mays
  unsure (1)..(495): unsure at all n locations
agggccnttncccatgatagagaatattgcaccgtcgtaccggtccggaattcccgggtcgacccacgcgtccgcggacgcgtgggcggacgcgtgggcatatttctccagctgttccgccgagcgaacgacccacaaccagaagccacccattggcgtacgcgaggcgatcggagcatcccgtcccaagaggagaaactccggccggcgacgcgggggaaaatggggaagacgccggtgcggatgaaggcggtggtgtacgcgctgtcgcccttccagcagaaggtgatgccggggctgtggaaggacatcaccaccaagatccaccacaaggtcaccgagaactggatctccgccacgctcctcctcacccccgtcgtcggcacctaccaatacgccatgtggtacaaagagcaggagaagctttcccacagatactaaatgggatgtcctccaagttgctgcggcttgtcgcagttgaattttccatgatgn

SEQ ID NO: 95035 - DNA, 495 bp, Zea mays
  unsure (1)..(495): unsure at all n locations
atgcngtggctatgtgggtgggaagtaaggcacactcgtaccggtccggaattcccgggtcgacccacgcgtccgacgaaggctgtgcaggaggcatgggcatcggcgtgcggcggcactgggaagcagacaatcctcatacccaagggtgacttccttgtcggacaactcaacttcacaggcccttgcaagggcgacgtgaccatccaggtggatggcaatctgctggcgaccacggacctaagccagtacaaggaccatggtaattggatcgagattctacgtgtggataacctggtcatcaccggcaagggaaaccttgacgggcagggcccagccgtgtggagcaagaactcctgcaccaagaagtacgactgcaagatccttcccaactcgctggtgatggacttcgtgaacaacggggaggtgtccggngtcacgctgctcaactccaagttcttccacatgaacatgtaccggtgcaaggacatgctg

SEQ ID NO: 95036 - DNA, 512 bp, Zea mays
ggttttaagagttgggtgcgatggggggggggtggatggtatgctgcaccggtccggaattcccgggtcgacccacgcgtccgtgcaggaaaaggagcgaagagagagagagagagagagacgcaggcccgccggcgacgatcgaggagggaggaaccagagacccggcggcggcgacgatggctccgcgcagctcatcggcggcgacgtgcctgtgcctcgctctcgccgcggccacgctggcgctggcccacggtgcgcaaggaggaggaccatcggcatctgcggcggacctggacaaggtcacgggcgagaccttcttcgacatcgagatcgacggcaagcctgcaggccggatcgtgctgggactgtttggggacaccgttcctaaaactgcagagaactttcgagcactttgcacaggggagaaaggaattgccaagtccggcaagcctctgtggtacaaggggtcgacgttccacaggatcatcccggggttcatgatccaggga

SEQ ID NO: 95037 - DNA, 502 bp, Zea mays
  unsure (1)..(502): unsure at all n locations
ggagcgtgtggctgaagcatcgaagggtgatagttatcgctcgtaccggtccggaattcccgggtcgacccacgcgtccggccacgaggaggacatctgccaggtggtgctggtggccagcccgcgcaaggactgcgacgaggtccaggcgctcagggaccgcgccggcgtcctgctcaccaggaacgttggcatctccgacagcctgcgccccgccaacccgctaggctacttcaaggacgtgccgctccccgtctgcgccgcgctgctcaagcagctggactcggacgacgacgacgaccagtaaactataccacggcggcgtcgcggacatgctgcacaaaactacaacgatacagagcgaacgcatggcatggatagcagtatctacggaaagaaaaggaagaaaaggaaaataaaaaatgtatcagagtgcttgattcacttgctgctgtcacccattccccgttcttaacataacatgtgggccggcttggcccan

SEQ ID NO: 95038 - DNA, 492 bp, Zea mays
  unsure (1)..(492): unsure at all n locations
agcggtgggcatgctagaaattattgcactgtcgtaccggtccggaattcccgggtcgacccacgcgtccgcggacgcgtgggccatggcctcctcatagaataagctctatctcaccgcaggaacgcctcattacaatccttcaagagagcagcactacactacactacattagagagaggtcgagcgcccctcctccgatccgccggcccgccgagagctagctgctgatcggtcgaggagagtcatggcgacgtcgacgatgcgcgttgccgccggcgtgctgctggtcgtgtcggcgctggcgaccttggcccgggccgaggacccctacctgttcttcgagtggaaggtgacgtacgggaccaggtccctgctgggagtgccccagaaggtcatcctcatcaacggcgagttccctggccccaggatcaactgctcctccaacaacaacatcgtcgtcaacgtcttcaaccagctcgaccatccgcn

SEQ ID NO: 95039 - DNA, 509 bp, Zea mays
  unsure (1)..(509): unsure at all n locations
agttataaatgcngtgatcctccgtactagtatgcatcgctctaccggtccggaattcccgggtcgacccacgcgtccgtggagacttagatctccaaacactcgtaactatcctactaggtggtgacatcgggccggaaaaacatttatggtcatagagtctgcccttcgtttgtcagtcgggcaatttttcttgcatacaatgccttcgtttaagtatcggatgagttgctgcgactaaaaaaaaaaaaaaaaaaaaaaaaaaaaaaaaaaaaaaaaaaaaaaaaaaaaaaaaaaaaaaaaaaaaaaaaaaaaaaaaaaaaaaaaaaaaaaaaaaaaaaagggcggccgttttaaaggatccaagcttacgtacccttgcttgcaacttcataactcttttttagggtcacctaaattcaattaactggccggggttttacaacgtcgtgactgggaaaaccctggggttacccaacttaatcgccttgcagcacatcccctttttc

SEQ ID NO: 95040 - DNA, 510 bp, Zea mays
  unsure (1)..(510): unsure at all n locations
ngtnnantgaggggcngttgtgatggtggtgtgatgtactgcatcgctgtaccggtccggaattcccgggtcgacccacgcgtccgcccacgcgtccgcccacgcgtccgcccacgcgtccgcccacgcgtccgcccacgcgtgcgcccacgcgtccgcccacgcgtccgcccacgcgtccgtaggcgccttcttcgtcccacgctccgtctttatttgtaatctgaagcttacaggaacatttgagtggatcatggacggattggtaggcctcttgaaagtccgggtggtgaggggcatcaaccttgcctaccgcgacgcaagaggcagcgatccgtatgtcgtcctacgacttggcaagaagaaacttaagacgagcgtgaagaagagatctgtgaaccccatctggcacgaggagctaactctgaccgtcacagatcccagcctagctctgaagctggaggtgttcgacaaggacacgttcagcagggacgacccgatgggggacgc

SEQ ID NO: 95041 - DNA, 496 bp, Zea mays
  unsure (1)..(496): unsure at all n locations
tgtnnggtgggntgntgatgtgggggattatggactgctgtaccggtccggaattcccgggtcgacccacgcgtccgcccacgcgtccgcccacgcgtccgcccacgcgtccgcggacgcgtgggttcggagagagcgagaaagaggagagagagagggacgggggcggggccggcggaagcggagcctgcgcccgccggaccgaatcctcgccggatcgcccggcctgccggggcggcgctgcggacggcctgatccggctggaatggcggcgggccgacgagggatctagcggaggtgggtgtcgcgcggcaatggctgcggcggaggcgcggcgccggtcagcggtctgggctctgctgccgctgctgctgcggctgctccacccggccgcgctcgtgctggccaacaccgaaggtgatgccttgcatagcttgaggactaacttaaatgatcctaataatgttctacaaagttgggatcccactctggtcan

SEQ ID NO: 95042 - DNA, 494 bp, Zea mays
  unsure (1)..(494): unsure at all n locations
cagcggtgggtggngcctcatcntgtagtancgctgtaccggtccggaattcccgggtcgagccacgcgtccgctgccaccctacagcggcatgacggcgtgtggcaacgtccccatcttcaaggacgggaagggttgcggctcatgctatgaggtgagatgcaaggaaaaacctgagtgctcgggcaatccagtcacggtgtacatcactgacatgaactacgagcctatcgctccctaccacttcgacttgagcggcaaggccttcggctccctggcaaagcccgggctcaacgacaagcttcgccactgcggcatcatggacgtcgagttcagaagggtgcggtgcaagtaccccgccgggcagaagattgtgttccacatcgagaagggctgcaaccccaactacctggccgtgcttgtgaagtttgtggcggacgacggtgacatcgtgctgatggaaatccaggacaagttgtcggctgagtggaacn

SEQ ID NO: 95043 - DNA, 494 bp, Zea mays
gcgttgactgccctctgtgggagagatgagtatcgctcgtaccggtccggaattcccgggtcgacccacgcgtccgaagaaacccagctgttattgctgacaatgttggtgataatgttggagatattgctggaatgggatcagatctctttggctcatatgctgaatcatcatgtgctgctcttgttgtggcctctatctcgtcttttggaatcaaccatgaatttactccgatggtgtaccctcttctcgtcagttctgttggtattatagcatgtctcataacaacgctgtttgcaactgatttcttcgagataaaggctgtggatgaaatagagcctgctctcaagaaacagctcataatttccacaattgtgatgaccattggcattgcactaatcagttggcttggtcttccatacactttcactattttcaactttggagtccagaagacagtgcaaagctggcaattgttcttgtgtgtggcggtt

SEQ ID NO: 95044 - DNA, 491 bp, Zea mays
  unsure (1)..(491): unsure at all n locations
agtcnctcctatgtttgtatttatgcactgtcgtaccggtccggaattcccgggtcgacccacgcgtccgcccacgcgtccgcccacgcgtccgcccacaccttgagacctgcgttgtcacgcacgcatcaaggttggggccgccagcagagttcagccgttcctgttcctgataaaacgagagaaggatggcagtgtctcagggagctgtcctattcttgtttctcctcctcgtcgcagcagaggtgggaaccatcgatgccaaaatgggagtagccatgcccatgcatgccttgataatggagaaagcgaaacagcaggagaaggagaagaaggaggagaaaagcacggagaaggaagagagtcaatgcttatcgccgagtctccagttcgagggcttctgcttcaacagcgacagatgcgccgaggtgtgcatgaaggagagctttcccggtggcgagtgcaagcgggacgtggccatgcgcaagtgn

SEQ ID NO: 95045 - DNA, 491 bp, Zea mays
  unsure (1)..(491): unsure at all n locations
atgcntcatgtagatggagagttatgcatcgctcgtaccggtccggaattcccgggtcgacccacgcgtccgaaagaggttatcagggaaaatgatatattatacttcataatggaatacatggagtgtaatctctatcaacttatgaaagaaagggtcaagcctttctccgagtctgaagtccgcaactggtgttttcagatatttcaggctcttgcatacatgcaccagaggggctactttcatcgtgacctcaaacctgagaatctgttggttagcaaaggtgtcataaagctagcagactttggtcttgcaagggaagtctcatcattgccaccatatacagaatatgtctcaactcgctggtatcgggcaccagaagtcttgctccagtcatctgcttatgattctgcagttgatatgtgggcaatgggtgccataatggctgagctgttgacactccatcctctctttcctggaaccagtgaagc

SEQ ID NO: 95046 - DNA, 492 bp, Zea mays
agcgtgctgagcatagatcgcatagtaatcgctcgtaccggtccggaattcccgggcgcgcatggggctcgccggggacgggtcggcggacaccgcccacctcagtaataatgaaaatgggcggttcgtttatggagttgcgagttctcctggtaaaagagcatcgatggaggacttctatgaggcaagaatagacgacgttgatggagagaaaattggaatgttcggtgtatatgatggtcatggaggagtccgagcagctgagtatgttaagcagcaccttttcagcaatttaatcaaacacccaaagttcatcactgataccaaggctgctatcgccgaaacttacaacctcacagattcagaatttctgaaagctgatagctgtcaaactcgagatgctggctcaactgcctcaacagctattattgtaggtgaccgtttgcttgttgcaaatgttggagattctagagccgttatttctaaaggagg

SEQ ID NO: 95047 - DNA, 496 bp, Zea mays
  unsure (1)..(496): unsure at all n locations
tatggtgnctgagctcagtgagggaaagtattgctcgtcccggtccggaattcccgggtcgacccacgcgtccgggagttcagaaccatcagagcatgcctcttctttggcatgggtgcatctggcgtgagacctgttcttcacaagctagtactcttctggcaccaaccggaggcattgcacacgaccggatacgaaattctgatggggctcttctacgggctgggagcattggtatatgcggcacgggtacctgagcgctggatgcctgggaagtttgacatcgccgggcacagccaccagctgttccacgtcttggttgttgccggagcctacacacactaccacgcaaggcttgtgtacctcaagtggagagacctgcaaggctgctgaaaggtactgcatcgttgaggatgtggatagattgtagattccgtgaattcaggctgaaggtcatggtctgttgtaaattgtaacagtaatcatgaaacaattg

SEQ ID NO: 95048 - DNA, 493 bp, Zea mays
  unsure (1)..(493): unsure at all n locations
tgggtnggtgagtagtgggcgagagagtatgctcgtaccggtccggaattcccgggtcgacccacgcgtccggccggcctctacgacgagatcgtcatggtccccaaggacaaggtcaacatcttcgtgtacggcgacgggcctaagcaaagccgcgtgaccggccgcaagagcttcgccgacggcatcaccaccatgaagaccgccaccttctccgtcgaggcgtccgggttcatctgcaagaacatggggttccacaacacggccggcgcggagcggcaccaggcggtggcgctccgggtgcagggggacctcgcggcgttctacaactgccggttcgacgcgttccaggacacgctgtacgtgcacgcgcggcggcagttcttccgcaactgcgtggtctccggcaccatcgacttcatcttcggcaactcggcggcggtgttccagaactgcctcatcatcacgcggcggcccatggacaaccagcaga

SEQ ID NO: 95049 - DNA, 499 bp, Zea mays
  unsure (1)..(499): unsure at all n locations
ntgaggccnngtggtgatgatgggaggaagtaatgtcacactcgtaccggtccggaattcccgggtcgacccacgcgtccgcacgacaagatggcgtgcacaaacaatgcgatgagagccttgttcctcctggtccgcttctgcatcgtgcatggtgagaaggaagagtcaaagggcatcgatgcgaaagcgtccaggcctggtgggtccttcgacatcaccaagttgggcgcctccggcaatggcaagacagacagcacgaaggctgtgcaggaggcatgggcatcggcgtgcggcggcactgggaagcagacaatcctcatacccaagggtgacttccttgtcggacaactcaacttcacaggcccttgcaagggcgacgtgaccatccaggtggatggcaatctgctggcgaccacggacctaagccagtacaaggaccatggtaattggatcgagattctacgtgtggataacctggtcatcaccggcaagggan

SEQ ID NO: 95050 - DNA, 490 bp, Zea mays
tgcggtgagcctcctgaacagtacgcactctcgtaccggtccggaattcccgggtcgacccacgcgtccgacgacctccgtgctccggcgatgcagcggatttcgctacgacttctgcgctggtcgtacaccgccgcctccgcctccctctccaccacctcctcctccctccgcggcctggcagtatcccatggcggttggaccacccgaccgtcgctgcagcctccggtgcgaaccgcggcgccggtcgaactcaccaggtggccgccgcggaggggttactcccagttcgcgagcgggttcaccccgctgaagccgaagccgctgggatccatcctcgacatcgaacgcgccaagggcctctcccccgaccacctcgtcgccgcatgggatgactatcatttaggaaggggtcatataggtgcatctatgaaagcaaaactttaccatctcttggaacaaagatcagcttcatgccgtcactttgtta

SEQ ID NO: 95051 - DNA, 499 bp, Zea mays
gttttttggtgcgtgacatatagaaaatggatgtatcgctgtaccggtccggaattcccgggtcgacccacgcgtccgcccacgcgtccgcccacgcgtccgcccacgcgtccgcgctcctgcgccgcccgtgcgatccggtcaccggccggggagggctcagaaacctttcatccaatacatacatctatctgagccctttcccgcggtgaggcccgaccggagtccacacacacacacacacggtgtcgatggcggccgtaataaggagccgccgcgtgtccgttgtcttctacgtcgtcctcgccgcagctgcagccgcggcgcaggcatccaataacgtcacctgcgacgaggattactgggcggagcgcgccgaggtggctcggtcgcgcaacctcgccgactacgtcagcgaccccgtggccgccacgaaccgtttcaacgcggacgtgctgagggccacgacgcggcgggcgctggcgaggtacgatggccc

SEQ ID NO: 95052 - DNA, 509 bp, Zea mays
  unsure (1)..(509): unsure at all n locations
gggagaggtatgggnnttncccactccaccgcanaggttagtcactgctctaccggtccggaattcccgggtcgacccacgcgtccgcggcgcgtgggcggacgcgtgggggaggccgccgcgcccatgctcaccttcgaggcgggcaagacgtaccgcctccgcgtgtgcaacaccgggatcaaggcgtcgctcaacttccgcatccagggccacgacatgaagctcgtggagctggagggctcacatacccctgcaggacgtgtacgactcgctggacgtgcacgtcggccactgcctttccgtgctggtcgacgccgaccaggcgcccggcgactactacatggtggcctccacgcggttcatccacgacgccaagtccgcctccgccgtaatccgttacgccggttccagcggcgccccgccggggcccaacatgaccgagccaccggccggttgggcctggtccatcaaccaggccaggtcgttccgttggaacctgacggcca

SEQ ID NO: 95053 - DNA, 490 bp, Zea mays
  unsure (1)..(490): unsure at all n locations
agcngtgccataaggttggggataggatctctcggtccggaattcccgggtcgacccacgcgtccgcccacgcgtccgcccacgcgtccgcccacgcgtccgaagaaacctcatggaacctggtgataataatacttccaatgctgctgctgctgctgctgcttccagtagtgcaactgcttctcggacaatcacagtggacgattctttgccatcaacctccctccaaatcaggttcgcagacggcagtcgcttggttgcccgtttcaacacaagccacaggattagtgacgtgcgggcatttatcgacgcgacaaggccaggagccagtgattacacgctgcaggccgggttccccccaaagccgcttgaagacacggccaagaccatcgaggaagccggcgtggccaactcggtaatcattcagtcagtctagcttggcagaacaggtgccgcaaccctattccatcgaacacgctaggcatctgaa

SEQ ID NO: 95054 - DNA, 495 bp, Zea mays
  unsure (1)..(495): unsure at all n locations
cgatgcctgtgaggacgtcccatcncggatcgcagtgacggtaccggtccggaattcccggggcgacccacgcgtccgaacagaacgccggctcgttcctcgccgtgcgtcgcctctccggtggcgccagccagcaccatcgtcaccactcttccccggctgaggtcgtgggcgtgtccactgcgtggctcgttaaggggctttcatgcgtctgcgcgcagaggagggagagcgacgtgcgcctgtccttcgatttgagtcccattcaggaagagtgcttgaataggttgcagaaccggatagaggtgcagtatgatggttcaaatctggagcatcagaaagcactggaagccctttggcgttcttcttttcctggaactgaacttctagggctagtatcagaccagtggaaagagaatggatggcaacgtaaagatccatctacagatttcaggggcggcggctttatatctttggagaatttactgtatgtct

SEQ ID NO: 95055 - DNA, 499 bp, Zea mays
  unsure (1)..(499): unsure at all n locations
ggttagaaggcctntggctatgtggggagttattgcacgctctaccggtccggaattcccgggtcgacccacgcgtccgcggacgcgtgggtgcaagaggaggaattagaatctgcaatatccctttgtagtgcgttggagttccttaatgtgcattcttgtccaaagatcaatgctttggattttggcagactccgtttgggttgccccagtctgaagcgcatccagagcagcctcatctcataatacagaggctgctaccatataaaggagggcaattcatgcaataagccgctgctcagatttgaagaaaaaaacaaggggatgtttggtttctagggactaatttttagtccctacattttattctaatttagtctctaaattgctaaatatggaaactaaaactctattttagttttcgtatttggcaatttaggaactaaaatggaataaaaatatagggactaaaagttagtccctagaatccaaacaccan

SEQ ID NO: 95056 - DNA, 491 bp, Zea mays
  unsure (1)..(491): unsure at all n locations
agagggtgctgaggnttgaactgtagttacgtgtactgttcgaattcccgctcgacgccacgcgtccgaggtctgactggaacagcacgttatgctagtgtgaatactcatcttggaatagaacggaggaggagagatgatctggagtctgttggctatcttctgctatattttttaagaggaagcctcccatggcagggccttaaagctggcactaagaaacaaaagtatgataaaattagtgaaaagaaaatgcttacctcggcagagattctgtgcaaatcttacccgccggagttcgtctcatatttccactattgtcgctccctgcgatttgaagacaggccagattactcttcaatgaagaagctctttcgtgatgtatttatacgggaaggataccaatttgattacgtatttgactggactgcactcaagtaccctcaaatgggctccaacaacaagcttgttcaacaaccaagtgcaagaan

SEQ ID NO: 95057 - DNA, 504 bp, Zea mays
  unsure (1)..(504): unsure at all n locations
gtttgttcgggagtcngtgggccatccgataaagntngctcgtacaggtccggaattcccgggtcgacccacgcgtccgcacgacgcgtaccaggtcgtgtaccggatcaacgtcggtgggcccgccatcggccgcgcggaggacacgctgggccggcgctgggagagcgacgcggcgtacgtgcagtccaaggaggcggtgaaggacgtgtcggtgcccaccagcaccatcaagttccccgacggcacgtcacggctggtggcgccggcgctggtgtacgccagcgccgcgaagatggcggacgccgacgtggcgagccccaacttcaacctgacgtggaaggtggacgtggacgcgtncttcagctacctggtccgcctcttcttcgccgacatcgtgagcaaggccaccaacgacctctacttcgacgtgtacctcagcgggcgcaaggccgtgtccgggctggacctgtcgacggtggccggcggcgagctggcggcgcc

SEQ ID NO: 95058 - DNA, 510 bp, Zea mays
  unsure (1)..(510): unsure at all n locations
ggggttnttgttagccgggtgggatgtaggggaggtagtattgcactgctcgtaccggtccggaattcccgggtcgacccacgcgtccggccgacgtggccgccgagctccggagcagggccggggtgcccgtcttcgtgatggtgccgctcgacaccgtgcgcaaggacggcaactcgctcaaccggcgcaaggccgtggaggccagcctggcggcgctcaagagcgccggggtggagggcatcatggtggacgtctggtggggcatcgccgaggccgacgggcccgggcagtacaacttcaacgggtacatggagctcatggagatggccaagaagaccgggctcaaggtccaggccgtcatgtccttccaccagtgcggcggcaacgtcggtgattcagtcaccataccacttccgggatgggtcttggaggagatggacaaggaccaggacctggcctacacggnaccgagcggccgncggaactacgagtacgtctncctgggct

SEQ ID NO: 95059 - DNA, 493 bp, Zea mays
  unsure (1)..(493): unsure at all n locations
agccngtgggcatgcgtgggagagagaaggatcgtcgtaccggtccggaattcccgggtcgacccacgcgtccgcccacgcgtccgccgccctttttttttttttttttttttttttttttttttggtttgaagtagtagagatatatatatatattctgcaagaaacaagatgcttagctggaacgcaatagaatatggaaaagtgaaacggaagaagaatgcatgcaaatgcaaggtcatcgatcagacgaggcaatccagggcctggaggctccccaggaggttgatggttaacttgccagatgcacccaacagaaagaagattcttagcgtgatactagcaaaagaagatttggcagatgatgtagatctggaggcgctagcaaacctgacagatgggtattcaggcagtgatctgaagaacctgtgtataactgcagcacatcgtcccataagggaaattcttgaaagagagaagaaggagagaacct

SEQ ID NO: 95060 - DNA, 496 bp, Zea mays
  unsure (1)..(496): unsure at all n locations
tgtaatgcctgtgtaatgattagatattatgcacgctctaccggtccggaattcccgggtcgacccacgcgtccgacccacgcgtccgctttcttcgaacgcaaaaagaaccccacccgacgtaccgcgagccggcgatggcgacggtggcgatggacatctcgaagcccacgccggcagcgtccggtgacgaagtagcggcggcggcgaaggggaggagcggcggcgggggcgaggggctgcggcagtactacctgcagcacatccatgacctgcagctccagatccggcagaagacccataacctcaaccgcctcgaggcccagcgcaacgacctcaactcccgagttagaatgctcagggaagagttgcagttgcttcaagagcctggctcatatgttggtgaggtggtgaaggtcatggngaaatcaaaggttctggtgaaggtacatcccgaaggcaaacatgtggtggatatagataagagcattgatat

SEQ ID NO: 95061 - DNA, 493 bp, Zea mays
  unsure (1)..(493): unsure at all n locations
aggcncctggatgggggagaagaaagcatcgctctaccggtccggaattcccgggtcgacccacgcgtccgcggacgcgtgggcggacgcgtgggcgattccatttctaccccgagacctccagcgcggcgcccctgaaccctcagccttctccgtcccgcctcggcactcgacggccgccggcacacaccgcgcagtctcgagacaggaaccggaggaacgaggatggaggatgactcgccgctgacgaagacgatgaagggtgcggtgacaggactcgccgcggggaccatctggggcaccgtcgtcgccacctggtacgacgtgccccgtgtggagcgccacgtcgcgctccctggccttatccggacgctcaagatgtgcggcacctacggggccaccttcgccaccatcgggggcctctacatcggcgtcgagcagctcgtgcagagccagcgcaagaagcgcgacttcgtcaacggggccgtcggcg

SEQ ID NO: 95062 - DNA, 498 bp, Zea mays
  unsure (1)..(498): unsure at all n locations
agttaggcctngtgtgatgattagatattattgcactgctctaccggtccggaattcccgggtcgacccacgcgtccgggcgtacttgcgtttgccgtctcttccctgctgccgtctctgtccggagggcaagccatggcggcgggcggggacggcgtcgctcgccaggcggagctccgccggatcgagggcaacatctgcttcaagaaggcgcgcctcggcgccgccatcgactgctacaccgaggcaattgcgctctgccccgacgtcgccgtctactggatcaatcgggccctatgccatttcaagcgcaaggagtgggccaaggtcgaagaggacagcaggagggctcttgcgcttgattacactttagtcaaggggcactatctgctggggtgtgcgctactcgagaaggaagaatctgctcttgctatcaaggaattcgaaaaggctctaactctcttaaagtctgtggattcaacgtatgaaatggctgag

SEQ ID NO: 95063 - DNA, 503 bp, Zea mays
  unsure (1)..(503): unsure at all n locations
ngtnttgaggnnnnnnnnaaatgaatgagatgtattgtatactcgtaccggtccggaattcccgacccacgcgtccggacagacagcacgaaggctgtgcaggaggcatgggcatcggcgtgcggcggcactgggaagcagacaatcctcatacccaagggtgacttccttgtcggacaactcaacttcacaggcccttgcaagggcgacgtgaccatccaggtggatggcaatctgctggcgaccacggacctaagccagtacaaggaccatggtaattggatcgagattctacgtgtggataacctggtcatcaccggcaagggaaaccttgacgggcagggcccagccgtgtggagcaagaactcctgcaccaagaagtacgactgcaagatccttcccaactcgctggtgatggacttcgtgaacaacggggaggtgtccggggtcacgctgctcaactccaagttcttccacatgaacatgtaccggtgcaaggacat

SEQ ID NO: 95064 - DNA, 497 bp, Zea mays
  unsure (1)..(497): unsure at all n locations
aggggnnnnnccatgaacgaaagtacgtactactcnccggntcggaattcccgggtcgacccacgcgtccgcagtacaccacacactcgcctttccgatcccatccctctccagccaccttcctccgctggccgtgcttctgcttcctccgccaccaccgccggcatggctgcgcgctgcccctacttcgccgtcgaggagtcctcccgcggcatccgctcgggggagtccccggccgcggcgctccgccggatcctcgcgacgcctggtgcgcaccaggcgccctgctgctacgacgcgctcggcgcgcgcctcgtcgagcgcgcggggtttccgatcgggttcatgggcggtttctgtgtttctgccgcgcgacttggcttgcctgatgttggcctcatttcctatggagaaatggtagatcaagggcgtctcatcaatgaagctggttcaatcccagtgattggtgatggagacaatggttacggaaattctat

SEQ ID NO: 95065 - DNA, 497 bp, Zea mays
  unsure (1)..(497): unsure at all n locations
ggggagagggtnttgtcatgaagtagaataagcatcgctctaccggtccggaattcccgggtcgacccacgcgtccgcaatgccaagcctaagccactagccgcctaccttttcaccaagaataggaagctgcaagaggagtttgtggcgagcgtccctgcaggagggatgcttgtaaacgacactgcgctacatctcaccaacccgtacatgcccttcggcggcgtcggcgacagcgggatgggctgttaccacggcaagttcggcttcgactgcttcagccacaagaagggagtcctgatccgcggctttggcggcgaggcgaacgccaggtacccgccctacacgacggagaagcaaaagatcctgaggggcctcatcaacggcagcttcatcgccctcatccttgccctcctgggcttccccagggagaagcgttagatgctccggcctctttttggtttcggtacagcctttgtagtccctgttcgtcgtca

SEQ ID NO: 95066 - DNA, 501 bp, Zea mays
  unsure (1)..(501): unsure at all n locations
tggggnnnnnnntttgaatgcagcctaagcacgctctaccggtccggaattcccgggtcgacccacgcgtccgcccactgctataggcagcccacatgcgcgcgcactcccaagtcccaagtcctaagctagccagctgagctcgctcccagtccaagcgccggcgccaccaccgcagctgctcgctggtcaccatgagcaaggagaagcaccaccgcgactggatcctccggcgctgctgtggctccctcgccgcctgcatcctgacgctggccgccgtcgtcggcttcatcgtgctcgtcatcttcctggcgctgcgcccctccaagccgtccttctacctgcaggacgtgcagctgcgctccatcgacctcagcgacccggcgctctccctcgacctccaggtgacgatcgtgtcgcggaacccgaacgagcgggtgggcgtgtactacaagacgctggacgcgttcaccacgtaccgcgacgaggcggtgacggtcc

SEQ ID NO: 95067 - DNA, 523 bp, Zea mays
  unsure (1)..(523): unsure at all n locations
gtccgtgctgttaagagggggaggaggtctcttcccgtccggaattcccgggtcgacccacgcgttcggtacataggcccaaccctgcttgaggctcttgaccagatcaccgagcccaagaggccttcggacaagcccctgcgtcttgcccctccaggaatgtgtacaagattggtggtattggaactgtaccggttggtcgtgtggagactggtgtcatcaagcctggtatggttgtcacctttggtccaactggcctgactaccgaggtgaagtctgttgagatgcaccacgaggcgcttcaggaggctcttccgggtgacaatgttggcttcaacgtgaagaacgttgctgtcaaggatctcaagcgtgggtttgtggcctccaactccaaggatgaccctgccaaggaggctgccagcttcacctcccaggtcatcatcatgaaccaccctgngcagattggcaacggctatgccccagtgctggactgccacaccttccacattgctgtcaagtttgc

SEQ ID NO: 95068 - DNA, 537 bp, Zea mays
agaacgtgtacgtgttttcgtttacgactgctcatgcactttcgttccggtccggaattcccgggtcgacccacgcgtccgcccaaagttcatcactgataccaaggctgctatcgccgaaacttacaacctaacagattcagaatttctgaaagctgatagctgtcaaactcgagatgctggctcaactgcctcaacagctattattgtaggtgaccgtttgcttgttgcaaatgttggagattctagagccgttatttctaaaggaggacaagcgattgcggtttcaagggatcacaaacctgatcagacagatgagagacaaagaattgaggacgcagggggctttgttatgtgggctgggacatggcgagtgggtggtgttcttgctgtctctcgcgcatttggtgataaactcttgaagcagtatgttgtcgctgaccctgaaatcaaggaggaagtggtcgacagctcccttgaattcctcatccttgctagtgatggactctgggatgttgtcactaatgaggaagctgt

SEQ ID NO: 95069 - DNA, 530 bp, Zea mays
agttagcgtctgacgctgaaacgaagtatgacgcactgacgtaccggtccggaattcccgggtcgacccacgcgtccgcgacggcaacctgctcggcaccggcgaactcatcgcgtaccagaggaactggatcgagatgggggaacgtcgagaacctgtccatcaacggccactgcaccatctacgggcacggagccctggtgtggagcaagaaccagtgccagcattcttacaattgcaagatcctcccgaatagcttggtgctggattttgtgacgaacgtccagatccgcggcatcacgctgctcaacagctagttcttgcacctcaacatcttcgagtgcaagaacgtgctgatcgacaaagtgacggtcaaggcccccggcgacagccgcaacacggacggcatccacatcggcgactccatcaacgtgaccatcagcagcaccaccatcggcgtcggcgaccactgcatctgcatcggccccggtagcaagatgatccgcatccatggcgtcaagtgcggacca

SEQ ID NO: 95070 - DNA, 529 bp, Zea mays
  unsure (1)..(529): unsure at all n locations
agagtggtcggtntggtacagtacccgcagantacgcattgacgtaccggtccggaattcccgggtcgacccacgcgtccggatggttctaatgttctgactaatgaacagctggatgcttatgtagtgaaccctgtgacttggtcaagaccaactattcagcattctcgatgtttcaccaagttgtgcatatattggtacaaatacaaaggtttcagttactggtacattcttggtgaataaagaacatgtggaaagtcacaggtggtcatgtatgtttggggatgttgaagtaccagctgaggttttgaccgatggcaccctacgctgctatgcaccagctcaccaatcaggaagagttccattttatgtaacctgttcaaacagggtggcttgtagtgaagtgcgagaatttgagtatcgcgattctgaagctcattacatggagacttctcgttcccaagccaatggtgtaaatgaaatgcatctacacattcagcttgagaagctactcactttggggccaaat

SEQ ID NO: 95071 - DNA, 537 bp, Zea mays
  unsure (1)..(537): unsure at all n locations
cggcgcgctcgtgtggtccgaaacaagcacgtattacgcactggcgctcggaattcccgggtcgacccacgcgtccgcggacgcgtgggttttggagttcaagcccgcacgaaatggagaacagtgccttgcaatccggacacagtatgtcctcaatcagcactgctgcacaacctaatgatcagcatgcttctggaagtagcagctccccaaatgaatttgtaaatcaagcaggaaataatatattatgacagagagtctctcacgtataggccaactcctgaaattggtcacacacatggccagatgtaaactatttgttcttatggctcccgaattccaaccctatagggtcttctactatggcaccagactagacagcagtggattggaaaacgaagacataattctcagggtcaacaaagtcaaagaccaaaaataagttgtaatgctacatacgagagcctgctcgggagctcgaaaccatttgcacaaccgatccctcttggtgaaatggtgggtttcctcgtgatcaan

SEQ ID NO: 95072 - DNA, 529 bp, Zea mays
  unsure (1)..(529): unsure at all n locations
tgcccgctanctgtgtccattctcgagncgtanttgcgtacccgtccggaattcccgggtcgacccacgcgtccgcttgctggtattatgtgtgggcaatttggtgtgcctttctgggagttcttgtttgctactgggattgggaaagccatcatcaagactcatattcagacactatttatcgtgtccctgtgcaacaatcagctcttgtatcttattgaaaaggagttaatctggatatttggtcacgttcctgggttttctgccacccttccgtctgtgattgccagactccatgctgccaacgacaagtatctatcaccaccagccccagtctcaccgtcatcacaaatgggggagaaacagtggaatttctcttttacatctgtctggaactctatagtgtggcttgtgcttttgaacttcttcattaagatagtcacgtcaacagcacaggattatctcaaaaagcagcaggatacggagatggaacttatttcggattccccgatccatgaccattctaaaa

SEQ ID NO: 95073 - DNA, 538 bp, Zea mays
tgatagtgcgtatggaactagaccgacccatgactgcactgtacgtaccggtccggaattcccgggtcgacccacgcgtccgcactaccataatatgaagacggaggactcatcctaccccatcttcatcgacatgaagtacggtcccaacaagttgtgtactgtcaacggcgccttcatggtcaccgacttggatgtcaccttcaagaacatcaccggcacctgcttcaacccggaggccgatagcctgctctgcactgacaaggttccatgcaccgtcgttaccatggatgacgtcaacgtcaagtatagcggcaccaacatcaagaccatggctatatgcacgaacgccaagggcagcaccaagggctgcctcaaggagcttgcatgcttctagacccttcatcgactgacccatctctctagttataatgtatatctcgtacttgcattgcccattcgatgctatccattggtaactcacaacagttaaacgacagacatccgacagctatattatgttcgacgatgtcacacc

SEQ ID NO: 95074 - DNA, 530 bp, Zea mays
  unsure (1)..(530): unsure at all n locations
agttgcctggtgctnaagcctgggtntccatntatgctagtactgtcgttccggtccggaattgccgggtcgacccacgcgtccgcagaccaagacgtcgcgcgccgacgacgcggtcgacgccgtgtcgcccgaggcgggcgaggggctgcggatcgtcgacgagatcctgccctacctcggcgccaccaacctgtgggactacctgccgttcctgcggcggttcgacgtgctctgtgtgaggaacaagatcatggacgttgtccgcaggagggactccttcctgcagcggctcatcgacgctgagcggcggatgctggacggcgacggcgacggcgaccagaagaagagcatgatcgccgtgatgctctcgctgcagaagtcggagccggacgtgtacactgacaccatgatcatggcactgtgcgggaacttgtttacagccggaacggagacgacgtcgtccacgatagaatgggccatgtcgctgctgctgaaccacccggaggcgctgaacattgccgatgcac

SEQ ID NO: 95075 - DNA, 525 bp, Zea mays
gaaggccgtgtgtctgactcccgcatattacgtattgacgtaccggtccggaattcccgggtcgacccacgcgtccgcagaccaagacgtcgcgcgccgacgacgcggacgacgccgtgtcgcccgaggcgcgcgaggggcggcggatcgtcgacgagatcctgccctacctcggcgccaccaacctgtgggactacctgccgctcctgcggcggttcgacgtgctcggggtgaggaacaagatcagggacgttgtcggcaggagggacgccttcctgcagcggctcatcgacgcggagcggcggatgctggacggcgacggcgactgcgacgagacgaagagcatgatcgccgtgatgctctcgctgcagaagtcggagccggacgtgtacacggacaccatgatcatggcactgtgcgggaacttgtttacagccggtacggagacgacgtcgaccacgatagaatgggccatgtcgatgctgctgaaccacccggaggccctgaagaaggccgacgcaaaga

SEQ ID NO: 95076 - DNA, 529 bp, Zea mays
tgcgcgcggttaaactggcccagcccactacgcactgacgtaccggtccggaattcccgggtcgacccactcgtccgcccacgcgtccggagaatccccaagcaatcaaacagggtacagggagaggataggagaggagaggagaggttgggtctgggacaccatggatccgctgaagctgtacggggcggtgatgtcgtgaaacgtgacgaggtgctcaacggcgctggacgaggctggctccgactacgagatcgtgcccatcaacttcgacaccggcgagcacaacatcctggagcacctcgtgctcaacccgttcggtcaggttccagctctgcacgatggcgacttgtacctcttcgaatcacgagcactctgctactacgctgctcgcaaaatcaagccagagctgttgacggaaggaaacctcgacgaggcagccatggtcgatgttttgatcgaggtgcaggctatccagtacaccgttgcactgaatcccatcctcttgcaggtcctcatcagtactatg

SEQ ID NO: 95077 - DNA, 524 bp, Zea mays
  unsure (1)..(524): unsure at all n locations
gactgcgctgngctgacaagaacatcacgnactgacgtaccggtccggaattcccgggtcgacccacgcgtccgcccacgcgtccgcacgccacaggcaaggcacagaggcttgtgagggagagcgaggagcggaggaggacatggtgcacgggacgctggaggtgctgctcgttggggccaagggcctcgagaacaccgattacctctgtaacatggatccgtatgcaattctcaagtgccgttcacaggagcagaagagcagtattgcaactggaaaaggaactacccctgagtggaatgaaaactttatcttcactgtgtctgaccggacaacagacttggtaatcaagattatggacagtgatacaggcacagcagatgactttgttggtgaagcaacgattccattggaagcagtgtatactgaaaggagcattccaccaacactctataatgttgtgaaaggtgaaaaatactgcggggaaatcaaagttggtctcacattcactcctgaggatactc

SEQ ID NO: 95078 - DNA, 529 bp, Zea mays
  unsure (1)..(529): unsure at all n locations
agaaggccgtntgtacgatacacgcagactattgtacttctctaccggtccggaattcccgggtcgacccacgcgtccgcccacgcgtccgacgacaaccacggcaagttcacggccgggccgtggaaacccggccacgcgaaccttctacggcgggcgtgacgggtccggcaccacggcgggcgcgtgcgggtacaaggacacgcgcacgcaggggtacggcgtgcagacggtggccgtgagcactgtgctgttcggtgacggcgcggcctgcggagggtgctacgaggtgcggtgcgtggacagccctagcgggtgcaagcccgacgcggcagcgctggtggtgacggtgaccgacctgtgcccgcccaaggaccagtggtgcaagccaccgcgggagcacttcgacctcagcatgcccgcgttcctgcagatcgcgcaagagaaggccggcatcgtgcccatcttctaccgcagggtggcgtgcgcgaagcanggcggcatccggtacaccatcaccgggaacaat

SEQ ID NO: 95079 - DNA, 528 bp, Zea mays
tggagcagtgccgtatgatgatgaccgaactcatcatgtactgacgtaccggtccggaattcccgggtcgacccacgcgtccgctggaagactggcgtcaaagtggagacccagaagatgatgctgggaacgttcaggccccagctagagccctatatctacgagggcgaagaagagacgacacctgctggcatttttgctagaggctcctattccgctaaactaaagtttgttgatgacgatggcaagtgcttcttggagatgagctactactttgagattaggaaggagtggccaggaggccaatggatgtggccggaccagcagggcagagctgactcgtcggagtacgctgttgttagagctcatagcaaaaagccaagcagaaaatatgtgctatcgcttcaagaatgtttcactactttcttcgtcattatcgattgtgttttgatttgtttcgagctgtcattaattgtatgttgtttgtcgcataaggctgcttattcgcatatataattcctgtatcca

SEQ ID NO: 95080 - DNA, 537 bp, Zea mays
  unsure (1)..(537): unsure at all n locations
ggatggatgnnaggagggcgtntttacgatcaggagtacatcgcactgacgtaccggtccggaattcccgggtcgacccacgcgtccgcccacgcgtccgggccggccgtcatgctggcacagccgcacggctccagcagccgcaaggatgtccaggtcgccttcagcaacgccgaccacaaggacagcagcaccaaggtggaacagccggcggacagctccttgaagccggcgagcctgaacgcgttcgacatcatctcccactccagagggttcgacctgtcaagcctgttcgaggtggaccaagagcagaaggccagcaactcgcggttcatgacccagaaaccggcgtcggcgatagtgtcaaagctggagcagatcgctgagacagagcgcttcatggtgaagaaacaggacgggctggtgaagctgcaggggtccaagcaagggaggaaggggcagctcgcgatcgacgccgagatcttcgaggtgacaccggcctttcacgtcgtcgaggtgaagaagtcggcaggcgac

SEQ ID NO: 95081 - DNA, 523 bp, Zea mays
  unsure (1)..(523): unsure at all n locations
ggtggtgttcacgcccgggacgtactgacgtaccggtccggaattcccgggtcgacccacgcgtccgctcttatccacccgcgcgcccaccgccgcgcgcagcaccgcgccgcccacccgcggtcaccgcagcgccccaaatgccgctccaaccctagcctctcgccatgcctttcgatctcgggcggccatgggaaactgatgccgctcgccggtcgccgtcgcgcgggaggacgtcagctcctcgcactttcccgcatccacctcgtcatggagctctgcgagggcggcgagttcttcgaccgcatcgtcgcgcgggggcactacaccgagcgcgccgtcaccaatgtcactcgcaccatcgtcgaggtcgtccatttctgccatcggcacgacgtcatccaccgtgacctcaagccggagaacttccttttcgccaataagaaggagaactcgccgtcgcgcagcgcccctctcgatatgccgccctgcttcctnctcttctcttgatccatctgccatc

SEQ ID NO: 95082 - DNA, 532 bp, Zea mays
tgagacggtgctgtttctagctcagtacgtacatgctatactcgtccggaattcccgggtcgacccacgcgtccgggaacatccatcgatcttcccccagcggcgaggagagccggcggtcacaggaaggagaaagggcttgcgcacacaacgctctccgggtgtttttcatcctagccgtggtatgtgccgtatgcacagcgaaaaggacaggagccaacaaggaagaatcggcggcagcccccggtggcgctgctggaggcagcggcgggacgttcgacatctccaagctcggcgcgaccagcgacggcaagacggactgcacaaaggcagtccacgactcgtggacgtcagcgtgcgaagcgaccggaagcgccacggtggtgatccccaagggcgactacctggtcggtcctctcaacttcactgggccatgcaaggggagcaacatcgacattcagctggatggcaacctgcttggatcaaacgacctggacaagtacacggtgagctggatcgaattgtctcacct

SEQ ID NO: 95083 - DNA, 539 bp, Zea mays
  unsure (1)..(539): unsure at all n locations
gtatggaagggaggaggtgcgctaaagactgaagttcagntctgacagtactgttcgtaccggtccggaattcccgggtcgacccacgcgtccgcggactcgtgggcggactcgtgggcggactcgtgggcggcgtgcacatcagctgggtgcgctcggtcaccatggactcctggaccgaggcgcagctccgcaagatggaggccggtggcaacgaccgactcaacgccttcctcacagctcgcggcgttcctaaggagacgccccacgtcgccaagtacaacttcaacgcctcagccgcctaccgcgaccgcatcgccgcgctcgctgagggaaagccgtggactgacccgcccgtggtcaaggagactcccggatctggcgcccccgcccccgctaggaagccgcccgtgcacacatctgccgactccggctgcggctggtgggacgactgggacgacgattttcggccggacatgatgcggaatcagtcggttggatcgttcgtcgacgcgggtgcgcagtcagggaggcagccn

SEQ ID NO: 95084 - DNA, 527 bp, Zea mays
  unsure (1)..(527): unsure at all n locations
aggtgagtagttcacgcaagggatagtactgctcgtaccggtccggaattcccgggtcgacccacgcgtccggatctctgctcccgatccatctccggctgccgcgcgcggtagatctccgttcggcagcgtgtgatctgcccgatccgtgcggttgggtctggatcgggtggtgaaggtagcgggcgcggaggaagatggggctcgcgttcgggaagctcttcagccggctcttcgccaagaaggagatgcggattcttatggtcggtctcgacgccgccggtaaaaccaccatcctctacaagctcaagctcggcgagatcgtcacaaccattcncaccatcggtttcaatgttgaaactgttgagtacaagaacattagcttcacggtctgggatgtcgggggtcaggacaagatcagacctctctggaggcattactttcagaacacacagggtcttatctttggtggggatagcaatgaccgtgaccgtgttgttgaagccagagatgaactgcacaagatg

SEQ ID NO: 95085 - DNA, 527 bp, Zea mays
  unsure (1)..(527): unsure at all n locations
cggtgcgtgttcacgaaagagcactgtacttctctaccggtccggaattcccgggtcgacccacgcgtccgaatcctcatacccaagggtgacttccttgtcggacaactcaacttaacaggcccttgcaagggcgacgtgaccatccaggtggatggcaatctgctggcgaccacggacctaagccagtacaaggaccatggtaattggatcgagattctacgtgtggataacctggtcatcaccggcaagggaaaccttgacgggcagggcccagccgtgtggagcaagaactcctgcaccaagaagtacgactgcaagatccttcccaactcgctggtgatggacttcgtgaacaacggtgaggtgtccggngtcacgctgctcaacttcaagttcttccacatgaacatgtaccggtgcaaggacatgctgatcaaggacgtgaccgtgacggcgcccggtgacagccccaacacggatggcatccacatgggcgactcatccgggatcacgatcaccaacan

SEQ ID NO: 95086 - DNA, 535 bp, Zea mays
  unsure (1)..(535): unsure at all n locations
tgtcgctgcntgattacgaccacgaaagactatagtactgctcgtaccggtccggaattcccgggtcgacccacgcgtccgcccacgcgtccgcccacacagaaaaccctagccgccgccaccgaagcggcctcccaggtaagcaggatcgtccagcccgccgccgccatgaagcgcaatccccgcgtcacgagctcccgccggaagtgccgcaaggcgcactttacggccccgtccttcgttccgccgggttctcatgtccgcggggctgtcgacggagctccgccacaagtacaacgtgcgctccatcccgatccgcaaggacgacgaggtgcaggtcgtgcgcggcacctacaagggccgtgaggggaaggtggtgcaggtgtaccgacgccgctgggtcatccacgtcgagcggatcacccgcgagaaggtgaacggctccaccgtgaacgtgggcatccacccctccaaggtgatcgtcaccaagctgaagctcgacaaggaccgtaaggcgctcctcgaccgcaaggcc

SEQ ID NO: 95087 - DNA, 529 bp, Zea mays
  unsure (1)..(529): unsure at all n locations
cgcttctgtngactgccaggcccagtgacgtactgtctgtaccggtccggaattcccgggtcgacccactcgtccgatttcatcaacgaaattcgtcaggctggcagaaatggagaactttcaggtgagactttcatgttcttcaacaagcagatcataggaatcaagagggagatcatacagcttggtgtaccgttatttcaacctaccacagaggatgctaattgtcacacataaccaatcccccttgtcctgcaggctgtcattgaccaccttgttctttggcgtttaataccagaaagcaggaaaccaaatagtgtcgacatcaacttcttcgatgaggatgaacattcgcatccctacttcaagcctccccatcttgacaaccccatttgcactcttctgctgtctgaaaccacgatggcatttggcatgtcacttgtcactgacagcaacggtaactacaaaggacctgtcacactttcactaaagcaagggtacttactagtgatgcttgggaacagtgccn

SEQ ID NO: 95088 - DNA, 543 bp, Zea mays
  unsure (1)..(543): unsure at all n locations
gtatatatttagataggccgtntagactagcaaagcatgactacgcactgacgtaccggtccggaattcccgggctacgaggtactcaccgagcctctcaaccaccatgttgcactgtccaggggtcatgggctcgtcgtagagcaaggcctgtgattgaatgcatccaaacaacgacaccaacgccaacattaattaattagtagtctccatgccctgggattgtgcgtggccgctccgttaaacaccacccatccttcgttcggcattttttcccccttgtttatataattttattgtatcgttttggcaaataattttgtgattcgaccccaaagcaagtttggttgtcttacgatttgtaaacctggaacaatatataatgtgattgaactgctttgtctaaaaaaatagaatctaaatatgcaaaccccgtggccgtcaataaacgattaaacactaacgtactaaaggccacaaaacagaaagtcgctaacaaagtacaaatagtccgtgcatggcaaaaaaagggggggaacctcc

SEQ ID NO: 95089 - DNA, 528 bp, Zea mays
ttcggtctcgagttcaaatcgctagtgacgtactgactgtaccggtccggaattcccgggtcgacccacgcgtccgcatggacatccagcataactcggtgacggcgctcgggcgcaccgaccccaacatgaggtccgggctcttcatccagaactgccgcctggtgcccgaccagaagctgttcccgtaccgtttaaagatcccctcgtacctgagccgcccctggaaggagttctcacgcctcgtcatcatggagagcaccatcgccgacttcgtcaagccataggggtacatgccctggaacggcgacttcgccctcaagacgctctactacgccgagtacaacaaccgctggcccagttcctgcaccagcaagagggtcaactggccctgcttacacgtcatctgacggaaggaggccgagccgttcaccgccgggccgttcatcgacggcgccatgtggctcaagtacaccgtcacgccgcacatactcggtttcaagttctaaaggccgcatggcatgccat

SEQ ID NO: 95090 - DNA, 532 bp, Zea mays
  unsure (1)..(532): unsure at all n locations
cgcggctnntttccgtaccagaccgctacggactgacgtaccggtctcggaattcccgggtcgacccacgcgtccgcccacgcgtccggcattctcttcccttccctgagcaaagagaagtagccacaagcatgtggggcatcatcgacaagatccaggagacgctccacatcgggggcgaccacaaggaggagcacgagcacaagaagggcgaggagcaccacaagaagggcgaggagcaccacaagaaggacgacggggagcacaaggagggcatcgtggagaagatcaaggacaagatcaccggcgagcacggcgacaagtccggcgaccacaaggacaaagaccataaggagaagaaagatcagaagaagaagaaagagaagaagcacggggaaggccatgaccatggtgatggtgacggtcacagcagcagcagcagcgacagcgactgatctcgcctcgccgagcgccgtacgcacaaatgcaccgtgccaggtataatacgagctgtccgcgaacaacatgcgcc

SEQ ID NO: 95091 - DNA, 525 bp, Zea mays
  unsure (1)..(525): unsure at all n locations
ntagtgnctgaaagggagggggaggggatgtgtgcacccgtccggaattcccgggtcgacccacgcgttcgcccacgcgttcgcgataaagtccccgctcccgtgaaagagaaggtggatgtgaagctccaggagctcaaagaggcaatatctgggtggatcaacacagagtatgaaggatgccatgtctgctttgaaccatgaggtgatgcagattggccaggcaatgtataaccagtctggtgccagtgctgctgggtctactcctggtgctgaggctgggcctacccctggtaccggaccagtgcagaatgatggggatgtcattgatgcgaacttcacagatagcaattgaggggtgatcgatgcatgaccatgtgttgagcatggttggcataaaggagagtgagcaaatagttccttttttgtgttgggatttttactgtaggctatctagtatggagttgatagcggtagtgtttcgcgaacttttctctcgtgattttgactcaacaattggctgaa

SEQ ID NO: 95092 - DNA, 530 bp, Zea mays
  unsure (1)..(530): unsure at all n locations
acgtactagtttctgcatcgcgccgtcatcgcactgccgtaccggtccggaattcccgggtcgacccacgcgtccgcccacgcgtcctgtgctacggccctacgcggcgcagggccggtcgcagttccaggaggagggggaggtgctgagctgcatgcggcaccccaacatggtgctcctcctcggcgcgtgcccggagtacggatgtctcatgtacgagtacatggccagcggcagcctggacgactgcctgttccagcgctgcggcggcgcctgcgggaccgtcatccgctggcagtaccagttccgcatgtgcgccgagatcgcgacggggctgatgttgctgcaccagaccaagccccgagccgctggtgcacctgcacctcaagcccaggaacatctgctggaccgaactacttgagcaagatcagcgacttctggctggcgcggctcgtgcctccgtccgtcgncgacaccgtgacgcagtaccgtatgacgtgcaccgcggtgaccttctgctacatcgacgc

SEQ ID NO: 95093 - DNA, 530 bp, Zea mays
  unsure (1)..(530): unsure at all n locations
gcacggccgtgtttctgcactacagatatctcgtactgacgtaccggtccggaattcccgggtcgacccacgcgtccgcccacgcgtgcgtcgaaatctgcgtggcacccatatggctgcggtcgatgcggcggaataagaacgtaatcatagacaccgaccccgtaattgatgacgcgatggccatcttcttggcgctgcggtctccggagctggaggcgctgggcctcaccactaccttccgcaacgtgcacaccgccctcgccacgcgcaacgcgctccacctgctggaggctgttggcaggactgacatcctcgtggcagatggatcccatgtaacgatcaagaaagccaccaagctgaggatcgcaagcttcgtccacggttcagacggcctgggaaaccaggacttcccttcaccagctaccaagcctgtagatcagtctgctgctgccttactggctgagcaggcaaatctgtaccctggtcaagttagcattgtcgccctcggaccacttaccaaccttggn

SEQ ID NO: 95094 - DNA, 532 bp, Zea mays
  unsure (1)..(532): unsure at all n locations
cgtgactatgtctgcatccgccngactacgcactgccgtaccggtctcggaattcccgggtcgacccacgcgtccggtctgggtcgctcgctacattcttgagaggatcacggagatcgccggtgtggtggtgacggtcgacccgaagccgatcccgggcgactggaacggcgccggcgcgcacaccaactacagcacggagtcgatgaggaaggagggcgggtactaggtgatcaatgcggccatcgagaagctgaagctgcggcacagggagcacatcgcggcatacggcgagggcaacgagcgccggctcaccggcaggcacgagaccgccgacatcaacacgttcagctggggcgtggccaaccgcggcgcgtcggtgcgcgtgggccgggagacggatcagaacggcaagggctacttcgaggaccgccgtccggcgtacaacatggacccctacgtggtcacctncatgatcgccgagaccaccatcatatggaagcccgagggctaaggcggacgttccgtcgcg

SEQ ID NO: 95095 - DNA, 524 bp, Zea mays
tgagcttgtgagttgcatgcctcatgacgtagtgacgtaccggtcttgaattcccgggtcgacccactcgtccggtctgggtcgctcgctacattctggataggatcacggagatcgcctgtgtggtggggacgggggaccctaatccgatcccgggcgactgaaacggcacacatgcgcactctaactacagcacggagtcgatgaagaaggaggtcgtatactaggtgatcaatgcggccatcgagaagctgaagctgcggcacatgtagcacatcgcggcatactgcgagggcaactagcgccggctcaccgtcattcacgagacctcctacatcaacacgttcagctggggcgtgaccaaccgatgcgcgtcaatgctcgtgttccgatagacggatcatatcgacaaggtctacttctaggaccgtcgcccagcatccaacatggacccatacgtggtcacctacatgatctccgaaaccaccatcatctggaagccctgaggtctaatgcggcctttc

SEQ ID NO: 95096 - DNA, 528 bp, Zea mays
  unsure (1)..(528): unsure at all n locations
aggtgggccgtntgaactaggcacgaccactacgtactgacgtaccggtccggaattcccgggtcgacccacgcgtccgctgacgcagctcatcgcgtcgtcctccttcggcggggccgcgtcgtcgcgccggggcctcgcgcggcacgctcttcggctaccgcgacggccgcgtgtcgctgtcgctgcagcagaacgcgcggtgccagcccacgctggtggtcgagctggcgctcccgacgcacgcgctgctccgcgagctcggcgcccacgcgggcgcgcgcatcgtgctggaggtcgagaagcgcgccgagcagggcaccgtcgacggcaacgaggccatcgtcaccaccgaccacgacgggtgggtgctggaggagctcatgtggaccatgttctgcaacggcaagagggtgggctacgcggtgcggcgggaccccaccgaggaggacatcgccgtgctggagacgctgtgggccgtctccatgggcggcggcgtgctccccggcaggtcggacatggacagcn

SEQ ID NO: 95097 - DNA, 538 bp, Zea mays
  unsure (1)..(538): unsure at all n locations
cggtgtctgtccatcagaatatnggtacgtatctactggtccggaattcccgggtcgacccacgcgtccgggcggcgcgcgggaggaagctcaagttcgacatcatccccacggtgcacctgtaccggcacgaccgctgggagctgccgagcctggcgcgcgtcgttggcgagcgcgagtggtacttcttcgtgccccgcgacggcggcgggcgggcggccaagcagcagcccggctccggcggccggcctagccgcaccacggagcgcgggttctggaaggccacggggtcggaccgcgccgtgcggtgcgccgncgaccccaagcgcctcatcgggctcaagaagacgctcgtctactacgagggccgcgcgccgcggggcaccaagacggactgggtcatgaacgagtaccgncttcccgacgctgccgacgctagcagcgacgcgcgcgtgccgcangtggacgtggtgctgtgcaaggtctaccgcaaggccgtgtcgctcaaggagctggagcagccggtggccatggagga

SEQ ID NO: 95098 - DNA, 542 bp, Zea mays
  unsure (1)..(542): unsure at all n locations
cggatggctgttgcccagtcccgacntgcatagnactgtctggaccggaattgccgggtcgacccacgcgtccgccaagatccaggacaaggacggcatcccaccggaccagcagcgtttgatcttcgctggcaagcaggtggaggatggccgcacccttgcggattacaacatccagaaggagagcacccttcacctggtgctccgtctcaggggtggcatgcagatctttgtgaagacactcactggcaagacaatcacccttgaggtggagtcttcggataccattgacaatgtcaaggccaagatccaggacaaggagggcatcccaccggaccagcagcgcctcatcttcgccggcaagcagctggaggatggccgcaccctggcggactacaacatccagaaggagagcaccctccacctggtgctccgcctcatgggtggcatgcagatttttgtgaagacattgactggcaagaccatcaccttggaggtggagagctctgacaccattgacaatgtgaaggccaagatccagg

SEQ ID NO: 95099 - DNA, 535 bp, Zea mays
  unsure (1)..(535): unsure at all n locations
acggttaagtccccagtccangcangacctaccggtcttgaattcccgggtcgaccgacgcgtccgcactgaaccaccctataaagcgcggggtctcagtctcaccggcacgtattcaatcccagtcgcacgcatagtatctcctagagcctcatctcctccctctctcgagccaagagcagagcagctaccaaacaagctctactttcgcttccgatccatggagctcgacgccgacaacctgagcgccaccgagctccgactcggcctgcctgggaccagcagcagcagcagcgacgactggcagaagaagccgtcgccctccgtcggggccaagcgcgctctggacgacggcaccaagagcgaggcctcggggaccagcccggacgacagagacctcgacttcgaccacgaccacgacaccgtcgagccttccaaggcgcaagtggtcgggtgatcgccggtgaaggcgtacaggatgaacaccttgcatgcagtggcggaggacaatatagtcgagcataagcagaagcac

SEQ ID NO: 95100 - DNA, 535 bp, Zea mays
cgtgcgtgtcctcagcctcatcgtcgtactgacgtaccggtccggaattcccgggtcgacccacgcgtccggagcaaccaatggttaaccttgaaatgtgcatgactggtctggacaagaagaaagcttctggctttttcaagactaatgctgatgggaacacaacatgtgccaaggaaatgacaaagctctctggcatctctgaaatcatccccgagatggagatctgcgattttgactttgaaccctgtggctactccatgaatgcgatccatggctctgcattctccacaatccatgtgacgcccgaggacggtttcagctatgccagttatgaggttatgggcttggatgccactgctctgtcttatggtgaccttgtcaagagggtccttcggtgctttggcccctcggagttttccgttgccgtgaccatcttcagcgggcgtggccatgccgggacatggggaaaggcacttggtgcagaggtctatgactgcaacaacatggtggaacaagagctgcctggaggcgg

SEQ ID NO: 95101 - DNA, 488 bp, Zea mays
  unsure (1)..(488): unsure at all n locations
gcacggggnnnnactgctgaggactgtactcgtcatagcactgcccgcaccggtccggaattcccgggtcgacccacgcgtccgcttgtttgcgcctcgccgttgattgatgcgctcactcatctcacatgggtgggactctttgctcttggagcaccacctgtctagtgggagctactccagcctctagacaccaactccagcgcccccgtatggaacaacaactccaccctcactgtctggacagcaagattcattcacctgtcatatagtttcatcgatgaatctgaaacttttattgttcctgtgttgcccctatccaaaggtcatgttccttggatcaactgtaaggtgaaccttttatcctgatattatgatgtggttatgtattctattttctcaacagtaggagtacattctaaagatcataggttagaaatcttgcgccataagatagctgctaaagaaaatgaactaaaagggntccn

SEQ ID NO: 95102 - DNA, 481 bp, Zea mays
tgatgatgccgattgccatgataggggagtatatagtatctgctctaccggtccggaattcccgggtcgacccacgcgtccgcgcctgtcttgctgaagctgaactgctgatccgtcttccaagctgtggtgtcatcccctgagttctgatccaagatgtatctccagtattacatcaatgagaagggggacaaggtctacaccaccaagaaggagtcacctcttggggtgccgacgcagtctgctcacccagctcgcttctcaccagatgacaagtactctcgccagcggtacctgttgaagaagagatttggacttctgccaacgcagaagccagcactgaaaataggtatctgaggaaacatatcaaacactgctaggcactactatgacatctcagcgcattcaggcactatatgtaatgctatgtgtttgacaggtctcaagtgctaatcaaggagggtaacagctttggaaccaa

SEQ ID NO: 95103 - DNA, 539 bp, Zea mays
  unsure (1)..(539): unsure at all n locations
cgccgtctcgcaaactccacgtnaagctacgtactgacggtccggaattcccgggtcgacccacgcgtccgcccacgcgtccgcaagaccgtcgaccagtactatgtcggatccaacaacagcatccagggcgcgtgcgtgatgaacaccctcgactccgtggtcgacgcgctcgccagggaccccgcccgcaagttcgtcgtcgtcgagcaggcttttttccaaaggtggtgggcagagaaaatcccaaacattcaggcagtagtccgcaagctcgtggattcgggtcagctagagttcataaatggtggatggtgcatgcatgatgaagctgctgtccattatattgacatgattgatcagaccacgcttggtcaccggatgatcaagaaacaattcaacaagactccaagagctggctggcaaatcgatccttttggacattctgcagttcaagcttatttgcttggagcagagcttggcttcgattctttgcattttgcaagaatcgattaccaagataaggaaaaagcgtaaag

SEQ ID NO: 95104 - DNA, 539 bp, Zea mays
  unsure (1)..(539): unsure at all n locations
agtctgactagtgccatccgtcatnctgcatngnacgtactggtccggaattcccgggtcgacccacgcgtccgcccacgcgtccggatgtatcaaactggtctccgtttatgccaaatggtttcaaatctgtagggactggagccacagtagtcttttttgcatatgttggatttgatgcggttgctaattctgctgaggaagccaaaaggccacagagagacctacccattggtatactaggaagccttatagcatgtgtgttgttatacgttgctgtatgcttggtcattactggaatggttccatatacattacttggtgaagatgctcctttggctgaggcttttgctgctaagggcctgaaatttattactgtattgattagtattggagctgttgctggacttacaacaacacttcttgttggcttgtatgttcagtcacgtttgtactttggacttggaagggatgggcttttaccttcagtatttgctgaagtacacccaacaaggcatactcctgtacagtctcagatn

SEQ ID NO: 95105 - DNA, 538 bp, Zea mays
  unsure (1)..(538): unsure at all n locations
cgggtnntgcccccgtttagtnctgcatcgactgacgtaccggtctggaattcccgggtcgaccgcacgcgtccggctcagccagctccaccacgagaacctcgtcgacatcattggctactgcgctgacggagagcagcggctgctggtgtacgagtccgtgcccgccggcaccttagaagaccacctgttcgatctgccggcggacaagaagccgatggactggtgcacgaggatgaaggtggcgcacggcgccgcgcaggggctggagtacctgcacgagacagcgaacccgccggtggtgtacggggaattcaaggcctcccacatacttctcgacgagaagctcacgcccaagctctccgacttcgggctcgcgcagctcggtcaggccgggggcagcatgccggtggtggcgtcgcccatgatgggctccttcggctgctgcgcgccggagtacgatcgcaccgggcaggccaccatgaagtccgacgcgtacagcttcggtgtggtgctggtgcagctcaatctccggagg

SEQ ID NO: 95106 - DNA, 536 bp, Zea mays
  unsure (1)..(536): unsure at all n locations
tgcctgctgatnnccttgaccnctngatcgactgactggtctggaattcccgggtcgaccgacgcgtccgcctcgtcgacgtctcactcaccccgccttcacgcctccctcaccaaataaggtcccgcccgtttgggacattcacaggggggacaggaaatcagcggccatggcctcgattccggcgacgaccttcgccgtcatcttatccgtcctcttctgtgccgcggctggcaccgccgtcgacaacgacctccccgactacgtcatccagggccgcgtctactgcgacacctgccgcgccgggttcgtgaccaatgtcaccgagtacatcgcgggcgccaaggtgaggctggagtgcaagcacttctgcaccggcaagctcgagcgctccatcgacggtgtgaccgacgcgaacggcacgtacacgatcgagctcaaggacagccacgaggaggacatctgctaggtggtcttggtggagagcccgcgcaaggactgcgaccaggtgcatgcggacagggaccgcgccgccn

SEQ ID NO: 95107 - DNA, 535 bp, Zea mays
  unsure (1)..(535): unsure at all n locations
cgggctgtgcccagcccggtcgcatcgacgtacnggtccggaattcccgggtcgacccacgcgtccgccggacgctggcgtccgtggacctcgcgggccacgtggtggcggcgcccgagtactgccaggccggcttcagcaactacttcacggacgccttctggtcgcacccggcgctcaacggcaccttccacgggcgccgcccatgctacttcaacacgggcgtcatggtcatggacgtcgacaagtggcgcgccggcgggtacacgcgccgggtggaggagtggatggccgtgcagaagcggcggcggatctaccacctcggctcgctgccgccgttcctgctcgtcttcgccggccacatccgggcggtggaccaccggtggaaccagcacgggctcggcggcgacaacgtcgagggccgctgccggggtcttcatccgggccctatcagcctncttcactggagcggcaagggcaagccgtggctacgnctcgacgcccgncggccgtgctctgtggactacctatgggg

SEQ ID NO: 95108 - DNA, 536 bp, Zea mays
agtgttgcgtgcctagctccagtgaagtactgacgtaccggtccggaattcccgggtcgaccgacgcgtccggacccacgcgtccggcaagagcaagcaagagaggacgacatggcggcgccacggagcctgggggaccgcgcgctgcgcggcgtggcggacctgataaagctgctcccgagcggcacggtgttcctgttccagttcctgagcccgctggcgagcaacaacgggcactgcgccacgctgaacaaggcgctgagcggggcgctggtggcgctgtgcggcgcctcctgcgccttctcctgcttcaccgacagctacgtgggcgcggacgggcgcgtgtactacggcgtggtgacgcggcggggcttgcgcaccttcacgcccgacccggacgccgatcgccgggacctgtcggcgtaccgcctccgcgccggcgacttcgcgcacgccgcgctctcgctgctcgtcttcggcaccctcgcgctcctcgacgccgacaccgtcgcctgcctctacccggtgctggagct

SEQ ID NO: 95109 - DNA, 535 bp, Zea mays
  unsure (1)..(535): unsure at all n locations
tgtgcgtgtccctagcttgactgcacgtacgtactggtccggaattcccgggtcgaccgacgcgtccgcccacgcgtccgcccacgcgtccgcttgaagttcttgaacgtgcaggtatgacagactgtggagggatgttctactcctgtcgacatgaatggcaagctttctggtactgaggggccaccagttgatgatccgactcactatcgaggtcttgctggcgcactgcaatatatcactttcactcggcctgacatttcctatgctgttcagcaagtttgtctacacatgcatgatcctcgggaaccacattatacgttgatcaaacgtattcttcgctatctgcatgggacattggatcatggcttacatcttcgccccacagatgtttctgctttggttgcctactctgatgctgattgngccggttgtcctgacacccgtcgttcgacctctgggtatgctgtttttcttggtgataacctcatctcttggtcatccaagcatcaacctactatttcccgttccagtn

SEQ ID NO: 95110 - DNA, 536 bp, Zea mays
  unsure (1)..(536): unsure at all n locations
tgtnttacggnttcagctccaagtaagtactgacgtaccggtcttgaattcccgggtcgaccgcacgcgtccgagaaggttatgctagacctttagttgatcgaatagatgttcacaatagattcagacggcggctctatcgcccatcaactgttaccacggaatacagagaacatgtgaaagatctttcttgcgtgtcaaaagatttcggcaggattgtcattgtcgacaacaatccgttcagtttcattcttcagcctttgaatggaataccttgtgttccattttcagctggacaacattctgatgaccagctcatgatggttatatttccactcctgaagcatctttctctccagaaagatgtcagacctgtattgcatgaaaggtttcatatgccagaatggttccaaaagcatgggatcccccaaactaatcagtctgtgtaagttttgctgcccttgttttgatgaacgctgtgcctattatgctataagccccttaagggagagcacttgtatattattatcaatatt

SEQ ID NO: 95111 - DNA, 478 bp, Zea mays
  unsure (1)..(478): unsure at all n locations
tgagccnctaccgctgcgtagccatccatcgtcacgacgtaccggtccggaattcccgggtcgacccacgcgtccgctagaactagtctatcaccctcgaggtggagtcgtctgacaccattgacaacgtcaaggagggcatcccaccggaccagcagcgcctcatcttcgccggcaagcagctggaggatggccgcaccctggcggactacaacatccagaaggagagcaccctccacctggtgctccgcctcaggggtggcatgcagatttttgtgaagacattgactggcaagaccatcaccttggaggtggagagctctgacaccattgacaatgtgaaggccaagatccaggacaaggagggcattcccccagaccagcagcgtctgatctttgctggcaagcagctggaggatggtcgcaccctcgcggactacaacatccagaaggagagtacccttcaccttgtttttcc

SEQ ID NO: 95112 - DNA, 535 bp, Zea mays
  unsure (1)..(535): unsure at all n locations
agtactgtnccctagcccgacttagcgctctactggtcttgaattaccgggtcgaccgcacgcgtccggaaggagcagcacttcgtgcttgttcatggcgaagggcatggggcctggtgctggttcaaggtgggctggctcctcgagggcgctggccaccgtgtcacgtgcgttgacctggccggaggcggcgtcgatcctaccgaccccaacaccatccggtccttcaagcagtacgacaagccgctcatagacctcatctccaacttgccagacggagagaaggtgattctgatcggacatggcgctggagggctgagtgtgatccatgcaatgcatgaatttgttgacaggatcggtcaagcatttttcgtggccgccacaatgctgccgtttggatttcaagccgatgaagataagaacgatgtaatgtttttgaagaatttgtttgccatctttttaaaccacatagacccttctagcaaatgataaaaaaatatagagtacacatcaaacaaacatatacatatagggg

SEQ ID NO: 95113 - DNA, 543 bp, Zea mays
  unsure (1)..(543): unsure at all n locations
agatggctgcttgtgnncccgatcncncgcatcgacgtaccggtcttgaattcccgggtcgacccacgcgtccgccgaattcccaggcaggcacgtcggcgaggttggcaggaagaccgaagaccgagccgtgcggtgggtcgggacgggaacgggacaggaccccaaaatctcagatccttcctgcccgcccgcccgtgcccgtcgacgcgtcgttcttgccggccgcgccccacctacgccctctcctcctccagggggatcggatacgccacaggctgcgcgatggtgctgtgggtcttcggctacggctccctcatctggaaccccggcttcgacttcgacgacaaaatcctcggcttcatcaagggctacaagcgcacctttaatctcgcttgcattgaccacagaggcacaccggagcatccggcgaggacctgcacgcttgaaaccgacgacgaggccatatgctggggaattgcatattgtgtcaagggtggtccagaataagagctaatagcaatacagtacttggagagaaan

SEQ ID NO: 95114 - DNA, 544 bp, Zea mays
  unsure (1)..(544): unsure at all n locations
gtagccgtgtggtaacgtccagcccagctacgaactgacgtaccggtccggaattcccgggtcgaccgacgcgtccggccaccacggcgaccgaggcggccaaggctgcaccggcgcaggagcagcaggccaacggcgacggcaacggcgagcagaagacgcgccactccgaggtcggccacaagagcctgctcaagagcgacgacctgtaccagtacatcctggacacgagcgtgtacccgcgggagccggagagcatgaaggagctgcgcgagatcaccgccaagcacccatggaacctgatgaccacctccgccgacgagggccagttcctcaacatgctcatcaagctcatcggcgccaagaagaccatggagatcggcgtctacaccggctactcgctcctcgccaccgcgctcgcactcccggaggacggcacgatcttggccatggacatcaaccgcgagaactacgagctaggccttccctgcatcaacaaggccggcgtgggccacaagatcgacttccgcgaaggccccccgcn

SEQ ID NO: 95115 - DNA, 538 bp, Zea mays
  unsure (1)..(538): unsure at all n locations
cgggctgatgnnccaggctcaccgaagtactgactgtaccggtcttgaattcccgggtcgaccgacgcgtccgggatccccccacaccttgagacctgcgttgtcacccacccatcaaggttggggccgggaggagagttcagccgttcctgttcctgataaaacgagagaaggatggcagtgtctcagggagctgtcctattcttgtttctcctcctcgtcgcagcataggtgggaaccatcgatgccaaaatgggagtagccatgcccatgcatgccttgataatggagaaagcgaaacagcaggagaaggagaagaaggaggagaaaagcacggagaaggaagagagtcaatgcttatcgccgagtctccagttcgagggcttctgcttcaacagcgacagatgcgccgaggtgtgcatgaaggagagctttcccggtggcgagtgcaagcgggacgtggccatgcgcaagtgcttctgcaagaagccttgctagttcatcggtcttgctaattgttgatgggtgcttcattaat

SEQ ID NO: 95116 - DNA, 476 bp, Zea mays
  unsure (1)..(476): unsure at all n locations
agaagcctgntncctcgtatgagactgtattgcatctgctctaccggtccggaattcccgggtcgacccacgcgtccgaggcgtcgctatcgagattgcggaagccgtggttggtgcgctgagaggggagctggcagcggccgctgtgaatgcgcccatggtcccagctgagatcctgtcagagctggctccatatgtttctctggccgagaagctcgggaggctggcggtgcagctcgtggccggcgagagcggcatcaagggcgtgaaggtggtgtacaccacagcgcgtggccccgacgacctggacactcggctcctccgcgcgatggtgaccaagggcctggtggagccggtgtccagcacgttcgtgaacctggtgaacgcggactacacggccaagcagcgcggcctccgcctcacggaggagcgcgtggcgcacgacagccccgcggcggaggcgccgctgggaaggg

SEQ ID NO: 95117 - DNA, 479 bp, Zea mays
  unsure (1)..(479): unsure at all n locations
agggtgccncttatgcctagttccgcctttcatcgcactgccgtaccggtccggaattcccgggtcgacccacgcgtccgcagagaacggactaggtgcgtgctctgcgctgacaagagcagcggcaggcaggtcgtcggtgcgccttgggtggtgaataattgaagaagaagaagaggcggagacttgagcaggtgatgtcttcgctgccaggaggcttcctgtgcgtgcgcgtcctgcgcgggatcgacctcgtcagctgcgacgccaagggcagcgacccctacgtcgtgctcagcctggatggacagaaactgaagacgagcgtgatgaagaagacggtgaacccgttgtggaacgaggacctcaccttggccgtcatggacgcgtcggcgcccatcaagctagaggtcttcgacaaggacacgttcagcaaggacgacatgatgggggacgcggagttcgacgtggagggcccc

SEQ ID NO: 95118 - DNA, 473 bp, Zea mays
  unsure (1)..(473): unsure at all n locations
tgcgctttngcatcnctgactcgcttcgcactgacgtaccggtccggaattcccgggtcgacccacgcgtccgcgtgctctaacagtggatgtggcatctgagaacattcgaacttggacactccaggggtttgatcaggggagaagcagcggacgcagcgcagctacgatttcaccggagtcacgtcgtggtttgcggccaagtgcgacctcatccttctcctgtttgatccgcataagctggacatcagcgatgagttcaagcgtgtgatcgggtctctccgcgggcatgatgacaagatacgcatagttctcaacaaggccgaccaagttgatgcacagcagctgatgagagtgtacggagcactgctgtggtcgctcgggaaagtcctgaacacaccagaagtcatgcgtgtctacataggttcattcaacgacaagccgatcagggagacagcggctgggccggcttt

SEQ ID NO: 95119 - DNA, 535 bp, Zea mays
  unsure (1)..(535): unsure at all n locations
tgggctgatnncccgactccncgcaacgatcgactggtcctgaattcccgggtcgaccgacgcgtccgcggacgcgtggggtgatttgaaataatcggtaataaatagttcgtgaatccctgaagcgtgcatgtatatattcctgccaagataaaggtaatggagtcgtcacgcaggttccagccggccgtcatcctgcttctcctgctcattgtgtccaccgatatggcacaggcaagggaatgcgagaagtacagtgagcgatttgttggggcatgcatgatcgcagacaactgcgccaatgtgtgccgcggtgagggcttcttggccggcaggtgcagcaccttccgccgccgctgcatctgcactaggcagtgctaaacaagatcgctcgatcgctcgccatgcatcgacaacctattcttaataacgttcattatctcgttcttatttatgacgaatgtcatgtatgttctggtgactgtcatgtatattctgatgactgtcatgtatcttgttcatgtatgctcaaagt

SEQ ID NO: 95120 - DNA, 539 bp, Zea mays
  unsure (1)..(539): unsure at all n locations
cggtggctgtnccattccgtcatgcatcgtactaccgcaccggtcttgaattcccgggtcgacccacgcgtccgtctagatcgcacggccgcccttttttttttttttttttgcgagatgaaaggcaaccgtggtcatgcatctctgttccatacttccattccacagattggttccatactgtgcattaccacttatacagattataaactactacatggtactagaatcaacaagaccagatagccccttgtaagccatactcatattctgataaagatccacattaaactgctagtatgaagcaatgaggtgagtaacttacccttgtcctatgcttcaatctcaaaggttctccatctggatattgctcttgagtggcacgtactccccaaggtaccctccaaggtgctcatacaacgcagtccggtcaatctgctggttgtggaaggccttgcaagcgtagtagaagacgctctgcacgagcagttccagcaaattgacacagactagaacgcacaagatcacggcgcccacaa

SEQ ID NO: 95121 - DNA, 479 bp, Zea mays
  unsure (1)..(479): unsure at all n locations
cgcaggtcgctgtggcttgcatccgccngtacatagcactgactgtaccggtccggaattcccgggtcgacccacgcgtccgcccacgcgtccgctgcgcttcatgatctctacgagctccagggcctgtccccgtggtacgagaacctatgccgccctgtcacagacttgctgcccattatcgccagcggcgtccgtggagtcaccagcaacccaacgattttccaaaaggccatttcatcgtccagcgcatatgatgatcagttcaagcagctcatttcggcaggaaaggatgcggagagcgcttactgggaactcgttataaaggatatccaagatgcgtgcaaactttttgagcccatctacgacgagactgatggggctgatgggtatgtctccgtagaggtgtctcctaggttggcaaatgacactcaaggaactgttgaagcggcaaagtggttacacaaagtggtccaaaa

SEQ ID NO: 95122 - DNA, 476 bp, Zea mays
tgatgtgctgacgctgcactgctgagtagcgcactgacgtaccggtccggaattcccgggtcgacccacgcgtccgcccacgcgtccggtcaagtccctgtgcgcgcccaccctatacaaggagtcgtgcgagaagagactgtcccaggccaccaatggcaccgagaaccccaaggaggtgttccacagcgtggccaaggtggcgctggagtcggtccagacggcggtcgagcagtccaagtcgatcggcgaggccaaggccagcgactccatgaccgagagcgcgcgcgaggactgcaagaagctcctggaggacgccgccgacgacctgaggggcatgctcgagatggccggcggcgacatcaaggtgctgttcagccggtccgacgacctcgagacctggctcacgggcgtcatgacgttcatggacacctgcgtcgacggcttcgtcgacgagaagctcaagggccgaaacc

SEQ ID NO: 95123 - DNA, 540 bp, Zea mays
atgtggttgcaacggtcagctcatgcatgaactgacgcaccggtctggaattaccgggtcgacccacgcgtccgcccacgcgtccgcccacgcgtccgtggcgctgtccggcgcccacacgctgggcttcggccggtgcaaggagttcgccgaccgcctctacaacttccgcaaccagggcgggaagccggagcagttcgaccccagcatgaacccgtcctacgccagggggctgcaggacgtgtgcagggactacctcaaggaccccaccatcgccgcgttcaacgacatcatgacgcccggcaagttcgacaacatgtacttcgtcaacctcgagcgcggcctcggcctgctcagcaccgacgaggagctgtggacggacccacgcaccaagcccctggtgcagctctatgcatccaacgccacagccttcttcgacgacttcggccgcgccatggagaagctcagcttgttcggcgtcaagaccggcgccgactgcgaggtcaggctgcgctgcgacgcctacaacagcggtcccgc

SEQ ID NO: 95124 - DNA, 538 bp, Zea mays
  unsure (1)..(538): unsure at all n locations
ctgtgcgtgtccagcttcaccnagctacgnactgaccgcaccggtccggaattcccgggtcgacccacgcgtccggagaaacaaggctcgacttgtggcaaaaggttatgcccaagtcgcaggtttggatttcgaggagacttttgctcctgtggctaggctagagtcaattcgaatcttgctagcatatgccgctcaccattctttcaggttgtaccaaatggatgtgaagagcgctttcctcaacgggccgatcaaggaggaggtgtacgtggagcaaccccctggcttcgaggatgatcggtaccccgaccatgtgtgtaagctctctaaggcgctctatggacttaagcaagccccaagagcatggtatgaatgccttagagatttcttaattgctaatgcttttaaggttgggaaagccgatccaactctttntactaagacttgtaatggtgatttgtttgtgtgccaaatttatgtcgatgacataatatttggttctactaaccaaaagtcttgtgaagagtttagcagg

SEQ ID NO: 95125 - DNA, 537 bp, Zea mays
  unsure (1)..(537): unsure at all n locations
tgggntgctactgatgaacatggatgtatcgctctaccggtcttgaattcccgggtcgaccgacgcgtccgcccacgcgtccgggtgagcgcgacgatgggatccctcgctaataacatcatggtcgtgggcgccgtccttgcggcgctcgtcgccggcgggtcgtgcgggcccccgaaggtgccacccggccccaacatcaccaccaactacaacggcaagtggctcaccgctagggccacctggtacggtcagcccaacggtgccggcgctcctgacaacggcggtgcgtgcgggatcaagaacgtgaacctgccaccctacagcggcatgacggcgtgcggcaacgtccccatcttcaaggacggcaagggctgcggctcatgctacgaggtgagatgcaaggaaaaacctgagtgctcgggcaatccagtcacggtgtacatcactgacatgaactacgagcctatcgctccctaccacttcgacttgagcggcaaggccttcggctccctggcaaagcccgggctcaacgac

SEQ ID NO: 95126 - DNA, 535 bp, Zea mays
  unsure (1)..(535): unsure at all n locations
cggnnnnnnncactgacngtgangcantgncgcantccacttggctggaatacccgggccgacccacgcgtccgcagacgcgtgggcggacgcgtgggcggacgcttgggggaatggtggtggtggtgctggagagaagaatctctttgtagcatcctttttctttgatagggctgctgaggctggatttgttaacgccaatgcgcctgtcgctaaggttaaaccatcggacttcagacaagctgcggagcgcgcttgctcgttgagcgtgaagaacgccgaggccaccttccctggtgtacagaaggatagcatttcatatatctgcattgacctcgtttattaattcacattactcctggaaagattccgcgttgatccggaccacgagatgaccttaataaaaaaagtcccttacagcgacgcctacgtctaaaccgcatggccgctaggcaatgccctctaggttgcatcttcctagtacgaaagaaacacagtttagcaaggtaacatcgtaccggattcttgtatagaa

SEQ ID NO: 95127 - DNA, 480 bp, Zea mays
  unsure (1)..(480): unsure at all n locations
cggagggannactatccactgaaaacgattgccctcgcattnncnnncnnnnnttnnnnnnnnnnncgnnccacgcgtccgggagagactagacccgctagctgaggccgggcggcgcgctggacacgaacatgatggggagaaaggcgctcggctgtgctcctcttctcctcctcttggccgccgccgtcgctccggccgagctcagcgtcggggcggcggctgcctcgggcgcggtcacccgggccgacttccccgcggggttcgtcttcggcgtcggctcctccgcgtaccaggtcgaaggtgcagttgcagaggacggaaggaagcctagcatctgggacacattcacacatgaaggctattcccttgacaacgccacaggcgatgtaactgcngatcagtatcataagtacaaggacgacgtnaagcttctgcatgagaatggtgtcgatgcctaccggatgtcgattgcccccc

SEQ ID NO: 95128 - DNA, 564 bp, Zea mays
  unsure (1)..(564): unsure at all n locations
cgggnanananaactgaaatcanctagcactgaccgatccggtccggaattcccgggtcgacccacgcgtccgcctgcatcaccaccaaactcaacaacagccagctcgcgaaaataatgaagagccgcagcatggcatcatcggccgcgctcttggtgctagccctcgcgctagtggcggccaccgccccacaggtagcggaggcaaagaagaagagagcggcggagagcggcgaggcggcggaggcgaagaagatccaggacgacttctgctcgacgctgtgcgagggcaagaaggggacggacctggtcgtgtgcaaggagtcctgcgcgctctcccagcagtccaacctggtgctgtacggcaggatccagtgcaagggcaagtgcaccgagcagaagggcatcacggcgccggccatgaaggtctgccaagaggagtgcgacaaggcgtacgtggtgaaggcggccgaggtcaccaaggcctgcagcgtcacctgcgccatggaggagaacccgcgcctcagcgagaacttgcagagggtctgtgacccctctcctttt

SEQ ID NO: 95129 - DNA, 559 bp, Zea mays
  unsure (1)..(559): unsure at all n locations
ncggngtanttaattgctcatgctctgcatcgncgtancggtccggaattcccgggtcgacccacgcgtccggtggaactcacttcagactttgtgtatccctacagaaaccagggcggattcgatatgatcgtgcagtggaagggacaagattgaaacaccggagcagttcaagcaagctgaagacacagccaacaagcttgatttggatggacttgttgtcattggtggtgatgattcaaacaccaatgcctgccttcttggtgaatactttaggtcaaggaacctgaagactcgtgttattggttgcccaaagactatcgatggagatctgaaatgtaaggaggtaccaacaagctttggatttgatactgcttgcaagatatactccgaaatgattggcaatgttatgactgatgcaagatccacagganaatactaccactttgtgaggcttatgggtcgtgctgcttctcacattacattggaatgcgctttgganacacaccccaatgctgcactcattgggaaaaaggtgcttcgaaaaagaaacccttta

SEQ ID NO: 95130 - DNA, 546 bp, Zea mays
  unsure (1)..(546): unsure at all n locations
atggcttgtgccctcagcttcacngtcacgacgtacnggtctggaattcccgggtcgacccacgcgtccgcgtggatggcggtgccacaacctctcctgctgtcgctgctggtcgccgtgctagcggtgggcggcgatgtcgccaacgccggccacgccaagcccctaacgcctggcgggcgcgtggtacacgacaaccacggcaagttcacggccgggccgtggaaacccgcccacgcaaccttctacggcgggcgtgacgggtccggcaccacggcgggcgcgtgcgggtacaaggacacgcgcacgcaggggtacggcgtgcagacggtggccgtgagcactgtgctgttcggtgacggcgcgggctgcggagggtgctacgaggtgcggtgcgtggacagccctagcgggtgcaagcccgacgcgggaacgctggtggtgactgtgaccgaactgtgcccgtccaaggcccagtggtgcaagtcaaccgcggagcacttggacctaagcatgccccgcgttcttcagatcgcgcaagagaan

SEQ ID NO: 95131 - DNA, 544 bp, Zea mays
  unsure (1)..(544): unsure at all n locations
cggntntccctgccagcccagctacgaactgccgtaccggtccggaattcccgggtcgacccacgcgtccggcgatattcagcagaatgaacattgggacgctagatgtcggggattttctcgctattggagctatcttttctgcaacggattctgtgtgcacgctgcaggtcctccatcaggatgagacgccctttctgtacagtctcgtgttcggtgagggagtcgtgaacgatgccacgtctgttgtgctcttcaacgcactccagaacttcgatcttaaccacatcgatgtagccgttgtgctgaatttcttgggaaacttctgttacttattcgtgtcaagcaccttacttggagtgtttactggattgctcagtgcctacataattaagaagctatatataggaaggcattccactgaccgtgatggtgcgcttatgatgctcatggcttacctctcctacatgctggccgagctgctagatctgagtggcattcttaccgtattcttctgcggcatcgtgatgtcacattacacctg

SEQ ID NO: 95132 - DNA, 551 bp, Zea mays
  unsure (1)..(551): unsure at all n locations
nggaagtgntgactcatgccagccgatgattgtactgctctaccggtctggaattcccgggccgacccacgcgtccggtgcctcggcgccatctgcggcgtcggcctcgtcaaggcgttccagagcgcctacttcgagaggtacggcggcggcgccaactcgctcgcctccggctactcccgcggcaccggcctcggcgccgagatcatcggcaccttcgtgctcgtctacaccgtcttctccgccaccgaccccaagcgcaacgcccgcgactcccacgtcccggttctggctcccctccccatcggcttcgccgtgttcatggtgcacctggccaccatccccgtcaccggcaccggcatcaacccggccaggagcctgggcgccgtcgtcatctacaacaaggacaagccctgggacgaccactggatcttctgggtgggccctctcgtgggcgctgncatcgcggncttctaccaccagtacatnctncgggctggcgccatcaaggccctcggctccttcaggagcaacgcgtgatgagcggggct

SEQ ID NO: 95133 - DNA, 483 bp, Zea mays
  unsure (1)..(483): unsure at all n locations
tgccgctgctgtatgcctttcaagaantnagctgcacctgacgtactcgagttcccgggtcgacccacgcgtccgatccggagcagccgcagtcccaccgacccctccgccggtcgccctccatctcctcgccggggcctgtcgtttctcttttcaataatcaagatgagccgtggtggtagtgccggtggtggtcaaagttctctgggttatctctttggaagcggtgagccccccaaaccagcagtggcaccagctgcaagtgctccacctgttgagaaaccatctgctgcaaagactgatgcggccaagcatgttgctgcttgggttaccagccaaaccaataactaccacaaggctgatggtcagaacactggcaacttccttacggaccgtccttcaaccaaggtccacgctgctcctggcggtggctcttccctgggctacctgttcggtggcaactgatgcccgtgctggattggg

SEQ ID NO: 95134 - DNA, 477 bp, Zea mays
  unsure (1)..(477): unsure at all n locations
aggatgcgtgctagtccctgcctgatcgtattgctatactcgtcttgaattcccgggtcgacccacgcgtacgcccacgcgtccggggttgttctaggtggactgaaggaatatctcaagacaattaggcgctgtataagggtggtatttattggttgtggaacaagttacaatgctgccttagctgcaagaccttttgtggaagaactgactggtattcctgtgactatggaggttgcaagtgacttgctggacagacaaggtcccatctacagagaagacactgcagtttttgttagtcaatctggggagacagcagataccctacttgctctagattatgcactagaaaatggagctctctgtgttggcataacaaatactgttggaagcacgctgtctagaaaaacacactgtggtgttcatatcaatgctggttgtgagattggtgttgccagtacaaaggcttataaaacn

SEQ ID NO: 95135 - DNA, 554 bp, Zea mays
  unsure (1)..(554): unsure at all n locations
ncggntgtgcatcgtcagccctgcactgcactgcctgtccggaattcccgggtcgacccacgcgtccgggaccagggacagggagcaacaaagctgagtcctcctcctccatggcggtacggtggcgggcgacgtttacaaaggcgagctgacgccgctgcagcggcacgtcgccttcttcgaccggaacaaggacggcgtcatctaccccgccgagacataccaagggttccgcgcgatcggggccggcgtcacgttgtctgccttcagctccgtcttcatcaacggcctccttggacccaagaccataccggagaacgagaaggctccagctttcaagctccccatctacgtgaagaacatccaaaaaggaaagcacggaagtgattcgggcgtgtacgatgccaatggaaggttcgttgctgaaaaatttgaggagatcttcaagaagcatgcccacactaggccagacgccctgacaggcaaagagctggaagagctgctcanaggcaacagggaggcctatgacttcaagggatgctgggggggttcac

SEQ ID NO: 95136 - DNA, 553 bp, Zea mays
  unsure (1)..(553): unsure at all n locations
cttgccgtgctagtgccttcaccttcntgcatcgnacgtaccggtccggaattcccgggtcgacccacgcgtccgctgacgcgtgcgcggacgcgtgggctgcgcccgttcaggatccacatcttcccgagcgagtgctgggttgacctcttgctcttcggaccacctccaaggctcttggtgtagcttgccactctcaccaatcaagttttcatgtctgatctcgacattcagatcccaactggcttcgatcccttcgctgatgccaatgcttgggactctggtgctgcagcatggtcaaaggactacgtacacctgcgcattcagcaaggttatggtctcaagaaccttgccacccttcaaggatttgaaaatgggttcaagttccacaagattcttcaatgacttaatcaaaaagtattgtggcaattggccattgtgccagaacccgaaccttggacagggcattaagttccagggggatccaaggaagaacgctctaaaattccctgtacaggccggtcttgtgaaaaaggagcaccttaagattctc

SEQ ID NO: 95137 - DNA, 539 bp, Zea mays
aggttgactatgccagccgatcgatgtactgctctaccggtccggaattcccgggtcgacccacgcgtccgggcaacttcttagctacacacaatctcatagagactatgagagaacggatgtttaaacctgctttgtcaaccattatcacagagaacacagaagtcgcaactgtttccctttcagatccagtttgtgtagcagcacggaaaatgcgtgagttacaagttaattcagtcattattactgctggaaatttgcttgatgggatctttaccccaagggatgtgctgatgcgtgttgtggcccaaaatctttctcctgagttaactctagtagaaaaggtaatgactgcacaccctgactgtgctacattggacacaacaatccttgatgcactacatatgatgcatgatggcaaattctggcatattcctgttcttgatggagatgggcgggttgctgcttggttggacgttctgaacttacccatgctgcgatgtcaagggctaccttgcattgctcatggcctttttttc

SEQ ID NO: 95138 - DNA, 478 bp, Zea mays
  unsure (1)..(478): unsure at all n locations
tgctgtgctgccccctccnctgcacgtagatcantgncgtccggaattcccgggtcgacccacgcgtccgcaaaggcagcacactcagctatccagcaaatgagatcgagacgcaggagtcatggccaccgtgagcgccgccgtggtgaccaccatcgttgcccgcgccgcgatcgccaggcccaatgctctagggctgcctgcgttgagggcgaggagcgagagggtgcggtgcagctacgccaaggatgccaagaacgcggccccagtcagcaccaagggcgcaggcgcgtcgctgctcgccgcagcgggcgcggtgaccgcgtcggcggggcccgcgctggcgctcgtggacgagcgcatgtccacggagggcaccgggctgagcctcgggctcagcaacaacctgctggggtggatcctcctgggggtcttcggcctcatctggtccctctacaccatctacacctcttgnaaa

SEQ ID NO: 95139 - DNA, 481 bp, Zea mays
  unsure (1)..(481): unsure at all n locations
cggctgcgctgcgtgtggcctgaactgcntngtattggcatacccgtccggaattcccgggtcgacccacgcgtccgcggacgcgtgggcatgcatgtgtaatgcattgcttgggatccaacccaatctagtatagcgtggcatgggtcggcttaaagtattgtcagcactaaagttaattatttggcggtgtaggcggtgttggccttccagttggcagggatgacatcgtcgtagacggacttggtgcctccctcggtagtgaggcggacggtgaggggtcccttaagcggtttgtcgctgtccttcctccagatggcgccccaggagtgcttcagaggctcgtacgtgtcggagcccttctccttgacgtccactgccacaatgtcaccgtcgccgtccacgtacttgaccagcagtgccaggtagttggggccgcaccccttttcaaggtggaaggtgaccttggagtcgttaaccn

SEQ ID NO: 95140 - DNA, 552 bp, Zea mays
  unsure (1)..(552): unsure at all n locations
gttcggcgtgcgccctaaccgccntgcatagacgtaccggtccggaattcccgggtcgacccacgcgtccgatcgaggccccgtacagatggttcttccagtgaaggatctcctagccccggtaccagtgagggatgtgctagccccggtaccagcgctccgaacgaagagagcaaccctgcgactgcgagcaagaggccgtatctcgagaggaactactccgtgctggaaccttcagaagggagccagctcgtcgacgacgtggaaggggaaagctctatcgagaacgtgggaaacagcttgagatcaacaagaaggcgatggccgctctttacaaggagcttgaggaagaacggagcgcttcggcggtcgcggctagccagacgatggccatgatcaataggctgcaggatgagaatgctgcaatgcagatggaggctctgcattacctgaggatgatggaacatcatgctgaccacgaccacctggcgattaagacctgcacgaattgcttacggagagggaggaagaagtgcttgactggtcgcttct

SEQ ID NO: 95141 - DNA, 548 bp, Zea mays
  unsure (1)..(548): unsure at all n locations
cggntgacgcatgctcagccgagtacagtacctgctcgtaccggtccggaattcccgggtcgacccacgcgtccgcccacgcgtccgataccatccagtacatcgattctccccccaagatcaaaggccggagaaggaggaagaaaggttagggagtcggctatgggatgcttttcatgctgctgtgtggcagatgacgacaacgttggcaggaggaagaagcatgacgatccctatgttcctatccctgctcatgtttataattttggacctagccggttcccagccccaacccctgtcatctccactggcagagctcagccaattgcagtaccggccattcatctggaagagctgaaggaaattacaaaaaacttcagcagtgatgccctcattggcgagggctcgtatgccagagtctattttggtgtgctgaaagatgggacgaaatctgcagtgaagaagcttgactccagcaaacagcctgatcaagaattccttgtgcaggtttcagctgtctcaaggttgaaacatgagaatgttgtcca

SEQ ID NO: 95142 - DNA, 553 bp, Zea mays
  unsure (1)..(553): unsure at all n locations
cggnctcgccctgtccagcncatcatcgaacctgccgtaccggtccggaattcccgggtcgacccacgcgtccgcttgtttgcgcctcgccgttgattgatgcgctcactcatctcacatgggtgggactctttgctcttggagcaccacctgtctagtgggagctactccagcctctagacaccaactccagcgcccccgtatggaacaacaactccaccctcactgtctggacagcaagattcattcacctgtcatatagtttcatcgatgaatctgaaacttttattgctcctgtgttgcccctatccaaaggtcatgttccttggatcaactgtaaggtgaaccttttatcctgatattatgatgtggttatgtattctatgttctcaacagtaggagtacattctaaagatcataggttagaaatcttgcgccataagatagctgctaaagaaaatgaactaaaaggtcaaaagagacctttggtcgctgntgctaccaagaatgcagatttttcttgcaatcagccaaggctgccatctgaaaagan

SEQ ID NO: 95143 - DNA, 545 bp, Zea mays
  unsure (1)..(545): unsure at all n locations
cggnntgcaatgcccaggcagatgactgnactgctctaccggtccggaattcccgggtcgacccacgcgtccgcccacgcgtgcgcggacgcgtgcgcagactcgtgggtggaaatccaggacaagttgacgggtgagtggaagcccatgaagctctcttggggcgccatctggaggatggacactgccaaaggcgctcaagggccccttctgcatccgccttaccagcgagtccggcaagaaggtcatcgccaaagacgtcatcccggcgaactggagacccgatgccgtctacacttgcaacgtccaataatactagactttgaattaccttcgattcatccggcacagcgggctatggaccttcagcagcaagctaattaagttggcagcatgcaccgctaacctaatatactactgagacttccaaattctagaatatgcaatccttttgttcagattcatgatcgaattccaaagagtggaaaacaagcacaaggttaaatatacatgccatttttggaggctttttttcatgacggcat

SEQ ID NO: 95144 - DNA, 475 bp, Zea mays
  unsure (1)..(475): unsure at all n locations
cggtgtgcttgngctagccagatagtgactgcactgccgtccggaattcccgggtcgacccacgcgtccgctcggcgccaggtaccacgccgccgacaacgaggacctgccggagtccgtcgactggaggggcaagggcgccgtcgccgaggtcaaggaccagggcagctgcgggagctgttgggctttctcaacaatagcagctgtggaaggcatcaaccagattgttacaggcgacttgatctccttatctgagcaagagcttgtcgactgtgatacttcgtacaatcaggggtgcaatggaggtctgatggactatgcgtttgagttcatcatcaacaatggcggaatcgacaccgagaaggattacccttacaagggcacggacggacggtgtgatgtcaacaggaaaaacgcgaaggttgtcactattgacagctacgaagatataccagcgaacgatgagaaggaaggg

SEQ ID NO: 95145 - DNA, 553 bp, Zea mays
  unsure (1)..(553): unsure at all n locations
cgacgtgcgtgtcctacccgcgatgcatcgacgtaccggtccggaattcccgggtcgacccacgcgtccgatcgcgagcggtcgctcgcgatctagaactagcggacgcgtgggcagtggtccacgtggcgatcactggatgtgggattctcgcctatttaactatgggaactgggaagttttaagatttcttctctccaatgctagatggtggctcgaggaatataagtttgatggtttccgttttgatggtgtgacctccatgatgtacactcaccacggattacaagtaacatttacggtgaacttcaatgagtattttggctttgccaccgatgtagatgcagtggtttacttgatgctggtaaatgatctaattcatggactttatcctgaggctgtaaccattggtgaagatgttagtggaatgcctacatttgccctttctgttcacgatggtgggggtagggtttgactatccggatgcatatggctgtggctgacacatggattgacccttctcangcaaagtgatgaaactttggaagatggg

SEQ ID NO: 95146 - DNA, 551 bp, Zea mays
  unsure (1)..(551): unsure at all n locations
atgggntgtcgactgtcacgtcctgcatcgtactgcctgtaccggtccggaattcccgggtcgacccacgcgtccgcggacgcgtggggtcaactcgatcgatccatcgcatctctgccttgtattttggatgtcgatccgtgtggactgttacaaaatattacatatgtgaccaatccaaggggtgcgacagttttccccaagggacacaccccttgggatacaccccttcacttgtatataagtgtaatgatctatggaatacaatcactgttctctgcctctctctttgttaccactgagtaaacttgagtatacttcaacacgttatcagcactgcttgcgagatcagagaaaaagacttgtgctaagttccttgttcagatgaacgtggacttggatcgctacagcatgcaacaacggattttcttaaaacanatcgctcataagttggagaaaggtgatggtatggaaactactcttnctctccgcttttcgctgtctgctgtctgcgtgtaattttatatcggccgtggctcactgtaccacac

SEQ ID NO: 95147 - DNA, 549 bp, Zea mays
agaaaggttgtcgactgccagccgatcgatgaactgctcgtaccggtccggaattcccgggtcgacccacgcgtccgcccacgcgtccgagaaggagaactgtaccaaaagtgcagaaggccattctggactctgcattgcccatggtggtggaaggcggtgccagtttccagactgcacaaagggtgctcagggaagcacaaagttctgcaaggcacatggtggaggaaagcgctgcacattcgtcggatgcaccagaggggctgaaggcagcacttcattttgtaagggccatggtggaggcaagcgctgtgcctttcagggcggtggcgtgtgcccaaagagcgtgcatggtggcactcagtattgtgttgcacatggtggtgggaaaaggtgtgctagctttggttgcactaagagtgctagagggcgcacagagtattgtgtgcgccatggaggtggcaagaggtgcaagttcgagagctgcaccaagagtgcgcaggggagcactgatttctgtaaggctcatgggggaggtacacgattgct

SEQ ID NO: 95148 - DNA, 478 bp, Zea mays
  unsure (1)..(478): unsure at all n locations
taatgcgnctgtcgctgcgttacggagtacatcgcactgncgccttcaantcccgggtcggccgacgcgtccgcccacgcgtccgctcagcagcactgaacagtctcttcgccattgggtgtgccagcggagcatttattggcggggtgatagcagatcacctgtcaaagtacttcccagattcggcacgggtcatgtgtgcccagtttagtgccttcatgggcatcccgatttcttggatcctcctcacagtcatcccccagtcagttgactactggtatgccttcgccgtcacgcttttcttcatgggcatcacgataagctggtgcgccacctcgacaaacaaccccatgttcgctgaggtggtccctcccaagcaccggaccatgatctacgccttcgaccgtgcgttctacggctcattcgcctcgttggctggccctgcagtgcgcctaatcaccgagaagatctatttttt

SEQ ID NO: 95149 - DNA, 554 bp, Zea mays
  unsure (1)..(554): unsure at all n locations
cgattgctgcgtgtgnccgaactgcgccgcatcgacgtaccggtccggaattcccgggtcgacccacgcgtccgcccacgcgtccgcccacgcgtccggaaggtcatcgccaaagacgtcatcccggcgaactggagacgcgatgccgtctacacttgcaacgtccaattctactagactttgaattcccttcgattcatccggcacagcgggctatggaccttcagcagcaagctaattaagttggcagcatgcaccgctaaccttatatactactgagacttccaaattctagtatatgtaatccttttgttcgggttcatgatcgaattccaaagagtggaaaacaagcaaaaggttaaatatacatgccatttttggaggcattnttttcaaaaaataatcantacaatatgctacaaaaatatttattaaaacaaaaaaaggggcggccgcctaaaaggacccaggttacggtcgctttgattctacgttttacgctttctagagtgtccccctaattaatataatggccgagtttaacaaaccacaat

SEQ ID NO: 95150 - DNA, 542 bp, Zea mays
  unsure (1)..(542): unsure at all n locations
agtgcgtgtcctgcactgtcctgcatcgncgtaccggtccggaattcccgggtcgacccacgcgtccgcccacgcgtccgcccacgcgtccgcccacgcgtccgcccacgcgtccgcggacgcgtggggaaaggtggggttttcctacatataactgggaggagatgtcaaaggataattatgggtggtggcgagctcgtctgacacagatggcaaagtacttcacagcatacaggatagaccacatcttgggtttctttaggatatgggagcttccagatcatgctgcaacaggtttagttgggaaatttagaccttccatccctcttagtcaggaggagcttctaagtgaaggtctatgggattttaatctgatgagccaaccatacattctgcaggaaatactggaagagaggttggatcctcttgacagtcattgcagccaattttctaaatgagtaccaaaagccgtggtatgaagttaaaggaggattgcacacagtgaaaaagagtattgtaaagatttaaacacgtgctgaaan

SEQ ID NO: 95151 - DNA, 568 bp, Zea mays
  unsure (1)..(568): unsure at all n locations
cggtagctgcgtgagcccgtacgnncntgactgncgtatcggtccggaattcccgggtcgacccacgcgtccgcggagaaaccttctgactaaggccgccgtcttgaggtagcgcccgtcgccgactttcttggggtcgaggttgatgatgatcatgccaggcctgaaatcgaagttctccttgacaatcttgaggatctccttgccggagatcgcgccagtgccgtacgtgtcgactaacactgacagaggctcgggcactccattggcttaagacacctggaccatggcattttaagcaatacccttctttattattctcttggcagtctgcctttgtaaatacgcttcgatgaggcaatcatctgcgagttctttgtcagataaagtntcaatcactatgttacgcattccttgtccacaattgttattcttctttgacctgtaattgttatacatttttctaagtgtctatactgcantctgtttttctatgatgctttttaatctgaggcttcgctttaaggtatccgatttaaatggtttacggtacctcgaccccaaaaan

SEQ ID NO: 95152 - DNA, 545 bp, Zea mays
  unsure (1)..(545): unsure at all n locations
agtgctgtgcctgcactgtncagtacngcatctaccggtccggaattcccgggtcgacccacgcgtccgcggacgcgtgggttcgaataacacaggtgagcgcgacgatgggatccctcgctaataacagcatggtcgtgggcgccgtccttgcggcgctcgtcgccggcgggtcgtgcgggcccccgaaggtgccacccggccccaacatcaccaccaactacaacggcaagtggctcaccgctagggccacctggtacggtcagcccaacggtgccggcgctcctgacaacggcggtgcgtgcgggatcaagaacgtgaacctgccaccctacagcggcatgacggcgtgcggcaacgtccccatcttcaaggacggcaagggctgcggctcatgctacgaggtgagatgcaaggaaaaacctgagtgcttcggcaatccaatcacggtgtacatcactgacatgaactacgagcctattgctccctacaacttcgacttgagcggcaaaggccttgggttccctggcaaaccccggttcaac

SEQ ID NO: 95153 - DNA, 552 bp, Zea mays
  unsure (1)..(552): unsure at all n locations
tgaataggtntnncgactgccaggcnagtanagtactgctcgtaccggtctcggaattcccgggtcgacccacgcgtccggtaacacagttgagcacgacgatgggatccctcgctaataacatcatggtcgtgggcgcggtccttgcggcgcttgtcgtcggcgggtcgtgcgggcccccgaaggtgccgcccggccccaacatcaccaccaactacaacggcaagtggctcaccgccagggccacctggtacggtcagcccaacggtgccggcgctcctgacaacggcggtgcgtgcgggatcaagaacgtgaacctgccaccctacagcggcatgacggcgtgcggcaacgtccncatcttcaaggacggcaaagggctgtggctcatgctacgaggtgagatgcaaggaaaaacctgagtgctcgggcaatcctgtcacggtgttcatcacagacatgaactacgagcctatcgctccctaccacttcgacttgagcggcaaggccttcggttccctggcaaagcccgggctcaacgacaagcttggc

SEQ ID NO: 95154 - DNA, 475 bp, Zea mays
gaatgtgtgtgctagcaagagagagtattgtctgctctactcgaatctccagttccggccacgcgtacgcatagcgcattatccttttgagctcaacttgtcatctatgatatgtcttgcaactgatcaggtgtgggctacttcatgattcagatcgctgctagcatgaccaagatttacatggtgcttcaacttgtcaatgggggcagaactgttcgactggattaaaacatacaagatgcaaatatggaggaacaacaatcttccttggtggatggacttaaaactcccactactgtggctgatcaagaattcacagtcgtggagtgcttgtccaatcatgagtatcactcgcagactcttggatatgtaattggtggaactaacatgagatgcgacacctaccatctcacatgaaggatcaatctcttaattgccacactggacaagctcttggaccatctgcaaaaaagat

SEQ ID NO: 95155 - DNA, 477 bp, Zea mays
  unsure (1)..(477): unsure at all n locations
tgtaggtgcttatgncctttactgcctgcactngcgtacccgtcttgaattcccgggtcgacccacgcgtacgatccaggacacggacggcattcctccagaccagcatcgtctgatctttgctggcaagcagggggaggatggttgcaccctcgcggactacaacatccagaacgagagtacccttcacctagatctccgtctcaggggtagtatgcagatctttgcgaagaccctgactggaaaaaccatcaccctgcaggttgagagctcggacaccatcaacaatgttaaggctaatatccaggacaatgaggtcatccccccgaaccagcagcgtctgatcttcgacagcaaacagatggaggatggcaccaccttagcagactacaacatccacaaggagagcactctccaccttgcgctccagctccttggtgaccactaagtcatgggtcgagtaaccttccagaattt

SEQ ID NO: 95156 - DNA, 475 bp, Zea mays
  unsure (1)..(475): unsure at all n locations
agaatgtgtgagcctatctagtaactcattnctctacncgtcctgaattcccgggtcgaccgacgcgtccggaaacgtcagtcctgtcgatttgcctaaatactggtgctctgctctacatgataccattggggcttacttactccataagcacacgcgtttccaacgagcttggcgctgggcagcctcaggccgcgaagatggcagcaaaggtagtcatgtacatggctttgtctgaaggactcgttatatccttgacgatgaccctgctacgcaacatttgggggtacgtgtacagcgacgaggaggagatcgtgacgtacatctctaagatgttgccgatcctcgggatatctttcttcatagatgggctccatagctctctttcaggggtgctcacaggctgcggaaagcagaagatcggcgcggccgttaatctcggagcgttctacttgctaggcatcccagtgggggn

SEQ ID NO: 95157 - DNA, 543 bp, Zea mays
  unsure (1)..(543): unsure at all n locations
ataggctgtccctgatgttnagcatcgctctaccggtccggaattcccgggtcgacccacgcgtccgatcacgacaagatggcgtgcacagacaatgcgatgagagccttgttcctcctggtcctctggtgcgtcgtgcatggtgagaaggaagagtcaaagggcatcgatgcgaaagcgtccgggcctggtgggtccttcgacatcaccaagttgggcgcctccggcaatggcaagacagacagcacgaaggctgtgcaggaggcatgggcatcggcgtgcggcggcactgggaagcagacaatcctcatacccaagggcgacttccttgtcggacaactcaacttcacaggcccttgcaagggcgacgtgaccatccaggtggatggcaatctgctggcgaccacggacctaagccagtacaaggaacatggtaattggatcgagattctacgcgtggataacctggtcatcaccgggcaggggaaaccttgacnggcanggcccatncgtgtggagcaagaacttctgcaccaagaatat

SEQ ID NO: 95158 - DNA, 556 bp, Zea mays
cgaattgctcttacactgctagtcactcgatcgacctgccgtaccggtccggaattcccgggtcgacccacgcgtccgcagaaatcaatacccgaaaagtggtcggcacatacggttatatgtctccggagtatgcaagggatgggatcttctctgtcaagtcggacgtattcagctatggagtattgctgctggaaatcgtcagcggtaggaggaacagaggagtgtattcctattcaaacaaccaaagccttctaggccatgcatggagcttgtggaacgaggagaagagcatagagctagcagacgaaagaatgaatgggtcgttcaactcggacgaagtgcagaagtgcatcagagttgggctcttgtgcgtgcaggagaacccagacgaccgtccgctgatgtctcaggtgcttctgatgctggctagtaccgatgccacctcactgccaactcctaagcaacctggcttcgccgctaggagagttctgatggaaacagacacgtcgtcaaccaagccagactgcagcatatttgacagtgcaacaattac

SEQ ID NO: 95159 - DNA, 477 bp, Zea mays
  unsure (1)..(477): unsure at all n locations
tggacggtgcttccggcctgaactgtctngctnncgtattcacttnccggaattcccgggtcgacccacgcgtacggcaaggcaaaacctgactgctcgggcaatccagtcacggtgtacatcactgacatgaactgcgaggctatcgctccctaccacttcgacttgagcggcaaggccttcggctccctggcaaagcccgggctcaacgacaagattcgccactgcggcatcatggacgtcgagttcagaagggtgcgatgcaagtaccccgccgggcagaagatcgtgttccacatcgagaaggtctgcaaccccaactacctggccgtgctggtgaagtatgtggcggacgacggcgacatcgagctgatggaaatccaagacaagttgtcggctgagtggaagcccatgaagctctattggggcgccatctggaggatggacactgccaaggcgctcaagggcccctttttt

SEQ ID NO: 95160 - DNA, 546 bp, Zea mays
  unsure (1)..(546): unsure at all n locations
acggcgtgccctcccgctctnttagtatgcatctaccggtccggaattcccgggtcgacccacgcgtccgcccacgcgtccgcccacgcgtccgaaacgcgtcgcatccgctccacaggatcctctgcgcgaccggaaccgtgtgaccgcccgtgccgccggcgatcccgatccgccgacccgtcccagccccgctcgcagccatgtcgccgtcggagccgacgcgggaggagagcgtgtacatggccaagcttgcggagcaggcggagcggtacgaggagatggtcgagttcatggagcgcgtcgcgcgctacgcccgggggcgccggcggcggggaggagctctcggtggaggagcgcaacctgctgtccgtcgcctacaagaacgtcatcggcgcccgcagggccttcgggcggatcatctcctccatcgagcagaatggggaaggccgctggaaacgaggcgcacgccgaattcattcgcgcctacccgttcaagatcgaggccgagttggccggattttgcaagggcatcttttgcttctt

SEQ ID NO: 95161 - DNA, 545 bp, Zea mays
  unsure (1)..(545): unsure at all n locations
cgtgcgtggccagctagaganatgcatgctctaccggtccggaattcccgggtcgacccacgcgtccgcggacgcgtgggcggacgcgtgggttcttgcttctgcttactcgcatgagttgccacgatgtgggcttgaagttggtctgaccaactatgcagctgcctactgcactggccttctgttggctcgccgtgtgctcaagacccgtggtttagataaggaatatgagggcaatgttgaggccactggtgaggatttctctgttgagccagctgatgagaggaggcctttccgtgctctcttggatgttggccttattaggactacaactgggaaccgtgtctttggtgccctcaagggagctttggatggtggcctggatattcctcacagcgagaagaggtttgctggtttcaagaaggatgacaagcagctggatgcttatatccatcgcaggtacatctatggtggccatgttggtgactacatgaggaacctcgctggaaaggagccagagaagtacaatcttacttagatgagan

SEQ ID NO: 95162 - DNA, 550 bp, Zea mays
  unsure (1)..(550): unsure at all n locations
aaaggttgngatgctagctcagtgacgtactgccgtaccggtccggaattcccgggtcgacccacgcgtccgttccacaaacgcaagccccaatctcgccgtcaccacctcaatccagcaaacgcaaaccccgtctcgccgccgccgcgatgtctcgccgctatgacagccgcacgacgatcttctcgccggaggggcgtctctaccaggtggagtacgcgatggaggcgatcggcaacgccgggtcagccctcgggatcctagcggccgacggcgtggtcctcgtcggcgagaagaaggtgacctccaagctcctccagacctcgcgctccgccgagaagatgtacaagatcgactcccacctggcgtgcgccgtggccgggatcatgtccgacgccaacatcctcatcaacanccgccgccttcacgcncaacgctacgcgctctnctaccaggaacccatncncgtcgagcagctcgtccagtccctctgcgacaccaagcaggggtacacccaggtcggaggccttcgncccttcgggggtctctn

SEQ ID NO: 95163 - DNA, 545 bp, Zea mays
  unsure (1)..(545): unsure at all n locations
tgactgagcctagctctgcccatcantgcactgctcgtaccggtccggaattcccgggtcgacccacgcgtccggcgctccagattcctcgtcgcgcgcgctgagcaggagaggcgcgccgccatcgtgcgcgcggagggggagagcgaggccgcgcgccttatctccgaggccacgaccactgcgggcaacggcctgatcgagctcaggaggatcgaggcggccaaggagatcgcaagcgttctgtcgcgcacgcccaacgtctcctacatccccgccggcgacaatggccagatgctgctcgggcttaacgccgcccggcttcagaatttcaggacgagatgaaactgttcttggtggggaggagggaaagttgtttctgtagagcttctagaagtgttgctaagagtctggttttgattaatgaaatggctggaagtctgtttgtgctcaatagagtgtttcttctgtgaaataaaactggtctatgagatggtgtggccagctctttgctttgctctctgcaattcagttgtatcttatac

SEQ ID NO: 95164 - DNA, 544 bp, Zea mays
  unsure (1)..(544): unsure at all n locations
aggcgtgtgctagctaagaacagctacgcactaccgtaccggnctggaattcccgggtcgacccacgcgtccgcccacgcgtccggctcaacttcacgtgcatggagatgaaggacgagcagcagccgcagcaggccagctgctcccccgagctgctggtgcagcaggtcaaggctgcgaccagcgccgccggcgtgcagctcgccggcgagaacgcgctggagcggtacgacgatgcggcgttctcgcaggtggtgtcgacggcgcgcggcgcaggcctggccgcgttcacgtatctgcgcatgaacaagacgctcttcgacggcgacaactgggggcggttcgtgtccttcgtcagggctatggccgacggtggcgcgaggccagcgctgccgcggtgtgacacggngcactcggacctgtacgtcgggtttgtcgacgccgtcaaggagaggaaggcggcggaggccaagggcgccggcaccaccgcagcattgtaggtggtcgtcggtagatgcccatgcatgtgcttgcataatgcata

SEQ ID NO: 95165 - DNA, 477 bp, Zea mays
  unsure (1)..(477): unsure at all n locations
tggatggctgctgtagnccttcaccgctntcagtcgcattcacgncctgaattcccgggtcgacccacgcgtccgtgttaacttaccataacaacaactcaattcctatcgaattccttcctatcgaattcctatggtaaagttcctataggatagaacgtacacagggtgtacacattatatatgaatgaaacatattcattaacttaagcatactcctttttttatttaatgagttgatattaattaaatatctatttttttagatttttgcaaaggtttcatttacgcctaatccatatcgagtagaccctgtcgatgtgagaattcttaattcatgagttgtatggagggacttatgtcaccacaaacagaaactaaagcaagtgttggatttaaagctggtgttaaggattataaattgacttactacaccccggagtacgaaaccaaggatactgatatcttggcaaggcc

SEQ ID NO: 95166 - DNA, 545 bp, Zea mays
  unsure (1)..(545): unsure at all n locations
cggtactagtggttaaactgagntgcatcgacgtaccggtccggaattcccgggtcgacccacgcgtccgcccacgcgtccgcccacgcgtccggtgcgtgcgttcgtgcagtcacagacaggcgtccgggcaccgtgtctttcaccggcacgcaggacaagtgcacggcgtgcgacaagaccgttcacttcatcgacctcctcacggacgacggcgccatctaccataagacatgcttcaagtgcagccactgcaaaggggtcctctcgatgtgcagctactcctccatggacggtgtgctgtactgcaagacccacttcgagcagctcttcaaggagaccgggagcttctccaagaacttcacgccaggtggcaagtcatcagacaagggtgaactgacaagggccccaagcaagctgtcgtctgcattttctggtacccaagataagtgcgcagcatgccagaaaacagtgtatccgcttgagagtttactatggagggcgagtctccacaagaactggttcagtgctcgcacggcggtgat

SEQ ID NO: 95167 - DNA, 551 bp, Zea mays
  unsure (1)..(551): unsure at all n locations
tggactactactgttagtncagctacgtactgacgtaccggtctggaattcccgggtcgacccacgcgtccgggagccgatacagctctgctgctctctggatcaagcatgtgtggcgatgtttccgtgaacggcgcaccggtggaagactacgaactgccaccggaagcgtactcccatgcaggagcaaggtctccgggtccgggaacgccgacgggggaggccgtgaagaaggcggatgaggtggtgagcaccatgctggccaggggcttcgtgctgagcaaggacgcgctgcggcgcgcacagtccttcgacggccggcaccagcagctgctgtccacggccacggcgcgggtggcgtcgctggaccgacgactgggcctcagcgacaagttcagactgcgcaccggcgcggtccgcggcgcggagcgcgtggtcgacgagcgctttcaggtcacggagcgcgccctggggggccttttctggcggccggataggtcgttggccggaagcccctacccgttccgcgggacctgctggtgggttgggag

SEQ ID NO: 95168 - DNA, 482 bp, Zea mays
  unsure (1)..(482): unsure at all n locations
cganatcggtgctagtgcctgactcccgatngtagtgctctacccgtcctgaattcccgggtcgacccacgcgtccgcccacgcgtccgcccacgcgtccggaggagaggagaggagagactagacccgctagctgaggccgggcggcgcgctggacacgaacatgatggggagaaaggcgctcggctgtgctcctcttctcctcctcttggccgccgccgtcgctccggccgagctcagcgtcggggcggcggctgcctcgggcgcggtcacccgggccgacttccccgcggggttcgtcttcggcgtcggctcctccgcgtaccaggtcgaaggtgcagttgcagaggacggaaggaagcctagcatctgggacacattcacacatgaaggctattcccttgacaacgccacaggcgatgtaactgcggatcagtatcataagtacaaggacgacgtaaagcttctgcatgaagaatttn

SEQ ID NO: 95169 - DNA, 525 bp, Zea mays
  unsure (1)..(525): unsure at all n locations
agcggnntgnctgtccgcaggganactaaggactgtacgtaccggtccggaattcccgggtcgacccacgcgtccgcccacgcgtccgcaaattatgggatattctagccgtgtatgcatggattgacatagatgttggttactgccaaggaatgagtgatttatgctcaccaatgatagttctactaaaggatgaagcagatgccttttggtgctttgagaaattgatgcgtagattgcgaggaaatttcaaatgcacagatcaatctgtgggagtatccaaccaacttcaacatcttgcatctattattcaggttcttgacccaaagctacatgaccacctagaaactcttggcggaggtgactacctttttgcgttccgaatgttcatggtgctatttaggcgtgaagtatcatttggagactccttatacctctgggagatgatgtgggctctagaatacgaccctgacattttcttcgcaacatgcgaagaacaaggtgcaatacataaaaataaagttg

SEQ ID NO: 95170 - DNA, 519 bp, Zea mays
  unsure (1)..(519): unsure at all n locations
tggcgttgctgccgatgatgaccgatgtcatgctatggcgtaccagtccgcgggtcgacccacgcgtccgattttggatcttacaaagaaaggtgtttgcattttgaaggactgttcaatgcttattatggaggaggcagacaagcttctctctcctgagtttcaaccttccatagaacagttgattcgctacctccctgctagttgactgattgatttgaagcttggaaaagagggtgttgagacagtgaactttctgtcgttcttcaacaaaagcatagaactgcgtaaatcgtgttgaactattggcgaagaagatcacagagcttggttattcttgcttctatattcatgcaaagatgctacaggaccaccgcaatagagttttccatgatttccgtaatggagcgtgcaggaatcttgtttgtactgatctttttacaaggggaatagatattcaagctgtgaatgttgttatcaattttgatttccccaagaactctgaaacatatctccacn

SEQ ID NO: 95171 - DNA, 533 bp, Zea mays
  unsure (1)..(533): unsure at all n locations
cgtttgcggtgctgtgtcattcccgactgtantnacataccgctccggaattcccgggtcgacccacgcgtccgggccatcttcgtcgaccttgagcccactgtcattgatgaggttcgcactggctcgtaccggggactgttccacccagagcagctcatctcgggcaaggaagacgcagctaacaactttgcccgtggccactacactgtcgggaaggagattgtcgatctatgcctggaccgtgtgcgcaagcttgcagacaactgcactgggctgcagggattcttggtgttcaatgctgttggtggtgggactggctctggacttgggtcacttttattggagcgcctttcagctgattatggcaagaaatccaagcttggattcaccatttatcctttcccacaagtgtcaacaacttgtggataaccctacaacagtgtcctctccacacactccttgcttgagcacactgatgttgcagtcctcctggacaacgaggctatctatgacatatgcaggaaggtccc

SEQ ID NO: 95172 - DNA, 522 bp, Zea mays
  unsure (1)..(522): unsure at all n locations
agtggtntgctgtcgcagcnccctaagttctncnannnncgttccggtccggaattcccgggtcgacccacgcgtccgcggacgcgtgggcggacgcgtgggcgccccgcgcggcggtggcaggccgctccaggaggagatgtacgcatcccccgggaaccgcttcgcctgcggcatcgccgccttcaacgggagacaagaggacgcggcggacgccgaggcacagaggacggtggctctcgtggccagggacccgcccacgagagagatgacggtggatcagctgctcgtcaaggccaaccagctgcatcatctcctcgaccggttcatcgcctgccgccctgtaggcgcggccaaggcgaaccgagtggtgggggtctctctgtacccgctgatcaaggagagcgtgcagctctactgcgagctcacggaggtgacggccacgctcatcgagcagttcgcggagatggagaccgcggactgcgagcgcgtgcacgcnctcttctgcggtctcgccaagca

SEQ ID NO: 95173 - DNA, 522 bp, Zea mays
gtggggtcctgtgaactgagtacgagtgccatagcactgacgtaccggtccggaattcccgggtcgacccacgcgtccgatccagattccagcagcaacatctgcatcgaggattgctacatttctactggtgacgattgcatcgccatcaagagtggctgggatgagtatggaatcgcctatggccgcgccatttctggcatcaccgtgcggcggatcacaggctcctccccgtttgctggcttcgcggtcggaagcgagacatcaggtggcgtggagaacgtccttgcagagcacttgaacttcttcaactcagggtttgggatccatgtcaagaccaacacaggcaggggcggcttcatcaggaacatcactgtctcggatgtgacgctggataacgtccggtacggcctgcggatcgttggcgatgtcggcaatcaccccgacgacagctacaaccggagtgcgctcccgatcgtcgacgcccttacggtaaagaatgtccagggccagaacgtcaag

SEQ ID NO: 95174 - DNA, 526 bp, Zea mays
agatgcagggtgctgagaccgaatcacccgcaaactaagtatcgctccgaattcccgggtcgacccacgcgtccggtcggggcggcacgccgccgctcgcgtgggcccagcggttccggatcgccggcggagatcgcgacggcgctgctgttcctgcaccaaacgaagccggagccgctggtgcaccgggacctgaagccggccaacatcctgctggaccgcaactacgtgagcaagatcagcgacgtcgggctggcacgcctggtgccgccgtcggtggcggacaacgtgacgcagtaccggctgacggcgacggcgggcaccttctgctacatcgacccggagtaccagcagacgggcaagctgggcgtcaagtcggacatctactccctcggcgtgctcctgctgcaggtggtcaccgcgcggccacccatggggctcacgcatcacgtcgagaaggccatcgacgcgggcacctttgagcagatgctcgacatcaccgtcaaggactggcccgtcgaggagg

SEQ ID NO: 95175 - DNA, 537 bp, Zea mays
  unsure (1)..(537): unsure at all n locations
gtnttgggtgcgtgtaccagataaggaacgtactgctctaccgctccggaattcccgggtcgacccacgcgtccgcgtctcgctcgtggctgccctactcgtgctgcttgccctcgccgtcgtttcctccacgcgcggcgcacaaaaggagtccgtggctgacaacgccgggatgttggcaggcggcatcaaggacgtgccggcgaacgagaacgacctccagctccaggagctcgcgcgcttcgccgtcaatgagcacaaccaaaaggccaatgctcttctggggttcgagaagcttgtgaaggccaagacacaagttgttgctggcacgatgtactatctcactattgaagtgaaggatggcgtagtcaagaagctttatgaagctaaggtctgggagaagccatgggagaacttcaagcagctgcaggaattcaagcctgttgaagagggtgctagcgcctaaagatcttgtcgtctcctgtgcaatttgctgcctgaaggcgcaaactaagttacagaataaggagctgcttn

SEQ ID NO: 95176 - DNA, 527 bp, Zea mays
  unsure (1)..(527): unsure at all n locations
aggtggagagcgcgatttacagattcccgaataccgtcgtaccggctcggaattcccgggtcgacccacgcgtccggaagaggttgccgttaccgaccatgtcgcagcagccggcgccggcgccggcgccgccataggggccgtataggcaggtgagggaggcgacgccccatagccgggcgatctcctgcgtgcggttctccccctgcgggcgcctcctcgcgacagcctccctcgacggaacggtagcgctgctctccccgtcctcactggccgtaatcgccgtcctgcgcggccactctgacggcgtgtccgacctgtcctggtccacggagtcgttctacctctgctccgcctccgacgaccgcaccatccgcatctgggacatccggcccgtcctcgccggtggcgcccaggcagccgtcgtctccggcgcagaccgctgcgtncgcgtgctcaaggggcacaccaacttcgggttcagcgctaacttcaacccggagaccagctcgcagatcgctttcggg

SEQ ID NO: 95177 - DNA, 526 bp, Zea mays
  unsure (1)..(526): unsure at all n locations
agccggtggtgtaccagaaacgggaggtagtgttgcaccggcccggaattcccgggtcgacccacgcgtccgcccacgcgttcgcccacgcgtccggtctaggtttcctctctcaccatagcgcccgctctgtggcccttcgttcacctctacttactctactccctgcctgccagggagaggggaagtcagaggcacggagtggcgcagagcagacgcccgtgaaccattgtagctgtccctgtcgtcgtcatcgtcgtcgtcaacgaatccgcacaaggaaaagatggagaagaagccgaccatcctcatgaacaggtacgagctcgggcgcacgctcgggcagggcaccttcgccaaggtgtaccacggccggaacctcgcgtncggcgagagcgtggccatcaaagtcatcgacaaggagaaagtgatgcgcgtcggcatgatcgaccagatcaagcgcgagatctccgtcatgcgcctcgtncggcaccccaacgtcgtgcatctgcacgaggtgatggcc

SEQ ID NO: 95178 - DNA, 532 bp, Zea mays
aggagttacggtgcgtgataccagaaacacgcagatactgcttctaccggtccggaattcccgggtcgacccacgcgtccgcccacgcgtccgagtgatttgaaataattgggaataaatagttcgtgaatccctgaagcgtgcatatatatattcctgccaagataaaggtaatggagtcgtcacgcaggttccagccggccgtcatcctgcttctcctgctcattgtgtccaccgatatggcacaggcaagggaatgcgagaagtacagtgagcgatttgttggggcatgcatgatcgcagacaactgcgccaatgtgtgccgcggtgagggcttcttggccggcaggtgcagcaccttccgccgccgctgcatctgcactaggcagtgctaaacaagatcgctcgatcgctcgccatgcatcgacaacctattcttaataacgttcattatctcgttcttatttatgacgaatgtcatgtatgttctggtgactgtcatgtatattctgatgactgtcatgtatcttgg

SEQ ID NO: 95179 - DNA, 566 bp, Zea mays
  unsure (1)..(566): unsure at all n locations
cgctccgagtgtggtgtgcacgctatcgatagtatactcgcataccgcggccggaattctccgtggtcgactccaactcgtctcggacacttcgatggacacaacgactgattcatccttgacaagtagttgtacttatgactacttatttcagttgcggcaagagaaatactctggcgccataaatgctcctgaagactttgcactgtcctgctgacactcgtcagatatgttagcatgtggagaggaccttggccttatccctgcttgtgttcaccctgttatgcaagaactagtgttgattggattgcgtatccaaagaatgcctagtgaaccaaacttggaatttggtattccttctcagaatagctatatgacagtttgcgctccctcatgtcatgactgctctacattacgtgcttggtgggaagaagattaaggaagaagaagtcgtttctacaagactgtagatggcactgatgaagagccctcatctcgttgcaccccagaagtagtgcacttcattgttcagcaacatgttgacgctccatcaatgtgggcaatcn

SEQ ID NO: 95180 - DNA, 524 bp, Zea mays
  unsure (1)..(524): unsure at all n locations
cgtgagggggtntggatgagtaccgactatgattgcactgctctaccggtccggaattcccgggcgggcacaaccagctgacgggcagcatcccggcggggctggtgcaggggcagttccggtcgctggtcctgtcgtacggccagctgacgggcccgatcccgcgcgacgacgcgcgcgacgagatcaacaccgtggacctctcccacaacaagctgacgggcgacccctcccacctgttcgccgccggccggcccatcggcaaggtggacctgtcgtggaactacctcgacttcgacctgagccagctggtgttcccgccggagatgacgtacctggacctgtcccacaacctcatccggggcaccgtgccgctgtcgctggagcggctgtccacgctgcagaagctggacctgagctacaaccgcctgtgcgggccgctccccaagggacacggcgtcatcaagcacgggtgcaagccgtacgcgcacaaccagtgccgcaaagggaccccgctcgcgggc

SEQ ID NO: 95181 - DNA, 535 bp, Zea mays
aggatgaaggtgtggacggatggggggatgaaggattgctgtaccggtccggaattcccgggtcgacccacgcgtccggaggcaggaggaggaggaggaggccatggcgcgcgctgcgggcgtggaggcgcaggcgcggcggcggccacggctggtggggtacgaggagctgccggagtacctcaaggacaacgagtacatccgcgggcactaccgcgccgagtggcccgtccgcgacgcgctcctcagcgccttcgcctggcacaacgagactctcaacgtgtggacgcatctcggcgggttcctgtttttcctggcgctcgcggtcgccggagggtggacggaggccgccgacgaagccgctcccgggatcatgaggttcgtggtgacaccaccagctaacgcttcgtggggtagcggccagcattcgggtctgccaagccacgacggcagggcgtcgcagtccggcgtgccgcggtggccgcggacggtgttcctggtgggcgccatgtcgtgcctggccatcagcgcgacc

SEQ ID NO: 95182 - DNA, 527 bp, Zea mays
  unsure (1)..(527): unsure at all n locations
agtagcgggagtatngaccgagtaagactgtcatagcactgccgtaccggtccggaattcccgggtcgacccacgcgtccggacgagtagaggttagatttaggctgaggtaagatggtgtgcatccggcaggcgacgcatcgaagacctgctggcgatgcaggcgtgcaacctgatgtgcctgccggagaactaccagatgaagtactacttctaccacatgctctcgtggccgcagctcctcttcgtcgccgaggactacggaggcagcatcgtcggctacgtgctcgccaagatggaggaggacccctccgagccctgccacggtcacatcacctccctcgcggtcctccgctcccaccgcaagctcgggctcgccactaagctcatgtccgccgcgcaggccgccatggaccaggtcttcggcgctgagtacgtgtcactccacgtccgccgatccaaccgcgctgccttcaacctctacacctctaccctcgggtaccagatccaggacatcgaggccaagt

SEQ ID NO: 95183 - DNA, 540 bp, Zea mays
aggatgtatggtgtggtacggatgggaggatattgtatctgctctaccggtccggaattcccgggtcgacccacgcgtccgcccacgcgtccgcccacgcgtccggtgaggtgagtaatatgaagcaagagaataacaaggtgaccaaagagctacaagctgggctcgagcatgtaaggggcctccaagtggaaattgggaggacagttctgaagctcagagacaatattgaactatccattgggagaagcagtcgagcacatcagaacttcagatatctatcagggaaggccggggtacctcaacgaacttccttatttggttctaggacgaaaaagacatcattattttcatgtatgcctcccattgccaaagccgatttctgacatgaggtcaagtctttttagataacattggttagagggttagctaattttttcttctattcgatatgggtggttctctatgaacatgcttaaaaaaattgatgcaaggtaaaaaaaaaaaaaaaagggcggccgctctagaggatccaagctt

SEQ ID NO: 95184 - DNA, 526 bp, Zea mays
  unsure (1)..(526): unsure at all n locations
tggagcggcgtntaggatgagacacgatcatgactgacctgctctaccggtccggaattcccgggtcgacccacgcgtccgcccacgcgtccgcatctgatcactcatatgtatcacggaagcatgaggaggataaggtgatgatctttgagagaggagatttggtcttcgtgttcaacttccactggagcaatagctattttgactatcgcgttggttgtttcaagcctgggaagtacaagattgttttagattctgacgatggccttttcggtggatttagtcggcttgatcatgacgctgagtacttcactgctgactggccgcatgacaacaggccgtgttctttctcggtctatgcacccagcagaacagccgtcgtatatgcacctgcaggtgcagaggacgaatagggcacagcagcggttgttggggaagaacttcagagggatgtactgctggtggactgacaccactgccacgcgcgatgctgccagatgttgccctcgagaccacgtggcangac

SEQ ID NO: 95185 - DNA, 535 bp, Zea mays
  unsure (1)..(535): unsure at all n locations
ttggtttngatcggcatcggggtgatgactgtattgctctaccggtccggaattcccgggtcgacccacgcgtccggttgccaaagaattccctcccctagccgccgccgccgctcgtctccctgagaggtgccgggaccgaggatttggccgagttctaggtagagaatcggttttacttgtctcagcccggggtctgctgcgtctggtggtggtgaaggggagaaattcgtgagatctgttccggatcaggcgtgcgagctcgggaatcaggggtttcacacatagcttcgtcgatttgaatttgatgtactaatggagtctaagggtggcaaaaagtctagcagtagtcgttctatgatgtatgaagctccccttggctacagcattgaggacgttcgacctgccggaggcgtgaagaagttccagtctgctgcttactccaactgcgcgaagaagccatcctgatatcccttttggcttcctcattctagtagtttaggatttcttttctgacactttgattctgaccaat

SEQ ID NO: 95186 - DNA, 534 bp, Zea mays
  unsure (1)..(534): unsure at all n locations
ggatggtaggtaggcgggtagtgattcatgatctngatgtatcgttctaccggcccggaattcccgggtcgacccacgcgtccgcggacgcgtgggcggacgcgtgggttcttgcttctgcttactcgcatgagttgccacgagggggtcttgaagttggtctgaccaactatgcagctgcctactgcactggccttctgttggctcgccgtgtgctcaagacccgtggtttagataaggaatatgagggcaatgttgaggccactggtgaggatttctctgttgagccagctgatgagaggaggcctttccgtgctctcttggatgttggccttattaggactacaactgggaaccgtgtctttggtggccttcaagggagctctggatggtggcctggatattcctcacagcgagaagaggtttgctggtttcaagaaggatgacaagcagctggatgctgatatccatcgcaagtacatctatggtggccatgttgctgactacatgaggaacctcgctgaagaggagccn

SEQ ID NO: 95187 - DNA, 699 bp, Zea mays
  unsure (1)..(699): unsure at all n locations
ngtnatgacgtggtagattagtcatcgggaagtagatgctctactngcgtccgganattctccgtggtcgactcgcacgcgtctcgtggcacgtttcaaatctgtggcccctctgcnngttcgagatnctgatctganngctggcaccagtcccactttgcgcgcatgggcggagggactncgtgagccgccaagccccaatctcactggcaaagttcggcggtagtgccagaagctcgcctggcgagcctcactcnnaccatcgtaggagaatctgnntcgtcgactctcgccgtaaagcccgtacgagaatnctcgcatctncgtggtctgtctgctactctcacgttctgtccactactctngatatcactcnnttctggaaagggctaagagggtggcaccgnnngtgtttctcatagaaatacctagtnnggcatcgaaggccgtacccggggtacgtcggaagaagctgtnngggggaagcacccgtggaagggcttttcgcgtgcggtgtgacaaccgtgtgtgctcgtatcgttctctggggcccagtgcgaaagcgctgctgctncagctgcngtctgtcggaagccacatgcanaccgtgttgctgaacgcccggtgctcgtttcggtcaatcgggccccccgggaatgcccgcngccgacggggctaccaccccgggttcccggggac

SEQ ID NO: 95188 - DNA, 530 bp, Zea mays
agtctgagcgtgtggactgaccccgcacatgatctgcattgactgtaccggtccggaattcccgggtcgacccacgcgtccgcccacgcgtccgcggacgcgtgggctgacgcgtgggcctgaacaaccggcaggtgtgcgcgctcactctgctcaactccaagttcttccacatgaacatgtaccggtgcaaggacatgctgatcaaggacatgaccgtgacggcgcccggcgacagccccaacacggatggcatccacatgggcgactcatccggtatcacgatcaccaacaccgtcattggcgtctgtgacgactgcatctccatcggccctgggacctacaaggtgaacatcaccggcgtgacctgcagtcctggccacggcatcagcatcggcagcctacggcggtacaaggacgagaaggacgtcacggacatcaacgtcaacgattgcactcttaagaagacgatgttcggcgtccgcatcaaggcgtactaagacgccgtctccgtgctcaccgtctacaag

SEQ ID NO: 95189 - DNA, 532 bp, Zea mays
  unsure (1)..(532): unsure at all n locations
tggatgagcgggtggcatgtatcccgccaagtatatagtatctgctctaccggtccggaattcccgggtcgacccacgcgtccgacgtgatcatgttctacgcgccggtgctgttcctgaccatcggcttcggcgacgacgcgtggctgatggcggccgtcatcacggggctggtcaacatgttcgccaccgtggtgtccatcgtgtgcgtggaccgcctgggccggcgcgcgctgttcctgcagggcggcacgcagatgttcgtctcccagatcgtggtgggcacgctgatcgcgctccagttcggcaccgccggcgtgggcgagatgtcccgctccaacgcctggctgctggtgctcttcatctgcctctacgtcgccgggttcgcctggtcgtgggggccgctgggctggctcgtcccctcggaggtgttcgcgctggaggtccggtcggcggggcagagcatcgccgtgtgcgtcaacatgctgctcaccttcatcatcggccaggccttcctcagcatgctgtgctn

SEQ ID NO: 95190 - DNA, 529 bp, Zea mays
  unsure (1)..(529): unsure at all n locations
agatgccgtgtgcgtgagtcatntctcgacgtatcntcgtaccggcccggaattcccgggtcgacccacgcgtccgctccgatccatcaacaatcgccgagagcgatcgagagataaataaagatgaagaaagtggcgtcatcgtcagccgttctcttcgtgctagccctgacgctagtttgtgccccgctgatagcagaggcaaagaagaagagagtcgccgccgccgccgccgaggagaagaaggtgcaggacaacttctgctcgacgctgtgcgagggcaggaaggggatggacctggtggtgtgcaaggagtcctgcgacctctcacagcgctccaacctggtgctgtacggccggatccagtgcaagggcaagtgcaccgagcagaagggcatcaccgcgccgcaaatgaaggtgtgccaagaggcgtgcgacaaggactacgtggtcaaggcggctgatgtcaccaaagcctgcaacaccacctgcgccaaggagaaagcacctctgctcatcgagaactgca

SEQ ID NO: 95191 - DNA, 528 bp, Zea mays
  unsure (1)..(528): unsure at all n locations
tgctcgcnnttgtatcgtatacgacagtatancgcattgctctaccggtccggaattcccgggtcgacccacgcgtccgcggacgcgtgggcggacgcgtgggcggacgcgtgggtgaccttcgtggacactccaggaggtgtatcaggggagaagcagcggacgcagcgcagctacgatttcaccggagtcacgtcgtggtttgcggccaagtgcgacctcatccttctcctgtttgatccgcataagctggacatcagcgatgagttcaagcgtgtgatcgggtctctccgcgggcatgatgacaagatacgcatagttctcaacaaggccgaccaagttgatgcacagcagctgatgagagtgtacggagcactgctgtggtcgctcgggaaagtcctgaacacaccagaagtcatgcgtgtctacataggttcattcaacgacaagccgatcagggagacagcggctgggccgctgggcatggagctgttccagaaggaacaagatgacttgctctcggacctg

SEQ ID NO: 95192 - DNA, 525 bp, Zea mays
  unsure (1)..(525): unsure at all n locations
gtggacgttggtgtttcagttcttgacgtatcctcgtaccggcccggaattcccgggtcgacccactcgtccgaaagaattccctcccctagccgccgccgccgctcgtctccctgagaggtgccgggaccgaggatttgggcgagttctaggtagagaatcggttttacttgtctcagcccggggtctgctgcgtctggtggtggtgaaggggagaaattcgtgagatctgttccggatcaggcgtgcgagctcgggaatcaggggtttcacacatagcttcgtcgatttgaatttgatgtactaatggagtctaagggtggcaaaaagtctagcagtagtcgttctatgatgtatgaagctccccttggcttcagcattgatgacgttcgacctgccggaagcctgaagaaattccagtcttgtgcttactccaactgcgcgaagaaaccatcctgatatcccttttggcttcctcattctagtagtttaggatntcttttctgacactttgattctgaccaa

SEQ ID NO: 95193 - DNA, 529 bp, Zea mays
agggcgtggtttgtctgcatcagcaggtgattgtactgctctaccggtccggaattcccgggtcgacccacgcgtccgcgtcgcccggtcggaagcaccaccagctaccagggatgtctggcgaggaggaggagaacgccgcggagctcaagatcggcgaagagttcctcaaggccaagtgcctgatgaactgcgaggtggcgatcatcctggagcacaagtacgagcagatccagcagcacgcgtcgtcggagtcggacccgtcgtcgcaggtgtcgcaggtgttcgagaagtcgctgcagtacgtgaagcgcttcagccgctacaagaaccccgacgccgtgcgccaggtccgcgagacgctgagccgctacggcctcgccgagttcgagctctgcacgctcggcaacctctgccccgacaccagcggcgaggccaccgcgctcgtcccctccctcaagtccggcggcaggttcgtcggcgaccccggggacgagaagatcgagaagatgctcaacgacctcttcct

SEQ ID NO: 95194 - DNA, 529 bp, Zea mays
tggaggtcggtggcccttcccgacggatgacgcattgacgtaccggtccggaattcccgggtcgacccacgcgtccgacgtgatcatgttctacgcgccggtgctgttcctgaccatcggcttcggcgacggcgcgtggctgatggcggccgtcatcacggagctggtcaacatgttcgccaccgtgctgtccatcgtgtgcgtggaccgcctgggccgtcgcgcgctgttcctgcagggcggcacgcagatgttcgtctcccagatcgtggtgggcacagctcgatcgcgctccagatcggcacctgcatcgttggcgagatgtcccgctccaacgcctgtctgctggtgctcttcatctgcctgtacgttgccaggttcgcctggtactggaggccgttgatctggctcgtgagctcagaagtattcgcgctagaggttcaggctgcagtgcagaacatggccgtgtgcgtcaacatgctgctcaccttcatcaacgaccagtccttggctagcatgctgtgctcgc

SEQ ID NO: 95195 - DNA, 531 bp, Zea mays
  unsure (1)..(531): unsure at all n locations
ttatcgtggtgtaaatcgaatacggaagtatgatgcaccggcccggaattcccgggtcgacccactcgtccgcccacgcgtccggtttgtctggtggtacaaatggacattcagacatgtgctacttctgtcccagatttaaaaaaacacagaaatctgctggtgtccttgaacagggaaatgttgctctggatgttgctcgcattcttctacgctgtanagctgagttggctactacagacattactgattatgcattggatgctctacgtggcagcacgataaggaacgtatatttggttgagcgaccgngtccagtacagggcaacttgcacagcaaacgagctgcgtgaaattttaagtttgaaaaatgtccgtatttgcatcaaggcagctgatctcgtgaccacacctgcggacgaggaggagatgaggaatagtagaatacatagaagagtttatgaattgttgtcaaaaactgcgcatggcggcaacaattacaatggccaaaaggagcttcattttgtgttt

SEQ ID NO: 95196 - DNA, 523 bp, Zea mays
tgagcggtgctgaaccagcataggaagaatgctgcaccggcccggaattcccgggtcgacccacgcgtccgcccacgcgtccgcccacgcgttcaggacgaccacgagtactactagctctcgggcagcatcggagctggatccgtctctgcacaggttgaggacatcacagacactcacaacagacatgtagtgaactcatatttgcatgagtgtacatgcctcgagtggcagcacaccggctaaccttgcccacatgcattggccttgattataacacacgatagcgtggatgtggaattggacgatcctgtgcatgaatactactcagtgcaaaggatcaaaagtgcatacaagagaatgactgaaccacttccagataggtctcaatggccattagtggacccgccctatgtggttggtgcaccacttgacaagataggtagcacaaggtacaacttgactgaaaaagggcggacgctctagaggatccaagcttacgtacacgtgcatgcaacgtgat

SEQ ID NO: 95197 - DNA, 548 bp, Zea mays
  unsure (1)..(548): unsure at all n locations
agatgcaggggnntccatgannctgactctcttcgcantactcntccggtccggaattcccgggtcgacccacgcgtccgcccacgcgtccgattatttccggtttaggcttggattgtttgtggtagcctcggcctttggagttcattcagatcggtgattcctgcgtcggccaacagttttgaggtggtaatggcggaccaggctaaccaacccactgtccttcataagctaggtggccagttccacctgagctccagcttctctgaaggtgtacgggcccgtaacatctgcctttctttctcatcttatgaaaggagatttgccacgaggaactacatgacccagagcctttggggcccttcaatgtctgttagcggtggcatcaatgttccagtgatgccgactccgctttttgccaatgctccagccgagaaaggtggcaaaaacttcatgattgatttcatgatgggcggtgtttcagctgctgtttcgaagactgcagctgctcccattgaacgagtgaagctgcttattcagaatcagga

SEQ ID NO: 95198 - DNA, 527 bp, Zea mays
  unsure (1)..(527): unsure at all n locations
tgagagtcgtgttaaagtataaacgacaantattcaccggcccggaattcccgggtcgacccacgcgtccgcccatgccatcgcggcgcctaccccacccgtcctgctcccgnccggtagtagtagcagagcgtccccggccgtgccgagaatagatggggttcgggtccttcgtcgggcggggtgctcttcgtcgccgctttccttctctccgnctaccaggagtttaatgaatttggcgctgatggtgggccagcagctaaggcccttcagcccaagttcaatgtgtttgtaaaaaatatctctgcgcatctgggagtagttgtgccgcacattgagttgaagcatgtgattgctgctacaattgctcttaagggacttggaagtctcctttttattttgagcagctccctcggtgcttatctcctgctgctgtacctcgctctgatcacntctatcgttcacgacttctacaactacgacacggagaaggaagaaatcgcgcggctgtttgcgaagttcaccca

SEQ ID NO: 95199 - DNA, 527 bp, Zea mays
  unsure (1)..(527): unsure at all n locations
gggacggtgcgtgaacacgaacaagaacgtatgtctgcaccggtccggaattcccgggtcgacccacgcgtccgcccacgcgtccgctcgctcgcgctcatggcgcgctccatgggcctcaacaccgtcatcgtgcgcgagcaggaggaggagctcgacattgtcgtcgaggccagccgccgtctcggcgtgcgccccgtcgttggcatgcgcgccaagctgcgcaccaagcacgccggccacttcggctccacgtccggggagaagggcaagttcggcctcagcgccgcgcagatactgtccgtggtcaccaagctcaaggccatcggtatgctcgactgcctccagctgctgcacttncacatcggctcccagatcccgaccaccgtcctgctctccgacggcgtcngcgaagccgcgcagatctactgcgagctcggccgtcttggcgcggacatgcgcgtcatcgacgtcggcggcggcctcggcattgactacgacgggacccactcggcgcaaaccgacat

SEQ ID NO: 95200 - DNA, 571 bp, Zea mays
  unsure (1)..(571): unsure at all n locations
tgtgcgttantataccttgatagctggtcgtactgcacgtaccggtccggaattcccgggtcgacccacgcgtccggaaacaacaagactgacagcgacgatgatgccacagctgcgtagcctcgtcgcgctggtcctcgtggccacggccatagccgccgctcccggcgttgggtttgtcgtcaccggccgcatctactgcgacaactgccgcgccgggttcgagacaaacgtgtcccacgccatccaaggcgcgacggtggagatggagtgccgccacttcgagtcgcagcaggtccacgacaaggcggaggcgacgacgggccccggcggctggtacaggatggagatcagcggcgaccaccaggacgagatctgcgacgtgcgcctgctcaagagccccgaggcggactgcgccgagatcgaccactcccgcgaccgctgccgcgtcccgctcacccgcaacgacggcatcaagcagagcggcgtccgctacgccaaccccatcgncttcctccgcaaggagccgctccccaactgcngcgagcttgntcgcgcctacgacctctan

SEQ ID NO: 95201 - DNA, 561 bp, Zea mays
  unsure (1)..(561): unsure at all n locations
gtcgagtgtgtctgctgaggccggatcggatgacgttccggtccggaattcccgggtcgacccacgcgtccgcttcgagccgctcctcgtcgacttcgggttctccagcctcatcagccacatgcagtccccgaactccctgttcgcgtaccgcgccccggagtgcgccgccggccaccccgtgagcgcaatggccgacgtctactgcctcggcgtcgtcctactcgagctcctcaccggcaagttcccggcgcagtacctccagaacgccaagggcggcacggacctcgtcgtgtgggccacgtcggcgatggccgacggctacgagcgggacctgttcgacccggccatcatggcggcgtggaagttcgccctgccggacatgacgcggctcatgcaggtggcggtggactgcgtcgagacggacctggagaagcggccggagatgaaagaggcgttggtgagggtggatgatgtggtggcgactgctttagccacngtgagggagatgcaacatgatggtaacngcagctaagggacgatgaacgcgccaatcggaan

SEQ ID NO: 95202 - DNA, 568 bp, Zea mays
  unsure (1)..(568): unsure at all n locations
agtcgagggtgtctcaattgaaacccctactgatgcctgtcgcactgcacgtaccggtccggaattcccgggtcgacccacgcgtccgcgagaatatcaagatggaggactcagccaaccccatcttcatcgacatgaagtactgccccaacaagttgtgtaccgccaacggcgcctccaaggtcaccgtcaaggacgtcaccttcaagaacatcactggcacctcctccaccccggaggccattagcctgctctgcactgccaaggtcccatgcaccggcgtcaccatggatgacgtcaacgtcgagtatagcggcaccaacaacaagaccatggctatatgcacgaacgccaagggcagcaccaagggttgcctcaaggagcttgcatgcttctagaccctccgtcgactgacccatctctctagttataatttttctctcgtccttgcattgcatattagttgctatccattggtaacgcacaacagtaaaacgacanacatncaacagctatattatgttcgacggtgtaacaccctgaattttagggtataaaatttcttctc

SEQ ID NO: 95203 - DNA, 540 bp, Zea mays
  unsure (1)..(540): unsure at all n locations
tgatttatcncnnagttgctcgtatctactgataccattacgaccgtttggactgcccgtaccggtccggaattcccgggtcgacccacgcgtccgcccacgcgtccggagaagagctgcgccccgctcatgctccgcctcgcgtggcactccgcggggacgttcgacgtgtcgtcgaggaccggcggtccattcggcacgatgaagcatcagtcggaattggctcacggcgctaacgcggggctggacatcgcggtgcggctgctcgagcccatcaaggaggagttcccaatcctctcttacgccgatttctaccagctcgcgggagttgtggccgtggaggtcaccggtgggcctgagattcccttccaccccggtagggaggacaagcctcaacccccacctgagggccgacttcctgacgccactaagggttctgaccacctgaggcaagtttttggcaagcagatgggcttgagcgatcatgacattgttgccctatgtggtggccacaccttgataaggtgccacaaatagcgg

SEQ ID NO: 95204 - DNA, 526 bp, Zea mays
ggttttatccgagtcgcgtgtcgctgatagactacgactgctcgtaccggtccggaattcccgggtcgacccacgcgtccgccaagtacatggtcatccaaggcgagcccggcgctgtcatccgcgggaagaagggatctggaggcataactgtgaagaagaccggacaggcgctggtgatcggcatctacgacgagcccatgacccctggacagtgcaacatggtggttgagaggctcggtgactacctcgtagagcaaggcctgtgattgaatgcatccaaacaacgacaccaacgccaacattaattaattagtagtctccatgccctgggattgtgcgtggccgctccgttaaacaccacccatccttcgttcggcattttttcccccttgtttatataattttattgtatcgttttggcaaataattttgtgattcgaccccaaagcaagtttggttgtcttacgatttgtaaacctggaacaatatataatgtgattgaactgctttgtctaaaaaaaaa

SEQ ID NO: 95205 - DNA, 540 bp, Zea mays; identical to SEQ ID NO: 95203
  unsure (1)..(540): unsure at all n locations

SEQ ID NO: 95206 - DNA, 529 bp, Zea mays
gttatagtgcggagtccgtaatcaatgatagactgacgccctgtctaccggcccggaattcccgggtcgacccacgcgtccgcgcaaggagagcaccctccacctggtgctccgtctcaggggtggcatgcagatctttgtgaagacactcactggcaagacaatcacccttgaggtggagtcttcggataccattgacaatgtcaaggccaagatccaggacaaggagggcatcccaccggaccagcagcgcctcatcttcgccggcaagcagctggaggatggccgcaccctggcggactacaacatccagaaggagagcaccctccacctggtgctccgcctcaggggtggcatgcagatttttgtgaagacattgactggcaagaccatcaccttggaggtggagagctctgacaccattgacaatgtgaaggccaagatccaggacaaggagggcattcccccagaccagcagcgtctgatctttgctggcaagcaacttgaggatggtcgcaccctcgcggac

SEQ ID NO: 95207 - DNA, 562 bp, Zea mays
  unsure (1)..(562): unsure at all n locations
nagcgttgtgcctaatgatagcggtttgcatgacgttccggtccggaattcccgggtcgacccacgcgtccggcaacaggaagtagaactatagaacaagaggcttgaatgaaatgtatgtatcagactcgccccgttttttttttgtccatgtactgcagtgcagcggactgagccgctggcacagcatgcggtaataatcttgtcacaatgacagtgctgtaatcgggagcgtgtttcttgtaatcttgttaggaagtgtttctggttttgtttgagcaaaaaaaaaaaaaaaaaaaaaaaaaaaaaaaaaaaaaagggcggccgctctagaggatccaagcttacgtacgcgtgcatgcgacgtcatagctcttctatagtgtcacctaaattcaattcactggccgtcgttttacaacgtcgtgactgggaaaaccctggcgttacccaacttaatcgccttgcagcacatccccctttcgccagctggcgtaatagcgaagaggcccgcaccgatcgccctttccaaagttgcgcagcctgaatggnaatgggactc

SEQ ID NO: 95208 - DNA, 562 bp, Zea mays
  unsure (1)..(562): unsure at all n locations
agcagtgtctctcctgaagccggtttgcatgacgttccggtccggaattcccgggtcgacccacgcgtccgcccacgcgtccgcccacgcgtccgatttcccagccgccgcggcgccacgcagacctagcagagaaacacccacccgagatggcgatggctctgcgccgccttgcgggcgtgtccggatcgccgtcggcctcctctgccgcggccacggtgctactccggtcggcgctgacccgcccgatctccaccggcttccgcgaggagcgcgacaccttcggtcccatccaagtccccaacgacaagctgtggggcgcgcagacgcagagatcgctgcagaactttgacattggcggggagcgtgagaggatgcccgttcccatcatccgtgcctttggcgtgctaaaaaagtgcgccgctaaggtgaatatggactatggccttgatccaacaatagggaaggccataatacaggcagctgangaggtcgcagagggaaagttggatgatcacttnccactngttatcttgcatactggcagtggcacacatagcat

SEQ ID NO: 95209 - DNA, 561 bp, Zea mays
  unsure (1)..(561): unsure at all n locations
agtcggagttctcttgctgatgcctgtttgatgacgttccggtccggaattcccgggtcgacccacgcgtccgcgagaaccccgagaagagcatcgacaccatccacatcgacggctacgccttcttcgccgtcggcatggggcccggcaaatggacggcagcgtcgcggagtacgtacaacctcctggacacggtgagccggcacacgatccaggtgtacccaaggtcgtggacggcggtgatgatgacgttcgacaacgcgggcatgtggagcgtccgctccaacatctgggagaggcagtacctcggcgagcagctgtacgtgagcgtcatctcgccggagcggtcgctcagggacgagtacaacatgccggagaccagcctccgctgcggcaaggtcgtcggcctgccgatgccaccgtcctaccgcgccgtctagagcgtcgaccgatcgcgcacggtgctgtacacaactaaaggagagcgagaggggactntntctcgcgtttccttctctagccagccttgtctgtccccttctcgttaatctctctctctct

SEQ ID NO: 95210 - DNA, 563 bp, Zea mays
  unsure (1)..(563): unsure at all n locations
atgcgttntntaaatgaaacccntatgataactgtacgcctgcacgtaccggtccggaattcccgggtcgacccacgcgtccgcccacgcgtccgcttttttttttttttttttttaacaacaaacaaaaaaactactatctgagctcaaatttgtacatttagaacgacataatctacttggacctttacagtaaagggcagaatgataaattcttggttgtatcattcacaagtaaatgcatctcctcctcaagatatgccgatcgtcttccctagcagccacattaccagcgagaactcgatcataaacagcgcgtgtagccatgtccggtcgacgacgaaaccgaacaccgtgatccccgcccggttgttctccaagtacgtcactagcgcctgcctcttctggaaggagacgttggtggcgtggaaaggcgtgaaccttgaggtgtccacgccgtcctcgctccgccactcgtcgtcgtcggactcttcgccggacgacgcgcccgccatcgggaagggactcgtgggcgtttgctgctgcaggcacgctttgctggg

SEQ ID NO: 95211 - DNA, 561 bp, Zea mays
  unsure (1)..(561): unsure at all n locations
ggctagttgtccgcttgtcccctcctgatacctgtcgcatgcacgtaccggtccggaattcccgggtcgacccacgcgtccgtgaataactcgatcgagatagacctatcgctatcggtgtagcattcaagtagggaggtggccatgaacaacattgaatcgtcggagctgaggaaggtgttccaaatgttcgacaagaatggcgatggccagatcacgaagaaagagctaggggagtcgctcaagaacctgggcatccacatctctgatgacgagctcgatgccacgatggacaagatcgatgccaatggtgacgggtgcgtagacgtcgaggagttcggaaagctctaccgctccatcgtcggcgagggccaagtggacaagcacgacgaggaagaggacatgcgggaggcattcaacgtcttcgaccagaacggtgacggcttcatcaccgtggaggagctgcggtctgtgctgtccagcctcggcctcaagcaagggcgcacggccgangattgccgtaagatgatcagcanggtcgatgccgactgcgacgggcgc

SEQ ID NO: 95212 - DNA, 523 bp, Zea mays
  unsure (1)..(523): unsure at all n locations
gggtatgcagtccgnntcaactgaagactacagcagtggtaccggcccggaattcccgggtcgacccacgcgtccgagtggttntaatggtcatttctggggtttttgcaacaaacgataaacacgattggagtttgactcaatctgaggttgctgctgttgtatatgctggtgtcatggcatctgctcttaattatgtcctattgacatggtccaacaaaatactgggacctgctatggtggcactttatagccctcttcagccagtggtctctgctctattgtctatgatttttctgggaagcccaatttaccttggaagtatttttggaggacttctaatcatctccggtttataccttgtgacctgngcacgccacagagaaaaactgacaagtattggagtaccttatgtaacatgtgtatcggagtcactcgatggtccttctcatgttgcaaagactgtgcccttcatatctctttcaaggctgtgggatgtgccacatgagtcttgagaactngg

SEQ ID NO: 95213 - DNA, 532 bp, Zea mays
tgtttagtgcgaggttcgtgtctccgtatgccgtgacgtacgctcgtaccggtccggaattcccgggtcgacccacgcgttcgggtgaagccggtggacattatcacccccaccgtggccgcgcacatacaggccaccgtggcgtgcgggcgcaagcacgggctgcgggtccgcgtgcggagcggcgggcacgactactagggcctgtcgtaccggtccgtcaagccggagacgttcgccgtggtggacctgtccatgatgcggcatgtgcgcatcgacggctaggccgccacggcttaagtggacttcatggcgcagctcgcccagctctactactctctggcgaagatgacccccagtctcaggtttcctgaggtcgtgtgcgccacgatcggcgtctgaggccactttagcgggcgcgtgtttcagcattgctgctgcgcaagtacaggaccgtcggggacaacctcatttaaccccaagttggtggcccccaacggtaccctgttggacacgaagtcattggcgagag

SEQ ID NO: 95214 - DNA, 511 bp, Zea mays
gatcgaaagcgtgacgcctgctcgtaccggtccggaattcccgggtcgacccacgcgtccggcaactgaaaacagccgagcgatctcctctccctctccctctccgatccattctccagcgcagcgaagtaaacatgtctgaccgggcaaagatgtcgtggcaggcgtacgtggacgagcacctgatgtgcgagatcgagggccaccacctcgcggcggcggccatcgtcggccacgacggtgccgcctgggcgcagagcacggcgttccccgagttcaagaccgaggacatggccaacatcatgaaggacttcgacgagccagggcacctcgcgccgacaggcctgttcctcggacctaccaagtacatggtcatccaaggcgagcctggtgccgtcatccgtggcaagaagggatcaggaggcatcaccgtgaagaagacagggcaggcactcgtcgttggcatctacgacgagccgatgacgcctgggcagtgcaacatggtggtgga

SEQ ID NO: 95215 - DNA, 563 bp, Zea mays
gtcagtgtgtctaatgataccggttggatgcacgttctcggtccggaattcccgggtcgacccacgcgttcggcgtcatgcaacatcggtcaacaaagatcttgaatctaagctaaaaaatgcctctacacttttggtgaagttgcaagatgagttttctagttatttgaaaggggaatgcacacaagaggttagtatagatggagatgcagagagacaaccattggtgtttatcaagatgaagctagcaaatgccaggaaggagcttgaggacatgagagcagacattaaaaaattcaaggatgatgttaggaaactttggaatgtcgcagctacatttcgggctgatatagatagggaggaggcaggtctactagcattagagcacaaagagcaccttgcttcgatttctgtatcatctcaccaggaagagctaagcaacattacatatgagctcaacatcatccatgaaagaacaaaagcaactaagatgcctatagagctacaacaagcaactgaaagtgtggaacaagcaaaagctaaggctttgatggcccattata

SEQ ID NO: 95216 - DNA, 564 bp, Zea mays
  unsure (1)..(564): unsure at all n locations
agtcggtggctcttgactgataccggttcggactgacgttccggtccggaattcccgggtcgacccacgcgtccgcccacgcgtccgcgctcggcttccccggttcttgagaggggaaagaggaggcggaggagagggatggggagggacgagaggttcccagtgtgggaggccgcgctcggcgctggggtcgccgccgccttcgccgctgggctcgtcggggtttacctttccatgccggactccgactacagcttcctcaagctgccacgtaatctccaggaactccaaatcctcactggccatcttgagaactatactagcgactacaccctacaggtgttggtaggctactgcgccgtgtacatcttcatgcagaccttcatgatcccagggacaatattcatgtcactgcttgctggtgctctgtttgggcagctccggngcgttgccctggtagtcttcgccgccactgctggcgcttcttcgtgctatntcctgtcgaagatgattgggaagccactggtgttcacgctgtggccagataaactcagcttcttncag

SEQ ID NO: 95217 - DNA, 562 bp, Zea mays
  unsure (1)..(562): unsure at all n locations
agcggtgtcctcctgaaaccntactgatagtgttcgactgcacgtaccggtccggaattcccgggtcgacccacgcgtccgcccacgcgtccgcgttcgactcggactcggactcggagtccagcaataagccggcgaacaagtccggggcgtcgtcgtaccaggcccccgccgacgccaagaagcggtacaaggacgggttccgggactcgggcgggctggagaaccagtcggtgcaggagctggagcactacgcggcgtacaaggccgaggagacgacggacgcgctcgccggctgcctgcgcatcgccgaggacatcaggcaggacgccagcgacacgctgatcacgctgcacaagcagggggagcagatcagccggacgcacgagaaggccgtcgagatcgaccaggacctcgccaagagcgagacccttctcgggagcctcggaggcttcttctccaagacgtggaagcccaagaagacgaggcagatcaagggaccagcgcatgtgtcacgagatgactccttcaagaagaggccagccgcatggagcaaagggac

SEQ ID NO: 95218 - DNA, 562 bp, Zea mays
  unsure (1)..(562): unsure at all n locations
gactagagtccgcttgacnccctaatgatacctgtcgactgcacgtaccggtccggaattcccgggtcgacccacgcgtccggtacctctgttatatggctatgtatctcatctttgtggagtttggaatttactggatgcacagggagttgcatgacataaaaccattatacaaatatctgcatgcaacccaccatatttacaacaaggagaataccttgtctccatttgctggacttgcatttcatccactggatggtattctgcaagcaataccacatgtgttcgcgctcttcctctttccaacgcacttcaggacacatattgcactcttgttcctagaggctgtgtggacaacaaacatccacgactgcattcatggcaagatatggccagtcatgggtgctggatatcacaccattcaccatacgacttaccgtcacaactatggccactacaccatctggatggactggatgtttggtacgctcaatgagccagaagatatcctcaagaaggcttgagtttctcggagctgtggtattcctatggtgctgctgcn

SEQ ID NO: 95219 - DNA, 526 bp, Zea mays
  unsure (1)..(526): unsure at all n locations
gtnggtgcngtgtgtatcgatgatagcgtaacgactgcacgtaccggtccggaattcccgggtcgacccacgcgtccgccagcctggatcctctccaaatcagagagttcatggagattcagtcagtaaattacaatggtgatacctaccatttgataagtaaaaactgcaaccatttctgtgaggatatctgcaaaaggttgacaggaaattttattccaaaatgggtgaatcgacttgctagaatgggtgctgtttgcaactgcattctaccagagtccctcaagatcaacgcggccggtcatgacccagcttctcgagctgaagatagcgagagaaaaatgctgacaagttccttcagttgcttctgttcaatctctctatgccaaagacatttctcaacatcttcgccgtctctgcgttccttcgcgaacggcacttcttgggataccaagcaatccaattctacccgactgaagaagagcttacagttgaggtcctgtgtatcatatttaactcatgaagn

SEQ ID NO: 95220 - DNA, 572 bp, Zea mays
agtctgagtgtcttaccgaggcctgtacgtatgcactatccgtcctgcattcccgggtcgacccacgcgtccggccgtggtccctgtctttctccttcggcttcttggtgcaggcgagcaccctgaaggcccaggctctcaaggtggagaacttggagaatgctagagctgccttcctctccaggtgcaaggccaactctgaggctaccatcatcacctacaacggtgatgctgacggcgacaccgacagcctaaacgtcaaggactacacgtactgagctgctcctctctgcatgcccgtcttggaactcctgactaccagctacgttgccgactgtggtttgctcgtcagatcttatattctgacattcaaaaaacatgcttcctatttgggatgatggttatatatatattgcgactgtaattattactttcctctggaaaatcttcgtgaattttattacagacaatggcgaattatatcatttatcttatttcattttatacctaattatttctttatttttcatttacataatgtctattgcaaaaagtatattatctatagaaag

SEQ ID NO: 95221 - DNA, 563 bp, Zea mays
cgtcgatgtggtgtcactgaagccggatcgcactgcacgtaccggtccggaattcccgggtcgacccacgcgtccggaagttctgctactacaacaactacaacatcaagcagccaaggcatttctgcaagagctgtcagaggtactggaccgcaggcggaagcatgagaaacatccccgttggtgctgggaggcgcaagagcaagagctccagcgcgagttgccgcagcgtgttgattcccgttccaggcagcagtagtgtagctaatcctggcggagaggcttccctgtttccgttgtccgtaaaagcaaaccaagcagcagttagcttcgggcctgattcccccctctgcacctccatggcctccgtgctgaagatcggaggaagaggagagcaggttaagagctgcagccctgcctcagcagcagcacagcccaggaacggagaaacccagacccagacgtgcgcaccttcttctgctgctacaacaccatcagatggtccagggaatggattgcagaaaggagcagagagcgcacaccaaaaccaaaccaaaaccaaa

SEQ ID NO: 95222 - DNA, 558 bp, Zea mays
ggcagggtccgatgaacccttccgatgcctgtcgactgcacgtaccggtccggaattcccgggtcgacccacgcgtccgcccacgcgtccgcccacgcgtccgaaagaagtcgcctaattctttcgatcgaattaggcgccttcttcgtcccacgctccgtctttatttgtaatctgaagcttacaggaacatttgagtggatcatggacggattggtaggcctcttgaaagtccgggtggtgaggggcatcaaccttgcctaccgcgacgcaagaggcagcgatccgtatgtcgtcctacgacttggcaagaagaaacttaagacgagcgtgaagaagagatctgtgaaccccatctggcacgaggagctaactctgatcgtcacagatcccagcctagctctgaagctggaggtgttcgacaaggacacgttcagcagggacgacccgatgggggacgcggagatcgacgtggcgccgctggtggaggcggcgaacgcgagcccggaggcgaacctgaggaacggcgccatcatcctgtctgtgcggtcgagcgcc

SEQ ID NO: 95223 - DNA, 563 bp, Zea mays
gtctagtagtccgcttgaccccctaatgatgctgtacgcactgcacgtaccggtccggaattcccgggtcgacccacgcgtccgcccacgcgtccgcggacgcgtgggcggccgagaccttcttcgacatcgagatcgacggcaagcctgcaggccggatcgtgctgggactgtttggggacaccgttcctaaaactgcagagaacttccgagcactttgcacaggggagaaaggaattgccaagtccggcaagcctctgtggtacaaggggtcgacgttccacaggatcatcccggggttcatgatccagggaggcgacttcaccaacggcaacggcacggggggcgagtccatctacggcagcaccatcttctccgacgagaacttcaagcacacccacgctaaagccggtacgctgtccatggctaactacgggcccgactccaatggctcccagttcttcatcaccaccgtagacgaaaaccggttgcccaagaagctggacgggcgccacgtggtgttcggcaaggtggtgaaagggatggacgtcgtgcgcaagatc

SEQ ID NO: 95224 - DNA, 509 bp, Zea mays
ggactgatagcgtaacgactgtcgtaccggtccggaattcccgggtcgacccacgcgtccggtcatctgcaacgtgccggagttccgcaacaccacagtcaaccacgacctgcatttcatttcctgggacaacccaccgaagcagcaccctcactacctcacgctcgccgacttcgacggcatggttaacagcaacgcgccctttgcaaggaagttcgggagagaagaccccgtgctggacaagatcgaccaggagctactgggccgccggcctgatgggtttgtgcccggcggatggacgtacctactgaatgcgacgactgaggaagggagacccttcgccgttgagcgcgtgcaggatctccgcccagggcctggtgtggacagattgaagaaactcgtcacgggcttgctcacacaagaaggctttgatgacaagcactgcttgtgagactgccccccagtaagatgattctggctgggggcggtagattacacggtcagatctt

SEQ ID NO: 95225 - DNA, 534 bp, Zea mays
gggtaaggccgtgtgtcgtaaacgctgagtgccctgacgcctgctcgtaccggtccggaattcccgggtcgacccacgcgtccgtacacgcgtgcggccacgcgtgcgtgcacgcgtccgctcacgcgttctgctacgcgtgcgtgcactcgtccgtgcacgcgtcctcgcacgcgtacgagcatacctgcagtcatttactccaccaggaccagcgagttcaacagcagacagatcgggactattatgacgagccgcaggatggcatcatcggccgcactgtcggtgctagccctagcgctagtggcggccaccgccccacacgtagcggcggcaacgacgacgagagcggcggagagcggcgaggcggcctatgccaagacgatccaggacgacttctgctcaacgctgtgcgacggcaagatggggaccgacctggtcgcgtgctaggagtcctgcgctctctgccagcagtccaacctggtgctgtacggcaggatccagtgcaagggcaagtgcaccgagcagaagggg

SEQ ID NO: 95226 - DNA, 564 bp, Zea mays
cgtcgagtagtgttgctgatgccggatcggatgcacgttccggtccggaattcccgggtcgacccacgcgtccggccagcccaagccatgaacgccgccagcaccgtcgccgcggcccccgcgcctgccgcgaccgtgcaggtgccgcgcgggcaggtggatctgatcgacttcatcgactggaccggcgtcgagtgcctcaaccaggactcgtcccacagcatcgtcaacgcgctcaagcagagtttgagagacgacgaggggctgtacctcgccagcgattcggacgagcagctgctgatctacatccccttcatgcaggtagtcaaactgcattccgcgctattcaaaggtcccgaggaagagggccccaaaacagtaaaactcttctccaacaaagagcatatgggtttcagcaatgtcaatgactatccaccaagtgacaccctcgagctatcatccgatcatttgatagagaataaacttttgccactaaagtatgtcaagtttcaaaatgttcgcagtctgactatatttattgaggacaaccaaagtggaagtgtt

SEQ ID NO: 95227 - DNA, 559 bp, Zea mays
  unsure (1)..(559): unsure at all n locations
gtcgagttgtattaatgatacctgtttcgatgacgttccggtccggaattcccgggtcgacccacgcgtccggttccaaagggaagggagcacgcgcgcgcgaggtagagcagcggcggcggcggcaggagtgaggcaggatgtcttcggtatacgtgcttgagcccccgacgaaggggaaggtggtggtgcagacgacggccggcccgctcgatatcgagctgtggcccaaggaggcccccaaggcggcgcgcaacttcgtgcagctctgcctcgagggctactacgacggcaccctcttccaccgcgtcatcaagaatttcctcgttcagggtggcgaccccactggctccggcactgggggtgagagcatctatggggctccatttgcggatgagttccactcgcggctgaggtttaaccacaggggtttagtggcttgtgccaatgctggtacatctcattctaatgggagccaattctttatcacccttgaccgttgtgattggcttgattagaagacaccatcttttggaaggttactggtgattctattttn

SEQ ID NO: 95228 - DNA, 560 bp, Zea mays
  unsure (1)..(560): unsure at all n locations
gatgagttgtattaatgataccggattgcatgacgntccggtccggaattcccgggtcgacccacgcgtccggattgttttgtgaagacgctcaagaatgatggccctttggcattttacaaaggcttcctgccaaactttgcaagactgggatcttggaatgtgattatgttcttgacattggagcaggttcaaaagctgtttgtgaggaaagcgacaagctgatgatagagtttttgcagtcaggtggcgtacaattgacgcacagggtttttcttctatagacaaaaggggagaaatgacacctcccccctcgagaattggggaacaaggacagatctgacacctcaattgcgagaaataaaaataacagccgacagttgcatgatccctgaacgaataaattcagaactagaaaacagatgtcagtaaacaacatgtggtgaatgttggaacttgaactgctctagttcagtgggcatctgttgatgcatgcttgggatggatntaatgtttcgtantttttctttcttgtactgaaatgctctgatcggaaacan

SEQ ID NO: 95229 - DNA, 561 bp, Zea mays
  unsure (1)..(561): unsure at all n locations
tggcagtagtccgaatgaaaccctactgatagcggtacgactgacgtaccggtccggaattcccgggtcgacccacgcgtccggttgaccttgtcaggaaagctatgccccttgtactgacacctgagaacgatccggggaaggatgagctcaagcagctccaggtgcagctggaaaacatcaacaagctggcacacaagcaggtccggcgcatcctctggtctggtctgggtttcttgatcacccaggtgggcctcttcttcaggctcacgttttgggagttctcgtgggacgtgatggagcccatcacgttcttcacgaccactacaggcctggtcgcgggatacgcatactttctcatgacgtcaagggacccaacctaccgagacttcatggagaggatgttcgagtctcggcagaggaagctgatccagatgcagaacttcaacttggacaagtaccttgagctccagaggcgctgcanggaccccttggagaagcgtgcgggacgaccaacactgtcatggctcatctgcatgagctatccattcacaaatgaca

SEQ ID NO: 95230 - DNA, 522 bp, Zea mays
  unsure (1)..(522): unsure at all n locations
gttatcggnttctatcatgatagctgacgcctgcagcgtaccggtccggaattcccgggtcgacccacgcgtccgcccacgcgtccgcccacgcgtccgcccacgcgttcgcccacgcgtccgcccacgcgttcgcccacgcgtccgcccacgcgtccgctaaaaagaaggttagattagggagcccagcggctcaatggatttcagtttataatgctaggcgacccatgaagcagaggtaccattacaatgtggctgactcaaggctaagtcaacatatagaaaagggtaatgatgacgggctttacgttagttgtgtggcttcctcggcaaacctttgggcactcatcatggacgctggaactggtttctgttctcaagtttacgagctctcaccagtttttctccacaaggactggataatggagcagtgggagaaaagttactacataacagcaattgctggatcaaccaatgggagttcattggttgtcatgttcaaaggaactncttacactcaac

SEQ ID NO: 95231 - DNA, 553 bp, Zea mays
gcgagggtccgattgtcccctactgaggcctgtcgcactgcacgtaccggtccggaattcccgggtcgacccacgcgtccgcccacgcgtccgcccacgcgtccgcccacgcgtccgcccacgcgttcgcccacgcgtccgtgcacgcgtccgcccacgcgtccgcccacgcgtccgagcaaacctgcagtcatctcctccaccaccaccaccaagctcaacaacagccagctcgcgaaaataatgaagagccgcagcatggcatcatcggccgcgctcttggtgctagccctcgcgctagtggcggccaccgccccacaggtagcggaggcaaagaagacgagagcggcggagagcggcgaggcggcggatgcgaagaagatccaggacgacttctgctcgacgctgtgcgagggcaagaaggggacggacctggtcgtgtgcaaggagtcctgcgctctttccagcagtccaacctgtgctgtacggaggatccatgcaagggcagtgcaccgagcagaaggcattacggggccgccatgaaggtttgcag

SEQ ID NO: 95232 - DNA, 561 bp, Zea mays
gtatagagttccgcatgaaaccctacgataccgttcgactgcacgtaccggtccggaattcccgggtcgacccacgcgtccgaatagttctatctcaccgcaacaactcctcattacatcctttatgagaggctgatcgattggtagatacgtactcgggtggagcagagcaacgagagacatggcgacgacgacgcgtgttgccgccgccgccaccggcgtgctgctggtcctgtcggcgttggcgaccctggcgcgggccgaggacccgtacctgttcttcgagtggaaggtgacgtacgggaccaagtccctgctgggcgtgccccagaaggtcatcctcatcaacggcgagttccccggccccaggatcaactgctcctccaacaacaacatcgtcgtcaacgtcttcaaccagctcgaccatccgctccttttcacctggaacgggatgcagcacaggaagaactcgtggatggacgggatgccaggcacgcattgtccgatcctgcctaacaccaactttacgtacaagtggcagctcaaggaccagatcgggag

SEQ ID NO: 95233 - DNA, 527 bp, Zea mays
  unsure (1)..(527): unsure at all n locations
gtttctgcgnatttgctaaagccaccgaccctcaggactgtcgtaccggtccggaattcccgggtcgacccacgcgtccgaatagttctatctcaccgtaacaactgctcattacatcctttatgagaggctgatcgattggtagatacgtactcgggtggagcagagcaacgagagacatggcgacgacgacgcgtgttgccgccgacgacaccggcgtgctgctggtcctgtcggcgttggcgaccctggcgcgggccgaggacccgtacctgttcttcgagtggaaggtgacgtacgggaccaagtccctgctgggcgtgccccagaaggtcatcctcatcaacggcgagttccccggccccaggatcaactgctactccaacaacaacatcgtggtcaacgtcttcaaccagctcgaccatccgctccttttcacctggaacgggatgcagcacaggaagaactcgtggatggacgggatgccaggcacgcagtgtccgatcctgcctaacaccaacttcacg

SEQ ID NO: 95234 - DNA, 560 bp, Zea mays
  unsure (1)..(560): unsure at all n locations
agtcggtagtactcaatgataccggttcggatgcacgttccggtccggaattcccgggtcgacccacgcgtccggtggcgacttcgtgaagtcgctgctctctcccctgtcaacgctgctggttgctgggctcgtcgtccttgacggtgaaaagtgggtcaaacatcgaaggattctgaatccggcattccacgcggagaagctgaagggaatgctgccggcattcttagcatgttgcaacgaactggttgacagatgggagaaacagatctctgcttccgctgaaccaactgagctggatgtctggccagagttccaaaacttatcgggagatgtgatttcaagagctgcattcggtgttagctatgaagaaggcagaagaattttcctacttcaggcggagcaagctgaacgccttgttcaatctttcaagacaaattacatccctggcttctctctcctgccaacagaaaacaacagaaggatgaatgaaatcgacagggaggtgaagacggtcctgaggggcataatagagaagagacagaaggcagccangaacg

SEQ ID NO: 95235 - DNA, 559 bp, Zea mays
agctgatttatatagatactctacgatagcgttcgcactgcacgtaccggtccggaattcccgggtcgacccacgcgtccgcacaataagatggcgtgtatagacaatgcaatgagagccttgttccttttagcgctcttttgtgtcttgcatggtgagaaggcaaagtcaaaggacaacgatgcaaaagcgtccgggcccggtgggtccttcgacatcaccaagttgggcgcatccggcaatggcaagacggatagcacgaaggctgtgcaggaggcatgggcatcagcgtgcggcggtaccgggaagcagacgatccttatccacaatggcgacttactcgtcggaccactcaatttcacatgcccatacaagggcaacgtgaccatccaggtgaatggcaatctgcttgcgactactgacctaagctagtacaaggatcatggtaattggatcgagattctactcgtggacaaccttgtcattaccggcaagggaaagctcgacgggcatgtgccagccgtgtggagcatgaacttctgcttcaagaagtacgact

SEQ ID NO: 95236 - DNA, 507 bp, Zea mays
  unsure (1)..(507): unsure at all n locations
nctggaaagcgtgacgcctgctgtaccggtccggaattcccgggtcgacccacgcgtccggtcatcggtttctcctcagacatcggttacgctctcggtgacacgacggaagactgcaatgtttacacggggaagcggctgcacgcggccttgttcttcgtgatgggattctggctgctggacttttccaacaacacggtgcagggccccgcacgcgcgctgatggcggacctcgcaggcagccacgggcccagcacggcgaacgccatcttcgtgtcgtggatggcgatcgggaacatcctgggctactcgtcggggtccaccgacaagtggcacacctggttcccgttcctgcagacgagggcatgctgcgaggcgtgcgccaacctcaaggccgccttcctggtgtcggtggtgttcctgggcctgtccacggtggtgaccatgatcttcgcccgcgaggtgccgctggacccggcggcngctgcgaagcatgacgaggccggg

SEQ ID NO: 95237 - DNA, 530 bp, Zea mays
  unsure (1)..(530): unsure at all n locations
tgtaatccgatatgcctactccatgagagcatgacgactgtcgtaccggtccggaattcccgggtcgacccacgcgtccggccgcggcggggcgagacggcggtggtccccattgacgtggcgtccgccggcggcgggcgaggcgatgagcggcccaagagagagcgccaccggagtcacggccccggccgccacggtccgcaccggagtcgcccgccgcccccgcccccgccggcgttccggccgttccggcggtggttcccgttccttgtgccgctattcatcgtcgccaacatcgtcctcttcgtgctcaccatgtacgtcaacgactgccccgcgcacgcgcgggccaccggcgccgcgataggcggatcggtcggcgagagcgccaccgcgcagggctgctggctcgcgcccgagctcgggaggttcgcgttccagtcgttcaaggagaacccgctcatcggcccttcctccgncacgcttgttggaaatgggggcacttganaccagtaagttaccaaagatcc

SEQ ID NO: 95238 - DNA, 559 bp, Zea mays
  unsure (1)..(559): unsure at all n locations
cggtagtcctcaactgatgccggnattgatgacgntccggaccgcaattcccgggtcgacccacgcgtccgcagatcgcggcggaggccggcgcgtacgcgcggtggctcatcccgtcgctggccgcctacgtgccgctgcagtgccacgttcgcttcctgcagacgcagagcgtggtcctgcccgtggcggccagctgcggcgccacggcgctctgccacgtgctggtgtgctgggcgctggtgtacaaggccggcatgggcagcaagggcgccgcgctcagcaacggcgtctcctacgccgtcaacctcgtggtactggcgctgtacgtgaggctgtcgggcgcgtgcatggagacatggaaaggcttctcgcgggaggcgtttaaggacctgtggcgattcgccgagctcgcctggccggccgacatgatgatctgcttggagtggtggtcgtttgaagtccttgtgcttctgtccagtcttctggcaaatccttagcttgaaacgtcagtcctgtcgatttgcctaaatactgggtgctttgctctacatgatac

SEQ ID NO: 95239 - DNA, 557 bp, Zea mays
  unsure (1)..(557): unsure at all n locations
tagcgtttccttacgaggccgttantgataccggtacgactgacgtaccggtccggaattcccgggtcgacccacgcgtccgcggacgcgtgggcggacgcgtgggcggacgcgtgggcggacgcgtggggtcgggcgttacaagcaaatcaagcgaacagaaggtgtctcgagcactgacatagttgggaggatattgctaacattcaggcagaaagatgctggcactgatttaagtgttgtcattgctgagaagtctggagagaaatcaaatgatgaagtgaaaagtcagctatctcatttccttccaacttctcgccggatcatgcagttttcaaatgggcaggctccttcgccaggtgctcgtgttgtctatgtagatggcacatttgatcttttccacgctggccatgttgagttcctcaggagtgccagacaacttggtgactttcttcttgtcggtatctatgacgacgagtctatcacggatagaagaggctgtcggtctataatgcatcttcatgagcgtactcttagtggtctggcctgcggtatgt

SEQ ID NO: 95240 - DNA, 556 bp, Zea mays
tgttctttcatgaacccctctgatgccgtacgcactgcacgtaccggtccggaattcccgggtcgacccacgcgtccggcgcgaacaagttctgggcgccgacggcgaagccggcgctggcagcggagccctgcacggggcagctgaacccgctgaaccccaagacgtaccgcgtggcggaggacgtgctgcgcgacctggcggccttgttcccggacccgtacctccacgcgggcgccgacgaggtgaacacggcgtgctgggaggacgaccccgtggtgcggggcttcctggcggacggcggctcccacgaccgcctgctggagctgttcgtgaacgcgacgcggccgttcctagtccacgagctgaaccgcacgtcggtgtactgggaggacgtcctcctggggcccaaggtgtcggtcgggcagacggtgctgccccacgacaccaccgtgctgcagacgtggaacaacggcgccgagaacaccaagcgcatcgtggcggccgggtaccgtgccatcgtgtccttcgcgtcctactactacctggactgcgg

SEQ ID NO: 95241 - DNA, 494 bp, Zea mays
ctctgaatgcagtcgcttgccgtaccggtccggaattcccgggtcgacccacgcgtccgcggacgcgtgggtgcaaagctgggtggcatgaattcgttgctccaaattgaaacatcggcagcaattcctcttgtatccaaggtcccaactataatcttgggaatggatgtgtcacacggttctcctggacattctgatgtaccatctattgctgctgttgttagttctcgtgaatggcctcttatctcgaaatacagagcttctgtccgcacccaatcacctaaaatggaaatgattgactcattgtttaagccacgggaagctgaagatgatggtctgatccgggagtgtttgattgacttctacaccagttctgggaagagaaagcctgaccaagtcatcatatttcagggacggtgttagcgaaagtcatttaatcaggtgctttacattgagttgcaacaaattatctaggcttggcaaatttttggtgg

SEQ ID NO: 95242 - DNA, 512 bp, Zea mays
  unsure (1)..(512): unsure at all n locations
gttaggtgagtgttgtcngaccattggatgctgtccgcctgccgtaccggtccggaattcccgggtcgacccacgcgtccgcggacgcgtgggtgcaaagctgggtggcatgaattcgttgctccaaattgaaacatacccagcaattcctcttgtatccaaggtcccaactataatcttgggaatggatgtgtcacacggttctcctggacattctgatgtaccatctattgctgctgatgttagttctcgcgaatggcctcttatctcgaaatacacagcttctgtccgcacccaatcacctaaaatggaaatgattgactcattgtttaagccacgggaagctgaagatgatggtctgatccgcgagtgtttgattgacttctacaccagttctgggaagagaaagcctgaccaagtcatcatattcagggacggtgttagcgaaagtcagtttaatcaggtgctgaacattgagtngcaacaaatcattcaggcttgcaaatttcctg

SEQ ID NO: 95243 - DNA, 533 bp, Zea mays
  unsure (1)..(533): unsure at all n locations
gtttgggtcntgtcngtccgtttgatgcagctcgtacgcactgccgtaccggtactgaatggctcgacccacgcgtgcgtccacgcgtccgcaaggatggcatccgtcccctctgggaggatcctgcaaaccagagtggtggcaagtggataattagattcaaaaaggcagtttcaggtcgattttgggaggatttggtgctagtggtagtaggcgaccagcttgagtatagcgatgatgtctgtggtgttgtgcttagtgtccgtttcaatgaagacattctgagcgtctggaaccggaacgcatcagaccatcaggctgtgatggcattgagggattctatcaagaggcacctcaagctgccgcacagctatctgatggagtacaaaccccatgatgcttcgcggcgtgacaactcgtcctacaggaacacatggctgagaggatagataaacctcatgatactcggcagcttcactgcgacggttctgaaacaaaaagactcttttatgtacccagaacgcagacttttt

SEQ ID NO: 95244 - DNA, 497 bp, Zea mays
  unsure (1)..(497): unsure at all n locations
ggtttagggtgtgtcgtcccttaagctctcgtactgccgtaccggtccggaattcccgggtcgacccacgcgtccgcggacgcgtgggcgaacctgtgattgattattactccaagaagggcttagtggtgaacctgcctgcagagaaaccaccgaaggaagtgactgctgaggtgcagaaagccctctcgtgatgaaatgtccactcttgaggttaaacatgacatctaccaaaacccctttgtttgggtttcttcaaaatttgcactaggccaacatcatgaggttttttattttcagtatccttattgtgcggatgcaccatttttttgttatcacacctttcacaagctcggcaattgtctgaataatttctgtgtctaatgatggaactgtttttcagtaacaaactgatatgattacaacaattcatctttgggaaaatttccctgcaaaaaaaaaaaannnnnanaaaannaaaaaaaaaaaaaaaaata

SEQ ID NO: 95245 - DNA, 508 bp, Zea mays
gtgagtagggcttacgtcttgcctgcatgctgtgcgcactgccgtaccggtccggaattcccgggtcgacccacgcgtccgcggacgcgtgggtggacgacaagttcaaggagatcgttgtggaccaggtcggggatcgcgctaccagctacgaggacttcacaaacagccttcccgagaatgactgccgatacgcgatctatgatttcgactttgtcactgcagaagatgtccagaagagcaggatcttctatatcctatggtccccatcctccgccaaggtgaagagcaagatgctttatgcaagctcaaaccaaaaattcaagagtgggctcaatggcattcaagtggaactgcaggctactgatgcaagtgaaatcagccttgatgagatcaaggatcgggctcgctaggcatcatgatcatgcatcatggactcggcctactactgtggatttgtatgccattatagacttggtgctgtgaaagactgcttgatgaattgcgg

SEQ ID NO: 95246 - DNA, 502 bp, Zea mays
agagggactgatgtcattgcctgcatgctgtacgcactgccgtaccggtccggaattcccgggtcgacccacgcgtccggcgacaagccggggaaccacaacttcgagctgacgtatatcgggcagccaccgatgggcctcgccgcgccgtggtactctgccgccggatgcaagctatggaacatgtcccaatcgggctgcatgaactcgccgaggaagacggtgttgtacgcaacggaggcgacgtggacggtgtgcgatgccgggtcgcgcgggtagaagtcgtcggaggcgcgcacgacggcggtctgcctggcgctgtacagcatgtcggagttgtggcacatgcaggagatgcagccgttgtccgggaagctgcgcgccacggaggcctcgagcgcgcggtggtaggcgcgggtgatggcgacgcggccgctctagaggatccaagcttacgtacgcgtgcatgcgacgtcatagctcttctatagtgtcacctaag

SEQ ID NO: 95247 - DNA, 531 bp, Zea mays
  unsure (1)..(531): unsure at all n locations
aggctgntctangtcaatcgtattgtagtctcgtctgccgtaccggtccggaattcccgggtcgacccacgcgtccggctagctcgatctactactactactactagctggtacacatactagccatcctgccagccagccagcttgccatggcgcccaccgtgatgatggcctcgtcggcaaccgccgtcgccccgttccagggtctcaagtccgccgccagcctccccgtcgcccgccgcagcaccaggagcctcggcaacgtcagcaacggcggaaggatccggtgcatgcaggtgtggccggcctacggcaacaagaagttcgagacgctgtcgtacctgccgccgctgtcgacggacgacctgctgaagcaggtggactacctgctgcgcaacggctggataccctgcctcgagttcagcaagctcgggttcgtgtaccgcgagaactccacctncccgtgctactacgatggccgctactggaccatgtngaagctgcccatggttcggtggaccgaccccatcc

SEQ ID NO: 95248 - DNA, 527 bp, Zea mays
  unsure (1)..(527): unsure at all n locations
tggtnttgagggtgtgtcgtccaactgatgtgtccgtctgccgtaccggtccggaattcccgggtcgacccacgcgtccgcggacgcgtgggggcgccctcgagtgcggcgggaacaaccccgcccagatgaacgcgcgcgtcggctactacaggcagtactgccgccagctcggcgtcgacccggggcccaacctcacctgctaggctagctaggcggcatcggtggacggcggggccttcaggccttgtgctcggcgtcgcaccctctcgcgcgcgaaaccgagcaatagtgacaataaaacgcccgggctagctgagcctgtatgttcgacctgaataatgaagcagctgtgtgatatgcatgttgtttcgacacaacgtgtacgcttgcacatcgcttgtactttacgattgcattgcatgcaacaagggtttaaaggctgaatcaataaacggtgtgtaggcaaaataaagagagaccttaattaaattaatggcacctgttatataacggcgtgactggaa

SEQ ID NO: 95249 - DNA, 510 bp, Zea mays
tgtgagggctcagctacgtcctttggtttgcagtcgtatgccgtaccggtccggaattcccgggtcgacccacgcgtccggaagagcacagagagcatcaacaacaagctgcagctggtgatgaagagcggcaagtacaccctgggctacaagaccgtcctcaagacgctgcgcaactccaagggaaagctgatcatcatcgcaaacaactgccctccacttaggaagtctgagattgagtactacgccatgctggccaaagttagcgtgcaccatttccacggaaacaatgttgatcttggcactgcctgcggcaagtactacagggtgtgctgcctcagtatcatcgacccaggtgactcggacatcatcagtaccacccctggcacccagtgagccagccccggcacccattgcagctgcttcggctttctcaaaatgagatgagatgtaacgctccggccctatgtccgtttccttttttatcttttagctatgtaattatgctac

SEQ ID NO: 95250 - DNA, 506 bp, Zea mays
  unsure (1)..(506): unsure at all n locations
aggggtgctgttcgtcccactcacgcacgtnctgtctgcacgtaccggtccggaattcccgggtcgacccacgcgttcgtctggatgaagttattcttgtgggtggatccacccgaattcctgcagttcaagaacttgtggagaaacttactggccagggttcccatgtttcccgtgaaacctctttaggggtggtctcttggggcacatttgcacggccgggtttttgcgcgggatttgaaaagaatccgtcttttggaaagttcccccatatatctttggtttgggacccttggttgggatattgccaaagtatttccccaggaatccccacttgccaacttaaaaatcgaaggtattcttaacagctgcaattggccagacaagcgttgagattaaggtcctccagggagaaagagagtttgttagggccaacaagtcccttggaagcttccgttggacggaatccttctgaaccttgtgtgttccacanattgaagtgaatt

SEQ ID NO: 95251 - DNA, 513 bp, Zea mays
  unsure (1)..(513): unsure at all n locations
ggatagtgggtnctctccgtccattgatcgcatctgtacgcactgccgtaccggtccggaattcccgggtcgacccacgcgtccgatagtaaacgctccatacatattttctgcatgttggaaggtcgtgaagcctctgttgcaagagagaacaaggaagaaagttcatgtgttgcgtggctgcgggagagacgagcttctacagatcatggactactcctccctcccccatttctgcagacaggagggctcgggctcatccaaacattcgtcaggcgacgccgataactgcttctctctcgaccacccgttccaccaggagctctacagcttcatccaggagcaggcgctgaaccaggagctcatcaagcagggctccttgcacgtgaaaatccccgagcaggaccctgaggacgcaaagatcgtggaggtcatcgaggccgagttccacatgcttggcgtgcagaacgggtccgccaatggcatcgaccaagcatagcacctttgtctaan

SEQ ID NO: 95252 - DNA, 505 bp, Zea mays
agtagggtccttcagtccatgcactgcatctcgtacgcctgccgtaccggtctcggaattcccgggtcgacccacgcgttcgctgacgcgtgcgggaaccaccagcctaagtttgagacatgctaccaactagcgattgcaatcaaaaaggaggttgaagatcttgaggctgatggtattcaggtgatccaaatcgatgaggcagctctaatggagggtctggcactacgcaagtcacatcatgcattctacctggactgtactgtccactctttcaagatcaccaactgccgatttccagacaccacacagatccacacccacatgtgctactccaacttcaacgacatcatacactccatcatcgacatggatgccgatctgatcactatcgagaactcccggtctgacaagaagctactgtccgacttccgtaatggtacgaagtacggagctgacattgaacctggtgtctactacatccaatctcctaggattcctttcc

SEQ ID NO: 95253 - DNA, 526 bp, Zea mays
ggtttagggtgtgtcgtccgttggttgcagtccgtcctgcagtaccggtccggaattcccgggtcgacccacgcgtccgcacatgtgatcttcgtaatagtgtaacaggtcaaactgatgaatgaaaagcattcgcagagagggagtcattgtatttcatggagacctctgcactcgagtcgactaacgttgaaaatgcattcgcagaggtctgaactcagatctaccgcattgtgagcaagagagcagttgaagctggcgaagattcagcatctgggcctggcaagggcgcgaagattaacatacaggatgatgtttcggcggtgaagaatggtggctgctgctgtagctgacctgccctgatgtatttattgagcagctgtggtgatgtatcttatggtacggcatatccagcgaccgagaactggtactggcattagcagcttctatgatacctagagagtttattgacatactgggctaaataagctgaaggttaaattggtttagatccttattgggcgat

SEQ ID NO: 95254 - DNA, 508 bp, Zea mays
  unsure (1)..(508): unsure at all n locations
gggaggttcgtttcgtcgctggatgcgtncggactgccgtaccggtccggaattcccgggtcgacccacgcgtccgcccacgcgtacgccctcctccgccgaatcctctcctccggccgccgaaaccctagccggcgccgctgccgtcatggcaagcagcaacgtctcgaccgtttacatctctgtcattgatgacgtcatctccaaggtccgcgaggatttcatcacctacggagtcggtgacgccgtcctaaacgagctccaggctctagtgggagatgaaaatgctacactgctgctcgatctctgagaacatagaccgaaccaaggttgctgacgcgtacgtcggaggcaccaccggcacgacaacggccgtgcacgacctgaacgtgccgtacgaggccacatcttaggagtacgccaacccgaccgctgacatgctgtttccggcgacacccttgcagactccaatccagactccttttgcagggaccgacacagcgatgtg

SEQ ID NO: 95255 - DNA, 513 bp, Zea mays
cggtgaggggtagtgtagtccattgttttgcatgtgtacgcactgccgtaccggtccggaattcccgggtcgacccacgcgtccggtcgagttggatggcaaacggattaagttgcagatctgggacactgcaggccaagagcgtttccgcacgattactactgcttactacaggggagcaatgggcatcttgcttgtgtacgatgtcacagacgagtcatctttcaataacataagaaattggatcagaaacattgagcaacatgcttcggataacgtgaacaaaattctggtggggaataaagctgatatggatgaaagcaaacgggctgtgcccacttcgaaggggcaagctctcgctgacgaatacgggataaagttttttgaaacgagtgcaaaaacaaacctgaatgtcgagcaggttttcttttccatagcaagggacatcaaacagagactttcggaaaccgattccaagcctgaggatcgaacttttcagatcaaggctgaggg

SEQ ID NO: 95256 - DNA, 527 bp, Zea mays
tgggttagagggtgtcttcgtccattgtttgcagttcgtccgcagtaccggtccggaattcccgggtcgacccacgcgtccgagcatgcggcacgctatcttagacttctgttctctggaagtgagctgacccgaatagtctgcatggctgttttccgacaccttaagagcttgtttggtggcttaccgtcagactatagtgctgcagaaacaactatcgttcttgccaaggctgtttcctcttgtgtgcgccatatggaactcagtgctctcagtgcctgtctagcagctgttgtctgttcttcgcagcagctacctcttcagccactcggtactgcctctggtgatggagtgtctcagatagttaaatctgtgctggatagagcgaccgagctactggcggatccctattctgcagccaactacagtagatcaacactgtcgcttttgcatgcgtcgatagaggcttcctgcggactgctgactaagtactgtgacagccagtattaaagaatcgtgcgaaggtt

SEQ ID NO: 95257 - DNA, 528 bp, Zea mays
  unsure (1)..(528): unsure at all n locations
ngggtgagggtgtgtcgatcatgatgctgtcntatgccgtaccggtccggaattcccgggtcgacccacgcgtccgcccacgcgtccgtggttgaccacatgaggaagatgaagaacaatgccattgtctgcaacattggccactttgacaatgaaattgatatgctcggccttgagacctaccctggcgtcaagcgcatcaccatcaagccccagactgaccgctgggtgttccccgagaccaacactggcatcattgtccttgctgagggtcgcctgatgaaccttgggtgtgctactggccatcctagctttgtcatgtcctgctcattcactaaccaggtcattgcccaacttgaactgtggaaggagaagagctctggcaagtatgagaagaaggtgtatgtgctccccaagcaccttgatgagaaggttgctgctctccacttgggcaagcttggtgccaagctgaccaagctcaccaagtctcaggccgactacatcagcgtgccgatcgagggtccctac

SEQ ID NO: 95258 - DNA, 510 bp, Zea mays
agttgagggtgtcgtcgtcctctggatgctagtcgtactgccgtaccggtccggaattcccgggtcgacccacgcgtgcggatgtagagtgattgatgtacatcacttcactaatcatgaaatctgtagaaggcgaaactactagccatatatgatatgcataatccgagtggtgaacattatcaatatcccgcaaatgatttctaagctccggcggagaagaagcccaaggccgagaagcgcctaccggcgggcaagtccgacaggtaaggagggcggcgagggcaagaaggggaaaaagaaagcgaagaagtccgtggagacctacaagatctacatcttcaaggtgctgaagcaggtgcaccccgacatcggcatctcgtccaaggccatgtccatcatgaacttcttcatcaacgacatcttttagaagctcgcggtcgaatcccccgagctggcgcgctataacaagaagcccaacggcaccttctgcgagatccagaactcggt

SEQ ID NO: 95259 - DNA, 501 bp, Zea mays
gagtgctgtagtcttcgtctgcatgtgtacgcctgccgtaccggtccggaattcccgggtcgacccacgcgtccgcaaatgctcctagcgaattcaccacagcttctcaccaccgctaccttcgatggcacccaaggcggacaagaagccggcggcgaagaagcctgcagaggagcccgcgacagacaaggcggagaaggctccggcggggaagaagcccaaggccgagaagcgcctcccggcgggcaagtccgacggtaaggagggcggcgagggcaagaaggggaaaaagaaagcgaagaagtccggggagacctacttgatctacagcttcaaggtgctgcagtatgtgcacccctacatcgggatatcgtccaaggccatgtgcattatgaactcctgctcatcgactgtctcctagaagctcgcgtccttatccgtcaagctggcgcgctatatcaagaagcccaccggcacctacggcgagatccataccttgtt

SEQ ID NO: 95260 - DNA, 530 bp, Zea mays
ggtttagggtgtgtcgtccgctgatgcagtcgtcctgccgtaccggtccggaattcccgggtcgacccacgcgtccggcaccacaagcgagcgagggacccggggcggaagaagagagagaagacgtctctctgctctcggcgtccccgttccccaacctctcgtctgctgcctgcctgcctgcaaaaaggagtttgtcatggcgtctaagcgcatcctcaaggagctgaaggacctgcagaaagacccccccacatcatgcagtgcaggtcctgctggtgaggacatgtttcattggcaagcaacaattatgggaccacctgacagtccctatgctggtggtgttttcttagtgaacattcatttcccgccagattaccccttcaaacctccaaaggtttctttcaagacaaaggtcttccatcctaatatcaacagcaatggaagtatatgccttgacattctcaaagagcagtggaaccctgctttgacaatttctaaggtcctgctctacatctgctccctgctga

SEQ ID NO: 95261 - DNA, 523 bp, Zea mays
  unsure (1)..(523): unsure at all n locations
nggatttagggtgtgtcgtccattgtagatgtccgcctgcagtaccgtccggattcccgggtcgacccacgcgtccgcccacgcgtccggcttgctggtgatgatacgcttactactgatgcacctatatctgagattgctcgcatgtcaatccataggcctgaggttgagcaatcgtcgaataaggattaggagatcagaggaacaggacagatatttggaagggtggaactggtacgctgaaagtgaagaacgttaaaaatggtgccgtcccatctaaagaccgagttgcaaagtctgacccttagcgccgcagcaattgaaggagatgtttggtttgaataatcaatctattttagatgaggtgatgtatcataagttcattccacaaatttggtggaataaatttattcctcatattatgactaattattaacctatgaggaataaaatcatggtggatcaacctattctattatctaaaccaaaagtaacgagtaagaagatggactatcttatttcg

SEQ ID NO: 95262 - DNA, 507 bp, Zea mays
ggagggctcgtgtcgtccaactcagccggtcgtatgccgtaccggtccggaattcccgggtcgacccacgcgtgcggtcctcgatccgatccgccgagtgcacaccacctttccccactccgatcgaatcgatggccgccgagggcgagaagaagatgataaccctcaaaagctccgatggcgaggagttcgaggtggtagaggcggtggcgatggagtcgcagaccatccgccacatgatcgaggatgactgcgccgacaacggcatccctcttcctaacgttaactccaagatcctatccaaggtaatcgagtactgcaacaagcacgtacatgccggcgccgtcgccgccgtcgtctcgaaggccggttccgacgacgtgggtgccgtcttcggcaacagcaccgtcggctccggtgaggaccttaagaactgtgatgcggacttcgtaaggtcgtccaggccaggcttttgaacttatcttggctggaaccttttggacctta

SEQ ID NO: 95263 - DNA, 514 bp, Zea mays
  unsure (1)..(514): unsure at all n locations
gtgggctcntgtcgtcctccgcatgcagatcgtacgcctgccgtaccggtccggaattcccgggtcgacccacgcgtccggcggtactgttgttggtatcaagttcaaagatggcattgtcctgtgtgtcgagagagctgctaacctcaaagatgatgcttgaaggatcaaaccgaacgtatccattcaaggcaccgtgactctggcttggatgttgctggactatcagcagatggcatcaaattgctcaaggaccagatcacaagctgacattgattaatagggtaatggtgaacccatttctgtgaagtactaggcttatcgacttacacggtatactcatttttacactgctgtactggtggatcatgccagatgggtagctgtgttagtctttgagggcttgatggaactgacccacagctatcctggatataaccattgtgttagctctactataacttacgtgctatatttcgagaaggtctgacaggatgtaaagtctgttttatat

SEQ ID NO: 95264 - DNA, 506 bp, Zea mays
ggtatgggtcttcgtctacgatgcatcgtacgctgcagtaccggtgccggattcccgggtcgacccacgcgtccgcgagaagggcggcggagggcacttcgtcatcgggaccaaggccagctacacctgctgcccgctgctctccggcgtggccgacctcgacgccgcgctctgcctatgcaccaccatcaaggccaaggcgctcagcgtcagcctcgtgctccccgtcgccatctcggtgctcgttaacgagtgcggcaagcacgtgcccttcagcttccagtgcccgtaatctatagtacaacaattaagcccatactgatcatcggctgcatatatgtgctagctactatgaagtatcaccaccactaatctatatccgcatgcatgcatcagtgcatgggtgattaagggtttatacgctgtcaaagttatacacgcatacttatatcacacatatatatagcttatattaagcatatataaggtagctttatacattggcg

SEQ ID NO: 95265 - DNA, 536 bp, Zea mays
  unsure (1)..(536): unsure at all n locations
tggtttgagggtgtgtcagtcgattgaanctcgtcggtcactgccgtaccggtccggaattcccgggtcgacccacgcgtccgaggaggtcttcattctcagctaagcctgaatatccagaaaatggctccaaaaattctgcagctctgccaagctacatggctgctacacaatcagcaaaggcgaaactgcggggaaatagctcaccaaaacttagctctgattcagcagagaaaaacggcttcactcgtcgtcactcccttccatcctctaacaacggtaagatggtttcacattctccacgtacacaaaggccagctaatgctggttgcaaggatggagcgaaaggtgacaaggctatgctgtcatcaagagatgcaagcgagagaccactgaaagctgagtggagacgttgacgcggcgaatcaaatccaaatcctgcatttgattagcgtgaccgtttgggtggatggatcgcccttgcagaatgctcggatttgttttgcttgggatgtaaaaaaaaaagatgtgggctc

SEQ ID NO: 95266 - DNA, 529 bp, Zea mays
aggtttagagagtggtgtcgtccgttggatgcggtcgtcctgccgtaccggtccggaattcccgggtcgacccacgcgtccgcccacgcgtccgctgatgtatatagctttggcgtggttgtgatggagatcatcagtggaaggaagaacctggacacttgtcggtctgaaaagagctttcatcttattaccttgctagaagagaagttgaggagtgatcgcttggtagatttgattgatatgtgcattactagtgacagtcaggcacaggagcaagaagcaattcagatgatgaagctcgcaatgtggtgtttgcagattgattgcaaacgaaggcccaaaatgtccgaggtcgtaaaagtcttggaaggctctatcagtgtcgaaactgacatagatcataactttgtcgtgacaaatccaccaagctttagcgctcctagaattgtggtcatgtcagctccacctctagcttcagaagtgtcaggcccaaggtgaaattccttgaggccggttatttgtgtaaagg

SEQ ID NO: 95267 - DNA, 509 bp, Zea mays
  unsure (1)..(509): unsure at all n locations
cgaggtnctctcagtcaatcgcatgcatgctgtacgcctgccgtaccggtccggaattcccgggtcgacccacgcgtccgcccacgcgtccgcacagatctgcaatgatttacaggtggatcctcaggatattgttatgcttgtcatatcgtggcatatgaaagcttccactatgtgtgaattcactcgccaggagttcattggtggactgcagtcaataagagtggattcaatagagaagcttcaggccgaagtaccctcaatggcagctgacctaaaggatgaccagaagttccatgaaatatacaactttgcatttgcctgggcaagggagaagggccagaaatctctcgcattggagactgctattggcatgtggcagttgctatttgctgaaaggagctggcctctcattgactactggtgccaatttctacaggtaaggcataataaagcaatctccagggatacatgggcacagttattggaagtttgtaacacaattggtc

SEQ ID NO: 95268 - DNA, 516 bp, Zea mays
agggttagaggtgtcttagtcaatgcatgcatgctgtacgcctgccgtaccggtccggaattcccgggtcgacccacgcgtccgcggacgcgtgggcaagaatggagtggaggaagtgcttggtctgggtgagctcaacgagttcgagaagaaggggctggaaaacctcaagggcgagctcaagtcttccatcgacaagggtatcaagtttgcccacgggaactaggcaccttgcgtccttgcccggcttctaacaattgatgcccgcccttgcatttttgtttgactgcctatttttcctgccccccgtatggttggggcaatgaggcgtagtggtcgataataaaacccagcggaacatagaaaacgtgtaccagaaactgtttgcaaacaccggtgcctctttttgtgttgaaccaccattagttgagccgtgagggaatggtgaacaagctttccaaaggataaaaaatagggcggtcgctctataggatccaagcttacgtacgcgtgcat

SEQ ID NO: 95269 - DNA, 525 bp, Zea mays
ggtggaggtgggtgtcgtccactgactgcgtctgtatgccgtaccggtccggaattcccgggtcgacccacgcgtgcgtgcacccgcatcatcaccaacacgcacgtcggattcagctgcctttcagccttaacagggaggtctccgtcgactcagcgggaaactcgttactcaaacagtaggactttcaggggagacgcctggcgaaaagcatgcgtaagatcaacgtcgcatagcgactacaggacgtctagatcaaatgcctacccagacgggacactgagcttcagaatgaccacatgaacctcaggaccaagattgacgagggagagcaacagctgcagcaagtgactgtggcccagtctgtcgcagcagcagctgccatccacgtggagctgaatccgttcttggagatggataccaaatgcttcttccctggcggtcccttcgcgacactggacatgaagtgcttcttccccggcagcttgcagatgctggaggcacagtagcgccagatgcttgccg

SEQ ID NO: 95270 - DNA, 502 bp, Zea mays
  unsure (1)..(502): unsure at all n locations
aggtaggggtcctgtcgtccgccttaagcggtcngtatgccgtaccggtccggaattcccgggtcgacccacgcgtgcgtccacgcgtccgctctcaatctgataccgcagatccgtcgtccggtgagtggaagccgcacgaacccatggcctccggcgagcttgcctgcacctacgccgctctcatcctcagcgacgatggcatcgccatcaccgccgagaagatcgccacgatcgtgaaggcggccaacatcaaggtcgagtcctactggccggccctcttcgccaagctcctggagaagcgcaacgtcgaggacctcatcctctccgttggatctggtggcggagctgctccagttgctgctgccgcacctgctggtggtgctgcggctgctgctgccccggctgtcgaggagaagaaggaagaggccaaggaggagtctgatgaccgacatgggcttcagcctggtcgactgaggagacccccttacccagccattag

SEQ ID NO: 95271 - DNA, 517 bp, Zea mays
  unsure (1)..(517): unsure at all n locations
aggttaggtttttctctanatccattgactgcantctgtacgccgtaccggtccggaattcccgggtcgacccacgcgtccgcccacgcgtccgcagggcttgaaatttccagccatgttctgtcacctatcgtcttccttaagctgaagaagtcgactggttctcctaccactgatctagaccttcttgaaactattgctgacaaggccttgaaggaagactcagttttcgttgtgacatcaaagaaatcaaatctggataggtgcaaacttcccattggaatccgcctgtttgtatcagctggccatactgaattagacatctccaggctttcctcatccttgaagagggtttctgcatcggttctttcagattacttttgatccacatcggattcccttaagacgaaagccatccattttctacgcgctttgtactctaggccgtgtgtgtttggtaaatgtacataacctgtacatttctacatgttatgaattgacctttgtgcaaaaaaaa

SEQ ID NO: 95272 - DNA, 494 bp, Zea mays
gggctctgtagtccactgactgcatcgtacgcactgccgtaccggtccggaattcccgggtcgacccacgcgtccgcggacgcgtgggcattattttaatctgcgagctcacagatttgaaatagcggtgattgagatatatgatcaatctagggcggacaataaagatgtcatgaagctcatacttgggaagcataatctttcagcaccaattacatcatacgcccgccctgaggtggcagtaaaatcccagtcatactttttcacccattcagtaaaagcaatggcagttacacaaacggctaaggggatcacttccaagcagattctgattggtactattggtgaccaggttttggcacttgataagcgctatcttgatccacgccgttcagtgaacccgacacaacatgaaaaagaggacggcattataccattaacagattctttgcctataatacctcagtcctttgtgacgcactctcaccaagtgg

SEQ ID NO: 95273 - DNA, 520 bp, Zea mays
  unsure (1)..(520): unsure at all n locations
gggtgagtgctccttcagtcgctggctgcatncgtctggcactgccgtaccggtccggattcccgggtcgacccacgcgtccggtgggttggcttctcctccccctccggttcgggttcgggttcgtgagagttctgcggggttcggtttcgtagggtgagcgcatcgagatggcctcgtaggatgttgagtaccgctgcttcttcagctgcctcgcctggaccacggacgaccactccatgcacaatgccttcagcacctacagcgaggtgctggactccaagatcatcatcgatcgggagacgcataggtcccgcggcttcggctttggcacacttctccacgcaggaggtacattcagaacgccatccaggtcctgaacatgacagaactctaccggcaacccatcaccgttaacgacggccattacgctgctggtccggtacaccacggccgtatctaccgctctggcccttggactctttcgcttcttcaattatgagtccactgttgaccttgt

SEQ ID NO: 95274 - DNA, 496 bp, Zea mays
ggagggggtctcgtctctgctgcagctgtacgcctgccgtaccggtccggaattcccgggtcgacccacgcgtccgggtgggttggcttctcctccccctccggttcgggttcgggttcgtgaggttctccggggttcggtttcgtgggtgagcggatcgagatggcggcgtcggatgttgagtaccgctgcttcgtcggcggcctcgcctgggccacggacgaccactccctccacaacgccttcagcacctacggcgaggtcctcgagtccaagattatcctcgatcgggagacgcagaggtcccgcggcttcggcttcgtcaccttctccacggaggaggcgatgcggaacgccatcgagggcatgaacggcaaggagctggacggccgcaacatcaccgtcaacgaggcccagtcccgccgccgccttcgccctccgaatcccaatggcgtccgcggccgctctagaggatccaagcttacgtacgcgtgca

SEQ ID NO: 95275 - DNA, 502 bp, Zea mays
  unsure (1)..(502): unsure at all n locations
tgattgaatgcaaactgtacgcctgccgtaccggtccggaattcccgggtcgacccacgcgtccggatcctcttcttcggaaagaagtacggttccggcggtgcttaaatggagaaatatgatgacgaacaagagcagtgtgtgttcccggtcctttccaatcaggatctggtgaagtttttgcctttcatatcgaagaaattaataattcatgtagagggaggattcttccaacaatttgttttggatggagacttagatctccaaacactcgtaactatcctactaggtggtgacatcagtccccaaaaacgtttatggtcatagagtctgcccttcgtttgtcagtcgggcaatttttcttgcatacaatgccttcgtttaagtatcggatgagttgctgcgactaanaaaaaaaaaaaaaaaaaaaaaaaaaaaaaaaaaaataaaaaaaaaaaaaaagggcgggccgtctagaggatccaagctaacgtacccgtgn

SEQ ID NO: 95276 - DNA, 533 bp, Zea mays
agggtggctcgtataagccgcttgaatgctgtacgcactgccgtaccggtccggaattcccgggtcgacccacgcgtccgtgtgtttgtaaaaaatatctctgcacatctgggagtagctgtcccgcacattgagttgaagcatgtgattgctgctacaattgctcttaagggacttggaagtctcctttttattttgaccagctccctcggtgcttatctcctgctgctgtacctcgctctgatcagtcctatcgttcacgacttctacaactacgacacggagaaggaagaattcgcgcggctgtttgcgaagttcacccaggacgtggcgctagttggagctctcctcgtcttcctgggcatgaagaactccaccccgaagcggcagggcaagaagaaggctcacaaggcgaagacgaactaattagaagttgctcgctcgggctcaggcgggtgtcaggagacgaatagtggcccaatgcgaaacagtcgatgcgcatcgagcttgccgcttggcttttacatgtgtcg

SEQ ID NO: 95277 - DNA, 529 bp, Zea mays
  unsure (1)..(529): unsure at all n locations
ggtaggctgnaataagtcaatgaatagctatacgtcaggcgtgaccggtccggaattcccgggtcgacccacgcgttcggtgcgacgccgctcttggccagaagctggcttctaggctgaacctgaagccgagcatgtaagatcgacgaggaagaaagcaggcaccggtggccaaggatgcaacgcaacatggagcgtgtgatgtttacaccaatataattgaataaacaggggatgtgcgcgtcgttgtacttatgctgatgctgaggtcgtggtcgatatatatactgaacttttggtggatgctcttcttttctggggagacctaatggaacgaaaaaaaatgtgtcattggggcctgtggtacaaaccctgctgtgtatgggcctgtctataagaaacagcgattagctgtgacgttatgtttctgacagtttatttactaatgagcacatctttaatttactaaaaaaaaaataaaaaaatgagaggttgggaggagtagatattgaaaaaaaatgntgtatga

SEQ ID NO: 95278 - DNA, 530 bp, Zea mays
  unsure (1)..(530): unsure at all n locations
gggaggctcgtgtcagacaatggatgcatacgtncgcctgccgtaccggtccggaattcccgggtcgacccacgcgtccgcggacgcgtgggcaagaattgcttcgccctcctcctaaggccccatccattggtattgttgatggccatgagtttgaggaatatgaggagccaccggtacttggaaggaagacttattttgtagcagataaatcaggttcgaaccatcaatgggcccaatgtgaagattgttccaaatggaggaaacttccaatagatgctctgttgccctccaaatggacctgctctgacaacaaatgggatccagagaggtgttcttgcgaatctgcacaggaaataagtatagaggagcttgcagaattcattcctataaaacctgccaaaaagcccaaattgaagatagaatctgatgctatcgatgcttcagatgggctggacacgcttgcaaactttgcaattcttggtgaaggtgaagctctcccttaacagccaacaccaaacatcccgggc

SEQ ID NO: 95279 - DNA, 531 bp, Zea mays
  unsure (1)..(531): unsure at all n locations
gttagaggggnctgncgtccgttgatcgcatctcgtacgcactgccgtaccggtccggaattcccgggtcgacccacgcgtccgcccacgcgtccgatcacaacgaacacaagctctcgatctcaccgacaccgaggaagaggagatcaatggcgtccgagcagggagtcgtgatcgcgtgccacagcaaggctgagtttgacgcccacatgaccaaggcccaggaagccggcaagctggtggtcatcgacttcactgccgcctggtgcggtccatgccgcgccatcgccccactgttcgtcgaacacgccaagaagttcactcaggtcgtcttcctgaaggtggacgtggacgaagtgaaggaagtcaccgcggcctacgaggtcgaggcgatgccgaccttccacttcgtcaagaacggcaagacggtcgcgaccatcgtgggtgccaagaaggacgagctcctggccctgatcgagaagcatgccgcgcctgcgcctgcgtctgcgtctgcctaaaggagatcagatc

SEQ ID NO: 95280 - DNA, 529 bp, Zea mays
taattggaagggtgttagtaattggctgcatcgtcggcagtaccggtccggaattcccgggtcgacccacgcgtccgcccacgcgtccgtctatattgtatagaactaagatcatgcttaattgacatatcttgtgatcatatctctttcattttggtacaaatgcatatatcttattattctcgtaccatgactacggctaatatgtttccaagtatatttctatactaagtcgtagattgaaagggaaatggagtcttcggcgaagacaaggcttccactcaactctatgggtgttatctaccctttggcattacttcgtaatctatcttgacattggggtaaactttctcttatatatcatttacccaagggggagacaccttatataatgtgctctgtttacctaaggctgatgttacccattgagtgttgttgaaaccttttgtttgccgtagactttagtttccctttaattttcaacatagagtggaattttgctcttgtaatttttttgcgtggtattagt

SEQ ID NO: 95281 - DNA, 551 bp, Zea mays
  unsure (1)..(551): unsure at all n locations
nttatttggagatagttgggaggtgtgtgtacgtacatcgatcgctatcgtcacgcactgccgtaccggtccggaattcccgggtcgacccacgcgtccggtttcctgaatctttgtgttctttattggagcacttgtagtttgtacaatgtttaatattggcgtgttcaggtttaggcccgtcggaatcaaatgcacaactgcaggtatagccagataagataatcggtggagctcaatgcaagctcgggattggacgattgtagacatcactaacaacatcagaggagcgagcttgcggtcaaaaacacagatgggcaacaacaacaatgaacacgaaacgaaacaaacggacacgagacgaccacagacgaagataaaccccctctagactagggtgaacacggtagcagaagcgaacaagataactaggcctcagcggaccccaccgctcagttcctccagttcccgtcgttgttgccgtagccgccgacgcggtttccaccaccgtatcccgttgcggcgcttaccttgtaccgggggctcttaaa

SEQ ID NO: 95282 - DNA, 526 bp, Zea mays
  unsure (1)..(526): unsure at all n locations
gttgaggggctcgcgtccactgatgcatctcgtgcgcactgcggtaccggtccggaattcccgggtcgacccacgcgtccgataaagatgcgatggcagaatcatattgtactgcaagagtgacaattgtgtgttccagtcacatatatgacctagttttgtgtgtctatatgtcgaaacccatatgtctgtgattttattatatgttatgtaagcacaaatgaaacatgccggactagttgcttttgcttgtctatgtatttgtttattccctttgcctcaaagatccatcttcagggtagccatgccggcatgaagttattcatatgctcgggagcgaacccgatctgcagggttggctctgctgcagcttccaggggatgaaagaataatccctagttctagatcgcgggcggccgctctagaggatccaagcttacgtacgcgtgcatgcgacgtcatagctcttctatagtgtcacctaaattcaattcactggccgtcgttttacaacgtcgtgactggn

SEQ ID NO: 95283 - DNA, 544 bp, Zea mays
tggggttgatgttttgggaggggtgtgtagtaaatggatgctagtcgcctgcagtaccggtccggaattcccgggtcgacccacgcgtccgcggacgcgtgggcggcgcgtggggtccgcctcagcccgccgcaaggagagttcaggagacatcttcgagaagctgaaatggctcctaaagctgctcctgccaagaagggtgatgccaagacccaggccttgaaggttgccaaggctgtgaagtctggggcagccaagaagaagaccaagaagatccgcacgtctgtgacatttcaccgccccacgaccctgaagaaggctagggaccccaagtacccacgaatcagcactaccggaaggaacaagcttgatcagtaccaaattctcaggtacccccttaccacagaatcagcgatgaaaaacattgaagatgacaacactctggtcttcattgttgaccttaaggcagacaagaagaagatcaaggctgccttcaagaagatctatgacatccaagcaaagaaggtcaacacctggatcaggc

SEQ ID NO: 95284 - DNA, 547 bp, Zea mays
atgtgaggggtttttgggaggggtgtctacgtcgatggtcgcatgctgtacgcctgcaggtaccggtccggaattcccgggtcgacccacgcgtccgcccacgcgtccggtactgcacactgccatcgctctcgtcccttcgctgccgctctatctcggccggagccatgggcggcggtggcgcggcgctgctgctggtgatgtgggcggtcgtggcgtcggcggccgtgtacgaggtgggcggcaccattgggtggaccgtcatgggcaaccccgactacgccggctgggccagctccaagcagatcgtcgtcggcgacactgttgtgttcacgtataacaagcagtgccacaacgtgctggcggtgagcaaggcggactgcaagaactgcatcgccaccaagccgacggccacctggtccacggggaacgattccgtcgtcctgaacaccacgggccaccactacttcctctgcggctacccgggccactgcgctgccggccagaaggtggacatccgcgtgggcttctatggtggccctgtcgc

SEQ ID NO: 95285 - DNA, 540 bp, Zea mays
  unsure (1)..(540): unsure at all n locations
tgtttgtggggagagggnctcgaagtaaattgctcgcangctgtacgcctgccgtaccggtccggaattcccgggtcgacccacgcgtccgaatttttcgtcgtatgcgaaactggagctccaaatatggaaatgctgctgaaagcgatttacgagctgcacacagacttcgttctgaagaatccgttctatgagatggagatgccgattcggtgcgagctgtttgaccacaacctggctcaggtgatccagaaggaccgagttgcgctcctgggtcggtgaaattggaaagcttttggtcctaaccataccatgtatcttgtactttcccccctttttctacattatgctcggacttactgtgcaattgtctcggccgaagacagctggtgaccaacaactgtttggtcctgactattagcaccgtatttggaacagatctaaaaataagaacctaaaagggcggccgctctagaggatccaagcttacttacgcgtgcatgcgacgtcgtagctcttgtataggggcgcgcaaatcca

SEQ ID NO: 95286 - DNA, 527 bp, Zea mays
  unsure (1)..(527): unsure at all n locations
gattgagggtagtgtcgtccatcgatcgcggctgtacgcctgcggtaccggtccggaattcccgggtcgacccacgcgtccggaccggaggagcccactcctgcatgtaactcagatactccacccgagagtccgcaccaactcacatcacacctcaccttccactccagaagaagaagccagaccggaatcccgagagccctgcccctgctccctcggttcctcctccgttgggcgtttggccgccgggggtggtgggccgagaccgagatgatatcgtggaacgatgtatacacggtgctgaccgcgatggtgcccctgtacgtggccatgttcctggcgtacgggtcggtgcggtggtggcgcatcttcacggcggaccagtgctccggcatcaaccgcttcgtggccatcttcgccgtgccgctgctgtccttccacttcatctccaccaacgacccgtacgccatgaacctncggttcctggccgcggacacgctgcagaagctggtcgttctcgcggggct

SEQ ID NO: 95287 - DNA, 536 bp, Zea mays
gggtatagggtcctctttgtccgttgatcgcatctcgtacgcactgcggtaccggtccggaattcccgggtcgacccacgcgtccgggcttctcctcccccaccggttcgtgttcaggttctggttcgtgggcgagagggaagagatggcggcgtcggacgttgagtaccgttgcttcgttggcggcctcgcctgggccaccgacgaccactccctcaacaacgccttcagcacctacggcgaggtcctcgagtcgaagatcatcctggatcgggagacgcagaggtcccgcggcttcggcttcgtcaccttctccacggaggacgcgatgcgcagtgccatcgagggcatgaacggcaaggagctctacggccgctacatcaccgttaacgaggcccagttccgcggcgggcgctctagaggatccaagcttacgtacgcgtgcatgcgacgtcatagctcttctatagtgtcacctaaattcaattcactggccgtcgttttacaacgtcttgactgggaaaacccttgcgttc

SEQ ID NO: 95288 - DNA, 525 bp, Zea mays
  unsure (1)..(525): unsure at all n locations
gttgaggggngtgntgtccttgcatgcatctcgtacgcctgccgtaccggtccggaattcccgggtcgacccacgcgtccgcggacgcgtgggcgatggcgacggagctgacggcggcgcagctgcgcgcgtacgacggcaccgacccgtccaagcccatctacgtctgcgtccggggcaaggtctacgacgtcacctccggccgcggcttctacggccccggcggcgcctacgccgtcttcgcgggccgcgaggccagccgcgccctcggcaagatgtccaaggacgaggccgacgtcttcggggacctctccgggctcaccgacaaggagctcggcgtcctcgccgactgggagatcaagttccaggccaagtaccccgtcgtcgcccgactcgccgtcgacgcctgaactcgtcagtctcggtctaaatttactctgtcctgcctcttgcggtgttcagtgctgtgcttgcttgcttgatgctagttgctttgctacccaataatctgaatggaacgacgtt

SEQ ID NO: 95289 - DNA, 577 bp, Zea mays
  unsure (1)..(577): unsure at all n locations
gatgaaggggntgaggattaagttgagtatgttgtgtatttagtgattggtaggggtgtgtagtacatcgatgcggtcgtctgccgtaccggtccggaattcccgggtcgacccacgcgtccgcccacgcgtccgctttatcaagctactaaagatccttggtacctagaagtgggtgaaaccattgtgaggtcacttaattactatactaaagtggatggaggttttgctagcatcagagatgtttcaacaatgaaacttgaagatcaccagcacagcttctttctttcagaaacgtgcaaatatctatttcttctgtatgatgattcattcttgaggaatcaaaattacctttttacaaccaaaggtcattccctttcaataagaaacacgtggcatgaagaattttctggaacatatgttcccaggcattggacatcttgtaagggttaggttcaacccatttgcgccagcgcattattgtcttaaggtttgcccgagaccattttcggaagaaaggttggtaccccatgggaaaatgccttcccatgttccaaaatgcgaaagttagcagtat

SEQ ID NO: 95290 - DNA, 535 bp, Zea mays
  unsure (1)..(535): unsure at all n locations
aggtataggagtgatgtcngtaaataggatgctagtcgtcctgcagtaccggtccggaattcccgggtcgacccacgcgtccgtccagaacttcaggtggttttgatctctgcaactcttgctcatgagatcttggagatgactagtaagttcatgaccgaaccggttaggatccttgtgaagcgtgatgagctgaccctggagggcatcaaacaattctttgttgctgttgagaaagaggagtggaagtttgatacactttgtgatctttatgatacactcaccatcacccaagctgttattntctgcaatactaagagaaaggtggatttggctcactgaaaaaatgcgtacaaataacttcaccgtatcagctatgcacggtgacatgcccgaacttggaatggatgccattatggttgagttcagggtctgcggcatctcgtgtgctaataactacagatggttgggctcgaggtctggacgttcagaaggtttcacttgtcgttgtttatggtctccgagtgtttgtagg

SEQ ID NO: 95291 - DNA, 529 bp, Zea mays
tggttaggctgtgtgatacgccggaagctgtcggtctgccgtaccggtccggaattcccgggtcgacccacgcgtccgcccacgcgtccgatctcggagcttgaacggagcgtcaccagtctccagatggaggtggcggcgctgtccccaaaagggtcaagaggatattggcaaacaggcagtcggctcagaggtcacgagtgaggaagctgcagtacatctcggagcttgaacggagcgtcaccagtctccagatggaggtgtcggcgctgtcccctcgcgtggccttcctcgaccaccaccgctcactgctcaccgtcggcaacagccatctcaagcaaagaatcgcggcgctcgcccaggacaagatcttcaaagacgctcaccaagaggcgctggagaaggagatccagcggctgcgccaagtgtaccagcagcagcaggtcaaggtggccaccaccggcggcgccgacatcgccaccggcgacttcgcgtcgatgcaggccaagcaagagcttggtgcgtgcga

SEQ ID NO: 95292 - DNA, 540 bp, Zea mays
  unsure (1)..(540): unsure at all n locations
ntgattgtagtttagggggggggatcgagtacctgatgcatgtgtacgcctgccgtaccggtccggaattcccgggtcgacccacgcgtccgcggacgcgtgggcggacgcgtggggaaggctcaagagcttggcctgcaagtccttgcggggatcagaggatatgcagatgcggctcaagctccggaactttttacaaccaccccagcacttgcgataccaaaggctatatcaaatgctggattagagtcatcccatgttgatttttttgagattaatgaagcattttctgctgtcgcacttgcaaatcaaaagcttcttgggattccttcagaaaagattaatgtccatggaggagctgtgtctctagggcatactcttgggtgcagcggtgctcgcattttggtcacccttcttggtgtccttagggaaaagggcggcaagatcggtgttgctggtgtctgcaacggcggacgtggagcatcagctcttgttctcgaactcgcataagaagcattggcttgaagcactggatattta

SEQ ID NO: 95293 - DNA, 520 bp, Zea mays
  unsure (1)..(520): unsure at all n locations
ggggatcgngtccatggatgcaactcgngcgcactgcggtaccggtccggaattcccgggtcgacccacgcgtccgggagattttgtccatgttataggggatgctcatgtctatagaaatcacgttcgagctgtggaggaacagattcagaagatgcctaaaccatttccaattttaaagataaatccttcgaaaaaggatatagattctttcatggcgtcagacttcaagctggttggctatgatcctcaccagaagctagagatgaaaatggcagtgtaacggtggcttagctctggagcccccagccttggaacctcggtgggtgaaatcagtcgaacgaactggtactacataaaaaatgaaccggacatcgcactagcttgtttttggtgatggtgctgaatgttgtgcgggaggcgttttcccccgttattagtagcgatctgcgtgctatatatggtcgctgaagtcaaaattgtctctcttttatttttatctactactactactcaaatg

SEQ ID NO: 95294 - DNA, 531 bp, Zea mays
  unsure (1)..(531): unsure at all n locations
ggtgaggggctctngtccattgatcgcatctcgtaggcactgcggtaccggtccggaattcccgggtcgacccacgcgtccgcccacgcgtccggatcttgagtgttcaacaactgtacagaatatgtacacaatactgggatgacaagtataatacccaaagtgtttcatcagacgttcttagtaacatgcgggtgctaatgacagaggattctaacagtgatgaaagcggttcgttcttgttagatgataattcgagcatcccgttctccgtggatgatatcaccaactcaatgcatgagaaggacttcacggatatcaaaccggctgatgagctactcgagaaccctgccttccagtttttacaggattagcgctagtgaagtcctcgagcattttatgctgctagatatcttgtcagatcatttattgatttggtgtatatttattggatcttttgtaccacatgtgcctttatttagttatcttatccttttcagctagcttttgtaaaaattcatataggttttt

SEQ ID NO: 95295 - DNA, 529 bp, Zea mays
  unsure (1)..(529): unsure at all n locations
nggtaggctgtgtcgtcgctggatgcggtcgtcactgccgtaccggtccggaattcccgggtcgacccacgcgtccgcggacgcgtgggcggacgcgtgggatattttcatagggaacttctgagtggcgacaaggagggtcttcttcagctcccaagtgacaaagccctgctgagcgaccctgtcttccgccctcttgtggagaaatatgctgcagatgagaaggcattctttgatgactacaaagaggcccacctcaagctctccgaactggggtatgctgatgcttaaatgtccatatcctggagcgggacacaaactgctgcctgtatggactcgtgccaatcaaggtgaaccatcagattgtctagaggcttctttggaataaatttatctggtcttgggactttggctatgggtgaatcggaacccattttccgtttaaaaaaaaaaaaattaaaaaaggagcaaaaggaaatgatttagggagttaaaaaagggggagcggttttaaaggtcccaagttact

SEQ ID NO: 95296 - DNA, 534 bp, Zea mays
  unsure (1)..(534): unsure at all n locations
aggctaggctcatgtgntagtccgtaagccgtcggtatgccgtaccggtccggaattcccgggtcgacccacgcgtgcgcgaaagcacccgttctgtcccctcgcataaccctagctccagccaccatgaagggcagggcgtgacacctccaagaaggacgagggcaggctccgggcgggcggcgccgccggaaagcgcaagaaggccgccgcgagcggcaagcccaagcgcccgccctccgccttcttcgtcttcatgtctgaattcaggcaggagtatcaggcgctgcacgctggcaacaagagcgttgcgaccgtgagcagggcagcaggggaaaagtggcgtgctatgtcatatcaagagaagccgaccaaggggttaggaggaaacagagggagaggaaaagggaaaggagtgtatagcaaggggcgtctcctatggagaacataggataaggggcaggggcatgcaagaggagtcatgttgtaaaaagagaactataatagaaggagggtgcatagagaggagagagt

SEQ ID NO: 95297 - DNA, 537 bp, Zea mays
  unsure (1)..(537): unsure at all n locations
aggaggggctgctgtaagtatactgatagctatctgaacgcctgccgtaccggtccggaattcccgactcgacccacgcgtcccacaaaaacaaacacaaaaaaatttattcataaaaaaacaaaaaaaatgacaacaaggggggtcttatacagctgccaagtgacaaagccctgctgagcgaccctgtcttccgccctcttgtggagaaatatgctgcagatgagaaggcattctttgatgactacaaagaggcccacctcaagctctccgaactggggtatgctgatgcttaaatgtccatatcctagagcgggacacaaactgctgcctgtattgactcgtgcgattcaaggtgaaccatcagatggtctagagattgctttgtaataaatttaaactatcttggtactttgtctatggatgaatcggaacccattttcacgttaaattgaataataccttagtttagatagtagaatcattctttatagagagaaaaaaaggcagaaagtaataaaaattgaagataaatgn

SEQ ID NO: 95298 - DNA, 523 bp, Zea mays
  unsure (1)..(523): unsure at all n locations
aggggctcagtaaactgctgcantctgtacgcctgccgtaccggtccggaattcccgggtcgacccacgcgtccgcaaggaccttcggcgcccgttcaggatccacatcttcccgagcgagttcttggttggcctcttcctcttcggaccacctccaaggctcttggtgtagcttgccactctcaccaatcaagttttcatgtctgatctcgacattcagatcccaactgccttcgatcccttcgctgaggccaatgctggggactctggtgcagcagcatggtcaaaggactacgttcacgtgcgcatccagcagcgtaatggtcgcaagagcctgaccaccgtccagggattgaagaaggagttcatctacagcaagatcctcatagatctcaagaaagagttctgctgcaatggtacagtggtccaggacccataacttggacaggtcattcagctccagggtgatcagaggaagaacgtctgggatttcctcggacaggcccggattttagaataagga

SEQ ID NO: 95299 - DNA, 527 bp, Zea mays
  unsure (1)..(527): unsure at all n locations
ggggngaggggctcgcgtccttgcatgcaactcgtacgcctgccgtaccggtccggaattcccgggtcgacccacgcgtccgaataagacgacttgtttcattgattcttcaagagatcgagcttcttttgcaccacaaggtcgaggatgtcttgcagctgcggatcaagctgcggctgcggctcaagctgcaagtgcggcaagaagtaccctgacctggaggagacgagcaccgccgcgcagcccaccgtcgtcctcggggtggccccggagaagaaggccgcgcccgagttcgtcgaggccgcggcggagtccggcgaggccgcccacggctgcagctgcggtagcggctgcaagtgcgacccctgcaactgctgatcacatcgatcgacgaccatggatatgattattatctatctagcttgtggtggtggttgaacaataataagcgaggccgagctggctgccatacataggtattgngtggggtgtgtgttaaaaagagggaaaccaaattccttcaattt

SEQ ID NO: 95300 - DNA, 542 bp, Zea mays
atgagtgtggtatagggggggctgaattcgtaaatggatagtgtacgcactgccgtaccggtccggaattcccgggtcgacccacgcgtccgctgaaagggcatatgtctataagttggccccacaggcagaatgttatatacctttccgaattgacacctcggctgaaggcggggaggaaaatagctgcttgaaagggggtgtttacttagccgatggtgatgaaactgttccagttcttagtgcgggctacatgtgtgcaaaaggatggcgtggcaaaactcgtttcaaccctgccggcagcaagacttacgtgagagaatacagccactcaccaccctctactctcctggaaggcaagggcacccagagcggtgcacatgttgatataatggggaactttgctctaattgaagacgtcatcagaatagctgctggagcaaccggtgaggaaattggtggcgatcaggtttattcagatatattcaaatggtcagagaaaatcaaattggaaatgtaacctatgggaaatttaaagaagt

SEQ ID NO: 95301 - DNA, 532 bp, Zea mays
tttagttgggaggctgagtcgacactgatgctgtcgcactgccgtaccggtccggaattcccgggtcgacccacgcgtccgcggacgcgtgggcactcatgcaatcaacaaggatctgaaagctgaccccaaggatgaggttctttcaacactgcgggcgatcatccggtgcttcacctgccctgacagatacttcgagaaagtcattcgactggctcttggaggcatgggcactgatgaggatgacctcaccagggtcgtaactactcgcgccgaggtcgacctgaagctgataaaggaggcttatcagaagagaaacagtgtgccgctggagcgtgctgtggccaaagatacaactagagattatgaggatattatgcttgccctccttggggcggagtgaggaggcgtgcctcaactcgatctcatctgctcctacttgtttgatggggccaaaaaactgcatcgacgtggtatccacatggccgtggttttgaataataattaaatttggaacacgtggcctggatta

SEQ ID NO: 95302 - DNA, 531 bp, Zea mays
  unsure (1)..(531): unsure at all n locations
gggggctgtagtcgtatacggtatgcactcggtagtcgtgccgtaccggtcctgccttctcgacccaagcgttccctgacgcatcagctctcatgcaatcactaggatctgaaagctgaccccacagatgagggtgtttcaacactgtgggcgatcatccggtacttcaccttgcctgacagatacttccagaaagtcattcgactggctcttgaatgcatgggcactgatgaggatgacctcaccagtgtcgtaactactcgcgccgaggtccacctgaagctgattaaggaggcgtatcttagtataatcagtgtatcgctggatcgatctttggtcgaagatacaactagagattatatgtatattattcttgcccttcttggggcatgatgaggaggcatgccttcaattagacttatccggtttgtactagattgatgtggtcaaaaaactgcatttaacgtgggtgagcacattgtccggggtttngaatatatattaaatgtgttacacatttatgatggtagg

SEQ ID NO: 95303 - DNA, 527 bp, Zea mays
  unsure (1)..(527): unsure at all n locations
ggagggagggcntcgngttcatgcatgcagctctcgcgcactgcggtaccggtccggaattcccgggtcgacccacgcgtccgacgcgctgttccgctgcagcgacgccgccggcgaccagcagcgggacagcagctactacgagcgcgagaacgcgctcacggtcatcgggagcaacccgctgcggcgccacctggccctgggctacgacgactcccactcccacgacgacggcgcgtcgtcagctggctctgaccgcgtggacggcatagagctcgccgcggcggcgccggcgccggcggtcgttaagaagcaggtgaggttcgcggtggctccgcccaggagccccggtgtggacgagaccgtgttggaggagctgcacgagctgtgcgaggcgcgcgaggccggcacggcgttcatcctgggccactcgcacgtgaagaccaagcccgggtcgtcgatactcaagaggctggccgtcggcgtcggctacaactttttgcgaaagaacatgtccngggccggaa

SEQ ID NO: 95304 - DNA, 532 bp, Zea mays
  unsure (1)..(532): unsure at all n locations
gggtttaggggctcgngtccactgatgcatctcgtcacgcactgccgtaccggtccggaattcccgggtcgacccacgcgtccgcccacgcgtccgcccacgcgtccgatgcaataaatcaaataaaataagattaagattgacaaaagatgtaaaaaccaagagctaaaatgaatactatttccagttctaggcggcattataaattctatttttttcttataatgatgtgaatcttgatggtttaatattatggttttaggacaattattatggtttcatactatttccagttctttagtcatggattttttttcagaagttgatgaactctaccttcgcaggatctagttccttgtatcttactgtcttttgagtttgagcatatactgatgtggagaggaagtgattggaaatcatctcttcctccattagaaaatagttatgaagtgacaaaggtgcaagaaagttttagtggcaaagaatctaatgaaaaggttacacattcaggaaatggtttgatccagattgg

SEQ ID NO: 95305 - DNA, 528 bp, Zea mays
  unsure (1)..(528): unsure at all n locations
gggtggaggggntcgcgtccttgcatgcatctcgtcacgcctgcggtaccggtccggaattcccgggtcgacccacgcgtccgcccacgcgtccgaaactgcgcaaccagtatccagatgctgcaaaacactaacaggcacgtggttggtgactctgtgggaaacttgtcactcaaagagctgaagcagctggagagccgccttgagaaaggcatctctaagatcagggccaggaagagtgagctgctggctgccgagatcaattacatggccaaaagggagactgagcttcagaatgaccacatgaacctcaggaccaagattgaggagggagagcaacagctgcagcaggtgactgtggcccagtctgtcgcagcagcagctgccaccgacgtggagctgaatccgttcttggagatggataccaaatgcttcttccctggcggccccttcgcgacactggacatgaagtgcttcttccccggcagcttgcagatgctggaggcacagcagcgccagatgcttgcn

SEQ ID NO: 95306 - DNA, 525 bp, Zea mays
  unsure (1)..(525): unsure at all n locations
ggttagggtgtgtagtattttgatgcagtcggttcgccgtaccggtccggaattcccgggtcgacccacgcgtncgtccacgcgtncgtccctctatgcttcaaagcaggggaggatgcagacaccctgggcctaaccggccatgagcgctacacggtccaccttccaaccaatgtgagtgagatcaagcctggccaagatgttaccgtgacaactgataatggaaagtcgttcacttgcacactcagattcgacactgaggtggagcttgcttactacgatcatggtggcattctaccatatgtcgctagaaagatagcggagcaatagattgtaccgttgagatggttgcgatacttgcggtgaatcgtaattggtgtaaacggtttggttagtagtacaacccatttttgcggactacttataataacctctgagtatctcagagtgagctgtctgaaatttgatgaactgctacaattctggtgcgccatgaagatgggatccttttggcttctatggtat

SEQ ID NO: 95307 - DNA, 525 bp, Zea mays
  unsure (1)..(525): unsure at all n locations
agggatggctnattcgtgcactgacgcgtcgtatgccgtaccggtccggaattcccgggtcgacccacgcgttcgcaaggaccttcggcgcccgttcaggatccacatcttcccgagcgagttcttggttgggctgttcctcttcggaccacctacaaagctcttggtgtagcttgccactctcaccaatcaagttttcatgtctgatctcgacattcaaatcccaactgccttcgatcccttcgctgaggccaatgctggggactctggtgcagcagcagggtcaaaggactacgttcacgtgcgcatccagcagcgtaatggtcgcaagagcctgaccaccgtccatggattgaagaaggagttcagctacagcaagatcctcaaagatctcaagaaagagttctgctgcaatggtacagtggtccaggacccagaacttggacaggtcattcagctccagggtgatcagaggaagaacgtctcgaatttcctcgtccatggcggcattggggataaagaacc

SEQ ID NO: 95308 - DNA, 540 bp, Zea mays
  unsure (1)..(540): unsure at all n locations
cgtgaggggggacactaagtaaatagaattgcatgcgtnacgcctgcaggtaccggtccggaattcccgggtcgacccacgcgtccgaaaacagggctttcctgtgacatatgcgtcaataatcttttagcagttgttaacacagaacttttgcgagattatggacaaatagataaaaggttacagcagttggcattcattgtgaagcattgggctaaaactcgacgtgtaaatgaaacttatcaaggaacactttctagttatgcctatgtgattatgtgcattcacctcctacagctgcgaagaatactcccatgtctacaggaaatggaggccacttattatgtcaaggtggaagaaattaactgcgcttactttgaccaagtggacaagctaaataattatggtgctcacaacagagatacagtatcaaggctgctctggtcctttttccattactgggcatatgagcacgattacacatgagatgtcatatcaattcgtactgggaaggatattgagtagggatcgtgaaggagg

SEQ ID NO: 95309 - DNA, 536 bp, Zea mays
  unsure (1)..(536): unsure at all n locations
tgttgtggcggtagtcntaagctgaaagctagtcgtcactgccgtaccggtccggaattcccgggtcgacccacgcgtccgcccacgcgtccgcgcttcgcgtcacccagagctcgtcggcctccgtccccgctagaagcgagagcatggacacccaagtgaagcttgctgttgtggtaaaggtgatgggcaggaccggctccaggggtcaggtgacccaggtcagagtgaagttcttggatgaccagaaccgtctcatcatgaggaacgtcaagggccctgttcgtgagggtgacatcctgaccctgctcgagtctgagagggaggccaggaggctgcgctgaagcccttgttgtcttggatgtaattctgttaattttgttcaatgtttgtcgaacttgccgtgtgacccatactatatctgctttgggatttagtaagcctggattgcagttttttttatgttcctggtggaaattgcaattgtttgtcggcaaaaaaaaaaggggggttgggagtggagagtgtagaggggg

SEQ ID NO: 95310 - DNA, 530 bp, Zea mays
agagggactcgtagtaatctgacagcaagctgtaggactgccgtaccggtccggaattcctggggcgacgcagtcgtccacgcatgcgtgctctgcgtcgatattgactagtaggactgctgagcccgctagaagcgggagcatggacacccaagtgaagcttgctgttgtggtaaaggtgatgggcaggacctgctccaggggtcatgtgacccaggtcagagtgaaattcttggatgaccagaaccgtctcatcatgaggaacgttaagggccctgttcgtcagggtgacatactgaccctgctcggaaatgagtaggagttgccgaaaggtgtgcttaaaaccttattgacttgtagcaagtggggttgtagtgaagaatgctttgcggaaaaggagcttagaacaattctgtaagggtatagcgatttaggacgcagtggattagagtttctttaatggccgtggtggatgtggttactggaatgaagcaagtaaagttggtgaggaagtttagtgtggtgtacta

SEQ ID NO: 95311 - DNA, 526 bp, Zea mays
gtggagggggtgagtccctgatgcagctgtccgcactgccgtaccggtccggaattcccgggtcgacccacgcgtccgcccacgcgtccgcccacgcgtccgctagccatcccaggttgctccggccgcatgcccgccgaccgccgaccgccgaccgccgacgatgcctcccaaggccaagaaggacgctgcgccgtctgagcgccccatccttggacgcttctcctcccacctcaagatcgggatcgttgggttgccaaatgttggcaaatcaacttttttcaacatagtaacaaagttggctatcccagctgagaattttcctttctgtaccatcgaaccaaatgaagcacgggtgaatgttccagatgaacggtttgattggctctgcaaactttacaagccaaagagtgaggtgcctgcatatcttgaagtaactgacatagctgggcttattagaggtgctcatgctggggatggtctgggcaatgcattcctctcacatatacgtgctgatgatggaatc

SEQ ID NO: 95312 - DNA, 526 bp, Zea mays
  unsure (1)..(526): unsure at all n locations
agtcctntntgncatgaactgaaagtgatcgcctgcacgtaccggtccggaattcccgggtcgacccacgcgtccgctgaggtgtgcgaaagaaagctggatgagtaccttctcactcgcagctacatcactggctaccaagcttccaaggctgacttggctgtgctacactgcgttcatcgtctgctcccatcgcccaaggatatcaactcagcaaggtggttgaatcacattgatgcgctctataggctgcacggaattactgcaaagggccaaggtgtgtaggttgaatcacatgcagctccttcagacccatctccatatcttgctgaacctcacgccctaattgctcacgaggacgacgacgatgacgttgacctttgtgatgaggagaccgaatatgagaagaacgctgctgaagagcgtgctagaactgccaaggctcttggcaagaagaaagaatctgggaagtcatcagtcttacttgatgcgaagccatgggaccatgagactgacatggccaatc

SEQ ID NO: 95313 - DNA, 546 bp, Zea mays
  unsure (1)..(546): unsure at all n locations
gtggattatatccgacatcgagtncactgcacgtaccggtccggaattcctgggtcgacctacgcgtccgagcatctccgctccggctgcgctcagccttgctttcctgctacctgctctagcgcgagcgagagaggtacggcggccgatctggcggaacatgcggagggctcggccgttgcacgttagtcggcgccatatatgtggagggtcctgatcgagctcaagcggatggagaacaagttcaattgccatgtcaccagcgccaagcgccgcaacggcctgctcaagaaggcttattatctttctgttcatgttgtcgcctaggtctggctcatcatctttgtcaagcttggctagcttgtacgagttctgtattatgcagagaattccaaaaacacttgaaaagtaccaatgtttatgttttgattggccagaaatagcactccataattgaattgagtgagctacatttaagatttctatttgagtgcttttaactgaatgtatttagtagatatttttgatgtgttttatgtggtatat

SEQ ID NO: 95314 - DNA, 526 bp, Zea mays
  unsure (1)..(526): unsure at all n locations
tgatccgacttnnaatgaaatcgagtancgctgcgcgctgccggtcccgaatcggacatttccgaggtcgacccacgcgtgcggccctcttccagccatccatgattggtatggaggctgccggaatccatgagacaacatacaattcaatcatgaagtgcgacgtggatatcaggaaggacctctacggcaacattgtgctcagtggaggttcgactatgttcccgggaatcgctgatcgtatgagcaaggagatcacttcccttgcaccaagcagcatgaagatcaaggtcgttgcaccgcctgagaggaagtatagtgtctggataggagggtccatcctagcctcgctgagcactttccaacagatgtggatatctaaggaggagtacgatgagtctggcccggcaattggtcacaggaagtgcttctatgcttcgcaagttcctcatcgttgcctaatctcaagttatgttccctttattttttcaggatacgtgtgggcagatttgcatggtacgggtag

SEQ ID NO: 95315 - DNA, 519 bp, Zea mays
atctccttattaaattggatgcatatcggtcgcctgcagtaccggtccggaattcccgggtcgacccacgcgtccgcccacgcgtccgatgcaacaacaagcaatgacaagaaggtgtcagagttagatttgtacatgagcgaggacctagtgaaggtcaatgacaatgaagcaacgtttgatatcctatcatggtggaaagggcaagtcacaaattttcctattctttctacccttgctcgtgatgtgttgtctatgcaagtgtctactgttgcttcagagtctgcatttagttcgggtggacgcattgttgatgcattccgttcaagactcaaaccagaaattattgaggcattggtttgttgtaaagattggaagattgcttcggagaaagatttggagattgaaattaaaaccttaagtgaagctatgaatgacgttgacttggaggatgctgctgcaattagaacttgagaagttaaagttcaagttaccatggatgatgttgaacttgttact

SEQ ID NO: 95316 - DNA, 528 bp, Zea mays
  unsure (1)..(528): unsure at all n locations
gagtccttaatganaatgaaactgcagatccggtacgcctgcacgtaccggtccggaattcccgggtcgacccacgcgtccgcccacgcgtccgggccttcagcaatgtgcctactcgtgattggattaaggatgccatctttaagactctgattgcaaatggaatgttcaacaatgctcatataaggctcacgctcacccgtgggaaaaaggtgacatctggaatgagtccagctttcaatctttatgggtgtgccttgattgtgcttgcagagtggaaaccaccagtttatgataactctcatgggataaaattggttactgccaccacacgtcgaaattctccaaatagtatagattccaagattcatcacaacaatcttatcaacaatattctggcaaagatagaaggtaatcttgcccaggctgaggatgccattatgctagataaggatggctttgtatcagaaacaaacgcaacaaatatttttatggtcaaaaagggaattgtattgacacctcatgctt

SEQ ID NO: 95317 - DNA, 524 bp, Zea mays
  unsure (1)..(524): unsure at all n locations
tggtccgntttgcaattgatccgcaagacggtacgcctgcacgtaccggtccggaattcccgggtcgacccacgcgtccgcccacgcgtccgcggacgcgtgggggaagcaggggctagacgcggatcggcgagcatgaggggcggcggcggcggcgggatgatggacgatgaagagagggtgggccatgcggagatcccgaccagtttcggtcccgagctgcgcgcctgcctccgatgccgcctcgtcaagacctacgaccagttcagggagaacggctgcgaaaactgcccgtttctagagatggacagagagcacgacaacgtcgtcaactgcaccacccccaacttcactggaattatctctctgatggaccccagtaggagctgggcagcccgttggttgagaattggcaggttcattcctgggtgctatacacttgctgtctcggaggagcttccagaagagtatcaagggatttgtcaagacatcaacgtgcagtatgtgccgtccaagcgtgtcta

SEQ ID NO: 95318 - DNA, 522 bp, Zea mays
  unsure (1)..(522): unsure at all n locations
attcctanttgcaatgaatgcangctggtcgcctgcacgtaccggtccggaattcccgggtcgacccacgcgtccgcaaatccagcagtgcaattggcaggtcgttaatgtaacaactcctgcaaattatttccatgttctgcgtcgccagatacaccgggacttcaggaagcctttgattgtgatgtccccaaagaacctccttcgccacaaggactgcaagtcgaacctatctgaatttgatgatcttgcgggccaccctggatttgacaagcaggggacacgcttcaagcgtctcattaaggaccagaataatcacaaggacctagaggagggaatcaaccgcctagttctttgctctggaaaggtgtactatgaactggatgaagaaagaaggaagtcggagcgcactgatgttgctatttgtagagttgagcagctctgcccgttcccctatgacctcatccagcgcgagttgaagagatatccaaatgccgagatcgtgtggtgccaagaggagcc

SEQ ID NO: 95319 - DNA, 528 bp, Zea mays
  unsure (1)..(528): unsure at all n locations
natgtcctgngatgnccctgacctgcatatctggtacgcctgcacgtaccggtccggaattcccgggtcgacccacgcgtccgcggacgcgtgggggcttctcctccccctccggttcgggttcgggttcgtgaggttctccggggttcggtttcgtgggtgagcggatcgagatggcggcgtcggatgttgagtaccgctgcttcgtcggcggcctcgcctgggccacggacgaccactccctccacaacgccttcagcacctacggcgaggtcctcgagtccaagattatcctcgatcgggagacgcagaggtcccgcggcttcggcttcgtcaccttctccacggaggaggcgatgcggaacgccatcgagggcatgaacggcaaggagctggacggccgcaacatcaccgtcaacgaggcccagtcccgcggcggccgtggaggcggcggcggcggctacggtggtggccgtggaggcggcggctacggcggtggcgggcgccgtgatggcggcggcggctact

SEQ ID NO: 95320 - DNA, 524 bp, Zea mays
tggtccgttgtcattggctgaaacctgtcgcactgcacgtaccggtccggaattcccgggtcgacccacgcgtccgcggaactaggaaggcgaagccgaaggcgcggcgcggcgcggcacggatcgagcgatggcggtggcccctcctacggcggcggcgctggagcagctaagcagcagcaagatgttcgacggcttcaatctccgcttccgccaccagagcgccacccttggctgcgccatgactttctccatctacctgcccccgtccccggcgtccaaccttcccgtgctgtactggctctcgggtctcacctgcaccgacgagaatttcatcataaagtccggcgcccagcgcgccgccgctgcccacggcatcgccctcgtggcacctgacacctccccacgtgggttaaatattgaaggagagtcagacagctatgattttggtgtgggtgccgggttttatttgaatgccacaaatgaaaagtggaaaaactggcgcatgtatgactacattgtga

SEQ ID NO: 95321 - DNA, 526 bp, Zea mays
  unsure (1)..(526): unsure at all n locations
tgtgtccgantttcattgatttgatagccggtacgcctgcacgtaccggtccggaattcccgggtcgacccacgcgtccgcccacgcgtccgcccacgcgtccggaaggttctatcagcctctccatcagcatattcagctaatccaaagactaagttagcgtctcctccatcgctcactgggtcagctatatcattggtttcggttatgcaggcaagaaataatgctcgggtgctgttatctggatcactcgatctgtttagcaaccggttcctgaagtctggtgttcaaaaggctgatagcaaaacaagatatgagagagctggaaacgagcaatttgtggcagagataagcaaatgggttttccatgagaggggacatctaaaggctgttaatgttaggcatcacaaggttggggagaccaatgaaccaggcatgtaccgcattaatgatgacctggaatactctgttgagatctatgaatggtccggaacaagctggaagccgtatgttgctgatgatgtgc

SEQ ID NO: 95322 - DNA, 524 bp, Zea mays
  unsure (1)..(524): unsure at all n locations
tgtccttattantttgaactgaaacctgtcgcctgcacgtaccggtccggaattcccgggtcgacccacgcgtccgcaaacacgtcaatagtagagattttggactacgattcgtgcaaaacactaaaaaagaaaaggccatcgaaaacgccgccgccgcctctgatgctttccgccgtgatggcggcggcggctacggcggtggcggcggcggctacggtggcggcggtggctacggtggtggtggtggcggctacggcggtggcaaccgtggcggcggctacggcaactccgacgggaactggaggaactgagcggtggggcccgcgcggccaagttatcctgttcgctaccgtgatgtttaccctagtccagagggtttatcttcgttcgtctcgtttgttggtgcccatctgtgtttttgattgcaaggtcgctctgtgtcagttgttagtgctgtgttcatcctcggctccagcagacccatgcatcaaccagcatggactgtggatcgatggatgctt

SEQ ID NO: 95323 - DNA, 532 bp, Zea mays
tggtgtccgtatattacaatcgaactgaaagctggtacgcctgcacgtaccggtccggaattcccgggtcgacccacgcgtccgagtcacgtctcccagatctaactccccccgactcacgaatcccagagagcctccatggcgacgcaccgccactgcctcccactcctcctcgtggccgccgccctcgccctcgccgccgtccctgctcgcgcggcgctgggcggcgggcgcggcccgctgctgggcgggtggaacccgatccctgacgtgagcgactcgcacatccaggagctaggcgggtgggcgctggggcaggcgaagcaccagaagctggccgccgacgggctgcggttccgccgcgtggtgcgcggcgagcagcaggtcgtgtccgggatgaactaccgcctctacgtcgacgccgccgaccccgccggccgcaccgtgccctacgtcgccgtcgtgtacgagcaggtctggacccgcacccgctggatcgataccgacaccgctgtgccgaacgcaccatgat

SEQ ID NO: 95324 - DNA, 525 bp, Zea mays
  unsure (1)..(525): unsure at all n locations
agtccgtatgnnatgagctgaaacctgtcgcctgcacgtaccggtccggaattcccgggtcgacccacgcgtccgggccaccatacgcaagcccaacgacttcaagcagccaggggagaggtaccgctcctgggacgccgaccgacaggaccgattcgtgaggcgattcgccgactcgctcggacacccaaaggtcagccaggagctcaggtccatctggatagacctcctcgccaagtgcgacgcgtcgctggggatgaagattgccacccggctcaacatgaagccaaacatgtgatgcttctgctgaataataatgaagacacgcatgcatgtcgtcgtcaggaacaagagaaataatacaagaccagcacgcatgggcatactctatattatagatggccaaaaagcacgaggcccgtgagcccggcacgaagcccgctttttgggcccggtccgagcacggcacggtagaataagcgggcgggcttgaacaggaaactaggcacggcgggctagcccggc

SEQ ID NO: 95325 - DNA, 532 bp, Zea mays
  unsure (1)..(532): unsure at all n locations
atgctgcctntntntcaatcgaactgatngccggtgcgcctgcacgtaccggtccggaattcccgggtcgacccacgcgtccgcccacgcgtccgcggacgcgtgggcaacacgcaggggtccggccacgacgggccctacaggtacgacatcaagcggtcggggaacaacgtcaacgtgtccacgggggtgaactggatgctgctgggcagccccgtcagcaaggacttcccgctcgccatctaccccgtcgacaaggtgccgctcccctacgagctgttcgggcccaagccgcccacgccggcgcccgcgccggcacccgcgcccgggccggccaaggccaagaccaagaagaagaagaagtccgccgccatcgccgagccgcccacggccgacgacgacgacaccggcaagggcggcaaggggctgggcaagggcggcgcgaaacgccaccgtaaggttctccgcgacaacatccagggtatcacgaagccggcaatccggaggctggcgaggaggggcggcgtgaagt

SEQ ID NO: 95326 - DNA, 514 bp, Zea mays
acatagaacgctgtacgcctgcaggtaccggtccggaattcccgggtcgacccacgcgtccgctcgagaagggcgccaaggtcatcctcgccagccacctgggtcgtccaaaaagtgtcaccccaaagtacagcttgaagcctcttgttccacgcttgtctgagctccttggagttgaaagtctgatggccaatgattgcattggtgaaaaagttgaaaagttggctggccgtttgccaagaaggtgaattcttgttctagagaaatgtatgattctaccatggggtattgtattaccaatctttatttgcctatgaactttccttttgttgctgcccttttttgtctatgttgttttgtgccgggtttatatatgttatgctttaaccattaggattttcacattcttttaaccctctttttatctggttttttatttttaagtgatttttttattttttttaggctttttttttttttaataagttctttttttctgtttatttgtgtttat

SEQ ID NO: 95327 - DNA, 509 bp, Zea mays
caatgagacactgtacgcctgcagtaccggtccggaattcccgggtcgacccacgcgtccgctcgcagctgcgcgtggcctaccagggcgtgcccggcgcgtacagcgagaaggcggccgggaaggcgtacccgggctgcgacgccatcccctgcgaccagttcgaggtggcgttccaggccgtggagctgtggatcgcggaccgcgccgtgctccccgtggagaactcgctgggcggcagcatccaccgcaactacgacctgctgctccggcaccggctccacatcgtctgtgaggtgcagcttcccgtgcaccactgcctgctggcgctgcccggtgtgcgcaaggagtgcctgacccgcgtgatcagccacccgcaggcgcttgcgcagtgcgagcacacgctcacggccatggggcctaacgtctttcgcgaggcctttgtatacacggtctgtgccttctagttccttgtcgtctacggttttcttgtcatgtggctttttttg

SEQ ID NO: 95328 - DNA, 521 bp, Zea mays
ttttgatgctgtacgactgccgtaccggttcggaattcccgggtcgacccacgcgtccgtcctcttctccgtcgcggctcagatcttttcgtgcggcgatggcgtcgttctcggaggctccccccgggaacccgaaagccggcgagaagatctttaagaccaagtgcgcgcagtgccacacggtcgacaagggcgccggccacaagcaaggtccaaacttgaacggtctttttgggagacagtcgggtaccactgcaggctactcctactctgcgggtaacaaaaacaaggctgtagtctgggaagaagacactttgtatgagtacctgcttaaccctaagaagtacattcctggaaccaagatggtcttccctgggctgaagaagccgcatgagcgtgctgatcttatcgcgtacctgaaggaagcaactgcatatttcattgacatggccttttgccttgatattgaaatattgttttgtcagtttatttattaaacttttttatacaatttttgttat

SEQ ID NO: 95329 - DNA, 502 bp, Zea mays
taattgagcgtacgcctgcagtaccggtccggaattcccgggtcgacccacgcgtccgcccacgcgtccgacttgaaatgattcataggggggaaaatgtaaggctcgagtctatcttctatggcggcctcgacattcatgacagacacagggacatgcgccttgacattgacaatatgtcctatgaggaactattagcacttgaggaaaggatcggaaatgttagcactggcctcagcgaggaagctgtgataaagttgctcaaacaaaggaaattttcatcgtggagactaaaagcatctttggacccagaaccatgctgtatttgccaggaagagtacgtttatggagacgatctctggaggctggactgggggcactactttcatgcttgctgcattaaacaatggcttttggtgaataaaatgtggcccattttgaaaaaaacttattgaaaggcctgacctaataaagggtaacatcctttgtctattgctattat

SEQ ID NO: 95330 - DNA, 510 bp, Zea mays
atatgatgtcgtacgcactgcagtaccgttctcgaattcccggctcgacccacgcgtccgcccacgcgtccgcccacgcgtccgctgtctcgtgggcgataatgcgccggcgctgagatgttggtttatcaagacctgctatctggcgacgagctcctgtcggattcattcacctacaaggagctcgagaacggcgtcctgtgggaggtcgagggaaagtgggtcacccaaggtcctgttgatgtagacattggtgccaattcatccgccgtgggttgtgaggatgaaagcgcttatgacacagtcgtgtatgttgttgatattgttgtcacaattctgttactggtgcatcctttttttgcctggtattatttttcttattcattattatttaccttttgtttttcatttgtttgtttgttcctttatatgcctgatgttttttaatgggttatttgggttctttctattttttttgtagtttattttaatgtcctatttttttttgtt

SEQ ID NO: 95331 - DNA, 527 bp, Zea mays
  unsure (1)..(527): unsure at all n locations
tgggtccgntnttnncttgaaatgcaaaccgtgcgcctgccgtaccggtccggaattcccgggtcgacccacgcgtccgcccacgcgtccggaagatggtgcgcaaggcgaaggttgagttcgacgagcagccgccggataacttcgacccgaagaacccgtatgccgacccggtggcgatgctcgagtaccgggaacacctggtgcgagagaagtggatccagatcgagaccgccaagatcatccgggagcgcctccgctggtgctaccgcatcgagggcatcaaccaccaccagaagtgccgccacctcgtcgaccaatacctagaggctacccgcggcgtgggttggggcaaggatgcccgcccgcctgaactccacgagcccaagaagaccgtcaaggcggagtagcggcgctgctgccttgcttctcgtgctgctgttcctggattggagaggtgatctgacccttccattgagttgaatgaagtagcctggaactgtggtagttcgtcttttacatcttag

SEQ ID NO: 95332 - DNA, 514 bp, Zea mays
  unsure (1)..(514): unsure at all n locations
ttcgtagtcgtacgcctgcagtacagtgctggattcctgntcgacccacgcgttcgagcatctgccttagagaaagcaatctacatacttgatggggacacacatcatgcttggggaatcccttagcatggggacaatttgaatattcaatcgctttgttgggactctgctggtgaatatctgtcttttgtcagagaagactcgttcagaatatggacattcagttctggacgtgatggtgaatttgtgcacgaattgaatcgcagtggaaatcattttcactcatgtgttttacacccaacttatcaaaccttgttagcgattggtctttacgagttcttggaacttttggacataatggagtataactccactactcttaacaatgcttattactgttttgtttcaatcctttctattattctattctacttgtttaggttcgctttttatagtcttgtatgggtctttataattctatgaatatattttgctttttaatctctttttggtc

SEQ ID NO: 95333 - DNA, 547 bp, Zea mays
gaatgaaagatcgtacgcctgcaggtaccgtccgtattcccgggtcgacccacgcgtccggataagaattgtggagctagattaaaggatacagttcttgactgggatgatgctttaccccctgaggagatgaatttggccacggagcattgtcgatcagctgatcttgttctatgtctaggaactagattactcctgcatgtaatatgcctctgatgtcaatcaagaagggggggacatagggaataatgttctggagatgaagaaacgcttgcgttggcttatctttttttcttttttatttttttttttatttatttttttattttttttattttttctttttttttatttttttatttttgttttttattattatttttatttttttatttatttttattttttatttttttatttatatttatttattttatttttttttctttgtttttttatctttcattctcttttttttacctatatatttgtttatgtttatgttgttttgttactctctatcattctgatattttcattttgtttt

SEQ ID NO: 95334 - DNA, 513 bp, Zea mays
tctaggacgctgttacgcctgcaggtactcgtctcggaattcccgggtcgacccacgcgtccgcccacgcgtccgcccacgcgtccggtccttggcagaaacgctggctgggtcccttggtgcatcaggatcttctggaaacgtggcatactatatgggtcaaatggctatggccatgggaaaacttgtcacactcgagaatttccttcgccaggctgacaatctacgacagcagaccttacatcagatgcatcttatcctgactatccgacaagctgctcgtgcgctttttgcaatccatgactacttttcacgttttgtctctctgagatcttattggtttgctagtgtttctttagttacattatttttattattgttctatttatttttttttattttttatttttttttcttgttttattatttttattattttttttttttattatttttttttttatttttttctattttttatataatattcttattattttatttttttttttt

SEQ ID NO: 95335 - DNA, 512 bp, Zea mays
tttgtatgagagctgttcgactgcacgtaccggtccggaattcccgggtcgacccacgcgtccggtctgttgaaatgcaccatgaggctctccatgaggcccttcctggtgacaatgttggctggaatgttaagaatgttgctgtgaaggatctgaagcgtgggtatgtggcctccaacttcaaggatgaccctgccaaggaggctgctagcttcacgtcccaggtcatcatcatgaaccaccctgggcagattggcaacggctatgccccagtgctggactgccacacctcgcacattgctgtcaagtttgcggagctcattaccaagattgataggctgtctggcaaagagcttgataaggagcccaaattcctcaagaatggtgatgctggtatggtgaagatggttcccactaagcccatggtagtggaaaccttttctgaatatccttctcttggtcgctttgctgtccgtgacatgaggcaaacggttgctgtctgagtcataaat

SEQ ID NO: 95336 - DNA, 510 bp, Zea mays
  unsure (1)..(510): unsure at all n locations
gtctgaagcagntacactgcaagtacctgtcctgaattcccgggtcgacccacgcgtccgcaaagattataagccctaatacggatgatgccaaatatgttataaatgtaaaacaaatcgcaaaggttgaggtcggatcgggagataatgactctccaactgatatacccgaagggttgaggttcgggtatggcatcctatgtttcaacttatatacttatcttatgtgacattgtcttcaacttgcatcatattacacttattgcgtcatgacaactacagcacaacgatgcatcaatgttcctacgtgcttgggctaaatgcattcttaaccggcctagaaagttgggtcattcctttcctgattgatttgctgtggttgtcatgtgttctatggatttatcctatacattatctacactataactttctatctattattattttcgattagcttcattttattctatgtactttttttgtttttttgtttattttttatcttcctat

SEQ ID NO: 95337 - DNA, 512 bp, Zea mays
ctattgtatgctgtacgcctgcagtaccgtccgaattcccgggtcgacccacgcgtccgggagaagcttgcgtatatagctcttgactacgagcaagagttggagactgccaagaacagctcctcagttgaaaagagctatgagctacctgatggccaagtaatcaccatcggtgcagagagattcaggtgccccgaggtcctcttccagccatccatgattggtatggaggctgctggaatccatgagacaacatacaattcaatcatgaattgtgatgtggatatcaggatggacctttactgcaacattgtgctcagtggatgttctactattttccttggttttgctgatcatattttcttggtttttttttattttgtttcttgttatatattgttttatgctttttcactttctttgattatgtttttattctatttttttttgttcttgtttttatttttttctttattattttttatttatattttgtttttttttattttttt

SEQ ID NO: 95338 - DNA, 521 bp, Zea mays
gtatagaacgctgtacgcctgcagtaccgtcctgattcccggtcgacccacgcgtccggactcgacctccgcttccagtcctccgccgtcgccgcgctgcaggaggccgtcgaggcctaccttgttggcctgttctaggttcacctaccttttctccatctcactccaagctcgttaccatctttcctaatgacatatatctctgtttttctattctcttttagctctcttattctgtctattcttattttccatttcttttagtctcattttcttttatttattattttttttatttattttcttttatttatgttttttttattttttttattatattcttttttatattttcttttttttatttatatttattttatttttttttttaatatataattatatatttttttttttaatttatttttttattttattattaatttttaatcattttttatttattattcttttttattaatttatatttattatctatcttctatttatttttatttatt

SEQ ID NO: 95339 - DNA, 518 bp, Zea mays
tattgatgtcgttcgcgcagcagctaccgtcctgaattcacgggtcgacccacgcgtccggaatcacacaacagcagctcaaaaaacctttcacacctcaacaagcagagcatagacccgggattcgtcggcgcggtagcgagagctagagatggacggttggatgttctgtttctagacctctctgtttgtggcgctgtatctccttctggacgtgctcttctgctactcctgctctgtctgttttctttcttttgtttgtttttttttttgttgtcttttattttctttatatttatttttactttttattttattattttttttttttatatttttttttttttttattttttttttttttttttttttttttttttttatttttttactttttttaattttagttttattttttcttttttttatttcttttttttttgtttttcttttttttttcttttttttttttttttttattttttattttatctttttttcttttttcttaatttttt

SEQ ID NO: 95340 - DNA, 517 bp, Zea mays
gattgtatgcagtcgcctgcacgtactgtccggaattcccgggtcgacccacgcgtccgcatgggtatccgtctgctcagttaaatgcgctgcattgatactacgctatagcatacccatgcggcgaccattatggactgtggatcgatggatgctgttactcctgtcaggatttgttctaagttaatcctaaggaaaaaatggtgcttcttggtgctgcaaaaaaaaaaaaaatgggcggccgctctagaggatccaagcttacgtacgcgtgcatgcgacttcatagctctcctatagtgtcacctaaattcaattcactggccgtctatttacaacttgttgactgggaaaaccctgtctgttacccaactctaatcggtttgcatcacatatgatatcttcccagctggagtaatattctattagcccctctacagatcgctactttgcaccattactacaactctcattggcgacagcattgagcttctcaggtggtggtttcggctttcct

SEQ ID NO: 95341 - DNA, 509 bp, Zea mays
ctgatttgaatgccggtacgcctgcacgtaccggtccggaattcccgggtcgacccacgcgtccggatgaatgctagcccggactgtgacttcgcccgattctgcgaccgcaagtacagacagctgatccatccaggcttggagtcctaactgatcgggacctcggattgcggaacactgccggtggtgagcgtggccggccaactctacgagctgttcgtggcaatggcaagctcgatctggacactccacaggttagcatgggcatactaccccgcagtcggcatattccaggtcggccggtgcgcatagttctcgacggtgtacatggagaacattgtccggtcgaagaagcgttttgctgagagcaaggagccccggaagccggtgctgccgaatgtcgtgttcacggtggtgccgtgctttcggctcggatggacagtgatccaatgtacggtgtttctgtgtcacggttagagggaagaagacattacatattcttgtttgag

SEQ ID NO: 95342 - DNA, 518 bp, Zea mays
tcatcatgctgtacgcctgcaggtaccggtccggaattcccgggtcgacccacgcgtccgcccacgcgtccgcccacgcgtccgaagagggcaccggtaatgtcaacgacgacggaggcggcaaagagcggctcagccgcaccggtgcggtgccagcggatcggctgcgacgccgtattcaccgacgatgacaaccgcgagggctcctgccaataccaccccttcgcacctatgtttcatgactgcatgaaagaatggagctgctgcaagcaaagaagccatgatttcagcttatttttgcagatacctggatgcacaacatgaaagcatacaaccgaaaaaccaatcacaaaagctgtatcatctaaccgtacaaaggcaacaccgatccagtcctctaaacatggtgtgggaggtgatgtgtgtgccaggtgttcgtaagggttccttttgcttcgatcatgggtcatatgttcaagtcctaaaatctagtttgttacgtctatttatacaaggta

SEQ ID NO: 95343 - DNA, 514 bp, Zea mays
  unsure (1)..(514): unsure at all n locations
taatgattgcatgnagcctcacgtaccggtccggaattcccgggtcgacccacgcgtccgatcaaggggaagggaatgattcagggtatctctgcagttggtgcattttttgagctgcttagtcaacccagcttaagtgtgcagcacccagaagaaaacaagcaggttgctccagctgagctatgcccaatcctgaagaggctttacagaatactgataaaaagggagctcccagcaagggacattcttcaagccctgagggacgaaacgatgaatgatcctcgggaaaggattgagatggcacaaagccatgcattctacctgccgtctttccttggaaaaccatgatctaantagtcttgtagattattagaatattaacggacgctgtgcttcatgttttttcactgtgctttgtgtccttgtgttctagctacattggggatggggctttgtctagtggctaattcttagtgtttccttgtttctatgttttcctgtagatttctgaact

SEQ ID NO: 95344 - DNA, 518 bp, Zea mays
attgtgaacgctgttacgcctgcaggtaccggtccggaattcccgggtcgacccacgcgtccgctgacgatgacggccggcgcgaacagcctgcacccgccggagtgcagcgtgggcgagacctgcgagaaggcgacgtcgtaccagttcgcggtgctcttcgtggccttcgcgttcctggtgctgggctcggcggggatccgcccctgcagcatgcccttcggcgccgacctgttcgaccccaacacggagtctggcatgcgcggcatcaacagcttcttcaactggtactactttaccttcacggccgtcatgattgatctttgtcaccgtcatcatctactttctgtgcttcttgtgctggcccttctgtctgttctttctttcgtgattttttgttcctggtttgccttctctctttttttgtctctcgcctattcttctgtttactttctattttgtcttctttttttttcttttttttttttctttttttctatttttattattttgttttt

SEQ ID NO: 95345 - DNA, 525 bp, Zea mays
  unsure (1)..(525): unsure at all n locations
ttgtattactacgtttgattgcggtacgatngcacgtaccggtccggaattccattgtcgactcgcgcgattcgtccacgccacgcgttcgctcagtcggcagtgctgtgttcattctcggctccagcatacccatgcaggaaccatcatggactgtggatcgatggatgctgttactcctgtcaggatttgttctaagttaatcctaaggaaaaaatggtgcttcttggtgctgcaaaaaaaaaaaaaaagggcggtcgctctagaggatccaagcttacgtacgcgtgcatgctacgtcatagctcttctatagtgtcacctaaattcaattcactggccgtcgttttacaacgtcgtgactgggaaaaccctggcgttacccaacttaatcgccttgcagcacatccccttttcgccagctggcgtaatagcgaagaggcccgtaccgatcgctcttcccaacattgtccattctgaatggctaatgggactcgccctgattcggtgcattaagctcggcgg

SEQ ID NO: 95346 - DNA, 516 bp, Zea mays
ttggtagctctacgcctgcacgtaccggtccggaattcccgggtcgacccacgcgtccgcccacgcgtccgcccacgcgtccgcccacgcgtccgcccacgcgtccgcccacgcgtccgcccacgcgtccgaggaaggggtccaataaaaaaaaaaatcgccgccgtcgcccagcggaccttctcctcctcttccccgcacgccccgccgctggctgcgtcgggctacaccccgcgccgcgagtacggcctggtgcccatggtgatcgagcataccttccgcggggagcgcgcctacgacatcttctcgcgcttgctcaaggagcgcatcgtatgcatccatggccccatcactgacgatacggcgttcctcggcgtcgcccagctgctcttccttgaatccgaaaaccctcgcaagcccctccacctttacattaaactcccggggggccgtttcactgcaggccttggcattaacaataccaagcaattaaattcgttccctctaaacacactt

SEQ ID NO: 95347 - DNA, 516 bp, Zea mays
tactatgatgtcgtactgcactgccgtaccggtccggaattcccgggtcgacccacgcgtccgcccacgcgtccggcaaagacgaacgaagtatacaaggttgatgagaggggcatacgctggttctacactggtgatattggtcagttccatcctgatgggtgccttgagattattgacaggaaaaaagatatagtaaagcttcagcatggagaatatgtgtctcttggcaaggttgaatcggctctagcaacaagcaactatgtggagaacatcatggattatgccgatccatttcataactactgtgttgccctggttgttccagcgcaccaggccttggagaagtgggctcagaattccggataaactatgaatgctttgcatagctttgccaaaactacctaacaatttatgaggttcatctatcgttattaaaggccttataagcctccaggctcgagtaattctaggtgcctgcttaaattttgctttttgctttatccatgtctttat

SEQ ID NO: 95348 - DNA, 511 bp, Zea mays
ctacttgacactgtacgcactgccgtaccggttcggaattcccgggtcgacccacgcgtccggacaaagtgaaccgaccaccagcgaccttcgtgaaggtttacaaatctggaacctacgggaggtcgcttgatatcactaggtttagcagctatcacgagctccgtagggaactggggcgcctatttggccttgagggccagttggaagacccattgagatcaggctggcagcttgtattcgtcgaccgtgaggaggacgttcttctcgtgggcgacgacccttggcagtaagcactgcatgcgacgttgattcttttttttttctgcattcttcctcacattgcgttggcaacccaaccccacagggaattcgtgagcacggtgttctgcataaagatccttctcccgcatgatgtgcatcagatggggaagcatggcctggagctcctgacttgggccccgtgcggagcttcgttgcagttgttacaacactttagcaggcaggattt

SEQ ID NO: 95349 - DNA, 486 bp, Zea mays
gaatggagaccgctacgcctgccgtaccggtccggaattcccgggtcgacccacgcgtccgctcaaatactgatctcactgatccagtatggctatggcaaaggcaggcgcgccgagggtctcggcggcccagctggtggctctcgggctagcgctcctctgcgctgtcgccggcccggccgccgcgcagaactgcggctgccagccaaacgtctgctgcagcaagttcggctactgcggcacgaccgacgagtactgtggcgacgggtgccagtcgggcccgtgccgctcgggcggcggcggcggcggcagtggtggccgtggtgcgaacgtggctagcgtcgtcaccagctccttcttcaacggcatcaagaaccaggccgggagcgggtgcgagggcaagaacttctacacccggagcgcgttcctgagcgccgtcaaggcgtacccaggctttgcccatggcgggtcgcaagtgccaggcaa

SEQ ID NO: 95350 - DNA, 474 bp, Zea mays
  unsure (1)..(474): unsure at all n locations
ttcttcagcccgtcgcatgcacgtaccggtcccgaattcccgggtcgacccacgcgttcgnacacgcgttcgggcatgggttccttttaccctctttgatactgattggatgggccgagaaatctatcgaggaagcccagacaacccatgagagacccaaaggtaccatgatggtgtgagaatgggttcttttggtctaatgctcaactctgtcgtccttggattcacctctgttgtgctagaaaagttatgtatgaagtggggagctggacttgtatggggtgtcttcaatattctaatgactttgtgcttcttggcaatgcttgtgataacatatgttgcaaagaacatggattatccattcagtggtgcaccatcgactggcattggccgtgcttctttggtgggttttacaaattttaggggacccctgtggatcacattacggattacctattccatgggtgtttattt

SEQ ID NO: 95351 - DNA, 488 bp, Zea mays
ctagggcaatcttttacgcctgcaggtaccggtccggaattcccgggtcgacccacgcgtccgggtagctgcagctggggctagctggaaaggtcgggagccatggggaggggccgggtggagctgaagcggatcgagaacaagatcaaccgccaggtcaccttcgccaagcgccgcaacggcctgctcaagaaggcgtacgagctctccgtgctctgcgacgccgaagtcgcgctcatcgtcttctccaaccgcggcaagctatacgagttctgtagcggaccgagcatcacgagaacacttgagaggtacgaaaaaaacagttatgcatgcccagatactgctgtacagaacatagagaacgagttagtccagaacagccgcaatgagtaccttaaactgaaagcaaaggtggataatttacagaggactcaaaggaatttgcttggtgaaaatctgggttcacttggggtcaaagagcttgatct

SEQ ID NO: 95352 - DNA, 494 bp, Zea mays
  unsure (1)..(494): unsure at all n locations
tgttagtgccgtatttctcaccgttgcaaaccggtacgcctgcacgtaccggtccggaattcccgggtcgacccacgcgtccgcccacgcgtccggtggcgttgaaaggaaggacttcaactcatatggtagccgaagaggaaatgatgagatcatggctaggggaacctttgccaacattcgtcttgtgaataagttcttgaagggtgaggttggacccaagacaatccatgttccatctggggagaagcttgcagtttttgatgctgctatgaaatccaagaatgaagggcatgacactattatcctggctggtgccaagtacggaagtggaagctctcgggattgggctgcaaagggcccaatgctgcagggagtgaaggctgtgatagcaaaaagctttgagaggattcaccgaagcaatcttgctggcatgggaataatccctctatgcttcaaagccggagaggatgcaaacaccctgggcctaaccn

SEQ ID NO: 95353 - DNA, 488 bp, Zea mays
cactcacgacacctgtacgcctgcacgtaccggtccggaattcccgggtcgacccacgcgtccgcaagcaaagcaatcagagccaagcacccaccgtcctcctttctttccttcgactcatcaaagcatgtcttgctgcggcggcaactgcgcgtgcacctccggctgcaactgcggcagcggatgcggcggctgcaagatgttccctgacgtggagaccgccggcgtcggcggcgtgaagcccacggtcctcgccgcccccgccaccaaggcgagcgccggcgggttcgaggcggccgccgagggcggcggctgcgactgcaacacctgcaactgcggcaccagctgcggctgctcctgctgcagctgcaactgagccacccgcgatgaccagacaaccacccgggcttccccccacccatcggactacaactatgtagcggcgtctaaataaaaacccttcaccggccaccgccattggttcttct

SEQ ID NO: 95354 - DNA, 521 bp, Zea mays
tgtccgtatgtcattgtacggatagcggtacgactgcacgtaccggtccggaattcccgggtcgacccacgcgtccgcccacgcgtccgggttattcccaatacacattgattggacgggattggaaaaaattgtgaggaagtttgacttgtttgggattcaaacccatcgaatcccgctcaatccacatggattgagagctaaccgaacaagcccgtaatgtattccttggtttctgctttcccggacgcgtgtgtgcggaagccaaactggatgaggcacttcaaattgatcccaacacgtccgatgcactctggtgcttgggaaatgctcagacctctcatggattcttcactccagacaatgcaatagctaatgagttctttacaaaggcaaccggatgttttcagaatgctgttgatgtggaacctgcaaatgagctgttcaggacgtctttagacttgcaaatgaatgcacctgaactgcatttggatatccaaaagcaaattggtttctcaagc

SEQ ID NO: 95355 - DNA, 470 bp, Zea mays
gactgatgcctgtcgcctgcacgtaccggtccggaattcccgggtcgacccacgcgttcggtcgaagatgctcgagactatcaggtctctgatacagcgcctggagaaagtcgacccgttgaagatgacgcacgaggagcagctctgcttttggatcaatatccacaatgctctggtcatgcatgcttttctggcctatggtctgcacgacaagcgcatgaagagcacggacatgattctgaaggctgcgtataatgtttgcggccaattcagtaatgcgccgacctttcaaaacctcgatcttgggattccaagccattgggcaataattggggttcccgcccctgttaaccccggcaaaagaatccgcggcaaggaacccgattgcgttcaagaacccataacccgttggccattttcggcttttaaccgaacgtttttgaaccaactgtgccgcttgcaacggcaat

SEQ ID NO: 95356 - DNA, 485 bp, Zea mays
ctattgtacgctggtacgcctgcaggtaccggtccggaattcccgggtcgacccacgcgtccgcccacgcgtccgatcacgcgtacggccacgcatgctcggacgcttgagctcgaatcatgtcgtacaagccggcattgtgaagaaggagcacatcaagattcatggtttctgagcaaccgccgggtccatatcaaaccaaccctgcatgcagggcatcttattatatataatatctgaggtggagcatatctatctggctgtgtactgcaagcaggcctagtacgccgtctgcgcgttcctcctattacacatataggcccctccctgcgtgtatgcttgttaccgtcgtgttcaaccttgtactacgaggctccatcgaacatcgatggcttgcttctttatcagaacatgtttgaataaaaaaatttcagtttattaaaaaaatagggcggccgctttagaggatccaagctttctttccc

SEQ ID NO: 95357 - DNA, 472 bp, Zea mays
ccctagatagctgtcgcctgcaggtaccggtccggaattcccgggtcgacccacgcgtccgcccacgcgtccgcccacgcgtccgcggacgcgtgggctttccccgtgcttctccgccgtcgaggccgcgtcccagtgcgaagagaccacgactcagatggccagccgctgggtccggcccgaggtgtacccgctgttcgcggcaacgggcgtggccgtcggcatctgcggatttcagctcttccggaacatcaccggcaacccggaagtcagggtaaacaaggcagggagggcagctggtgtgcttgagaaccatgaggaggggagacgttacgccatgcatggcctaagaagctttgtgcacgacaagactcctgagatcatgcctgcagttaacaagttcttcactgaccctaagtgaagcatgttgattggcatactactactactactacttgctactgtggatttt

SEQ ID NO: 95358 - DNA, 483 bp, Zea mays
gaatgagacccctgtacgcctgcacgtaccggtccggaattcccgggtcgacccacgcgtccgtgatcgtccaggatctgccttccttgggctggggagtaagaaaagatctggctatctgctggtgcatcttgcttaggcagaaggtcgatgaaacttattgctgtgtgcagtatcttgaaaatcatctggagcttttagatttccttgttggttgctacaagaacttggatattgcattgaactgtggaaatatgttaagagaatgcataaagtaccctacacttgcaaaatacatattggaatctggtagctttgagctgttctttgagtatgttgagcttccaaactttgatattgcttcagatgctctgaacaccttcaaggatctgcttaccaagcacgaagttgtagtcgcagagttcttgagttcccactacgagcagttttttgaactctactcaaagctcttgtcattaactg

SEQ ID NO: 95359 - DNA, 524 bp, Zea mays
  unsure (1)..(524): unsure at all n locations
cgctccgtnatgacttttgacggatntccggtaggaatgcacgtaccggtccggaattcccgggtcgacccacgcgtccgcccacgcgtccggaagatggtgcgcaaggcgaaggttgagttcgacgagcagccgccggagaacttcgacccgaagaacccgtatgccgacccggtggcgatgctcgagtaccgggaacacctggtgcgagagaagtggatccagatcgagaccgccaagatcatccgggagcgcctacgctggtgctaccgcatcgagggcatcaaccaccaccagaagtgccgccacctcgtcgaccaatacctagaggctacccgcggcgtgggttggggcaaggatgcccgcccgcctgaactccacgagcccaagaagaccgtcaaggcggagtagcggcgctgctgccttgcttctcgtgctgctgttcctggattggagaggtgatctgacccttccattgagtttgaatgaagtttccttgaactgtggtagttctgttttttatt

SEQ ID NO: 95360 - DNA, 541 bp, Zea mays
atgtgccgtgttgtgttagaattggaaatccgctgcacgtaccggtccggaattcccgtggtcgacccacgcgtccggtaagatcagaatttctcagcaccggaggaactgtttcttctctatcttcagcttctaacgaacggtctccatcaagtcagccggtggaaccattctcaaactttggtgccccttttgacaggtaggtctactttagagacgagacatatctcaccaagttcacgtgtgatcagcttaatcattaccgatcagattcagtctacctatgatcttatatactactggataatatcctacattggtgtgtacctttacacgtttatttctactattgttttgctgtctgtctgattgcttattattgtgtttatctatattaaaatgggcgcttcttgtattgtttttatactttttatcttaatttatcttgttctgttactcttttttgaatgttatgtcttttaaatctatttatctttaaattctatttttgttaaatattatcttttttttatttatggat

SEQ ID NO: 95361 - DNA, 480 bp, Zea mays
atagtgaaccctgtacgcatgcacgtaccggtccggaattcccgggtcgacccacgcgtccgagcaccttcccaaaaaaatcccccattttcttcgaggcgaggagagcgtgaaagacagggcaccggcagcgacgatgtcggggcgcggcaagggcggcaaaggtctgggcaagggcggagcaaagcgccaccgtaaggtgctccgtgacaacatccagggcatcaccaagcccgcgatccgtaggctggctcggaagggcggcgtgaagcgcatttcggggcttatctacgaggagacccgcggcgtcctcaagatctttctcgagaacgtcatccgcgacgccgtcacctacaccgagcacgcacgccggaagactgttacccgcatggacgtcgtctacgcgctaaaccgccaggcccaaccctctaacgcttttgaagctaagctggatgcctcttctccttgctggcgtggatg

SEQ ID NO: 95362 - DNA, 478 bp, Zea mays
gttccgtacgccggtacgcctgcacgtaccggtccggaattcccgggtcgacccacgcgtccgacctgatttgtttaccccccgaaaatttgccgtctcctcgtctcgctcctctccctgcgcagcccccagatccggcaccgcccgctcctcgatccccgcaccccacgcccgcaggccgggaccggcggggtcgcgcgccgggtaggaggaggagaagaggaagggcggtatggcggcgccgccggcgagggcccgggccgactacgactaccttatcaagctgctcctcattggagacagcggtgggtgctgctagatctctctgtctcagtaaacgggtgtgtaagggcgtacgctctacacccgctcgcgttcgtgggatcggagttggattccggtgttggcaagagttgccttctgttgcggttctctgatggttccttcactacaagctttattaccacaattggtattt

SEQ ID NO: 95363 - DNA, 523 bp, Zea mays
  unsure (1)..(523): unsure at all n locations
cggtccgtattgtccttgaactgaangccggtacgcctgcacgtaccggtccggaattcccgggtcgacccacgcgtccgcccgagtgcaacgtcatcgaggaggagggcccgtacgaggacctcgccggcgatagcggcctctcccgccgctgccagatcatactcggcttcctcaccttcgtcctcctcttcaccgtcttctgcctcatcatctggggcgccgcccggccgtacgagcccgaggtcatcgtcaagagcttggtgatggacgacttctacgcgggtgaaggcacggaccacagcggcgttccaacaaaattggtcacaacaaactgttctctgcacatagctgtctacaaccctgccacaatgtttggaattcatgtcacttctggccccatccacctgatgtattcagagatcccaatagcagtcggtcagagcttggtgatggacgacttctacgcgggtgaaggcacggaccacagcggcgttccaacaaaattggtcacaacaaactg

SEQ ID NO: 95364 - DNA, 480 bp, Zea mays
ctattgatcgccggtacgcctgcacgtaccggtccggaattcccgggtcgacccacgcgtccggacccacgcgtccgcccacgcgtccgcggacgcgtgggtcccagcgcacagctctcctcatcggcgcacccgagctcgccctctccttcctcatcgaggcccgagtcctgctctgatggcgaccgacgtggctgagactcccgcgccgttggtggatgcggcccctgaggcgcccgcggacaccccggcggcgcctgctgttgacgcgaagccggccaaggccaagaaggccacagcgccgaagaagcgcgccagcccgacccatccgccgtacgccgagatggtctcggaagcgatcgcgtcgctcaaggagaggacgggggccagcagctttgctattgccaagttcttggagggcaagcacaaggacaagcttccgtccaaacttcggaagcttttgaaccgtcaacttaagag

SEQ ID NO: 95365 - DNA, 505 bp, Zea mays
  unsure (1)..(505): unsure at all n locations
tgtctatgtgtcncntattgtcctccaccataggacacctgtacgcctgcacgtaccggtccggaattcccgggtcgacccacgcgtccgctccacttggcgagaacacggtcctcttgaggggccccaagaatgcccgtgaggcagtgaggcactttggcaaggctcctggagtgccgcacagccacaccaagccgtatgtgcgctccaagggaaggaagttcgagaaggctcgtggcaagaggaacagccgtggattcaaggtttaaaacaaattgtggccctccgtgttgccatcagcatagtgcaaccgttgtgtttgatcaatcgacagtaattagtcatcactctgtaccgagattagtagcacaatttgttgtcctggtttgaattttggaagatatttgatgtcgtctccttattatctactcgttactggttgagcacgaagattgttttgtgatactcctacatgatttaagacggttcccgacgttccatgttn

SEQ ID NO: 95366 - DNA, 480 bp, Zea mays
  unsure (1)..(480): unsure at all n locations
cttatgatgacggtctgcctgcacgtaccggtccggaattcccgggtcgacgcacgcgtccgnccacgcgtccggagcatcttcggccgtttccttctgcacgtctaccccggtgaaacgttgtgcactgagatgtggcttgacggccagaaggtgcactaccaaacgaaggccaaggagcggaatcgcgctgtcctctctggatatgtgttgctccagcacatcccctcgtcattgtaagtaaaagttttggttcttaaaattggtgcccgctgaaagcatttggcttggctgggataaattgagcacgaagtgggctgccactgtaatgatagccatgtatgggtctgcacataacacattcgtaccggattgattagaagcacgtaccacttaaaaaaaaacaatattgtttttaataaaaattatatatttaatacaactacaatattttataaaaatatcaggctgggccatgtt

SEQ ID NO: 95367 - DNA, 478 bp, Zea mays
accatagatcactggtacgcctgcacgtaccggtccggaattcccgggtcgacccacgcgtccggtcatcatttttccccatctctgttggattttctgcatcgagtactttcagtgatctgaaggttactggaatccttcctctgaaggaaggcaaccctccgaagttttcccagcgggctcgtttgctcacagctaactatcaagttgtttaatggttgtaccgttgtccgagtgttgatccacttaaatatattcgaatagcatatttttgtgacatggtatgctactggcatgaacttttgcaagtcatgggatggaagatcattttgggttttgaaaatctttactatgtgcttctcattggtagcatgttgcacaaatgttctgatgtgttgctaccagagaaataagtaatgttcttgcctttcgtttgcctgcattttgtacccgttctttccccttgagggtaatcttt

SEQ ID NO: 95368 - DNA, 522 bp, Zea mays
  unsure (1)..(522): unsure at all n locations
ggtccgnatccnatgaactgagaccgntcgcctgcacgtaccggtccggaattcccgggtcgacccacgcgtccgcccacgcgtccgagcagccaaaggacaagacaagagacacaacgaaaggaaaggaaccaagagaaagatcgagaagagaggagccttcgcttttggacttgcaccgtcgtgatctgtcccgcgaccacatgaggatccacccagcatcccccaccgccggcggcaagaaggacctccggcgcctgccgcacgtgtacagcaaggtgctggagctgccgctcccggcggacaccgacgtccaggtgttcgaaggcccagacgccttccacttcgtcgcggcgccggccgccggtgcgcgtgccgccgccaccgtgcgggtgcgcaccgtcaggatccaccccggggtcaccaaggtcgtggtgcatgccggagccgccgaacgggccgcttacgacgacgccgtcagcgacagcatggagctcgacaggtggcggtcccggcttgcct

SEQ ID NO: 95369 - DNA, 505 bp, Zea mays
atggtttgaagctggtcgcctgcaggtaccggtccggaattcccgggtcgacccacgcgtccggatgaattctagcccggactgtgacttcgcccgattctgcgaccgcaagtacagacagctgatccatccaggcatcgagtcctcactgttcgggaactcggagtgcgggacactgccggtggtgagcgtggccggcccactctacgagctgttcgtggcaatggcaagctcgatctggacactccacaggttagcatgggcatacgaccccgcagtcggcatattccaggtcggccggggcgcagagttctcgacggtgtacatggagaacattgtccggtcgaagaagcgttttgcggggagcaaggagccccggaagccggtgcggccgaaggtcgggttcacggtggtgccgggcttccggctcggagggacagtgatccagtgtacggtgtatctggatcacgggaagagggaagaagacattacagattcggtttga

SEQ ID NO: 95370 - DNA, 522 bp, Zea mays
  unsure (1)..(522): unsure at all n locations
gttccgnttttcnattgaatgagactggtcgcctgcacgtaccggtccggaattcccgggtcgacccacgcgtccgcccacgcgtccggtcagttgttagtgctgtgttcatcctcggctccagcagacccatgcatcaaccagcatggactgtggatcgatggatgctgttactcctgtcaggatttgttctaagttaatcctaaggaaaaaatggtgcttcttggtgctgcaaaaaaaaaaaaaaagggcggccgctctagaggatccaagcttacgtacgcgtgcatgcgacgtcatagctcttctatagtgtcacctaaattcaattcactggccgtcgttttacaacgtcgtgactgggaaaaccctggcgttacccaacttaatcgccttgcagcacatccccctttcgccagctggcgtaatagcgaagaggcccgcaccgatcgcccttcccaacagttgcgcagcctgaatggcgaatgggacgcgccctgtagcggcgcattaagcgcgggg

SEQ ID NO: 95371 - DNA, 478 bp, Zea mays
  unsure (1)..(478): unsure at all n locations
cactgcagaatcgtactgcatgcacgtaccggtccggaattcccgggtcgacccacgcgttcggaatgctcggncttgagacctaccctggcgtcaagcgcatcaccatcaagccccagactgaccgctgggtgttccccgagaccaacactggcatcattgtccttgctgagggtcgcctgatgaaccttgggtgtgctactggccattctagctttgtcatgtcctgctcattcactaaccaggtcattgcccaacttgaactgtggaaggagaagagctctggcaagtatgataagaaggtgtatgtgcttcccaagcaccttgattagaaaggtgctgctcttcacttgggcaagcttggtgcccagcttaccaagcttaccaagtcttaaggcgactaccttaacgtgccgatccgaggttcctaccagccttgccactaaccgtacttaggaagccggacacaggtttgaat

SEQ ID NO: 95372 - DNA, 476 bp, Zea mays
  unsure (1)..(476): unsure at all n locations
ggactgaataccgctacgcctgcacgtaccggtcccgaaattcccggtcgacccacgcgtntcgccacgcgtncgccacgaggcacttcaggaggctcttccgggtgacaatgttggcttcaacgtgaagaatgttgctgtcaaggatctcaagcgtgggtttgtggcctccaactccaaggatgaccctgccaaggaggctgccagcttcaccttccaggtcatcatcatgaaccaccctgggcagattggcaacggctatgcccctgtgctggactgccacaccttccacatcgctgtcaagtttgctgagctcattaccaagatcgacaggcgctctggcaaggagcttgagaaagagccaaagttcctgaagaacggtgatgctggtatggtgaagatgatacccaccaagcccatggtggtggagacattcttagcgtattctccccttggtaggtttgctgtccctgaca

SEQ ID NO: 95373 - DNA, 473 bp, Zea mays
  unsure (1)..(473): unsure at all n locations
cactgcatgctggtcgcatgcacgtaccggtccggaattcccgggtcgacccacgcgttcgcccacgcgtccgcccacgcgtccggcgggctggcggctggctttgggcgtgcagcaggtgtgggctagccgctttgggcgtgcggcggcacagcggcaccgacgcaccgtggtgggctggtgggcggtggcactgcggcagctgggcgcaggcactgcggtctgcggcagccgggcgctggcactgcggtctgcggcggccgggcgccgacaggagcagccgagcccttcggtcctctgcgtctcctccggttgcttcagagtctgcctttagtgctgctggccgggttgttgatccatatcgcaatcgncttgaccctgagatggtacaagcacttatatgcactaaaaattggattcgtgcatcaagaaaagattcagtaattattcattctaatttgactggtctaaaa

SEQ ID NO: 95374 - DNA, 509 bp, Zea mays
  unsure (1)..(509): unsure at all n locations
tgtaagtgtcgcttttgagaccgaatggagntcgtactgcatgcacgtaccggtccggaattcccgggtcgacccacgcgtccgctccaggtcaattgtgggtgcttccttggaagtaatccagaagaagagagctgagaagccagaggtccgcgatgctgctagagaagctgctcttcgtgagatcaaggagcgcatcaagaagaccaaggatgagaagaaagcgaagaaggcggaggtgagcaagtcccagaagacgcagacaaagggtgcggtccagaagggttccaagggccccaagttgggcggcggtggtgggaagcgctgaaagaacttagtgtcgtttctcgacattgcagtcgttccttaaccaaagccactttcgtagaacctgtgttgaatttgcaagacttattcaagcgttgcttgtgcgtgctaaataccatggcaagaagacggatttatatttatgcctgaaaaaaaatgaccgttcatattcaaaaaaaaaa

SEQ ID NO: 95375 - DNA, 500 bp, Zea mays
gttatgccgctatgcgcccacgtagaatctggtacgcactgccgtaccggtccggaattcccgggtcgacccacgcgttcggccacgccttccggcttggatgacattgagaagatcaagggccagcttgaagcttccaacaaggctgtctcgaagattggacagcacatgtctggtggtggctctggcggctcgcaatcaggatctggacctcagggtggcggcgaccaggcgccggaggcagagtatgaggaggttaagaagtgaggctgccggagttcaagggaattgtaacggcttgtttagaagtagctcgcttttttttgggaacgcacatagtcagatgtctcagatgaggtgttacccgtgttgcaataatctatgaactttcacctcttgtgttctcctgcagtgaaacacgggtcacaacattgtcataggtcttattgcgcatataaccccttgtgccccaaaaaaaaaatattctatttttataataa

SEQ ID NO: 95376 - DNA, 514 bp, Zea mays
  unsure (1)..(514): unsure at all n locations
gtccgnnntgcatgaatgaagcctgtcgactgccgtaccggtccggaattcccgggtcgacccacgcgtccgcccacgcgtccgcccacgcgtccgcccacgcgtccgtccgtctccaaatcctcctagcgaattcaccacagcttctcaccaccgctaccttcgatggcacccaaggcggacaagaagccggcggcgaagaagcctgcagaggagcccgcgacagagaaggcggagaaggctccggcggggaagaagcccaaggccgagaagcgcctcccggcgggcaagtccgccggtaaggagggcggcgagggcaagaaggggaaaaagaaagcgaagaagtccgtggagacctacaagatctacatcttcaaggtgctgaagcaggtgcaccccgacatcggcatctcgtccaaggccatgtccatcatgaactccttcatcaacgacatcttcgagaagctcgcggccgagtccgncaagctggcgcgctataacangaagcccaccg

SEQ ID NO: 95377 - DNA, 526 bp, Zea mays
  unsure (1)..(526): unsure at all n locations
cggtccgnattgtnctttggatcgatagctggtacgcctgcacgtaccggtccggaattcccgggtcgacccacgcgtccgcccacgcgtccgcccacgcgtccgcccacgcgtccgcccacgcgtccgcccacgcgtccggcaagatcaacgtcgtcgttcaagccagccagcggtagagccggtagtagagactacgaccgaggctagctaagctaagagatggcggatcaccagtactcggcgtggacgacttccgctgctcgtcatcgggtcttctcctgtgcgctcatggctcttgttagttttgtggctgcaggacgacccattgtgctcgccgacgccatcgtctttcacgtggcgaacaggtgcccgttcccggtgtggccggcgtccgcccctaacaccggccacccagtgctcgccggcggcggcttctacgtcccgcagggcaagtcgaggcgcgtcgtcgcgccggccaactggaacgggcgcttctgggctcgcaccgggtgcaacttcaccg

SEQ ID NO: 95378 - DNA, 515 bp, Zea mays
agtccttatttccttgaatgaatacgttggactgcacgtaccggtctggaattcccgggtcgacccacgcgtccgcccacgcgtccgcggacgcgtggggtggttgtgtgcctttcggctggtgtagcattgagaggaggcgctgttccagttccagttccaggatgagcaaggaggatgtgctcaaggtgcagactttgatgctgagagtgaacatacactgtgacgggtgcgagaagaaggtcaagaagaccctccacaagatcgacggtgtctatcagagcagcatcgacgcggaacaggggaaggtgacggtgtccggcctgctggatccggacaccatcatcaggaagctcaacaaggccggcaagccggcccagctgtggggctccaagcctggcgtccctcagaacggccatggcggcggcaaaggccagcctaaggacgccggcggtggcaagggccattccaaggatgccggcggtggcaaggcccaaaagggcggtgccggtggg

SEQ ID NO: 95379 - DNA, 492 bp, Zea mays
  unsure (1)..(492): unsure at all n locations
gaaatagaaactgtacgcatgccgtaccggtccggaattcccgggtcgacccacgcgtccgctcctcaccgctcgtgctctctctctctctctcggcgccgactcggctaccgncgncggcttacggaagcttcccaggtcttcgtcaggcttttctccggcaacgagcaccctgcacagatcgtgaacctccacacctcaacgatagatggcggggttcagaagccttgcacccaagaccaggaacctggtggtggccgggggactgtctggcttcgtgctcggggtctactacttcaccatgagagccgttggaggcacagacgaactacaagtggcgatcgaccagttttgagagacccaaaaaccaggagcttcttgaaacttcaactttagcgcacgaaggtccttaaatcataagcacgcgggcacacccccggaacttggtgaagctctaatgggtgacatgggcccacaacactgacacttttt

SEQ ID NO: 95380 - DNA, 554 bp, Zea mays
tatgtgatatcggttgacggtcgactgcacgtaccggtccggaattcccgggtcgacccacgcgttcggttctagatcgcgagtggccgctgccaccgtcttcgacgaagcggctgctgccggcttcgggcttggccacggcgcgcgtttcgcgcgcaagcatggacgtgctgccgctgagatgccccagtcggagccacaacctaaaactaagccggagccccatatgcagacactgacccagccagaacctaaaccgaaacctatgccacatccagagccaaagcctgaaccttaaccaaagcccaaccctgaacctcaaccaatgcccaagccttaaccaaaatccaaaccagagccattgcctacaccgaagcctgaacctaagcccgaacctaagccagagcctaagcccgaacctaaaattaaatcaaagcccaaacctggaccaaaaccagagcctatagcagagcataaacctgagccaaaagcagaggcttaaaccaaactgaagcagaggcaaaggccgagctcaaccataaccttgggctaaa

SEQ ID NO: 95381 - DNA, 550 bp, Zea mays
  unsure (1)..(550): unsure at all n locations
agtgttactgatgctgtcgactgacgtaccggtccggaattcccgggtcgacccacgcgtccgcccacgcgtccggctccccccgcaaaaaccctagctttacctccccacaagcgcctccaagatgaagctcgtcaggttcttgatgaagctgaacaacgaaacggtgaccatcgagcttaagaacggcaccgtcgtacacggaaccattaccggttatccggtcgattatggtttacatatacggacagctatcttcagatagtgttgacatcagcatgaatactcatctgaagactgtgaagctgacactaaaagggaaaaatcctgttacccttgatcaccttagtgtgaggggaaacaacatccgctattatatccttcctgacagcctaaacctggagactttgctggttgaggaaacaccaagggtcaagcctaagaagcctacttctgggaagcccttgggccgtgggcgtggccgtggtcgtgggcgcagttcgggtctgggaccttgagcatgctaactgctttttggaaatggattggn

SEQ ID NO: 95382 - DNA, 561 bp, Zea mays
  unsure (1)..(561): unsure at all n locations
ntgtgattttgaagatatctgtacgcacgacgtaccggtccggaattcccgggtcgacccacgcgtccgcccacgcgtccgcaaggctaagcgataccttgaggatgttattgctcacaagcaggcaattcccttccggagatactgtggaggtgttggtcgcaccgcacaagcaagtctcgccactccaatgggcacggtcgctggcctgttaagtcagccaggttcatattggatttgctgaagaatgctgagagtaacgctgatgtgaaaggcttggacgtggacaacctctatgtttcacacattcaggtgaaccaagcccagaagcagaggcgccgcacctaccgtgctcacggacgcattaacccttacatgtgcttcccttgccacattgagctgattctgtcagagaaggaagagcctgtgataaatgacgctgacaacattgtcgcggcaaggaagcagtgaagtatgttaacctgctgataatggcattctttcgaagcattatatccgtagctcttttatgtaccttttcaagcctgtaccgaatccgtg

SEQ ID NO: 95383 - DNA, 522 bp, Zea mays
ctactgatttctgataccctgcacgtaccggtccggaattgccgggtcgacccacgcgtacgcccacgcgtccgccaccctccagcgcctacaccctcctcgccgcctcactccctctgaggtcgcagatccgtccggttagacgaagccggccgcacccatggcctccggtgagctcgcctgcacctacgccgccctcatcctcagcgacgacggcatcgccatcaccgccgagaagatcgccaccatcgtgaaggcggtcaacatcaaagtcgagtcctactgcgcggcgctcttcgctaagctcctggagaagcgcaatgttgacgatcctattcctctccgttgaatctgctgatgcgcttgttcaatttgctggttgccgccccagctgaaggtgcttgagttgctggtggccctggttcaaaaggaaagctaagaaagagccccatggaggaatttgatgacaacatgggcttaaacctgttcacatgaggagggccttggttcccaaccttttaa

SEQ ID NO: 95384 - DNA, 512 bp, Zea mays
tctgaatgcggtacgcctgccgtaccggtccggaattcccgggtcgacccacgcgtccggcgggaggggagaggggcaagtgcgagtggtggtggtcgctgcgtcgtcggcggcggaggcacccagacccagcagctattgtggtcgtccctcagccgcgtcgcaccgcatcgcattctacgattcgaagctctctctgctcgcagccatggcgaagaattacccaaccgtgagcgccgagtacagcgaggccgtcgagaaggccaggcgcaagctccgcgccctcatcgccgagaagagctgcgcgcccctcatgctccgcctcgcgtggcactccgcggggacgttcgacgtgtcgtcgaggaccggcggtcccttcggtactatgaagtgcccggcggaactggctcacggcgccaacgcggggctggacctcgcggtgcggctgctcgagcccatcaaggaagagttccccaccctttcctatgccgatttctaccagcttgccggag

SEQ ID NO: 95385 - DNA, 515 bp, Zea mays
cctagaatgctagtacgcctgcacgtaccggtccggaattcccgggtcgacccacgcgtccgagctccaaagagttgctatatgcctctgccttggaaagcctgcagatatctatctgattgatgaaccaagtgcttatcttgattcggagcagcgtattgtggcctcaaaggttatcaagagattcattcttcacgcgaagaaaactgcatttattgttgagcatgatttcatcatggcaacatacttggctgacaaggtcattgtttatgaggggcgaccttctattgattgttctgccaatgcaccacagtctttagtatccgggatgaataaattcttatcgcatcttgacattacttttagaagagacccgaccaactataggccacgtataaacaagttggactctacaaaggacagggaacagaagtcggccgggtcctactactacctcgatgactaatgaggaagcacagattcttcttggagagccatatggcgcatagtctttg

SEQ ID NO: 95386 - DNA, 559 bp, Zea mays
  unsure (1)..(559): unsure at all n locations
gtgtcattgatgacagcggtcgcctgcacgtaccggtccggaattcccgggtcgacccacgcgtccgtgtgtcctagcgccgtcgtcgccccaactcgccttgcgtgactgaaagctcgtcggcttccgtccacgcgagaagcgagagcatggacacccaggtgaagcttgctgttgtggtgaatgtgatgggcaggaccggctccaggggtcaggtgacccaggtcatatntagggttcttggatgaccagaaccggctcatcatgaggaatgtcaaggggcccgtccgcgagggtgacatcctcaccctgctcgagtccgagagggaggccaggaggctgcgctgaagccctagcgttcttggtgggctcttgtttggtctttggtgtcttcgaatttgtgctatggttgaacttttgtgaccctgtcttgagagtagtaagccttgtgataagatagcagttttagttaatcctggttgaaaaaggaaatttgtgttgatgcatggttattcttgctatattatctataaaacgactcatgctttgatactaaaaa

SEQ ID NO: 95387 - DNA, 557 bp, Zea mays
  unsure (1)..(557): unsure at all n locations
tgtgaattgatgacagcggtcgcctgcacgtaccggtccggaattcccgggtcgacccacgcgtccgcccacgcgtccgcccacgcgtccgacattgtggtcattggccatgtcgactctggcaagtcgaccaccactggccacctgatctacaagcttggaggtattgacaagcgagtgattgagaggttctagaaagaggctgccgagatgaacaagcggtcattcaatgttgcgtgggtgcttgacaagctcaaggctgagcgtgagagatgtattacaattgatattgccctgtggaagttcgagaccaccaagtactactgcactgttattgatgccccgggacaccgtgacttcatcaaaaatatgatcactggcactttccaagctgactgtgctgttcttatcattgactcaaccacttggggttttgaggctggtattctcaaggatggccagacccgtgagcatgctcttcttgctttcacactttgtgtatagctaatgatgttctagtgcaacaagatggatgctctttnaccaaagtttttaag

SEQ ID NO: 95388 - DNA, 558 bp, Zea mays
atgcgattacaagttagaacagctggtacgcctgcaggtaccggtccggaattcccgggtcgacccacgcgtccgcggacgcgtgggaggagaagcaccccaatgtgaagcaagtctccctgattggcaaggctggtggtgacaagtggaagtccctgtctgatgccgagaaggctccctacgtgtctaaggcagagaagctcaaggctgagtacaccaagaagatcgacgcttacaacaacatgcagtctggagaccccacggcgtctggtgattccgacaagtccaagtccgaggtgaacgactaggacgaggatggtgactagtgatgtatgacggatgaaactctgtccaagtgtttgcagtcagggaaaaaatctcgtcgttgtcggcctaaccgggttttctcgaaggactttctagatgcatgttattagtgccgtcttctgagtagtttccttgcaagtgtcgtcccgtccctggagtgaggcagtttatttagtagtttctttacgttatggcacttgaccgtagtttgattgagttgttaattcttgt

SEQ ID NO: 95389 - DNA, 514 bp, Zea mays
  unsure (1)..(514): unsure at all n locations
nttgaatgcagtcgcctgcagtaccggtccggaattcccgggtcgacccacgcgtccgcccacgcgtccgcccacgcgtccgcccacgcgtccgcccaagcccctgcgaccccgagataccaaagccagcagaagaagggatgcagcagccgatgcacatgcagccgcaggcgccggcgatagccccagctgccggaatcaccacggagcagatccaaaagtatctggatgagaataagcagcttattttggctattttggaaaatcagaacctaagaaaattggcagaatgtgctcagtatcaatcacaacttcagaagaacctcttggaattcgctggaatcgcaaatgcccaacacgagactggtgtaagccggactcaaaatgcgccgccctggtggatctcctggagtagggcagtccatgtcacaggtgcctatgttcccaccgaggacacctttaacaccccagcaaatgcaggagcagcagcttgagcagcaacaggcttagttgt

SEQ ID NO: 95390 - DNA, 550 bp, Zea mays
atgtggatctgatgccggtcgcctgcacgtaccggtccggaattcccgggtcgacccacgcgtccggtcgaccgtgtcctcggagcacgatgaaggttgttgctgcctacctgcttgctgtcctcgctgggaatgccagcccctccgctgaggatttgactggcattctggagtcagttggctgtgaagttgacaatgaaaggatggaactgctgctgtcccaactgagctggtaggacatcaccgagctcattgccgcgggcagagagaagtttgcttcagtcccatgtggcggcggcggtgtggctgttgcggcaggtgcacctgctgctggcggagctgctcctgcagctgatgcaaagaaagaagagaaggtggaagagaaggaagaaagcgatgatgatatgggcttcagcctcttcgactaggttgcacagtcatcacagtattggttccggcagtgaaatcaaagggaaccagagtcatgtttagatttaaccctatttatatgtgaagtactgaaaaactgcttatgagtctggattggaaa

SEQ ID NO: 95391 - DNA, 557 bp, Zea mays
  unsure (1)..(557): unsure at all n locations
atctgaataanatacggacagctgtacgcctgcacgtaccggtccggaattcccgggtcgacccacgcgtccgcccacgcgtccgatctgtatgagtcgggaaaagtgtgcctcagcctcctgaagacatggacaggcactggtaacgaagtgtggaatgctgagagctcaactgttcttcagctgctgttatcgcttcaggcccttgttctcaacgaaaaaccttactttaactaggcgggatacgacaaatttgtgggcaaggctgatggagagaagaactccatcacgtacaatgagaatgccttccttctgtcatgcaaatccatgatgtatgttttacgcaagccttcaaagcattttgagacgttggtcaaggagcatttcacctgcctggccccgcacattgtggatgcctgcgaggcttatcatgggggcgatctcgttcgacatgcgcacgacaaagcatacgtagcagatgacggcatctttgaactgcttaacctggtttangattatgcttggttaagcttctgccgaacctggtactgtctttt

SEQ ID NO: 95392 - DNA, 514 bp, Zea mays
tctgaatgctgtacgcctgcacgtaccggtccggaattcccgggtcgacccacgcgtccgctcaccgtggagataccagcaaggcattcttttattacaggtggccgctgacaggtttctcagagctactcatacagtaacgcaagtacgcaacaggagtttcttcctcgcagcttctcaccagaaaagcctacacggcacagcaacatctcgcgcggtcactggtactgactggcaagctggccttccttgacgatgtagttctgcacggggaagtcctcgcccttgaaatacctattcagcatgtccctcacaccatccgcataccgcagctgcgcatcaattgtagtcccagataagtgaagagtcatggcatggtttggcatgtttcgccagtggtgatcctttggggcttgctatgggtatcccagatcacttccggtttatatctatgtgaccgatagaacatgcatttttctttgtttgagtattcatcatttgtttcttggtctat

SEQ ID NO: 95393 - DNA, 550 bp, Zea mays
tgtgatatttgttgctggccgtctgcacgtaccggtccggaattcccgggtcgacccacgcgtccgcattaggcgccacgtggacctggagacggtgaggtccaggctggacggagggtccggcagctacgcctcggggaccgagttctaccgcgacctgctgcttctgtgcgcgaacgcgctggtcttctacccgcgcgggtcgcccgagcgttccggcgcggcgcggacgcgcgcgctcgtcgccaagcacatgtccaaggatcagccggggccctcggggaaggctgtcgcggggcccgcggcgttcaataaggccaaggcggaagccgacgttgggtcgctgctggagaagactgcgcccatcatcgtgtgcgcgaagcggagctttatcgccaaggccgccgacgtggacaccggcaaaaggagagatcggagaatggcgaatcccgcctggatggcgcgaagcagcatgaggcggtgggcaagatggaggctggggctcgtgtatagggttccaagtgtacgtacacctggatgcgaggtgatt

SEQ ID NO: 95394 - DNA, 552 bp, Zea mays
agtgagctagatagctgtccgcctgcacgtaccggtccggaattcccgggtcgacccacgcgtccggcgaatcgacgcgcctatctcagcttgctgcactgcactgcactgccctgccatcatatcgtacgtgagcccggccgagagcgagggagaggcatggctgctccgaagctcgcgacgctggcgctggccgtgctcctggcggcgaccgcggtggctcccccggccgcggtgcgcgcggcgatgtcgtgctccaccgtgtacagcacgctgatgccgtgcctgccgttcgtccagatgggcggggccatgccgccccagccgtgctgcggcggcatccgcagcctgctgcagcaggccaacaacacccccgaccgccgcaccatctgcggctgcctcaagaacgtcgtcaacggcgccaacgggagccgaacctacatcaggcgcgccgtcgcgctgcccagcaagtgctgcgtttgccctgccgtacatgatcaagaccaacgtttacttgcaacacgattaattaaatgaggcgtcctgtgcgcg

SEQ ID NO: 95395 - DNA, 557 bp, Zea mays
atgcgaacttgatgataccgttcgcctgacgtaccggtccggaattcccgggtcgacccacgcgtccgtccacgcgtccgcaaggacctgtacatcaacaatgctatccagatggatgttaccgggagcaggaaggctgttgtcatccacgtcccataccgcctgcgcaaggccttcaggaagatccatgttagactcgtcagggagctggagaagaaattcagcggcaaggatgttggtgattgttgctacaaggaggattgtgaggccacccaagaagggttcagctgttctgcgccctctcaccaggactctgactgctgttcacgatggcatcttggaggatgttgtctacccagctgagattgtggggaagcgtgtcagataccggctggatggttccaagattatcaagattttcttggacccaaaggggaggaacaacactgaatacaagctggagacctgcactgggggcttaccgcatgcttgtttggtaaagatgtggtctttgagtaccctttgaccgaaaatcctaattataatccctctggaag

SEQ ID NO: 95396 - DNA, 555 bp, Zea mays
  unsure (1)..(555): unsure at all n locations
tgtgtagcaagtcggagagccgtacgcctgcacgtaccggtccggaattcccgggtcgacccacgcgtccggcaccaagggcggttttccctagcattgttggccgtcctcgccacactggtgtcatggtagggatgggacagaaggacgcatatgttggcgatgaggcacagtctaagagaggtattcttactctcaagtacccgattgagcacggtattgtgagcaactggtatgtcatggagaaaatttggcatcatactttctacaacgagcttcgtgttgccccataggagcactctgtgttgcttaccgaagctcctttgaacctcaaggccaacatgtataatgatacctaaattatgcttgagacttttaatgttcctgccatgtatgtggaattccaagcggttctctaactttatgctggantggcgactataggtaatggactccactttggtgtatggtttgtgcgactactgtgcctattttctactgtttttggctgttgtaaaggtaattatttgatggtattgatgtgattgtgtcctt

SEQ ID NO: 95397 - DNA, 558 bp, Zea mays
atgtgcacttgtatgatagcggttacgccgcacgtaccggaccggaattcccgggtcgacccacgcgtccgcatacgcgtccgcccacgcgtccgcccactcgtccgcaacttcaagcaggctggcgagagatatcgttccttctaccctgcaaggcaagaccggttcatgcagcgatgggtagactcaatgactgaccctcgcatgacccatgaacaccgtaccatttgtattatttacgtgtcccagtgcgacgccgctcttggccagaagctcacttttaggctgaacctgaatctgtgcatgttagatcgaataggtcttatgcatgcatccgttgccaatgatgcaacggagacatggagcgtgtgatgtttacacgcttataaccttttttataagttttgtgctcgtctttttacatttgctatgtctgaagtctgattgttaatatataaactgttattaattgtatatgctcttttcttcaagggagcttaatttagctttttataatattggttattagtttatgttgaaacattactttttgtttat

SEQ ID NO: 95398 - DNA, 510 bp, Zea mays
tatgaatggatacgcctgcacgtaccggtccggaattcccgggtcgacccacgcgtccggttgttcggagcgggcagcagcacacagccccatcccaatcctagtcgatcttcttcccctcctcaaggaagaaaagaagctgaaccatggggaagagaaagtcagctgctaagccacctcctaagaagcggatggacaagcttgacactgtcttttcctgcccattctgcaaccacgggagtagtgttgagtgccgaattgacatgaagaatctgattggcgaagcatcttgtagaatcttgcaggaaaacttcaacacaactgttaaagcacttactgagcctaatgaattatatagtggaagggattgataagtgtgaacctgtcaacactgttgaaggcaacattaatgcttaacgctgcccaagtgatgaacctgttccctacattcgtatggtaatggccgggattttcgaaaggcattaaccataatcaggcattggcttggaa

SEQ ID NO: 95399 - DNA, 530 bp, Zea mays
ggttcctctcactgacttgcatggcgtacgcctgcacgtaccggtccggaattcccgggtcgacccacgcgtccggacgtcgtcaaggccatcgagaaggtgggcacccgcaacggctccacctccaaggtggtcaaggtcgctgactgcggacagctctcctagatctctctgatctggtctgttcggccgccctccctccgtcatcgtcgactccccctgcgtccgttcctttggatctgaataagatggtggtgatctgagtggtggtcttagtttatcatgtatcgctcgcagtttaatttagcggtttaggtgtggatctgtgaaccccatggcgcctctgcttgattcgtgtttcacctgttatgttctgagattcatgataatgctatgagaactgaaattcccgtttaaaaaaaaaaaaaaagggcggccgctctagaggatccaagcttacgtacgcgtgcatgcgacgtcatagctcttctatagtgtcacctaaattcaattcactggccgtcgtttta

SEQ ID NO: 95400 - DNA, 556 bp, Zea mays
atgtgtatctgaagcctgctcgatgacgtaccggtccggaattcccgggtcgacccacgcgtccgcctttcttgatcccaaaactaccgccaagatacatgttcttgggaacaaataccaaagtaagctgcttgaaataattgacgccagtgaattgccggaattccttggtggcacttgtacctgtcctgaatacggaggctgccttaaggctgaaaagggaccatggaaggacccaaacatacttaagatagtccaaagtggtgaggttcattgtgctcgtcaaattgtaactatttccaatggtgaagaaaaatttattacttatgccaaaccgaagcaccattcaatgcgagggagtgacacatcaactgctgagtctggctcataagctgacgatgctatctcccccaaagctctcagaggttacatacaacatcctaagttgaccccagttcgtgaagaggtcaaaattgtcatggctacgagcttttctactcgtgttcctgaatatgaaggacctgttgttgacaaaggtttgaatgcttcattggaa

SEQ ID NO: 95401 - DNA, 548 bp, Zea mays
agtgataatgatagctgtccgtcgccgtaccggtccggaattcccgggtcgacccacgcgtccgcccacgcgtccgccctcctcccttcttcctgctccgcgtctcgatctcgactcccccgccgcgtcgcgcgacccggccagatctcgcccaccctgcgccgcggccatggataacttgatcaccctcgtcaacaagctgcagagggcttgcacggctctcggagaccacggagaggagagcgccctcccgacgctctgggactcgctgccggctatcgccgtcgttggaggacagagctctggtaaatcatctgtgttggagagcgtggttgggaaggatttcctaccgaggggttcaggcattgtaacccgtcgtccgctggtgctgcagctccacagaattgatggtgacagggaatatgcagagttcatgcatcttccgagaaaaagatttacagattttgctgctgtgagaaaggagatagctgatgaaactgaccgagaaacaggcccgttaaagcaaatatcaactgtccctatccatt

SEQ ID NO: 95402 - DNA, 557 bp, Zea mays
tgtctattgtctatagcgttcgcctgcacgtaccggtccggaattcccgggtcgacccacgcgtccggcgagggaaaagttggcaccgtatgcaggcttgtcatctgaagaaagctaccagagtcgcgaccttgaaaaggcatctcagcaattttcaaagaacctgtacgagttcaaggttcatccaacaacattgatcccatagcaagttgggaatatgtatacagtatcacttctatgctgctcttgcatcggttatacataatagacatgaaactctggcaggccagaggattgttatgttttcgtatggcagtgggttgacatcaacaatgttctctttcaagattaaagaaggccatcaccctttcagcttgcttaacattgcatacatattggatgtttccaagaaatttaaggcaagacttgttgtgcatcccaagaaatttatcgaggttctgaaactgatggaacacctgtatggggcgaaagaattttttgccagtttttatactagtttgctattttttggcacctatttatttaagcacgtttat

SEQ ID NO: 95403 - DNA, 538 bp, Zea mays
tgtgtgcttgaagaggcagtacgactgacgtaccggtccggaattcccgggtcgacccacgcgtccgggcacggacacgacggtgatctcggtggagtgggcgatggcggagctgctgaggaaccccagagtgcaggagaagctgcaggaggagctggaccgtgtcgtcggtcgcgaccgggtcctgtcggagacggacttcccgaacctgccttacctgcatgccgtcgtcaaggagtccctgcgcctgcacccgccgacgccgctgatgctcccccacagggccagcgccagcgtcaagatcgccggctacgacatccccaagggcgccaacgtcgtcgtcaacgtgtgggcggtggcgcgcgaccccgaggtgtgggacagcccgctcgagttccggccgagcggtttctcgggaagacatcgacttaaagggcgcgacttccgctgcttgcctgtcgcgccggccgccggtgtgcccggtgcgcaacttggatcaacctggggcgtccaataacggccaatgcttgacactttt

SEQ ID NO: 95404 - DNA, 515 bp, Zea mays
  unsure (1)..(515): unsure at all n locations
tttgatggcatcgcctgcagtaccggtccggaattcccgggtcgacccacgcgtccggctccagcccatagtgaatctcccggagtcgcccaaacaacagcgacaaccatggccgccgccgcctgctattcgccagcgcgcatcatcatctcctgctcagctaccaccacctcctcaccgtcgtcagcgcgcacgctgcgcgtcgccgtagtggggggtggccccgcgggcgcgtcggctgccgaggcgctggcctcggcgggggcccggacgttcctcctcgagcgcagccccgcgggcgccaagccctgcggcggcgccatcccactctgtatgctggacgagttcgccatcccgcgggacctcgttgaccgccgcgtcacccggatgcgcgtgctctcccccttcaacctcgccgtcgacttctcccgcgcgctgccccccggggcgcacatncccatgctccggcgcgaggtgctcgattccttcctccgtcgtcgcgccgttgaggccgt

SEQ ID NO: 95405 - DNA, 556 bp, Zea mays
  unsure (1)..(556): unsure at all n locations
gtggtaatgatgacacctgtcgactgcacgtaccggtccggaattcccgggtcgacccacgcgtccgattaactaaagttcctttgctatgtgataatgagagtgcaatcaaaatggcggataatcccgtcgaacatagccgcactaaacacatagccattcggtatcattttcttagggatcaccaacaaaagggagatatcgagatttcttacattaatactaaagatcaattggccgatatctttaccaagcctcttgatgaacaatcttttaacaaacttaggcatgagctaaatattcttgattctaggaatttcttttgttaacttgcactcatagctcatttatataactttgatcatatgctatgactaatgtgttttcaagtctatttcaaaccaagtcataggtatattgaaagggaattggagtcttcggcgaagacaaaggcttccactacgtaactcatctttcgccgtcgcttcaaagcaactgttcggtctaaagggagaataattgagcacccagccaaatgacgtcntttttgtggata

SEQ ID NO: 95406 - DNA, 508 bp, Zea mays
tctgatgctgtcgcctgcacgtaccggtccggaattcccgggtcgacccacgcgtccgatcactttgttttttatttagctgctacctcatggcggtactgcatttgcagataatgctggagtcattgtgaaccccaagggcgagatgaaaggatctgctatcactggacctattggcaaggagtgtgctgacctttggcccaggattgctagtgcagcaaatgctattgtctgatactactggttgagaatagtttattgtgatccattttaaccttttctgcacttcaacatttgtgggaatttacttgattaatggactaaaggaaaagacgcttatgcgcacaattaaaataggccgaactgtgcacttttgtattcaggttaatgatgtgctggccgtgtgatctaaaaaaaaaatttctttttattgtttattatattttttttttattttatttttttttttattatatatttgtttttttttatatgttaataataaaat

SEQ ID NO: 95407 - DNA, 555 bp, Zea mays
  unsure (1)..(555): unsure at all n locations
tgtatttatgatgctgtccgtctgacgtaccgatccggaattcccgggtcgacccacgcgttcgaccacgcgttcgtccacgcgttcgcccacgcgtccgcccacgcgtccgcagactttggacttgcaaagcttttagaggatgaagaatcacatattactacaatagttgcaagaacattttgttaccttgcaccatagtatatgcaatttggcagagccacctagtgagactgatgtctacagttttggggttatggtactcgaaatactcagtggaaagcggcctactgatgcatccttcattgagaagggactaaacattgttggatggttaaattttctggctagtgagaaccgggagagggaaatttgtctcctgaactgggaaagagtgcagactgagaccttatatgctctgctatcttttgccaagcaatgggttaagctcttgtcagatgagaggcccacaatgcacaaggtgggtcagatgctggagtttggagtatgttcactcgtgccttactgattttattggattagagatgtgttctn

SEQ ID NO: 95408 - DNA, 546 bp, Zea mays
gtgtgatcttgattgcagttcgtacgacgtacctgtccggaattcccatatcgacccacgcgtccgcccacgcgtccggagatatgcaggcagttagaaaggccattattgctggttcatttactaatgcatgtcatctggaggaatacagccaaaacggaatgtataaaacaattaggactttgcaagaagtctatattgatccatcttcagttctctttagggttaattctaagtgggttgtctaccagtctctcgtctcaactgacaagcattatatgctgaacgttattgccattgagccatcatggcttacggaagctgcaccacatttttatcagttccgaacattcaatcctgcttcccactaacattactgtgtgctagacttgacgtagttttgtaatttagagaactaaattatatatggccacaattttgttaaagaaaaggattgccaaaatttgataagcttagtaccttggacaatattgtttttcacgattcttgggccgtgtcagatcacactttaaggttaattcaaat

SEQ ID NO: 95409 - DNA, 549 bp, Zea mays
tgtgatctctgaagctgttcgactgacgtaccggtccggaattcccgggtcgacccacgcgtccggaacaaacgtggaggcagggtgaggctccaatcgattgtgacgcctttaaccgagtttgaccaccctgagaaaggagatgctctgtacgctatggagctggctctggccctggaaaagctggtcaatgaaaagctgcacaacctgcatggtgtggcaacaaggtgcaatgatcctcagctgacagacttcatcgagagtgagttcctcgaggagcaagtggaagccataaacaagatctccaagtatgtcgcccagctgaggagagtgggcaaggggcacggggtgtggcacttcgatcagatgctgcttgaggaagaggccttaaaagaagaacggacagatgaatgaaggaaacaagtgtgtaatgttgatcaggcggaggaaaaatgggtcaactgacaactctgggtcggtgggatttgaaataggttggggtttgtagatggagaacggtggtgccccgctccttaagagggatgaaca

SEQ ID NO: 95410 - DNA, 551 bp, Zea mays
tgtgataattgatgcagtctgtcgcctgcaggtaccggtccggaattcccgggtcgacccacgcgtccgcggacgcgtggggtccagaagctcgtgctcaacatctccgtcggcgagagcggtgatcgcctcaccggcgccgccaagtgacacgaccttgacagtcaatatgctctttcaggagatggtcccagttactttacatggttctgttggacacaatgaagccatccatatatgctattaaaaatcctgctagtcattatggctttaaactgtaccatgtctgttctattttcagctaggcagagcatgttctatttacagcaggccagcagacaccaggcagtaatgtgatgtatgagtcaattataaggatggaaatgttttttggcagcttttctcagtggatcagtatcaccggaaaaactttttggacacctagatgtcgagagatgcccattccctgaggaatttcaatggagctacaacctttccctctcttctggtttgccaggtactgcttaaggagggcaaggttcaaatttttg

SEQ ID NO: 95411 - DNA, 518 bp, Zea mays
  unsure (1)..(518): unsure at all n locations
nttggatagcaatacgcgtgcacgtgccggtccggaattcccgggtcgacccacgcgtccggactgattgcctggagatgcgtgtcggggccatcgagcgatccggcgagcgggtgctggtcatcgacgacctggttgcgaccggagggacactctgtgctgcgatcaggcttctagaacgtgctggagccgatgtggtcgagtgcgcgtgtgtcatcgggctcccgaaattcaaggatttgtacaagttgaatggaaaacctgtatacgtgctggttgagtctcgtgaataatcggagaaatgacaacttatgctcaggtgtcagagtgatcagggatattggctgtttactccttgctactgcgattgaacagtggagggacgacatggacaaggacaagtatattcggtgcatcactaagtcttggtgaggggagagattgtagtgttttaggctgagtagtgaagaacctgtagttctgcacggaacatgatggttattaagtgatgcaacaat

SEQ ID NO: 95412 - DNA, 579 bp, Zea mays
  unsure (1)..(579): unsure at all n locations
ttagttctcttctctcgtgacncgtcagtactgctcgtaccggtctcgaattcccgggtcgacccacgcgtccggcctgctatgctagcgctggatccagtgtgttggggacgcagatctatccgtgctcaactgtgatggtgacaatctggaagggaaaggtgttggtgctccatttgagcaggggaaaggggatgattcatcgccagcggaggtgcattggagcagcatggttcatcagactggtggtggcatcagcatcgtggactagagaggttgcgcttatgtgagagcctagagttcatggaccgatggtatgttgaggtgggatggtaggtggtattattttgtttttttctttttttttgttttttttttatatttttttattttatattctacttttattattatttatttctatttacttttatttacgtaatatatcttcttactttttttattttcttttctttttattattttttttttttttatatttttatttatgttttttatttatttttattttatttatttttatgtttctgttattttttcttttttttattttgtttt

SEQ ID NO: 95413 - DNA, 554 bp, Zea mays
agatcgttgtatctctgatgtcgatcgcactgacgtaccggtccggaattcccgggtcgacccacgcgtccgggagagagagaggagtgggagacccgcgagaggctgccgtgtagggaccaccgtagactcagcgtctcagctactgcgaaggagggataaggggatggccgggatcggaccgatcaggcaggactgggagccggtcgttgtgcggaagaaggcacccaccgccgccgccaagaaggatgagaaggccgtcaacgccgcgcgccgcgccggtgcggagatcgataccatgaagaagtacaacgctggtacgaacaaggcggcatccagcggtacatccctcaacaccaaacgcctcgacgacgacaccgagaacctcgcccatgagcgagttccaagtgatctgaaaaagaatctcatgcaagcaaggctcgataagaagctgacacaggcacaacttgctcagatgataaatgagaagccacaagtgattcatgagtatgaatcatggcaggcaattcctaaccagccgatcataacaagct

SEQ ID NO: 95414 - DNA, 565 bp, Zea mays
  unsure (1)..(565): unsure at all n locations
tatggttatattttaagatngtcgtanagccgtacgactgcacgtactcggtccggaattcccgggtcgacccacgcgtccgagcaagcggagctgcatctggtgctttaacatatccaacgcagcagtatccatctggaagaactcctgctgatttagcatcagaaaatggtcacaaaggcattgctggttttcttgcagagtctgctttgacaagtcacctctcagctcttacattaaaagagtcgccaagtggcaatgtggaagaaatatgtggattaacagcagctgaaggttttgcagcatcaagttcttcccagcttgcttgtgttaattctcaggaagagtccttaaaagattcacttggtgcagttcgtaaatcaactcaagcagcagccagaatatttcaagcttttaggtgggaatcattccacagaaagaatgttattgaatatggagatgatgattgtggattgtctgatgaacgcacactttcacttgttttccttataaccccttaatttgtcaccggtattcacattcttgctgtttgttgattttaaaa

SEQ ID NO: 95415 - DNA, 558 bp, Zea mays
  unsure (1)..(558): unsure at all n locations
agaggcgtcttatancatgatctactgaagctgtacgcactgcacgtaccggtccggaattcccgggtcgacccacgcgtccggaacctattggcatctcgaaagatgggaaagaggtttacttccgggatgtttggccatcaacagaagagatagccgaggttgtcaagtcaagtgtgcttcctgacatgttcaagagcacatatgagtccatcacccaaggaaatcctatgtggaatgagctgccagtctcaacaagcactctctatccctgggatccatcatctacatacatccatgagcctccttacttcaaggatatgacaatgactcctcctggcccgcgaccggtgaaggatgcatattgccttctgaactttggtgacagtatcacaactgatcacatctcgcctgccggaaacattcacccagacagcgcagctgcaacatatctgaaggagcgtggtgttgaaaggaaggacttcaactcatatggtagccgaagaggaaatgatgagatcattgctaggggaacctttgcaacatttcgcttgtgat

SEQ ID NO: 95416 - DNA, 559 bp, Zea mays
  unsure (1)..(559): unsure at all n locations
tgcgtggctttctacgaatctgangctgtacgactgcacgtaccggtccggaattcccgggtcgacccacgcgtccgattcgctccactgacctcacggggctcccagcagtaccgtgccctcactgtgccagagctgacccagcagatgtgggactccaagaacatgatgtgtgctgctgaccctcgccacggtcgctacctcacggcatctgctatgttccgtgggaagatgagcaccaaggaagtggatgagcaaatgctgaacgtgcagaacaagaactcttcctactttgtggagtggatccctaacaatgtgaagtcgagtgtgtgcgacatcccacccatcggcctgaagatgtcctccacattcatcggcaactcgacctccatccaggagatgttccgccgcgtcagcgagcagttcactgccatgttcaggaggaaggccttcttgcattggtacacgggtgagggcatggattagatggaattcactgaggcagaaagtaacattgatgaccctggtggccgaatcccaatcggtaccaagacccact

SEQ ID NO: 95417 - DNA, 534 bp, Zea mays
gtatagatacccctaggactgccgtaccggtccggaattcccgggtcgacccacgcgtccgcccacgcgtccgggggcagggccaccccgtcaagctcgtgccctacaacccggactaccaggacgagtccgtgctctggaccgagagccgcgacgtcggcaacggcttccgctgcgtccgcatggtcaacaacatctacctcaacttcgacgccttccacggcgacaaggcccacggcggcgtccatgacggtaccgagatcgtgctctggaagtggtgcgagggcgacaaccagcgctggaagatccttccttggtgaacgaacgaatgaaactactagctggtaccctaataataattctgctggctgcggcgatcccataaataaagatgcccggtgcgattgcattttgggacttctcgagtggtgtttgcgtcagactacctagtcactgttggggcttgtgttccaacattttgctatccttgtttgcgctaggaaggttgggtcacttattcaatgataagggctt

SEQ ID NO: 95418 - DNA, 561 bp, Zea mays
tgggtatggtatggtgtatctgatagcgtgacgactgctcgtaccggtccggaattcccgggtcgacccacgcgtccggggctcgcaatcaagcactccctcggccagtcccacccggtcaagctcgcgcctttcagcccggaccaggaggacgcgtcggtgctgtggactgagagcaaggacgtgggcaaggggcttcgctggatccgcatggtcaacaacacctggctaaacttcgacgcctttcacggcaacagggaccacggctggcgtgcaccaacggcactgccgttgtgctctgggagtggtgcaaggtctaagacccgagcttggaaaatccctgcgttgtggtccctaggctaaattctttcgtggcccaacctggaggctccgactctttgctcgtatttttgtaaggctttctgatattactatattcttaatggtgctaaactttcttcttgtgctttggatcccattcaatcctttgtgttcaggatcaataattggttttatggacttttcgcttttatttaacttgtttcttgttatatggagtgt

SEQ ID NO: 95419 - DNA, 542 bp, Zea mays
tgagcgtgtatctagtctctgattgtcatgtacgcctgtcgtaccggtccggaattcccgggtcgacccacgcgtccgagcagcagcacccgaggatggtgaagttcctcaagcccggcaaggccgtgatcctcctgcagggccggttcgccggcaggaaggctgtgatcgtgcgcgtgttcgaggagggcacccgcgaccgcccctacggccactgcctcgtcgccggcctggccaagtaccccaagaaggtggtccgcagggactcggccaagaagacggcgaagaagtcgcgcgtcaagtgcttcatcaagctcgtcaacttcacccacctcatgcccactcgcttcaccctttaagtcgacttcaaagacgttgccaacggccggcccgactcgctctacactcgcgacaaggatgtcgccttcttgaaagccgtcaatgggcgccttgaggagaggttcaagaccggcttgaacatgtggttctttaccaagctccgctttaaatagtcggattctcgaatgggcctcgttgttttt

SEQ ID NO: 95420 - DNA, 551 bp, Zea mays
  unsure (1)..(551): unsure at all n locations
tggtatcngtctgtgaatctagtatcngatgtactgtcgtactcggtcctgaattcccgggtcgacccacgcgtccggatggacatcatagatcttgaggatgagactatagatgcagagatattgaactcgatggctgttacaaatgaccatttcaagactgctcttggaacaagcaacccatctgctctccgtgaaactgttgttgaagtcccaaatgtctcttgggaggatattggcggtctgcagattgtcaagagggagctgcatgatactgattacaatcttgtgtatcatttatagttgtatgagcttgttgtctttgtctatttatatagtattcttgtttaatggtttattttatttcttgtacataggtttttgttttattcttttgcgttttctatttctttttttatcttttttttttatgtttgtttaaatgttttcctctttttttatgttcttgttcttgttttatatattttttttttatttattttttttttattattttatttttattattttattgtttttctttattattt

SEQ ID NO: 95421 - DNA, 560 bp, Zea mays
  unsure (1)..(560): unsure at all n locations
ttattctgcgtttctccgtattactgatcgcangtacgtaccgctcctgaattcccgggtcgacccacgcgtccgtgattttagccgccgccgctgctcatctcacatccctcgagaagacgcctgctcctcgccgatcgatacgatggccgacttctccgacctccacaccgccgacggcctcaagtccctcgaggctcacctcgccggcaaaacctatgtgtctggtgactccattactaaggatgacattaaggtcttcgccgcggtgccgtcgaagcctggcgctgagtttcctaatgccgcccgctggtacgagaccgtctctgcggctgtagcctcaagattccctggtaaggctgttggtgtaaatctgcctgcgggatcagctcctgcggcatgttctccctgcggatgatgcttatgtcgttttttaccttgttcatttttgtgatgaaactttttaggtcttgaagttctattattagttttgccctcgttgttatggtctctttttatatttatgtttgtgatttatcttttttctaatttgttttcat

SEQ ID NO: 95422 - DNA, 563 bp, Zea mays
gactgtgctttctccgattacgatcgctggtacgactgcacgtactcggtccggaattcccgggtcgacccacgcgtccgagctctaccggttcgacatggaggcgaaccagtgcaaagaacgtggcacaggcactgtgaagctgcttaagcacaaggagaccgccaaggtccgcctcgtcatgcgtcaggcgaatacgcttaagatctgtgctaaccatctggtggtggcgacgactaagatgcaggagcacgcatggtgcgacaagtcgtgcgtgtggctcgctctggacttcgccgactgtgagctcaaggaggagatgtttgctatcacgatttggatctgtcgagaatagctagaagttcaaggacactgttgaagagatagctgaagagcatggtaagaccgaggtgaaagcaaacgagtaagtctttattgacgtcggacatttggtactgattctcacaggtacatatgctatgcattgttggagattcataggtagaggaagtttatatatcctgttataatatatgttttataacgtttaatgctgaggttat

SEQ ID NO: 95423 - DNA, 547 bp, Zea mays
  unsure (1)..(547): unsure at all n locations
aggatgctnagtccgagtctctgatgcctagtacgacgctcgtaccggtccggaattcccgggtcgacccacgcgtccgcccacgcgtccgcccacgcgtccggcggccgtagagaggccgacgcgcaccagcagatcccaaactcaccggggaggagggagtgggcgaccggcggcggcgatgggtttcatcatggagttcgcagagaacctgatcctccgtttgatggaggacccggacaagcgcgaccaggttcggcgggagcatgcctacaagatgaaggagcggtgcgagcgcaccaaggcggcgtggagccttcctctgcgctcctacagcttctggaccttcgaccgcttcaactcgcagctcttctgggacctgctgatcagtcaggctgccggtcgcctggaccctttctacgaccttattatctgtctcttcggcttccctgctgtttttctaaactcccgtgtcgatttttgctctatatgtttactttggctttaataataaatttggtcttgttaaaatttactgtgattcctt

SEQ ID NO: 95424 - DNA, 569 bp, Zea mays
  unsure (1)..(569): unsure at all n locations
gacgtcgctttctccgatntctgatgcgctgtacgtaccggtcctgaattcccgggtcgacccacgcgtccgattcgctccactgacctcacggggctcccagcagtaccgtgccctcactgtgccagagctgacccagcagatgtgggactccaagaacatgatgtgtgctgctgaccctcgccacggtcgctacctcacggcatctgctatgttccgtgggaagatgagcaccaaggaagtggatgagcaaatgctgaacgtgcagaacaagaactcttcctactttgtggagtggatccctaacaatgtgaagtccagtgtgtgcgacattccacccattggcctgaagatgtccttcaaattcatgggcatctcgacctctatccatgtaaatgtttccgtcgcgttagctagcatgtcaatggcatgttcatgaaggaaggcctttttgcaatggttcactggttgaggccttgattgatatggaatttactgatgcatatttgtaacatgaattaacttggtgtgctcatattcctctttttcctaaacttcttctttttatt

SEQ ID NO: 95425 - DNA, 552 bp, Zea mays
  unsure (1)..(552): unsure at all n locations
agatgnntgctatctactgatgtcgtcgcctgcacgtaccggtccggaattcccgggtcgacccacgcgtccgcccacgcgtccggggatgaaagtgccatgaacgaaggcacaccctcagccaaagcacagctgtcttgccccgagggtaaaagtatatcttccgtgaagtttgcgagcttgggaaaccccagtggaacctgtagatcataccaaatggggcgctgccaccacccgaactccttatctgttgttgagaaggcctgtctgaacaccaacagctgtacagtctccctgacagacgagagctttgggaaggatttatgccctggagtcaccaaaacacttgccatcgaagcggactgttcttagtgacgtacggagtactaagtatctcggtgtgcatctaggttccaagtatgcccgtcaaaattctaaaattgtagtgcttcttgcacggcaatgctattgtaacctggatttacccgctaatatgtttcctaaaaaaaataaattatttattttttttttcttttttaataaaaaaggggg

SEQ ID NO: 95426 - DNA, 560 bp, Zea mays
  unsure (1)..(560): unsure at all n locations
taggttcttntgtttgatctacgatagctgtacgactgcacgtaccggtccggaattcccgggtcgacccacgcgtccggttggcatcccactcaactacaggcacatggagggctttggtgtcaatacctacaccttgatcaacatggatggaaagcctcaccttgtgaaattccattggaagcctacttgtggtgtgaaatgcttgctcgacaatgaagctgtgactgttggaggcacctgccacagccatgctactaaggatctatatgattccatcgcagctgggaattaccctgaatggaagctctacattcagactattgatcttgaccatgaggataagtttgactttgacctgctcgatgtcaccaagacctggcctgaggatatcatcccgctgcatcccgttggactgatggttctgaacaagaacgttgacaacttctttgcagagattgcacagtttgctttttgtctatctattattgttcctggaattaattattctgattataagttgttttagacttaattattcttctattcctattcctaag

SEQ ID NO: 95427 - DNA, 559 bp, Zea mays
  unsure (1)..(559): unsure at all n locations
tgtggaatggtnctttccgatagtagatcgcactgcacgtaccggtcctgaattcccgggtcgacccacgcgtccgctaacttttggaaaatcaaaaattcatggatatggtgtctttgccaaggttgcacacaaggccggagatatgatggttgaatacataggggagattgttagaccaccgatatcagacactagagagcggcgaatttacaactcactagtgggtgctgggacatatatgttcaggatagatgatgaacgtgttatagatgccactcgggttggaagtatagcccgtctgatcaatcactcatgcgagcctaattgctattcacgtgccataactattcttggagatgaacacatcatcatttttgcgaaacgggacatagatccattgtaagagcttgcatatgattataggtttttatcaagtgatcaacgtcttttcatgtttttggggattcttcaaattgtcttttagtattttatttttgtattggctattggaactgttatgtttaatatacttttataattaatttaattcttttat

SEQ ID NO: 95428 - DNA, 606 bp, Zea mays
agtgttgtatggttgatctacgacgtcgtacgactgcacgtactcggtctcgaattcccgggtcgactccacgcgtccgcccacgcgtccgctagttgctcatttccagaactcaagtttgatgaatgaggataaacgctgccgccctatactcttccactctgatggtccgaatgcaggagatcaagaaccattccctgtgggatcaaatgtccgttctatgtctgtatggtccatgattttgagcttgtaattttactattattactttgtgttttttcattttttttgtttttatttcttttttgttttaaagttatattattttttttttttctatatttactgtattttttttcatttttttttttatttctttttcttattttttttatttttttactatttgcaattcttaatttatttttctttatattatttatcttatatttttttttatctttattattattatatttttcgttttgttttatttatttatattttttttattttttttatttcttttattatattttattctttcttgtttacttattattttatatttcttcttattgtttgatttattttatttatattgtt

SEQ ID NO: 95429 - DNA, 555 bp, Zea mays
tgcgattgctgtttctgtgagcagatcgcactgcacgtaccggtcctgaattcccgggtcgacccacgcgtccgaggacgccaccccgaacctcaccctccggggcttcggctccgtgcagcgcgtcaaggaccggctggaggaggcgtgcccgggcaccgtctcctgcgccgacgtcctggcgctcatggcgcgcgacgccgtcgtgctggccaacggcccctcctggcccgtcgcgctgggccgccgcgactgccgcgtctccctcgtcaactagaccaaccagctgccctcgtccaccgtcaacttcacccgccttgtcagcatgttcgccgtctagggcctctccgtcagggaccttgtcgtgcttcttggctgctactcttcttgtacctttctactgtacctttttagtgtcttgtctttcatcttcatcgtctccttcagttctttctactttttcttgtaccttgtcttttgtttattttttctctttaggttcatggtcttattcttttcttctcttttatttttatttgtttttccttttttttt

SEQ ID NO: 95430 - DNA, 551 bp, Zea mays
  unsure (1)..(551): unsure at all n locations
tgagagtctcgantaactcggatntacgatcgctcgtacgtaccggtccggaattcccgggtcgacccacgcgtccgcccacgcgtccgggcacaagccgacatatggcggctcagcctctcctacctcacgcccctgtcactgaggtgcgccgtggagcttggcatccctacggcgatctaccgccatggcggggctgcctcagccgctgagctggtcacggcgctgtctctcccctccactaagctgccgttcctccgccgcctgctgcggctcctcgccgcgtcgggcgtgttcaccgtcgacaagcagagctcggaggaggagcggtaccgcatcagccccgtgtcctacctcctggtggacggcatccctcacgagggccacatgaaccacaccgttctggtgcccacttgcactttgacgcgctactttatgccgggattgggccttgcctgattggtttggtgggtctttgttacttttactgttttttgatttttttgggtcttttttgtttctttttttattttttttctatattatttttt

SEQ ID NO: 95431 - DNA, 561 bp, Zea mays
  unsure (1)..(561): unsure at all n locations
tgcgatcgtactctctgacttcgatagctgtacgacgcacgttctcgtccggaattcccgggtcgacccacgcgtccggcaagtaccagaagagcacggagctgctcatccgcaagttgcccttccagcgcctcgtccgtgagatcgcgcaggacttcaagaccgatctccgcttccagtcctccgccgtcgccgcgctgcaggaggccgtcgaggcctacctcgtggggctctttgaggacactaacctctgcgccatccacgccaagcgcgtcaccatcatgcccaaggtcatccagctcgcgcgccgcatcatgggcgagagggcctgagcgagtcgagctcctcttaccgcatgcggcgtctttgttgctattgtcctgtttgtatgattttgtcatttattggttttttatttggttgtttgtttacttggttccttttttcttgttcttttgtatttttttgtatgtatgttttttttttctttttttacattattttttattttctttatcttatttttgttttttttgtctttgtgttttaangttaatatgt

SEQ ID NO: 95432 - DNA, 554 bp, Zea mays
agatattgctttctaccgaatacgatagctgtcgcactgcacgtactcggtccggaattcccgggtcgacccacgcgtccgggtcgatatcctcatccttggtggtggtatgatctacacattttacaaggcacaaggatattctgttggaaaatctctcgtggaagaggataaacttgagctcgcaacttctcttattgagaaggcgaaggcaaagggggtttctcttttgcttcccactgatattgtagtagcggacaagtttgcagctgatgctgagagcaagattgtccctgccactgctatccctgatgactggatgggtcttgatgttggccctgatgccaccaaaacattcaacgaagcattggacaccaccaagactgttatttggaacggccccatgggagttgttgagttcgagaatgtttgacctggcactgaagcgattgccaagaatcttgctgagcttacaaccacgaatggtgttactaccattattatgtggcggcaacctttgttgttgttgtttatatggctggtcttgtcctcaa

SEQ ID NO: 95433 - DNA, 550 bp, Zea mays
tggtgtgcgttgtctagtacttgtatgctgtactactgtcgtactcgtctcggattcccgggtcgacccacgcgtccgtgctctacttcaccggcgccaccaacatcctctacaccttcggcggccacgccgtcacagtcgagatgatgcacgcgatgtggaagcccgccaagtgcaagtacatctacctgctggcgactctgtacgtgttcacgctgacgctgccgtccatggcggccatgttctgtgtgttcggcgacgagcttttgacctatttgtacgctttttcgcagtttctgattttcttgttgcttgtctctgttgttttaatattgcgtttcttttttttttttttttagttattttttttttatttttttttttttgattttattttttgttttttttaatttatttattttattgttattttatttttattttttttattttttttttttttgttttttgtttttatatatttttttatttgtttatttatttttttttgttttttctttttttttttttgtttttgttttattatttt

SEQ ID NO: 95434 - DNA, 547 bp, Zea mays
gagttccgctttgtccgaaacgatcgccgtacgaccgctctggaattcccggtcgacccacgcgtccgctttgaatctttggtatccttcaaatcttcattggattaggtatccttcaaatcttcagtatgcttcgagtcttcggtacgcttcgaatccttatggggtaataacttccaagtttcaaaatttaagtgaagagacttattttttccagaagaatagattcatagtttaagaacggaatacccatatatgaaaataagagcttccgtgcgtaaaatgcgtacacaatgtcgactgattcgcaggcgtgggcgaattagagtcattcgttccaatccgaagcataaacaaagactggggtaatctttcgaaaaagaagcttttctgtctaatagcttttctttctaattaaagttacaaagttctctacgtaaatggccaaattggcatgttttctttatctattctataataatgtgtgtccgttgtgatgtatcaagggtaaatgatttttagttgggaatcttaattcaatttttta

SEQ ID NO: 95435 - DNA, 565 bp, Zea mays
agtgcgtttatattgcacggggtactgatgctgtcgcactgcacgtactcggtccggaattcccgggtcgacccacgcgtccgggaaggtttatctcctattaattcctatacaggggatacaaaaatgataaagctatactcaggagcaggcgcaagaccaagaactgcaccgcttcctattaggagtggcctgatatatagggaacctttaccagtaggaggcacccatcttttatttgccaaaacagtttgtttaacagcatcaacgaattgctcaacagttggagcaggcatacacatcctctctgcaccgcttagcatccttatagcattctcctctggacgaaatagaaggatggacccatcagttttcctatatgcttttaggccttcaaacaatccctgcccataatttaagactccagcttaaggactcagtgctatatgaccaaatggtatgactttacctttggaaaagattccatcagttccacaatttgcaacatacattaaagtaagtcttgatgaggctaaagccaatgttttcccaatttcatattaat

SEQ ID NO: 95436 - DNA, 554 bp, Zea mays
agatttgatctctactgatactgtagtctgtagactgacgtactcgtctctggattcccgggtcgacccacgcgtccggccacgcgtacgttgtatgaatagattgcagtctatacagagatcataaagctatactcaggtgcaagcgcatgaccaagaactgcactgcttactattatgagtggcctgatatataaggaacctttaccagtttgaggcacccaacttttatttgccaaaacagtttgtttaacagcatcaactaattgctcaacagttgtagcaggcatacacatctatctctgcaccgttttagtatacttatagcattctttttatgacttaatataaggatggacccatcattttttctatatgcttttaggccttcaaacaattctttgttataatttattatctttgtttatggacttagtgttatatgaccattttttcatattttatcttttgataattttattttatttattcattatttattcttctatttgtttaattttattatgtcttaatccatttattttcttttttat

SEQ ID NO: 95437 - DNA, 555 bp, Zea mays
  unsure (1)..(555): unsure at all n locations
gagttccgtatagtagatntctgatcgcnntacgtaccggtccggaattcccgggtcgacccacgcgtccgctcaagggcaaggtgacaattatcgccaagcctggagtgaagttggagattccagatggagacgtacttgagaacaaggatgtcaatggccctgaggatctttaagcaatgtttatcatcaccagttttcccaaggacatgtcacaggaactgccaagcctaatcactcctactgagctctatattttgtaattttcatgtgcattccgattccgctgtgagggtcatgtgagcccgctagagaataattgtaatcttctttgctgcgtctgtacttctgtttttgtgcgccaggacgtatatttttactgaaatgatactccgtaatatattataatacttgttttatattatttttattgtttttattatattattatgttttttttatgtttttataatttattttttttttatattatttttttataatttttttatttttcttatatatttgggtgttctttttatggtttcttccttt

SEQ ID NO: 95438 - DNA, 550 bp, Zea mays
  unsure (1)..(550): unsure at all n locations
aggatgtgcgtagtgctnaatatctgtaaagtcagtacgactgctcgtaccggtccggaattcccgggtcgacccacgcgtccgcggacgcgtgggcggacgcgtgggtcgcggacgcgtgggcggacgcgtgggccgccaccggcacctacgcaacaccaggcgctccagcagaacagcactcggagctcgcctgcccgacggcccaccatgatcatccccaagaagaaccgcaatgagatctgcaagtacctcttcaaggagggcgtgctgtatgccaagaaggactacaacctggcgaagcacccacagattgatgtgcccaaccttcaggtgatcaagctcatgcagagcttcaagtccaaggagtatgtcagagagaccttctcctggcagtactactactgggaccttaccaacgatggcattgagcccctactcaactacctgatacctcccgtctgagattgtgcctgccacgctcaagaaggctgtcatgccactgggccgttcatttgggttttggccctcttgtgaccgtccaaaggcg

SEQ ID NO: 95439 - DNA, 554 bp, Zea mays
  unsure (1)..(554): unsure at all n locations
agattgttanatttgtccgatttcttaacgcngtacgtactcggtccggaattctctcgggtcgacccacgcgtccgcccacgcgtccggttggatccagaattcttctaacaaatccagacgcacatgaggtgcattgctcaagggaaaggagccgtgcagcttgggaagctattgatgagtatttgatgcccttcgtggaaaaagaaaaatatgaactcccaagcaaatgtagacttcgtcctgataatgacatgtttcgggagcaagagcaacataagattcattttgatattaatgagtggcactgtggcttttgcaagaaagctttccgagcagagaagttcattgatcagcattttgaaaatcgccacaagaatcttgtggataatagtgaaggaagatgcatggcagatctatgcggcgcactacattgtgatctgatgatgcagttcatataaccaaaatgtaaatgcaatgcaactgcagctacaaggaatcgctatctttagccttgcatacagttgcttcctattaattaaggtctggctcct

SEQ ID NO: 95440 - DNA, 544 bp, Zea mays
  unsure (1)..(544): unsure at all n locations
nttgattttcgtataccggtacgcactgcacgtaccggtccggaattcccgggtcgacccacgcgtccgcccacgcgtccgcccacgcgtccggtgaaatccagcatagtggcacctgagtgttccaagtaccatgacgtgcctgctgtgatctttgctctgactggatacactggaaatctattccatgacttcaccgacgtgcttgtcccccttttcacgactgcaagcgagttcaatggtgaagttcagttcctaatcacagacatggctatttggtggacaaggaagtatgctgtggtgtttgagaagctaaccaagtaccccttgattgatttcaacaaagacaacgaagtgcattgcttcaagcatgccattgtcggccttcatgcttacatggagttcacaatcgacccgttaaaggctccacacaattactcaatggtggacttcaaccggttcatgcgcatgacctactcgctgcctaaggattcagtgagagcacctggtgagaccccgcataccatgtatgccttggctggtt

SEQ ID NO: 95441 - DNA, 546 bp, Zea mays
  unsure (1)..(546): unsure at all n locations
agatttgttnttgctcgtttctgtatagtctgtacgcctgtacgtaccggtccggaattcccgggtcgacccacgcgtccgcccacgcgtccggccaccgccacctacgcaacaccaggcgctccagcagaacagcactcggagctcgcctgcccgactgcccaccatgatcatccccaagaagaaccgcaatgagatctgcaagtacctcttcaaggagggcgtgctgtatgccaagaaggactacaacctggcgaagcacccacagattgatgtgcccaaccttcaggtgatcaagctcatgcagagcttcaagtccaaggagtatgtcagagagaccttctcctggcagtactactactggtacctcaccaacgatggcattgagcacctacgcaactacctgaaccttccgtctgagattgtgcctgccacgctcaagaagtctgccaggccactgggccgtccatttggctctggcccttctggtgaaccgccaaggggccctggtcgttttgaagacagaccaaaggtttggagacaggg

SEQ ID NO: 95442 - DNA, 605 bp, Zea mays
tgatcgggttgcgtaaattcgactgactaccaggtacgttcgtaccggcctggaataactcggtcgacccacgcgtccggaaagatggcattctgttcccaattcctctttaccctttgtactcagccttcatagctctgcatggtggagctcttgtcccgtattaccttaatgaaaaaactgggtggggtttggagatctctgattttaatacgcatctgtgctatgctttgttaagtgtctactgattttcattcctcgtatattttgtaattcattaatcttcatatggtccttgtttattcttattttatcttttttaatattattttattattatcatatttctatgttttctttcttatttttttcttatttttattttgtctatttattttttttttgtttttttcataaactatttttgtttgtactattattctcgttttattctactttcttttttttttcttttataatattatcttttttaatgcttttcttctttatatgtattctttgtacttcttctattgtattttctgtatcttattctgttattttattattcttatttttatgtattacatggtattatttacttg

SEQ ID NO: 95443 - DNA, 508 bp, Zea mays
  unsure (1)..(508): unsure at all n locations
ctaagaaagcggtcgactgcacgtaccgtccggaattcccgggtcgacccacgcgtccgcccacgcgtccggcaagaatatactctntgtcatctccaaaccagatgtgttcaagagtccgaattccgacacgtatgtcatattcggcgaggctaagatcgaggacctcagctcccagctgcagacccaggcagcagagcagttcaaggctcctgacttgagccagatgatctcgaatccagagacgtctggcccgggacaggaggacaatgatgaggaggacgacgaaacttgtgttgaggccaaggacattgagttggtgatgacccaggcatctgtttctaggcccaaggttgttaaggccctaaaggcttttaaatgaggacatttgctctgcccttaatgaatctgacaacttatggtgaaattttttgcccgggcaacttttgttttgaagggcttttgcaacctgggtgttatattttgacctaatccttaattaagttat

SEQ ID NO: 95444 - DNA, 527 bp, Zea mays
gtttattgttcgtttggtcttgccgctgatgactgactgattccgctgccggtccggaattcccgtgtcgacccacgcgtccgcggacgaccactccctccacaacgccttcagcacctacggcgaggtcctcgagtccaagattatcctcgatcgggagacgcagaggtcccgcggcttcggcttcgtcaccttctccacggaggaggcgatgcggaacgccatcgagggcatgaacggcaaggagctggacggccgcaacatcaccgtcaacgaggcccagtcccgcggcggccgtggaggctgcagctgcggctacggtggtggccgtggaagcggccgctacggctgttgcgggcgccgtgatggctgctgcggctactgcagtggctgcggcggctaccggggctgcggtggctacggcgtggtggtggccgcttcaggcggtggaaccgtggctgcttgttcttgaaacttctgactggaactggtagaactgatccgttggggcccgctccgtcaaattt

SEQ ID NO: 95445 - DNA, 534 bp, Zea mays
  unsure (1)..(534): unsure at all n locations
agtttatatgaggtatatgccgccnccatggantccgactgatagcctgttcgcctgcagcgtaccggtccggaattcccgggtcgacccacgcgtccgatgacaccagcatgtttcctgtatcattttgctgtttttttttggttgttgctccggtttcaacaaggagccggaaacatgttttctgtatcgttttaggtctttgttcggttaatcctattacctatgaattggatgagattgaaaaaattaagaaataactttgacttgtttggaatttaaaaataaaaaaaaagggcggccgctctagaggatccaagcttacgtacgcgtgcatgcgacgtcatagctcttctatagtgtcacctaaattcaattcactggccgtcgttttacaacgtcttgactggtaaacccctgcctttccctaacttaatcgtcttgcatcacattctccttttctccagctggtgtaattcctaataggcctcgtattcgattggccttttcttaccgattgccccaccttgaatt

SEQ ID NO: 95446 - DNA, 527 bp, Zea mays
  unsure (1)..(527): unsure at all n locations
agtatcatgccggntntgccgcgtccgattccgtcggtattacgcttcgaatgcacgtaccggtccggaattcccgggtcgacccacgcgtccgcgcctcggcttgtccccaccaacccgcagctcgctcccaccaaacccacacccgaacaatggcgtcggcgtccaaggaggaggtgatcgggaagctcaacatccgcgtggtgcggggcaacaacctggccatcgccgacccgctcacccacaccagcgacccctacgtcgtcctccagtacggcgctcagaaggtgaagactagtgtccagaagaagaaccccaatccagtgtggaacgaagtactgcagctctcagtaaccaatcctactaagccagtgcaccttggagtttttgatgaagacaagttcacagcagactactgcatgggtgttgctgagatcaactttctgacatctaacatgctgctaagcttgaccttgagcacgcttttgatgggaccaggatcaagacgatttaccttgttggataaa

SEQ ID NO: 95447 - DNA, 540 bp, Zea mays; identical to SEQ ID NO: 95203
  unsure (1)..(540): unsure at all n locations

SEQ ID NO: 95448 - DNA, 523 bp, Zea mays
  unsure (1)..(523): unsure at all n locations
gattgatntatcacgtactttctatcattggtcgttccgggcttgagataacggaccgacccacgcgtccgcacgccaagcgcgtcaccatcatgtttaaggtcatgcagctcgcgcgccttataggatgcgggctcgcctaagcagtacggttgatgcgcatgcttgctactcaatttggtgcttaatttatcatattatggatgaggtataggtttttcagttgaccattatatgatgaattttgtcggtaaattcttttatgataggcgtaccatgatttgctactacattctataatgtaattaatctgtaactgattttttatattatagtgttgatttataatattttatataaactttatattgttaaaaccttttacttgttatgtttgtatatttttaatatatttaaaattttaaaggtaataatcataataaatgaatttaattactttaaattatttaaattttattttttgttttaatatttattttagatatttttaatctttataaag

SEQ ID NO: 95449 - DNA, 515 bp, Zea mays
  unsure (1)..(515): unsure at all n locations
gtaaatgctagtcgctatncctgatagctgatacggtggactgccgtaccggtccggaattcccgggtcgacccacgcgtcgcccacgcgtcggagaagagctgcgccccgtcatgctcgctcgcgtggcactccgggggacgttcgacgtgtctctaggaccggcggtccattctcacgatgaagcatcagtcggaattggctcacggcgctaacgcgggctggacatcgcggtgcggctgtcgagcccatcaaggaggagttccaatcctctgtacgccgatttctaccagctcgcgggagttgtggccgtggaggtcaccggtgggcctgagattcccttccaccccggtagggaggacaagcctcaaccttcacctgagggccgacttcctgacgccactaagggttctgaccacctgaggcaagtttttggcaagcagatgggcttgagcgatcaggacattgttgccctatgtggtggccacacctttgtaaggtgccacaaatagcgg

SEQ ID NO: 95450 - DNA, 518 bp, Zea mays
cgtttttctcggtttctgctacgtagccgctgcatgcactactcgtcctgaattcccgggtcgacccacgcgtccgcggacgcgtgggcgagcggatgctgttcgacattcagaagttctacaacgtgttgattgaggagctgcctgccaacgtcgctgaccttctgtgatcattttgaagaaaaacagaactaaaagaaaggtggtgggggtgatctggtaaggcttgggtttgcctaaatatagtcttggaggagtgttaatgcctgttatgatggttatttaagttttttaattgttgtatattcttatctttattgatcaattgttctggacttatttacttttgttaattatatttcctttttcttgtatttttttttgtatttttattcttttttatgtaggtttttttcgtattattttcttttgattatttttttttttattattatttgattatcatttcgttagtttgtatatttttaatttatttatttatcttattagttatttat

SEQ ID NO: 95451 - DNA, 523 bp, Zea mays
gtttattgctcggttatgcctcgactgatgacggactgattacgcttggcatgcacgtaccggtccggaattcccgggtcgacccacgcgtccgcccacgcgtccgcccacgcgtccgcccacgcgtccgacctggtacaaagaaggtcggtgggatgccagacaacttatagcttctggcgggatgccatcatcccactcagctacagtgacagcactttcagtggctgtgggaatccaagaaggctttcgtagtgcaacatttgcaactgcactagtctttgcatgtgtggttatgcatgatgcttttggagttcggttacatgccggaaagcaggcagaggtgctgaatcaaattgtctatgagctgccagaggaacacccattatcagagacaaagccactgcgtgaaatccttggacatactgttcctcaggttgtggccggttgcatccctggaatacctatggctgtcgttatgcttttgtcttttgggaggtcttagtcaagtgttgttcaacct

SEQ ID NO: 95452 - DNA, 503 bp, Zea mays
taatgattcctcggtatagcggtgcgactgcacgtaccggtccggaattcccgggtcgacccacgcgtccgcccacgcgtccgcccacgcgtccgcccacgcgtccggcttcaacacggacgaggtggcggcgggcggcgcgccgcccgtgacgctgcacatggacggcggcgtggacctgacgctgccgatggagaacacgctgatccacagcagcgccacgccgctggcgtgcctggccatggccgaggcgccgcagaacgtgaacgccgacgtgaacgtggtggccaaccttcagcagcagaacgtgcgggtcgtcgtcgacgtcgccggctcgcgcgtcggtttcgcgagggagccctgcaactgagcccctgaattcgtccgtgccctatgcacggtaggtaggttgagtcttccttcggctgcttaatcgttcggtgtgtagttgtttgtatctgttagtttatgttactttgttttgtattttctatattcgtctt

SEQ ID NO: 95453 - DNA, 534 bp, Zea mays
  unsure (1)..(534): unsure at all n locations
tgaattagtnttagtccggnataaattggtcccccttgnagcggtacgcactgcacgtaccggtccggaattcccgggtcgacccacgcgtccgggcaaggcgtacgctgccacaccaacaaatctcaagattattgacctctacgtgggttttgcggttgccactgcccttattcaggttgcttacatgggattggttgggtcgtttcccttcaactccttcctctcaggagtcctttcatgcataggaactgcagttcttgctgtttgcctccgcattcaagtgaacaaagacaacaaagaattcaaggaccttcccccagaaagggcctttgctgatttcgtcctatgcaatctggtgctccacctggtgatcatgaatttcctcggataagcaactgctgcaccatgttggttaaaggttttgtagccccaagttgtggtcgctgattgtcgcctttaaatgtttggaactgtcgtgatcgtgatgtcgaatatccatatgatctgttgaagtaagcttagtattcccgg

SEQ ID NO: 95454 - DNA, 537 bp, Zea mays
  unsure (1)..(537): unsure at all n locations
tgttctatgtgatgtctctnnatncatgattnaactganagtggtacgcactgcacgtaccggtccggaattcccgggtcgacccacgcgtccgcaaaaacatttttggaatgttatgttcaagggaacattgaaccaagtgaagcagaatctatcgtagaagaaatcgaaaacactatatttactacgcccaattctttgttcaaatccatgtctccatcagaatatcttattaaaagggtcatcatgcttgaaaatgacttgaaatgctactaccaaactgagggattaaaccagaagaatgagaattcatcagttatccaatatattcaggtgcatcaagatgacgccattttgaatatcaaacttgagctgttctctctaatagcaaatcagccagccttcaaccagctacgaactgttgaacaacttgggtatataacaagtctttctctgagatccgactatggagtcctggcactccaggttgttatccagtccacagtaaaggatccttcataccttgatgttagagtt

SEQ ID NO: 95455 - DNA, 532 bp, Zea mays
  unsure (1)..(532): unsure at all n locations
aggattagctanagtccggnattgactgataagcctgagagcggtacgactgcacgtaccggtccggaattcccgggtcgacccacgcgtccgcccacgcgtccggctactctgtgaatctggaggagataacttggcagctaacttcagcagagaattagcagactacataatctacattatcgatgtctctggtggggacaagataccaagaaaaggtggccctgggataacccaggccgatctgttggtaataaacaagacagacctagcacctgctgttggagctgatctgtctgtaatggagcgagacgcacttcgcatgcgcgaaggagggccctttgtgtttgcacaggtgaaacatggagtgggcgtggaggggatcgtgaaccatattctgcaggcgtgggagatcgcgactggtaataagcggcgataagatctcacgacttgtggccatatgttggatgcagatttgaatcagtcggcacttccacatgcatgtgtcatctgttcgttctcaataaatctt

SEQ ID NO: 95456 - DNA, 541 bp, Zea mays
  unsure (1)..(541): unsure at all n locations
tgatttttgctggatttggttcccttctgttagccgnnctatctgcactgatctcgtcctgtattcccgggtcgacccacgcgtccgcgccgtcgtcttctgcggttctgccgtctactttccaatttggcctctctcccttgcaagtgtaagcttcatcttcagccatgggtaaggagaagtcccacatcaacattgtggtcattggccacgtcgactctggcaagtctaccaccaccggccacctgatctacaagcttggaggcattgacaagcgtgtaatagagaggtttgagaaggatgctgcttttatgaactagcttgcctttaagtttgcttgttttgctttcttagtttattgttgtttgttatatgtttatttttcttttgttttttgttcttgttgttttttatttttctgtttcattttcttttttttttttttttctttttttctatcttatttttctctgatcatttattttattattcttattttcattttttttattatttttatttattattcttcttctccttg

SEQ ID NO: 95457 - DNA, 524 bp, Zea mays
gttatatgcatgtatatctcataaatgattccgactgataccggtacgactgcacgtaccggtccggaattcccgggtcgacccacgcgtccgcccacgcgtccggaggtggaagtgtggcttcagacaataagtccaggtcaaaggacgccaatgcacaggcattcctgtgaagaagttttcactgtcctcaaagggaagggtacgctcttgatgggatcaagctcactaaagtacccagggcagccacaggaaattcctttctttcagaataccacattttcaatccctgtaaatgatccacaccaggtttggaattctgacgagcacgaagatttgcaagttcttgtgatcatatcgagaccgcctgctaagaatattttatatgatgattggagcatgcctcatacagccgcggtactgaaattcccctttgtctgggattaggacttgttcgaagcatcaaaagacgaactctatgtcacatgttgtttcctggcatttaatttgcttatccatgatct

SEQ ID NO: 95458 - DNA, 545 bp, Zea mays
tgtttataggaatccgagtcgtttccaggtatgctgtcgcactgcagcgtaccgtccgggattcccgggtcgacccacgcgtccgcgacaagccaatcgaagccgagatacggccatggactccaccggcaccggagcagggggtaaggggaagaagggagcggccggtcgcaaggtcggctggccaaggaagaagtcggtgtctaggtccttgaatgccgtgctccagttactcgtcttccttatctttcgctacttgttagaatgtccgatatttgcattgtgttttttctttattattctgtttatattgtcgtttattttgattacttttttgtttgaggttttgtttctttttatttaattcttgttcttggttatatttgtattaatttttatttttttatttttatatttcttttgttgtaaattttattttttttttatattatttatatttattttttttttttattctttctttattttttgatgttatttatttgttttttatttttttcttttattttttcttttaaattttg

SEQ ID NO: 95459 - DNA, 527 bp, Zea mays
  unsure (1)..(527): unsure at all n locations
gaacatgcttgtccanatgttgataaatgatgccgtacgcacgcacgtaccggtccggaattcccgggtcgacccacgcgtccgcaaagagactgggagattcagatccacacacatccgcatccctctctcctcggtttcctctcccaccaccaacccccagatcgcagcgatctccgccgccgccctctcagggattccgcgcgacaaagtcaggcgtagaggctccaggaggaggagggaggcgcagcagggcgggtgggggagatgttcctctgggactggttctacggggtgctggcctccctcggcctgtggcagaaggaggccaagatcctcttccttggcctcgacaacgccggcaagaccacgctgctccacatgctcaaggacgagcggttggtgcagcaccagccgacgcagcacccgacgtcggaggagctcagcatcggcaagatcaagttcaaggccttcgacctcggcggccaccagatcgcgcgccgcgtgtggaaggattactacgcaat

SEQ ID NO: 95460 - DNA, 545 bp, Zea mays
  unsure (1)..(545): unsure at all n locations
tgatagaggtnattccggaattttcgttagtccgtangcccgtacgcactgcacgtaccggtccggaattcccgggtcgacccacgcgtccgaggccaggctcaccgaggggtgctccttccgtcgcaagggcgattaggtcctgcttctcttaacgtgagaagagataaatttggtgttttgcaactttctcaggatatgtactcggtgaggatttagttaattattatggctgttagcgtagcctgactatgcttgtgtaaacctgaactccgtgtgagcgtagtgccagctaatatggtgctgcttgtcttttgctgagggtgtgactttgcatttgatatatactatctgtctatattacagacacgatttgtacattgatcaatttgttctatgatttagcctttttattttatatgttacgtttcattacttctcttgctttctaatcttatagttttgcaatttgatctacttttattacaaattctttgtactcttgcatttctgctaactttttttttataatacttctaattaat

SEQ ID NO: 95461 - DNA, 521 bp, Zea mays
  unsure (1)..(521): unsure at all n locations
tgttatgccagnttgatgatatccattatctgtacgactgcacgtaccggtccggaattcccgggtcgacccacgcgtccgcggacgcgtgggctacaacaagagagtattattccaagcttgtgaaggctgatgttcatggcaaagaccaagaaatatactgcattaaattgcctgggaaccccaagcttggtgaaggcaaacctgagaaccaaaaccatgccataatcttcactcgaggagatgcagttcagacgatcgatatgaatcaggataactacttggaggaagcaatgaaaatgagaaatttacttgaagaatttcataatgctcatggaaaacatggcatacggaagcccacaatcctaggtgtgagggagcatgtattcacggtgagtgactcttcgctggcgtcatttatgtccaaacaggagactagttttgttactttggggcaacgtgttcttgcttacctcaaattcgaatgcactatggacattctgatgtttttgatcggatat

SEQ ID NO: 95462 - DNA, 522 bp, Zea mays
  unsure (1)..(522): unsure at all n locations
ctaccgtatgcctgnatgacatgcactgactcgtgcntgaattcccgggtcgacccacgcgtccgcccacgcgtccgcccacgcgtccgcaaattttcaggccgttctcgtggtttcggctttgtaacttttgatgagaagcaagccatggaggatgctattgagggaatgaatggactggacttggacgggaggaacatcactgttgataaagctcagccacaaggacctggtagagaccgtaatggtgaccgtgattatgaccgcgagcgtggatctcgttatgaacgtggtcgtgactatggtggtgggcgtgcaccgcgaggtggtggtggtggtggtggttgtgtctgatttaagtgtgtggaattctgagtattttttattgtttgagtttattatggttattttattattgtgttttatattttttatatttattatattttagtttatgttatattttttttatatatttttttattttatatgttatgtaatttattttttctattttatttt

SEQ ID NO: 95463 - DNA, 525 bp, Zea mays
  unsure (1)..(525): unsure at all n locations
tgtgtatcgtgtagtnttagctcctccattgattccgaactgatanctgttcgactgcacgtaccggtccggaattcccgggtcgacccacgcgtccgcaaggatctgctgcaggtgcaccccaactcttacgccctggtgatcagcatggagaacatcacactgaactggtactttgggaacaaccggtccatgcttgtgtcgaattgcctgttccggatgggtggcgcggccatcctgctctcgaacaggcggtctgacaggcggaggtccaagtatgagctggtgcacacggtgcgcacgcacaagggcgccaacgacaagtgctttggctgcgtgacacatgaggaagatgagtttggcaagattggcgtgtcactgtccaaggaccttatggcatttgccgttgacccatttagtaccatctttaccactctggtgccgtttgttctctcttttttatagctatctattttttagtgtttatttgttttccaataatgttccttaagattagttttattt

SEQ ID NO: 95464 - DNA, 529 bp, Zea mays
  unsure (1)..(529): unsure at all n locations
tggtttatgtgatatccancatgatgccgctgatgcctgtcgcctgcacgtaccgtccggaattcccgggtcgacccacgcgtccgcccacgcgtccgcatggaatcaaagagcattttcttgtcaccactgaactgaagttcaattgctttctcctcatgccgattgttgacaaactaccagcacttctaagacaagaccttgagtcagctttcgaagaggaacttgatagcatctttgatgtcactcagctgcgccagtcacttgggcagaagaagcgcttgttttgatctaattttttattttgttttttttttattttttaatattttattttttttgttttttatatttatttttttttatattttttttattttttattttatattttttttatgttttatttattttttttattattttttttattttttatatatttttatttttttgattttttttttttatatatttttttttttttttttatttttttatatattattttttatatttttttttattt

SEQ ID NO: 95465 - DNA, 524 bp, Zea mays
gttagttatcctgatgcttgatgaatgatagctgtcgcactgcacgtaccggtccggaattcccgggtcgacccacgcgtccggggattcggaagagtatagaagcacgtacgaaacagttgctgcctttatatacccagattgcaatacggtttgctgaattgcatgatacttccctaagaatggcagctaaaggtgtgattaagaaagttgtagactgggaagaatcacgctcgttcttctataaaaggctacggaggaggatcgcagaagatgttcttgcaaaagaaataaggcagatagtcggtgataaatttacgcaccaattagcaatggagctcatcaaggaatggtaccttgcttctcaggccacaacaggaagcactggatgggatgacgatgatgcttttgttgcctggaaggacagtcctgaaaactacaaggtgcatatccaaaagcttatggctcaaaaagtgtctcattcgctctctgatcttgcttgactcagttcagatcttgaagcg

SEQ ID NO: 95466 - DNA, 514 bp, Zea mays
ctctgtatgctgcagtactgcacgtactcggtcctgaattcccgggtcgacccacgcgtccgcccacgcgtccgcccacgcgtccgcccacgcgtgcgagggcttcggatcccacacccaggaaaggagaagagagggtcggaataatggcggccgaggagggtgccgtgatcgcgtgccacaccaaggacgagttcgacgcccgcatggcctatgccaaggagcagggcaagctggtggtcatcgacttcatggccccctggtgcagtgggtgccagatgatggcccccgtgtacgcggactgggccagcaaggacctcttcgggggcttcctagaggtcgacgttgactaactggtggaagtctggtatatctacggcgtccatgtgtttccgactcttttgtttcattatggaatggctaagacgcctgggagcttttttatctgtttccatgattatcctttgtggcgctatcgggtattacttctttctctggcatctatacagtttcg

SEQ ID NO: 95467 - DNA, 514 bp, Zea mays
tggtttttgcctggttggttgcctctgatgacgatcgcactgcagctaccggtccggaattcccgggtcgacccacgcgtccgcccagaggtacgcggcgcccacgccacgtccttggaattattcacgcccgcgacagacgtgtacagcttcggggtgctcctgctggagctcctgacgggccggacaccgttccaggacctcatggagctgcatggcgacgacatccccagctgggttcgcgcggtgcgtgaggaggagagggagacggagtctgtgtccgccggtggaggtggagccgaggagaagctcacggcgctgatcaacatcgccgcgacgtgcgtggctgcggacccggccaggcgccctaccacggcggagctgcttccgatggtgagggaggccagggcctaggccatgtcatcgtccaacagcatgcaccggtcaaccatctcggtgtcggattccatgcttggccttccaattgcacgggatcaagcctctgtaatgtttt

SEQ ID NO: 95468 - DNA, 525 bp, Zea mays
  unsure (1)..(525): unsure at all n locations
gtttatccgacatgattctcagatgcctgtcgcctgcagcgtaccgtccggnattcccgggtcgacccacgcgtccgcccacgcgtccgcggacgcgtgggtgcgcgtgctcgtcactggcgccgcaggacaaattggatatgccctggttcccatgattgctaggggtgttatgcttggtgcagaccagcctgatattctgcacatgcttgacattccgccagcagctgaagcccttaatggtgttaagatggagttggttgatgctggcgtttcttttctgaagggatgttgtgctaccactgattgttgttgaaagcctgcactggggtcattgttgcccttcttgggttgttgtatactccattaatgttggttaatgttattggatattattgtattgttttatatattgttttaattttctatattttaatttattattcctctattataccttattctttttcttaaatgttatagttttttggtgtttttatatcttaagtatttttttattgtttg

SEQ ID NO: 95469 - DNA, 532 bp, Zea mays
  unsure (1)..(532): unsure at all n locations
tgtnttagtggnagtctcanattnattgactaaactgaagctgtacgcctgcacgtaccggtccggaattcccgggtcgacccacgcgtccgcccacgcgtccgctagaacctgtcatggtggtcgtgacagagctactagtggggggttcgttgcgcaagtatttggtcagtctccgacctaggagccttgagcctcgtgtagcagtggggtttgcattggacattgcccgagctatggaatgcttacatgcacatgggatcattcatcgtgatcttaagcctgagaatctgttgctgactgcagaccagagaacagtaaaacttgttgatcttggtttggctagggaagagacactaacggagatgatgactgctgagacaggaacataccgttggatggctccagagttgtacagcacagtaacactgaggcatggagaaaagaagcattacaaccacaaagtagatgtctacagctttgcaattgtgttgtgggaactcctncacaataaactgcccttcgagggaat

SEQ ID NO: 95470 - DNA, 532 bp, Zea mays
gtattctgtaggcttattcgtctacgattgcgtatgacactgcactactcggtccggaattcccgggtcgacccacgcgtccgaacttggaaaactttgttgatgtaaagaacattctcgttgaaatgggaacatactttcaagtgcaggatgactatctagattgttttggtgatcctgaattcattggcaagatcggaactgacattgaagactacaaatgttcctggctagttgtgcaagctcttgagcgtgctgctgagaaccaaaagagcattctgtttgaaaattacggaaagtctgatccagcgtgtgttgcaaaggtgaaggacttgtacaaagagcttaaactggatgaggttttccatgagtacgagagggagagttacaacaagctgattgccacatttatgcccattctagccagggtcttccaacctgtttgaaatcctttctttaaatgattttttagttggactaggtgactcctatcgtttataagctttttcatttactcttgcatatattaaat

SEQ ID NO: 95471 - DNA, 503 bp, Zea mays
  unsure (1)..(503): unsure at all n locations
gttatgcgnccatggtcctctgtagccgatcgcacgcactaccggtccgtnattcccgggtcgacccacgcgtccgcggacgcgtgggcggacgcgtgggcggacgcgtgggcggacgcgtgggcggacgcgtggggggttttgctgctctccgaccccgagctccgaaggccgcagcatcaggcgcggcccccctcgcgtgtgaccgagatggcgctgccgaatcaggggaccgttgattaccccagcttcaagctcgtcatcgtcggcgatggtggaactggtaaaactacatttgtgaagaggcatctcactggagagtttgagaagaaatatgaaccaaccattggtgtggaagttcattcgtaggatttcatcactaactgtggtatgatcaggttctaactgctggtattccttttgtcaagagaaatttgttggccctatgaatggatcctaattttattgcctttttgtaattaatcaggtatgatttatctttg

SEQ ID NO: 95472 - DNA, 558 bp, Zea mays
  unsure (1)..(558): unsure at all n locations
tgcttattatgccggnnttatctcctncattggattacctcttgnatgccagatacgcactgcacgtactcgtctcggattcccgggtcgacccacgcgtccgaacgtgttgattgaggagctgcctgccaacgttgctgaccttctgtgatcattgtgaagaaagacagaactaaaagaaaggtggtgggggtgatctggtaaggcttggttctgccgaaatattgtgggggaggagtgattatgtcggttttgttttcatgtttatatgttttttatttatcttgttatttttttttgatattttcttcttgttgtttattatattttttatttttatttattttttcttgtcttatttttttattttacattattcttatgttcttttttcttatttgtgttatttttatatttttttttgttttttttttttcatttttttttttattttcttttattttatattatatttatttattttttattatttttttttgtttttattttttttttattgttttttttttttctattatatttttttattttataatg

SEQ ID NO: 95473 - DNA, 529 bp, Zea mays
  unsure (1)..(529): unsure at all n locations
agtttagtnnatctcgnatncctgattncatgatgctggtacgcctgcaggtaccggtccggaattcccgggtcgacccacgcgtccgctcttgaagattatattcacaggataggtcgaactggccgtgctggtgctagcggaactgcatttacttttttcacacacgcaaatgcaaagttctcaaggaatctagtgaagattctgcgagaagctggccaagttgtgaatcctgccttagaatccatgtccaggtcttcgaactcaacgggaggaggcaattttcggtcgagaggcagaggtgggtttggtaaccggggccatatgtctggatcaaatacctttcctttaggaggaagaaggccatattgatgtgtgcaaaagaactgtgggagtatgggactatttgtatactactcggcattaagtgcattctttgggaaatttctgagaaatttcccctactaccaggattgataacaccatcgattttcgctacagtacctggagcttcttatatgaaagaacn

SEQ ID NO: 95474 - DNA, 534 bp, Zea mays
  unsure (1)..(534): unsure at all n locations
aggtttatgtgatgtcctnantagatgatantccgtaagctgtacgcactgcacgtaccggtccggaattcccgggtcgacccacgcgtccgctcttgaagattatattcacaggataggtcgaactggccgtgctggtgctagcggaactgcatttacttttttcacacacgcaaatgcaaagttctcaaggaatctagtgaagattctgcgagaagctggccaagttgtgaatcctgccttagaatccatgtccaggtcttcgaactcaacgggaggaggcaattttcggtcgagaggcagaggtgggtttggtaaccggggccatatgtctggatcaaataccttttctttaggaggaagatggccatattgatgtgtgcaaaagaactgtgggagtatgggactatttttatactactcggcattaagtgcattcttttgggaagtttctgagatatttcccctactactaggattgataacatcatcatttttcgctcaatatcaggagcttgttatttgaattaacat

SEQ ID NO: 95475 - DNA, 534 bp, Zea mays
gaattatgccggatatcttcgctgattccggctgatagcggtcgcctgcagtaccggtccggaattcccgggtcgacccacgcgtccgagcgactagtcgaaggcggcggcggcggcgatggggagcgacctggagacggagaagaagaagaccccggtggcgctgatgcccatcgcgaagcctctcgctggaaagaagctctgcaagcggaccctcaagctcgtgcgacgagcctctgaggccaagtgcctcaagcgcggagtcaaagaggtagtcaagagcattcgccgcgggaacaaagggttgtgtgtgattgctggaaatatttctcctattgatgtgattacacacgttccaatactatgtgaggaatctaatgttccttacatatatgttccatcaaaagaggatcttgcgaccgcatgatccactaagaggccaacttgttgcgtactggttctgacccaactaatcaaggtggagctcagtgccaaggtgtaaggttaactgaaagtatgctattacctatttgt

SEQ ID NO: 95476 - DNA, 535 bp, Zea mays
  unsure (1)..(535): unsure at all n locations
agttntagtccgagttccanantatttgattnaactgaaagctggtacgcctgcacgtaccggtccggaattcccgggtcgacccacgcgtccgcgtaataaaaccacttgaccgtcacaatcttctacgcccagagactgtggaatcactatttgttttgtatagaatcacagaggattccaagtatagggagtggggttggcagatctttcaggcttttgagaagtacacaaaagttgattctggtggttacacatcattggatgatgtcacaagcctacctccttccacgagagataaaatggaaactttctttcttggagaaacattgaagtatttgtatttactgtttgatgaaaacaatacccttcccctagataagtatgtgttcaatacagaggcccatcctcttccagttatgcggtctgcagaacaggcttcacattctgtgtagtttcccaagtttatagctgttgtaccatggtgagaagtacagatctgtgacaaatatacttgacaacatagttggaggaa

SEQ ID NO: 95477 - DNA, 514 bp, Zea mays
actgataccctgagtactggtacgactgcacgtaccggtccggaattcccgggtcgacccacgcgtccggcgaaggcgaccattccttcttcgctccttcgccgccgctatggttaagtactcgcaggagccgggcaaccctaccaaatcggccaaggccatgggaagggacctgagggtccacttcaagaacacaagggagacagcttttgcgcttcgcaagctgcctttgaccaaggctaagcgataccttgaggatgttattgctcacaagcaggcaattcccttccggagatactgtggaggtgttggtcgcaccgcacaagcaaagtctcgccactccaatgggcagggtcgctggcctgttaagtcagccaggttcatattggatttgctgaagaatgctgagagtaacgctgatgtgaaaggcttggacgtggacaacctctatgtttcacacatccaggtgaaccaagcccagaagcagatgcgccggacctaccgtgctcacggg

SEQ ID NO: 95478 - DNA, 518 bp, Zea mays
ttctgatgccgtccgcatgctgtacgcgctccggaattcccgggtcgacccacgcgtccgcccacgcgtccgcccacgcgtccgcggacgcgtgggttcgacttcacctcgcagaacgtcccgcgcgcgctgtggcagcccgtcaagggcacccgcctgtaccgcgtcaggtacggcgccgtggtgcagatcgtgttccaggacacgggcatcttcgccgccgaggagcaccccatgcacattcacggctaccacttctacgtgctggccacggggttcggcaactactacccgcgccgcgacgccgccaggttcaacctggtggacccgcccagccgcaacaccatcggagtgcccgtcggctgctgggccgtcgtgcgctttgtggccgacaacccctgggtgtggctcgtgcactgccacatcgacgcgcactttacgggagggcttgtcatggctcttctgtttgatgaccgttagtttgaacttgaggccaactgttctctctctgtttattt

SEQ ID NO: 95479 - DNA, 520 bp, Zea mays
  unsure (1)..(520): unsure at all n locations
gtttttggtgtttatcctcagcatgattcctctgtatgctgtacgcctgcagtaccggtccggaattcccgggtcgacccacgcgtccgcccacgcgtccggtcttcttcgacatgaccgtcggcggcgccccggcgggccggatcgtgatggagctgtacgccaacgaggtgcccaagaccgcggagaacttccgcgcgctgtgcacgggcgagaagggcgtgggcaagtccgggaagccgctccactacaagggctccaccttccaccgcgtcatccccgagttcatgtgccagggcggcgacttcacccgcggcaacggcaccggctgcgagtccatctacggcgagaagttccccgacgagaagttcgtgcgcaagcacaccgtccccggtgtgctctccatgggccaagccgggcctaacaccaacggcttccagttctttatctggaccgtcatgacttcttggctcgactgcaagcacgttgtctttggccaagttcttcagggcattgactn

SEQ ID NO: 95480 - DNA, 522 bp, Zea mays
gatgcaagacgctttgaaaccggttcgcctgcaggtaccggtccggaattcccgggtcgacccacgcgtccgcccacgcgtccgctctgcttcatgaaggttcatgtgagccaaggattcaggaagttgaagcagaagttcaggaaccttcagttcatccttggggaggtctttcgacaacaaaggatggcatcctaactcttcttgattgcttcataaatgcaaaatctcttcatgtgatccagaatgtatttgacaatgcacgtgcgagagaacgtgaacgtgagatgctttaccctgatgcatgtggtggcggtggcagaggatggattagcccagtgatacctaactatggcaggggccatggaacacgagatacctgtgccttgcacactgcacacctttcttgtgatactctggtggatttttggtcggctctgggtgaagaaactagatcatctcttttaaggatgaaagaagaggacttcattgaaagacttatgcacagattcgacagcatga

SEQ ID NO: 95481 - DNA, 511 bp, Zea mays
attgacctctgagtgctgtacgcctgcaggtaccggtccggaattcccgggtcgacccacgcgtccggtctgctcgcatttcctcccaatccatcccgcctccaaacccgaactccaagtcgccccgcatcgatggcgcccaaggccgagaagaagcccgcggcgaagaagccggcggaggaggagcccgctgccgagaaggcgccggccgggaagaagcccaaggcggagaagcgtgtcccagcaggcaagtccgccggcaaggagggcggcgagggaaagaggggccggaagaagggcaagaagagcgtggagacctacaagatctacatcttcaaggtgctgaagcaggtgcacccggacatcggcatctcctctaaggccatgtccatcatgaactccttcatcaacgacatcttctagaagctcgtcgtctaggccgtcaagctcgggcggtccaacaagaagccaaccattactctccgtgggatccaaacctccgtgcgccttg

SEQ ID NO: 95482 - DNA, 510 bp, Zea mays
  unsure (1)..(510): unsure at all n locations
ggtatatattatcgatgcactgcagtncgctgcacgctcccgtccggaattcccgggtcgacccacgcgttcgcccacgcgtccgcccacgcgtccgccctctcctagtctcctctccacactcccgctctcctgctactctgctccgtgatctggtctggtgagatcggggatcggaccgtcgactcggcgagacatggcggactggggccccgtggtggtgggcgtggtgctgttcgtgctgctctcgccgggcctgctctgcgagctgccgggcacccaccgccacgtcgacttcggcggcttccacaccaacggcaaggccatcttcgtccacaccctcgtcttcttcgccgccttcaccatcctcacgctcgcgctccacatccacatctacaccggctagctagctagctagtgcggagcacatgccgacggtctggactcgcggaggtctcagatcagaaaggaacgccggccggccgcgcgtcctgtgttgctgttcttgtn

SEQ ID NO: 95483 - DNA, 509 bp, Zea mays
cggggatatctttcattgaaatgagtccgttggcacgcacgtaccggtccggaattcccgggtcgacccacgcgtccgcggacgcgtgggtccggacgcgtgggctacgctcacctttcgtccgggcttgcctgtggccttgctgggcttgcagctggcatggccatcggcattgttggtgatgctggagtcagggcgaatgcacaacagccgaagctttttgtgggcatgatcctcatcctcattttcgcagaagcgcttgctctgtacggtctcattgttggaattatcctttcatcccgtgctggtcaatcccgggcagattaagtgcactaccattctgcaattaccgtactgtttattatgctattctaagagaattgaaaccctatgcccttgtctagtttattcttgttaccatgtattaatgaaacaatttgtagctgaaggaaggtgacacttccaaccatgttggttttggccggggtaagcagaggttatttattggt

SEQ ID NO: 95484 - DNA, 505 bp, Zea mays
ggccttgtgcgctgaatcaatccgatcgcctgcacgtaccggtccggaattcccgggtcgacccacgcgtccgcggacgcgtgggcaaccggcggtccatcttgagaggaccaagaaacagagagagcggttctacgtccgagtcgtcgcatcaggtcccctcgattcgccggcggcggcgccaccaaccaagctcatacatctgaattgactagtccaactcagggatttctttggggaccaatcaaactcaagaactaagtttcatgtctgatctcgacgtccagcttccatctgcttttgatccgtttgcagaggcaaatgctgaggactccagtgctggtgctggatcaaaggactatgtgcacgtgcgtattcagcagcgcaacggaaggaagagtctgacaactgttcatggcttgaagaaagagtacagctacaacaagatcctcaaggatctcaaaaaagagttctgctgcaatggtactgtagtccaggatccaag

SEQ ID NO: 95485 - DNA, 499 bp, Zea mays
gagtccttactgccactgatgcagagtctcctgcacgtaccggtccggaattcccgggtcgacccacgcgtccgcctcaaaagctccgatggcgaggagttcgaggcggaagaggcggtggcgatggagtcgcagaccatccgccacatgatcgaggatgactgcgccgacaacggcatccctcttcctaacgttaactccaagatcctatccaaggtaatcgagtactgcaacaagcacgtacatgccgccgccgccgccggcgccgcctcgaaggccggttccgacgacgtgggtgccgactgcgccaacagcaccgccgtctgcggtgaggacctcaagaactgggatgcggacttcgtcaaggtcgaccaggccacgcttttcgacctcatcttggctgcaaactatctgaacatcaagggtctactcgaactgacctgtcagactgctgctgacatgatcaagggcaagacaccagaagagattcccaagacct

SEQ ID NO: 95486 - DNA, 507 bp, Zea mays
ggtcctttttatgatgagctgagaccgttcgcactgcacgtaccggtccggaattcccgggtcgacccacgcgtccgcccacgcgtccggtcgctggtatatgtactgcgcagtcggtgtaggtgacgacgaatgaaaactgaaatcttggtctcctgaatacctgaaacagggtcgtttcgagatactgtctctgtccgggtcgtttcttctgtcagagaacggtggccagcgcagtcgaactggtgggctcagcgtttcgctagcaggccccgacggccgtgtcctgggtggctgtgttgccggactcctgacggctgcttcaccggtacaggtctgctgtcgtcctctggatcctgctggctgaaaaatcactaccttcctggttccattcatttcgtcgtggtagcgtaaattacagagcgttgtcggtcgtcgactgtatctccagatttcctcgtcgacgccactcaattgccttccttcgactgcacttgtgatcagtag

SEQ ID NO: 95487 - DNA, 501 bp, Zea mays
  unsure (1)..(501): unsure at all n locations
tgtccgntatnacgtttggactgaatccgttcgcactgcacgtaccggtccggaattcccgggtcgacccacgcgtccgggaaaatggaacaatatctgaggatgttgttcggagtgcgttttctgctacggaggaaggcttcttgacactcgtgcggagaacacgttttataaagcctttgattgctgcggttggatcctgctgtctagttggtgtcatatggagaggaacactatatgtggctaatctaggcgattccagggctgttactggcgttctaggtagatcaaacaagatcgtggctgagccactcacaagagatcataatgcaagtagggaggaggtcaggcaggagcttatatcccgtcatccagatgattctcaaattgtggttctcaagcatggtgtttggcgcatcaagggcataattcaggtttcaagaacaattggagatgcttacttgaagaggcgggaatttgctcttgatccatctatcactc

SEQ ID NO: 95488 - DNA, 499 bp, Zea mays
  unsure (1)..(499): unsure at all n locations
gattccgtactgccactgatggcggtcgcctgcagcgtaccggtccggaattcccgggtcgacccacgcgtccgggtctgtgctgagcttgctttgattattgttcacactttgtagtactcgtacttttcgcccccttcccttgtgggcattcttgacgtccctgtcttcctcggctgccgcagatacatgatttcgtcaaacattggtgaagtcgcttctatattcctaacttccgccctgggcattcctgagggtttgattcccgtccaacttctatgggtcaatctcgtcaccgacgggccccccgcaactgctctaggtttcaatccgcctgacaaggacatcatgaagaagccacctaggaggagcgacgactcactgatcactccctggatcttgttccgctacctggtaaacggtctccctcgcgtgctacccgtcccttgactctgttgggtcgtcatcttttggagactntgtctgcangtgattgccn

SEQ ID NO: 95489 - DNA, 513 bp, Zea mays
  unsure (1)..(513): unsure at all n locations
gcgtttctatttatgatatgcacatcggtcgcctgcacgtaccggtccggaattcccgggtcgacccacgcgtccgtccacgcgttcggccacgcgnttcgccacgcctccgggtccccatccttcgccaaggggaagagcaagatgctttacgcaagcttaaaccagaaattcaagaatggccttaaatgcattcaaggtgaacttcaagccacaaattccaatgaaattaacctttattagatcaaagattcggcaccctatgcgcaacggcatttcgaggttcatgatcacaccttattgacattcctacatattgtggatatgtatgcgcctttatacactgggctctgaaaaactgtttttgggagatgtggggttgttgctctgtgaaaagatactcataggttttacaaaacacttaaagtttggagctataatgtgaaatcctcttgttatgtcgactatgtatggactcttgtcatctgtttgtgcgtctgaacacattactaa

SEQ ID NO: 95490 - DNA, 507 bp, Zea mays
  unsure (1)..(507): unsure at all n locations
aggccttnatnacgttgaatgcaagccggtcgcctgcacgtaccggtccggaattcccgggtcgacccacgcgtccgaaagccagaagatatccctggtctcagggaagctgggtggacgcctgatcaattggggcattctaaatcacgatcatcattctccccggactataatacttacaggcaacagcttactacccttatgcagacagcgctgaagaatctgaatgaacatcctgatgcttggccattcaaagagcctgtggattcacgggatgttccagactattatgatatcatcaaagatcctattgatttaagaacaatgttaagaagagtcgactcggaacaatattatgtgaccctagagatgtttgtagccgacatgaagagaatgttcagcaatgcaagaacttacaattctccagatactatctattacaaatgtgcgacacggcttgaaaacttcttctcgggcagaattactgtactgcttgcacaactctan

SEQ ID NO: 95491 - DNA, 502 bp, Zea mays
tggcttatatccttgatggcggtcgcctgcagtaccggtccggaattcccgggtcgacccacgcgtccggagaacctcatcaaatatggaaatcattcgttgacctataggatagttgatagaattttgacacagataccaaggaaattcacaagcatgacagaagggaagatgggctatgaagactttgtttattttatattatcagaggaagacaaatcatctgagcctagtcttgaatactggtttaagtgcatcgatcttgatggtaatggtattttaacttacaatgaaatgcattttttctatgaggagcaattgcaccgaatggagtgcatggcacaggaacctgtggtttttggggacatattatgccagatgattgatatgattggaccagagaatgagagctattttactctacgggacttaaaacggtgtaaactctcaggaaatatattcaatattcttttcaatctgaacaagttcatggcatttgaaa

SEQ ID NO: 95492 - DNA, 499 bp, Zea mays
gtggtttattggatactgatgcggtcgcctgccgtaccggtccggaattcccgggtcgacccacgcgtccggccacgcgtacgcccacgcgtccgcccacgcgtccgtccacgcgtccggccacgcgtccggccacgcgtccgcccacgcgtacgcccacgcgtccgcgcacgcgtgcgaaaccacacacccgacctaccccggccggaccggcaggcagcacaacatggacctcgccctgctggagaaggccctgctgggcctgttcgccgcggctgtggtggccatcgccgtggccaagctgagcggcaagcggtaccgtctcccaccggggcccccgggcgcccccgtggttggaaactggctgcacgtgggcgacgacctgaaccaccgcaacctgatggccatggcgaagcggttcggcgacatcttcctgctgcgcatgggcgtgcgcaacctggtggtggtgtcgaccccggagctggccaaggaggtgctc

SEQ ID NO: 95493 - DNA, 513 bp, Zea mays
  unsure (1)..(513): unsure at all n locations
ggactatttatncttgatggcagtgcggtcgaccgcacgtaccggtccggaattcccgggtcgacccacgcgtccgcctaatgaaatatggaaatcattcgttgacctataggatagttgatagaattttgacacagataccaaggaaattgacaagcatgacagaagggaagatgggctatgaagactttgtttattttatattatcagaggaagacaaatcatctgagcctagtcttgaatactggtttaagtgcatcgatcttgatggtaatggtattttaacttacaatgaaatgcattttttctatgatgagcaattgtcccgaattgagttcattgtttaaagaaccttttggtttttggtgacatttttatttcagattatttaatattaattgatctaaataatgtagcctttttaatttttagggatttaaaaacgttttaaatttttaagaaattattttaataatttttttataatcttaaaatatttttttgtcttttaaa

SEQ ID NO: 95494 - DNA, 509 bp, Zea mays
tggtccattatatacattgaacgcacgtcgatacgcctgcacgtaccggtctggaattcccgggtcgacccacgcgtccgggaagaaccagttcaggggtatccgtcggttcccgtggggcaaatgggctgctgaggtcagagatcctctcatgggcgtgcgcctctggctcggcacattcaactcttccgaagaagctgctcatagcttacgactccgaggcacgcatgatccgcggcaagaaggctaaagacaacttctctgatgaggtttctactgctgtttctcagaagcgccgtgcttctggtcttgcctctctgaaagcccctaatatggactttgatgatgagaagcctatcatcaatctggcttgtaacaatttgaccaacttatacgcattattacttacccttcctgcatatgccattataacatctttccctggccatttatgcagaccttctgacatgccattctttcttttggtgaattatgctgccatggtgaat

SEQ ID NO: 95495 - DNA, 504 bp, Zea mays
  unsure (1)..(504): unsure at all n locations
gtgcctaattcncattgattgcaatccggtcgcctgcacgtaccggtccggaattcccgggtcgacccacgcgtccgctccgatccccgcccaaatcccacgacgccggcggcggccatgggcggcaaggacctgacggaggaccagatcgcctcgatgcgggaggccttctcgctgttcgacacggacggggacggccgcatcgcgccctcggagctgggcgtcctcatgcgctccctcggcgggaaccccacgcaggcgcagctccgggacatcgcggcgcaggagaagctcaccgcacccttcgacttcccgcgctttctcgacctcatgcgcgcccacctcaagcccgagcccttcgaccgcccgctccgcgacgccttccgcgtcctcgacaaggacggctccggcaccggcgccgtcgccgacctccgccacgtcctcacctccatcggcgagaagctcgaggcccacgaattcgacgagtggatccgcgaggtcgac

SEQ ID NO: 95496 - DNA, 506 bp, Zea mays
  unsure (1)..(506): unsure at all n locations
cgtggnntgtgntggctacggagtggcaggtacgcttgacgtaccggtccggaattcccgggtcgacccacgcgtccgccgaaccccaaaccctagcttcgctcgttgcggcggcggcggcgagccggcgatggcgaagtctctgcgatccaaacgcgagaagcggcttcggacgttgcgccgggagatagcggagccgttctacgacaagaaggaggccgccaagctcgccgcccaggccgcagccttagctgctgccccgctcccggtccgcgggcccccgccgtcccaggatgccggtaccccccgcgcagctagctcggcctcggctatggatgtggagatgtctggtgcagggaacagcaggtctaagaccttcttgaggccacttggcagcattagcaagaagaaggtgcagcttcatttgaagatcaagaaagacaagagaaaagctaggaagaatggaaagttttcttttaagaagtagacgagtgtatgatgaatcg

SEQ ID NO: 95497 - DNA, 526 bp, Zea mays
agattcctactcgctactgacccagtccgatgcacctaccggtcttgaattcccgggtcgacccacgcgtccgctcacgctccgcgttctgtcgcgacccgacttcgaacacctcccggacatcttcacctccgtcggcctcgagtactacgagaaggtcctcccatccatcggcaacgaggtgctcaaggccgtcgtcgcgcagttcaacgccgaccagctcctcaccgagcgtccccacgtctccgcgctcgtccgcgaatcgctcaccaagcgcgcccgcgagttcaacatcgtcctcgacgacgtcgccatcacccacctagcctactggcaggagttcgcgcaggccgtcgagaagaagcaggttgcgcagcatgaggccgagcgctccaggttccttgtcgcgcgcgctgagcatgataggcgcgctgctatcgtccgcgcctaggggtagagcgagtactttcgccttattttctaggccattacctctgtgggcaactggtcttatcgagctcatgtt

SEQ ID NO: 95498 - DNA, 505 bp, Zea mays
  unsure (1)..(505): unsure at all n locations
agtggcctgncttgcgtactgaaatcgagtacgcctgcacgtaccggtccggaattcccgggtcgacccacgcgtccgcccacgcgtccgcacgaggtgtggtgagcctagtgcttggctacttgaacaatcttgtgatcgaaatggccttcttggtacagggaaacacaaatgaagaactcccggaattcctcctaggtacctgccgactgaattacctggatgcctccaaggcagtgtccatagacgagtgctaggaccccaactgacctcattttttaaagccaagtacaccaaaagacaaaaaaaaaaggctgaatccccattccttgctgccgacacaatcggcaaccctagcccagatgcccattttattgcctcaccgcaaaagtgggggatccattgcaaccgttgtacattctcttcttgccgactgctcangtattgtgttggaatgattatagcaatccatgataaaagccctctcattcttttgcatcttatc

SEQ ID NO: 95499 - DNA, 499 bp, Zea mays
  unsure (1)..(499): unsure at all n locations
cgtggcctgactatggatggacccagtactctgcacgtaccggtccggaattcccgggtcgacccacgcgtccgaaggccatctcaaggaatgtaagcttgtcttccatcacaatacctgcatacacagtggcagaccttcagatggcaacgggcagcttcagtcctgacagttttatcggtgagggatcggtaggccgtgtttacaaagccaaattcggtgatcagaaggtcatggctgtaaagaaaataaacttctctgtatttccaagccatccttcagatttgttcattgagttggttgcaaacatttcaatgttaaatcatccaaaccttgctgagcttgctggttactgttcagagcatggacaatgcttgctggcatatgaattctaccgaaacggttctcttcatgatttccttcatctgaaagatgaacacagcaagccattgtcttggaacaaccgtgtcaagattgcgctttgatcttgcagagcatn

SEQ ID NO: 95500 - DNA, 505 bp, Zea mays
  unsure (1)..(505): unsure at all n locations
gtgtcttgtctatctattgacgtcgatancactgcacgtaccggtccggaattcccgggtcgacccacgcgtccgcccacgcgttcggcagatgtctggcgttcatctgaagagaagagatacaggagaagaatcagttcgtactgtgaaagggtcattttatggcataggacatactccaaacagtcagctgttgcagggccaaatcgaacttgatagtgctggctatattttagttaaagagggctcatccaaaacttcagttgatggtgtattcgctgctggtgatgtttaggatcatgaatggagacatgctattactgcagctggatctggatgcatagctgttttgacagttgaaagatacttagatgcctattatcttcttgtcgaaatttatcctttctgttcaagaataatacatttattgattttactgataaagatgttcattaggggctttgcaattttttacagaattcacctagggtccggtatgcacttn

SEQ ID NO: 95501 - DNA, 506 bp, Zea mays
  unsure (1)..(506): unsure at all n locations
cgcgttnacctggcgacgggacggcagtacgcttgacgtaccggtccggaattcccgggtcgacccacgcgtccgggtttccaaagccaagtgtgtgtactagcaaccagctagctcgggcggcagcaggcagccatcatgtcggaggagaagcaccaccacttcttcaaccaccacaagaaggacgaggagcagcccgccggcgagtacgggtactccgagaccgaggtggtcaccgccaccggcgagggcgagtacgagaggtacaagaaggaggagaaggagcacaagcacaagcagcacctcggcgaggccggcgccatcgccggcggcgccttcgcactctacgagaagcacgaggcgaagaaggaccccgagcacgcgcacaggcacaagatcacggaggaggtcgctgccgctgcggccgtcggcgcctgcggctacgtattccacgagcaccacgagaagaaaaaggaccacaaggactccgaagaggccaagcgcgt

SEQ ID NO: 95502 - DNA, 509 bp, Zea mays
ctcgactgacttgcctaccgcatcggagatgcgaatgcacgtgccggtccggaattcccgggtcgacccacgcgtccgcccagcgccggcagtcgccgtcatcgatcgatcgccggaaaactaacccctaacgatgtctggagccggcgaggaggacaagaagcccgcggagggcggcgcccacatcaaccttaaggtcaagggacaggatggcaatgaggtgttctttcgcataaagaggtccacccagctgaagaagctgatgaacgcttattgtgaccgccagtctgtggacatgaatgccattgcgttcctgtttgatggccgcaggcttcgcggcgagcagacccctgatgagctggagatggaggacggcgacgagatcgatgccatgcttcaccagaccggaggcagcgttcctagcaccacctaaaagcatcagtcgcggagcttcgttttgctctccgtcctgcgtagtagtaaacaaaaaggaaaaagtctttttaagg

SEQ ID NO: 95503 - DNA, 534 bp, Zea mays
  unsure (1)..(534): unsure at all n locations
caactgaatgntcgntctcatgcacgtaccggtccggaattcccgggtcgacccacgcgtccgcccacgcgtccgactcattagaccacatcctgccatttggaggcttgttcatgggatgacaggggtttaccttgtcgccctcactttcttgctttttcagactcgtgatgatgctaggcaattcatgaagtatcttcatcctgatcttggtgtcgaatttcctgaaagatcttatggaactgattgtcgcatatatgtccctgatcatccaaaaagcaggtttaacaatgtttatgagatcattttttgatgaatttgttatagctcatatccttggatggtggngtaaggctataatgatacgaaaccaaccactttttgtggtcttggcaattgggttttgaagttaatggagctcacttttcggcataaggtggccaaatctcaatggaatgcctgtttgggatagcaattgtcctaaacatattgatatgcaaattgggtttggaattttggcctggaatgaaaacc

SEQ ID NO: 95504 - DNA, 533 bp, Zea mays
  unsure (1)..(533): unsure at all n locations
naataagaccgctggtacgcctgcagtaccggtccggaattcccgggtcgacccacgcgtccgcggacgcgtggggtcgcgtatcacgacgaggagtggggagtgcccgtgcacgacgacgagtaagcaagccgccattattccttgctccttgcaagcgcaagctgatgctcacggcaacagctgtgctcacatgttcgagatgcactgaaacgacaggttgctattcgagatgctcacactgtctggcgtgcaagtcggggccgactggacttccatcctcaagaaaagacacgtgtacagggaggcgttctccggcttcaacgtggatgcggtcgccaagtacaccgagaagcagatggcgtcgctgaacgccgactacgggctggatttgggcaccgtcagaggaaccgtcaacaacgcctgccggattatcgaagtgcgganggacttgggctcgctggacaagtacgtgtgggcgttcgggaacaacaaggcgctggccccgagcttcaagtacaaccgggaaaact

SEQ ID NO: 95505 - DNA, 543 bp, Zea mays
tggagtccgttttttctgcactaggacgcggtcgcctgcacgtaccggtccggaattcccgggtcgacccacgcgtccgccagtctcccgggcagaagaggcacgagaggaaggtggggaaggaaaccacagccgcttctggcgggcgctcaccctgccccttccacctcgcctcgcctcgcaatggaggtttccaggtggaccccggcggccggcctcctgctcctgttgctcctcccgctcgcggccaccccgtcacgcgccgccacgatggcgagatcgccgtcgtcgtccactgccgtgttccagctccagggagacgtataccccaccggccactactatgtcacgatgaacattgggaacccagcgaagccctacttcctggacgtggacactggcagcgatctcacctggctgcagtgcgacgcaccctgtcggagttgcaacaaggtgccacatcccttgtatcgaccaacggcaaaccgccttgtaccgtgtgcaaacgcactctgcactgcactttacaacggacagggcttt

SEQ ID NO: 95506 - DNA, 546 bp, Zea mays
gtgagcccgtttcgctctcgtcgacgccggtcgcatgacgtaccggtccggaattcccgggtcgacccacgcgtccgcccacgcgtccgcccacgcgtccgcccacgcgtccgcccacgcgtccgcccacgcgtccgggctcttctccctcttgccggtcccgaataaagagcagcagcgcaagaggtcggtagagcgagaagaaggcaatggcggccgagagcttccttttcacctcggagtccgtgaacgaggggcaccccgacaagctgtgcgaccaggtgtcggacgccgtgcttgacgcatgcctcgcgcaggaccccgacagcaaggtggcctgcgagacctgcaccaagaccaacatggtgatggtgttcggcgagatcacgaccaaggcgaccgtggactacgagaagatcgtgcgcgacacctgccgcgagatcgggttcacctgcgacgacgtgggcctcgacgccgaccgctgcaaggtgctggtgaacatcgagcaacaattccccgacattgcgcatggcgtgcacgggcact

SEQ ID NO: 95507 - DNA, 545 bp, Zea mays
cggagtcccgtttgtcgcgttgcagtacgcggtacgcactgcacgtaccggtccggaattcccgggtcgacccacgcgtccgcccacgcgtccggaacaacgcgaccgccgccgtcgacgacgacgactcagctactcgcctggggatgggggtcgaactggcgcaaccgaccgccgacgcggctgcggtgaccaccgctgagcaggctcaggatctcatcgacgccgctaggtacgacgacttggaggacgtagtcgccctgttctccgctggtgtctcgctggactccacagattcgcaaggccgcacagctcttcacatggcttctgccaatggtcaccttgctgaggtggaatacttgattcaaaatggagcgaatgttaatgccaccaacatggagaagaacacaccactccactgggcatgccttaatggacgtatagaggtaatcagggctttgatctcagcgggggctagcgagagtgctctgaacagccacgagaaaacgccaatggaccaaagcggtgaccccaggcaaaatggt

SEQ ID NO: 95508 - DNA, 495 bp, Zea mays
  unsure (1)..(495): unsure at all n locations
naattgataatcgatcgcctgaggtaccggtccggaattcccgggtcgacccacgcgtccgcccacgcgtccgattggcattgcgctcatgttggcttggtcttccatacaccttcaccattgataactttggagcccagaagacagtgcaaagctggcaattgttcttatgtgtggcggttggtctctgggctggcttagtcattggttttattactgagtactacacaagcaatgcctacagccctgtataagatgttgctgattcctgcagaactggagctgccactaatgtcatttttgggcttgctctgggttacaaatcagtcattatcccaatttttgctattgcgtntagtatcttccttagcttcagccttgctgccatgtatggtgttgttgtggctgctcttggaatgctgagtaccattgccacaggccttgctattgatgcctatgggcctatcagtgataatgctggaagcttaagtctgg

SEQ ID NO: 95509 - DNA, 549 bp, Zea mays
  unsure (1)..(549): unsure at all n locations
tgtgtgtcccgtntagtgtttctgcatacgctctactgacgtaccggtccggaattcccgggtcgacccacgcgtccgaaaggcagctgaggagaagccctctagtggtactgagtctgaagctgctccctcaaccaatgatgaaactcctccatctgtagaagacaagaatggaacttctgaagtacaagatgctgctgaaaatccagaggcagaagaaactaacactgctgcagaggaaacacctgctgtagaggaagcaagtgagactaccgaggaggaagaggctgagaaacctgagatcaagatcgaaacagctccagcagattttcgtttcccaacaacaaaccaaacaaggcattgtttcacacgctatgttgaatatcacaggtgtgtggctgcaaaaggtgaagatgcacctgagtgtgataagttcgccaagtactatcgatccctgtgcccaggtgaatgggttgatcgcttgaacgagcaacgcgaaaacggcacctttcctggaccttttgtatcctacaatgcataagaagtatt

SEQ ID NO: 95510 - DNA, 524 bp, Zea mays
  unsure (1)..(524): unsure at all n locations
cctgagaccgctcgcctgacgtaccggtccggaattcccgggtcgacccacgcgtccgaggccgcgtacctccacgggcacttcagcgcccgcgtcaagctgcccgccgagcacaccgccggcgtcgtcgtcgccttctacatgtccaacggggacgtgtacgagcggacgcacgacgagctggacttcgagttcctcgggaacgtgcgcggcaaggagtggcgcgtgcagaccaacgtgtacggcaacggcagcacggcggccggccgggaggagcgctacggcctctggttcgacccaaccgaggacttccaccgctacgccatccactggacccgcgacaggatcatattctacatcgacgacacgccgatcagggagatggtgcggacggagtccatgggcgcgcagttcccgtccaagcccatgtcgctgtacgccaccatctgggacggctccagctgggccacctcggngggccgctacaaggtggactacaagtacgcgcnctacgtcgncgagtt

SEQ ID NO: 95511 - DNA, 573 bp, Zea mays
  unsure (1)..(573): unsure at all n locations
tggtagtgccggtttgtacgtgcacgtagcaaagctggtacgcactgcacgtactcggtctcgtgaattcccgtggtcgactccactgccgtccgaagggaaagtatcntgggccatcttgatatctgcnntgcgtcgatgtaaaatgccgggcttacttcctttgcgtcacgnaatcaagctgttacttaatgctcaacactgaagatggttactcaanttaggganagctttccgaagccaatactctgggctgtgattctgctctttgtgatgggtttcatagcaggtggtttcattctgggtgctgttcacaatgcaattttgctgatagttgttgtggtgatatttggttttgttgctgcacttcttatctggaatgcttgctggggtagtagaggtgcagttgggtttgttaatcgctatcctgatgctgatctcagaactgctaaagatggacaatatgtaaaggttacaggggttgttacctgtggaaatttcccccttgaatcctcgttccaaagggtcccgaaatgtgtatacacttctactagcttgtatgagtacagaggn

SEQ ID NO: 95512 - DNA, 514 bp, Zea mays
gttagatcctagtctcgtgtccaatgatgatcgatcgcatgtacgtaccggtccggaattcccgggtcgacccacgcgttcgcggacgcgtgggtggggataggcgtaggaccgttatgaggccaccacaagttcttagggagggaacaaagaagacagtttttgttaactttatggatttgtgtaaaacgatgcataggcaacctgagcatgtgatgatgtttttacttgctgaaatgggaacaagcgggtcacttgatgggcagcaaaggttggtgatcaaaggaagatttgcccccaaaaactttgaagcaatcctgaggagatacatcaatgagtacgtcatctgcaatggatgcaagagccctgataccattctgtccaaggaaaatcgtctgttcttcctttgctgcgaacagtgtggatcttcaaggtccgttgctccaatcaaagctggattcgttgctcaagtcggtcgtcggaaggcatgagcatctatatgtggatggtgttg

SEQ ID NO: 95513 - DNA, 550 bp, Zea mays
  unsure (1)..(550): unsure at all n locations
tgagtgtcccnttatctactcaacttaagctgctactcctgacgtaccggtccggaattcccgggtcgacccacgcgtccgcggacgcgtgggcttgcttctcagatttgcggatgattcatatttggacagctacatcagcacaattggggttgattttaaaattcggacagtagagcaagatgggaagaccataaaacttcaaatttgggatactgctgggcaagagcgcttcaggaccatcactagcagctactaccgtggagctcatggaatcattattgtatatgacgtgacagaccaagaaagcttcaataatgtgaagcaatggttaaatgaaattgatcgttatgcaagtgacaatgttaacaagctccttgttgggaacaagagcgacctaactgccaacaaagttgtggcaactgagacagcaaaagcatttgctgatgagatgggcatcccgttcatggagacgagtgccaaaaacgccaccaacgtggaacatgccttcatggctattgctgcattcatcaaggacaggatggccaan

SEQ ID NO: 95514 - DNA, 526 bp, Zea mays
cactgagagctgcgtcgcctgcacgtaccggtccggaattcccgggtcgacccacgcgtccgctctacatttcttctgtctctgctcctccgcctccgcctgatccatccaagacagggatcgccatgtcggactcggaggagcaccacttcgaatcgaaggccgacgctggggcgtccaagacctacccgcagcaggctggcaccgtccgtaagaacggcttcatcgtcatcaagaaccgtccctgcaaggttgtggaggtttctacctgcaagactggtaagcatggccacgccaaatgccactttgtcgccatagacatattcaatgggaaaaagcttgaagatattgctccttcatcacacaactgtgacattccgcatgtgaaccgtactgagtatcagctgattgatatttctgaggatggatttgggagcccttttacttcagatggcaacactaaggatgatcttagcctcccactgatgagactcttgtggcccagaataaggaatgtttcgaaagc

SEQ ID NO: 95515 - DNA, 524 bp, Zea mays
tcagtagagctgctcgcctgcacgtaccggtccggaattcccgggtcgacccacgcgtccgcccaaaccgacaccacagcctgagccaaaaccagagcctaaaccggaaccgaaacctgcaccacaaccagaccccaaacccgcaccacagccggacccaaaacccgcaccacaaccggacccaaaaccagaacccaaacctacaccacagccagacccaaaaccttcaccacaaccaggcccagagccgaaacccaagccagcgccacagcctgaaccaaaaccagaacccaaacctacaccacaaccagacccaaaacctggaccacaaccagacccaaaaccagaacccaaacctacaccacaaccaggcccagagccgaaacccaagccagcgccacagcctgaaccaaaacccacactgcaaccagatccgaaacctgagccaaaaccaacaccacaaccacccttccacagcccgagccttaccagatcccgaacccaacccaaccattcaagcaggg

SEQ ID NO: 95516 - DNA, 544 bp, Zea mays
  unsure (1)..(544): unsure at all n locations
tggagtccgattttnctaatgcagaccgctgatcgactgcacgtaccggtccggaattcccgggtcgacccacgcgtccgccctaacaatgtgaagtcgagtgtgtgcgacatcccacccatcggcctgaagatgtcctccacattcatcggcaactcgacctccatccaggagatgttccgccgcgtcagcgagcagttcactgccatgttcaggaggaaggccttcttgcattggtacacgggtgagggcatggatgagatggagttcactgaggcagagagtaacatgaatgacctggtggccgagtaccagcagtaccaagacgccacagctgaggatgaggaggagtacgaggaggaagaagaggaagatcctgctgcctaagccatcatcccaagtgcttggtaaagatatgatgtcccttgtatcgctgctagtcagcactgagtcgtttgaggtgctcgtggtgatgttaggtactagatgggtgtcattacttatgaatgcgatgttgctgtgacagaactgcatntnctattgg

SEQ ID NO: 95517 - DNA, 550 bp, Zea mays
ggggtgtgcctgttttgtctatctgatgacgctggtcgcctgacgtaccggtccggaattcccgggtcgacccacgcgtccgcccacgcgtccggcactgcgctcatttctgcatccccctcccgccgcgccgcctcaccgccgccggagaagatgggtcgcgtgatccgcgcgcagcgtaagggtgcggggtccgtgttcaagtcccacacccaccaccgcaagggccccgcccgctttcgctccctcgacttcggcgagcgcaacgggtacctcaagggcgtcgtcaccgacgtcattcacgaccccggccgtggcgcgccgctcgccaaggtcactttccgccacccattcaggtacaagcaccagaaggagctctttgtcgcagccgaaggcatgtacacgggccagttcgtctactgcggtcgccgcgccaccctcttcatcggcaacgtgcttgcccttcgcgggatccctgagggtgccctcgtctgcaacgtctagcaccaactttgtgaccgctgagtctttgccagtgccttttgggacg

SEQ ID NO: 95518 - DNA, 466 bp, Zea mays
  unsure (1)..(466): unsure at all n locations
naattgaaagtcggntcgcactgcactaccggtccggaattcccgggtcgacccacgcgtccgcccacgcgtccggactagttctagatcgcggcacagagcctcattcatctccattcgaaacacgctcgcacccacactctcccttcgtccccagcctaaatccccgcaacgatggctcgcacgaagcagacggcgcgcaagtccacgggcggcaaggccccgaggaagcagctggcgaccaaagcggcgcgcaagtcggcccctgcgaccggcggcgtgaagaagccgcaccgcttccgcccgggcaccgtggcgctgcgcgagatccgcaagtaccagaagagcacggagcttttcatccgcaagctgcccttccagcgcctggtccgcgagatcgcgcaggacttcaagaccgacctccgcttccagtcctccggcgtcgccgtgctgcaggaagcctccc

SEQ ID NO: 95519 - DNA, 486 bp, Zea mays
cccttgaaatcggtcgcctgcagtaccggtccggaattcccgggtcgacccacgcgtccggcacaactctctcgcaggcttctctcccctctgcgcccttcccgcagcaccctgctcgcagcgctctccacaggacctgctccgcgcgcgccgcccccatcgccggcaaggcggcggtgctgctgcatattctcccggtcccccctccggagccaccctccccttctccgggacctcgagtaactttggagtaccagtgatgcaaagggacactagctctagcgatgtttctgcttctcatgtagggcgtgtaagacgtcgcaaacatccatctgaggcttccacagatgggaatagagctaatggacaaccgttgcttgtcaatgatcagaacaagtataaatcaatgcttatccgtacatattctacagtatggatgattggaggctttgcctttattatttatgtgggtcatctatatatctg

SEQ ID NO: 95520 - DNA, 528 bp, Zea mays
cactgcagactgctcgtactgcacgtaccggtccggaattcccgggtcgacccacgcgtccgacacttatgcccggtgcacacgctcggtttctgttgtccctcctgcatactacgcacacctgggagcattccgggcgcggttctacatggaaccagagatgtcggagaaccagacgtataagagctccaatggcacgaacggaggcttggtgaagcccctgcctgctgtgaacgagaaggtgaaaagggtgatgttctactgctgacaaggtgaccactttaacaaccattcacatgctgtagctaacttggttaggttcagtagggggattagattagctttctacaggaacgaagaggaaacgggatgcgtatttggatcatgaacaatcaatctgatagcgatcgctgtagaatactcagaaatgcctgtataataagtcttgtaggttcaaaacagcctggttattcttaccgtctgtatcataggacattgcactttctgctgcttcaaatgaaaccttag

SEQ ID NO: 95521 - DNA, 552 bp, Zea mays
  unsure (1)..(552): unsure at all n locations
ggttgttctcttatatagctaatcacagatcgctgtacgactgcacgtaccggtccggaattcccgggtcgacccacgcgtccgacagcaccgctgccgaaggtgggaaagaaggctgcggcagtagcaccggcaccgactaggaaaggaaaccgtggaaactacagccatggtggtgcggatccgtctggcagcggttcgggtgccggaatcggcccttctaccgggtgatggccgtctatagccgctcccctcgagacggcaagcaccttgaggtactcggctactataaccagctcccagggaaggatggatgcaaaaggatgggcctgaaattcgaccgggtgaagtattggcttgcaattagggcacaaccattagatcttgtgcagagtattctcttttcgagccggacttgtgtcaccacctgcattgctagctatggcacggaatggttggctcacttgattaggtgctcaattaatccaatgaacagtgcgcaccttggaacttctatggtgtctcaaattttggtaattccaatgctctcgn

SEQ ID NO: 95522 - DNA, 498 bp, Zea mays
ctaccgaaagtcgaatcgcactgcacgtaccggtccggaattcccgggtcgacccacgcgtccgcatatctatctggctgtgtactgcaagcaggcctagtacgccgcctgcgcgttcctcctatgaggacatataggcccctccctgcgtgtatgcttgttaccgtcgtgtcgaaccttgtactacgaggctccatcgaacatcgatggcttgcttctttatcagaacatgtttgaataaacgctatttggtaaaaaaaaaaaatataattttaatgattattttttttatattatatttattatatatatttttttttatttttttgaattttttaatataaataaaaaagggcggcccttttaaagggtccaagttttctttcccgtgcatgccacttattaacctttttttaagggtcccccaaatttaatttaattggccggttttttaaaaacctcctagccgggaaaaaccctggggtttccccaatttat

SEQ ID NO: 95523 - DNA, 478 bp, Zea mays
cgctgatagtcggtcgcctgcagctaccggtccggaattcccgggtcgacccacgcgtccgcccacgcgtccgcggacgcgtgggcccacgcgtccgcccacgcgtccggaggatatcttgactggatttaagatgcactgccatggctggcggtctatttactgcatcccgaagcggcctgcattcaaaggttctgcgcctctgaacctttccgaccgtcttcaccaggtccttcgctgggcccttgggtctgtcgaaattttcttcagcaagcactgcccactttggtacggatacggcggcgggctaaaattcctggaaaggttttcttacattaactccatcgtttatccctggacgtccattcctctcctggcttactgtaccttgcctgccatctgcctgctcacggggaagtttatcacaccagaacttaccaatgtcgccaggatctgggtcatggcacttttcatttgc

SEQ ID NO: 95524 - DNA, 473 bp, Zea mays
tacgaattggtcgcctgcactaccggtccggaattcccgggtcgacccacgcgtccgggctggcttctcctccccctcttaccaagtcctcctcgggttagggttccttagggttttgtggaggggcgatggcggcggctgatgtggagtaccgttgcttcgtcggcgggcttgcctgggccaccagcaacgagtcgctggagaatgccttcgcctcctacggcgagatcctcgactccaaggtcatcaccgaccgggagacggggaggtctcgcggcttcggcttcgttaccttctccttcgagaactccatgctcgacgctatcgagaacatgaacggcaaggagctcgacggccgtaacatcaccgttaaccaggcccagtcccgtggcggtggctactgccgctgtcgcggctgccgcggctattgtggctggcgccgtgacagcggttattgctgccgtggcagctac

SEQ ID NO: 95525 - DNA, 534 bp, Zea mays
  unsure (1)..(534): unsure at all n locations
agattagatgccnattgtctgcgtanattactgaaagtcagatggcactgcaccgtaccggtccggaatttcccgggttcgacccacgccgttccgcaggatataagttatgcctgtggatgccagtcaaagtttgcgtattatttcggtaggtgcattgtaagtacttccgcggctgaaagtcttagtctaccttggtggtgatattgggagcatgctactccaaagcaaagtgcaccatcagagggtgcgtcgataccccgcggattgcgaaaacaggcttgcaaaagggttcgagtatcttcaactctgccagcccgaacccaaacgtggctacnggcgcccttgttgggtggccatttcagaacgacaacttcgtggacttccgtgacaacgccgtgcaaacggagttcagcacctacaacaatggcaccctggtcggccttctcttcggcctngtcaccactttcttcgtggtacagtccttcacctagaaggcttcctctatgttcttgccttgaacgattcttgtac

SEQ ID NO: 95526 - DNA, 527 bp, Zea mays
tccgtagagctgctctactgcacgtaccggtccggaattcccgggtcgacccacgcgtccgcccacgcgtccgcccacgcgtccggcagatccttccagcggctgtcgctgttcctgttccaccttccgttgatcataagcaagcagcttctgtgatgctcaagggcatgaccgcccatgttctgcttcgccgggtattcaaggtacaaacaaaccctaaaccctaaccactacttaattgattgatttttagccctcctcttacagtatccactcagtctgggatctcagcccttggctaactgaatgtgattctgacgaccccttcttattactttgcgcgagcgttctgacaattgtttatttgaacaatcaattggatatgtaaacagtaagcaaaaatgacattgtatatttatataagtaatatataggtctaattatatacatggaaagcagattcatagtatgaaatttgggtttatgaatttgcaaagttttttagatagaatcaatggatgtggacc

SEQ ID NO: 95527 - DNA, 526 bp, Zea mays
catgactgacagcggtacgcatgacgtaccggtccggaattcccgggtcgacccacgcgtccgcccacgcgtccgcagtgattgagtttgcacgttctatcatgaagttgcacggtgcaaacagcacagagttcgatccaaccacaaaaaccccatgtgttattttcatgccagaggggtcaaaaacccatatgggggcaacaatgcgccttggatcaaggaggacctttttccaggtcactaactgcaaatctgctaaactgtatgggaatgctagctacgttgatgaacggcaccgccacagatactaggtgaatcctgatatggtcccagaatttgagaaggcagggctttctttcgttggcagggatgaaagtggtaaacgcatggagattatcgaactgccaactcatatgtatttcgtcggtgcacaatttcatcctgaattcaagtcaaagccggcaagccatcttcggttttcttacgaattggagcaacgtcataagtcagcttgatcacctgctct

SEQ ID NO: 95528 - DNA, 480 bp, Zea mays
  unsure (1)..(480): unsure at all n locations
acattgaaaatcgantcgcactgtcacgtaccggtccggaattcccgggtcgacccacgcgtccgaggaggagtccccgagcaggtggcgaggctgtgcagcttcgaggtgctcagcggcctgtaggggaaccaaaccggaggtgtcgcttttggaaacgatttagtcattggcaagtctacgttcttcagggaaggcaaggtgggggactgggaaaaccacatgaccaaagagcaaggacagaggttggatgacgttttggaggacaagcttaagggatctggtctcgtgttttgattaattcatatagcatgttgcatgtcatgaataatcattcgcttacacatgtagtggtattttaatgtattggatctttttttttctacatagattcacgtatgggaatccagaaatatggggaacctcaattaattatgggcatctgattgtaaggaaattaggtcctttttgtggaaaaaa

SEQ ID NO: 95529 - DNA, 525 bp, Zea mays
  unsure (1)..(525): unsure at all n locations
cactgatntcgtctactgacgtaccggtccggaattcccgggtcgacccacgcgtccggttgtatgttagaagagtgttcatctctgatgaatttgatgaccttcttccgaagtatctcagctttttgaggggtattgttgactcagacacactgccgctgaatgtgtcacgagaaatgctccaacaacatagcagtctgaagactatcaagaagaagctgatccgcaaagctcttgacatgattaggaaacttgctgaagaagaccctgatgagtacagcaacaaggataagacagatgaagagaaaaatgagatggaggagaagaagggccagtacgccaagttctggaatgagtttggcaaatcaatcaagctgggtatcattgaagacgcaactaacaggaaccgncttgcgaagcttcttagatttgaaagtcccaagtcngatggcaaacttgccttctttgacgagtacatttcagggatgaagccaggcagaaagacatcttctacctcacgggaag

SEQ ID NO: 95530 - DNA, 530 bp, Zea mays
taccggagtcctgctacgtactgcacgtaccggtccggaattcccgggtcgacccacgcgtccgcggacgcgtgggcggacgcgtgggctcgacaatggcactccaggcagcctacgagtacctgcgggaggccgtcggccatggcgcgtggtcgtccacgcagacgctgacgctgctgctcatcgccgtacccaccgtactactgctgctagcgtccctcgccaagagcacgtcgtcgtccggtaggggcaagccgccggtccctccctagccgtcgggcaccctccccatcgtggggcacctacaccacatcgggccccagacccacatctcgctccaggagctggtggccaagtacgggcacaacgggttcctgttccttcgcgccagcgccgtgcccaccctgatcgtgtcgtttgccaacgccgtcgaagccgtgatgcgcacccacgaccacatcctcgcgtcccgggccgggtccatggcctgccacatacttcggtacaacgacttggacgtgggcttttag

SEQ ID NO: 95531 - DNA, 555 bp, Zea mays
  unsure (1)..(555): unsure at all n locations
gggatgctccgttgtactcgtctcctgatgcgctactcctgcacgtaccggtccggaattcccgggtcgacccacgcgtccgcccacgcgttcgctcctcgcatttcttcccatcccccttcgcaacccaaaccccaactcgcgcggcatcgatggcgcccaaggccgagaagaagcccgcggcgaagaagccggcggaggacgagcccgcggccgagaaggcgcccgccgggaagaagccgaaggcggagaagcgggtccccgctggcaagtccggtgccaaggacggccgcgagggcaagaagggcaagaagaacggcaagaagagcgtggagacctacaagatcgacatcttcaagtgctgaagcacgttcaccccgaccttgggcgtctgctccatggccatgtcgatcatgaactacnttcattacgatatcttcgaggagctcgctgatgatgcccgccaacttcggcgctattaacaagaagcctaccaataaccttccgggagaatcagaccttccgtcgccctggtcctgccgagggagctcgcca

SEQ ID NO: 95532 - DNA, 531 bp, Zea mays
  unsure (1)..(531): unsure at all n locations
nacttcagatcaccggtacgactgcacgtaccggtccggaattcccgggtcgacccacgcgtccgattttcgtgctttggtgatatagcactggcaattggggaggactttgagaagtatttgatctatgcgatgcctatgctgcaaagtgctgctgatttgtcggcccataccactgcaactgatgatgagatgctcgactacaccaatcagctaagaaatggaatcttggaagcctactctggtatcctgcaaggatttaagagttcacctaagacacaactgctgatgccattcgctccgcatattattcagttccttgatgctctgtacaatgggaaggatatggatgatactgtgatgaagactgcaataggtgtcttgngagatctggctgacacattatgtgtccatgcttgccctttgatcaaataattcaacttaaggcaggcatttttaaaggaatgcttggcattagacgaacctttggtgaaagaatctggccatttggcgaggatagcaatcaagcct

SEQ ID NO: 95533 - DNA, 469 bp, Zea mays
  unsure (1)..(469): unsure at all n locations
cgactgaaaactgntcgcctgcacgtaccggtccggaattcccgggtcgacccacgcgtccgctccaggtcaattgtgggtgcttccttggaagtaatccagaagaagagagctgagaagccagaggtccgcgatgctgctagagaagctgctcttcgtgagatcaaggagcgcatcaagaagaccaaggatgagaagaaagcgaagaatgcggatgtgagcaagtcccagaagacgcagacaaagggtgcggtccagaagggttccaagggccccaagttgggcggcggtggtgggaagcgctgaaagaacttagtgtcgtttctcgacattgcagtcgttccttagccaaagccactttcgtagaacctgtngtgaatttgcaagacttattcaagcgttgcttgtgcgtgctaaataccatggcaagagaacggatttatatttatgcctgaaaaaaaatgaccgt

SEQ ID NO: 95534 - DNA, 529 bp, Zea mays
ccctgagagctgctctcctgcacgtaccggtccggaattcccgggtcgacccacgcgtccgcccacgcgtccggtgttgttcggagcgggcagcagcacacagccccatcccaatcctagtcgatcttcttcccctcctcaagaaaagaagctgaaccatggggaagagaaagtcagctgctaagccacctcctaagaagcggatggacaagcttgacactgtcttttcctgcccattctgcaaccacgggagtagtgttgagtgccgaattgacatgaagaatctgattggcgaagcatcttgtagaatctgtcaggaaaacttcagcacaactggtaatgcacttactgagcctattgatatatatagtgaatggattgatgagtgtgaccgtgtcaacacttgtgaatgcgacgatgatgcgtgagccttgccccatgtgatgaaactgttacctacaatcgtaatgtaatgtgctggtattttcgaatgccataagccatagtcaggcattgcttggaattacct

SEQ ID NO: 95535 - DNA, 532 bp, Zea mays
tactcagtagtcctggtcgcatgcacgtaccggtccggaattcccgggtcgacccacgcgtccgaatatccagcgtttgtgtcaatctggtaaatgccgacttgaccgcacagcagacgggagtgcgcatcacggaggagaggatcctactggacggctcacctgaaacacctatcgattacattcaagttcagattgccaatgtcgagtccaaatttaccagtgcgatatctgagactggagagatcactgtggagggcagagtgaaggatggtgttcctcatctaacaaaggttggagcattccaagtcgatgtgagcttggaaggaagcctcatcctttgcaggcacgttgatcaaccatggatgattgggtcaatcggaagcgtcttgggtgacgagaatgtaaatgtcagtttcatgagtgtttggaagaattgctccttgcacgcatgctgtcatgggcattggatgtgatgatggaccaagcttggggacactggcgaagatcggtgagaatccagccttcgaat

SEQ ID NO: 95536 - DNA, 555 bp, Zea mays
  unsure (1)..(555): unsure at all n locations
gtggtgtacctgtattctactanctcgcagtacaccggtacgcactgcacgtaccggtccggaattcccgggtcgacccacgcgtccgaccacgcgtccgcccacgcgttcgcccacgcgtccgatttctgtgaagggaatcaagggcgccttaacaggcgtacttctgcctgtgttggtgaccatggagaatggaaagcctaaccttaggaagaaggtgatgccagctgtcattgtgaggtagcgcaagccatggtgctgaaagggatgacgtctacatgtactttgaagaagcaagacaaatataaggatgctgaacctagtgcaatagatctttttaaggagatgcattgcagcaaaaagaaagggtttagcatatatgttcagaaagctattgttgatatggaagaaatggtggcaacatcagttcaagatggacaacaaccgaaatatcctacaaaagttgtttatagtgtgcaacttggctccagtgtgttcttatgcaatcttggtctttagtccgtcttcaagaaaggcttaacatcaataggtttg

SEQ ID NO: 95537 - DNA, 532 bp, Zea mays
gccttagacactggtacgatgacgtaccggtccggaattcccgggtcgacccacgcgtccgcattgatgagaatcaccgaggaacttatgatttcatctaccttccaattgattttaagaataaatgtaacgtgggatatgcattcatcaatatgacggatccacagcagatagttccattttacaagacattcaacggcaagaaatgggagaagttcaatagtgagaaagtggcatcacttgcgtacgccagaatccagggaaggaacgctttgattgctcatttccagaattctagcctgatgaatgaagagaaatggtgccgccctatgcttttccacaaagatggcccgaacgcaagagaccaggaaccattccctgtgggtaacaatgttcgttctcggtacgggaggaacagaccacttagcagtggttcggagactaccaaaaaggcaaagtccattaacctcttctaactgtaaaagaagccggtttccgatattccaactcatgacaggcatgcggtattttt

SEQ ID NO: 95538 - DNA, 519 bp, Zea mays
  unsure (1)..(519): unsure at all n locations
catcgatnattggatggctattcacgtaccggtccggaattcccgggtcgacccacgcgtccgcccacgcgtccgcccacgcgtccggcagatccttccagcggctgtcgctgttcctgttccaccttccgttgatcataagcaagcagcttctgtgatgctcaagggcatgaccgcccatgttctgcttcgccgggtattcaaggtacaaacaaaccctaaaccctaaccactacttaattgattgatttttagccctcctcttacagtatccactcagtctgggatctcagcccttggctaactgaatgtgattctgacgaccccttcttattactttgcgcgagcgttctgacaattgtttatttgaacaatcaattggatatgtaaacagtaagcaaaaatgacattgtatatttatataagtaatatataggtctatttatatacatggaagccgatacatagtatgaaaattgtgattaggaattttgaaagttttttagattgattcagtgg

SEQ ID NO: 95539 - DNA, 521 bp, Zea mays
attgaatacgtagtctcgtcgaattgacgtaccggtcctgaattcccgggtcgacccacgcgtccgattttcgtgctttggtgatatagcactggcaattggggaggactttgagaagtatctgatcggtgcgatgcctatgctgcaaagtgctgctgatttgacggcccataccactgcaactgatgatgagatgctcgactacaccaatcagctaagaaatggaatcttggaagccttctctggtatcctgcaaggatttatgagttcaccttagacacaatctgctgatgcctttcgctccgtatataattcagatccttgatgctctgtacaatgtgaaggatatggatgatactgtgattaatactgcaatatgtgatttgtgagatctgtttgacacattatgtgtccatgctgtccattttatcattaatccatattatgccagtcatttttataggaatgctatgtttcttacttatcttctgttaatgaatttgtccatttgtactaggtta

SEQ ID NO: 95540 - DNA, 521 bp, Zea mays
tattgatatcggatggcaatagctaccgctccggaatttccgggtcgacccacgcgtccgcccacgcgtccggtgtagttcggagcgggcagtaacacacagccccatcccaatcctcgacggtcttggtcccctcctcaagagaagaagctgaaccatggggaagagaaagtcagctgctaagccaccttctaagaatcgtatggacaagcttgacactgacttttcctgcccattctgcaaccactggagtcgtgtagagtgccgaattgacatgaaggaatctgattggcgaagcatcttgtagaatctgtcatgactacttcagcacaactgtttatgcgctcactgagcctattgatatatatagtgaatggatagatgagtgtgaacgtgttaacacttgagaatgcgaccattgtgcgttagcttgctctatgtgatgaaactgtgacctaccatcgttatgataatgccctgggctttttgtatgcctttagctcttacttagccttggggag

SEQ ID NO: 95541 - DNA, 524 bp, Zea mays
attgactaccgtatgctcgttggcactgcacgtaccggtcctgaattcccgggtcgacccacgcgtccgcattgacgagaatcaccgcggaacttatgatttcatctaccttccaattgattctaagaatggatgtaacgtgggatatgcattcatcaatatgacagatccacagcagatagttccattttacaagacattcaacggcatgaaatgggagaagttcaatagtgagaaagtggcatcacttgcgtacgccagaatccagggaaggaacgctatgattgctcattctcagaattctagcctgatgaatgaagagaaatggtgccgccctatgcttattcacaaagatggccctaacgcatgagaccaggaaccattccctgtgggtaacaatgtatcgttttcggtctcggaggaacataccattttatagtggttcggagactaccaaagaggtaagtccaataaccttttctaactgaatagaatctcggttccggttattccaaattatgaat

SEQ ID NO: 95542 - DNA, 523 bp, Zea mays
gtctgactactagtctcgtcgcatgcacgtactcggtcctgaattcccgggtcgacccacgcgtccgtattgacgagaatcaacgcggaacttatgacttcatctacctgccaattgattttagggatagatgtaacgcgggatatgcattcatcaatatgacagatccactgcaaatagttccattttacatgacattcatcggcaagaaatgggagatgttcaatagcgataaagcggcatcacttgcgtacgccagaatccagtgaaggaacgctatgagtgctcattctcagaattctatcctgatgaatgaagagaattggcaccgcactatgcttattcgcatagatgtgtccttattcatgagaccatgatccatttcctgagagtaactattgtctttctcggtacggcatgaactgaccacttagtagtgtattcgtgattatcaataaggctagtttcaatatacttctctagctgtatagtaactcgatcctgattatagcaacttatgaca

SEQ ID NO: 95543 - DNA, 594 bp, Zea mays
cgctgtaacttgaaaactgataacgctggagatccaccgcggtggcgtccgctctagaactagtggatcccccgggctgcaggaattcggcacgagatccctcgtgaaagatgcagatccttgtgaaaactcttactggtaagaccatcaccctcgaggtggaaagctccgacacaattgataatgtcaaggtcaagatccaagacatggaaagtatccctcctgaccaacagaggcttatcttctctgttaaacagcttgaggatgtccgtacccttgctgactacaacatccaaaaggagtccaccctacatcttgtccttcgactcaagggtagcatgcagatctgcgtgaaaaccctcactggccagacaatcacacttggaggttgaaagctctctcacaatggataatgtcaaggcttagatccagaattaggaagggatcccttactgacaacagaggcttatatttgccgttagcatctggaagaggtcgcacccttgctgacttacacattcaaaatggtcttaccttcaacttatgctttggtttaagtggtggatgcaaatattttgtcaaacccttactggg

SEQ ID NO: 95544 - DNA, 590 bp, Zea mays
  unsure (1)..(590): unsure at all n locations
gtgcaaatacttgatncctgacaacgcttgagctccaccgcggtggcggccgctctagaactagtggatcccccgggctgcaggaattcggcacgagccagaactgggtctgcttgaaccaagcctccaggttttgagacttgatggtaatccattgagaagcataaggaggccaattttagacaggggaaccaaagctgttttgaaatatttgaaagacaaacttccggagcaataaggaccgcatgcaactctgtcgtttatgtttgtttgaaagcttgatctcaagtggtgaagctgttgagtttcttgatttaagctgagacagggagaatgtaatataagtacaaaaatagcggtcgtaagctccttttctgtcggatttaattcatcatggctgtggatgtaatggatactattacagtcaaatgcagtacacattggtagcagtgagagccgaaacccgtaaaacacgaacgtactggagcctcatgctttgtatgttttaaccctatccccttttattggcttggagagtgttaaggttgagtgtttaattgtttgaaacatacattattcaggagattgtg

SEQ ID NO: 95545 - DNA, 590 bp, Zea mays
  unsure (1)..(590): unsure at all n locations
gtgcnaatagttgatcctgacaacgcttgagctccaccgcggtggcggccgctctagaactagtggatcccccgggctgcaggaattcggcacgagtttctaatattagtattagaaataaaaatgaaaaagctttttgtgacttatcctccctctcacaagcatatgtattttacaaattatcacaaacccaagttattagttgttataaattcaaacctatccttcaatatcatggaacatctctttttcttaaaaatgaaataaaagattattttgaagaacggggagtatctcattccagattaagacatcattatgggttaagacagaaaattgtttggcattctggaatgaatgaatggaaaaactgttataggagttcttattcattacgatttagttcagaatagatggcttaaatttaggaccaggacaatggcaaattagagtcaatcaacactatctggctcanaataaacatttaacaaaatgggattcagatgaataagaaggattagttcattacgaaaaaaaaaatgattttcaagcgaactcattactaaactcangattttaaactggatcaa

SEQ ID NO: 95546 - DNA, 586 bp, Zea mays
tgtgcgatgaatgaacttgacaacgctggagctccaccgcggtggcggccgctctagaactagtggatcccccgggctgcaggaattcggcacgagtcacaaccccatgaagagaaagcaaatattcccacacatgtccagatccttctcctagacgaagtaagggtgaagtcaattcactcaaagctagccaagaacctaggctccgtcaatgtcatgaagaaggatgctgccgccaatctcccagccaaggacggcagcgtggtagggtcaggcaattacatagtcacgatgggtcttggcaccccaaagaagaatttaagactcatattcgataccggaagtgacatcacatggacacaatgccaaccttgcttaagatcttgctataaacaacaggatccaaatttttcacccagttcgtcctcaacttattccaatgtttcctgctcctcagcagcctgcacttcattgaattctgctacaggtaactcggcttgctgctcatcatcaaactggggctatgggatccaatatggagaatcattcttctcgattggaatgtttgctaaagaaaagctcactt

SEQ ID NO: 95547 - DNA, 585 bp, Zea mays
  unsure (1)..(585): unsure at all n locations
aggcggatgattgaaaatgacaacgctggagctccaccgcggtggcggccgctctagaactagtggatcccccgggctgcaggaattcggcacgagcttgtccatggtgcccgaacactctttaagtttgctagggatcaaagaggcagatatagtgctggtggttctgaccctgccctcgtgtttaattgctcaagttactgttatgaggttgtttggagtggagcctggttatactatgccactgggaattgatcctatctacagttagctactcatcctaaacttgccaagcatgctgatgctttctggggtggcccagattgtggtgatcttagctggtgatagtagcttgctggtgctgaggtagcttctgagcctgttgtagatgtttttgagttctgggtattcctataaagaaatantgagtgcctttcataattataaccagctaataatgtgctcaattccttccggtgtcacttgccttaatttgacacaaaggagggttgatttaggttgaccattggatgctttagccactggattgcgtaaccatgccacccttttagcccgcctattttt

SEQ ID NO: 95548 - DNA, 587 bp, Zea mays
gtgcgtatgattgatatctgacaacgcttgagctccaccgcggtggcggccgctctagaactagtggatcccccgggctgcaggcataaatcgccgaggaaaacaagatgtcggggcagcaagaagaagataagaaacccggcgatcagtccggcggtcacatcaacctcaaagtcaaaggccaggacgggaatgaagttttctttaagatcaaaagaagcacacaattgaagaagctcatgaatgcatattgctaccgacaatctgtggatttcaactcgattgccttcttgttcgatggtcgccgtctgcgaggtgagcaaactccggactagcttgagatggaggatggtgatgagatcgatgctatgcttcaccaaaccggtagtacttgtttgaagcgagtactaactttggcgtcattagtatttgatgagtcagctatggtcttatcatgtaagatgtttgccatgtttttatatccgacttaattgccatgttatgaagaccttgggaccctggtttgaaataatctgcctttataaaaaagcttgggttttagtggttacaaagtgaaatggaccttg

SEQ ID NO: 95549 - DNA, 576 bp, Zea mays
catgacaacgcttgagctccaccgcggtggcggccgctctagaactagtggatcccccgggctgcaggaattcggcacgagctaacttttaccaaacaaataatccgggaagaatactatgagaaatacatgaacaaacaacttcgaagctattctttctccatggttgatgactcaatcctacccttcaagcagcaacctgaccaaagagccacttgcggatctctggaagttatttattgaatgcaacatccaatcgtgcatccaaggtgttctcacacacaatctttccatctcgagatgctatcacaacaccttctgagcagaaagggccatgagcattgtgatgagaaggtgcaggatgaagatggacattgtcaatgaatatctctggtggatgaacattcactttggaagcatattcttcttttgctgaatccaggacagaactcaccaagggcacattatctttgcgacagcgcagtaagatagcatgctctttcagccttgccaaactttgaacatttcatctttcaaaagcggtttgtacacatggtgatcacggttcacgtcaaa

SEQ ID NO: 95550 - DNA, 548 bp, Zea mays
tgttaggtgattcgtatcctccgatgtccgaatgtcgtcgcctgcacgtaccggtccggaattcccgggtcgacccacgcgtccgcggacgcgtgggtggaaaactttgttgatgtaaagaacattctcgttgaaatgggaacatactttcaagttcaggatgactatctagattgttttggtgatcctgaattcattggcaagatcggaactgacattgaagactacaaatgttcctggctagttgtgcaagctcttgagcgtgctgctgagaaccaaaagagcattctgtttgaaaattacggaaagtctgatccagcgtgtggtgctaaagttaaaggcttgttccatagagcttaactggtagagggttttcctgaatttccttatggagatgttccatcattcttattgctacatttgtaggcccatttttccatgggatgtctaaattttttttgattttcttcttttatattattttaatattggtctatgtgtctccttattatgttctatattgttcatttatttcttttttttatttg

SEQ ID NO: 95551 - DNA, 533 bp, Zea mays
tgtaatccgaaatgattgacgactatagctgtacgcctgcagctaccggtccggaattcccgggtcgacccacgcgtccgcccacgcgtccgcggacgcgtgggcgggactgcaggccagaagacctccgtcgcccatttggacagtttggtcgagttaaagatatatatcttccaagagattattacactggggatccccgagggtttgggtttgtccagtattatgatcctgctgatgctgctgatgcgaagtactatatggatgggcaggtagttcttggtaggcaaataacagttgtttttgcagaagagaacagaaagaagcctcaagagatgagagctagggacagagtcaggggtcattcttatgatgacaggaggtattctcgctctaggtcgcctcgttattataggggccgctctccttcacgcagtcaaagctactcgaggtctccaccttagaatccatgacacagacttagagagaggtcctactccggctcacctgtggacagcagatcaagaatgggt

SEQ ID NO: 95552 - DNA, 526 bp, Zea mays
tcgatttctgtagagctgtacgcctgcacgtaccggtccggaattcccgggtcgacccacgcgtccggaatgccagcagcacaaacgcatcggaactcttcaaagaagttgcatattcttatagcatctggtcagatcctgagaaaagaaggcagtatgatactgctggttttgaggagttagaaaatgaaggaatggatatggaaattgatttgtccaatcttggaactgtgaacacaatgtttgcagcactttttagcaagcttggtgttcctatcaagaccacagtatctcctactgtgctggaagaggccatgaatggcacagatacagtgagaccactccctgttggaacatcagctactggataggttgatatgcaatgctcttatttttttggcgtaacaataattgaagagcaagctcattctggaatggatgtcagaatgacttctcctgctcaaagtttatttaatcttcttttcttttagcatgaagtttattgatgttatggtacttgcttgcg

SEQ ID NO: 95553 - DNA, 545 bp, Zea mays
  unsure (1)..(545): unsure at all n locations
gttgagctagtctcgtntcgcctanngtcctacagctggtacgcctgcacgtaccggtccggaattcccgggtcgacccacgcgtccgaaacccttgtctccttcttatccccacctccctcgcggatcactcgccgccgccgccggccgcagccatcgccgtgatgctgtccctgtcgagggcgatcgggaggcggctcttctcgtccgccgaggccgcgtcgacggctgcggtgaggacggcgcagaacccgctcgaggagttcttcgaggtcgagcggagcaccgaggagggcaagcctcctccccactacggtcgcagctggaaggcttctgaactgcgactaaaatcttgggatgaccttcagaaattgtggtatgttcttctaaaggaaaagaacatgctaatgacacagcgtcaaatgctgcattcagagagcatgaggttcccaaatccagaacgatatttcaaggtaaagaaatcaatgtgccggataaagcatgtcttgactgataggtctatagcggagcccgatccaaggtgt

SEQ ID NO: 95554 - DNA, 547 bp, Zea mays
gtctagttcttatctaagtaagcagtacgcctgcatgtaccggtccggaattcccgggtcgacccacgcgtccgcaactcccaaggtcccttttttttctcgatctggaagcgttgcagtagcagccatggacgtgagcggagcatgcgggaaggcgaagaatggcgcggcggggcgcaaggccggcgggccgacgaagaagtcggtgtcgcggtccgccagggccgggctgcagttccccgtcagccgcgtcgggcggtacctcaaaaagggccggtacgcgcagcgtgtaagcacgggtgcccccgtctacctcgccggcgttctggagtaccttgcggtcgatgtgctcgagctcgccggcaactcggcaagggacaataagaagacgcgcattattctcggccacgtgcttctcgtcattcgtaacgacgaggagcttggtaagctgcttgccggctgtaccatttgttcaatggtggcgttctttctaatattcacacttgggtccttcctcagtaaggtttcctataaggcgtcaatgatt

SEQ ID NO: 95555 - DNA, 527 bp, Zea mays
  unsure (1)..(527): unsure at all n locations
attgatgtccgtatacgatcgtactgcacgtaccggtctggaattcccgggtcgacccacgcgtccgcgtggctggaagccccctgttcgaaggcagttcnttcttgactgcaatgagattgcagatctatgtgatagtgctgaaagaatattttcaagtgaacctagtgtcttacagctgaaagctcccattaagatatttggtgatctgcatggtcaatttggtgacctcatgcgcttatttgatgaatatggcgctccttcaacagctggagacattgcttacattgattatcttttcttgggagattatgtcgatcgtggtcagcatagtctggagacaatcagtcttctccttgcactgaaagttgaatattctcacaatgtacatttaattcgagggaattatgaatcctcggatatcaatgctctttttgggttccgaattgagtgcctatagtgaattgggttagccggtatggatcttgacctggttcccttttaacaggttatttaattgggtttct

SEQ ID NO: 95556 - DNA, 527 bp, Zea mays
aatgattgtcagagagctgtacgcctgcacgtaccggtccggaattcccgggtcgacccacgcgtccggaagcagagaacccctcctcgacctcggcctctcctcttcctcctccgctcccaaaatcctagggttttgctcgccgcggcgcgatggagcccacctcgtcggcgtcgatcgcgcggcagacgtgggagctggagaacaacattcccgcggcggcctccgacccggacgcgatggacgcgatctaccgctacgacgacgcgtctcaggcgcgggcgcagcaggagaagccttgggccaacgacccgcaccacttccgccgcaccaagatcttcgcgctcgcgctgctcaagatggtcgtccacgcccgcgccgggggcaccatcgaggtcatggggctcatgcatggcaagtgtgagggcgacgccattatccgtatggacgcattcgcgctccccgttgagggcaccgagaccagggtcaatgcccaggccgattgcctaccagtacatgtttgactt

SEQ ID NO: 95557 - DNA, 540 bp, Zea mays
  unsure (1)..(540): unsure at all n locations
agtatcgaggtctngtctctgatgtctgtactactgtacgacctgcacgtaccggtccggaattcccgggtcgacccacgcgtccggagccgccggcccgtccgtctcactctccgcctcctgtccccaatgccattagttttcaagtggcaattgctgaccaggctaccaaaccaacgtcccttcataagctcggtggccagttccacctgcgctcgatcatctctgaaggtgtacggtcccgtaacatatgcccatctgtctcatcttatgaaaggagatttgccacaaggaactacatgacccatagccttttgtgcccttcgatgtctgttagcggtggcatcaatgtcccagtgatgcggaccccgctctgtgctaatgctcctgctgagaaaggaggcatgaactttatgatcgatttaatgatgggctgtttttcagctgctgtttcaaagactgttgctgttccaatcagcgtttgtagctgcttattcagaccccatttgtgatggttaattctggtatgcattcaatgct

SEQ ID NO: 95558 - DNA, 538 bp, Zea mays
gagatcgatttgctgtctccgaagtcgtacgccgtctaccggtcctgaattcccgggtcgacccacgcgtccgacccgcctcctctcgagttcgatctgtttgctctccccagacatgtcgggccgcggcaagggaggcaagggcctgggtaagggcggcgcgaaacgacaccgcaaggtgctccgcgacaacatccagggcatcacgaagccggccatccggaggctggcgcgcatgggcggcgtgaagcgcatcttcgggctcatctacgaggagacccgcggcgtgctcaagatctttctcgagaacgtcattcgcgacgccgtcacctacactgagcacgcacggcgcaagaccgtcacagccatggacgtcgtctacgcgcttaaagcgccagggccgaaccctttacgggctttgcggctatggcgctaggctaggccattgcttgaccctgccatcattctccttctggccttagcacctgtttcctgaaactcgttgcggtctgttcgtaggtgctagggtaagcaattt

SEQ ID NO: 95559 - DNA, 548 bp, Zea mays
  unsure (1)..(548): unsure at all n locations
tatccgagtctgctagtctccgatntacgttcgcatgtactactcggtcttgtaattcccgggtcgacccacgcgtccgctctcagaggaactgggtactatcagaaggctaacatggagataaagcaggcagatggaaatggagccatgattgctgaacaagtatttgagaagactaaagagaagttccaaatgtattgaaccgtggaattacttggtgggatgatttaacattgtgatagccctctgattctcaaaaaaagaataacacaacctctggtattatgtaatttatgatgggccacaaattgccattgtgcttccatttctgaaaacaagattgatgtcactccttgatcttcaatgagcagttgattcttaacttaaataattaaattttttttatttgttttatttttttatattgttgttattatttaatttttttatttttattattttttattcttatattttatagtaatataaatgggtgtgtcatttttaggtttctattctaatttactggttgttgctatatataatct

SEQ ID NO: 95560 - DNA, 544 bp, Zea mays
  unsure (1)..(544): unsure at all n locations
gtgaggtatctcgnnatcgatgatgtcctagttagtcgtctctcactgcacgtactcggtcctgtattcccgggtcgacgcgggcgtgtggacccacgcgtccgcccactcgtccgcccacttgtccggcttgaaggatcataatatcatgcccggcatcaaggttgacaagggtttagttccattgcctggttccaacaatgaatcgtggtgccaaggtcttgatggtttggcttcaaggtgtgctgagtactataagcagggtgcccgcttcgcaaagtggaggactgttgttagcatcccttgtggtccatctgcattagcagtgtaagaagctgcatggtgacttgctcgatttgctgctattgctcatgattatggcttagtgccaattgttgagcctgagattcttcttgttggataccatggtagtttaagaccttttatggttcttttaatgttttgttttgatgttttattattcttgttcttaatatagttttacttgaggttttctttttaatcttatatatttttacttttt

SEQ ID NO: 95561 - DNA, 526 bp, Zea mays
gtttgatgtctagtcagctgtacgcctgcacgtactcggtctcgaattcccgggtcgacccacgcgtccggtccattgaatcagtttttctatgttttcagaatgatggacaaggtacaccatgatagtagaattttttttacaccctggttatcttgttttaattcatcttttctgtgctccaattattttggtgaatcttagcatagaacttgaccttctattattttgtatgtttggtttgcatgggataactggcatgggatatatttatgtacattgatatcgtttttatgcttactcacatgggataatctgatcttctaactcaagatatttttcttttggtaatatgatcgtttaacttaagtttgcattcattttagactttaggttatgttagtcataacatgcttgtttagacatatttacattgtttgatcatattttcttttcatgttacgtttgtattatttggatctcggtgggtttcttttaattttgtttgtctgtattagcttttttt

SEQ ID NO: 95562 - DNA, 548 bp, Zea mays
  unsure (1)..(548): unsure at all n locations
gggagtntatgtgccttacaatgatctcctgaagccggtacgcctgcacgtaccggtccggaattcccgggtcgacccacgcgtccggaacgacaagaacatcatcttccatgtggacgacgtgacggtgcgcgtcttcaagcgctacgatgacctgccgtacccggacgccaagcccatggcggtgcacgccacactgtgggacggcagctactgggccacgcgcaagggcgaggtcaagatcgactggtccagcgcgcccttcgtcgtctcctaccgagactacaccgtcaacgcctgcgccgtcgacggccggaacgggggcggcagctcgtcgtgccccgccggtgccaacgagtggatggacaggcagtccgacgacaccgaccgtcttatcgtggcttgtgcgcgcctgaactgcttgcagtacaactactgctatgactggtggcgctttctgctagggtttctctggagagtgcgccctgaactggatctcattatcatgctctgtatttttgagttttcaagttttgttggtttgattt

SEQ ID NO: 95563 - DNA, 528 bp, Zea mays
gcgtatggctgtcgtagtggactgacgcggtactaccggtctgaattcccggtcgacccacgcgtccgcggacgcgtgggcggcgacttcgcggagctgtacatgttcaagtggacgacacttctgatcccgcccaccaccatcctgatcatcaacctggtcggcgttgttgccggcatctcctacgccatcaacagcgggtaccagtcgtggggtccgctcttcggcaagctcttcttcgccttctgggtgatcgttcacctgtacccgttcctcaagggtctcatgggtcggcagaaccgcaccccgaccatcgtggttgtctgggcgatcctgctggcgtcgatcttctccttgctgtgggttcgcatcgatccgttcaccacccgcgtcactggcccggatactcgaacgtgtggcatcaactgctaaggagggtggaggtttgtagaaacagagagttaccacgaatgggccgctgtcccaaattgtctgtagtaagttataggcatgtggcgttatttacag

SEQ ID NO: 95564 - DNA, 547 bp, Zea mays
  unsure (1)..(547): unsure at all n locations
agtgtgcctttttcgtttngtctgacctccgtatagccgtacgcctgcacgtaccggtccggaattcccgggtcgacccacgcgtccgcttacaaacaactcagagaaatctacttggtgaggacttgggtccacttagcgtgaaggagttagagcaacttgagaaccaaattgagatatctctcaagcaaatccgatcatcaaagaaccagcagatgctcgaccagctctttgatctcaagcgcaaggaacaacaactgcaagatgctaacaaagatttaagaatgaagatagaagaaactagtgaagaaaatgtgctgcgactgtctagccaggatattgggtgtagtggatctagtgggcatggtgatgaagccaaccaagaacaccttcaacttgctctagaaccttcgctgcatatatggtatcaaggctacatggaccacctgtactatgattaagttgcttctttgtgcgctgtgtgctctaatggccaaggttcttctatatatgttggactgtaatgctattgattaattcctctatg

SEQ ID NO: 95565 - DNA, 548 bp, Zea mays
  unsure (1)..(548): unsure at all n locations
tggtagttagtccgngatatcagtgagtccgtatagcggtacgacctgcacgtaccggtccggaattcccgggtcgacccacgcgtccggaaaaagaccgtcgatcccttctctaagaaggactggtatgacatcaaggccccatcggtgttcagtgtgcgcaacattgggaagactctcgtgtccaggacacagggtaccaggattgcctctgatggtctgaagcacagagtctttgaggtttgtctagctgatcttcagggtgacgaggatcaggcttacaggaaaatcaggctccgtgctgaagatgtgcaaggcaggaatgtgctcacaaacttctggggcatgaattttaccaccgataagctcagatctctagtaaagaagtggctgacattgattgaagcccatgttgatgtcaagacatccgacaactacatgctgcgtttgttctgcattggttttaccaagaggcgcccataccaggtcaagagaacctgctttgcttcagcatcccaaattcggcagaatcgtcccatgatggttgt

SEQ ID NO: 95566 - DNA, 541 bp, Zea mays
tggctatctcgtattaatagattctcctgaagctgtacgcctgcacgtaccggtccggaattcccgggtcgacccacgcgtccggcatgttgattttgtgaaggagtacaagcaagattttgaacgtgatcttgacccagagagcgctactacttttcctgcaacccttgctgaacttacggagagattgaaacactggaagaacattcttcagagtaatgtagaggatcggttcccagcagtattaaaactggaggaagaaagtaaaacacttcgggattttcatgttgttgatattgaactcccagggcagtacttcacagatcaggaaatcgcaccggaccacactgttaagttggacagagttggacctgacattccaattgtccggaggcatggcagtagctttcgacggttgacacttattggttctgatggttcacagcgccattttattgttcagacatcactgactccgaatgctcggagtgatgaaaggatgctgcagctattccgtgtgctaaataaaatgtttgacaag

SEQ ID NO: 95567 - DNA, 542 bp, Zea mays
  unsure (1)..(542): unsure at all n locations
ggtaggtttccgngtctctgatgtcagtatacgtacgactgcacgtaccggtccggaattcccgggtcgacccacgcgtccgcccacgcgtccgttttacacgaatgaaccactgacaaatatctacaacccggagcagcagaaattagtacttggtggtgaggtatgcatgtggggcgaacacattgatgcatcagacattcagcagacaatttggccacgtgctgcagcagctgcagagcggctatggacaccaattgagaagctggcgaaggacacaagatcggtcactgcatgattggcacgcttcaggtgcttgctgaatcaaagaggggttgctgctgcaccactagctggttatggccgctcggcaccatcagaaccaggttcctgcttaaggcattagatatttttcatagatgagtatattttacataatttcaggctttcaatttacttctttgagctgattataatagctcggttcgatttaaggctgacctgcatattgtttctattcttctgatgcgctacatttattt

SEQ ID NO: 95568 - DNA, 545 bp, Zea mays
cgatgcgtattgtgtatcctctgtacgccatcgcgtctgtcgtacgggccctgaattcctcggtcgacccacgcgtccgcccacgcgtccgcccacgcgtccgggagtccttgcggagaagcagctctgattgcacattccgaagtttgccggcttgcatcagcagatcattgtagaattttacaccccagaacattgccgtatcatctgaaatgggacaaacaaattacatcaggaggtaggttgctttatttttgttcttttctataaggatggcaagtttacttacttatgccaccaccatatggagtaagtggtttgtagtagaagctgaacaactgagtgatattatcaaagtttggatgctgagctactaaaaatataattatatttttgtgttaatttgttagatttatataaaaaatgggcggtccgtcttagaggatcccaagcttacttatccgtgcttgcttctttataagctcttttatttggcacctaaattcaatttatggccggttgtttatcacttttgactgggaaac

SEQ ID NO: 95569 - DNA, 543 bp, Zea mays
gattcgtatagctatcaatgatagcggtcgcactgcacgtaccggtccggaattcccgggtcgacccacgcgtccgcaaagagatggacgatggatacaagagcatgtgttgaacttccctccaaaactgttttggcatgttatattgatctttctgcagaggagcgtgaatactatgatcagatggaacaggaagggaggaacaaaatgcaggaattcggtgacagagattcgattctgagtaattactcaaccgtgctttatttcattctgaggctccgccagctctgtgatgatgttgctttgtgtcctttagacatgaaagcatggtttcctgcaagctctatcgaagatgtgtctaaacacccagagctgttgaagaaactggccttattggttgatgatggagatgactttgactgtcctatttgcctttcttcaccaactaaaactgtcataaccagctgcactcacatatactgtcaaacctgcatcctaaaaatcctcatgagcttcagttcccgctgtccaatatgcatgcgc

SEQ ID NO: 95570 - DNA, 544 bp, Zea mays
  unsure (1)..(544): unsure at all n locations
ggagtttaatccgtattgatgatcactgtaagntcggtcgactgcacgtactcggtccggaattcccgggtcgacccacgcgtccgctcttcgccgtgcccggcgcgttcacgcccacctgcacccagaagcacctcccggggttcgtggccaaggccggggagctccgcgccaagggcgtcgacaccgtggcctgcgtctccgtcaacgacgccttcgtgatgcgcgcgtggaaggagagtctggggatcggggacgaggtgctgctcctgtcggacggcaacggctagctggcgcgcgccatgggcgttgagctcgacctcttcgacaagcccgtggggctcggcgttcggtcccgtcgctacgcgctgctcgcggaggactgcgtggtcaaggtgatcaactcttatgagggcctgtcgtttaccaacatcattgtctatgtcatgcttaacttgctctttaactttatcttcttgtatggttcgtctttttcttcaagagttggtgtattttttcttttatatatatcgtgtctgtcttt

SEQ ID NO: 95571 - DNA, 540 bp, Zea mays
atgcgtgtttgcttatcaactgatgccgtaacgcctgcacgtaccggtccggaattcccgggtcgacccacgcgtccggccgtggactctcttccgtaagccctagcccctagccgccagtgtcgtgcattcgtgctgaggctctactgctgatccgtcttccaagctctggtttcatccctgagcactgatttaagatgtatctccagtactacatcaacgagaagggggacaaggtctacaccaccaagaaggagtcacctcttggggtgccaacgcagtctgctcacccagctcggttctcaccagatgacaagtactctcgccagcgatacctgttgaagaagagatttggacttctgccaacgcagaatccaggaccgaaatactgaagcttcaagtcaactgtccaaccctgcgaagttcttttttgtgtcaatgcttgttggttgggaaagacccatcttcggtttccgatatttgggggtcgttagttcaaattggacctaaacgcgaccaattaaatagagccggaggagt

SEQ ID NO: 95572 - DNA, 547 bp, Zea mays
  unsure (1)..(547): unsure at all n locations
aggattanntntctnntccctgattaccatgatgctgtccgcctgcagtaccggtccggaattcccgggtcgacccacgcgtccgcaccactgccacgcgcgcgccggatcgagggagggcacgcagacgcggaggagggaggatgagtctcttcgggcttggacggaaccagaagacattccgccccaagaagagcgctccatcaggcagcaagggagcacagctccgtaagcacatagatgccactctcggcagtggaaaccttagggaagctgtgaggttgcctcctggagaggatatcaatgaatggcttgctgtgaataccgtggatttctttaaccaagttaatatgctgtatggcacgctcacagaattctgcacacctgagagctgcccaacaatgacagctggcccaaagtatgaatacagatgggctgatggtgtgcagataaagaaacccatagaggtatcagcaccaaaatatatggagtatctgatggattggattgaaagccagcttgacgatgaaatcatatttccttaaaa

SEQ ID NO: 95573 - DNA, 537 bp, Zea mays
cgtatgcgtgtgtctgcctaccgaagccttacgctgtggtaccggtccggaattcccgggtcgacccacgcgtccgcccacgcgtccgattcatactggagctgacacttaggtcgtggatgcacactgaggagaacaagcgccgcaccttgcaaaagaatgacattgcagcagcgatcactaggactgacatttatgacttcttggtcgacattgttcccagggatgagatgaaggaggacggaattgggcttcctagggctggtctgccacccatgggagccccagctgatgcatatccatactactacatgccacagcagcaggtgcctggttctggaatggtttatggtgcccagcaagggcacccagtgacttatttgtggcaggagctctagcaacagcatgagcaagctcctgaagagcagcaatctgcatgaaagtggctgagaatattgctcagaagctatcacccgattcatagttctcattttaagttgatcaaactgcatggtttcttagtaataatcgtggttg

SEQ ID NO: 95574 - DNA, 538 bp, Zea mays
agtgatgcgtgtgtctatctactgaagccgtaacgctgtagctaccggtccggaattcccgggtcgacccacgcgtccgtggtgcggctcctatttcgtctatgatgactgtgcagcgatggtcgcgtggcccttcagccacccaaatcggaaagcctgctgttcacatggctagcgttgacttgaaaggaaaagcatacgatgtattgaggcagaattcttccaggtttttgttggaagatgtctacaggaacccaggtccgctccagtttgaaggaccaggtgccgattcaaagcctatctcactgtgcgtcgaggatcaagactacatgggcaggataaagaaattgcaggaatacctggagaaggtgaagagcattgtgaaacctgggtgctcgcaagatgtccttaaagcggcgctgagcgccatgttttctgtgacggagacacttgacaataagacctcatcgttcacccgccagactgcactgtgacttcgttggtgcccttttgtggtgcggatcataaaccccacttt

SEQ ID NO: 95575 - DNA, 542 bp, Zea mays
  unsure (1)..(542): unsure at all n locations
ggtattccgtantgattgatgaccgtatgactggtcgcctgcagcgtaccggtccggaattcccgggtcgacccacgcgtccgctcgtctgctcgcatttcctcccaatccatcccgcctccaaacccgaactccaagtcgccccgcatcgatggcgcccaaggccgagaagaagcccgcggcgaagaagccggcggaggaggagcccgctgccgagaaggcgccggccgggaagaagcccaaggcggagaagcgtgtcccagcaggcaagtccgccggcaaggagggcggcgagggaaagaggggccggaagaagggcaagaagagcgtggagacctacaagatctacatcttcaaggtgctgaagcaggtgcacccggacatcggcatcttctctaaagccatgtccatcatgaacttcttcatcaacgacatctttgagaagctcgccgccgaggccggcaagctcgcgcggtacaacaagaagcccaccatcaccttccgtgagatccagacctccgngcgccttcgttcctcccggg

SEQ ID NO: 95576 - DNA, 556 bp, Zea mays
  unsure (1)..(556): unsure at all n locations
tgagcnnttctcgtatctattgaagtccgtacgccctgtacgactgcacgtaccgtgtccggaattcccgggtcgacccacgcgtccggtgagcctgcaccaagtatcatatcttgtccttgatgaagccgaccgtatgcttgatatgggatttgagccacaaataaggaaaattgtgaaacaaataccaccgaaacggcaaactcttatgtatactgccacatggccaagagaggttagaaaaatagcgtctgatttactggctaacccagttcaagttaacattggaaacactgatcagctagttgcaaataagtcaattacacagcatgtggaagttatcccacatatggagaaatcaagacgacttgatcagatcttgcgctcacaagatcctggatcaaaaagcataatattttgctccactaagaagatgtgtgatcagttagctcgaaacctatcacggcagtatcgtgcttctgctattcaaggtgataaatcacaggctgagagggattctgtgttgaatgaactttgaagccggaaggtgtcaatt

SEQ ID NO: 95577 - DNA, 543 bp, Zea mays
tggctatgccgaattggattgatctaccgtaagactgttcgcctgcacgtactcggtccggaattcccgggtcgacccacgcgtccgactagttctagaccgctcgcagcaagatggaagaggctatgccccacagcagaattatgcacaaggtggtcaggatggtagaggttttggaaggaatgattacacagaccgttcaggctacaatggaccacctgattttcgaagtcaaactcagtaccaagggcatgtaaatccagctgggcaaggtcaaggttacaacaacccccaagagcgtatcaacttctcgcaagggcagggaggaggttttaggcctggtggtccttcagcacctgtgtcttatggccaaccatcagcacctggatcttatggtcaacctaatacacttggtaactattggcatgtaccctcattagtgaatcctggtggtaacatgatttcttgtgtgaatcctagtaatttgtgggatggcagacatggggtctggacacatatatggtggaaatatcttgcaaaaag

SEQ ID NO: 95578 - DNA, 537 bp, Zea mays
gtaatccgtgtatttgatccctgatgcctgtcgcctgcacgtaccggtccggaattcccgggtcgacccacgcgtccgactagttctagaccagctcagcgagcccgggtcgcccgagaacatcctctactaccacatgatccccgagtaccagaccgaggagtccatgtacaacgccgtgcgccgcttcggcaaggtgcgctacgacaccctgcgcctgccgcacaaggtcgtcgcgcgggaggccgacggctccgtcaagttcggccagggcgagggctccgcctacctcttcgacccggacatctacaccgacggcaggatctccgtgcagggcatcgacgccgtgctcttcgcgccggacgacgccaaggccacgcagaccgccgaccccaacaggaagcctcccgccatcgtcacccacaagaagaagatcaagctccggcgaggttagtacctacctaccttcagatctggacctttgctcctttgtgtcctactcgtaccattacagattgctcaaaagtatcccaccat

SEQ ID NO: 95579 - DNA, 531 bp, Zea mays
atatgtatgtctggtacgcactgcacgtaccggtccggaattcccgggtcgacccacgcgtccggagcgaggccctctacaagtacgtgctggacacgtcggtgctgccgcacgagccgtagagcatgcgtgagctgcggctggtgaccgacaagcacgagtgggggttcatgcagtcgtcccttgacgaggcgtcgctgctgcggatgctgatcaagctgatcggctcgcggcggacgctggaggtgggcgtgatcacggtctactcgcttgctggcgacggctctggcgctgtccgcctactgcaaggtcatcgcattctacgtgtgcctcgagtactactacatcagtcgtccttttatcgatcgcgcctgtgttgctgtcaatgtggactttctggagggtcttgctcttgatcagttgtaagagtctttttgtctctctttcatatactgttccttctactttcttgtttgttttcttcttattgttttattatttttcatttcctatttgttgtagttcattttt

SEQ ID NO: 95580 - DNA, 529 bp, Zea mays
ttgtagacgctggtacgcctgcacgtaccggtccggaattcccgggtcgacccacgcgtccgcccacgcgtccggtttggtcaattaaaacatatttttgtagacaaaagtactgccggttttgtgtacctgcggtttgatagtataacagccgctatgagcgcacagaaagcactccatggaagatggttcgcagggaagatgatcacagcaacttttatgaccccacaacagtatgaaatcaagttcccgagctagtgaacagatgcatgattaatatggacgtagttgcttgggctcggtgggtgctggcatttctatattttagcgttttgagcttgtgtcaacttattactggaggttattataaaaaaaaactagtggaggaaaatttagtggaagctagtgtatcgggtaatggcttacgataaatggtgtaaggaatgagtttctagtcctgtgggttagtgcttgaattgaaactgtactgtgtattggaatttttacctgtagtgctttttctaaattg

SEQ ID NO: 95581 - DNA, 532 bp, Zea mays
gattctcgatcaactggtacgcctgcacgtaccggtccggaattcccgggtcgacccacgcgtccgcggacgcgtgggatgagatgcaagcagttgctgtcaagagccaactgcaacagatcgcaagaccaatgtacagcaacccacctgttcatggtgcactggttgtttctataatcctcagtgatccagaattgaagagtttgtggttaaaagaagtcaagggtatggctgatcgtatcattggaatgcggaaggcacttaaggaaaatcttgaaaagctaggttcacctttgtcatgggatcatatcactaatcagattggaatgttctgctacagtgggatgacacctgaacaagttgaccgtttaacaaatgaataccacatttacatgacccgcaatgggtggataagcatggctggtgttacgacaggaaatgttggttacctagcaaattcttttcatgaggttaccaaactcaatttagttatggtcctaccttctttggttgattgaagcttttggaatat

SEQ ID NO: 95582 - DNA, 515 bp, Zea mays
attgtcagtatgctgtacgcctgcacgtaccggtccggaattcccgggtcgacccacgcgtccgcagtactgttagagcatgatgctgtactggaatgtgctgtccttggcttgcctgatgaagcctatggggaggttatatgtgcaataattgtgcctaaggaggatgcaaagaaaaaggctggacaggactcaaagccagcgctaaccttggaagcattaacaagttggtcgaaagataagcttgctccatacaagattccaacaagactatacttgtgggattctcttcctcggaatgccatgggaaaggttaacaagaaggagctgtagaaattgttaggagcttagccatgtgtatagatgtatgtatctcttcaatttcttcttaaagtttaacaagtcgttctcattaaattgattagctaaaaagtgctttcgttaccatggaccaattaatcttttaaacggcccgagttatacttggcacacatttatttatcagaaaagttttg

SEQ ID NO: 95583 - DNA, 530 bp, Zea mays
tatcgtagcctgctactcctgcacgtaccggtccggaattcccgggtcgacccacgcgtccgctccccgagtcctctcctctccggggtattgaattcgaaccaaaaaatcaaaacaactcagcgattcgattcgcggcgagtcaagcgggatgccgccgcgcacggctccggcggcgacctcaaccccgccgcggaaggtgcccctccggaagctgctgcgtgcggcgtcggtcgcctgcggggtgcagttcggctgggcgctgcagctgtcgttgctgaccccgtacgtgcaggagctgggcattccgcacgcctttgccagtctcgtctggctgtgcgagccgctgtccggcctacttgtccagcccctcgtttgtcatcttttcgaccgtatctgcctcgtcgtttcttctgttcgggcgctttatgtcctttatatttcgttttttcctttgtctattgtctgtattttagtttatactttttttttatatattatttttgttttattttattctataacctaat

SEQ ID NO: 95584 - DNA, 523 bp, Zea mays
atcatcgtactgcggtacgactgcacgtaccggtccggaattcccgggtcgacccacgcgtccgaggatgttgaacttttggcaagggggcgccatgacccctgtgttgtccctcgagctgttcctatggtggaatccatggctgcgctggtcctgatggaccagctcatggcgcatattgcccagtgtgagatgtttccgctgaaccttgccctacaagagcccattggctctgctagcagtgcatctgaactgtcaccaaacctatcataatgtttgtcgtggaacatgttccagctttccttctatcgaaattctggtctttgctaagcagtttgcaattcggaacccccataaaccctcgactattgtacctagagataaagtgaacggatatcatgatagaaatgcatttatgtttttgtgatgtggtattttactgttattttacccctttttttttttgagtgtggactcttgttgtcgtttgagcattaaagtttaatttggttgtgtatacatt

SEQ ID NO: 95585 - DNA, 512 bp, Zea mays
gtagaactggaagctgtacgcactgccgtaccggtctcggaattcccgggtcgacccacgcgtccgtccacgcgtccggcagcccctggtacggccccgaccgcgtcaagtacctcggcccgttctccggcgagcccacgagctacctcaccggcgagttccccggcgactacggctgggacaccgtcgggctgtacgccgaccccgagaccttcgccaagaaccgctagctggaggtgatccactcccgctgggccatgcttggcgcgctcggcttcgtttttcccttgctggtctcccacatcggtgtcaattttggttgggtccttttgtttaaagtccgtttttagattttgtttttggggtcttttttgtcttcttttttttcccttctgattttatctctcagtgttgttttcaaatggttcttttgtgttaatcctttgggtttctctatggtttttttacttttattagtttttttttatttggttttatttctaatatctctg

SEQ ID NO: 95586 - DNA, 510 bp, Zea mays
attggtactggatctcgtacgcactgcacgtaccggtccggaattcccgggtcgacccacgcgtccgctttgcggcaaaccaagatggatttactgctgtcaccaagttccaggagtttttatgcatgcattggtgaaggcacccatgcttatcagagcccatctaaagatttggctgctataaatagccgcctaaattataatggtcggagagtaaacagtcgattaaactttgacatggtgagcgactcattggtagctggtagtctaggccagccaaatggttgttctacttccttggatcctgcatctgcatttagcctccttttaaagatgtaagcctgatacttgatcaaatataaatgtcgatctttttcggttttaatttactaattcatagtcgtttatatttatttttagtgggttgactgtagttatttactgtacttgtatttttagttgttactttatttttttggattttcttattttatttcttttgttgtttat

SEQ ID NO: 95587 - DNA, 515 bp, Zea mays
tttgataggatgcggtacgcctgcaggtactcggtctcgaattcccgggtcgacccacgcgtccgctgcttctctctcgactcacccgttccatttaggagctctacagcttcatccaggagcaggcgctgaaccaggagctcatcaagcagggctccttgcacgtgaaaatccccgagcaggaccctgaggacgcaaagatcgtggaggtcatcgaggccgagttccacaagcttggcgtgcataacgggtccgccaatggcattgaccaagcatagcacctttgtctaataaggccagcctgattcaaccgagacgttgcttgccacttttgatgcaactaattctactgtttattttttttggtggtgtgggtcctacccttgttgctgtttcttggtgtgaggttggttatagtatttgttggttttttttgtttgttttagttagttttttttttatttttatcttatttttattttatttttttgttttctcgtattattcttaatatt

SEQ ID NO: 95588 - DNA, 550 bp, Zea mays
tgagcctaatatcttatctacttgaaatcgtactactgcacgtaccggtccggaattcccgggtcgacccacgcgtccggccgaccaccgtccgcacggtgctctcgctggcccttgctcgctcctggccaggtcaccagctcgatttcaagaacgccttcctgcacggcgccctcaccgagaccgtctactgctgtcagccggtggggttcgtggactcctctcgccctgacatggtctgccgactcaacaggtccctctacggcctcaagcaggccctttgggcgtggcactcctgacttgctacgttcctggtgaccctgggcttcgtggaggcctagtcagacatgtctttgttctgttcccattatggaacagagactgtctacttgctttcttacgtggatgacattgtccttactgtcttcatgtatgtctttttttttcgtcttgtttactcgcttcaatggtattttcctgtcaaggtttttgttgtttctttaacctatttctgtgtgtttctttttttagttctgttcttattgttttt

SEQ ID NO: 95589 - DNA, 515 bp, Zea mays
tttgacattatctcgtacgcctgccgtactcgttcggaattcccgggtcgacccacgcgtccgagcttctcccgctcgatctccgccccaagaagacccgcgccattcgcaggcgcctgaccaagtaccagctctccttgaagactgatagggaaaagaagcgtgagatgtattttcccatgcggaagtacgctatcaaggcctatgattagtgaaagaacagcttttatcctatcaagtttctgtccataagtttcttgtgtttgatttacctttcatctatctgttattctatggtatgtttaaatctaatatgttttattttttcacttttatatatttttttttttttagtttttttttttatttattttattttttattttattttttttttttgttttttttatttttatttttttatttattttagttttttttattttttttatttgtctttttccttttttctttttttatggtttcttatttttctttattattattttttattg

SEQ ID NO: 95590 - DNA, 524 bp, Zea mays
ttagtgagctgctactcctgcacgtaccggtccggaattcccgggtcgacccacgcgtccgctcctcctcgcctcctctccctagcctccacgactcaagggagggtgacggaaagcgacgcggcgcgagcgaggagggccaaggcgaagaggggaagcaccgcaccaggacccttgttcgccgtcgccgccgcctctgatctccgcgaggttgtcaggattcaatatgtcgaccagcacattcgctacttcctgcacgctgttgggcaatgttagaacaacgcaggccttccagacagcggtgaagagcccttcgtctctaagcttctttagccaagttacgaaggttccaagcctgaagacctccaagaaactggatgtcttcgccatggctgtatacaaggtgaagcttgtctggcctgaatgtgaagagcacgagtttgatgctccagatgactcctacattcttgacgcggtcgagactgtcgttgtggagtgccatactcgtgccgtgcttgggcttg

SEQ ID NO: 95591 - DNA, 532 bp, Zea mays
tctcgatcaccggtacgactgcacgtaccggtccggaattcccgggtcgacccacgcgtccgccggcgccgctgttcgagcccggggagctctagtcctggtccttctaccgcgcgggcatcgccgagttcgtcgccaccttcctcttcctctacatcaccatcctcaccgtcatgggcgtctccaagtccacctccaagtgcgctaccgtcggtatccagggcatcgcctggtccttcggaggaatgatcttcgcgctcgtctactgcaccgccggcatctccggaggacacatcaacccagctgtgactttcgggctgttcttagccaggaagctgtccctgactagggccctcttctacattatcatgcaatgcctgtgtgccatctgtggagctggagtggtgaagggctttcagcatggactttacatgggcaactgtttgttgcccaatgttgtcgcacctggctacaccatgggttgattgtcctggctcttaaattgtttgctccttaatcttagttacacctg

SEQ ID NO: 95592 - DNA, 513 bp, Zea mays
tttgtttgatactgtacgcctgccgtaccggtccggaattcccgggtcgacccacgcgtccgcccacgcgtccgccgagactacaattgagatcaaaatcaagacattggattcccagacatacaatttgcgtgtgaataaatgtgtgccagttcctctgttgaaagagaaaattgctactgtaactggaatattgtctgaacagcaacgcttgatttgtcgtgggagagtcttgaaggatgatgaactcttgtctgcttatcatgtcgaagatgggcatacattacatcttgttgttagacatccaggccagtcagctacatttggaaatgcagcaaccgaagcttacacatctaattctggccgtcgtcatgggcccacagtggcaagaagtgtattacttgaggctagtaatgtggatcctgggagcagtgtaatcctagtttttgttgcgcatattcttcaagtgtgctttgtacaatcagttgtacaatttatggttctccttaattt

SEQ ID NO: 95593 - DNA, 525 bp, Zea mays
cttaggaatatcggtcgtcctgacgtaccggtccggaattcccgggtcgacccacgcgttcgagacattgtattcgtcctccagcagaaggatcactccaaattcaaaagaaagggtgaagatctcttctatgagcacaccttgtctctgaccgaagcactatgtgggttccaatttgtgcttacacatctggacaacaggcagcttttcatcaaatcagaccctggtgaagttgttaaacctgaccaattcaaggcgatttacgatgaggggatgccaatttaccagaggcctttcatgaaggggaagctgtacattcatttcacggtggagttccccgactcgctggcaccagagcagtgcaaggctttcgagacagtactttcaccaaggcctttattcaagctgacagacatggaaattgatgaatgcgaggagactactatgcatgatgtgaacaacatttatgaagagatgcgcatgaagcaagcttacgctggccatgatgccttctaagaggaccat

SEQ ID NO: 95594 - DNA, 530 bp, Zea mays
atatgcagatcgtctactgcacgtaccggtccggaattcccgggtcgacccacgcgtccgcccacgcgtccgggcaccgacccaccgcccctttgctcgttcctttcgccggaatcgctgctcctctctgtgtgctgtcgatttgtgcggcgactgttagtttggttcggtcccatccttctgttgatcaatggctgacggtgaggatatccagccacttgtgtgtgacaatggcactggaatggtcaaggctggctttgctggcgatgatgcgcccagagcagtgttccctagtatagtcggccgcccttggcacacgggtgtgattggtggaatgggccagaaagacgcctatgtttgtgacgaggcacagtcaaaaagaggtatcttgacctttaagttctccattgagcacggtttcgtgaacaactgggatgatatggagaaaatctggcaccacatcctttacaatgaactgcgtgttgctccttgagagcccccatttctgttacagaatcacccttgaacct

SEQ ID NO: 95595 - DNA, 533 bp, Zea mays
attttgatttcgtactaatgtacgtaccggtccggaattcccgggtcgacccacgcgtccggcaaggagtgtgtggatcttcttttgaagcactgtgctgctgtaactctccaaaacctggacgggaagacacctatcgatgtcgccaagctgaataaccaggacgaggttctgaagttgctcgagaaggacgccgttctttgaataccatgcctttcgtatacactttggactctggtggcatggtttttttttatactcggtgtttttgtctggatagccacttgtattggtccttaaaatttggtttgcctaaatgcttttatcatgtgggtttatttaactggcctgttaatggttaccgttctgtgacttgtgtctttcccactttatatctgatactttaagtctatatgtataaatttgtttccggaacataatcaatggtggtgttttatggctatatgctatattatatattgtttttaattgttttcttttattttattcttgtttatttaatttttatttat

SEQ ID NO: 95596 - DNA, 515 bp, Zea mays
tttgtatgattctgtacgcctgccgtaccggtccggaattcccgggtcgacccacgcgtccgcccacgcgtccgtccacgcgtccgtccacgcgtccgagaatacaacactcggcaaagccttggattccggtagtgcatattacaaccatttgtgtgtaaattgcttatttgagaccctaaacgaattctaataaaaaagttgtcaactacaaagattaataacttttgaagttctacaacttttattttgacacttttttcatcatccgatgtaatttgcaaatatttgaattttaaatttgacatacttattttcaaattgtgagaaccgtaatgatgtttaagttaaaagttgttaattttaatatttttataacctattatagatctattaatttctaattttgtggttttgtaaaataaaggcttttgaaaaatttttgaataattttttattattttatttatagatttttatataattgtgtgtgtattttttagttttatatttat

SEQ ID NO: 95597 - DNA, 536 bp, Zea mays
catgttgtactgcggtacgcctgcacgtaccggtccggaattcccgggtcgacccacgcgtccggccgagtggttggggccaaggacatggaaggtagaggcgatgccaacgttcgtacttgtcaaggatgggaaggaggtaagccgagtggttggggccaagaaggacgagcttgagaggaagatccggatgttcacgtcatcttcctcatcgtaaactcctgtggttcgcctgggacggagttgctgaagtgaaatggttcccttctctgaatgctgtatataaatatttaatgggcggccgttttagaggatccaagcttacttactgctttcattctacgtcatagcttttctatagtgttacctaaatttattttactggccttttttttacaacttttttacttgtaaaacctctttttatctctaacttaatctctttgtattatatttttttttttatttgtttttctttaatatctaattagtcttttattttatttgtttattcttattaatttttcattctttat

SEQ ID NO: 95598 - DNA, 516 bp, Zea mays
attgtatggatgcgtacgcctgcacgtactcggtctcggaattcccgggtcgacccacgcgtccgatcaagggcaagacaccagaagagattctcaagaccttcaacatcaagaatgacttcacccctgaggaggaagaggagatccgcagggagaaccagtgggccttcgagtaaggaggtgctggatctattgatgcctaagtttcgtggtgtctactactatgtctactttatgttgtcctaatggttgtaagtattttgggagtcactttgctttgctaatgtctcgtgtaagacttatttggtcaatggtcggttattaacttattaccatgaaagcactttttctgctgccctaataggtttagtctcatttgcatttttactaatttaatttttgttgattttttttgtgattccattgttaaatctcatggtttaatttttttattgttgtgattatttcctattttatataatatgggctgttgttttttattattctatctttcag

SEQ ID NO: 95599 - DNA, 535 bp, Zea mays
  unsure (1)..(535): unsure at all n locations
ntccgtagatctgatgagcatttcgcctgcacgttctcggtccggaattcccgggtcgacccacgcgtccgcccacgcgttcggtcgttgtgcgtcttctacccctctccctcgaggcctttgccggctaagagcgcccagtcgcccaccaggatgaagtttgttgctgcctacctgcttgctgtcctcgctgggaactccagcccctctgccgaggacttgacagccattctggagtcagttggctgttaagttgacaatgattagatggaaactccttctttcccaacttgatctgttaggacatttccgagctcattgctgctggcatgtagttgctttgtttcaattccatgtgtcttgtggcggatttgtctttttgctggatctgtccctgcttgttggtgtttcctctttcatcttttgctctgttaatgtattgtatggtttttgtttttaggttatttagtctgattccattcttgtggtttattacttgtatctattttattctgtgtgcatattgttattgttg

SEQ ID NO: 95600 - DNA, 510 bp, Zea mays
  unsure (1)..(510): unsure at all n locations
gtctgatgttcctgatctagtcngccgcattagcggaccggacttcccgggtcgacccacgcgtccgcggacgcgtgggcggacgcgagtgctctgtcgtcgccgccgctatcgtcgtctgcgccgttgcgatgccgtcgcacaagacctttcggatcaagaagaagctggcgaagaagatgcgccagaaccgccccatcccctactggatccgcatgcgcacggacaacaccatcaggtacaacgccaagcgcaggcactggcgccgcaccaagctcggcttctgagcgcgcggatcggccggctcctgcgtcggaattctagggtctctacctttcctttggttttatcgatgtctcttgtgtttctgtaagctagcaaacagtttcagaaagcgtatggtaagaatttgatgactcctagaaggattgatgctactatgctggtactcaggatttcatgcttcaattgttatgctgaattaatagaacctctggtaccttactttag

SEQ ID NO: 95601 - DNA, 546 bp, Zea mays
aaatagagctgctcgtcctgcaggtaccggtccggaattcccgggtcgacccacgcgttcgcccacgcgttcgcccacgcgttcgcttgtgctcccccgctggtatattaccactctggaggacttcggattaatccaaacttgtataacaatgggaaagtgtgtcttagcctgttgggtacctgggatggtagaggttgtgagaagtggaatccagctcaatcgacaatgctgcaagttcttgtctccattcaagctctgattttgaatgacaagccatattacaacgagccaggatatgagtcctatgccaacactccgaatggagagcggttggctttggactataatgacaacacctttctgcactcatgcaagactatgttatactcacttcggaagccttcatagcaccttgcagatcttgttgctggccactttcgggtgcatgggcacacgatttttgtggattgcagcactacatggccggtaatgatattgggtcatggttccagatgaggtagaggattatgttgatgatgagtt

SEQ ID NO: 95602 - DNA, 533 bp, Zea mays
  unsure (1)..(533): unsure at all n locations
tgtatggnagtgccttttgctcatgatagcactgacatacgctcgtaccggtccggaattcccgggtcgacccacgcgtccgagatgatgcggggactgtgcagctttattgtgagaaagacagccttacggaggaccaatttgagcaactaaaggcgtttattgatattggtgatatattaggtgcaagtggatccattaaaaagacagagaaaggggagctatctgtttatgtgaaaaatttcgaaattctcacaaaatcattactcccactaccagataagtatcatggattaactgatgtggacaaacgttatcgtcaaaggtatgttgacatgattgcaaaccctaaggtcgctgatgtattccgaactagggcaaaagtggtttctgaaattcgcaagacaatgggaatcatttgggtttattgaaatcgaaacttcagttctacagggagcaacaagtttgtgctgaagctagaccttttataacctatcatgaacttatttcataatgatatttatgtttgtgct

SEQ ID NO: 95603 - DNA, 507 bp, Zea mays
  unsure (1)..(507): unsure at all n locations
tatcgttgtctnttnataccatctaccggtcctgaattcccgggtcgacccacgcgtccgcccacgcgtccgcgacaaattcaactctttttttgtcgagaaggaggaggagtacatcatgcgtcagaaggagctgcaggaccgggtggctagggcggccgggcgggagtccaaggaggagctcatgctggtgcgcaaggagatcgtcgacttccacggcgagatggtgctgctcgagaactacagcgcccttaactacacaggattggttaagattctcaagaaatatgacaagagaactggagccctgatccggctgcctttcattcaaaaagttctttagtagcctttctttaccactgatcttctgtattagcttgtgtaacagtgtaaatcatgctgggtcatcttcttaccgttagggagtgcatttgttttaagtgtaaattgaaaaaggaacttctaatgattaatattgacttggcttaacccaaatttttccttggt

SEQ ID NO: 95604 - DNA, 524 bp, Zea mays
atgtgtgtctatatatgtatactcgtatacctgtgcgcctgcacgtaccggtccggaattcccgggtcgacccacgcgtccgcctgaggtcacagttgacgagacatggttttctgatccacaaatttgtgaaacaaatcagcaatggtatattttgtccaagacgctggcagaggaggctgcttggaagttctcaagggataatggacttgaaatcgctactataaacccagcgatggttattggtcccctgctgcagcctacactaaataccagtgctgaagcaatcctgaagttaatcaatgggtcatcgtctacatatcccaatttttgctttggatgggttaatgtcaaaggattttgcccttgcccatatccttgcatacgaggttccctcatcaaatggaaggtactgcatggtggaaagagtttgtcactacttataactggtgaacatttttctcaacatgtatcctaccttttcttttttgactagtgtgtatatttattttcttttgtttctt

SEQ ID NO: 95605 - DNA, 538 bp, Zea mays
aattgtagtgcgtactcctgcacgtaccggtccggaattcccgggtcgacccacgcgtccgcggacgcgtgggctgacgcgtgtgctgactcgtgggcggacgcgtgggctcttcttccgattgttggtggtgtagctttggcatcccttactgaggcctcctttaactgggctggattttggagtgcaatggcttcaaatgtaaccttccagtcaaggtatgtgctaatctagaaacttatggtgaataaagttgaatctctcgacaacattatcctattctcgatcattacatgtatgttattctattctttggtgttattatccttacttacataatggtttatttattttttttatttttcattctttttgtatttacttttaactttatgctacttgtgttatttttgctgaatttttttttattctttttaaatctgttcttattttttgtttaattgtgttttatatttttttatttatgttttttttttctatatgtttttgttgatttttttttattttattttttatt

SEQ ID NO: 95606 - DNA, 564 bp, Zea mays
ggtatccggttttgtatatctgtaggtcgtactgcctgcacgtaccggtccggaattcccgggcggacgcgtgggtgaggtggagctggcgtacttcaaccatggaggcattcttccttatgtcatccgcaacttggcagcggcgcataactgaggcaagatcacacaccgtttgacccacaatggcagtggcaggctccatgttcccagggctagcgacctggttctcaatgtagtgacatttgtgatggatctaggggtctctttgtcgagtcatcccataaattaagtgttaaataaaagccgcatgttgtggcagtgtccttgtgattgaaggaacaattttgtctgtgtttaggtacatgaatgattttgtttatatatgtgtatattattttttaatatcttgatgttcttgttgtattgacatattttttattctttatctctataggtttatgtattgtttttgtcatttatttatattatttgttttttttttaattgtgttgttttttattatgtattttattttgttcttgcgtttattctaatttatttatt

SEQ ID NO: 95607 - DNA, 510 bp, Zea mays
tttgtatacgtacgacgctgtaccggtccggaattcccgggtcgacccacgcgtccgctcgcatcttcctgcgtcatccaagttctagcagcgcatcgctcggtttcggcaatgtcggggcgcggcaagggcggcaagggtttgggcaagggcggccccaagcgcaacctaagggtcttcgcgacaacattcaaggcattaccaaaccggttaatccgaagtttgctctgaagggcccgcttctaacgcattattttggcttaatttacgaagagacccctattattctccaaaatttttctggagaactgttattcgtgactctttttattaaacctttctctccctgttaaataactgtttatctcctttaattaactttttctttttatatattatttgatatttcctgctttttttctcttttgaagaaaacctattttgggaaatctattttgtttctttttctttttgctttatttttctataattctattttcttttatttcg

SEQ ID NO: 95608 - DNA, 503 bp, Zea mays
tagattccttatatatcgctacgtacgccgtaccggtccggaattcccgggtcgacccacgcgtccgacctttagcaattgacctagtggaaaagatgctaacttttgatcctagacagagaataactgttgaaggcgcacttgcacacccttacttggcatcacttcatgacataagtgatgagccagtctgctcaatgcccttcagcttcgacttcgagcagcatgcattatctgaagaacagttgaaggatctgatctaccaagatgctcttggatttaaacccaaattaccaagttcccaagtttcggttccggcctgttgatttgcctttattgacatggagaatttaattccaccttatggcatttgcaaaaaggtccccaattccaatggtttcctgtaattaattgccttttcccaaaacccccccattctcttccttggtttaaaaaaaagccagggatacggtcccattttaagggtttgaaaagatcccgct

SEQ ID NO: 95609 - DNA, 508 bp, Zea mays
accgattaccgtgagtcacgctcgtaccggtccggaattcccgggtcgacccacgcgtccgcggacgcgtgggcggctctgccccaactctactggagcggatataaggagcgtctgcacagaagccgggatgtatgccattcgtgcccgcaggaaaacggtgacagagaaggattttctcgatgctgtcaataaggtcatcaagggctaccagaaattcagtgcaacacccaagtatatggtgtacaactagagagtgtcttcatggaatatgttgattttagaactccgggatcttttcggtgattgtgtcatcgtgaggttctatgcaaggattgttgtttgttttgaaatctggatccccatggattgcattctgtaccacatgtttttaagacaaggtttttccccttggtggtttaatgtacctgttgcaatagttggtgacacctaactgaacattgtgtccgaaacctgccttatcttgtgttttaaaggatgaaacact

SEQ ID NO: 95610 - DNA, 519 bp, Zea mays
attgataagcttagtatagcggtacgcactgcacgtaccggtccggaattcccgggtcgacccacgcgtccgattggagttgaatgttaagcatctgttttcgtacattggcacaaaccctgctgacgatgacaacacgttcatagaagacaactcgttgccatcattctcaaaggctgttaatcagcgcgacgctgaccttgtctacttctggcagaagtaccggaaattggcagacagcttacatgagaaaaatgaagctcggagggagttgcttgaagtgatggcccacaggtctcatgttgacagcagtgttgagctcattggaagccttctctttggctctgaggactgtccaagggttctgaaagctcgtccgtgcagcttggtgagccttttgtcgattattgttgctggcttaaagtccatggttcgagttttgatagctcattgtgggtcgttggcgccattatgggttgaagcaacatttctgtctcttgtaatacattggcaatcgct

SEQ ID NO: 95611 - DNA, 567 bp, Zea mays
gatactgactacggtctcctgcacgtaccggtccggaattcccgggtcgacccacgcgtccgcccacgcgttcgcccacgcgtccgctggcggctggccgacgagcggtcgttgccccgtggacgcgctgaagctgggcgtgtgcgccaacttgctgaacgggctgatcaacgcgaccctggggacgccgcccaggacgccgtgctgcacgctgattcaggggctggcggaccaggaagcggcggtgtgcctctgcaccgtcctgagggccaacgtgcttggcatgaacctgaacctgtgtgtgagatttaagtcttctattcaacttctgcagcttggcgcgtttccttaggcttttattgcttgtgagtttttaaaggttcgtcgttttgatcgatcttttgggctagatattttttgttaaagtcttttgtgataactttcggactgttgattgataatgatgtagctgttatatgtatatgctgttgcacttttttatgttgttgagtcattggtttgtttttgaattttgttgtgtaataatttagtgtattttttgtatgt

SEQ ID NO: 95612 - DNA, 548 bp, Zea mays
taattgcatgccccgtctgcctgcacgtacccggtccggaattcccgggtcgacccacgcgttcgagacatgccagtccgaagaacgggcgtcttcctgtgatgtcttcttgtctgcccacgcctagtttctctgtcgattcctattcgtcgtctcttcagggctggtgctcactgctgcgccgttctgttaaccgaaacaagaactctgtgtattcctgtaccgagctgtgcatgtttttttctttccatcgtggagaatttaagttattatccgtttgctgcaaaaaaaaaaaataatatttatttattaaaaaaaagggcggccgctctagaggatccaagcttacgtacgcgtgcatgcgacgtcatagctctactatagtgtcacctaaattcaattcactggccgtcgttttcaacgtcgtgactgggaaaaccctggcgtttcccaacttaatcgcctggcagcacattcccctttcgccagctggcgtaatatctaataggcccggaccagttggcctttccaacatgtggcaatcttga

SEQ ID NO: 95613 - DNA, 543 bp, Zea mays
aaatcgaagtcgtctgccgcacgtaccggtccggaattcccgggtcgacccacgcgtccgaccggtgtcttcactgacaaggacaaggctgttgcgcatctgaagggtggtgccaagaaggggggtatctcagccccaagcaaagatgcacccatgttggttgttggagtcaatgaaggcaagtgcaccttggatgtgaacattggttccaatgctagtcgcaccacaaactggcttgctccacttgctaaggtcattcatgacaactttggcattattgagggcctgatgacaacagtttattcaaatactgccattcagaagactgtagattgacccttatccaattgctggataagtagtatctgggacaaggctaaaattaatttaagctaattcggtcctgccaaggttgggcgttgattgtggatgctaaatgaatggggaagcatattgtgtggtctaatagcgggtagggtttgaataatggagcgtttatccatggatgtcataaatgtgaaactgtttagttttagtggtttg

SEQ ID NO: 95614 - DNA, 504 bp, Zea mays
ttttgatacctgacgcacgctgtaccggtccggaattcccgggtcgacccacgcgtccgcccacgcgtccggggtttttgattttagccgccgccgctgctcatctcacatccctcgagaagacgcctgctcctcgccgatcgatacgatggccgtcttctccgacctccacaccgccgacggcctcaagtccctcgaggctcacctcgccggcaaaacctatgtgtctggtgactccattactaaggatgacattaaggtcttcgccgcggtgccgtcgaagcctggcgctgagtttcctaatgccgcccgctggtacgagaccgtctctgcggctgtagcctcaagattccctggtaaggctgttggtgtaaatctgcctgcgggatcagctcctgcggcagctgctcctgcggatgaggctgatgacgatgatgaccttgatccttttggggatgaaactgaagaggacaagaaagcaactgatgagcgtgccgcccttgc

SEQ ID NO: 95615 - DNA, 503 bp, Zea mays
  unsure (1)..(503): unsure at all n locations
atgatncctcgagaccgtacgcctgcacgtaccggtccggaattcccgggtcgacccacgcgtccggctcctctccactttccacattccagttccactccgactgcgctgccggtcgccgactccgaaactccgacagtccgaccacaaggtcttgtgcgggatccacagaaggatgagtgaagaggataagactgctgcttctgctgagcagccgaagagggcccctaagctcaatgaaaggatcctctcttctctgtccaggaggtccgtagctgctcatccatggcatgatcttgagatcggtcctgatgctcctgctgttttcaatgttggtgttgagatcacacagggatgcaaagcttaatatgaacttgacaagaaaaccggactgattaagggtgatcgagtcctggacttatcagttgtatacccttacaaatatggtttcgttccaaagactttttgggaagacaatgacccaaggaatgtggtaatcctga

SEQ ID NO: 95616 - DNA, 564 bp, Zea mays
tatctcgtaggacggtactcctgcacgtaccggtccggaattcccgggtcgacccacgcgtccgaggaaggtgaaggtgttactcttgatgggaatggagccgagacaggacagataattgtgacggcaataggaggtcataatgggaagccaaagcagaaggtctcatacatggcggaacgggttgttggtactggttcgtttggtatagttttccaggcataatgcttggaaactggagagacggttgcgatttaaaaggtgttacaagattagcgctttaagaatagatagctttattctgtggatttgtttgaccactgaaatgtagttcatctgtagcatctttttattttaactttttaatattgatatatttttcttctttcttagttctattgtatttttttctttaatctgattattattgttttttatatatttcctctctgattatctgatcgctgtctgtattgtgtaaagttttgttattttgatttttatttattctttttttttgttttttctttatttgtgatattttttttttttatttatttattt

SEQ ID NO: 95617 - DNA, 538 bp, Zea mays
attgatactcgtatgctgtacgcctgcacgtaccggtccggaattcccgggtcgacccacgcgtccgcgtcggttcacttctccaggtaaggaaagggttcgtactcatggcgccgtcgcagccaaagtcgggcctcttcgttggcatcaacaagggtcatgtcgtcaccaagcgcgagctgtcttctcgcccgtgccaccgtatggggaaatcaacgaatagggtgtctatggtcttgtgcctgatcagagaggtagctggttttgtttcttattataagcgttttattttacttcttaattgttttcttggacatatcttgtcctttatcttactttatattattatttgttactttatattatgtcgttttttttatttgatgaggtttatgtttttcattttttttgtattatatttttttattattttatgcatatttttttatttaattattttgattgtcttatttttattttcttttctttgtttataatatttattgtcttctatttctttatatttcttctacttttt

SEQ ID NO: 95618 - DNA, 505 bp, Zea mays
  unsure (1)..(505): unsure at all n locations
ntttgaaagngtgacgcgcgctgtaccggtccggaattcccgggtcgacccacgcgtccgcggacgcgtgggggagaactatgtcgagggtgaaaatgcttccaatggatccacacctgaatctaaacaaaagcaaattctcaaggttgttgtcacggaagttcttggtggtgggaagttttatgttcagacaatgggtgaccagagggtggcttcaattcaacagcagcttgcatctttgaaacttaaagatgcgccggtcattggtgcttttaatcctgtgaagggagagatagtcctcgcacaatttagcgtttacaaactcctggaacagagctatgattgttaatggacctcgttctgttgaatctccggacgacaagtttgaagtattctatattgactatggcaacccaaaggtggttacctacagtcgtttactacctgttgacccatctgtttcctcgtctcctgttcttgtcagctttgcaatcttgcttttata

SEQ ID NO: 95619 - DNA, 548 bp, Zea mays
acttgatgacgctggtcgcctgcacgtaccggtccggaattcccgggtcgacccacgcgtccgcggacgcgtgggcggacgcgtgggtccaagcctgcgacacctaagccgaccccgcctacggacactccaagccctaagccaccggctaccaagcctcccacgcccaagccgaccccgccaacgtacaccccttcgccaaagcctccgacacccaagccgaccccgccgacgtacaccccttctcccaagccttcgacgcccaagccgaccccgccgacgtacactccaagccccaagccttccacacacccgacgcccaagccgaccccaccgacgtacaccccttccccaaagccttcgacgcccaagccgacctcaccgacgtacacctcttccccaaagcctgcgacacccaagccgaccgcaccgactgacactcccacaccgaagccgtcggtcaccaagccgcccacctacactccgacgccgtcggtgtcttacaccctcagcccgtcggcaccatactactatgaaagcgagcctta

SEQ ID NO: 95620 - DNA, 544 bp, Zea mays
cactagacacctgtcgcctgccgtaccggtccggaattcccgggtcgacccacgcgtccggtcaaatactgtgatacttgcatgctgtaccgaccacctcgatgctcacactgttccattggcaataactgtgtggaacggtttgatcatcactgtccatgggtcggccagtgcataggactgcgtaattatcggttcttctatatgtttgtattctcgacgacattgctctgcctctatgtatttgccttctgttgggtgtatgtgatcaagattagagctgctgagcaatcgtcagtttggaaggccttgctgaagacaccagcatcagttgctctgattatctactgatttctctgtgtatggtttgtgggtggtttatctgtcttccatttatacctgatgagcactaaccagacaacatatgagaatttcagatatcgctatgatcggcgcgataacccatataacaaaggtgttctgaacagatttctagagatattctgcactggtatccccccttcgaagaaaattttcgggcaag

SEQ ID NO: 95621 - DNA, 526 bp, Zea mays
tctgaatccgtttgaatcacgtaccggtccggaattcccgggtcgacccacgcgtccgccggaaaactaacccctaacgatgtctggagccggcgaggaggacaagaagcccgcggagggcggctcccacatcaaccttaaggtcaagggacaggatggcaatgaggtgttctttcgcataaagaggtccacccagctgaagaagctgatgaacgcttattgtgaccgccagtctgtggacatgaatgccattgcgttcctgtttgatggccgcaggcttcgcggcgagcagacccctgatgagctggagatggaggacggcgacgagatcgatgccatgcttcaccagaccggaagcagcgttcctagcaccacctaaaagcatcagtcgcggagctttgttttgctctccgccctgcgtagtagttaacaaaatggaaaaagtctttttaaggaacttgtgatgctctggcttcttgtgccattgctgatggacattcttagcctttggttagtagtatgggtt

SEQ ID NO: 95622 - DNA, 527 bp, Zea mays
tacgattctggtgactcacgtaccggtccggaattcccgggtcgacccacgcgtccgcccacgcgtccggaacgtcatccgcgacgccgtcacctacaccgagcacgcacgccgcaagactgttaccgccatggacgtcgtctacgcgctcaagcgccagggccgaaccctctacggcttcggaggctaggctggatgcctcttctccttgctgtcgtggatgcctgtttgttgttagggttatttcgtttagttccttgtctgtgacgtgttggactattgttagtagtattcttgaagttgtttcgaatgtaatccaatcttatcgttcgataattgaaaaaaaaaaataatattatatatattaattatttatttattattattatttttctattatataaaaattaatataaaaaaaggggcggcccttttaaaggatccaagtttatgtacgcttgcattcaacgttataagttttttatggggtcccctaaatttaattcacgggcccggttttttaaaac

SEQ ID NO: 95623 - DNA, 533 bp, Zea mays
attggaatccatcagatatctgtacgcctgcacgtaccggtccggaattcccgggtcgacccactcgtccggacaagctcccctgctactcatcagtactcctcactcgtagcccaagggtttttcatttttgcatgggaaattagttcatttttccttgggaaattgaaaatcccatagaaaaatgtggttgacaaactagcctttatgtgtgtatggctagtttcttcaattcgtgagtgcgtggtagtaccaataagcaataagacgcagagggatcgatcaaaaaaaaaaataaaaaaaaaaaataaaaaaaaaataaaaaacaaaataaaatataataaaattaaaaaatttttaaaaatatataatctaaaaaaaaaaaaaaaggggcggcccttttataggatccaagttttcttactcttgcttgcaactttatacctttttatagggcaccctaatataaattcattggccgttttttacaactttttgcctgggaaaaccctggggtttccaaatttaatcct

SEQ ID NO: 95624 - DNA, 563 bp, Zea mays
  unsure (1)..(563): unsure at all n locations
gggaagtccgtgtatgtactnacacatagatcgctggtcgcctgcacgtaccggtccggaattcccgggtcgacccacgcgtccgcagggctgatggtcagaacactggcaacttccttacggaccgtccttcaaccaaggtccacgctgctcctggcggtggctcttccctgggctacctgttcggtggcaactgatgcccgtgctggtgcgctcaccaaagttatcctcccctgcctgctgcgtgctatgtctgaatcgtgaacaaccgttgttgtcatttcatgtgtgtaccccgtgcaatgctttgtgcgcatggttgatttctctgtggcaaacttcccgtcctgcatggggttgtaagctgtctctaaatttaacggcaagtcgtatgcctgaaccttcatcttaagttgttgtcgtatcccttcgtcttgtttcggttgcaccccgtgatggtatggattgggtgctgaccataaataataattttttttaattttatttagttttttttattttttttattaaaaataagggcggccgtttaatagatccacatt

SEQ ID NO: 95625 - DNA, 532 bp, Zea mays
atttgatatcaatcatgatatccgttacgactgcacgtaccggtccggaattcccgggtcgacccacgcgtccggttgagctgatggcttatgccttccttgtggtcagtccacctgacatgagtcaatgctttgaggagatggctgctgctgcatctaataaaacttcatccaaacctggattgaattatcctgacctggaagaacaggcccttcagtttatcttggactgctgtgaatctaatatagaaaaatatacaaagtacttagagggtggcgctggctctccagaagttccaatgaatgcaaagcaagccaacagaacattactgctaaaacagctagcaagagatctgtgcatcagtgaacggagaatcctgtatcgcacacaatatatattgcgtagaagattgatggacatgataggcggcgaacttagagctctgtcacttttcaacgggctgagaaaactctttaaataaatggatcggctatcttatcttggcagatcttactggacagatttgatttc

SEQ ID NO: 95626 - DNA, 560 bp, Zea mays
tggttgtccggtttcttacactagatcgctgtacgcctgcacgtaccggtccggaattcccgggtcgacccacgcgtccgcccacgcgtccgcccacgcgtccgggtcgctgaaggacgcggccaccggcaaggcgtccacgccgttcgatcacggagctgggcacatacacccgctgcgtgccctcaaccctggcctggtctacgacatcggccaggacgactacctggagttcctctgcgtggagaacctgacgccgttgcagctcaggtccttcaccaagaactcgagcaagacatgcaagcacaccttcagctcgccgggtgacttgaattatccggccatctccgcggtcttcgcggagcagccatctgctgcgctgacggtgcgtcgcaccgtgacgaacgtcggcccaccgtcttcgacttaccatgtcaaggttacagagttcaaaggcgcagacattgtcgtcgaaccaagcaccctgcacttcacaagctcgaaccagaagctgacctacaaggtgacgatgacaaccaaggcttgccaaaagacaccgg

SEQ ID NO: 95627 - DNA, 546 bp, Zea mays
aactagaacgctggtcgcctgcacgtaccggtccggaattcccgggtcgacccacgcgtccgcccacgcgtccgctcggttccgccggcgcgcgaggggattcgagctgggtcttgggtagcctctcaccgtctcacgatgccgccagcacccaagtccggcgacgccctcttcgccagcgtggatcgcgtcaatgcggagctgttcacgctcacgtacggcgccatcgtgcggcagttgctcacggatctggaggaggtcgaggaggtcaacaagcagctcgatcagatgggttacaacattggaacacgattggttgatgagttcttagcaaagtcaaatgtatcaaggtgtgttgacttcaaggagactgccgatgttattgcgaagcttggcttcaaaatgttcttgggcgtgactgcaaccgtgaccaattgggatgctgatggtacaagttggagccttgtcctggaagacaaccctcttggtgatttcgtcgagcttcctgacacttgccaatggcttcagttttgcgattgggtagtg

SEQ ID NO: 95628 - DNA, 544 bp, Zea mays
aacactagaacgctggtcgcctgcacgtaccggtccggaattcccgggtcgacccacgcgtccgcgcaacgcacgttctctccactggtcctacaacactctccctaccacaccgaaccaacaagaggagcaagaggtagctatagcagcctagcacacaccaccacccaccaccgccaccgcgccacagagctgccgagagtgtgctgtgctttgctcatcgaccgaccgatcgatctcggcatggcggactgggggccggtgctgatcgggctggtgctcttcatcctgctctccccgggcctgctcttccagatccccggcaagggccggatcatcgagttcggcaacttccagaccagcggcctctccatcctcgtccacgccgtcatctacttcgccctcctcgccatcttcctcctcgccgtcggcgtccacatttacctcggctagctagtcgccggcgggcggccggctgagcgaggctagctgctggcgcacggcggccccggccggctttatttgacatcatctgggtggctag

SEQ ID NO: 95629 - DNA, 530 bp, Zea mays
atcagatatccggtttgaatgcctgtaccggtccggaattcccgggtcgacccacgcgttcgcaaaaacctcgtcagtttgggaacagcggaaaaccggccccccgcccgcctgctaggtgctagcaacagcagtcgccgccgatgggggtggactactacaaggtgctgggcgtcggccgcggcgccaccgacgacgagctcaagaaggcctaccgtcgcctagccatgaagtaccatcccgataagaaccctacgccgcaggccgacaccctcttcaagcaggtctccgaggcctacgacgtgctcagcgacccgcagaagcgagccatctacgaccagtacggcgaggaaggcctcaaggccggcgcgccttcgcccgccgtcttcacgcacggcgccggcgccggcgtccacaggttccgctttaacacgaggagcgccgaggagatcttctccgagatattccgcggcgggtttgctggggcaggcccccgttaccccggcggccgcgttcccttcgggttcccg

SEQ ID NO: 95630 - DNA, 541 bp, Zea mays
ggattggacgcaaactgattcctctgatgtcgtacgcctgcacgtaccggtccggaattcccgggtcgacccacgcgtccgctcatctgggcgctcgtgacctctcctctcctcgtgctgggcggcatagccgggaagaacagcgacactgagttccaagccccctgccgcacgaccaagtacccgagggagatcccccagctcccgtggtaccgcagcaccgtccctcagatggccatggcggggttcctcccgttcagcgcgatctacatcgagctgtactacatcttcgcgagcatctgggggcacaagatttacaccatctacagcatcctcttcatcgtgttcatcatcctcatcatcgtcacggccttcgtcacggtggcgctcacctacttccagctcgccgtcgaagaccaccaatggtggtggagatctgtcctgtgcggaagctcgacaggcatattcatattcttctactgcatctactactaccaacgcgcgggcggacatggtcgggttcatgcagacgttcttcttt

SEQ ID NO: 95631 - DNA, 543 bp, Zea mays
gttacttagcctgccctgaaatcatcggaaatcgttcgcctgcacgtaccggtccggaattcccgggtcgacccacgcgtccggagatccggagcagccgcagtcccaccgaccccgtcgtcggtcgccctccatgtcctcgccgctgcctctcgtttctcttttcaataatcaagatgagccgtggtggtagtgccggtggtggtcaaagttctctgggttatctctttggaagcggtgagccccccaaaccagcagtggcaccagctgcaagtgctccacctgttgagaaaccatctgctgcaaagactgatgcggccaaacaggttgctgctggggttaccagccaaaccaattactaccacagggctgatggtcagaacactggcaacttccttacggaccgttcttcaaccaaggtccacgctgctcctggcggtggctcttccctgggctacctgttcggtggcaactgatgcccgtgctggtgcgctcaccaaagttattcttccctgtctgctgcgtgctatgtctgaatcgtag

SEQ ID NO: 95632 - DNA, 529 bp, Zea mays
actgaattcaaactgatatctgtacgactgcacgtaccggtccggaattcccgggtcgacccacgcgtccgcggacgcgtgggttttttttttttaacacaaaccaatccggcaggtttcaacacaatagttggttcggtgataagactttctcgagtagatagggtaaaacagggaatgcggaactgtaaatgacgacactgtttgacactgtttgcagagtggagtttgaaaaaggaaataaaatacaggatgagataaagaatctgctagagataacctaagtcatccactgcaggtatgctcccaacaatagcaagtactcaattcatattaaaatccaccctgtggaattccatggatggtggcattgtcctttctatcaaccaaagcagatcactcgtggaacggagtgagatcgatcttgaatggcttctttcccttggtaactcgagcaattgcaattaattcctccaacagctcttccagattgcgcaatggccattgagttgggccatcgcatggtgct

SEQ ID NO: 95633 - DNA, 547 bp, Zea mays
cttcgtatcgctggtcgcactgcacgtaccggtccggaattcccgggtcgacccacgcgtccgggctggtatcctccaggccatggtgatgtgttcccctctttgaataacagtggaaaactcgacatcttattggctcagggcaaggagtatgtcttcgttgctaactcagacaacttgggtgctatagtcgacatcaagatcctgaaccatctgatcaataaccagaatgaatactgcatggaggttactccaaaaacattggctgatgttaaaggcggtactctcatctcttacgaaggaagagttcagcttttggagattgcccaagtacctgatgagcatgtgaatgagtttaaatcaatcgagaagtttaagatattcaacactaacaacttgtgggtgaaccttaaagctgtcaagagactagtagaggctgaggcacttaagatggaaattatttcaaaccccaaggaagttgatggtgtgaaagtccttcaactttgaacttcagctggtgcaactatttcgttctttggccaaacca

SEQ ID NO: 95634 - DNA, 558 bp, Zea mays
gccggtatttgtaagctacgtatcgctgtacgacactgccgtaccggtccggaattcccgggtcgacccacgcgtccgcccacgcgtccgcccacgcgttcgcccacgcgtccgcccacgcgtccgcccacgcgtccggccacgcgtccgcccacgcgtccgcaccggtgatctcttctgcgaaggccttccacgagcagctgtctgtggcggagatcaccagcagcgcgttcgagccggcttccatgatggtcaagtgcgacccacggcacggcaagtacatggcttgctgcctgatgtaccgcggcgacgtggtgcccaaggacgtgaacgccgcggtggccaccatcaagacgaagcgcaccatccagttcgtggactggtgcccgacggggttcaagtgcggcatcaactaccaggcgccaacagtggtgccgggtgccgacctcgccaaggtgcagcgtgccgtgtgcatgatctccaactgcaccagcgtcgtcgagggttctcccgcatgaacagcaagtttcgacttatgtacgccaagcgcgcgttctg

SEQ ID NO: 95635 - DNA, 526 bp, Zea mays
aactgaaagccggctgaatgcacgtaccggtccggaattcccgggtcgacccacgcgttcgcggacgcgtgggcggacgcgtgggcggacgcgtggggtgccatttaaaactgtaaaggtgtgcactaaaggtccatcgggagaagaatatgcatggtaccagtgcacagtgaatggtggacgtgatagccgagctataggagcatatgaactagcaaaagctgtggaagaattgggcgcaggagaaatacttcttaactgcattgattgtgatggccaaggttgtggatttgacatagatttggttaaaatggtttctgatgctgtgacaatccctgtcattgcgagcagtggtgctggagctgttcaacatttttctgaaatttttgagaaaacaaatgcttctgctgcccttgctgctggcattttccaccggaaagagggttctatactagcagtgaaagagcatctggtcaatgctggtgtggaagtcaaggtgtagcagggagatccttccgttattgaa

SEQ ID NO: 95636 - DNA, 533 bp, Zea mays
atcatagtccggctgactgcggtaccggtccggaattcccgggtcgacccacgcgtccgtgaagacctacggcttcctcactcctgagttctgggccgagaccaagtatgccaagaccccgttccaggagttcaccgacctcttggctaagccgacaaagggtcttctgatcgaggctcccaccgagacagtggaagcttgaacgtcttagtttactgttccaagtgtcgcgaaaagagttttctgtactagctacatattttaaatgttattttgaattatgatgagaaaccaaggtatgcacccaagataattgatgtcctgctgttttcgtatgtgggtatcgaaccccaaagaaatagattcaaaaatgtaatgttctatctatttgtttaacatatccgtctttaatattaaggttcatatattatttttggaacttattttcggattcttttttactaatttttttaaaatttcataaataaggccgggattgtttttagtatccacagttatttcatctggcgacg

SEQ ID NO: 95637 - DNA, 523 bp, Zea mays
actgaaaccgttcgcctgcacgtaccggtccggaattcccgggtcgacccacgcgtccggtcaacactgactgctatgataaatgatgaggctgcaatatctgaagtgattgagactgtcaagcagcaagttaaggatgctaaatttcctgatttagaggttattcgcatgttgtgggatgtgctcatggaggctgttcagtggtctgggaagaaccagcagcaaaattccaatgcagcacttaggcaggtgaaagcttggactgagcttttgaatgctttttgcacgagtggcagactcgaactggaacttatacacaaagttcagacacagtgctatgaggatgctaagctgatgaagctgtttccggaaatcataagaacactgtatgaccaagatgtcctagctgaagatactatagtcctttggttccgtaaaggttcaaacccgaaaggcatgcaatcttttgtgaaagctctggagccgtttgtcaaatggctcgaagaggcttaagaagaaaaaa

SEQ ID NO: 95638 - DNA, 528 bp, Zea mays
  unsure (1)..(528): unsure at all n locations
nctgaaatcctcagagatcggtacgcctgcacgtaccggtccggaattcccgggtcgacccacgcgtccgcgcagatccgtcgtccggtgagtggaagccgcacgaacccatggcctccggcgagcttgccggcacctacgccgctctcatcctcagcgacgatggcatcgccatcaccgccgagaagatcgccacgatcgtgaaggcggccaacatcaaggtcgagtcctactggccggccctcttcgccaagctcctggagaagcgcaacgtcgaggacctcatcctctccgttggatctggtggcggagctgctccagttgctgctgccgcacctgctggtggtgctgcggctgctgctgccccggctgtcgaggagaagaaggaagaggccaaggaggagtctgatgacgacatgggcttcagcctgttcgactgaggagaccctctcacccagccattagcaaatttcacttgtgctgtcaaagactatcttgtcttatgttatgtctctagggctttggtat

SEQ ID NO: 95639 - DNA, 541 bp, Zea mays
aattgctgacgctggtcgcctgcacgtaccggtccggaattcccgggtcgacccacgcgtccgcggacgcgtgggcggacgcgtggggtcgcactagccaatcgtgcagcagctttgaatgctgccgtggtctctatcaaagaaaccatcaccgctgccatcataccgaatgcatggtctgcactgaatgttggtgcaccccattgtaaagggtatggaatgcttatcctaagagagtggaaagttacatgaaaaatgtaaaaacattgatgttaaaattagtcaatgatacatagggaagtctccaaaccattgtgatgaagatatgagattggcacggtctgtccgacagttgatctgggtgacaagtgctgtgtgcttgtatgcaccacttgctgggaggatgtgggcatataaccattcaagagtgatgcacattagcagtgagaacctgtttataaccaggacctggacaattttcacattgcctagaaacctggaaaaagccaccaaattggaataccttggtgagcctgtttcg

SEQ ID NO: 95640 - DNA, 525 bp, Zea mays
aactgattccggtggactcacgtaccggtccggaattcccgggtcgacccacgcgtccgccacgcgtccgtccacactaacgaacgaactcttgctccgatcacgagctagctgaggtcgacgatggcggctgtgctgaacagcaggaagacgccgcaggtggtggccgtgctggtggtggtggcgctgctggcttcgtccgcgtcggcggcgatcacctgcgggcaggtggggtcgtcgctggcgccgtgcatcccttacgcgacggggagggccagcgcgctcccctcgtcgtgctgcagcggcgtcaagagcctcaacagcgcggcgcggaccagcgcggaccgtcaggcggcgtgccgctgcctcaagagcctcgccaacagcgtcaagagcgtcaacatgggcaccgtcgtcaccatccccggcaagtgcggcgtcttcgtcggattccccatcagcatgttcaccgactgcaacaagatcagctaagttacgacgaccaagctaatagcctaccgaacg

SEQ ID NO: 95641 - DNA, 525 bp, Zea mays
  unsure (1)..(525): unsure at all n locations
tctgaggccgttgaatcacgtaccggtccggaattcccgggtcgacccacgcgtccgcggacgcgtgggcaacagcaggcgaggaaagcaagacacgcccacccacccgctccggcagccagcggctatgcagcagcagatgcccatgccgccggcgcccgctgccgccgcggcggcggcgcccccggcggccggcatcactaccgagcagatccagaagtatttggacgaaaataagcaacttattttggccatcctggaaaatcagaacttatggaagttggctgaatgtgctcagtatcaagctcaacttcaaaagaacctcttgtacctggctgcgattgctgatgcccaaccccagccttcgcaaaaccctgcaggtcgccctcagatgatgcagcctggtatagtgcctggtgcggtgcattacatgtcacaagtaccaatgttccctncaagaaccccattaaccccacagcagatgcatgagcagcagcaacaacaacagtttcagcagcagcagca

SEQ ID NO: 95642 - DNA, 565 bp, Zea mays
atttgaattcatcagtatatccggtacgcactgcacgtatccggtctcggtaattctccgtggtcgactccacgtcgtctcgtgtcccggggtaacaagctatgtctcagtcatggtgaccatgttcggtgtgtggcacctgcacgagaatctacgtggtcagtgtaatcttagagcacgtcatgcatctcatgtccctgaacatagatcatgctccagtgagaacatcagtggtccatggcatcgttgcgtgagcatcatcagtgcggcggcgggcaccatctggagctgggctcttcgtcgtcctcaaggttccggctgccgatgatgatgtcgtacgcgccgcataacgagcacttgctgcaggaacagacactgaacaacgctcgttcggctcctgagaagaggcagcgggttccgtcggcgtataacagattcatcaaggaagagattcgcaggatcaaggcgaacaaccccgacattagccacaggggaagccttagcacagcagccaaaaactgggcacattatccgaacatgcatttcggcttaaactccggccgat

SEQ ID NO: 95643 - DNA, 529 bp, Zea mays
  unsure (1)..(529): unsure at all n locations
tttgaaaccactgaanaccggtcgcctgcacgtaccggtccggaattcccgggtcgacccacgcgtccgggaacacattcaaagagattggcagagttaatgaagcaattcaggattatgttcaggcagcaacaatcaggccaaacatgccagaagcccatgccaacttggcctcagcatacaaggacagtgggcatgtagaaacggctataattagctacaagcaggctctccggctgcgtcctgattttcctgaggcaacctgtaatctcctgcatactctacagtgtgtctgtgactgggaaaacagagatggcatgtttcgagatgttgaagaaattattagaaggcaaataaagatgtcagtacttccaagtgttcaacctttccatgccattgcttatcctattgatccattgcttgctttggaaataagccgtaaatatgcggcccactgttccttgattgcctctcgttttgggctgccgccttttgtgcatccacctcctgttcctgtaaaagcaaaagg

SEQ ID NO: 95644 - DNA, 541 bp, Zea mays
tccgatatcgtcagatatctctacgactgcacgtaccggtccggaattcccgggtcgacccacgcgtccggttctgctgaggggtcctaagaacgctagggaagctgtcaggcacttcgggcctgcaccaggagtgcctcacagccacaccaagccttatgttcgctcgaagggtaggaagtttgagaaggcgagaggaaggaggaacagcaggggcttcaaggtctaagtggccactgccttgccaatctagtgccgttttgctcgtgtcagctcaatattaccgttttggtgtcatagttgtaatgttttagttgtcggaatctcgtgtcattatcggatatcgaaccaatcaaatttcgctcaaaaaataaaaatgtttagaatatgcactgtttaagttaattattattgatattttctactctattctttttatatattctttttcatatttccttaaatttttatatattttatttataaaaggggcgggccctttaagaggctccatattttactttcctgtcttatcaaataa

SEQ ID NO: 95645 - DNA, 558 bp, Zea mays
tgataccgtatttctaattacgatactggtcgcactgccgtaccggtccggaattcccgggtcgacccacgcgtccgcggacgcgtgggcggacgcgtgggcggatctggaatgggggcagcagctgtgttcgagcggggagacgcggtggatggactctccaacgtgagggacatgcaggcacataattttctgtctaaggatgcgaagtataggcgcagaaaaaccatccatcctagagcagcataagcctgctgcatttgtaatatattcgaaatccgtattttttttcttcacaagcactactctatatacgatgaataaaagggcgacaatacagtgtcatcttgtagccacctaagatgcgaaagagaaaagaatgccggctgttcaatgttctgggcttgttctgttattgcttgtcgtctttcatactgaacaagcatggccttttgtgtgtttgaaccataaggattgagagaagtccttgatttgctgaaaaaataatttttaattattttaattttatgtaggtatattgtatttattttaatatat

SEQ ID NO: 95646 - DNA, 543 bp, Zea mays
acttttgaacctgttcgcctgcacgtaccggtccggaattcccgggtcgacccacgcgtccgcccacgcgtccgctcaaggcttacttacaagaatgttcctacgtggcatagggacctgtgcagggtctgtgaaaacatccccattgtcctctgcggtaataaggttgatgtgaagaacaggcaggtcaaagccaagcaggttactttccacaggaagaagaatctgcagtactatgaaatttctgccaagagcaactacaactttgagaaacctttcctgtacctcgcaaggaagctggctggtgatccgaaccttcactttgttgaagctgttgctcttaagcctccggaagttaccatcgacatggctatgcagcagcagcatgaagctgagcttgctgcatcagctgcacaacctcttcctgatgacgatgatgatctgattgagtagaaaggatcatgagtcttgaacttgagcaggagttgtgccttgcgtgttttaagtggtctagggtgaactcttgaattctcattggcgggt

SEQ ID NO: 95647 - DNA, 548 bp, Zea mays
ctaacttgatgaatcttggtacgcctcgcacgtaccggtccggaattcccgggtcgacccacgcgtccggcggaggcgagtgggcgccctcctccgatctccacgaacttcttcctcggcctcctcgggctgccagagccgccgccaccatcttctccccagcgaggaacctcttgctctcaaccgtcttgccaggctcttcacgtcccaggctggaagtgatggtggcgatacccagaagccctttattgcttttgtcttaggtggtcctgggagtggcaaaggaacacagtgcactaagattgcttcggattttggatttgcccatctgagcgctggtgatattctccgacatgaaatagcatctggcagtgagaaaggggagttgatcctagaaatcataaaggaagggaggattgttccgtctgagataactgtggaactcatcagaaaagcgatggaaatgaacaatgctaaaagggttcttattgatggcttcccaaggtgtgaggaatacagaatcgccttcgaaaggattggtggaacag

SEQ ID NO: 95648 - DNA, 527 bp, Zea mays
atttgaaatccgtttgagatcacgtaccggtccggaattcccgggtcgacccacgcgtccgcgaagagggccttcttaaaaatcttccaaaggatcttagaagagagataaagagacatctttgtttgtcacttctcatgaaggttccaatgtttgaaaacatggatgaacagctgttggatgccatgtgtgatcgtctaaagcctatgctctacacagaaggaagctgcatcattcgcgaaggtgatccagtgaatgaaatgctcttcatcatgagaggaacactagagagtaccacaacaaatggtgggcaaactggtttcttcaactctaatgttctaaaaggtggagacttctgtggtgaagagctcctcacgtgggcccttgaccccacttcagcttcaaatcttcctggctcaactaggacagttaagacgttgtctgaagtcgaaacttttgctctgagggctgacgacttgaagtttgttgccacacaatttatgaggctccacagcaaacaacttcat

SEQ ID NO: 95649 - DNA, 526 bp, Zea mays
  unsure (1)..(526): unsure at all n locations
gcagagttcgctgagatcactttaccggtccggaattcccgggtcgacgcgggcgcgtcgacccacgcgtccgagaattttgaggaaaccagaaattgatgcatttgcagaggagcttaggccgcatgaaaaagctttattaccagataagtcgactgtgcttgaccgagcaatgatcgagcataatctccttagtgccagtaaactttacacaaatatcagctttgatgagcttgggacattactggggattgatccaaggaaggctgagaagatagcatctcggatgatttatgaggatagaatgcggggctcaattgatcaggttgaggctgtgatacattttgatgatgacacggaagagctgcagcaatgggatcagcagattgctggactgtgcccagccctgaatgacatccttgacagcatgtcaagcaagggaataactattccggtgtgaataaatatctcatgctgtcggtcgatggtgcatggcanaactgctaacatgccccggaatctaaaa

SEQ ID NO: 95650 - DNA, 530 bp, Zea mays
attggaaaccatcttgaaatcggtacgcctgcacgtaccggtccggaattcccgggtcgacccacgcgtccggtgcgttcttctgtaggtttgggctgggccgctcagcatcaacaggaaggccgtggttctctggaaccggcagggataccaggcaaccatcaccgcacagtggtcgagcatcgggctcgcttcttccactgctgtcactgctcgcgatctatgggcggtacgctgcttttgctgcctcgctcgctcttcagattgcataactccataccataaccaatgtaatgaaggctggctggtgttcgggcttgagatttcgtgttccattttgttgtgcagcactcgtcgttctcggctcaaggccagctatcaacttcggtgccaccttacgactgcaagatgtatgtcttgacgccgaactagctcaaaagacaatagcggattgttccatggcgcgtgggatgcaaccattcggtcaggattcaaggaagaagagtattgcatgcatgcaaggatttaat

SEQ ID NO: 95651 - DNA, 542 bp, Zea mays
acaggtcggaaactagttagtactcgccgtaccggtccggaattcccgggccgaccaacgcgtccggattggcattcctccgcgaccactgaggtgaaccatgaagagacaaaagagctactgggtcatgttgctggtcacaaggacgtccttgaaggtgatccttatctgaagcagcgtctgcggctgcgtgagtcctacatcaccactctgaacgtgtgccaggcctacaccctgaagcggatacgcgacccgagctttcaggtgagcccgcagcctgccctgtccaaggagttcaccgacgagagtcagccggcggagctggtgcaactgaaccagcagagcgagtacgcttcaggcctggaggacaccctcattctgaccatgaagggcatctactgcggcatgcagaacaccggctaggacaagatccttcgggtgcagataacctgtctcccatgagactgtgtacgatatgtgtaggcctgtgagcaatttattcaccggcgccaggttgtctgtagggattttcattgtaaacg

SEQ ID NO: 95652 - DNA, 578 bp, Zea mays
atagttaaagatagggtagatgctatgctacgaccctagcatcgactgaacggtccggaattcccgggtcgacccacgcgtccggccatgtatgaggttccagacgaaaaaacaggaaatgagcgagttgacgctgttgtggtggatgaggaggcgattggttccgttgataggccaggttgtggggctaaaattctccgaggggatggtgcattggaccagtacataacaagaaccaatgtgatgaatttacaggaaactaacgatggtttggccggtgagctcgaggaagcgtacatgctgtctagaattgttagctagtaatttgaaaggctggggaggaagcgtatatgctgagttctgaccaacttcgtacatcgtgtaacatgtctaccccaacacaggccgggttctttttgcttacaaaatcaactgtactctgtttcattcctgttaaactctaaccagccgatagatcccgggcaactttttccatgtaaccggaagttgcttttgattgaacaacccttctgcagaagtaaattgttgccaaaaaataaataattttttaaaattta

SEQ ID NO: 95653 - DNA, 578 bp, Zea mays
  unsure (1)..(578): unsure at all n locations
tgtagaaatgatagcgctgtcgtatgcctccacactagcatcnatgtaccggtccggaattcccgggtcgacccacgcgtccggcaatatgaaagcctgatgctttcgttcttcgttttatttaagatcactttcctcccttggtgttatgaaatgtgcaactctttaatcagggatggcaaccgatagtgaagcctcgaaggcagctgaggttgtggttgactggcataaacaggacaaaaagaggatgctccatgcagtttaccgtgttggggatctggaccgcacaatcaagtactacacagaatgctttgggatgaaactgctgaagaaaagggatgttcctgatgagaagtacaccaacgcctttcttggctttgggcctaaaaaacaccacttttgcagtgaatttaccaacttttgcggaggtcttgcgtgctacatgcggaacgcctattccttgctatcgtcttggcgtttctttgttaaaacttggccgttgaccctgtcctcgcgccagttttttattatatgaagaatgaatcaacccctgtagaatctaaggattgaagatacac

SEQ ID NO: 95654 - DNA, 577 bp, Zea mays
  unsure (1)..(577): unsure at all n locations
ngatgaattgatggtaagtgcgatcatgatncttcagctctcatcgtatgacgtaccggtccggaattcccgggtcgacccacgcgtccgggccctgcggatgcaggccctgtcaatgcaggcgtatgatgtctactccaagagggcgagggaggtcttgctggaagcctctgagaagctgaagatacaggcagacaaagcacagaaggacctcagtgtgatcgccaccgaggttagtcaggagggacaggaatatctggtgatggcagctcggaactccccagactcgatcaaggatattacaacaacgttcagggctcttggaagattgaattggccatcagagtatgaggattatcatgtgggcattccgtttggtacccttcttacagtagggggtttcctcaacttcatgttgactggaagtacctctgctcttcgttttggaattgttcttggccttgcactggtgacttctgggatcttaagtttgagaacacatagagaaggcgcccgcggacctgtctttctgtgaaaagggctagctggaataacctttggcatcttcttcagggag

SEQ ID NO: 95655 - DNA, 586 bp, Zea mays
  unsure (1)..(586): unsure at all n locations
ttatttatattatagtagagtgattaccactgataccctcntccgatcgactgacgtaccggtccggaattcccgggtcgacccacgcgtccgatccaggacaaggagggcatcccaccggaccagcagcgtttgatcttcgctggcaagcagctggaggatggccgcacccttgcggattacaacatccagaaggagagcaccctccacctggtgctccgtctcaggggtggtatgcagatctttgtgaagacactcactggcaagacaatcacccttgaggtggagtcttcggataccattgacaatgtcaaggccaagatccaggacaaggagggcatcccacccgaccagcagcgcctcatcttcgccggcaagcagctggaggatggccgcaccctggcggattacaacatccataatgagagcactcttcaactggtgctttcgcttaagggtggcatgcagaatttttgtaaagacaatgacttgcaaagaccatcacccttggaggttgaaaactttgacaccattgacaatgtaaaggccaagatccaggacaaggaggtgctttcccctgaacaan

SEQ ID NO: 95656 - DNA, 517 bp, Zea mays
gtaaggtttaaatacgatacagaatctcatggcatgacctaccggtccggaattcccgggtcgacccacgcgtccgccgtcctttcctttctgaggctcgcgaaccccgacaatggccgcaaccgcggtgtctgtcgacgagaagctcgacaagcttcgcgccgaggtcgccaaactcagccagatcagcgagaacgagaaggccgggttcatcagcctcgtgtcacgctacctcagtggggaggcggagcagatcgagtggagcaagatccagaccccgaccgatgaggtagtggtgccgtacgataccctcacgtcgcctcctgaagatctcgaggagacgaagaagctgctggacaagctcgttgtgctcaagctcaacggagggctcgggacgaccatgggctgcaccggacccaagtctgtcattgaagtccgcaatgggttcacattccttgaccttattgtgattcaaatcgaagtcctgaacaagaagtatggatgtaatgtcccttta

SEQ ID NO: 95657 - DNA, 585 bp, Zea mays
  unsure (1)..(585): unsure at all n locations
tttataagatttatgtatgatcgtgtngctacngcccttagtactgcacgtaccggtccggaattcccgggtcgacccacgcgtccgcagtctctgggcaccaaatttccggcggcgatggcggcggctgtggcgaggtcagggttccggcgcatgttctccgtctctgccttcgcgccgccgaaggcgcccgccgcgcgccccaaggccgacccatcccccaacctcttcgtctccggcttaagcaagcgtaccacaagtgaaggacttagagatgcctttgcggagtttggtgaagttttgcatgctcgagttgtgaccgatcgtgtcagtgggttttctaagggatttggctttgtaaggtatgctacgaccgaagaggcagccaagggaatagaatgaaaggatggaaagttccttgatgggatgggtaattctgcggaatacgcttaacccagaccaccggccgagtgaacatggattaattcgcaagccccagcaatcttggtgagctccatcagagtgctggggtgcaccagagattgaattgatattgtgagagccttttactttcccaaccttgtg

SEQ ID NO: 95658 - DNA, 579 bp, Zea mays
ttatgttttttattgagtagttctgttcttacgaccgtcagtacgctgtaccggtccggaattcccgggtcgacccacgcgtccgccaccatcctctacaagctcaagctcggcgagatcgtcaccaccatccccaccatcggtttcaatgttgaaactgttgagtacaagaacattagcttcactgtctgggatgtcgggggtcaggacaagattagacctctttggaggcattacttccagaacacccagggtcttatctttgttgtggacagcaatgaccgtgaccgtgttgttgaagccagagatgagctccacaggatgctgaacgaggatgagctacgtgatgctgtgctgcttgtttttgccaacaagcaagatcttcccaatgccatgaatgctgctgagaatactgacaagcttggattacacttcctgggccagcgacacttggtcattcagagcactttgtccacaacttggcaagggtctgtataaggccctggactggtttccaggcacattttgaagcagagtttgatgcctacttgaatatcaactttgaactgctatgaactt

SEQ ID NO: 95659 - DNA, 579 bp, Zea mays
  unsure (1)..(579): unsure at all n locations
nttagatattgatatggtggttnaatgagttcatgaaactactacgactgcacgtaccggtccggaattcccgggtcgacccacgcgtccgcaaagaagctccatccagacacaaataaaggtgatgcggatgcagaacgcaagtttcaagaggttcaacgagcttatgagactttaaaggatgaacaaaaaagatcattatatgatcaggttggccctgagcagtatgagaaaactgcttctggcggaggcggaactggcttcgagggtggttttggaaatccatttgaggatatttttggtggtggcggtggcggtggtggaatgaatgatttctttaggaacattttcggggatagggactttggaggacgagatgttaaggttgcactcgaactatcatttgtggaagcagttcaaggttgcagcaaaacggtcaccttccaaacgtctgtaacatgtgaaatctgtggtggagccggtgtgccttctggaaccacaccttgaacatgtctatcttgcaagggttcaaggattatattcatgcaaaccgggcccttcaggatgcaatcaacctgc

SEQ ID NO: 95660 - DNA, 575 bp, Zea mays
  unsure (1)..(575): unsure at all n locations
taatggaaagattgtggaggccgtncctgataccctcngctcatcgtactgcacgtaccggtccggaattcccgggtcgacccacgcgtccggccactaccaccaccgcaagcgacgacggggagatgtttctgcgacggatcctgaccggcggaggtggcctggcggcgctgagggcggcgcgcgccgtgaaggagacgacggggatcgtcggccttgaggtggcgcccaacgcgcgggaggttctcatcgggctctacacgcgtacgctcaaggagatcgaggccgtccccaaagacgagggctaccgcaaggccgttgagtccttcaccaatcaccgncttcagatctgccaggaggaggacgactggaagcgcatcgaggaccgaatcggatgcgggcaagtcgaagagctcatcgaggaggccgatgacgagctcaagcttatcgccaaaatgattgaatgggatccgtgggtgttcctgataactacgaatgtaaggtgaatgaggacacatcctaatttctaaacatgttcttaagaacggcccgtggtttttctggagaattttgaa

SEQ ID NO: 95661 - DNA, 525 bp, Zea mays
tgatagtgcgctatacccgttcacgatctctcctggaatgacgtaccggtccggaattcccgggtcgacccacgcgtccggtaacggcgtctgcctgctctaccgcgagtggcatcgcccgctccgcacgctcgatcccacccaggaccacaagctcatgttcggactcctcttctcccttcgctccttcaccgccaagatcgacccaaccacggctgaaaagggaaatcttggagtgccactgctgccaggccaaggttgctcgttttatagcttcaagacaaacacatacaaactgaacttcatggagagcccttctggtataaagcttatattaattacacatccaaggactggtgatcagcgagactcgctaaaacatatatacaatctatatgtggaatatgttgtaaaaaatcctctgtatgctcctggaacaccaatcaagtgtgaaactttcaattaaacatctcgatccatacgtggaaacattaatttgatgccattgagctagcttttggaaag

SEQ ID NO: 95662 - DNA, 582 bp, Zea mays
atagcaaaatatagccgcgtgctgttgctacgacactgagtactgctcgtaccggtccggaattcccgggtcgacccacgcgtccgcccacgcgtccgcagattcagatctgtttcctgtttctctacccccaccacctcctccacctgcattacccccaattgaaagagttattgcaaatcccattgttccaccagaaaagcgatatagtcctccaccaaagacaagtagctctacttctgccacatcattctctattgcatctcttcagcaatatacaaatagcttcagagaggagaatgtgataagagagagtagattaggaaaggtttacctagcagagcttcctgatggcaagttattggaggttttgaagattgacaatgctaatgggaagaatatcaagtgatgactttctaaaaaaggttgaatgtatcttagatatcaagcatcctaacattcttgagttagtcggatactgtgcttaatattggcagaaggtacttgtgtacaatcactttagcataacgacacttgatgacacactgcaagattgataggattctggaagtgccctgtctt

SEQ ID NO: 95663 - DNA, 569 bp, Zea mays
  unsure (1)..(569): unsure at all n locations
gtatgatcgctgttgctgataacccagcnactcatccgacctgccgtaccggtccggaattcccgggtcgacccacgcgtccgaccaaaaattcaagagtgggctcaatggcattcaggtggaactgcaggctactgatgcaagtgaaatcagccttgatgagatcaaggatcgggctcgctaggcatcatgatcatgcatcatggactcggcctactactgtggatttgtatgccattatagacttggtgctgtgaaagactgcttgatgatttgcgggtttgttgctgtgtaaaaaaaggtcccatggctcccagaagaccatgaaggttcggatctatcatgtaattccttgttatctgccaattatgtatggactaaaaaaaataatataaaaaaaaaaagggcggccgctctagaggatccaagcttacgtacgcgtgcatgcgacttcatagctcttctatagtgtcacctaaattcaattcactggccgtcgttttacaacgtcgtgacttgggaaacccttgcgttacccaacttaatcgcctttgcacacaatccctttt

SEQ ID NO: 95664 - DNA, 520 bp, Zea mays
ttgcgagcgaaacagcatccgcactgtgatcggactgcacgtaccggtccggaattcccgggtcgacccacgcgtccgatctcctcgcatttcttcccatcccccttcgcaacccaaaccccaactcgccccgcatcgatggcgcccaaggccgagaagaagcccgcggcgaagaagccggcggaggaggagcccgcggccgagaaggcgcccgccgggaagaagccgaaggcggagaagcgggtccccgctggcaagtccgctgccaaggagggcggcgagggcaagaggggcaagaagaagggcaagaagagcgtggagacctacaagatctacatcttcaaggtgctgaagcaggtgcacccggacattggcatctcctccaaggccatgtcgatcatgaactccttcattaacgatatcttcgagaagctcgctgctgaggccgtcaagctcgcgcgctataacaagaagcctaccatcacctgccgtgagatccagacctccgtgcgcctcgtcc

SEQ ID NO: 95665 - DNA, 511 bp, Zea mays
tgtattgttatgcacggaaagtaatggtactgtacgtaccggtccggaattcccgggtcgacccacgcgtccgcataggctgagctttgttgagatggttgttccttatggagatccaagtgaaccacattatcgcaagaatgcatttgatgctggagaagatggacttggaaaaaatgctcattctcttaagaagggatgcgattgcttgggctacataaaatattttgatgcacatttcacaaacttcactggtggtgtggagacaattgagaactgtgtttgtttgcatgaggaggatcatgggatcctttggaaacatcaagactggagaactggtttagcagaagtaaggcggtcaaggaggctcactgtttcatttatctgtacagttgcaaactatgagtatggtttttactggcacttctatcaggatgggaaaatagaggcagaagtaaagcttactggaattctcagcttaggggctttgatgcctggggaatcgaggaaa

SEQ ID NO: 95666 - DNA, 581 bp, Zea mays
  unsure (1)..(581): unsure at all n locations
tgtataaaattgataagcgcgccgaaagctgagaccatcgctactcatggacacggccggaattcccgggtcgacccacgcgtccgcggacgcgtgggctaccggatctcctgcgactaccaggcggacccgcggttctgcatccgcggcacgtcggtgaccatcaccgccaccaacctgtgccctcccaactacgcgctgcccaacgacgacggcggctggtgcaacccgccgcggcagcacttcgacatggccgagccggcctggctcaagatcggcatctaccgcggcggcatcgtgcccgtcaactaccatagggtgccgtgtgtgaagaaaggcggngtgaggttcagcatcaacgggcgcgactacttcgagctggtgctcatcttcaaacgtgggcggcttgcggttccttcaagtcgggttccatcagggggtcgggcaccggttgaatggccatgtccgggacctgggcggtaaccggggagtcaacggcgaacttaattggcacaagccgttagttcaggtgacccgtgagtgaagggcagaccaaaaactttcccgaagtttggccgtcc

SEQ ID NO: 95667 - DNA, 600 bp, Zea mays
ggtttaaattataatggcgtgttaagccatgcgacatcgagaccggtaggactgacgtaccggtccggaattcccgggtcgacccacgcgtccgcccacgcgtccgtgaatgttgaaaagctcaagaagatggcaggtgctgtgcgcaccggggggaagggtagcgtgcgcaagaagaagaaggcagtccacaagactacaaccacagatgacaaacggcttcaaagcaccttgaaaagaataggagtgaacagcattcctggtattgaagaggtcaacatctttaaggatgatgttgttattcagtttgtaaatcctaaagtgcaagcgtcaattggtgctaatacatgggtgggcagtggaactccacagacaaagaagctgcaagatctggtttccgcgattatcaaccaactttgtgactgacaacctgggcaaatttgcgggaagctcgcaaaacaaaattccgaaaacaaggcctctggtggcttttggtgccaaaggctggtggcaacagctgggggcttgttaagaacaattattgataaccatttctgtagcttggtcccttgagaagacaatttatggaggcccctggaa

SEQ ID NO: 95668 - DNA, 583 bp, Zea mays
  unsure (1)..(583): unsure at all n locations
agagataaagattggtgggtgtgtagctactgcccctgagntcgtccgactgacgtaccggtccggaattcccgggtcgacccacgcgtccgcccacgcgtccgcccacgcgtccgcccacgcgtacgcggacgcgtgggtcgacgaggagcgtgttgttggctggtacagcactggcccaaaactattggagaacgacttgtgtgtgcatgcatgattcaacagttatgttcctaatacagtcttggagattattgatgtccaacctaaggagctgggtataccgaccaaagcgtactacgctgtggaggatgttaaatagaatgcaactcagaaaagtcagaatgtatttgtccatgttccttcagaaattgcatgttatgaagtagaggagaatggagtagtacactttataagggatgttagggacacaacttttagcacacttgagatcaatggcacttgcaagcttgcatgcttaaagggaattagatgcaaggcttaaggagaatctcaacttgatgattatttgtattgacgtgggaggtcgcattggataatgaatttnagggcttttaggaat

SEQ ID NO: 95669 - DNA, 586 bp, Zea mays
  unsure (1)..(586): unsure at all n locations
atatgtttattttagatcagttgctaatgctactanaccgctactctgtgacggtccggaattcccgggtcgacccacgcgtccgatcctcgcatttcttcccatcccccttcgcaacccaaaccccaactcgccccgcatcgatggcgcccaaggccgagaagaagcccgcggcgaagaagccggcggaggaggagcccgcggtcgttaaggcgcccgccgggaagaagccgaaggcggagaagcgggtccctcctggcaagtccgctgccaaggagggcggcgagggcaataagggcaagtaaaagggcttgaagagcgtttaaacctacaagacctacatattcaaggtgctgaaccacgtgcacccggacattgacatctccttcaaggccatgtcgatcatgaactccttgatgaacgatattttctataagcttcctgttgagagccgtaaactctaacgctataacaagaagcctatgcatgactttccgggaagaccaaaactntattgcgcatcgtcttcgctgggaggttgacaaacatcgctgtcttctaggcactaaagctggaacaaatttaa

SEQ ID NO: 95670 - DNA, 585 bp, Zea mays
  unsure (1)..(585): unsure at all n locations
nttatctaataaattagtagtttatgttgatgataccgtacgactcgcacgtaccggtccggaattcccgggtcgacccacgcgtccggtgaatttgtatcccttttatgacaaagtcacctctggtaacatctcttttgaggatggcattgaaaatattgatattggtgggcccacgatgatcagagctgcagccaagaaccataaggatgttcttattgtggtggatcataatgattatcctgctttactggagtaccttaaaggaaagcgagacgatcagcagttccccaggatgttggcatggaaagccatgcagcatgtcgcctcttatgattctgcagtgtcagaatggttgtggaagcaatcaaataaaggagagatgttcccccaagctttactgtgccactggagctgaagtctacacttccggtatggcgaaaaatcctcatcaaaatgctgcattctatgctgacaagaacccttctctttggcgtgcttgtggtattggcactgctattcaacaccattgaaaaggaaagtcttacaacaactacttggattccgatgcttcatgggaatttg

SEQ ID NO: 95671 - DNA, 580 bp, Zea mays
tgatttaaatatgagtgtgctaacctgatcactgagatgttggactgacgtaccggtccggaattcccgggtcgacccacgcgtccgagggcttcggatcccacaccgaggaaaggagaagagagggtcggaataatggcggccgaggagggtgccgtgatcgcgtgccacaccaaggacgagttcgacgcccgcatggccaaggccaaggagcagggcaagctggtggtcatcgacttcatggccccctggtgcagtgggtgccagatgatggccccggtgtacgcggactgcgccagcaagtacccttccgcggtcttcctcgaggtcgacgtcgacgaactgctggaacggcgagacgctcgagagctttgctaccgtcgacgaggacgagctccgggacgccgtcaggaagtacgccggcgctggcactacgacggctcctgcctcggcgtccgcctaattcaggagatgtgatgtgtagcagatagcgcgcgcgcaccagtcgtcaataaataaataaataaataaataaataaattaagtaagggcaacgttcgactgctaattagtggcgccg

SEQ ID NO: 95672 - DNA, 518 bp, Zea mays
  unsure (1)..(518): unsure at all n locations
tctgtctcaagccatgnacgtactgcgatagcactgcacgtaccggtccggaattccagggtcgacccacgcgtccgcccactcgttcggactagctctagttgctgaggaatattttactggtacatggacaactggttcgactgatagactcaccagcctggatcgttacaaaggacgatgctatcacatcgagcccgttcctggggactcatatcaatatatctgttatgtagctcatccataagacctatacgacgagggctctgatactaacatgtttaattacattgagcgtaacgtgttcgacgtcaaagccttacgcgctatacatacgtaggatctactaatttccactgcttattcaaaatctttgcaagcttcaatctacacggtatccaagttagaaacgcttaacttgaacaagtaccgttgttctttattgggatgggctatgtaacctataatgggatcatcctcgaaaaattacggtacagcgtgctatgagcgtctactcg

SEQ ID NO: 95673 - DNA, 520 bp, Zea mays
  unsure (1)..(520): unsure at all n locations
tggacgcttctnattaccgactcagtactgtcatgcgactgcacgtaccggtccggaattcccgggtcgacccacgcgtccgcggactcgtggggttggcttctcctccccctccggttcgggttcgggttcgtgaggttctccggggttcggtttcgtgggtgagcggatcgagatggcggcgtcggatgttgagtaccgctgcttcgtcggcggcctcgcctgggccacggacgaccactccctccacaacgccttcagcacctacggcgaggtcctcgagtccaagattatcctcgatcgggagacgcagaggtcccgcggcttcggcttcgtcaccttctccacggaggaggcgatgcggaacgccatcgagggcatgaacggcaaggagctggacggccgcaacatcaccgtcaagctcaacatgcttgccaacgatcaggtccgtcccctgttgcaggacgtcgccacatccatggccaggctcggttccttgctgccgtccgactttgagggg

SEQ ID NO: 95674 - DNA, 586 bp, Zea mays
  unsure (1)..(586): unsure at all n locations
atttaaaataatagagagtagtgaaccctgcngccgttgccactgctcgaccggtccggaattcccgggtcgacccacgcgtccggtgaagttgacaatgaaaagatggaactcctgctgtcccaactgagcggtaaggacatcagcgagctcattgccgcgggcagggagaagtttgcttcagtcccatgtggtggcggcggtgtcgctgttgcggcagctgcacctgctgctggcggagctgctcctgcagctgaggcaaagaaagaagagaaggtggaagagaaggaagaaagcgatgatgatatgggcttcagcctcttcgactaggctgcacagtcatcacagtattgttttgggcagtgaaaccagaggaaaaccagagtcatgtttagattttaaggcttgtttatgttggaaagtactggaaagactgctacttgtctttatatttggtgattcagccgtatattgctatgctggttgggatttactcgtgaaccaaaagttttctgtcttaaatatcctgaattggttatcccaaaagtttcttgggtttttaacttaataataaaaaataaataaa

SEQ ID NO: 95675 - DNA, 585 bp, Zea mays
  unsure (1)..(585): unsure at all n locations
attatataattttagatggtgctaagcctgcnccnctcggactcatcgtacctgtccggaattcccgggtcgacccacgcgtccgcattggtggtgctctcttatttatgaccccattatttactgatataccccagtgtgcattggctgcaattgtgatttctgctgttactggcctggtagattatgaagaggccatcttcttngtggctattgataaaaaagatttcttttatgggcaatcacattaataccaccttaagttttggcattgaaaatggccttcctggtgggggtgcattcttattggcctttgtgaatcatgaatcaacaaattcacatatatctggcttgggccctttacctggcactactgtgtacaagaatacattgcagtacccttaggcttatacctattatgggatattaatggttccaattgatgcaccgatctactttgtcaacatttgctacatctaataacacgtttcgtgagtattagctcaaatctttcaagtttaaacaatggactttatatttgaaaggtgttttttgtgaaactctagaaattccctggtaaatatt

SEQ ID NO: 95676 - DNA, 590 bp, Zea mays
  unsure (1)..(590): unsure at all n locations
tgatggtaatttaagatcgggctgctcccacgancccagcnacatcatcgaaactgacgtaccggtccggaattcccgggtcgacccacgcgtccgcccacgcgtccgcccacgcgtccgcccacgcgtccgcccacgcgtccgtgtccggctaaagcgcctaaccctccgccgcccctcggacccccaaccagcagctgccgcggccatccgccggcgagatggcgctgtacctgctgttcgagtcggcgtccggctacggtctattccacgcgtacggcatcgatgagatcgggcagagcgtggaggccgttcgctcctccgtgctggacctcgatcgcttcggcaaggccgtcaagctcaccgccttcaaccctttctcctctgccgtcgatgcactcaatcagtgcaacgctatatccgaagggatcatgaccgatgaactgaggagtttcctggagctgaacctgccgaagcccaaggaggggaagaaggccaaatacagcctcggggtcgtcgagcccaaggtcgtgtctcacatctgcgaggtcaccggcattccctgccngagcaacgaattcgtccaggag

SEQ ID NO: 95677 - DNA, 524 bp, Zea mays
  unsure (1)..(524): unsure at all n locations
gggtgtgggtantaaagtcagtcccaccgcatacgcactttccttccggtcctgaattccggggtcgacccacgcgtacgtccacgcgtccgtccacgcgtccgggctactgtagattccattcttttgagggagctccccggtgtagaagatgctgaagctaggcttgcactcaaaagattagttgacatcagcatgggcgtgctggcccccttatcggatcagttgacaaagccactcccacatgcaattgtacttgtcaacctcgacgaattgtcaagtggtgcacacaaacttttgccagaaggcactagactagctgtcactcttcgtggtgatgaatcatacgagcagctagatattcttaaggatgttgatgatataacaatgttgttacataatgttccatatgttgaggagaagacaggcagggtgcatgctgctaggaagttatttgagtacttacaggccaatggcttgaacttccctgtaattcatcacataaaattgcctgaaaccattga

SEQ ID NO: 95678 - DNA, 542 bp, Zea mays
gatgtgtttgcagttgccgtccgcacgcacgtaccggtccggaattcccgggtcgacccacgcgtccgacacacaagacacaaccccactcacccggcagggaggccctcttcgtcggcggaggccatggtttccctcaagccgcagaagaggctcgccgcgggagtcctaaaatgtggcaaggggaaggtgtggcttgaccccaacgaggtctacgagatctcgatggctaactcgcgtcagaacattcgtaagctggtgaaggatggattcataattaagaagccacagaaaatccactcaaggtcccgggcaaggagggcccatgaggccaagcagaaggggaggcactctggttacggtaagcgcaggggtaccagggaggctaggctccccaccaagatcctttggatgcgcaagatgcgtgtccctaagcgtctgctgcgcaagtatcgtgaagcaaagaaaatcgacaaacacatgtaccacgatatgtatatgaaagtaaaaggaacatggtttaaaaattagagggtactcat

SEQ ID NO: 95679 - DNA, 538 bp, Zea mays
gacgctgtatggagttttatgactgctctaccggtccggaattcccgggtcgacccacgcgtccgcggacgcgtggggcactgggatctgcaagaggtctttcttacttgcatgatcactgcgatcctaagatcatccatcgggatgtcaaagctgcaaatattcttttggatgaggagtttgaggcagtcgtaggtgatttcgggcttgccaagcttatggactacaaggatacccatgtcacaactgctgttcgtggaacaattggacacattgctcccgagtacctatccactggcaagtcctctgaaaagaccgatgtttttggatatgggatcatgcttctggagcttattactggacagagggcatttgatctagctcgtcttgcaaatgatgatgatgttatgcttcttgactgggtgaaaggactgctgaaggagaaaaaggtggagatgttggtggacccagatctacagaatgcctacgaggagatcgaggtggagaaccttatccaaggggcactttcttgcacgca

SEQ ID NO: 95680 - DNA, 537 bp, Zea mays
tgatgggtattcacgatcaagaagctgatgctctaccggtccggaattcccgggtcgacccacgcgtccgctgattagtctgggacggaaactatggttcggatcaccgttggcatgaatgtgaaggctgaccgtgacgagtcgtcaccttacgctgctatgcttgctgctcaagacgtcgcacagcgctgcaaggagcttggcattactgcactgcacattaagctacgcgccaccggaggctacaagaccaagacccctggacctggtgcccagtatgccctcatggcgcttgctcattccgggatgaaaatcggacacattgatgacgttaccccggatcacactgacagcactagccgaaagggccgtaggatgcgaaggaggctgtatgcgtatcgactgcgtggcatattgcggctcttgggccgtggccagtatgaagctagccctctttggagtgtgctgctgttctgtgtttgtcaagacgagcattaatttgctctatgtggatgaccgttaccggtactcgaaccc

SEQ ID NO: 95681 - DNA, 540 bp, Zea mays
  unsure (1)..(540): unsure at all n locations
gtcggtatgatgagatcgagattcataggactgacgtaccggtccggaattcccgggtcgacccacgcgtccggtcattgcagtggatgtccttgatgagaagctccagaacgctacaacacttggagcaacccacactgtaaatgcagcaaaagctgatgcagttgaaaggataaaggaaattactgatggtaggggtgtagatgtggctatagaggcacttggtaaggcgttaacattttcccagtgcgccaagagtgtgcgtgatggaggcaaagctgttatgatcgggcttgctgcaacgaacgtaatgggagaggttgatataacccgtcttgtccgacgacaggtgaaaatcattggctcatatggcgcaagggccaggcaagaccttactcagatagtgaagctcgcggagagtggtgccttcaatctccagaacaccatatcaaggaaatgcatattcgaagaggcgaatggcgcctatgaagatcctaatcagggcatgatcgtaagacgagcttgtgttgagatcatgan

SEQ ID NO: 95682 - DNA, 536 bp, Zea mays
  unsure (1)..(536): unsure at all n locations
ntgtggtttttctagacgaaactctatgcactgctcgtaccggtccggaattcccgggtcgacccacgcgtccggtacaaaggcccaaccctgcttgaggctcttgaccagatcaccgagcccaagaggccttcagacaagcccctgcgtctgcccctccaggatgtgtacaagattggtggtattggaactgtaccggttggtcgtgtggagactggtgtcatcaagcctggtatggttgtcacctttggtccaactggcctgactaccgaggtgaagtctgttgagatgcaccacgaggcgcttcatgaggctcttccgggtgacaatgttggcttcaacgtgaagaacgttgctgtcaaggatctcaagcgtgggtttgtggccttcaacttcaaagatgaccctgccaaggaggctgccagcttcaccttccaggtcatcatcatgaaaccaccctggcagattggcacggctatgccccagtgctggactgccacaccttccacattgcttgcagtttgctgagctcatac

SEQ ID NO: 95683 - DNA, 545 bp, Zea mays
agaatgggtgtctatgtagaggatctcactgcctctaccggtccggaattcccgggtcgacccacgcgtccgcaaggctattccgttccgagagccaaaaactccactgctttcatcaactccggcgacttggagaatacgaagttccagaatccgatcggaagtttggtgctcgcgccttgacggattgatttcggtgcgccgatggggcaggcgttccgcaagctgttcgatgccttcttcggcaccagcgagatgagggttgtgatgcttggtctggatgccgccggtaaaaccaccatattgtacaagctgcatatcggggaggttttgtcgactgttcccacgattggtttcaacgtcgagaaagttcaatacaagaatgtgatgtttactgtgtgggatgttggtggccaagaaaagttgaggcccttgtggaagcactacttcaacaatactgatggcctgatctacgtagttgattcgttggatcgggagagaattggaaaagcccaagctgaatttcaggcaataataaaagatcc

SEQ ID NO: 95684 - DNA, 541 bp, Zea mays
agttggtaattaagagtgagatgaatgaccgtccggtccggaattcccgggtcgacccacgcgttcgctagccgccatatctcacggtccactcgagcaccaaaccctggggaagtgaggacaatgggcccggctggtgtcgggcgaaggcggcgcggtcgcgggcaaggaagaaggggtcgggttccttcacgatcgactgcaccaagccagtggaggacaagatcatggaggtcgcctcgctcgagaagttcctgcaagagcgcatcaaggtcgccggcggcaaggctggcaacctcggcgactccgtcaccatctctcgcgagaagaccaaggtcaccgtcacctctgacggacccttctccaagaggtacctgaagtacttgaccaagaagtacttgaagaagcacaacgtgcgggattggctacgcgtggttgctgccaacaaggaccgaaacgtctatgagctccgctacttcaacattgctgagaacgaaggcgagggaggaggattagattgcactacgcctaatatttagta

SEQ ID NO: 95685 - DNA, 544 bp, Zea mays
ttcgggtttaatgataagagtttcgatggactgcacgtaccggtccggaattcccgggtcgacccacgcgtccgcccactcgtccgcccactcgttcgaactaattggtgccacagacccacagaaatctgaaccaggaaccatcaggggtgatcttgccattgttgttggaagaaacatcattcatggaagtgatggcccagagacagcgaaggatgagatcgctttatggtttgaacccaaggagctggtctcttacaccagcaatgcggagaagtggatctatggggtgaattaacgagagagtcaatctgttttttttccttcttttgatctcggttttcacataattgccgacagacctaggcacaaggatgtaataaagtcgctaccgtcacttctgagttggattgtgaccttcaggtgtagtaaggcacaaggaaggatggaaaggaaaggaatataccgtgaaatatagagcgtgcactgagtagtcgcgatgttcaaatcaaactatatatcaacgtcacttgaatcatgtaat

SEQ ID NO: 95686 - DNA, 530 bp, Zea mays
  unsure (1)..(530): unsure at all n locations
ggatatgggtgcgtntaagctgaagtcctntggcncctagcgacgtcgtaccggtccggaattcccgggtcgacccacgcgtccggaagaccagttcccctctcctgatcgtcctgttcctcacagcagcagccatggcggccgagccggataagcaggcggcccccgcggcacatgagacggtcgtgcacatcgtgtacgttgaccgtcccgaggacgccgaccctgaggagttccacattcgcaccctcacccccgtactcggctgcgaacagaaggccagggacgcagtgctctaccactacaagaacgccgccagcggcttctccgcgaagctcaccccccagcaggtcaaggatctcaaggagcaaccaggtgttctccaggttgtgccgagccagacttaccagctacatggtcctgggtctggcactcaccagggcacgacacacaccttgggccttatgtgaaggcgtatgagaatcaagaagattgtgtttaatatggctgtatggcacaggtctgacgag

SEQ ID NO: 95687 - DNA, 538 bp, Zea mays
cgctatgccagctcggtacctactgcacgtaccggtccggaattcccgggtcgacccacgcgtccgtagcaagccaccatatgatggtgctaaagcatcaagtagtcgatctagtcgtcgtttcggaagcagaaggattagtccccaggtatcggctggcaattatgaagttggacaggtttcatacaaatacaacttgctcaaatccagaggccccaggagaatgtattgcactctcgaatgcccttcagcccaagagacttgggaaaactcactcaagacaaagttcaagcgccccctgggccccacaactttacgaaataaagcaccccgctggcatgagcacctgcaatgctggtgcttaaacttccatgggcgggtaacagttgcatcaatcaagaatttccagcttgtggctgctgccgaccccagtgagcctactaccaacgtggatgatgaaacggttctgctgcaattttgtaaagtcgatagcgatatgttcacaatgggttaccgggctaccacttttcgcgtttta

SEQ ID NO: 95688 - DNA, 545 bp, Zea mays
agtactgctagctacgattggtacgcactgctctaccggtccggaattcccgggtcgacccacgcgttcgaacgatggcgtccccaagctacttctcgacataagatgtggttctggacttagtggtgagacattgacggagcatggccaccactggattggctacgatatttcaaagtctatgctcgatgttgccttggagcgtgaaacggaaggagacctcctacttgcatatatggggcagggcttgggcttgcggccaggaattattgatggtgcaattagtatttcatcaattcagtggttatgcaatgctgacaagtcttctcatgaaccaagattgctgttaaaggctatcttcggctcattatatatatgcctagcacggggagcaagagctgttctacagttttatgctgataatgtgacgcagagtgaaatgattgtgacttttgccatgcgtgactgtattgcttgcggagtggatgatgacatgccttatagatcataagcgaagaagtcctacctttgtgctaacttgagga

SEQ ID NO: 95689 - DNA, 545 bp, Zea mays
  unsure (1)..(545): unsure at all n locations
gaactgtgngctgcaccgctgtgcatagcactgacgtaccggtccggaattcccgggtcgacccacgcgtccgcggacgcgtgggcggtctcgtgggcaaccggtgtcactcgtatagtggtgttgggtctctgtagacaaactcgggacggttgcttatcctaaaaattcgattgtactgcgtggcatgaaatgatcgattcgaagaatattttgaacatgctgccacctaatcaaaaaatttcatgtttaacttaaaaaaaaaaaaaaacaaaacaaagacaaaaaaaaagaacaaaactgaaaaaaaaaaaattacaaaaaaaaaaacaaaagaatagataagaaaaaaaaaggggcggcccttttagaggacccaagtttacgtacccttgcatgcaacgtattagcttttttatgggggcacctaaatccaattcactggccgacgtttaacaacgttttgacggggaaaaccctgcgtttacccaacttaatcgcttttgtgaaaatccctttttggccagctggcgtaataagcaaag

SEQ ID NO: 95690 - DNA, 536 bp, Zea mays
  unsure (1)..(536): unsure at all n locations
tggtttgatgataagacttcatggactgacgtaccggtccggaattcccgggtcgacccacgcgtccgcatttcacggtggagttccccgactcgctggcaccagagcagtgcaaggctctcgagacagtacttccaccaaggccttcatccaagctgacagacatggagatagatgaatgcgaggagacgactatgcatgatgtgaacaacatcgaggaagagatgcgcaggaagcaagctcacgctgcccaggaggcgtacgaggaggacgacgagatgccgggcggagcccagagagtgcagtgcgcgcaacagtaagcagactatcatcaaggcaattgggaggggtggtgcccttaaagcatgggagtgatctctggttttgctgtcgccgagctgggaaataggaagctgaatcgacctcgcaagctgggaatgtatccttttttgctgcaactaaaaaatgctacccaagcatagctgggtaccttttacttctgnntgtggatttggtaaagtgatggtttcaaatat

SEQ ID NO: 95691 - DNA, 516 bp, Zea mays
  unsure (1)..(516): unsure at all n locations
ctttntaaatttcaacgcgtccgactgacttaccctccggattcccggtcgaccactcgtctcgcccactcgttcgcccactcgttcgctgacgcttttgctgacgcgtgggaaaacacttaagcggataaggcatacaaggaccggaacaagctaagcagctgaagaagccagcagaggaagagctcctgtcactagaaggcaccctactggaagaagcctaaagctgataagctggtcctctctggcaagtccagctgtcaaggagtacgtcaaggtcaagaggggcaagaagaagggcaaaaacagcgtgtagacctacaagatctacatcttcaaggtgctgaatcacgtgcacccagacattggcatctactccaaggtcatatctatcatgaactccttaattaacgatatcttcgagaagctcgatgctgaggccgtcaagctcgcgcgctataacaagaagcctaccatcacactccttgagatccatacctccgtgcgcctcatcct

SEQ ID NO: 95692 - DNA, 543 bp, Zea mays
ggttgctattcagcgatgcatcgactgcacgtaccggtccggaattcccgggtcgacccacgcgtccgctgtaatctgtgaaatctggtttgcgatgtcctggattcttgatcagttcccaaagtggcttccaatcgagagagagacttacctggaccgtttgtcactaaggtttgacaaggaaggtcaaccctctcagcttgctccaatcgacttctttgtcagtacggttgatcccacaaaggaacctcccttggtcacagcgaacactgtcctttccatcctttccgtggattatccggttgagaaggtctcctgctatgtttctgatgatggtgctgcaatgcttacgtttgaagcattgtctgaaacatctgaatttgcaaagaaatgggttcctttcagcaaaaagtttaatatcgagcctcgtgctcctgagtggtactttcaacagaagatagactacctgaaagacaaggttgctgcttcatttgttaaggaaaaggaggcgatgaagagagaatacgaagaattcaaggtagg

SEQ ID NO: 95693 - DNA, 537 bp, Zea mays
  unsure (1)..(537): unsure at all n locations
atgggttaactgatcagcgatccgacgcgactgccggtaccggtccggaattcccgggtcgacccacgcgtccgcggactcgtgggcggactcgtgggcggacgcgtgggcggacgcgtggggtcgaatctctgccagttgaaccgttggagcctagtgatttgaagccagagaacagtagatatgatgcacaaattagtgtctttggggctaagcttcaaaagaaactggagcagtcaaaaatcttcatggttggttctggggctcttggatgtgaattcttgaagaaccttgcgttaatgggtatttcttgcagtcaaaatgggaagctgactgtgacagatgatgatgttatagagaaaagcaatctcagtcgccagtttctctttcgtgactggaacatcggacagcccaagtccacagttgctgcaactgctgctatggcaattaatcctaaagctcatgtggagggccctcagaatagagcaagtnctgagactgaaatgtngtttatgatgcccttgggagagtttggat

SEQ ID NO: 95694 - DNA, 546 bp, Zea mays
gttcggtttaacgaacagaaattcgatggactgcacgtaccggtccggaattcccgggtcgacccacgcgtccgccctaattacaatcttcctcaacgccgccgctcccagacaccgagcccgactgcccgaccccgatccggcgatccgtctccttcctttccttcgttctgccggccccgatcactcgtcaaccatggcggcggcagcaggcggaggagcggtgcgtgctctgtcccagaaggagcaggacatacagatgatgctcgccgccgacgtccaccttggcaccaagaactgcgatttccagacggagcgctatgtctttaagcgccgttccgacggcatctacatcatcaatcttggcaagacatgggataaactccagcttgcagcgagggttatcgttgccatcgagaacccgcaggacatcatcgtccagtctgcccgtccatatggccagcgtgctgtcctcaagttcgctcagtacactggcgcccatgccatcgctgggaggcacacccctggtacattcactaatcagcc

SEQ ID NO: 95695 - DNA, 548 bp, Zea mays
ggtacgggttacctgattcagttacagtacgactgcacgtaccggtccggaattcccgggtcgacccactcgtccggaaagagttcacctgttacaagatccttaaggatctcaatcacgtattctgctgcaatggtactgcagtttaggacccacagctaggccaggtcattcagctccaaggcgatcagctcaagaatgtcgctactttcctagttcatactgggatcgcgaataaagagaacatcaagattcacggctctctaagggacctgtaaatgcatgtgccctatattgtgtgccttcacatattgtgtagcttgaagcatcgacacgttactagtcattgcttacttatataagaacataagtcgtatttgctattgtcaagtgtgccttgcttgatgcaagttgcgttttcgtatcattattattatgcacggtcatcgtacgtgtatggctcgtatgggttaatgccaacttaataaaagcacactcctgttggcctataattaaaatcaaaaaggcggtcgttctagaggatccca

SEQ ID NO: 95696 - DNA, 514 bp, Zea mays
cagtctaggtacgtatcgatgggagcctcactatctattggtccagaattcccgggtcgacccacgcgtacgcataggctgagctttgttgagatggttgttccttatggagatccaagtgaaccacattatcgcaagaatgcatttgatgctggagaagatggacttggaaaaaatgctcattctcttaagaagggatgcgattgcttgggctacataaaatattttgatgcacatttcacaaacttcactggtggtgtggagacaattgagaactgtgtttgtttgcatgaggaggatcatgggatcctttggaaacatcaagactggagaactggtttagcagaagtaaggcggtcaaggaagctcactgtttcatttatctgtacagttgcaaactatgagtatggtttttactggcacttctatcaagatgggaaaatagaggcagaagtaaagcttactggaattctcagcttaagggctttgatgcctggggaatccaggaaatatg

SEQ ID NO: 95697 - DNA, 522 bp, Zea mays
  unsure (1)..(522): unsure at all n locations
gggtatgggttctgaatatcgtgatcgaattttatggtactgctccggaattcccgggtcgacccacgcgtccgagagaatcaagggttcttgagtttcagcatgcgttggaaccacttgcgtacagaaagatggactttgaagaattctgtgctgcagcaatcagcccgtaccagctggaagctttggaaaggtgggaagaaattgctggaacagcttttcagcacttcgaacaagagggcaaccgagttatatcagttgaggagttagcacaggaactaaatctcgcgccgacacattactccattgtgcaagactggatcagaaaatcggacggcaagcttaactttcttgggttcaccaaatttttgcacggtgtcacgatacggggttcaaatacaagacgacactaaacagatgcaaactgtattcgcttctaatttgaaaccctctcatcgattatatggccctgattgctgttacctnctgccttgccttgccttgcccctgagtcttgtcaat

SEQ ID NO: 95698 - DNA, 510 bp, Zea mays
  unsure (1)..(510): unsure at all n locations
cggtnctaaatctgttacgactctcttggcaaccgctccggaattcccgggtcgacccacgcgtccgggtgctctctgaatgaagaatcgcagctgatcaaacatggactagtatccaagcagttaatttcatgccttgctgcttcgcttgtgttcgtctctccacctagtcaggctattcctgcagaaacctttgcccgtccaggcttgtgccagattgcaacagtggcagccattgacagtgcttcaggctcctctgaagtttgacaacccttcagatgatgtcagcacagggatgatgatgaggggtatgaccgtcaaaaacttcgatccagttcgctactctggtacatggtctgaggtagcctcgttgaaacgtgcatttgctggtcagggactagaagactgtcactgtactcagggagtgtattcttttgatgagaaggcacgctcaatccaggtggatacattctgtgtacacggtggacctgatggatacatcaccggcat

SEQ ID NO: 95699 - DNA, 544 bp, Zea mays
agtatgggtatctcgatcagagatgactgcacgtacccgtccggaattcccgggtcgacccacgcgtccgcagggatctcgctcttgcaagggtggaaacagagaagaggaactctttgatcaaagcttgggaagagaatgagaagacaaaagctgagaacaaggctgctaagaaagtatccgctattctttcatgggaaaacacatagaaagcaaacatagaagctgaactgaagaagattgaggaacaactggaaaagaagaaggctgaatatgcagagaagatgaagaacaaggttgcaatgatacacaaggaagccgaagagaagcgagcgatggtggaggcaaaacgcggtgaggaggtcctgaaggccgaggagatggctgccaagtaccgggccaccggccacgctcctaagaagctcatcggttgcttcggagcttaagaagccttccaagtcagaccgagcagaaagtgaaaaacgtcaaccagtgattgcttgggcctctcgctctatcaagtgtgtaatgtgtctttcaaaag

SEQ ID NO: 95700 - DNA, 541 bp, Zea mays
  unsure (1)..(541): unsure at all n locations
aggtcgctatgcagctacctaccgactgacgtaccggtccggaattcccgggtcgacccacgcgtccgcccacgcgttcgcggacgcgtgggtcggatcccacaccgaggaaaggagaagagagggtcggaataatggcggccgacgagggtgccgtgatcgcgtgccacaccaaggacgagttcgacgcccgcatggccaaggccaaggagcagggcaagctggtggtcatcgacttcatggccccctggtgcagtgggtgccagatgatggccccggtgtacgcggactgcgccagcaagtacccttccgcggtcttcctcgaagtcgacgtcgacgaactgctggaagtcgcgaagatctacggcgtccatgtgatgccgaccttctgcttcatcaggaacggcgagacgctcgagagctttgctaccgtcgacgaggacgagctccgggacgccgtcaggaagtacgcctgcgcttgcactacgactgctncttgcctcgcgtncgcctaattcaggagatgtgatgtgtagcaaaa

SEQ ID NO: 95701 - DNA, 544 bp, Zea mays
  unsure (1)..(544): unsure at all n locations
tgttcggtttaacttacgagtctcgtaggactgcacgtaccggtccggaattcccgggtcgacccacgcgtccggttcttgatgaagctgatgaaatgctttctcgtggtttcaaggatcagatttacgacatcttccagcttctcccatccaagattcaggttggagtcttctctgctaccatgccccctgaggcccttgagattacccgcaagttcatgaacaagccagtgagaatcctcgtgaagagagatgagctgacccttgagggtatcaagcagttctatgtgaatgtggataaggaagactggaagctggacacactgtgtgacctgtacgagacccttgccatcacccagagtgtcatctntgtcaacacccggcgcaaggtggactggctcactgacaagatgaggagcaaggaccacacttgttcttgcactcatggtgacattgaccataacactagagacatcatcatgagggaattcngtctggctctnccgtgtggctataaccaccgacctgcttgcttctggtatga

SEQ ID NO: 95702 - DNA, 541 bp, Zea mays
  unsure (1)..(541): unsure at all n locations
cgctcgctatctagcacgtacagcactgtcgtaccggtccggaattcccgggtcgacccacgcgtccgcccactcgttcgcccactcgttcggccgatcacagtggaggatcacaggcaacaacgacgacccgcttggtgtgcgttgctctggaaggtaacagaagtttgggagtggcccatcgcactcgttctgaagctcacaataccatcaacccttccttccgagtggagcaaagtttacatcagcgcaaacatcagcctgtgccctctcctaatcctgtactccttcagctcgttcatccctctagacacccgaatagtgttcctcctcccgcaagtccgcttccctctatggtccgtcgtgctcttcgccagcctgtgcctagccctcttccactacctnctcgagaaagaagcccccgaaacagagaccatcgcgagcaccaccatctncttcatcatgagcgtcttctggatctcgaccacngcnggagagctnctgagctgcctgncgcggtcggagccatcatggactttcc

SEQ ID NO: 95703 - DNA, 543 bp, Zea mays
agtttgggtataatagatcgagattcatgtcatacccgtccggaattcccgggtcgacccacgcgtccgctgaaattggtggagcatttggtggagaaaaagcaactggtggtggacgagaagcagggagtgattcctggaagcagtacatgaggagggcgacttgtacaatcaactatgggagcgagctacctctagcccagggaatcaattttggttaatcctgcagaaatgttgcgcgtggatctcagtgttttctgcagacgtggatgccgtatggaaagaactgatgcaaccgcatttgagatctcagcagacttgagcagcatttattggcgtcagttgtgaaacttaaactgcaggagcatcttgtacataaataaaataagatgtttgttgctcgtgggccgtggcacgttttggtaccggtgtccagtctactaataaaatctaatgcaaaacggtcaaaaaaaaaaaaaaaagggcggccgctctagaggatccaaagctacgtacgcgtgcatgcgacgtcatagctcttct

SEQ ID NO: 95704 - DNA, 543 bp, Zea mays
  unsure (1)..(543): unsure at all n locations
ggaacgtgtaaagggggagagggattgtatacccgtccggaattcccgggtcgacccacgcgtccgcggacgcgtgggggcgaggtcccggcagcgctgttcgagctcaagaaccttgtgaggctggacatcgcggggaacaagttcagcggcaagatctcgcaagacttcaacaagctgatccgcctcggaacgctgtacctcgacgggaacagcttcaccggcgagatccccaagctgcagctgcctgcattggagcagttcaacgtgtcgtacaaccagctcaacgggtccatccccaacacgctccggaagatgccgaaagactcattcttaggcaacacgggcctctgcggcggtccactcggcctgtgccccggcgagtccgcgcccacgccggccggatcgccggagtcgcagccaggagcgggcggtgcagtcgacgtcggtggcggcaagaagaagaagctcttcggcggcgccatcgcctgcattgccatcggctncgtggtcggcgtgctgctcttgctggccttgtttttt

SEQ ID NO: 95705 - DNA, 515 bp, Zea mays
tggaggctcttattacgatctgcaagttagctgatcggcgccggaattcccgggtcgacccacgcgtccggatgacttcaaggagagactatccaagcttctgagtttacaagaagcctggactctaataattgatgatggattggcggcttcatttgtggccccggctactgattcgttagaagatgacagccaactaaccattgaagagtatcagaggagttgggagcagaacgaggaacttggtctgaatgacatggatacgtgctctgcagactcggcttacaacacgaccaacacataattattttagttttgatgtgccgaatgtatttgttacgctatcagtttactttgatgaactttcagtgtgtatactaatatcaacaacttatatttcctctgacgataaacaaaagatgaaataaagggcggccgatctagaagatccaagcttacgtacgcgtgcatgcgacgtcatagctattctatagagtcacctaaattcaattcac

SEQ ID NO: 95706 - DNA, 522 bp, Zea mays
tggtccgtcgctgagacagcaaccgagagtagagtgatatccgctccggaattcccgggtcgacccacgcgtccgcccacgcgtccgactctctctaccgtccgataccccaagcaccagcgcggcggcggcgaccatggctgtcggaaagaacaagaggatctccaagggaaagaagggtggcaagaaaaagaccgtcgaccctttctctaagaaggattggtatgacatcaaggcaccgtcggtgttcagtgtgcgcaacatcgggaagactctcgtatccaggacacagggtaccaggattgcttctgagggtctgaagcacagagtctttgaggtttgcctagctgatcttcagggcgacgaggatcaagcttacaggaaaatcaggctccgtgctgaagatgtgcagggcaggaatgtgctcacaaactttcggggtatgaattttaccactgataaactgagatccctagtgaagaagtggcagacattaatcgaagcccatgttgatgtcaagac

SEQ ID NO: 95707 - DNA, 545 bp, Zea mays
gttagtgaatagagggagggagtaattgtatacctctccggaattcccgggtcgacccacgcgtccggggcaaaccaaggagcttcacagcctaggccagagcaagaaagcatcctgctgcaggcacagcagcaggtgcaaatgcagaaactcgtataccaagtcggaggtgccttgccgacaaaagttgtctgcctgacacaggtagtgacagcagatgaactgagagacgatgaggaatacaatgacattgtggaggacatgagggaagaaggacgcaaatatggtaacttggtgaaagttgtaattccacgacctgaccccagcgatgccccagttgctggtgttggaaaggtgtttttggaatatgcagatgtcgaaggctcgaccaaagcaaagacggtgatgcatgggcggaaatttggcgggaaccaggtggtggccgtgttctatcccgaggacaagttcgctgcttagcagtattactgaaagttgtagaacctggtctagaggtgccacacacaatggggttttttaaatctttg

SEQ ID NO: 95708 - DNA, 525 bp, Zea mays
ctgtccggtgcttgattacgacatcgatagtatagtggaactgctcctgaattcccgggtcgacccacgcgtccgaaccctgctccaccaacccaatccagctacatccgtctgggtgaactccagggccaggagcagttcgccgtcttcgttcgcatcacctacgcggttcaatccaactggcaggaaggaacgtgatggccaagacgagctcgttcaagctggagcacccccttgagaagaggcagtctgaggctaatcggatcagagagaagtaccctgacagaattccagtgattgttgagaaagctgagaggagtgacattcctgacatcgactagaagaagtacctggtccctgctgatcttacggatggacaattcgtgtatgttgctaggaagagaatcaagctcagtgctgagaaagctatcttcatctctgtggaaaacaacctttcaacaacagctgctctgaagtcctcaatctattaaaagaacacaggttaaaaagggcttcccttcatga

SEQ ID NO: 95709 - DNA, 545 bp, Zea mays
  unsure (1)..(545): unsure at all n locations
agggaagtgctgatnccggaatttgccnacagcactgacgcttcggcatgggatactgcggccgaccacgcgtgctcgatcattgctgcgcatatttgactcttgggagggtgggctcacaaaaggtcataggttaacaagctgtggggaataatgtgcatgaactcaccaaaggtgggagctgatgtgtagtgtaaggctgaacaacaaataatggttaaagctgagcattctcttttaataagttggtcaaaaattattatcacttactaaatgtaagtgtatgccaacccaaagtaatagtaaatcaaaattaataataaaccataatgtgatgcaaatgacaaattaagttttacttcacaaattaattatgtgagtgttcgagctatctaggtggcgtctcctattcaggttgatggcgccaatgaataattattagttcttttattggtatccgttattttttttaaactcttccgctatgtaataattaagtgacatgtatctctatacacttggtctttatatgaaaaaaaaaaaat

SEQ ID NO: 95710 - DNA, 556 bp, Zea mays
  unsure (1)..(556): unsure at all n locations
tgaagagggtgtgtcagccgnccagttcgcgancnattgacgtaccggtctgggattattcggacggacgcacgcgtacgcccacgcgtccggtgccctgccaactacgctctgcccaacgacgacagcggctggtgcaggccgccttggcagcacttcgacatggccgagccggcctggctcaagatcggcatctaccgcggcggcatcgtgcccgtcaactaccaaagggtgccgtgtgtgaagaaaggcggtgtgaggttcatcatcaacgggcgcgactacttcgagctggtgctcatctccaacgtgggcggctgcgggtccattcagtcggcgtccatcaaggggtcgcgcaccgggtggatggccatgtcccggaactggggcgtcaactggcagtccaacgcgtaccttaatggccagagcctgtcgttccaagtcaccagcaacgactggcagaccaaaacctttcccgacgtttcgcccggcaacttggggttcggttagacctttgcgacctggcacaattttctaaatatagacacatttttgt

SEQ ID NO: 95711 - DNA, 555 bp, Zea mays
  unsure (1)..(555): unsure at all n locations
aggagtgtgctgnnnaagggggccctttcacgatgcactgacgctaccgtctggaatcgacggacggacccacgcgtacgtgccaagatctgtcaactggaactttcatttcaggagatcattttcggctacaggaaacagcctcagtgcaagccacacgttttccgaagcgtgtatgttcattggcccccaagaaaccgtaacgggaaaacaggagaagaccaccttgacatcatgactttctacaacgaagtattcattcctgccgtcaagtccttgttggtcgatgtaggacctgtcaccagtccaaagaacaaagaagaggaaaaagatcctgctgatatatgtccattcccagaatctaccctgctggctcggttgccgaaccatcccgacatgttttcaaaaaagtttctgcttcccataacgagtacgtcttaccgatcggtcattaaagatggacactttgttgtccccgagcttcaagaactacttcccgtgcatcggccaaagcacctacccgttacataaccccttcatagacctaatgctttn

SEQ ID NO: 95712 - DNA, 442 bp, Zea mays
  unsure (1)..(442): unsure at all n locations
aggattctgtccttggacgnncgcctacgcgtccgtccggaatcccggtggaccaccgtcgccaaatcttaactgactttattcaggagatattttcggctcaggaacaggcctatgctgccacagtttcgaagcgtctatttcatggccccaaagccgtacgaaacaggaaaaccacttacatatactgctaaccaaatttattcctgccgtaagcctcgtgtcaagatttctggaccagccaagaaatgataggaaaaggcctgctgatgtagtccattccaaattcccgctgctcgttccaaacctcccgactgtttcaaaaagttctgtaccataacggacgtttaccgtacggcatgaaatggcactttttgccagagctcaaagctctaccttcgttgtagagccctaccgtctaaaccctcaaggcctttgtttt

SEQ ID NO: 95713 - DNA, 508 bp, Zea mays
  unsure (1)..(508): unsure at all n locations
nagtaattgttgttcctgcataagaggaggagtaggtagctaccggttcggaattcccggctcgacccacgcgtccgggtgaaggtgttcagcaggcattgctgataatgctggaaggcacgatagtcaacgttcgtgaaaaaggagcaaggaagcatcctcgtggtgataatatacagatagataccaaagatattctttttatatgtggtggcgctttcgtggatttggagaaaactatatcggagagacggcaggattcttctattggcttcggcgcaccagttcgtgcaaacatgagggtcggtggcacttcaagtgctcaagtgacatcgtccttgttggaatcggttgagagtggtgatctaatagctnatggactttatccagaatttattggacgtttccctatccttgtgagcttaaccgntctaaatgangaccaacttgttcaagttctcactgagccaaagaatgccctgggtaaacaattcaagaaattggttaa

SEQ ID NO: 95714 - DNA, 506 bp, Zea mays
  unsure (1)..(506): unsure at all n locations
gtggggaagttgtcatgatttagaggagggagagctcncccggttcggaattcccgggtcgacccacgcgtccgcacaaaggaggggacacacacacacacacacaccgtctccgcccgcccgccgcgacgcgccatggctatggctcgctccgtcgcgcacctcttctttcccatcctccttatctccaccgcgcccgccgtgcgggccatcaccgacgccgccggcggccccggatacctccaggaggcgtgcaacaagacgctgttccccaaggtgtgcatgcacgcgctcaaggacaacccagagtgccaggcggagacggcggtcaccccgcgccggctggccgagctgctcgtgtacgtgtcggccgaggtgggcatgaccgtggccgcgttcgcgcaccacgagctcaacgccatcaaggacgacgacgtcctgtacaagtgcatcgacacctgctccgaggacatcganngaggccgtgcgcacctcagcgccctctc

SEQ ID NO: 95715 - DNA, 504 bp, Zea mays
  unsure (1)..(504): unsure at all n locations
aggagatgttgtcagtatattgggggagagaggatcaccggntcggaattcccgggtcgacccacgcgtccggccgagctcctcgggaatccggtgccaggcctcgccttctcgcggcggtgctccctccggcttcgtcccccagcgacgcaggcaggcgcgcgcgcggccatgaaggggggcggtgccatgaggccgtcgcctatgttctacgtccacgaggcggacgtcgtccagatccaccacttcctcgaggagtgctccctctgcgccaaatcgctctccggcgacatcttcatgtacaggggtgacacgccgttctgcagcgaggagtgcagggagcagcagatcgaggtggacagggcgaagcaccggcggaagaagcgcgcggcggcgcacgcgctgtccgcacgcagcagggagcaccggcaccagcagcagctgcagcagcaccaccaccagcagcagcaaccgcagccgctgaatgcccgcatggacacccgc

SEQ ID NO: 95716 - DNA, 508 bp, Zea mays
  unsure (1)..(508): unsure at all n locations
agattaatatcctgnncctttccattttctcncgcatcacacactcctcgcaattaccggctggacccacgcgtccggtcctcgaccatccctgcaaattatcgttatggctcccaagatcctagtcatccttgtgttccttttcgaggcctcaccggctgctctggccgacttcgatgtgatagagatgctggccgacaagcccacgtactccacgttcctgaagctcctgcaggacaccaaggtcgcgggcgaggcgaatcagctccggtcggcgacgctactggtcgttcccgacaaacttgccaagcctctggcgtcgctgcccgccgataaggtgcggccggccgtggagaaccacgtccttctcagttacttcgaccccatcaagctggacgagatgaaaacacgcaccgacatcctacccacactgctcttcgtcaccgacaagaaactcggcgttctcaactacaccagagccgacgaccggcagatgtacttcttctct

SEQ ID NO: 95717 - DNA, 501 bp, Zea mays
  unsure (1)..(501): unsure at all n locations
agaggggatgctgnnccttttgacctccnngctgacaatcagtctacataccggcgcgcccacgcgtccgggcgaagggcatgcccggctccgttcgttccatgaaggcctaacccgagcgggcagtgtgttaagtagggcgcgagtgagagcgagcggccaatcggccgggagcgaagccagcgctagctgccgcctccctccccggtcctcgggtccgccgcgcgcgcgccggccgtcaccaccgcacgacgccgaccaccacaattagctagcagcggcgtcgactaataaacgacaatggcgtgcatctccctcgaggacgtccgcaacgagaccgtcgacctcgagaccgtaccggtgcaggaggtgttccagcacctgaaatgcaacaaggaagggctctccagcgccgagggagacaatctgctcaagatcttcgggcccaacaagctggacgagaagtctgatagcaagctgctcaaggtcctgggctttatt

SEQ ID NO: 95718 - DNA, 510 bp, Zea mays
aggttagaagtgctgatgattgtgatggagagtaggttgctaccggttcggaattcccgggtcgacccacgcgtccgcccacgcgtccgatctcccctctccgcctcgcctctgcagccacagttccgttcgctcgacgcttctccaacgccgcttccagcaacaagccggagccactcctctcggaaccggatctggagtcaggtctgtatcttgtgtcaacgccaattgggaaccttgaagatatcaccttaagggcactgcgtgtcctaaaatgtgctaatgtgatactatctgaagacacaaggcattcaggaaagctacttcagcattacaacatcaagacacctcttcttagcttccataagttcaacgaacgggagagagagcccactatcttaaggaggcttcatgaaggtgaagcagttgcactgataagtgatgctgggacgccaggtattagtgaccctggcatggaactggctagactatgtgcaactgagaaaatcc

SEQ ID NO: 95719 - DNA, 501 bp, Zea mays
  unsure (1)..(501): unsure at all n locations
ntgggaatgtgtnncctggccatttgtcncgctacaactcactcgattaccggcggaccacgcgtccgcttgtgccccgcggtcatccggttttactttgccgagatcgtctacgcggtctcggagggccacttctcgggcgtcttgtaccgtgacctcaagcccgagaacttgctcctncgctccgacggccacgtcacgctcaccgacttcgacctgtcccgcctacttcaccccagcaggtcgtacgcggagtcgtcgtcgcccccgcggccagcgtcgtcccgctgccaccacaaccgacggtcgcgcgtccccgcgcggagcgactcggttctcagccagcacgtcaagtcgtactccaacttcaacaactccaggcccacttaccagccctggtccgtggcgttcgcctcgcggcagcagttccagaacctggtccgcttcattatgggtagcggcgacgggaccggggttggcaggaagaagcaggtcgcacct

SEQ ID NO: 95720 - DNA, 486 bp, Zea mays
  unsure (1)..(486): unsure at all n locations
nnnnaaaagtgatgatcgcatccgccttaccgaccgcgcgcgagcgttcagtggtccctcgcggccatccgcttgtactttgccgagatcgtctccgcggtcgcgcgaggccacgctgcgagcgtcgagtgccgtgacctcaagcccgagaacgtgctccttcgcgccgacggccacgtcacgctcaccgacttcgacctgtcccgccttctccaccccagcatgtcgtccgcggagtcgtcgtcgcccccgcggacagcgtcgtcccgcggtcaccacaaccgtcggtcgcgcgttctcgcgcggagcgactcggttctcagccagcaagtcaagtcgtacttcaactccaacaacttcaggcccactcaccagccctggtccgcggggtctgtcgttctggagcagctccagagcctgggtccgttccatcattgtgagtcggttacgggacccgggtgggtcaggaaaagcagtttgttcggt

SEQ ID NO: 95721 - DNA, 476 bp, Zea mays
aggcgttctaaaacgtccatagcatccctaccgttcggaattcccggtcgacccacgcgtcgcgacctggcggaccgtgggatccgcggccctttttttttttttggcgggtaagatcaatcagcatgtcctaatctctttgcccattgtgccgcagatcaagttctggatgttaccaagttacggaagatacaaaattcttccgctgagcatattgctctgcgttattcaacggccaaaggaaaatgactatttctataactcgcgtttaaatattaacagccaaggttgggaaaaagcagcatttgtgaaaagcttcaagcagccttgttcttgcagtagttctccagccactccatggtaacactcttcggcctctcaagtggcatgccaagggcacggtcccagatgagctgagatcctatccccatgctttttgaaacaccgaacaagacagtgtaataccgtgcttcaga

SEQ ID NO: 95722 - DNA, 511 bp, Zea mays
  unsure (1)..(511): unsure at all n locations
agaggagaatttgtccatcggtagagggaagagtagtctgctaccggttcggaattcccgggtcgacccacgcgtccgcccacgcgtgcgcccacgcgtgcggttctatctgaccgcaacaactcctcattacatcggttatgagaggctgatcgattggtagatacgtactcgggtggagcagagcaacgagagacatggcgacgacgacgcgtgttgccgncgtcgtcaccggcgtgctgctggtcctgtcggcgttggcgaaccttgcacgggccgaggacccgtacctggtcttcgaatggaaagttacctaccggaacaaggtcctggttggccttccccaaaaggtcattcttattaaccgctaatttcccggtcccaggattaaatggttcttcaacaacaacattgtagttaacggcttaaaccaagttgaccattcgttcctttttaactggaaccggattcaggacaggaagaacttatcgattgaccggatgccaggaac

SEQ ID NO: 95723 - DNA, 511 bp, Zea mays
  unsure (1)..(511): unsure at all n locations
naggggaatggtnntaatagggggtgaaggaagatatcactctaccggttcggaattcccgggtcgacccacgcgtccggtgttccattccttgacaaaagtttcatcagtgtagcaatggacattgatcctgaatggaagatgataaaacgtgacctcggtcgaattgagaaatgggttatccgtaatgcatttgatgatgaggagaggccctatttacctaagcacattctctacaggcaaaaggaacagttcagtgatggtgttgggtatagttggatcgatggattgaaggaccatgccagccaacatgtctccgattccatgatgatgaatgctggctttgtttacccagagaacacacccacaacaaaagaagggtactactacagaatgatattcgagaaattctttcccaagcctgcagcaaggtcaactgttcctggaagtcctagtgtggcctgcagcactgccaaagctgttgaatgggatgcatcctggtccaagaacc

SEQ ID NO: 95724 - DNA, 511 bp, Zea mays
  unsure (1)..(511): unsure at all n locations
nagacaaagtgtgtgnnnnttttgaacccntngcccgtaacataatccgtcggaattaccggccggacccacgcgtccggttgagatcataacaaaaatggctgctttctatggagtaagacgtgtttgggttggacagaacagtctcatgtctactcctgctgtatctgctgtcatccgtgaaagaatcggtgcagatggatcaaaggctactggtgccttcatcttgacagcgagccataacccaggtggtcctacggaagactttggtatcaaatacaatatgggaaatggtggacctgcccctgaattttttaccgacaagattgtctctaatacaacgacaatctctgaatacctcatctctgaaaacctttcagatgttgaaatatcatgtgtcggtgtcaccagctttaatggaccctaaggcccctttgatgtggatgtctttgactctagtgttaattacttaaaagtaatgaagacaaattttgactttcaatcatttaaa

SEQ ID NO: 95725 - DNA, 549 bp, Zea mays
  unsure (1)..(549): unsure at all n locations
agatggccgtagtgatcccctgccccctacgtatccatctaccggttcggaattcccgggtcgacccacgcgtccgcccacgcgtccgcggacgcgtgggatttaaacgacttaagcaggagaaacaggaccgtgcagctgctgctggcaaaaatattgatgagattcctggagcggaaggacttgttgtcagagttgtttcatcagtggataagaagctggaggttaaaccacgttttttagaaatttttcaagaagacaactaccctacagagttcccttacaagtccaaggctgttctcttgttccagaaaatagaaggtgtggaagtatgtctatttggaatgtatgttcaagaatttggtgctgaaagctctttcccgaaccagcgtcgngtttatttgtcatacttggattctggtaaatactttagacctgagattaaaacagtatctggagaagccttgcgtacatttgtgtatcatgaaaatctgaaaggaaatcttgaatactgtaaactgggggggtttacaaattggtaccttttgg

SEQ ID NO: 95726 - DNA, 549 bp, Zea mays
  unsure (1)..(549): unsure at all n locations
acgagatgagttacttgcggactggagnccncctacnccgcttcgncacagtcaggaattctcggggcgacccacgcgtccgcggacgcgtgggctagctagctttccccagctcttcttccacagcactgtctgtctggcaattaggtgtactaatgcgctagtggcactgctgctactctcgtgtactcccagctatctcctctctatactcttgtacgtacgcacgtgtcgcaaccgcaatggagtgcgagaccgggcttgtgcgctccctgaacagcgagggcctgtgcatgtcggcagcggcggcggcgccacgcgccgacgccctgaactggcgcaaggccgcagaggacctgtacgggagccacctgtacgaggtgaagcggatggtggtggagttccgcgagccgctggtgaggatccagggcgccagcctgagcatctggcaagtggccgtcgtggccgcgggccccggtgtcaggcccccatggagctggaccagtccgcccgcggtcggtctaaagaacccaggctaactacgcgtgg

SEQ ID NO: 95727 - DNA, 544 bp, Zea mays
  unsure (1)..(544): unsure at all n locations
cgtgtgcggtgtgaaccagcnctctagctccctncgtacagctgtaccggtccggaattcccgggtcgacccacgcgtccgcccacgcgtccgcccacgcgtccgcccgtcacaactcacaacccgagccggccaaacgcgaagcagcaggagctcccctgaccctgctccgcctccgatcaaggaaaaggaagatgagctactacggccagcagccccccgtcggcgtcccgccgcagcaaggctacccggggaaggacggctacccgccagcggggtacccgccggccggctaccccccgccggcgcatggctacccaccgcagggctacccgcagcagggctacccgccgcagtacgcgcagccgtctncacagcagcagcagagcagcgggccttccttcatggaaggatgcttggctgccctctgctgctgctgcctcctggacgcctgcttctgacggaaccatncgttgccggtccaacacggctgcaggtgaggcaaccagttacgggaagacctggaactgggccggctattctt

SEQ ID NO: 95728 - DNA, 486 bp, Zea mays
  unsure (1)..(486): unsure at all n locations
nggggagtctgtgncttgctatgtatgctaatttgcctgcagctaccggtccggaattcccgggtcgacccacgcgtccgtgaggattaaatgaactgtataaggccgtaatttgttcctggtttagtttcagggtagaaatggacattgctgtaatcagctacacattacatgcgaccggacctgaattattatataagaaacctgaagtgtagtcgatatacatgttttcgtcggtgaaacccacttactttttgtaggccattgaggtgcaataatttgatacccatgtatgttaatctgctaacccacatggaatgcaatttcacaagttaaatttgtcgcttgtcatattttgtaggcttcaatgttaaacattgtcacaggttctcatatatgggtggaagataaagatttgtccagggttgatggtgaggtatttcgaattgatggccaaaacgcccatgttcgcacaaccaaggggaa

SEQ ID NO: 95729 - DNA, 544 bp, Zea mays
  unsure (1)..(544): unsure at all n locations
ngatnaatgctgctgcgatagatctatggtagatcgtcgtaccggcccggaattcccgggccgacccacgcggccgaacaaagctgctctgggccccataaatgaagcagctactacaggggcggcgaactactcctcgtcgccaaaaccctactgctgcttgtatgccatggcgagcagtgctagccaggcgagcctcctgctccagaagcagctcaaggatcttgcgaagaaccccgcggatgggttacacgncaggcttgtaaaccacagctacatcttcgagtggcaggttaccatcatcggaccgtctgacaccctatatgatggaagctacttcaatgcaataatgaccttgggccagaactatcccaacagcccgccatcagtcagatgcacttctgagatgtggcatccgaatgtgtatcctgatggacgtgtatgcatcgctattcttcatccacctggctgaagatcccaatggntatgagcttgctagcgaacgatggacaaccatgcacacggctggaagtttaattctgaa

SEQ ID NO: 95730 - DNA, 542 bp, Zea mays
cgggatgagagctgagcatgagccctcgatactctcgtactgcggtaccggtccggaattcccgggtcgacccacgcgtccggagacgccgacgcggcgcccgagaagaatttgcggatggattcgctgcgcagcgtgttggagtcgattcaggcgatgcagatccgccccgtggtcgcccaaatcatcaccctagggatgatcctaacttcggcattgatcctatggaaaggattggtcgtcgtaacagggagtgagtcgccggttgtggtggttctatctggaagcatggagcctgggtttcgaaagggtgatgtcctgtttctgcacatgaataaggaccctgtccgcacaggagacatagttgttttcaatgtcgagggccgtgatattccaattgtccatcgtgtgatcaaagttcatgagcgccatgatacggtggactctgacattcttacgaaaggtgacaataatcccgggggttaccgagtcctgtacgcacatgggcaacttttggttgaacgacaggacataattggacg

SEQ ID NO: 95731 - DNA, 541 bp, Zea mays
  unsure (1)..(541): unsure at all n locations
agtattgcggtgtgtccctcgccctcgagactgtcgtaccggcccggaattcccgggtcgacccacgcgtccggccggctcacttctccaggtaaggaaagtgttcgtcctcatggcgccgccgcagccgaagtcgggcctcttcgtgggcatcaacaagggccatgtcgtcaccaagcgcgagctgcctctgcgcccgtcccaccgcaaggggaaagcaacgaagagggtgtccatggtcaggggccttatcagagaggttgctggctttgctccttatgagaagcgtatcaccgagcttctgaaggttggcaaggacaagcgcgctctgaagcttgccaagagaaagcttggaactcacaagagggcaaagaagaagagagaggagatgatgggcgtnctcaggaagatgagatcggctggtacgcacactgacaagaagaaataaagcatttcaagttcatgaatgtggcagccagagattatcaactgtgtttttttcctaccctttagaactagacatggcaaaatatttttgacc

SEQ ID NO: 95732 - DNA, 550 bp, Zea mays
  unsure (1)..(550): unsure at all n locations
ngtntnaccggagagtgacatgttgacttgaggagaactccgtcactgctcgtaccggtccggaattcccgggtcgacccacgcgtccggaacaaggacaaggaaaaggtagccagtggcctgccagatcggaatttgctgtttacgcttttgacctggcgaaatcgaatcagaataaaagaaagctctgcacttcgttcatcgagagcatccatagcaagaggaagcggctgaggttggctcgggtgagcaacatggcggagaagctgacgccggagcaggtggacgagtgcaaggaaatcttcgacctgttcgacgccgacgaggacggtcgcatcgccacgggcgagctcgtgacggcgctgcgctccctgggccagaacgtggacgaggcggaagcgcggcgcttcctggaagacgcgggcatcgcggcgggcgccggcgacatcgacctcgcggcgttcctggccgtggcggcccgcaagatgggcgccaggcaattcgaagcgcgcctttgcgagtgcttcgacctggtccaacgagccctggt

SEQ ID NO: 95733 - DNA, 476 bp, Zea mays
tgcgcggtgccacgaagtaactgcctgcgctaccggtccggaattcccgggtcgacccacgcgtccgcggacgcgtgggtctcaccaaactttctaaagctcaccatttgccctgcctacttgggtcgtacgcaaccctcgccgagagcagcccccgtaaaatcttcctctgcatcctattcgctattgcgggtggcatcgccggtggcgttcgtgtgcttctcggtacggtgaaacctttattgccgttcctgccgcactttcctcatttcttgagactttggccgttggacggtggactctgcgggatccccaatctcctgctgagcttccgcacagagggcgggcatggctggaaggcataccatcattctcatgcaaccatcacagaacagatcgacgaggacatttatggactacgattcagttaaccactcgctggatggaatatgtggtctttacgaaaggaaaatcag

SEQ ID NO: 95734 - DNA, 490 bp, Zea mays
  unsure (1)..(490): unsure at all n locations
tggagatgtnttattagtggggggatggtatgcctcaccggtccggaattcccgggtcgacccacgcgtccgcccacgcgtccgaccgacaggacgagactcgcagctagctgacacggccgagaagcagcttgcattgcaggcgtagtacgtacccagcagcagctagcactagcagtccatcggagcgacgatggtgagaaggacggtgctggcggcgctgctggtggccgccgccctcgccggcggcgcgcgggcgcagctcaaggaggggttctacgactactcctgcccacaggcggagaagatcgtcaaggactacgtgaaggcgcacatcccccacgcgcccgacgtcgcctccaccctgctccgcacccacttccacgactgcttcgtcaggggctgcgacgcgtcagtgctgctcaacgcgacgggcggcagcgaggcggagaaggacgcggcgcccaacctgacgctgcgcggcttcggc

SEQ ID NO: 95735 - DNA, 480 bp, Zea mays
gatggtattagcatgataagtatatgcatgcactaccggtccggaattcccgggtcgacccacgcgtccggttctagatcgcgagcggccccccttttttttttttttttttttgcgccaacatctcggtacaattattcgttcccccatcagtaccaccactagaacaaggcgatggagcagatagagcgaggcatgctatgccatggcccatggcacgcgcggctgactgtctgactgactcgaacaaaacacaaaaaacgacactgctacaatattatatactagagcttattaattagctagagataaagagtccttccgaggaccccatcacgccctgcagcgtcatcgccgccgtcgtctcacttgcaggtgcaggggtcgcaggtgcagttggcgccgcacttgcacccgccgttctcagctccggcggccgctctagaggatccaagcttacgtacgcgtgcatgcgacgtc

SEQ ID NO: 95736 - DNA, 547 bp, Zea mays
  unsure (1)..(547): unsure at all n locations
nggatatgagaggccaactttgtaaacatagatnctcgtcgcgactgcagtaccggtccggaattcccgggtcgacccacgcgtccggcctgacatctgtcttccagggctctcagacgtcattggaagttataaaagcggcaaagcactacaagctatttcagcgtgcgacccatgtctactctgaagcaaggagagtttatgctttcagggatactgtctcttcaaaactcagtgaggaaggcaagcttaagaaacttggtgatcttatgaacgagagccattacagctgcagcgtgctatacgaatgcagttgccctgagctggaagagcttgtgaaggtctgcagagacaatggagcactgggagcacgtctgacaggagctgggtggggtggctgcgcggttgctctggtcaaagagcccatcgtccctcagttcattctgaaactaaaggaaatgtactacaaatcaaggattgacaggggagtaatcaaagcaggtgatgtgggcctgtacgtgttcgcatccaagccgtcgagcggngc

SEQ ID NO: 95737 - DNA, 544 bp, Zea mays
tgtatgacgtgccatcctgaaacatcgagactgtcgcgactgcaggtaccggtccggaattcccgggtcgacccacgcgtccggataagccaagcagaggtggacggtacaccgtgtaagtcgcacacgaagatggtcgttgttcggactggacagaggctgagagtggagttttgtgctgagatcggcaccagctttcatttaatacagcctcagcttacctgaggcaattttcgcacctgttatgatgttgttttgctctcagataggtttatgtagcacaagaaagatatgttggagacgttgacgattttgtatgcaactaaatttctatcttaatatgccccgattcaacagcaaaaaaaaaaaaaaaaaaaaaaaaaaaaaaaagggcggccgctctagaggatccaagcttacgtacgcgtgcatgcgacgtcatagctcttctatagtgtcacctaaattcaattcactggccggtcgtttaacacgttctgactgggaaaaccctggcgttactcaacttaatcggcttgcaaga

SEQ ID NO: 95738 - DNA, 490 bp, Zea mays
  unsure (1)..(490): unsure at all n locations
tgaggttntttgtcatgcacggcattgngctagcacgtaccggtccggaattcccgggtcgacccacgcgtccggacccaatggatgtgttggtcctgatgcaggagcctgttgttcctggttcgttcctgagagctagagcaattggccttatgcccatgattgaccagggtgaaaaggatgacaagataatagcagtatgtgctgacgatcctgaataccgtcactacaacgacatcagcgagctgtctcctcaccgcctgcaagagatcaagcgcttctttgaagattacaagaaaaacgagaacaaagaagtcgcagttgatgcattcttgcccgcgacaacagctcaagaagccattcagtactccatggacctgtatgcccagtatattttgcaaagcttgaggcagtagattgcaagcaacaatttatctatcatgcgtcttggatcggggcgtgattttaataagccgaatcgcttgctatt

SEQ ID NO: 95739 - DNA, 543 bp, Zea mays
  unsure (1)..(543): unsure at all n locations
ggaatgaagtggctgaacatgaaagcatgacgcacgtcgtaccggtccggaattcccgggtcgacccacgcgtccgcaagcacaagcgcactctagcaatggcttctgaggttgtccgccctagcgacgccgagctactaaaggcacaagccgacatatggcggctcagcctctcctacctcacgcccctgtcactgaggtgcgccgtggagcttggcatccctacggcgatctaccgccatggcggggctgcctcagccgctgagctggtcacggcgctgtctctcccctccactaagctgccgttcctccgccgcctgctgcggctcctcgccgcgtcgggcgtgttcaccgtcgacaagcagagctcggaagaagagcggtaccgcatcagccccgtgtcctacctcctggtggacggcatccctcacgaggaccacatgaaccacaccgntctggtgctcacctgcacctcgacgcgctacatcgaggcgggggatagggctggcggaattggtcaagaaggaccgtggcacctaaccc

SEQ ID NO: 95740 - DNA, 482 bp, Zea mays
  unsure (1)..(482): unsure at all n locations
tagaggttgttgccccttcgcgatcgctagagctaccggtccggaattcccgggtcgacccacgcgtccgcccacgcgtccgtgaaagacggccggcaccttgcctacagggaggaaggagtgcgcagggagaacgccaggttcaggatcgttttcatccatggcttctcctccaccaaggagagcgggttccccgtgtcccaggagcttgtggagcagctgggcatatacatgctcttcttcgacagagccgggtacggcgacagcgacgccaacccgaagcgctgcctcaagagcgacgccacggacgtcgaggagctcgccgacgcgctgcagctcggggacaggttctacgtggtagggtgctccgtgggcggctacccagcatggagctgcctcaaatacattcccaacaggctggccggagtggcactgcccgcgccggcggtgaactactggtggccgctgcctgccaacgtgtn

SEQ ID NO: 95741 - DNA, 482 bp, Zea mays
tgtgtttttaccatgaattagtcgatagcactaccggtccggaattcccgggtcgacccacgcgtccgcccacgcgtccgatttgctaggatcatggataagcatttgaaggcccttgctcctgtctatgtgggaacaaaattcatcaagcttgatgctgaaaatgctccattctttgtagccaaactggcaatcaaaaccttgccatgtgtaatattgttcaagtaagtgtacaagttattcattactcctacctatttgacaatgttttttgctgtttggtaccctgcaatcttcctacttcaccatactatcatccctgtcctatttcaggaagggtattgctgttgaccggttagttgggtttcaagatctcggaagtaaagacgatttttcaacaagagcgttggaaaacattctcaagatgaaagggataatcgatgagaagaagaaagatgacgacgatgatgatgaagaaagcg

SEQ ID NO: 95742 - DNA, 538 bp, Zea mays
cgttgtgcatctgactagtacctaagcatgctcgtaccggtccggaattcccgggtcgacccacgcgtccgccagcttcatgctccaaggaggtgacttcactcttggggatgggaggggtggtgaatgtatctatggcatgaagtgtgctgatgagaacttcaagatcaagcacactggaccaggccttctgtccatggccaatgctgggagagatacaaacggatctcagtttttcatcaccaccgtgacaacaagctggttggacgggaagcatgttgtgtttggcaaggtgttgtctggaatggatgttgtgtacaaggtggaagctgagggccggcagagcgggcaaccaaagagcaaggttgtcatagcagatagcggcgagctgccgatgtgatgagctgaactgatgttctatctggaaggatgttaagaagttgctggtgaccatttgtcgttctggaacttttattaatgcctgaaattggacttgaccaagttcttttggttgctacaatgacttttttatttaatc

SEQ ID NO: 95743 - DNA, 542 bp, Zea mays
gggatgcgagattgtcatgatacatcgagactctcggactgcggtaccggtccggaattcccgggtcgacccacgcgtccgaacctctccccttttctccgtcctctcctagtccacacggcagacgccgccgccgggggagaggagaggaggggaggggatcggctccaagggaacaggtgagatggcaatcctgtacgcgctggtggcgcgcggcacggtggtgctggcggagcacagcgcggcagccaccaacgcgggcgctatcgcgcgccaggtcctcgagcgcctccccgacggcggcgccgacagccacgtcttctacacgcaggaccgctacgtcttccacgccaagcgcaccgacggcatcaccgcgctctgcatggccgacgacgccgccggaagacggattcccttcgcatttttggaggatattcatggaaggtttgtcaagacatatggccgggctgcgctaaccgctcttgcatatgcaatgaatgatgaattcttcaaggtcttgagccagcaaatggactactatt

SEQ ID NO: 95744 - DNA, 541 bp, Zea mays
  unsure (1)..(541): unsure at all n locations
gtattgccggcggatactgagcatcganctcgtgcgcactgcggtaccggtccggaattcccgggtcgacccacgcgtccgcccacgcgtccgtcttcatctcccaggttttcccctccaatcacccccaggtcttcctctcgcgagttgcggtctcgcggccccctccaccgaccgccgcctcctcacaaccgcggaagctgcttccctctccattggacgcggccagcttccatctctcggtcacctccctctacatcccacggccgctaccaccttccctctacctcacacggccgccggcctctccaaggtctgcacacgcattcagcgacgcatttgcctatatcagcactgtggtcataactctagtagagaaaggagaagatgcaagcatctagggcaaggcttttcaaggagtacaaggaggtacaacgagagaagtcagctgaccctgatatccaattaatatgtgatgattccaacatattcaaggggactgctcttattaaggcccttctggaacacctaatgaaggtgg

SEQ ID NO: 95745 - DNA, 543 bp, Zea mays
gttatgcagtgcattaatgatacatcgaactgtcgcgactgcggtaccggtccggaattcccgggtcgacccacgcgtccgcggacgcgtgggcggacgcgtgggccaggagctgctgtcgacgcccggcgcgcccacggcgccgatcgtcggacggttcgccgccagccagaaggagttcttcaggagcttcgccaggtccatggtcaacatggggaacatccaggtgctgacggggagtcagggtgagatcaggaagaactgtaggatggtcaacggaagctagacccgtcgacggcacaagttactggtgaactgaaagcagttctgctgtatgtacgatgcctcaaacatgttgatgggataatggtgcgccgatcgatttatttgtcaaggagatccaataaattggttatttgcatttttttcaacaaaaaagagatttttattgaccctgttgtaaaataaaaagggcggccggtctaaaggatccaaggttacgttcccgtgcatgccacgtcataactcttttataatggcacc

SEQ ID NO: 95746 - DNA, 482 bp, Zea mays
  unsure (1)..(482): unsure at all n locations
agatgttngtgaatgttgggtaaatggttgcacgcaccggtccggaattcccgggtcgacccacgcgtccgccggatcccgtccgcccccggaccaagaatcccaacctcacagcgatggcagcatcccgcagcgaggaacgtgatcagaatcagccagtggtgcttgtgacggggtgctcggagggcggcatcggccacgcgatggcgcgcgccttcgctgcggccgggtgcgccgtcgtggccacggcgcggtcacgcggttccatgcgcggtctcgacggcgacccgcggttcctgctgctggagctcgacgtgcgctccgacgagagcgcgcgcgccgncgtggcgggtgcgctgcgggagcacggccgcatcgacgtgctcgtcaacaacgctggggttcacctcgtcgcaccactcgccgaggtgcccatggagtccttccaccaggttttcgacaccaatgtctatggtgcaatg

SEQ ID NO: 95747 - DNA, 544 bp, Zea mays
  unsure (1)..(544): unsure at all n locations
tggtcggcncggtgtgacatatgatgcatgacgaccgtcgtaccggtccggaattcccgggtcgacccacgcgtccgcggacgcgtggggcacacgagttcttaaatttccttttgaatgaacttgttgatattctggaaaaagagtcaagtgctgctaaggactcaccccaatcatcatctccagaaaaagctccaaatggcccagttcaacctttagccaatggagttaaaaaagaaccaccagttactctggtccataaaaatttccagggcatattgaccaatgaaacaagatgcctaagatgtgaaacagtaactgcaagggatgaaacgtttcttgatcttagtgttgacattgaacaaaatagttctatcacaagctgcctgaaaaatttctgttctacagagactttaaacgcagaggataaattcttctgtgacaaatgctgcagtttgcaagaagcacagaagagaatgaagatcaagaaggctcccacatactggtgatccatctaaagcgtttcaaggacaatgagcagtta

SEQ ID NO: 95748 - DNA, 547 bp, Zea mays
  unsure (1)..(547): unsure at all n locations
ggaatggccgaggctgtcgactgataccctcgatactcctcggacctgcggtaccggtccggaattcccgggtcgacccacgcgtgcgcccacgcgtacgcccacgcgtccgcccacgcgtccggaaaacgccaccagacgcagatcgaattaagctctccgagtctccggttccctcctctcggcggcggctcaggtccctctccatcttcggcgcggcgctcggcgtctgacctcaacacgcaagaaagcaaatggcatgcggcagggctgcgcatgccaccctcaagggcccgagtgtggcgaaggagatcttcattggactgaccctgggtctgatcgcagcaggcatgtggaagatgcaccactggaacgagcagaagaagactaggtccttctatgacatgcttgacaagggccagatcagcgttgtcgtctaagagtaaagagttcttcccagatattttcaaagaactctctcgagagcatgacaacatgattggtngctgcggagatctgccttgtaaatagcacaccattttggaac

SEQ ID NO: 95749 - DNA, 546 bp, Zea mays
  unsure (1)..(546): unsure at all n locations
gaatgcaggtgctgtcaatgataccctactnctcatcggacctgcggtaccggtccggaattcccgggtcgacccacgcgtccgcccacgcgtccgcccacgcgtccgagcagaccggcaaggtccgcctagtcatgcgccaggctaaaacgcttaagatctgcgcgaaccacctcgtggccttcaccacgaagatgcaggagcatgcgggcagcgacaagtcgtgtgtttggcacgctgctgactttgccgatggcgaacttaaggaggagatgtttgccatcaggtttggttcggtagaaaactgcaagaagttcaaggagttggttgaggagatagctgagtcgcttacaaagaacgagggcaaggaaggtgaagatggtggttccacggctggattgctggcgaagctcactgtgagcgagggcgaatctgatggaagtggcaagtctgagtccactgattctagcaaagtgactgaaaccaaaccgtcttagccgcagctgtattgttggtgttggtgcacttgcacgcagattcgggttn

SEQ ID NO: 95750 - DNA, 479 bp, Zea mays
tggtggtggtgccatgcacgaataggctagcacctaccggtccggaattcccgggtcgacccacgcgtccgcccacgcgtccgcggacgcgtggggcgccgctcctttcggatctgggcgaggtgagctgcggcgccggacgtcgcggggaagaggatgaactggatcgggcgcaagatccacctctacaatgtcaccatcggcctctacatgctcgattggtgggagcgctacctcttcaatattttgatggtttgcctcttctggtacattctccgctatctccttgggttcttccaaagtaatgtgaagactcttttccaagaggggaactaccttgggcaaggcagtacataaccattgtcaaacaagatctgcttatgatcatttgccccatgtaattccatgtgtttaattagttgttaactacttaactgaggagctgagaagaagtaatttaagcaagtgttacagtgtac

SEQ ID NO: 95751 - DNA, 502 bp, Zea mays
  unsure (1)..(502): unsure at all n locations
tgtgggagtgtgttgttngatgttctattgcagtccgcactgccgttccggaattcccgggtcgacccacgcgtccgcccacgcgtccgcgccatatctcacgatccactcgagcaccaagccgagggaaggtgaggagcgatggcgcgcggcgtggtgtcggcgaagggcggcgcggtcgcgggcaagaagaaggggtcggtttccttcacgatcgactgcaccaagccagtggaggacaagatcatggaggtcgcctcgctcgagaagttcctgcaggagcgcatcaaggtcgccggcggcaaggctggcaacctcggcgactccgtcaccatctctcgcgagaagaccaaggtcaccgtcacctctgacggacccttctccaagaggtacctgaagtacttgaccaagaagtacttgaagaagcacaacgtgcgggattggctacgcgtggttgctgccaacaaggaccgaaacgtctatgagctccgctactttaact

SEQ ID NO: 95752 - DNA, 566 bp, Zea mays
tggtgggaatgataggggatgaatagtgctgatcatcgatgcactgaggactgtcgtaccggcccggaattcccgggtcgacccacgcgtccgcccacgcgtccgcccacgcgtccgcggacgcgtgggctgcaggacgtgcagctgcgctgcatcgacctcagcgacccggcgctctccctcgacctccaggtgacgatcgcgtcgcggaacccgaacgagcgggtgggcgtgtactacaagacgctggacgcgttcaccacgtaccgcgacgaggcggtgacggtccccgtgtcgatgccggcgatctaccagggccacaaggacttgtcgaggtggtggccggccatgtcggccaacccggccccgggggcccataccttgccgaacgcctggaaccaggccttcaagccggatacctgccggttccacgtaggggtgaccggcccgttaaggggaaaggccgcaaattggtctttccggaggttacaaactcttgggaactgtggccgggctggtttccacccaaggggaagctgggggcccccccggggaggggtgttttc

SEQ ID NO: 95753 - DNA, 546 bp, Zea mays
  unsure (1)..(546): unsure at all n locations
tgatggccgtggntatcattgataccatagagactctcgcgcctgcccggaattcccgggtcgacccacgcgtccgcccacgcgtccgaacgaggagaagctccgcgaggctctcaagttctccaacgcctgcggcgccatctgcaccaccaagaagggcgccatcccggcgctgcccacggtcgccaccgnccaggacctcatcgccaaggccaactagatggccgcacgcccgccgttccaccacgtcactgtccccctcgtcgtcgacgtcctcggtttcggttcattaggtagatcgagtcttagcgtccgtctctgcgcctctacgctgagacggtttgtttgggttaattaagttagctttcgtggagatttcgccccggggcatcaaataaaatgttggcatgcgtggtgggatgctatcctttatttttattttattttattttttagcttggatcagttggggttttgaacattgctagtgtcccgtgattgggaaagcttatgggatgctttncatgcagagttttcattgaatgc

SEQ ID NO: 95754 - DNA, 547 bp, Zea mays
tgtatgttgagggcgaaaattgaaacatagaactcgtacgcactgccgtaccggtccggaattcccgggtcgacccacgcgtccggtacagtcggctaggtaatctggtggtacgacgacatggcggccaccagcagcaagtcgtcgtcgtcctcgagctcggcgcagcgggcagctgccgcactgctcgtggccgccgccgtggcggtgtccgtcctggtggtgggcgcggcggcggtgtgcgacatgagcaacgagcagttcatgtcgtgccagcccgcggcggccaagacgacggacccgccggccgcgccgtcgcaggcgtgctgcgacgcgctggcgggggcggacctcaagtgcctgtgcggctacaagaactcgccgtggatgggcgtctacaacatcgaccccaagcgcgccatggagcttccggccaagtgcggcctcgccacgtccgccgactgctagcagtgtgctagccaagccaagccaagcagggaagcccccggcattgctagctggacgtgtctgggtgtgcatttgcaac

SEQ ID NO: 95755 - DNA, 549 bp, Zea mays
  unsure (1)..(549): unsure at all n locations
aggggttattggtgtgccggggtgtatgagcttgtatctctcggcacgctgtaccggtccggaattcccgggtcgacccacgcgtccggccgccgccgctgcagtgtccatagcctccgcaggagactgagatggggggttttgtcaagacccacaagagcaatgcatacttcaagcgtttccaggtgaagttcaagagaaggcgcgctggcaagacagactacagggccaggataaggctgattaaccaagacaaaaacaagtacaatacacccaaatacagatttgttgtgcgatttaccaacaaggacatcacagcacaaatcatctctgctagtatagcaggtgatatggttcttgcttctgcttactcgcatgagttgccacgatatggtcttgaagttggtctgaccaactatgcagctggctactgcactggccttctgttggctcgccgtgtgctcaagacccgtggtttagattaagaatatganggcaatgttgaagccactggtgaaggattctctggttagccaattgatgagaagg

SEQ ID NO: 95756 - DNA, 481 bp, Zea mays
  unsure (1)..(481): unsure at all n locations
aggtggttnttacaatgttacgatgatggcttgcaccaccggtccggaattcccgggtcgacccacgcgtccgcccacgcgtccggccagagatgagaagaagggtgggaacggacaagacactgagtcaccttccaaggacaccaggactgagagggtggaatcttatgctgcaaagccaagcacgaagaaatggttttgttgtgtgacagccagccctacgcaatcctgaggaagacaactgcatgcgctttggaaatactgtccctttaattttctatacatactatccataagacaatgtangggtacccaggcctctccgggctccaggatgggctatctcgtaaaactcttgcgtgcgtgtatgtatggtgtgagagaattcgcaaagtggacttctggttgtaattcttagtcgtctctctctctctctctttgggttggtcacggttctatgatccagcaatccactgaactg

SEQ ID NO: 95757 - DNA, 503 bp, Zea mays
  unsure (1)..(503): unsure at all n locations
agttnaggcgttcgttgccatggatcgcatccgtacgccagcacgtaccggaattcccgggtcgacccacgcgtccggcgacggccgccctttttttttttttttcatacaataaggaaccacactttcatccggtacatatagcttgtctcggcaaaacttaattttaaacagaagtgacacggaacgaactgtcttagcactgcccttatcataagatacaaacctagctaggaccagatcaaactgccatttcgaggacgctgttgggaccttagacctcagctgccaagacaggagggcgcagctcgtcctcctccttcggggtatggatggtcaccaggtccggaagaggggtgatcgggccaaccttgcccttcgggtcccagtcaagcatgatcttcaccttgatacccagaacaccctgtctgaggaggacgtgtctcacagctgagtcgatgtactcattcactggctgaccagatgagatcatgtagccatcc

SEQ ID NO: 95758 - DNA, 510 bp, Zea mays
  unsure (1)..(510): unsure at all n locations
aggggagtggnnnnnnnnnnccttgaacagtatgttgatgcgctaccggtccggaattcccgggtcgacccacgcgtccgcccacgcgtccgcccacgcgtccgcaaaaacactattttgaagaaatatgatggcaggttcaaggacattttccaggaggtgtatgaagctggttggaaaaccaaatttgaagctgccggcatatggtatgagcaccgccttatcgatgacatggtagcatacgcacttaagagtgaaggagggtatgtctgggcttgcaagaattatgatggagatgtgcagagcgatttcttagctcaaggttttggctcattgggtttgatgacttcggtactggtgtgccctgatggaaagacgatcgaagctgaagctgcccatggtactgttacccgtcattaccgtgttcaccagaaaggaggtgaaactagtacgaacagtattgcctcaatctttgcgtggacaagaggacttgcacacagggcaaagctt

SEQ ID NO: 95759 - DNA, 509 bp, Zea mays
  unsure (1)..(509): unsure at all n locations
gatgtgngtgaatgggggtcgatggtatgctgtaccggtccggaattcccgggtcgacccacgcgtccgcccacgcgtccggcagctccacccttcactcagtcttaggctcttagctctaggctctagctagccgcgccactccttcgtgtagccatcagccttctcatcgccaccaatggccactgccgaggtccagaccccgaccgtcgtggcggccgaggaagcgcccgtggtggagaccccgccgccggccgtcgtgcccgaggagtctgcccccgccgaggccgaggctgaggctgaggctgaggctgctgctcctgctgctcccgaggagcttccggcggccgagcagcaggcagccgccgagccggaggccgctgctcctgctggtgccgaggagcccgccgcggccgaaccggccgccgaggcggaggctgctgctcctgctggtcccgaggagaactccgcgggcgagccaggaggcagcgccgagggagaggctgctt

SEQ ID NO: 95760 - DNA, 518 bp, Zea mays
  unsure (1)..(518): unsure at all n locations
ntagatgttcntttgtttggtgggatgatgggtgagcatgtctcggttcggaattcccgggtcgacccacgcgtccggcgaatcgacgcgcctatctcagcttgctgcactgcactgcactgccctgccatcatatcgtacgtgagcccggccgagagcgagggagaggcatggctgctccgaagctcgcgacgctggcgctggccgtgctcctggcggcgaccgcggtggctcccccggccgcggtgcgcgcggcgatgtcgtgctccaccgtgtacagcacgctgatgccgtgcctgccgttcgtccagatgggcggggccatgccgccccagccgtgctgcggcggcatccgcagcctgctgcagcaggccaacaacacccccgaccgccgcaccatctgcggctgcctcaagaacgtcgccaacggcgccaacgggagcggcacctacatcagccgcgccgncgcgctgcccagcaagtgcggcgtcgccctgccgtacaagatcaggaacaac

SEQ ID NO: 95761 - DNA, 481 bp, Zea mays
  unsure (1)..(481): unsure at all n locations
gtatgcnnntntctgaagaaaatgtattgcaagcacttaccggtccggaattcccgggtcgacccacgcgtccgcgactgagggacaagagggtgaggctatagctgaggaaacaaagaagagtaaccatgtgcagaggaagattgagaaggcggacacatctgccaagaaaagcaagaaaaagaagaccaaaaccgagactgatggtgatgcaatggatgtggataagccctccaacgtggctgatggagaagctgagcttggaaccgagaagaagaaaaagaaaaagaagcacaagctagaggaggcacaggagaacggtgcagcacatgctaatggcgctgaagagacccagactcccaaaaaaaaaaaaaagggcggccgctctagaggatccaagcttacgtacgcgtgcatgcgacgtcatagctcttctatagtgtcacctaaattcaattcactggccgtcgttttacaacgg

SEQ ID NO: 95762 - DNA, 514 bp, Zea mays
  unsure (1)..(514): unsure at all n locations
catggttngtgatcctacgcttagatggtatgcatntaccggtccggaattcccgggtcgacccacgcgtccggaagcacttgaagaggctcaatgcgcccaagcattggatgctcgacaagcttggcggagcttttgctcccaagccatcttctggacctcacaagtccagggagtgccttcctctgatcctcatcatcaggaacaggctcaagtatgctctgaactaccgtgaggtcatttctatcctgatgcaacgccatgtacttgttgatggcaaggtcaggactgacaagacctaccctgctgggttcatggatgtcatttccatccctaagacaatggagaactacaggctgctttatgacaccaagggccgcttccgtcttcacccaatcagggatgaggatgccaagttcaagctctgcaaggtgaggtccgttcagtttggccagaaaggcatcctctacctgaacacctacgacggccgtaccattcggtaccccgacccggg

SEQ ID NO: 95763 - DNA, 516 bp, Zea mays
  unsure (1)..(516): unsure at all n locations
tgatgtgttngtcgtccctacntgaagtcacgtactgctctaccggtccggaattcccgggtcgacccacgcgtccgcccacgcgtccgcccacgcgtccggcatcaagagccatgtcattttctgggaatggatgggctgtttgtatcctgacagccaatggcactgtatctaatgtgaccctgcgtcaaggagagtcttctggtggaacagtaacttatgagggccgttttgagattctctctttggctgggtcatatcttctgtctgaaagtactggcatgagcagtcgaacgggtggacttagtgtttctcttgctagtcctgatgggcatgttttaggtggtgctgtcgcaggacctctaactgcagcttcgccagttcaggtggtcattgggagctttctggctgatacaaaaatggagcttgaccctggatcagcacctgagaaacatgttttcagcaggtttcaaactaccagcagtccatctaggggtaccgaatcctcgggtgggg

SEQ ID NO: 95764 - DNA, 497 bp, Zea mays
  unsure (1)..(497): unsure at all n locations
aggaggtgttngttgtcatagatggtgaaggtacgtcatgcctctaccggtccggaattcccgggtcgacccacgcgtccggaagaaaacccctgctgcaaagaaggataatgctgagggacaagaggttgaggcagcagctgaggaaacgaaaaagagcaaccatgtcacgaggaagcttgagaagcgcaaggagggacgtacccttgacccacacattgaggagcaatttggcagtggacggttgctggcatgcatttcttcccgccctggacagtgtggccgtgctgatgggtacatccttgagggtaaagagcttgagttctacatgaagaagctacagaggaagaagggcaagagcgctgtagcttagagcattctcatggattgtcttgcaccgaaatgtgtgtcctgatgagtacactttttttggttagtcgtctcaagttcagagcgttatgccatgttttcagacctgattagtacactcttttcta

SEQ ID NO: 95765 - DNA, 488 bp, Zea mays
  unsure (1)..(488): unsure at all n locations
tggggnagttgcnnnnncttagacgaggaccgtaggcaagcactctaccggtccggaattcccgggtcgacccacgcgtccgcgaaggtacacttgctgagactggtgaagttttcgataccacccatgaagataactctattttctcatttgaaattggacaaggcgctgtcatcaaagcatgggatatagccttaagaactatgaaggttggtgaggttgcaaaaattacatgcaaatcagaatatgcatatggagctgcaggctcaccaccagagatacctcctaatgcaacccttatttttgaggtggagctagtagcttgcaggccgaggaaaggttcaagcttaggcagtgtatctgatgagaaagccagacttgaagaacttaagaagcaacgggagctagctgctgctaccaaagaagaggagaaaaaaaaaaaaaaagggcggccgctctagaggatccaagcttacgtacgcgtgcat

SEQ ID NO: 95766 - DNA, 496 bp, Zea mays
  unsure (1)..(496): unsure at all n locations
atgtagaggttctgagtccccggggnttcgccacgncagaacttaccggactctgaatgttcgactcaggcgtccggtcacggcgtccgaccgacaggacgagactcgcagctagctgacacggccgagaagcagctggcatggcatgcgtagtacgtagccagcagcatctagcactagcagtccatcggagcgacgatggtgagaaggacggtgctggcggcgctgctggtggccgccgccctcgccggcggcgcgcgggcgcagctcaaggaggggttctacgactactcctgcccacaggcggagaagatcgtcaaggactacgtgaaggcgcacatccccgacgcgcccgacgtcgccttcaccctgctccgcacccacttccacgactgcttcgtcaggggctgcgacgcgtcagtgctgctcaacgcgacgggcggcagcgaggcggagaaggacgcggcgcccaacctgacgctgcgcggcttctgcn

SEQ ID NO: 95767 - DNA, 490 bp, Zea mays
  unsure (1)..(490): unsure at all n locations
aggggnaggggcnnnnnnttcgtacgtgaagctttttcgcctgcacctaccggtccggaattcccgggtcgacccacgcgtccgggaaaagacgcaagcgagttcaatccacagaggttcgaggatggcatttccaatgcgaccaagcatcaggccgccttctttccatttggatggggtcccaggatctgcataggccagaacttcgcgttgctggaagcaaagatggcactgagtaccatcctccaacgcttctcctttgagctctcatcatcctacactcatgcgccatacaccgtgataactttgcatcctcagcatggtgctcaaatcaggttgaagaagctttgaccatgatggtcatactgaatgccaaaacatgcactcctagtaacatattgtgattgttcatgtatgcaggtttaaatttagctttgatatgaataatgagaaccaagtgtgtatgaatggagtaagggtgtaatcggat

SEQ ID NO: 95768 - DNA, 515 bp, Zea mays
  unsure (1)..(515): unsure at all n locations
gagtgctgtagtgccacgcacgagtacggtatgcccgtaccggtccggaattcccgggtcgacccacgcgtccgcccacgcgtccgcccacgcgtccggcctgggccaccagcaacgagtcgctggagaatgccttcgcctcctacggcgagatcctcgactccaaggtcatcaccgaccgggagacggggaggtctcgcggcttcggcttcgttaccttctcctccgagaactccatgctcgacgctatcgagaacatgaacggcaaggagctcgacggccgtaacatcaccgttaaccaggcccagtcccgtggcggtggcggtggcggcggtggctacggcggcggtcgcggcggcggcggctatggtggcgggcgccgtgacggcggttatggcggcggtggcggctacggcggtcggcgcgagggtggtggcggcggctacggaggcngtggcggctaccgcggtcggcgccagggttgtggtggccgctaccgccgcngccgccggcgc

SEQ ID NO: 95769 - DNA, 517 bp, Zea mays
  unsure (1)..(517): unsure at all n locations
cgtggtgtagtgatatagtaagtagattggtatgcccgtaccggtccggaattcccgggtcgacccacgcgtccgcccacgcgtccggcaaccggtccagcactttcacgctcagctccagcaatggctgcctccaccatggcgatctcctccacggcgatggccggcacccccatcaaggtgggctccttcggcgagggccgcatcaccatgcgcaagaccgtgggcaagcccaaggtggcggcgtccggcagcccctggtacggccccgaccgcgtcaagtacctcggccccttctccggcgagcccccgagctacctcaccggcgagttccccggcgactacggctgggacaccgncgggctgtccgncgaccccgagaccttcgccaagaaccgcgagctgnangtgatccactcccgctgggccatgctcggcgcgcttcggttgctctttccccgactggtnttccgcaccggcgtcaaggtcggcaaggccctttggttcaagcccggtt

SEQ ID NO: 95770 - DNA, 516 bp, Zea mays
  unsure (1)..(516): unsure at all n locations
agatgtctnttntaatgtatagcatgcctaacgcactgccgtaccggtccggaattcccgggtcgacccacgcgtccgacaatatttacacaaatggttgaaagggaagggactcggtcactctacctgggacttgcaccagcgttggcgagagctgttgtctatggtggccttcggtttggactgtatgagccctgcaagcatgtctgcagttatgcatttggttcaacaaactttgcttttaaatttgcatctggagtcattgctgggggccttgcaactgctttaacaaatcccatggaagttttgaaggtgaggctgcagatgagtaaaagcagtaccagtacaataagagagatgagaaaagttatagcgcacgaagggtttaaagcactttggaaaggagtcggcccagcaatgacaagagcaggttgccttactgcatcacaaatggcgacttacgatgaggccaaacaggccttaatgaagtggacaccactttgaggaagttttcan

SEQ ID NO: 95771 - DNA, 515 bp, Zea mays
  unsure (1)..(515): unsure at all n locations
cgaggtgcctattnttcatgccagtcgataagcactgacgtaccggtccggaattcccgggtcgacccacgcgtccgctcagatgtgggctgctggttggcaaaaggctattgcagaagttggacccaatgttggctggtggatcgctgcgcagagcgtgttctatcacttatataaccaggtgtcctacatgtctctcgatcagatctctccattgacgtttagcattggcaatacaatgaaacgtatatcagtgattgtttcatctataattatcttccacacgcctgtccgccctgtcaatgcactgggagctgccattgccatccttggcacattcctgtactctcaggcaaaggcgtgaggctaaagctttggcctaaggatcggagccagtagcaggcactggatccagttttgcttgttggagtggcatgtatatataaggttcggttttcgtgagagagagggtcataatggatcagaggctatgctgattcggtcatggatggtgt

SEQ ID NO: 95772 - DNA, 510 bp, Zea mays
  unsure (1)..(510): unsure at all n locations
gatgtcttttatctcgtggagaggtaacgcacgcccgtaccggtccggaattcccgggtcgacccacgcgtccgaaagctatcaagtgtggacgcatctggcctccttgttgccaactctggcaacgatctgcctgtaattgatttgtctagtgtatcaccagagcttgcctttatggcaaatgatgctgatctggtggtgctcgaaggcatgggaagagcaattgaaactaacctatatgcgcagatgaaatgtgactcgatcaagattggaatggttaagcatcctgaggtcgcccaatttttaggaggaagactttatgattgcgtcttcaagttcaatgaggcctgaactacgagatacatttgataacacaataccggccgcactagtggtggcttagttctccccaagatcagcttgttaggtgttgcactgaacataattttgttagtatcagcaataatttcaatcaaaataagctacgtatatgtggtggnttatggaaat

SEQ ID NO: 95773 - DNA, 491 bp, Zea mays
  unsure (1)..(491): unsure at all n locations
tggagttggnnntnccatgtatgagaagtttatggtaagcctctaccggtccggaattcccgggtcgacccacgcgtccgcccacgcgtccgaggaaatgacaattatccactttcaacaggagctgcaaataatttattgttgggtattgagcaaggagctggaagcagcaatggtcagtctgcctttcccaagtttgacaatgggagctcagtggcattaccatctgggcagggaatgtctggtcttatgggaaaaggggcaaaatggcgtgacggggactggttgtgcaacaactgcaacaatcacaactatgcatctcgtgcgttttgcaacaggtgcaaaactcagaaagaatctgcagttcaccctggtgtgttatagcttgctgttggattattttgttccaggatatgttgctgcctgttctagctccttcctcaaggctgcggtttgagttttttcgattctgcagtgtttttgctgctcta

SEQ ID NO: 95774 - DNA, 509 bp, Zea mays
  unsure (1)..(509): unsure at all n locations
gagtgtctagtgtcccaggctancgcaggacgtctggttcgaatcccggtggacgcacgcgtccgcccacgcgtccgctgacgcgtggtccttaaggagctgccgggcgcatacgccttcgtgagggacatgcctgtgctgggcgctgtccacatcatgcgtgcaggtggaggacgagcggacgctggcgatcagtggttagcggcgccaggaggagcgcgaggactccaagtacctgctcatggagcggcagctgcgcaagttcatgcgcaagttcgtgctgccggacaactccgacatggacaagatctctgcggtgtgcatggacagcgtgctcaccgtgaccgtcgagaagctgcccccgcccgagcccaagaaacccaagaccatcgaagtcaaggtcgcctgatgtgggactaggtctaccgatcgtggctctgaagatgtgggagcagtgccagcgagttgtgaggacctttacctgtgtggaatgtttctaggaataattn

SEQ ID NO: 95775 - DNA, 514 bp, Zea mays
  unsure (1)..(514): unsure at all n locations
gtgggtnatcaatatatagaagtatatgtactgcagtaccggtccggaattcccgggtcgacccacgcgtccggggagtcggccgccaggtcgcgtgcgaggaagcaggcgtacataatggagctggaagctgaggtggcaaaactcaaggaccagaatgaggagttgcagaaaaagcaggttgaaatgctaaagaagcaaaaggatgaggtcctggagcgaatcaacagccaacatggaccaaaggcaaagaagctttgcctgcgccgcaccctgactggcccatggtagcctgctgaagcttgcacaaaattgaccgaagtcaagatcgtcgggccagatgtgcccgtgtgtatatatcagatgaagtcaagagtactgagtaccccgttacccctgtagaccgccgctacttcagagctgccgttcttgttctgtgacgtgggtagtctgcgcctgacagttcgctgtttaggttcggttgcgcgatccttacatgaacaatgaggcgtgc

SEQ ID NO: 95776 - DNA, 517 bp, Zea mays
  unsure (1)..(517): unsure at all n locations
cgttgtggtctttntcattgcaatgcccgtcagcactgacgtactcggttcggaattcccgtgctcgacccacgcgtccgtcttgtttctaatgccaaaggacccaaatccgtttgggtacctaaagttaagaactaagtttcttttgtaggttcatgcatccattgtctcaagtaggattctcgttttcactatcactttctacattactgaatagactggggtatcattcttttactccttttatttttgcttttatgctgcggtaaatttgatggtattctaataattttagtatatgtaagtatggtttgcagttgtatatattattagttgaagtatgattgttgcttgacacataactccactataatgaaaaataggtggacgctctagatgatccatgattacgtactcatctatgacgactcatacgtatcttattttattagctttattcaatatactgcttcgtcttgtttaaacaatttacttttggaacactctgttttcctat

SEQ ID NO: 95777 - DNA, 518 bp, Zea mays
  unsure (1)..(518): unsure at all n locations
ngggagtgcctnnttntaattgacggactctgatacgcacgccgtaccggtccggaattcccgggtcgacccacgcgtccgcccacgcgtccgcccacgcgtccggaccttggagacagccttgcatacaatagtctgaagggcttaattctccgcaacacttttagggcacaaaagaacgctgaagatgaaagctgcgtgatagccctcggcaaccttcggtcagaagttatcaagctgagaaatgaagccttggagaaggacaaaattctactttcattggtggatagagtgaaagaagatgaatcaaagttgaacactcaatccgaaacttataaagccgaaattgaagaccttcagaaaaaacttgctgaagctaatgagaactttgcacttgcaaaagctagccaagaaattagtgaatggtcgaaaactagactagagaaaaatgttgaagagcttcgtgaatccaaggaaaggtgcttcgataaatccctggattgagtaaaaaaatngaa

SEQ ID NO: 95778 - DNA, 485 bp, Zea mays
  unsure (1)..(485): unsure at all n locations
gaggtgctnttntcatgaagggagaggtcagcacgcctctaccggtccggaattcccgggtcgacccacgcgtccgcccgcccaccaccatcctgatcatcaacctggtcggcgttgttgccggcatctcctacgccatcaacagcgggtaccagtcgtggggtccgctcttcggcaagctcttcttcgccttctgggtgatcgttcacctgtacccgttcctcaagggtctcatgggtcggcagaaccgcaccccgaccatcgtggttgtctgggcgatcctgctggcgtcgatcttctccttgctgtgggttcgcatcgatccgttcaccacccgcgtcactggcccggatactcgaacgtgtggcatcaactgctagggaggtggaaggtttgtagaaacagagagataccacgaatgtgccgctgccacaaattgtctgttagtaagttataggcaggtggcgttatttacagctacgtac

SEQ ID NO: 95779 - DNA, 517 bp, Zea mays
  unsure (1)..(517): unsure at all n locations
gggagtgcncgtttgtatgaggggcgtagtgaggcatgtctcggtccggaattcccgggtcgacccacgcgtccgtgctccccgagatcgagcccgaccacatcgtctccctgttcgagggcaactcgaacctgttctgggccgagcggctcgggcgcgaccacctcggcgggatgaacgacctgtgggtgaagcactgcggcatctcccacacggggtcgttcaaggacctcggcatgaccgtgctggtgagccaggtgaaccggctccgccgcgcgccgctgtcgcgccccatcgccggcgtcgggtgcgcgtccacgggggacacctcggccgcgctctccgcctactgcgccgccgcggggatcccggccatcgtcttcctccccgccaaccgcatctcgctggagcagctcatccagcccatcgccaacggcgccaccgtgctctcgctcgacaccgacttcgacgggtgcatgaggctcatcagggaggtgacccgcgaacttgctatctc

SEQ ID NO: 95780 - DNA, 517 bp, Zea mays
  unsure (1)..(517): unsure at all n locations
gtnggggagagcccnntnnntttgacgcatctctaggcacgccgtaccggtccggaattcccgggggcgcccacacgtccgaggccatctacaccatcgacgactactgcttcgttgccaaggacccatcaggcaaggagatcaatgctcttgagcagcacatcaagaacctcctcagcccgtccacaccgttcttcttcaacaccctgtacgacccctaccgtgagggtgctgactttgtgcgtggataccccttcagcctcagggagggtgcccacactgctgtctcccacggcctgtggctgaacatccctgactatgatgcacccacccagctggtcaagcctaaggagaggaacgaaaggtacgttgatgctgtcatgacaatccccaagggaaccttgttccccatgtgcggcatgaaccttgccttcgacagggatctcattggccctgccatgtacttcggtctcatgggtgatggccagcccattggtcgctacgacgacatgtgggc

SEQ ID NO: 95781 - DNA, 500 bp, Zea mays
  unsure (1)..(500): unsure at all n locations
atggtaagtgtggnnttnnaatcgtatgaggagagtaaggcatgcctgtaccggtccggaattcccgggtcgacccacgcgtccggatgggtcccacctcccttgtcgtccaacagaagccctgaacgtgaaaaggaatctacatttgctgctggtagaagcaggcgtgttgaagtggagcgtacattgactgactcacagcgtgatgaatttgaggacatgctgcgagctttgacattagagaggagccaaataaaagacgccatgggatttgccttggataatgctgatgcagctggcgagattgttgaggttcttacagaatccttgacactcaaggagacgtctattccaacaaaggttgctcggcttatgctagtgtctgacatccttcataacagtagcgctcctgtgaagaacgcatctgcattccgaacgaagtttgaagcttctttgccagatgttatggagagctttaatgacttgtatcgcagtatcac

SEQ ID NO: 95782 - DNA, 480 bp, Zea mays
  unsure (1)..(480): unsure at all n locations
gagatgctttgtcctgaagaagcgtccgcacgcactaccggtccggaattcccgggtcgacccacgcgtccgcccacgcgtccgcgatccgccgagtgcacaccacctttccccactccgatcgaatcgatggccgccgagggcgagaagaagatgataaccctcaaaagctccgatggcgaggagttcgaggtggaagaggcggtggcgatggagtcgcagaccatccgccacatgatcgaggatgactgcgccgacaacggcatccctcttcctaacgttaactccaagatcctatccaaggtaatcgagtactgcaacaagcacgtacatgccgncgncgncgncgncgncgnctcgaaggccggttccgacgacgtgggtgccgncttcgncaacagcaccgncgncttcggtgaggacctcaagaactgggatgcggacttcgtcaaggtcgaccaggccacgcttttcgacctc

SEQ ID NO: 95783 - DNA, 520 bp, Zea mays
  unsure (1)..(520): unsure at all n locations
gttttggaagtgggtggtgctatgaagtagatggtactgcggtaccggtccggaattcccgggtcgacccacgcgtccgcccacgcgtccgccgtcttctccgacctccacaccgccgacggcctcaagtccctcgaggctcacctcgccggcaaaacctatgtgtctggtgactccattactaaggatgacattaaggtcttcgccgcggtgccgtcgaagcctggcgctgagtttcctaatgccgcccgctggtacgagaccgtctctgcggctgtagcctcaagattccctggtaaggctgttggtgtaaatctgcctgcgggatcagctcctgcggcagctgctcctgcggatgaggctgaggacgatgatgaccttgatctttttggtgatgaaactgaggaggacaagaaggcagctgatgagcgtgccgncgctgccaaggcctcttctaaaaagaaagaaagtggtaaatcctncgtccttatggatgtcaaaccattggacgatgagactt

SEQ ID NO: 95784 - DNA, 520 bp, Zea mays
  unsure (1)..(520): unsure at all n locations
tgttatttagtgggnnctatcgtcgtatgacatcgtacgcctgccgtaccggtccggaattcccgggggcgcagagaatccccaagcaaacaaacagggtagagggagaggagaggagaggagaggagaggttgggtctgggacaccatggctccgatgaagctgtacggggcggtgatgtcgtggaacgtgacgaggtgcgcaacggcgctggaggaggctggctccgactacgagatcgtgcccatcaacttcgccaccgccgagcacaagagccccgagcacctcgtccgcaacccgtttggtcaggttccagctctgcaggatggtgacttgtacctcttcgaatcacgagcaatctgcaagtacgctgctcgcaaaaacaagccagagctgttgagggaaggaaacctcgaggaggcagcaatggtggatgtttggatcgaggtggaagctaaccagtacaccgctgcactgaatcccatcctcttccaggtcctcatcagtccgatgcttgggg

SEQ ID NO: 95785 - DNA, 518 bp, Zea mays
  unsure (1)..(518): unsure at all n locations
gatgcctnnttataatgaaggagagatgtacgcacgccgtaccggtccggaattcccgggtcgacccacgcgtccgcggacgcgtgggcggacgcgtgggcaagcagaaaactttagttgacatggcggtcgaccgcggatgctacatcgaccaaagccagagcctcaatgtccacatggagcaagcaaactttgggaagctgacgtctcttcacttccatgcttggtccaagggcctgaaaactggaatgtactatctacgcacacgagctgctgctgatgcgatcaagttcacagtggataccacgcttctgaaggagaatgggaacggggttagcgatggaaagcccgccgaggaagacgtagacgctaaaatggcacagaatggtctgttctttgaacaacccggaaagagtgcctggcgtgtggaagctagattggagatttcaatctgacactgcactttgtgatttgtgaacacagcttttcatacaagccggctgatgattgaagctcaa

SEQ ID NO: 95786 - DNA, 483 bp, Zea mays
  unsure (1)..(483): unsure at all n locations
aggatgccnntcntttttcagtatgccgtccgcaagcactaccggtccggaattcccgggtcgacccacgcgtccgaatgcccctcgttgaaccgcaagaaaggaagtctcgctggtatcagtcttaatagcaaaatatatgctattggtgggggagatggaaatgaaactttttcagaagttgagatgtttgatccataccttgggaaatggttatgtggtccatctatgctgatttctcgatttgctcttgctgtggctgaattgaatggaacaatctacgccaccggtgggtatgatggaagcatgtacttacaatcagcagaacggtatgaccaaagggagggtgtctgggtccgtcttccaagcatgaacacaaagaggggatgtcatgcccttactgtcctgggagaaagcctatatgcaatgggcggatacaatggagacaagatggtttctagcgttgagatcttcgaccctcgg

SEQ ID NO: 95787 - DNA, 516 bp, Zea mays
  unsure (1)..(516): unsure at all n locations
agtttagtctnttctctcgactgaacttacagctccgccagccgtactcgtccggattcccggtcgacccacgcgtccgcagcgggttcggccagtaccacggcaagtactcgtttgacatgttcagccacaagaaggcggtgctcaagaggagcttcctcgtcgagttcatgttccgctacccgccgtgggacgagaccaagatcggaatgctcaggcgcgtctaccgcttcgactacgtctcgctcttcctcgcgctcatcggcctcaggagatgaatcagacggcagatagtgcgttgaacaattgagcctacataatctgtacttcacatctataacacagttgctagaggtctatatttcttttatactgatcctttgtttatgtaatttatccttttcttttacttatattccctttaaaatccttttttttagtataattatttttctatttttttctatttacttattttttttattttattttttttaatttatttttttttttttt

SEQ ID NO: 95788 - DNA, 482 bp, Zea mays
  unsure (1)..(482): unsure at all n locations
tgaggggnnnnnnaatgtacggaatttctttgccagcagccaccggtccggaattcccgggtcgacccacgcgtccggggaaaccttgagccatgggcacagttgtggatgccgctccagcagttgtggctgaggtcactgagaacatgttgggtggcaagaaagttacagttgtatttgtcctaggtggtcctggaagtggaaaaggcacacagtgtgccaacatcgtggagcactttggattcacccatcttagtgctggagatcttctgcgtgcagagattaaatctggctctgagaacggaaccatgattgagaacatgataaaggagggaaagattgttccatcggaggtgactataaagcttttgcaggaggcaatgataaaaagtgaaaatgacaaattcctgatcgatggatttccaaggaatgaggggaatcggattaattgtaatttttttagctggaatcgaagcaggcaa

SEQ ID NO: 95789 - DNA, 490 bp, Zea mays
  unsure (1)..(490): unsure at all n locations
nttgaattctattccctcgcacgacgtaccggtccggaattcccgggtcgacccacgcgtccggcgaatcgacgcgcctatctcagcttgctgcactgcactgcactgccctgccatcatatcgtacgtgagcccggccgagagcgagggagaggcatggctgctccgaagctcgcgacgctggcgctggccgtgctcctggcggcgaccgcggtggctcccccggccgcggtgcgcgcggcgatgtcgtgctccaccgtgtacagcacgctgatgccgtgcctgccgttcgtccagatgggcggggccatgccgccccagccgtgctgcggcggcatccgcagcctgctgcagcaggccaacaacacccccgaccgccgcaccatctgcggctgcctcaagaacgtcgccaacggcgccaacgggagcggcacctacatcagccgcgccgccgngctgcccagcaagtgcggcgtcgccctgccgtaca

SEQ ID NO: 95790 - DNA, 543 bp, Zea mays
tgctccggtgctgagcatagcatagaaagtatttctcaccgctcctgaattcccgggtcgacccacgcgtccgcccacgcgtccgcccacgcgtccggaaacccagattgccatctatgaaactacaaaactagagccagtgaagcagtggcctgttcgagagaattcacctccaatcacacatgctgcattctcgtgtgacagtcaactgatctatgcaagctttatggatgccactgttggcatatttaatgcatcgagtttgagacttcaatgtcggattcttccagcttcgtatctccccccaaatatcagtccgagtgttcatcctgttgtggttgcggcacacccttcggaagcgagtcagtttgctctagggctgactgatggtggtgtttttgtggtggaacctttggaatcagatagaaaatggggaaattcttcaacggtagaaaatgggtctggttgcaacttggccggaacggcttctaatggagcttcaaagtctgatcaacctgaaagatgaatgagaagatggaactg

SEQ ID NO: 95791 - DNA, 565 bp, Zea mays
  unsure (1)..(565): unsure at all n locations
aggataatggcgntntnaactgagccttccngctcgtagcgactgcacgtactcggtccggaattcccgggtcgacccacgcgtccgcttgcagaatcgcttgaaaaaaatataaatgtcgtgcaaatcacaggcaacaaaagaagctgggcgaagccagcaacacgcatgcactgcgacgtgcagcagttctaagtttaaaccttcgaagtcgcctgatgttgtgtcatgtcatggtaggcctaccgattgatgaattctcaaggaagactatggatgccattgcagaagagctgacttatgagaagacgcttgcttactcatgcatgcagtaaattctaccacatgcagagagcacttgacacatgactgttgtgaatcgcttaaggaacttatacttcattcatcgatgctcactctgaactgattcacatcgtatggcatgccngtttggcgtatttgccaagctaccgctgatggccgcgtctattgaatctttcaaatagtgtctatgctacactagcttatgtactccgccctttatacggtaatattttttctgttg

SEQ ID NO: 95792 - DNA, 546 bp, Zea mays
  unsure (1)..(546): unsure at all n locations
gaccatggtggtgtccatgatatgacagtangtctgcaccggtccggaattcccgggtcgacccacgcgtccgcccacgcgtccgcccacgcgtccggaaccgcagaagtgcagcagaacgatcggatctagcagagttctctcaacctcatcggcggcggcgaagagcgtgcggatcggagatggagacaagcgggtggaggaggagagcggcggcgcgggcctnctggagccccgccacggtgtacctgtggctcgcgctcgccgcagcagcactgacgctcgcccaggctaagaaggacctaacggaggttacccacaaggtctacttcgatgtcgagattgacggcaagcccgcaggtcggattgtcatggggctttttgggaaagactgttcctaagacagcagagaacttccgagctctttgcacaggaaaggaagggattggccagaatggcaaaagctctcaataccagggaaagtcctttcacagaattaattccaggttcatgcttcaaagaagtgaactcactcttggggatggg

SEQ ID NO: 95793 - DNA, 549 bp, Zea mays
  unsure (1)..(549): unsure at all n locations
ggtatatggtgccgtatcgcatganntacgacactccatagtactgcacgtaccggtccggaattcccgggtcgacccacgcgtccgcagtttgatgcgaccgcgggagcgtccgcccgaccgccaccgcgtccgcctcagctcccctcgcttccctctaatttccagcccagtagtagggagactagaatcgtcggcgcgacgccttggcagattcgtccgccccgatcccaccaccaccgtgccccgcgggtgacgtcggaccggcggcgatggcaacgtcggcggcggcgggatcgcgcaggaaggcgccgagccctccgaagcaccgtcacgacggtacctcgccgctgcctctcggcatggactggagccctcccccgaagagatgggagggaaggaacaccatatggccacacaaccctcaaacaggttggagttactgtgtgatgatgccttcttggatcaaccaaacccctgaaactggtgtcacaagccatagccttttggaatctggcggtttttacaggatacatgttggtatacaat

SEQ ID NO: 95794 - DNA, 548 bp, Zea mays
  unsure (1)..(548): unsure at all n locations
ngtntagtgcnnntttccatgattggagagggtaccgcactgccctaccggtccggaattcccgggtcgacccacgcgtccgcccacgcgtccgcccacgcgtccgcacacacaattaggtcacatacacacttcccggctgcctccctaggtagcagcttctacaatggaggcatccaacaagctcgcagtcttgctcctgtggctggtcatggcagctgccactgccgtgcacccttcctactctgagaattcgcctcaagactacctcactccccaaaacagcgcccgtgccgccgtcggtgttggcccggtgacctggagcacgaagctgcagcagttcgcagagaagtacgccgcacagagggccggcgactgccgtctccagcactcgggcgggccctacggggagaacatcttctgggggtccgccggcttcgattggaaagccgtggacgcaatgcgatcgtgggtagacgagaaacagtggtacaactacgccaccaacagctgggccgtcggcaaggtgtgtggccactacacgcagt

SEQ ID NO: 95795 - DNA, 555 bp, Zea mays
  unsure (1)..(555): unsure at all n locations
aagactgtcnnntgaaaatgcagttagaatgctcatagtactgcctcgtaccggtccggaattcccgggtcgacccacgcgtccgcacgttcacacttcgggcttattcgtttcaccgttaatccatgtggattgggtggtattgaggtggtattgagtcggtttaaatccatagcaagctaaaattcatcccaatttattccaatacactccaatccacatgtaattagaataactgaacaaggtcttcagtgtttcattctattccacacacttagttcaactttgtttaaggtatactacattatccttgtacactactcagcctgtgagttcatatcggttatgatgattgcctgtcactcatcaaatcatacttttcattatccatagaaaaaaaaaccgaattaggtttttaagacagctagcttttgatacatgtgtgtgttatctcaatattatgagggctccaaaagagtatgatgggtagctcgagtaaatcgaattaaactattttttactggcagatatctggaacagtttacaaatatatga

SEQ ID NO: 95796 - DNA, 552 bp, Zea mays
  unsure (1)..(552): unsure at all n locations
agtagtgggtnnaactgatttgagatgtcatagcactgctctaccggtccggaattcccgggtcgacccacgcgtccgcggacgcgtgggcggacgcgtgggcggacgcgtgggagggtgggctcacaaaagatcatagctcaacaagttgtggggaataatgtgcatgaactcaccaaaggtgggagttgatgtgtagtgtaaggctgaacaacaaataatggttaaagctgagcatctcttttaataagttggtcaaaaattattagcacttactaaatgtaagtgtatgccaacccaaagtaatagtaaatcaaaattaataataaaccataatgtgatgcaaatgacaaattaagtttacttccacaaattaattatgtgagtgtacgagctatctaggtggcgtctcctagtcagcttgatggcgccaaggaataattattagttctttttattgttatcgtttattttttttaagactcttccgctatgtaataatgatgtgacatttatctctatacacttggtcattatatgaaaaaaaaaaaa

SEQ ID NO: 95797 - DNA, 546 bp, Zea mays
  unsure (1)..(546): unsure at all n locations
ggtngtgagtggtgagataagcatatgatagcatcgtctctaccggtccggaattcccgggtcgacccacgcgtccggcagatcttcgtgaagactcttactggcaagacgatcacccttgaggtggagtcctcagacaccattgacaacgtcaaggccaagatccaggacaaggagggcattccaccggaccagcagcggctgatcttcgccggcaagcagctggaggatggtcgcaccttggctgactacaacatccagaaggagagcaccctccacttggtgctccgcctcaggggtggcatgcagatctttgtgaagacattgactggcaagaccatcaccttggaggtggagtcgtctgacacaatcgataatgtcaaagccaagatccaggacaaggaaggcattccaccggaccagcagcgcctgatctttgctggcaagcagctggaagatggccgtaccctcgccgactacaacatccagaaggagagcacccttcacctggtgctccgcttgccaggtggtatgcagatctttgtg

SEQ ID NO: 95798 - DNA, 545 bp, Zea mays
  unsure (1)..(545): unsure at all n locations
agtntgtggtggttgtcatcgataagatggtactcactcaccgctccggaattcccgggtcgacccacgcgtccggcgcctctacatttcttctctctctgctcctccgcctccgcctgatccatccaagacagggatcgccatgtcggactcggaggagcaccacttcgaatcgaaggccgacgctggggcgtccaagacctacccgcagcaggctggcaccgtccgtaagaacggcttcatcgtcatcaagaaccgtccctgcaaggttgtggaggtttctacctccaagactggtaagcatggccacgccaaatgccactttgtcgccatagacatattcaatgtgaaaaagcttgaagatattgttccttcatgacacaactgtgacatttcccatgtgaaccggactgaggatcatctggttggtatttccgaaggtggaatcgtgaggcctcttaactcagaatgccacccctaaggatatcctagaactccaactgatgagactattggggcccagatttaaggaaggttcgaaagcc

SEQ ID NO: 95799 - DNA, 539 bp, Zea mays
  unsure (1)..(539): unsure at all n locations
ggagtgtgcnttnaactacagggatgtgatggactgcatctaccggtccggaattcccgggtcgacccacgcgtccggtgagacaaaagcagagatattgcaaaacctagctgagttccagttttcttgtgtcatgtacaatggtgccctagagaatgcatgcagtgagcttggagcccgtatgtctgccatggacagctctagcagaaatgctggcgatatgcttgatcgtctcacgcttacttacaacaggacacgccaagcattcatcaccacagagcttactgagattatatctggtgcatcagcccttgaaggataggtgaagagactatgtggacttctgcctttttccccatttgtgttcctcacacatgaaagcttcttttcttccggaagctcagtttcaacccttctcgtttcacttttgcttgataaacgtattctcatgctttattgcaataattaagccaacgacagtgatgatgccgtgcgtatttgcatattgcaaaaagaatggtctacatctatggtgaatg

SEQ ID NO: 95800 - DNA, 546 bp, Zea mays
  unsure (1)..(546): unsure at all n locations
ngggtaagatgcgtnttngatgataagggaggttgatgcactgcctgtaccggtccggaattcccgggtcgacccacgcgtccgcccacgcgtccgcccacgcgtccgcccacgcgtccgcccacgcgtccggcggccgagagaggccgacgcgcaccagcagatcccaaactcaccggggaggagggagtgggcgaccggcggcggcgatgggtttcatcatggagttcgcagagaacctgatcctccgtttgatggaggacccggacaagcgcgaccaggttcggcgggagcatgcctacaagatgaaggagcggtgcgagcgcaccaaggcggcgtggagcctncctctgcgcccctacagcttctggaccttcgaccgcttcaactcgcagctctcctgggacctgcagatcagccaggctgccggtcgccgggacccttacgacgaccttattacccgcactccggctcccggcgtcttcctaaccgccgtgtcgatctctgcgccaaaggtctacttgggcatttcatagaatctggtcc

SEQ ID NO: 95801 - DNA, 553 bp, Zea mays
  unsure (1)..(553): unsure at all n locations
cggaggtgcnntntacctgangcctgccgctcatacgactgacgtaccggtccggaattcccgggtcgacccacgcgtccgcccacgcgtccgcccacgcgtccgcccacgcgtccggttccccgtcggccgcatcgggcgctacttgaagaagggccgctacgcgcagcgtgtcggcaccggcgcccccgtctacctcgccgctgtcctcgaatacctcgccgctgaggttctggagctcgctggtaatgctgccagggacaacaagaagactcgcattattccgcgccacgtgcttctggcgatccggaacgacgaggagcttgggaagctgctgggcggcgtgaccatcgctcacggcggtgtgctccccaatatcaaccctgttctgctgcccaagaagacggcggagaaggcgtccagtgtggggagcaaggaggcaaagtcgcccaaagaggccgtcaagtcccccaagaaggcatagactgactgtctggagtgatctgattgttagcaggactttgataccagtatgcggtgatgcgtaagctgg

SEQ ID NO: 95802 - DNA, 552 bp, Zea mays
  unsure (1)..(552): unsure at all n locations
aggagtggctgaaatgatatggaatgtactctcatngacgttccggtccggaattcccgggtcgacccacgcgtccgcgcagcctccaaagccactcccaaacccccgcttccagaaccttctcgaagctccccgccgcctcctccactcgcaccgatggcgaaggaaccaatgcgcgtgctcgtcactggcgccgcaggacaaattggatatgccctggttcccatgattgctaggggtgttatgcttggtgcagaccagcctgttattctgcacatgcttgacattccgccagcagctgaagcccttaatggtgttaagatggagttggttgatgctgcgtttcctcttctgaagggagttgttgctacaactgatgttgtggaagcctgcactggggtcaatgtggccgtcatggttggtggattccccaggaaggagggaatggaaaggaaagatgttatgtcgaaaaatgtttcaatctacaaatcccaagcatctgccctagaagcccatgcagctcccaacttgcaaggtcctgtggtttgcaac

SEQ ID NO: 95803 - DNA, 551 bp, Zea mays
  unsure (1)..(551): unsure at all n locations
atgagatgcnctgtcccatgcacatagaatgctcatgcgactgcacgtaccggtccggaattcccgggtcgacccacgcgtccgcccacgcgtccgcgcgtgattccgcatcccgttcgcgagcgcgacacacgctgacagctcacggctgaccttcccgagtcccgacggcctccagctccatcttgattcttgaggcgaagccccggtgcgtaagagtctgccatggccagcgagaataaggtctttgggttcgaggaagtcgccaagcacaacgtcaccaaggactgctggatcatcatcgccggcagggtgtatgacgtcactccgtttatggatgagcatcctggtggagacgaggttttgctagctgcaactggaaaagatgctacagctgatttagaagatattggccacagtgattccgcgggggacatggtggagaacaccacatgcggcagatagatgctcaaaaacctgcaaaaaagcgtctttatgtgcccacccagcacgcacccatgcatacaaacatgattaccgccccatcaaaa

SEQ ID NO: 95804 - DNA, 542 bp, Zea mays
  unsure (1)..(542): unsure at all n locations
tgaaatggtgctgggnaagggatcgacgnagcgatcaatcacgctgaggaactggatcgacggacgcgtcaggcgtaccgtgagacaaactcagacatattggtttacctatctgagttgcagagttcttgtgcggtgtagaatggtgccctacagaatgcatgcactgagcttgcagcccgtatgtctggcatggacagatctagcagaaatgctggctatatgcttgatcgacttacgcttacttacaactggacacggcgagcatccatcactacatagcttactgagattatatctggtgcatcagcccttgaacgataagtgaagagactatgtggacttatgcctatttgcccaattgagatcctcacacatgaaggcttattttcttccggaggctcagtttcaacccttatcggttcactgttccttgatgaacgtattctcatgctttattgcaataattacgccaacgactgcgattattgcgggcgtatttgcatattgtcaaaagaatggtctacttctatggtgaaagt

SEQ ID NO: 95805 - DNA, 550 bp, Zea mays
  unsure (1)..(550): unsure at all n locations
ngttntgtgggttcttagtaatagtataaggatagtatttctgctaccgctccggaattcccgggtcgacccacgcgtccgcccacgcgtccgtgatgtttcttttgaattgaacctttttgacaaattggatcttggttggtatgtgatcgcagtcacttcaactccaagcaaggtccataaagctgttgatgcctgcaaaggtgttctgagaggattgcatagtagccgaattgtggaaagggagctcgatcgggcaaagaggacactgttgatgaaacatgaagctgagacgaagacaaacgcctactggcttggtttgtttgcccatctacaatcttcatctgtaccaagaaaggatgtatcatgcatcaaggaattgacgacattatatgaaaatgcaacgattgaagaatctgatattgcatatgagcaccttgaaagtgacgattcttctttggttgcttgcattgggattgctggcgcttaatctggggaagatacaaacgatgacgaacctgatgtggatcttcatggcatgggtcccatg

SEQ ID NO: 95806 - DNA, 545 bp, Zea mays
  unsure (1)..(545): unsure at all n locations
tgttttgatgtcttgtcccatccatagcacgaatgcagtgtaccgctccggaattcccgggtcgacccacgcgtccgagaagagctacaaaccaccaaagaagccactcactgaaaaggagattgatgagctatgtgatgagtgggagccagagctgctatgccctccaatcaaggagggggccaaaatagatgctccaacattggaaagtgccgttggaccacatacgattgttgattgttgatggtaaagaagttgtgaactttgcatcaacatgaggtctggagtctagacacagcgttgcaaactgaggtttaatcatcttagcaactacggtacgtgaccctgagcgcgtgattgttgcgaaacaatgaccacctcggtctacaccttaaaggttngcgcgacatggcttttcataggggctaaatggatctattccctgagcctaagacaaaaggttcaatttgtacaggggatccaaagattctaaaagcatgcattcttcaaatttccaaagccaggatggcctgaattgattgata

SEQ ID NO: 95807 - DNA, 550 bp, Zea mays
  unsure (1)..(550): unsure at all n locations
agggttatgagcnnnttncctgattaacgaatgatggatgtactgcctgtaccggtccggaattcccgggtcgacccacgcgtccgcccacgcgtccgagatcgcgagcggccgccctttttttttttttttcaaacaaaacagatacttgtcatttcgaacaaattcagacgtgtacattttttacactacgatccaccacttagaaatgtaataccatacattccataactcgagtgcatagtcaaccatgtaagacttgttcgattagctctcaatccatatggattgagtgggattagatgtgttgaattcctaagcaagtcaaagttcttctaaattttttttaattccatcaatccatgtattataggaataaccgaacaagacctaaaagtacaggactctttatgagtattatgctagagaaataagcctgaatgttcagaccagccccttttttaaaaaggaacttggatcttcaaaacaaaatcgttatatggccttctgctagagaaatcatgcctgcaccaatgcactcatgcagatn

SEQ ID NO: 95808 - DNA, 546 bp, Zea mays
tgtttcgtgttgtgtgatcgtagtcgcgaagtaacttctctaccgctccggaattcccgggtcgacccacgcgtccgcgcatgctcttcagcaagtattaactgatgatgttgatttcaatgtgatgctttcttttctagaattctatgagactcttctaggatttgtgaacttcaaaatctatcattcaataaatgtaaattatcctcctattctggatccacgtctggaagctttagctgttgagctctatgcattgtgccgatacatgtctgctggttccagaagaatgattgggaattcacaaactgacgaagtaatggaagataaggatgagaaaagtaaagctgaggaagtaattgaggaagagaaggttgtgaagaataaagcaagctcaaaagcagatgaatctgagttcagattagcacagcttcaacatcagctcccaaccaatgaacctggtgcactgatgaatcttgtagaagaatcaactgccgatgatgcagatgatgatgatactaaagatttgtaaggtttatttaaaaa

SEQ ID NO: 95809 - DNA, 542 bp, Zea mays
  unsure (1)..(542): unsure at all n locations
tgtttatggttngtgggatgagtaaggatgagtaaggactgcacgtaccggtccggaattcccgggtcgacccacgcgtccggagaaatccctacgaagaagtactcattgctcttcatacttggtgctggaactctaccttttggaacactcttcatcgagctcttcttcattctttctagtatttggcttggaaggttctattacgtgtttggcttcctccttgtcgtgcttcttttgctgattgtggtgtgtgctgaggtatcagttgttcttacctacatgcatctctgcgcggaggactggaggtggtggtggaaagctttctttgcttctggaacagtggccctttatgtgttcctttactctatcaactacttggtgtttgatctcagaagcttgagtgggccagtttctgctattctctacattggatactctntcgttgtctgccttgccattatgctagcgactggtaccagtggcttcctgacgtcgttctctgatggccactacctttactgatcaggcaagattgattg

SEQ ID NO: 95810 - DNA, 553 bp, Zea mays
  unsure (1)..(553): unsure at all n locations
agggttatggagcntntccaatgataacagaatagctgatgcgactgcacgtaccggtccggaattcccgggtcgacccacgcgtccgcccacgcgtccgcccacgcgtccgcccacgcgtccgcggacgcgtgggcttgttatgaaggtaccccatgtatcacggactgtgttatggctgagcttgaaaagctggggcagaagtatcgtgtggccttgagaattgccaaggaccctaggttccaaagattagcatgcacacacaagggaacctatgctgatgactgcattgtggagagggtcactcagcacaaatgctacatagttgctacttgtgatagagatttgaaaaggaggataagaaaggttcctggtgttccaatcatgtacatcacaagacataggtattcgatagaacggctccctgaggccacaattggtggagcaccaagaatctgatcggtgcagacatgaaatgttctgggatgtaatactatggcggtacttgtccatctgaccaagtcactatttcatgtttcagtccacgacaagg

SEQ ID NO: 95811 - DNA, 551 bp, Zea mays
aggacggtctgtaaatgaatgatgcacttctactgacgtaccggtccggaattcccgggtcgacccacgcgtccgcactctccccagctcgagtaaccaccgcgagaaccaatcaccaagcaaaagcccgagaaggaaagaacaaacaggagacagatggcggctgcagcgaaggcgtcgtggatggtggcgatgagcgtcggggccgtggaggcgctcaaggaccaggcgggcctctgccgctggaactacgcgctgcgctccgtccaccgcgccgccaaggccaacgctcccagcttcgcgcaggccaggaaaaagctggcgccgcccgccgcggacaaggccgccgcggaggaggggatgaggaccgtcatgtacctcagctgctggggccccaactagctagggcctctgctagtttcggcttcctgcaaccgtaccgagctcggcttcaaatctgatccatgactgggtgccttgccgacccactgtaacataagagtttagcaccacgatgatgatgatgaaaagttcttgcacttggattcagt

SEQ ID NO: 95812 - DNA, 558 bp, Zea mays
  unsure (1)..(558): unsure at all n locations
aggagttcggtgtnaacgtttcagnnctggactnattgacgtaccggtctggaattaccgggtcgacccacgcgtccgcgcacacgtccggtgccctaccaactacgcgctgcccaacgacgacggcggctggtgcagggcggcgaggcaggacttagacatggtcgagccggcctggctcaagatcgagatctaccagcgctgcatcatgcccgtcaactaccaaagggtgccgtctgtgaagaaaggctcactgaggttcatcatcaactggcgcgactactacgagctggtgctcatatccaacgtgcacagctgcgggtccatccagtcggcgggcatcaaggggtcgcgcaccgggtggatggccatgtcccggaactggggcgttaacttggcaattcaacgcgtaccttaatggccagagcctgtcgttccaggtcaccatcagcgactgccagaccaaaacccttgcgcgactttgcgcctcgccagctgagggttcggtcaaacgtttggcgaccctgcagcaattctcttaagatagacacatctttt

SEQ ID NO: 95813 - DNA, 556 bp, Zea mays
  unsure (1)..(556): unsure at all n locations
aggagtgtgttgaaaatgatatagaagctacatgcattgccgttccggtccggaattcccgggtcgacccacgcgtccgcccacgcgtccggtgccctcccaactacgcgctgcccaacgacgacggcggctggtgcaacccgccgcggcagcacttcgacatggccgagccggcctggctcaagatcggcatctaccgcggcggcatcgtgcccgtcaactaccaaagggtgccgtgtgtgaagaaaggcggggtgaggttcagcatcaacgggcgcgactacttcgagctggtgctcatctccaacgtgggcggctgcgggtccatccagtcggcgtccatcaaggggtcgcgcaccgggtggatggccatgtcccggaactggggcgtcaactggcagtccaacgcgtacctcaatggccagagcctgtcgttccaggtcaccagcagcgacggccagaccaaaaccttccccgacgtcgcgcccgccagctgggggttcggtcagacgtttgcgacctcgcagcagttctcttagtatagacacantcttgt

SEQ ID NO: 95814 - DNA, 557 bp, Zea mays
agggacgtactgcatttgtacattgatgatcatcgcactgccgtaccggtccggaattcccgggtcgacccacgcgtccgtgccaagatctctcaactggaactttcattcaaggagattattttcggctacaggaaacaacctcagtgcaagccacaagttttccgaagcgtctatgttcattggcccccaagaagccgtaacgggaaaacaggagaagaccacgttgacatcatcactttctacaacgaagtattcattcctgccgtcaagtccttgttggtggaggtagggcctggcgccagtccaaagaagaaagaagaggaaaaaggtcctgctgatgtaggtccattcccagaatctccccggctggctcggttcccgaacctccccgacatgtctccaaagaaggtttctgctacccataacgtgtacgtctcaccgctacggtcatcgaagatggacactctgctgtccccgagctccaagagctactacgcgtgcgtcggcgagagcacctacgcgttccagagccccttcaagggacctgaagcttc

SEQ ID NO: 95815 - DNA, 544 bp, Zea mays
  unsure (1)..(544): unsure at all n locations
agttntaggtgggtggcatagaatagattgtcatacctaccgctccggaattcccgggtcgacccacgcgtccgattaactccatcgtttatccctggacgtccattcctctcctggcttactgtaccttgcctgccatctgcctgctcacggggaagtttatcacaccagagcttaccaatgtcgccagtatctggttcatggcacttttcatctgcatctccgtgaccggcatcctggaaatgaggtggagtggcgtggccatcgacgactggtggaggaacgagcagttctgggtcatcggaggcgtttccgcgcatctcttcgcggtgttccagggcctgctgaaggtgttcgccggcatcgacacgagcttcaccgtgacgtcgaaggccggggacgacgaggagttctcggagctgtacacgtttcagtggaccaccctgctgatacccccgaccacgcttctnctgctgaacttcaatcgggtggtgggccggaatctcgacgcgatcaacaacgggtacgagtcgtggggcccccc

SEQ ID NO: 95816 - DNA, 549 bp, Zea mays
  unsure (1)..(549): unsure at all n locations
ggtttggaggtgcgnnttaactgataagggatgctcatgcgactgcccgtaccggtccggaattcccgggtcgacccacgcgtccgggcgtttgcgatgggcggagaggccacgaatgccggcggcgggggtatccgcgcgcggatggagcactacctttacagtggcgagaagaagcacgtcgtcgccggcatcgccatcttcgctgccgtcttcggcgtcccatggtacttcatgacgcgaggggcaaagcatcaatctcaccaagattacatggaaaaggctaacaaggcgagatcagagaggctttcttctggacagtcatctgcactaaaagaatgaatgttgtattgcctattctggtccctgaccttcagagctggtcatagatcatacactgtattngattgcactcaacggatttgatctgntgntaaataagcagggtatctttctttctaatatcaggtgtggaaacgaagtaccgtcccaagatttttgctactggtgatccttttttgggtctaatgagcctattaccgtatcttc

SEQ ID NO: 95817 - DNA, 553 bp, Zea mays
  unsure (1)..(553): unsure at all n locations
aggtttaggatcgtatngatgatttctgatgctcatagcgactgcccgtaccggtccggaattcccgggtcgacccacgcgtccgcccacgcgtccggagaggaggtagcaacaccgactgcttaatctcttccttttcctcttcctatctccagcgcatcccaagaggcggaaagggaggatcgtggagcggcgaattattgtttgtttccccaagatgtcttctccaagcaagcgccgggagatggacctcatgaagctgatgatgagcgactacaaggtggagatggtgaacgatgggatgcaggagttctttgttgaatttcgtgggcctaacgaaagcatttatcaaggaggtgtatggaaggttagagtagaattgccagacgcatatccttacaaatccccatcgattggtttcatcaattagatatatcacccaaatgtcgatgaaatgtctggttcagtctgtttggatgtcatcaaccagacttggagcccaatgtttgatctttgcaatgtgttccagggctttctttcacaacttctggtc

SEQ ID NO: 95818 - DNA, 555 bp, Zea mays
  unsure (1)..(555): unsure at all n locations
nagagctgtnttgcacctaagttgggatgttgatgcgactgcccgtaccggtccggaattcccgggtcgacccacgcgtccgctctgctctcccccacctcccggtccggcagcagagagcgggggtgcagagagatcgagatccggaggccgcgagtgggagcgccaccaccagcgtctgcggcaatggcgggcacggtgacggtcccggggtcgtcgaccccctccacgccgctgctcaaggacgagctcgacatcgtgatcccgacgatccgcaacctcgacttcctggagatgtggcggcccttcttccagccctaccacctcatcatcgtgcaggacggcgacccgaccaagaccatcaaggtgcccgagggcttcgactacgagctctacaaccgcaacgacatcaaccgcattctcgggcccaagcctnctgcatctncttcaaggacttcgncttgccgctgcttcggctacatggtctncaagaagaggtacatctacaccttcgacgacgactgcttcgttgccaagacccatctggcagggatt

SEQ ID NO: 95819 - DNA, 557 bp, Zea mays
  unsure (1)..(557): unsure at all n locations
cgtctatggcgggttcttgcctctgacntacgatcgtccgtactactcgctccggaattcccgggtcgacccacgcgtccgacaaaaaaacagaaaagaaaaaggaaaaaaaggacacaaatgccagcagaaaaaggtatacacacgcggatggagcactacactttacagaggcgagaagaagcacgtcgtacgccggcatcgccatcttcgctgccgtcttcggcgtcccatggtacttcatgacgcgaggggcaaagcatcaatctcaccaagattacatggaaaaggctaacaaggcgagatcagagaggctttcttctggacagtcatctgcactaaaagaatgtatgtcgtattgcctattctggtccctgaccttcatagcttgtcatagatcatacactgtattgatctgcactcaacggatttgatctcgtgttaaataagccggttatctttctttctaaatcagttggggaaaccaggtaccgtcccagaattttgtcaactcgtgaactttccttgggtctaaagagcccattaccccatttttt

SEQ ID NO: 95820 - DNA, 547 bp, Zea mays
  unsure (1)..(547): unsure at all n locations
agtttttgagttctagtatggggtatagtattgtantcactctaccggtccggaattcccgggtcgacccacgcgtccggtgagaaaaaggccttacctgaaaatgtttcttgagaaggttgctcagatgtttgaggttgtcattttcacagctagtcagagagtctatgctgagcaacttatagataaacttgaccctgatggaaaatatatctcacggcgtatttatcgtgaatcttgtgtattctctgacggttgctatacaaaggacctgacaattctggggatcgacttggcaaaagttgcaatagttgacaatactccacaggttttccagttgcaagtggataacggcataccgattaagagctggtttgatgacccctcagatcaagaactgatcgaagttgctccggtctttgagaagctcgtggattcaaaagacgtgaggcccataatttcaaagacctttcatgacaaacttgagccgaattaggttgaagcgacagatgtatcattcagtgaacctggcgcttaagttagcttc

SEQ ID NO: 95821 - DNA, 557 bp, Zea mays
tgtgctggttcttagtgccgtgacgatcgcggtacgactgcacgtaccggtccggaattcccgggtcgacccacgcgtccgaagggatttaggacgtcgtttggtctctttgccttcttcctccttcctccaccctgccttgcccaaagtagtcagtcgtcatcgtctcttccgatcgcctcgagttcattacagttagcgccgctaatcccctccctaatcaccatccatccatccatccggtaggattccccagccatgtcggcgactgcggtgaagtttcccgtggaggcgccgccgaggacagtgaaggtcaccaacgtctctcttagtgcaaccgtgcaagacattaaggagttcttttccttttcaggagatattgaacatgtggagatgcagagtggtgatgagtggtctcaaattgcatatgtcactttcaaagatgcacatagcgcaaaaactgcacttcttctttcgggtgccacaatagttgatctttctgtcatcattggacctgctccagagtatcaggcaaccccctactgccttctggtcaa

SEQ ID NO: 95822 - DNA, 553 bp, Zea mays
  unsure (1)..(553): unsure at all n locations
aggaaagtgcgntttaaatgatttgggatgttgatggactgacctaccggtccggaattcccgggtcgacccacgcgtccgcccacgcgtacgcccacgcgtccggaaataagcatataacgaacacagtaaccatcgacttgcatggccaacatgtccaacatgctatgaaccttctcaaaattcacatgatgatttgtatttgcattccatctgtcttactgagggtaattaccggttgtggttcagaaggtacagggaagggaaaaataaagcgctcggttatagagcttgcggagaaggaacatattgagtggcgcgaagagaactctggaactgtagcccttcgacttggtgggccaagagagtatcggttccttgagcatgaaagcgattctgacctagtggggaactttaacatagattaacttctgatctaatctatgtattcccgtatttatgtgttatagctatggatgctgcctangttgcgatgtaggctgtagttctgacacaagaactcggtattgaagttgggtaaaatattggggaa

SEQ ID NO: 95823 - DNA, 539 bp, Zea mays
  unsure (1)..(539): unsure at all n locations
ggttnggaaagagtaattcattncatgactgncagtgcgtaccggccctgaattcccgggtcgacccacgcgtccgcccagcccggttctttgcgtgcggttgatctcgtcggaggcccggccgcggttccccaatccgccatggaattcgatggcggccaacgccgggaataagatccgcaacgccaagctggttcttcttggagatgtgggcgctggcaaatctagcttggttcttcggtttgttaagggacagtttgttgaattccaggaatcaacaattggagcagccttcttttcccagaccttatcggtcaatgatgagactgttaagttcgaaatctgggatactgccgggcaggagaggtatcatagcttggctcccatgtactataggggtgcagctgctgccattgttgtctatgacatcacaaatccggcctccttcacccgtgccaagaaatgggttcaagaacttcaagctcaaagaaatcagaataccatagtggctctggcttggaaccaagctgatatgctan

SEQ ID NO: 95824 - DNA, 515 bp, Zea mays
  unsure (1)..(515): unsure at all n locations
gtggtgtacggacggaagtactctcacgctctgaattcccgggtcgacccacgcgtccgggttggcttctctcccctccggtcgggttcgggttcgagaggttctccggggttcgggtcggggtgagcggatcgagatggcggcgtcggatgttgagtaccgtgttcgtcggcggcctcgcctgggccacggacgaccactccctccacaacgccttcagcacctacggcgaggtcctcgagtccaagattatcctcgatcgggagacgcagaggtcccgcggcttcggcttcgtcaccttctccacggaggaggcgatgcggaacgccatcgagggcatgaacggcaaggagctggacggccgcaacatcaccgtcaacgaggcccagtcccgcggcggccgtggaggcggcggcggcggctacggtggtggccgtggaagcggcggctacggcggtggcgggcgccgtgatggcggcggcggctacggccggtggcgcagcggctacggtggn

SEQ ID NO: 95825 - DNA, 533 bp, Zea mays
  unsure (1)..(533): unsure at all n locations
nagcgtaggttcagctcaagactgcatccgcattgcccttctcggtcctgaattcccgggtcgacccacgcgtccgggggagctcaagtcctggtccttctaccgctcgggcatcgccgagttcgtcgccaggttccgcttcctctacatcaccatcctcaccgtcatgggcgtctccaagtccacctccaagtgcgccaccgtcggtatccagggcatcgcctggtccttcggaggaatgatcttcgcgctcgtctactgcaccgacggcatctccggaggacacatcaacccagctgtgactttcgggctgttcttagccaggaagctgtccctgactagggccctcttctacattatcatgcaatgcctgggtgccatctgtggagctggagtggtgaacggcttccagcagggactttacatgggcaacggtggtggcgccaatgttgtcgcacctggctacaccaagggtgatggccttggcgctgagattgttggcaccttcatcctagtctacaccgtcttctcgg

SEQ ID NO: 95826 - DNA, 533 bp, Zea mays
agagtgaattccgatcaagacctgcatcgcatagacgtactcggtcctgaattcccgggtcgacccacgcgtccgcggacgcgtggatcagacagggacattgtggcgctctccggcggccatactctggggagagcgcatcgagagaggacagggtttgatggcccatggactagggatcctctgaaatttgacaactcttatttccttgagcttctgaaaggcgactctgaagggctcttgaaactccctactgacaaggttcttgtggaagatcctgaattccgtcagcatgtccaactatatgccaaggatgaagatgcatttttcagggactacgcggagtcacacaagaagctgtcaaagctaggctttaccccccctcgctcttgtctctcatccagatctgcgaataaacacaagtcgttgctggtgcaagctgcagctggcttcgaaattgttaccgaatttgcggattggccttactttggcaattccaccacaagttattttactttacgctaacggtggtc

SEQ ID NO: 95827 - DNA, 547 bp, Zea mays
  unsure (1)..(547): unsure at all n locations
cgcggtntgggtagatcatagattgatgattgnactgactctaccggtccggaattcccgggtcgacccacgcgtccgcccacgcgtacgcccacgcgtccggcgcaagccagtgccgcgcccagatctccgcgacagatgagtcgttcgtccagctaactgcactgcacgcaatggccaccacggcgaccgaggcgaccaagacgactgcaccggcgcacgagcagcaggccaacggcaacggcaacggcgagcagaagacgcgccactccgaggtcggccacaagagcctgctcaagagcgacgacctctaccagtacatcctggacacgagcgtgtacccgcgggagccggagagcatgaaggagctgcgcgagatcaccgtcaagcacccatggaacctgatgaccacctncgncgacgagggccagttcctcaacatgctcatcaagctcatcggcgccaagaagaccatggagatcggcgtctacaccggctactcgctcctcgacaccgagctcgcactcccggaggacggcacgatctn

SEQ ID NO: 95828 - DNA, 536 bp, Zea mays
  unsure (1)..(536): unsure at all n locations
gtggnttggttgatcctcgggtcctcgattgacctaccggtccggaattcccgggtcgacccacgcgtccgccaggctgattctgctgcgctacggcttgctgctatagcctggcatgatgaactcgcccctgggcctaagccgttgctaattgtcaacattgggggccccaccaggaattgtaaatatggtgtagatcttgccaggcagctcataacttctctgtataatgtgctagatagctgtgggagtgtcagaatctcattctctccgagaacaccatggaaggttgctgatactatatttaaagaatttgctggacatcccaaggtctatatttggaatggtgaagaacctaaccctcacatgggacatcttgcatgggctgatgcttttgtcataacagcagactcgataagtatgttaagtgaggcaggtagcacagggaaacctggttatgttattgggaccgaacacttgtaatggaagttttcggcttttcacaagactctacgggagcgaagggttgttcgccc

SEQ ID NO: 95829 - DNA, 535 bp, Zea mays
  unsure (1)..(535): unsure at all n locations
agatgtgttaataggaatgtactgtactgacctaccgcgtccggaattcccgggtcgacccactcgtccgcccacgcgtccgatccagaggagatgatccaaactgggatatctaccattgatgtgatgaactccattgctcgtgggcaaaaaatccccctattttctgctgctggactccctcacaatgaaattgctgctcagatctgtcgtcaggctggccttgtgaagacattggagaaaggaaagcatgcagagggtggtgaagatgacaactttgctattgtgtttgctgctatgggagtgaacatggaaacagctcaattcttcaaacgtgattttgaagagaacggttccatggaacgggtcaccctttttctgaatctggctaatgatcccaccattgaacgtattatcacccctcggattgctctaacaacagcagaatatttggcatatgaatgtgggaagcatgtacttgtcatcttgacagatatgagcctctatgcatacgcacttcgtgaggtttctgcan

SEQ ID NO: 95830 - DNA, 533 bp, Zea mays
tgaggttatacgatcagactctcgatggactgacgtaccggtccggaattcccgggtcgacccacgcgtccgcccacgcgtccggtgcatggcatcctgctagggtctcctatacagttgcccgtgctggtcagaacgggtaccaccaccgcaccgagatgaacaagaaagtttacaagatcggcaaggctggacaagagacccacgatgcctccacagagtttgacaggaccgagaaggacatcactcccatgggtggcttcccccactatggtatcgtgaagggtgactacctgatgatcaagggatgctgtgtgggtccaaagaagagggtggtgaccctccgccagtccctcctgaagcagacttcccggctggcgctggaggagatcaagctcaagttcatcgacacatcgtccaaatttgggcatggtcgcttccagactaccgatgagaagcagaggttctttggtaagctcaagggcgtaggtgctgcggtgcatcgacaagtcccatttgtcaaaatcatcaaa

SEQ ID NO: 95831 - DNA, 541 bp, Zea mays
  unsure (1)..(541): unsure at all n locations
gtgccttctgatcatgataggaaatgcatngacgtaccggtccggaattcccgggtcgacccacgcgtccggcacagtccattattgccgtctcccttttgcgtgagcaaagaaagagagcgagaagagcagtcgccatgtctggcatcatccacaagatcgaggagaagctccacatggggggcgaccacaagaaggaggatgagcaccacaagaaggccgaggagcaccacaagaaggaggagggggagcaccacaagaaggacggcggggagcataaggaaggcatcgtggagaagatcaaggacaagatcaccggcgagcacggcgacaagtccggcgaccacaaggaaaagaaggacaagaaaaagaagaaggagaagaagaagcacggcgagggccacgaccacgacggcggccacagtagcagcagcagcgacagcgactgagatctggtgtcgcagatgtcgatgctggcttataatgcagcacaggtgcaacacangtatgctngctggatggaggattcataccagctgat

SEQ ID NO: 95832 - DNA, 534 bp, Zea mays
  unsure (1)..(534): unsure at all n locations
aatgtttcttgtatagaagagtatgatngctctaccggccggaattcccgggtcgaccacgcgtccgagctgctgcaggcgctgtccaaggaggaggaggccgtgcgggcgcgccttcgccgncggggccgcgccttccgccagtccgcgcacaacgtcctcgccctcgccgccgcgctcgagattgttgccgttggatacgccatcatgaccacgagatcgccggacatcagctggcagatgagggcagtcagggtgctacccatgttcttggttcctgctctagctgctctcatctactcgaccattacaaacctcacgaaaatgcttgacaacagagaccaacaaactcttgaaaagctacgaactgaaaggcaagccaagattgacgaattgaaggagagaacaaattactacactactcagcaacttatacagagatatgatcttgacccagctgcaaaggcggcagcggcaacagttttggcatcaaagttgggtgcggattctggactgagagtctttttgggagat

SEQ ID NO: 95833 - DNA, 532 bp, Zea mays
  unsure (1)..(532): unsure at all n locations
nagtgtaaaatagaataagactctangtaccataccgctccggaattcccgggtcgacccacgcgtccgcccacgcgtccgtgaagaagtacgggagaggggactggaggaacatctcgcgcaagtacgtgactacccggacgccgacgcaggtggctagccacgcgcagaagtacttcatccgcctcaactccggcggcaaggacaagcgccggtccagcatccacgacatcaccaccgtcaacctccccgacgaagaccgcggcaacgcgccaccgtccgcggtcaccaccactaccaacccctccgtcgccctcccggacatgaagcccttcattgcgccgctccaagacgcgctcggcgtgtcgcacccctacggcaacgtgaagctggagcctaagagctcgctggtggccggcctgggcttcaacgactccgtcctnctgatgcactgcngacagttgtaatcgggctgtcttgctgcgagaaccgntcccgtngcaacgtactgcaccaaccancaccttatctt

SEQ ID NO: 95834 - DNA, 535 bp, Zea mays
  unsure (1)..(535): unsure at all n locations
tgagcgttatttgatacagaactctgatcggactgacctaccggtccggaattcccgggtcgacccacgcgtccgagcaaccgcagccgcgagggccaagcaggggggacaaggaaaagggccgacgaagaggaaaaaggaagaacgcgtcgcggagccatggggcttggccttggcgtgcgggcggcgcccttcacgtacgcggcgcacgcactggccgtcgcggcggcggccatggttctcgtctggtccatccagttccgcggcgggctcgccatcgagtccaccaacaagaacctcatcttcaacgttcaccctgttcttatgcttatcggttatgttattatcggcggtgaagctataatggtgtacagggtacttccaacatcgaatcatgacacaactaagctgatccatctaattctccacgggattgcactngtccttggtgcggttggaatatactttgctttcaaaaatcacaatgagagtgggattgccaatctttacagcctgcactcttggattgggatag

SEQ ID NO: 95835 - DNA, 539 bp, Zea mays
  unsure (1)..(539): unsure at all n locations
cgggcttactgatcatggatgatgatcgattgacctaccggtccggaattcccgggtcgacccacgcgtccgtccacgcgtccgaccagctgctgcggccggagatgtcgtcgcagctgatcgaggagcaccggtcgggcgcggaggtgcacgtcgggcacgagctgtgcgagcgcaagtcgcgcgagttcatggtggagctgggccttcccgacgggctcctaccgctgcccagcctggacgaggtgggctacaaccggtcgacggggttcgtgtggctgcggcaggccgacggcctgacccacaccttcggctccatcggcaagcaggtgtggtacgacagggaggtgacggcgttcgtggagcccgggcggatgcacggnctcgccggggtgaagagcaaggagctcctcatctgggtcaccatctncgagatcgtnctcagcccctccggcaccaagatcgtgttccgcaccccccgcgggctcgggcgcgccttcctgtcaccgnctttcagctcgagcccgcggcggccgacg

SEQ ID NO: 95836 - DNA, 529 bp, Zea mays
  unsure (1)..(529): unsure at all n locations
nagtgtaattaagattttgatgctactgacctaccgctccggaattcccgggtcgacccacgcgtccgcaaatgggcctgtcacaggaagggctggtgatgtgcttgctgctgccaacacagcagcagaagtcgcaatgcggcttgtgagacctgggaagaaaaataaggatgttactgaagcaattcagaaagttgctgctgcttatgattgcaaaattgtggaaggtgttcttagccatcaactgaaacaatttgtgattgatggtaacaaagttgtgctcagtgtctccaatgctgatacaaaggttgatgatgctgaatttgaagaaaatgaagtatatgcaatcgatattgtcaccagcactggggaggggaagcccaagttattggatgagaaacagaccaccatctacaaaaagggccgtagacaagaaatatcacttgaagatgaaagcgtcaaggtttattttcagtgagatcagccagaagttcccatcatgcctttactgctagggcattagaaaaaa

SEQ ID NO: 95837 - DNA, 524 bp, Zea mays
agtgtatgctaaagtgatagcacgtagtaccgctcctgattcccggtcgacccacgcgtccgggcattgtccatatgatgttgtgccgtgttataatggggaacgtagaaatagttcaccctggatctgagcagcaccaacctagtagtgactattttgatagtggagtagatgaccttaaaaacccacaacattacattgtgtgggatatgaatctgaataggcacatctatcctgagtttgtagtctccgttaaattgcctcctaaatctgatgattacttcgtatggcaagacgactgtcagaattcatgtgatctgtcactggttttgatatccagttcacattagtgtatttcatatgaaattgtacgtcgatgttattttatgataaacaggacctcatctagatatggtccttttacatgaattattacttggtgatgtttgcttttgggtttatttttatttgtatcattcttaagttttatattgttctttttacttgttaggtatataataaaa

SEQ ID NO: 95838 - DNA, 531 bp, Zea mays
  unsure (1)..(531): unsure at all n locations
ngagtgattctactcccgactgcactgacttacccgtcctgaattcccgggtcgacccacgcgtacggttggcttctcctccccctccggttcgggttcgggttcgtgaggttctccggggttcggtttcgtgggtgagcggatcgagatggcggcgtcggatgttgagtaccgctgcttcgtcggcggcctcgcctgggccacggacgaccactccctccacaacgccttcagcacctacggcgaggtcctcgagtccaagattatcctcgatcgggagacgcagaggtcccgcggcttcggcttcgtcaccttctccacggaggaggcgatgcggaacgccatcgagggcatgaacggcaaggagctggacggccgcaacatcaccgtcaacgaggcccagtcccgcggcggccgtggaggcggcggcggcggctacagtggtggccgtggaggcggcggctacggcggtggcgggcgccgtgatggctgccgcggctacggcggtggctgctgctgctacagtggcgg

SEQ ID NO: 95839 - DNA, 532 bp, Zea mays
tgagtgggaacgcacggaaagtaatgcactgacgtaccggtccggaattcccgggtcgacccacgcgtccgtccacgcgtccgcccacgcgtccgcccacgcgttcgcccacgcgtccgtccacgcgtgcgagcggttctacgtccgagtcgtcgcatcaggtcccctcgattcgccggcggcggcgccaccaaccaagctcatacatctgaattgactagtccaactcagggatttctttggggaccaatcaaactcaagaactaagtttcatgtctgatctcgacgtccagcttccatctgcttttgatccgtttgcagaggcaaatgctgaggactccagtgctggtgctggatcaaaggactatgtgcacgtgcgtattcagcagcgcaacggaaggaagagtctgacaactgttcagggcttgaagaaagagtacagctacaacaagatcctcaaggatctcaaaaaagagttctgctgcaatggtactgtagtccaggatccagagctaggccatgtcattcaact

SEQ ID NO: 95840 - DNA, 546 bp, Zea mays
  unsure (1)..(546): unsure at all n locations
gagtggatttgctcgtctctagcttgctcgtcggattgcacgtaccggtccggaattcccgggtcgacccacgcgtccggctgttctcctcaccgctcgtgctctctctctctctctcggcgccgactcggctaccgccgccggcttacggaagcttcccaggtcttcgtcaggcttttctccggcaacgagcaccctgcacagatcgtgaacctccacacctcaacgatagatggcggggttcagaagccttgcacccaagaccaggaacctggtggtggccgggggactgtctgccttcgtgctcggggtctactactacaccatgagagcggtgggaggcacggacgagctacaggtggcgatcgacaagtttgaggagacgaagaagcaggatgctgctagaaactccagctccagcgcaggaggatcataattcataagcacgcggacacgcnctggatctgctgcaagctgagtggctgacatggtacgacgacagtcacgtcgctcagtaggccatgaccatgcgttctgcttgtactg

SEQ ID NO: 95841 - DNA, 549 bp, Zea mays
  unsure (1)..(549): unsure at all n locations
tgtgtggnnttnttaaatccattcngcatcatcgactgcacgtaccggtccggaattcccgggtcgacccacgcgtccgaagagaccaggccgaaggaaaacaatcctgaaaccaagccatgggtctgcaggaggaatttgaggagcatgctgagaaggcaaagaccttgcctgagaacacgagcaatgagaacaagctgatcctatacgggctctacaagcaagccacggttggagatgtgaataccgatcgtccgggcatattctaccaaaaggacagggccaagtgggatgcctggaaggctgttgaaggcaaatcgaaggatgaggcgatgaatgactacatcaccaaggtgaagcagctccaggaggaggctgccgcctcttaaaagtctcttaatagtgttgccaaacagctatttgtcagatgagctttgtgccatttcctcattagaagtatatcattcgatccattggggatctgtgaaccatgtacctgtttatgtaactggttaccagtgttatccatctatctatctatctgggaan

SEQ ID NO: 95842 - DNA, 532 bp, Zea mays
agtgtgttagggaacgaaagtactcctgctaccgctccggaattcccgggtcgacccacgcgtccggccgacaactctctaccgtccgagaccccaagcaccagcgcggcggcggcggcggcggcgacgcatggctgtcgggaagaacaagaggatctccaagggaaagaagggtggcaagaaaaagaccgtcgaccctttctctaagaaggattggtatgacatcaaggcaccgtcggtgttcagtgtgcgcaacatcgggaagactctcgtatccaggacacagggtaccaggattgcttctgagggtctgaagcacagagtctttgaagtttgcctagctgatcttcagggcgacgaggatcaagcttacaggaaaatcaggctccgtgctgaagatgtgcagggcaggaatgtgctcacaaacttttggggtatgaattttaccactgataaaatgaggtccctagtgaagaaatggcagacattaatcgaagcccatgttgatgtcaagacaaccgacaactacatt

SEQ ID NO: 95843 - DNA, 532 bp, Zea mays
gaggtattcggacagactctcatggactgcacgtaccggtccggaattcccgggtcgacccacgcgtccgcggactcgtgggctgggcccttccatgatacagcagatgcagcagccttgcaatgagtgcaaggggactggagagagcatcaatgagaaggaccgctgcccagggtgcaagggtgagaaggtcgttcaagagaagaaggttcttgaggttcatgttgagaaggggatgcaacacaaccagaagatcaccttccctggtgaagctgatgaagcgcctgatactgtcactggagacattgtattcgtccttcagcagaaggatcactccaaattcaaaagaaagggtgaagatctcttctatgagcacaccttgtctctgaccgaagcactatgtgggttccaatttgttcttacacatctggacaacaggcagcttctcatcaaatcagaccctggtgaagttggtaaacctgaccaattcaaggcgattaacgattatgggatgccaatttaccagaagccc

SEQ ID NO: 95844 - DNA, 539 bp, Zea mays
  unsure (1)..(539): unsure at all n locations
agggcttctttgtcctcgcgtcctcgattgacgtaccggtccggaattcccgggtcgacccacgcgtccgcggaggcccggccgcagttccgccatcagccatcgaattcgatggcggccaacttcgggaacaagatccgcaacgccaagctggttcttcttggagatgtaggcgctggcaaatctagcttggttcttcggtttgtcaagggacagtttgttgaattccaggaatcaacaatcggagcagctttcttttcccagaccttagcggtaaatgatgagactgttaagtttgaaatctgggatactgctgggcaagagaggtatcatagcttggcccccatgtattataggggtgcagccgccgccattggtgtctatgacatcacaaatccggccttcttcacccgtgccaagaaatgggttcaagaacttcaagctcaaggggaatccgatacaatagtggctcttgcttgtaacaaggttgatatgctagatgcgaggcacgttgcantagagggagcaaagacgttttc

SEQ ID NO: 95845 - DNA, 532 bp, Zea mays
  unsure (1)..(532): unsure at all n locations
ngagagaattcgatacagaatctcatggactgacctaccggtccggaattcccgggtcgacccactcgtccgcccactcgtccggacaaacatagcattggccatcaagaaggatccctcattcgtgaaaaacgttaagaagatcgttgtgctgggtggagcgttctttgcggctggaaatgccactccttccgctgaagcaaatatccacagtgatccggaggcagccgacatggttttcacttctggggcggacatctacgtcgttggcctcaacatcacaacgcaagtcagcttcacagataaggatctcctggagctaagaaactcgcaagggaagtacgcacagttcctatgtgatgtatgcaagttctacttggactggcacaccgagtcttatggtgctcctgctttgccgcgctagttcgtccggagctgttcacgttcaagaagggcgtggtgagggtggagacgcatggcatctgcgtcgggcatacttncatggacatgttgctgaagaagtggaactcaa

SEQ ID NO: 95846 - DNA, 539 bp, Zea mays
  unsure (1)..(539): unsure at all n locations
gctggtgcttaaaatagtatgatcatcgtatgactctaccggtccggaattcccgggtcgacccacgcgtccggatgccgccggtaagaccaccatcctctacaagctcaagctcggcgagatcgtcaccaccatgcgcaccattggattcaatgttgaaactgttgagtacaagaacattagcttcaccgtttgggatgttggtggccaggacaagatcaggcccctgtggaggcactactttcagaacacgcagggacttatttttgttgtagacagcaatgatagggaacgtgttgttgaggctagagatgagctccacaggatgctgaatgaggatgagctgcgtgatgccgtgctgcttgtatttgcaaacaaacaagatcttcccaatgctatgaatgctgctgaaattactgacaagcttggtctgcattctcttcgccagcggcactggtacatncagagcacttgtgctacatctggtgaaaggttgtatgaagggcttgaatggctttnncaacacattgncaacaaat

SEQ ID NO: 95847 - DNA, 530 bp, Zea mays
gagtgtaattcagtccatctgtcctgactacttcgtccggaattcccgggtcgacccacgcgtccgatcgcctctcagaaccgagatcctcaaaacccttctcccccctcccggatcgagtgcttgagctccgaccaaatctcgcagcggctgcaattccgagcccgaagagcggatcaggcgaggacgacgccttcgattctgatctgcggtcggctcgacctatagagaaccggagatgcatcagggcgactgcacggaggctcaggtgacgtgggaggaccagcagaacatcaaccgcttcggtcgcctcaacaaccgccttcacgagctccaggacgagatcaagctcgcgaaggagacgaatgagaaccttgatgatgctgggaatgaactcatcttgtcggatgaagacgttgtacgcttccaaattggggaagtgtatgctcacatgccaaggtatgacgtcctgactaggctggagcagatgtaagaggatgcggcttataaagcggataggttataggagg

SEQ ID NO: 95848 - DNA, 536 bp, Zea mays
  unsure (1)..(536): unsure at all n locations
ggagtgaatagatcaagcatcgtgancgcattgnctctaccggtccggaattcccgggtcgacccacgcgtccgcggacgcgtgggcggacgcgtgggcggacgcgtgggcgaccattccttcttcgctggttcggcgccgctatggttaagtactcgcaggagccgggcaaccctaccaaatcggccaaggccatgggaagggacctgagggtccacttcaagaacacaagggagacagcttttgcgcttcgcaagctgcctttgaccaaggctaagcgataccttgaggatgttattgctcacaagcaggcaattcccttccggagatactgtggaggtgttggtcgcaccgcacaagcaaagtctcgccactccaatgggcagggtcgctggcctgttaagtcagccaggttcatattggatttgctgaagaatgctgagagtaacgctgatgtgaaaggcttggacgtggacaacctctatgtttcacacatncaggtgaaccaagcccagaagcagatgcgccgtacctac

SEQ ID NO: 95849 - DNA, 538 bp, Zea mays
  unsure (1)..(538): unsure at all n locations
ggagtgaacctgataacgaatctttatcgcattgctctaccggtccggaattcccgggtcgacccacgcgtccgctcccctcccggccttcccttcctccccgccctccgaagtccgaaggccagaagcttccgggggccagcccaagccatgaacgccgccagcaccgccgccgcggcccccgcgcctgccgcgaccgtgcaggtgccgcgcgggcaggtggatctgatcgacttcatcgactggaccggcgtcgagtgcctcaaccaggactcgtcccacagcatcgtcaacgcgctcaagcagagtttgagagacgacgaggggctgtacctcgccagcgattcggacgagcagctgctgatctacatccccttcatgcaggtagtcaaactgcattccgcgctattcaaaggtcccgaggaagatggccccaaaacagtaaactcttcttcaatcaagagcatatgggtttcagcaatgtcaatgactatncaacaagtgacacnctcgagctatcatccgatcatttgatagt

SEQ ID NO: 95850 - DNA, 540 bp, Zea mays
  unsure (1)..(540): unsure at all n locations
tgggctgagttgtcccagctgatcatcnattgcattaccggtccggaattcccgggtcgacccacgcgtccgcgcagcagtgcccgccgcaggggaccggcgccgccgacccgcccctgcccatggaccccgtggcgcgcaccgccttcgacaccaactactacgccaacctggtcgccaggcgcggcctgctcgcctccgaccaggcgctgctcgccgacccggccaccgccgcgcaggtgctcgcctacaccaacagccccgccaccttccagaccgacttcgtcgccgccatcatcaagatgggtgccatacaggtgctcacaggcacagccggcaccgtccggaccaactgcagggtggctagctagctcatccatgatttacgtctacctgtagactcatgtgcttatataaaatcatacgacgaaactgtacgtacggcgtagagtggtgtggcgaggtccaatgattcagattgtacgtacgtgtccatcgatccaactgtagttgtgtacgcagtacagtacgtgctagcta

SEQ ID NO: 95851 - DNA, 542 bp, Zea mays
gtggcttactgttcaatgaatgatcttcgattgaacgtaccggtccggaattcccgggtcgacccacgcgtccgcacaaagcgccgtcgtcgccccatcgaacatggctccgaagaaggataaggccccgcccccgtcgtcgaagcccgccaagtccggcggtggcaagcagaagaagaagaagtggagcatgggaaagctaaaggagaaggtgaacaacgcggtgctgttcgaccaggctacctacgacaagctgctctctgaggtgcccaagtacaagcagatcaccccctccatcctatccgagcgcctcaggatcaatggctccctggctcggagggctatcaaggacctgatggcgcgtggcctcatccggttggtctcggttcactcaagccagcagatctacaccagggcaacaaatacctaaggatgggattcccttgtttgccctctctgtaggagctcgtcttctttagaacagttgccatctctgtcaagagtttgctaatgctatgttagatgagtttagtttggcttgc

SEQ ID NO: 95852 - DNA, 560 bp, Zea mays
  unsure (1)..(560): unsure at all n locations
gactgtgaagagactatgacagcactgctctaccggtccggaattcccgggtcgacccacgcgtccgagcaatctctagcagcagatcctcgtgcgaagcaaagcgctagcccccttcgtactgtccggatggcccgcacgaagcagacggcgaggaagtccactggcggcaaggcgccaaggaagcagctggccaccaaggcggcgcgcaagtctgccccggcgaccggcggagtgaagaagccccaccgtttccgccccggcaccgtcgcgctccgggagatccgcaagtaccagaagagcacggagctgctgattcgcaagctgccgttccagcgcctggtgcgtgagatcgcccaggacttcaagaccgaccttcgcttccagagctccgtcgtcgccgcgctgcaggaggcgtccgaggcctacctcgtcgggctcttcgaggacaccaacctctgcgccattcacgccaagcgcgtcaccatcatgcccaatgacatncagctcgcccgncgtatccgggtgaaaagggcctagcgtcgtccctgtgaagtgga

SEQ ID NO: 95853 - DNA, 550 bp, Zea mays
  unsure (1)..(550): unsure at all n locations
ctcgctatgctagttnatgatgacgntcttctgaattacctatcgactcgaccgttcgtatggacgaacatccgtatcatgccaagcttatctatctttacgatggtttgattgaatcggcggcttcgagacaaatcagaattgatggtgctctcaaggttggacagaaacgtggaagattggttgcagatctagaagaagatgaacaacctaaaaagaaggttagattatggagcccatcggctcaatggatttcagtttataatgctaggcggcccatgaagcagaggtaccattacaatgtggctgactcgaggctaatccaacatatagaaaagggcaacgatgatgggctttacattagcagcgtgactttctcagcaaacctttgggcactcatcatggacgcatgaactggtttctgttctcaggtttatgagctctcaccagttttccttcacaaggactgtataatgaagcatttggagaaaatcttctacataacagccattgctggatcaatccacgggagcctattggttgcaattcc

SEQ ID NO: 95854 - DNA, 561 bp, Zea mays
  unsure (1)..(561): unsure at all n locations
gcgtagtagcgggcaggaggggacgcatctacaggtccggaattcccgggtcgacccacgcgtccggtctgctcgtctgtcgtctccacctcgtccctcacctctgaccccaagcgacccaagccaaggttgcaccccacccccgcccccgcccctatccaatccgatggagggcggcgactcgtccggcgccggcgccggcggcgccgtggccgcggcggccaagtggcggagcgacgcgtcgcgggcgttccagtactacctggaccgctcgacgcctcacgctacggggcggtggctcggcacgttcgccgtcgcggccatctacgcgctgcgggtctacatggtgcagggcttctacatcgtcacctacgggctcgggatctaccttctcaaccttctcatcggtttcctctaccgcatggtcgaccccgagctcgacccctccgccgacttcgangggccagcgcttgccaccccggggtccgacgagttcaagccattcatcaggcgccctcctcgagttcaaggtctggtatgccatcacaaaaacctttggtt

SEQ ID NO: 95855 - DNA, 564 bp, Zea mays
  unsure (1)..(564): unsure at all n locations
tacgctaattaagtaagatgatcgtctgaccgtaccggtccggaattcccgggtcgacccacgcgtccggctagctcgatctactactactactactagctggtacacatactagccatcctgccagccagccagcttgccatggcgcccaccgtgatgatggcctcgtcggcaaccgccgtcgccccgttccagggtctcaagtccgccgtcagcctccccgtcgcccgccgcagcaccaggagcctcggcaacgtcagcaacggcggaaggatccggtgcatgcaggtgtggccggcctacggcaacaagaagttcgagacgctgtcgtacctgccgtcgctgtcgacggacgacctgctgaagcaggtggactacctgctgcgcaacggctggataccctgcctcgagttcagcaaggctcggttcgtgtaccgcgagaaccctcacctcncgtgctactacgatggccgctactggaccatgtggaggctgcccattgtcggcttgcaccgacgccacgcaggtgtacaaggagcttcangagggcattcggcgggtacc

SEQ ID NO: 95856 - DNA, 561 bp, Zea mays
gcgttataactgccagctcactaccgatctgtacgtaccggtctggaattcccgggtcgacccactcgtccgggcggcggctactgcggtggctggcgccgttatggcggctgcggctactgcggtggcggcggctgctactgtggctgcggtggctactgtggtggtggtggcggctactgcggtggcaaccgtggcggcggctactgcaactcctactggaactggaggaactgagcggtggtgcccgctcggccaagttatcctgttcgctaccgtgatgtttaccctagtccagatggtttatcttcgttcgtctcgattgttgttgcccatctgtgtttatgattgcaaggtctctctgtgtcagctgttaatgctgtgttcatcctcgtctccagaatacccatgcatcaaccatcatgtactgtggatcgatggatgctttacctcctgtcaggatttgttctaagttaatccctagggaaaaaatggtgcttttggtgcttcaaaaaaaaaaatttttctcaggggcttaattaagttatgtttaatttacta

SEQ ID NO: 95857 - DNA, 554 bp, Zea mays
  unsure (1)..(554): unsure at all n locations
ggcgtaatacgactgaactcgtaggactgacgtaccggtccggaattcccgggtcgacccacgcgtccgcccacgcgtccgtgcaggggaaaaccacagccatcatttgatcagactaagcctgctctgccagcacttgcacgacttatccattccaacgacgaggaagttctcactgatgcatgctgggccctgtcatacttatctgacggcactaatgataagatccaggctgtgattgaagctggtgtttgcccccggctcgtggagcttctcctccatccatcaccatcggtgcttatacctgctctacgaactgttgggaatattgtcactggagatgatttgcaaactcagtgtattattgatcatcaagctcttccccgcctcgtgaatctgttgacgcagaaccacatgaaaagcattaagaaagaggcatgctggactatttcaaatattactgctggaaacanagatcagatacaggctgtcataagttgccgtatcatcgctcctttgtgcaactgcttcaacagcanagtttgaatcaagag

SEQ ID NO: 95858 - DNA, 558 bp, Zea mays
  unsure (1)..(558): unsure at all n locations
ttggtttaactgcactnctcgatncgactgtcgtaccggtccggaattcccgggtcgacccacgcgtccgggaacctcgagcgcccgctgtgcatccccaaggaggagctgcttcctcgtccgccgggcggggtgcgcgtggaggacaccctgctgctcgcgcaggttacaaagttcacatgtggtggatttgctgtgggcatttgcttcagtcacttggtgttcgatgggcagggtgctgcacaatttctgaaagcggtgggtgagatggctaggggcctccctgagccatcgatcaagccaatctgggctcgtgatgccatccccaacccacctaagccacccctaggtccgccgccgtcattcaccgcattcaactttgagaaatccgtcttgagatctctccggacagcttcaagaacgtgaaggatcangttgcaagtgaaacccaaccgaagtgtttcactttcgacttggtaactgcctaatcttcaaaaggccggccttggaattggactttagcgccgaccttaggttccgcttgggtttttaaccaac

SEQ ID NO: 95859 - DNA, 559 bp, Zea mays
ggctgctatttaagaagatgatcgatctgatctaccggtccggaattcccgggtcgacccacgcgtgcgagcgcaattccccggcgacaactacgtctcggaagtagacgcgggccgcgacggacaggtggaccggcgtgacttgggcaagatgaagcacgggtgcgagcattaccggcggatgtgcaagatcgtggcaccgtgctgcaaccaggtgttcccctgccgacactgccacaacgaggctacggcttgcggagatcggcatacaatatgtcgtcaggatgttgaaaaagtagtttgcctactctgtgaaacaaaacagtcggtgtcacaagtgtgcataagctgtggagtcaatatgggagagtactattgtgatatatgcaaattgtatgatgatgatacagacacagggcagtaccattgcatcgactgtggatatgcagggttggtggcaaggaaaacttcttacactgtgtgaagtgtgggtcctgctatccggtaatagtccgtggataccatcactgggtggagaactcattgaggcataattgcc

SEQ ID NO: 95860 - DNA, 543 bp, Zea mays
agtgtgcatcttactaaccgtcagccactcgtagtacgacgtaccggtccggaattcccgggtcgacccacgcgtccgaaggttgcgtatgccctgtctcagggactaaaggtcattgcatgtgttggtgagacagttgggcagagggaggctgggtctaccatggaggttgttgctgcacaaacaaaagcaattgctgagaagatcaaggactggagcaacgtagttgttgcctatgaaccagtttgggctattggaactggtaaagttgccaccccagctcaggctcaggaagtgcacgccttcctgagggattggctaaagaccaacgtcagccctgaggttgctgaatctactaggatcatttacggaggctctgtaactgccgcgaactgcaaagagctagcagcacagcctgatgtcgatgggtttcttgtcggtggagcttctttgaagcctgagttcatcgacattatcaacgcggtcaccgtgaagtccgcttaagatgttacgctgaagacgaacatactttttttatgctca

SEQ ID NO: 95861 - DNA, 543 bp, Zea mays
  unsure (1)..(543): unsure at all n locations
tgtggcttgctgatcccatccngtcgctcnatagtactgtccgtaccggtccggaattcccgggtcgacccacgcgtccgatatggatgaggtggagagttcaaaaatttgtattgattctggctcatgttgccttgcacgctactcaaaattgagtccacatcaagttttgacgctttaatcaccaattgcccttccaaaggctgctaagaaccccacagaactggatggattgaggaaggcgcatattcgatatggtgccgctgttgtacagtaccttgcttggctggataatcagatgcacgagaactatcgagcttctggatatttcagtgagataaaacggtcacataaaaatgaacatttagcaaccaaacttactgacgcgtctgtgagtgacaaacttgaaagctatcgtgcaacataagagaactttaaaggtttgagctttcctacaatctcatctgtgggaacaaatgcagcagctattcactataaacctgaatcaagcacatgttcggaaatggatgctggtaaaatatn

SEQ ID NO: 95862 - DNA, 556 bp, Zea mays
  unsure (1)..(556): unsure at all n locations
aggtctgctgccagtactcatcgactgacgtaccggtccggaattcccgggtcgacccacgcgtccgcccacgcgttcgcccactcgttcgcccacgcgtccgggacgagatggacacatcaagccctgcagcacttgtcaatgcacagatgctgaacatgtttgttgggcgaagagtgcgcacggttgttcaagtccaacacaatgaaggtggagtgcttgtcgggcagtccaccgatgggcaccagttgtgtgtcaaaagtgccatggacgtccccgtatcacattttatggaggtttatggaattgctgaaaacagccagaccatccgtgctgaagtttgcacagattttggtcccaactttgatcccaaggtttttgatgagttgtgcaagctggcgagtggcaggttcaagcacctgttcctgtagagataatcatcgcatggaggatcttcagccaactgaagcttgtttgaaactgaatggttcgccttntaatntaagatttggctacatgtntccttcattgcatggaggaccttcagtaccctgtt

SEQ ID NO: 95863 - DNA, 559 bp, Zea mays
acgtctattaagaaggatgatcgatctgaccgtaccggtccggaattcccgggtcgacccacgcgtccgtccacgcgttcgcaccagccgtcgtcatgtcgaagcgaggtaggggaggttcggctgggaacaagttccgcatgtcactgggtctaccggtggcggccacggtgaactgcgcggacaacacgggcgccaagaacctctacatcatctccgtcaagggcatcaagggccgcctcaaccgcctcccgtccgcctgtgtcggcgacatggtcatggccaccgtaaagaagggaaagcccgacctcaggaagaaagtgatgcccgccgtcatcgtccgtcagcgcaagccgtggcgtcgcaaggacggtgtctacatgtacttcgaagataatgctggagtgattgtgaatcccaagggtgagatgaaagggtctgcaatcacaggacctatcggccgggaatgcgctgacctttggcctaggatcgctagtgcaacaaatgccatcgtttgagaccttgttggatgtgtttaaactgagtatgatcatctcaa

SEQ ID NO: 95864 - DNA, 546 bp, Zea mays
  unsure (1)..(546): unsure at all n locations
tgttgtgccgattatcatgttagcnatctgtctgcactgctcgtaccggtccggaattcccgggtcgacccacgcgtccgcccacgcgtccgcccacgcgtccgcggacgcgtgggtcgccattacaagagaagccagtgtgacaagagctacacctgcagccgttgcaacaccaagaagttctctgtcatcgcggacttgaagactcatgagaagcactgtggtcgtgacaagtggctctgttcttgcggaacgaccttctccaggaaggacaagctttttggacatgttgcgcttttccaaggccacacacctgcgctccccgtggaagacggggatgtaccagaaggttcagagcagcctcaggacggcgaaccaacgaatgaaatggcgaggagcatggtgtatagcttcccgtgtagctcgtctgatggtttattgaacctcgacatgaaaatggctgatgacgtgcgtggttatctcttgccgcttagctttgataatgctttggcgcggttgacgactttactcggcctggatttgacg

SEQ ID NO: 95865 - DNA, 561 bp, Zea mays
  unsure (1)..(561): unsure at all n locations
ggtgggtatgccagccgatgatcgatngacgtacatgtccggtattcccgggtcgacccacgcgtctcgcctgagaacagatttggatcgttgagaggagctgctgagatcaagcagcaccccttcttggaaggcttgaattgggctctgattcggtctgctgctccaccagagacacaaccttgcaacatcgtgactcttgccaaagagcggaaatagtgctaaactgtaccagaacgaaactaaggaacttaacactcaaggtcctctcagtcgcttctgaacttcaagcacttgcatacaatctgccgttatttcgaaagagtcaggatgtatcccggttgcgaacatgcgcgaagcctggaacgagactgtgacctgccctggcacgcaccgttaggaccacggcgtaatggtggttacgcccattctggctgcttaaacttgtcataggtccttacgcatgttgataaccgtgttttacctaccggtatcatcacgttgtccgggtttcccctaaaaggttaaatcgggggcgttctttaaggttgccatttagcg

SEQ ID NO: 95866 - DNA, 548 bp, Zea mays
  unsure (1)..(548): unsure at all n locations
cgaggccgtnttgctgctgccacccactcgatacgcacgcacgtaccggtccggaattcccgggtcgacccacgcgtccgcccacgcgtccggtctctcagggctcattggatgcactaaatgagatactcaaagagcctatgaccaattaaccgcttcagaccaaatattttagtggaggggtgccacccatatgcagaggatatgtggaaatcagtaaagataaacaagttaacgtttcaaggtgtgaagttatgtggccgttgcaaggttcctacaattaaccaagacactggaatacctagccctactgaaccaactgaaactctgcagacatatcggtcgggtgaagtgctgcttcgtagccacaaaaacaaacggcaggtgtactttgggcaaaatgcagtctgcaaggaatctctgtcagcaaatgtggaaagaaggatcggcaaggtgggggatccagtttatgtgacacagtcgttcccttcatctggtgaaagtccattctgagtgaccgaattaggaccccggcttcgttacaaccg

SEQ ID NO: 95867 - DNA, 545 bp, Zea mays
  unsure (1)..(545): unsure at all n locations
gagagccgnnttatcactgctagtngctcgctggactgcacgtaccggtccggaattcccgggtcgacccacgcgtccggttccccgctcaaggtttctcccagtgaaggctacatctgatctgttgcttgtgcagtctgatctttacaccttggttgatggctttgtcatccgcaacccatccagagcgaatccagctaacccttcaattgagcttggacctgagttcaagaaggttgccaatttccttggtcggttcaagtccatccccagcatagttgagcttgacagcttgaaggtttctggtgatgtctggtttggctctggaattacactcaagggcaaggtgacaattatcgccaagcctggagtgaagttggagattccagatggagacgtacttgagaacaaggatgtcaatggccctgaggatctttaagcaatgtttatcatcaccagttttcccaaggacatgtcacaggaactgccaagcctaatcactcctactgagctctatattntgtaattttcatgtgcattccgan

SEQ ID NO: 95868 - DNA, 561 bp, Zea mays
  unsure (1)..(561): unsure at all n locations
cgctgtggaaagagggagatatgattgctctaccggtccggaattcccgggtcgacccacgcgtccgcggacgcgtgggcgactgaagtgaagtgccgggagcacgccgaggctaagcatcccaagacggacgtgtaccagtgtttcccccatctgaagaagtgaaaggcctgaacttagcaaccagcgctggtttggtcactacgatcgggccagggggcgttccttgtgttgagggtgttcattccgtgttatcttcccgtcagtcatgcgtcctgtcctatgttaacctacataagaaagtgatgtggtgtccacttttagtgaaactactgtctgctgttaaaacctggttggtctcagaacgatgattttcgtgtgcaaaaaaaaaaaanaaaaaaaaaaaaaaaaaaaaaaaaaaaaaaaaaaaaaaaagggcggccgctctagaggatccaagcttacgtacgcgtgcatgcgacgtcatagctcttctatagggtcacctaaattcaaatcactgggccgtcgtttacaacgtnntgactgggaaaaccctgg

SEQ ID NO: 95869 - DNA, 555 bp, Zea mays
  unsure (1)..(555): unsure at all n locations
gcggtattacgatagatcgtcgatcgcacgacgtaccggtccggaattcccgggtcgacccacgcgtccgattctaaattggtggaggacaaatgcaaacaaatacccggtgctttcagctatggcgcgtgatattttagcaatacctttgagcactgttccttcggagtttgcgttcagcgctggtggtcgtattcttgatgataatcgaagcacaatgacaccagaaacacttgaatgctttgtatgctgtaaggattggttatatgaatacccaaatattcaagcttagttgatctgacttccttcaaacatgttcaacagtacggcattcaagggagatttatgcatcattcggtgggctcctgtagctgcttagggatgacccttccactgctgctagcttcaagctagatcagatactctntctactgatacgcatggtgtaaaactgccgtgttatgtggtagatcggtgtgtgtactggtttccttatgtgtaaaactgactgcttgatcangggtgagtatcgttttctttatcactctggattca

SEQ ID NO: 95870 - DNA, 563 bp, Zea mays
  unsure (1)..(563): unsure at all n locations
agaagtgctgatagggggagtatacggatcgctctaccggtccggaattcccgggtcgacccacgcgtccgcccactcgtccgggacaagaagcccgcggagggcggcgcccacatcaaccttaaggtcaagggacaggatggcaatgaggtgttctttcgcataaagaggtccacccagctgaagaagctgatgaacgcttattgtgaccgccagtctgtggacatgaatgccattgcgttcctgtttgatggccgcaggcttcgcggcgagcagacccctgatgagctggagatggaggacggcgacgagatcgatgccatgcttcaccagaccggaggcagcgttcctagcaccacctaaaagcatcagtcgcggagcttcgttttgctctccgccctgcgtagtagtaaacaaaagggaaaaagtctttttaaggaacttgtgatgctctggctccttgtgccattgctgagggacattcctaggnncttgttagtagtatggtttggtacccttgtctgtcatcactcgtttatctatccctaatacatgccgncatg

SEQ ID NO: 95871 - DNA, 559 bp, Zea mays
  unsure (1)..(559): unsure at all n locations
tagttatgactgcagcngtcgtcgtactgacgtaccggtccggaattcccgggtcgacccacgcgtccgcggacgcgtggggtcgtggcaggcgtacgtcgactagcacctgatgtgcgagatcgagggacagcatctcagcgccgccgccatcgtcggtcacgacggcagcgtttgggcgcagtccgagagcttccccgagttaaagcctgaggaggttgctggtatcataaaggactttgatgaacctggtactcttgcaccaactggtcttttcgttggaggtactaagtacatggtgatccatggtgaacctggagttgtcatccgaggaatgaagggcactgggggcattactatcaagaaaaccggcatgtcctcgattatcggtgtctacgactagccaatgactccagtgcaatgcaacatggtggtggacaggctaggcgattacctgtttgagcagggcctcataatagtccgctatttgcctgttgatgttcatttgggcaaccatatttgcggccttatatagttctggaatacatgagctggacct

SEQ ID NO: 95872 - DNA, 553 bp, Zea mays
  unsure (1)..(553): unsure at all n locations
catgtggaagagggaatacggattgctgtaccggtccggaattcccgggtcgacccacgcgtccgcccaacatcaatttaatgctcgtgagagtgattggggtttcacatcttttatgcctttgagtgagctctatgatgcaagtagaggttacctcgtgaatgatactgttgttgtggaggccgaggttgctgtccgcagaatggttgactattggacatatgactcaaaaaaaggaaactggttatgtgggcctgaaaaaccaaggagctacctgttatatgaactcccttctacagacactataccatataccctacttcaggaaggctgtatatcatatgccaaccactgaaaatgacataccatcaggaagcattcccttggcgctgcagagccttttctacaagctccagtacagtgacagtagtgtagctacaaaagagcttgacaaatcttttggttgggacacatnatgatctttcatgcagcatgatgtacaagagctcaacagaggtctgtctgagaaacttgaggacataatgaaaggaac

SEQ ID NO: 95873 - DNA, 563 bp, Zea mays
agtacggtatcctatcgatatgatcgatcgacctacaggtccggaattcccgggtcgacccacgcgtccgcggaactggacaccctgagcgaggagtcctacaaggacagcactttgatcatgcagctccttcgtgataacttgaccctatggacttctgacatctcggaggaccctgcggaagagatcagggaggcgcccaagcacgactcgagcgaggggcagtaaagccggctttacatgcctagaagctagtacctagtgtttgctgctgtctaatgacattatgcaatgtgatctggaccctggtttcttgggtgcgacgcttgtagcagccgtcttatgattatttgtcgggaaaatttgggggctccccatatgagatgctgccgggcaagacctcgccatcccccacctcgtttcaggcggtggacgctggagcctggtccggttgggttgggaagccccttaaactggtgtcgcttgcattttaacctttcatcgccgttcagtggtcctaaaatcattgctcgtctcagtggtctaataaaaaaaaaaaaggg

SEQ ID NO: 95874 - DNA, 564 bp, Zea mays
  unsure (1)..(564): unsure at all n locations
acgctatgacgacagatcgtcgatgcgacgcacgtaccggtccggaattcccgggtcgacccacgcgtccgtaaagatcgtcaaggagaacttcgacttcaggccagggatggtcaccatcaacctcgagctgaagaagggcggcaacaggttcatcaagaccgccgcatacggccactttggccgtgacgacgccgacttcacctgggaggtggtcaagcccctaaagaaggcatccgcttaagaatgtattgggaagttcactggacatgaggttcatcttcgtctggctctgctgatacctgcaaggattgctgctgctgctgcctgccctggatgtgtgtttgatcagtgactggctgctctgctccatagaagatgaatgaagagagagatggtgaagaaggctttggcaaatggcaattgccgcaacaagccatgtcggcgccactgaccggcttagtgnatggtataatttggtgtggcaacagccaggattaatgcgctggtcttttatctttactactaggttgggtctcgtcggtatctaattttcttttccct

SEQ ID NO: 95875 - DNA, 563 bp, Zea mays
  unsure (1)..(563): unsure at all n locations
agacgctgaatgcggaggagatggattgctctaccggtccggaattcccgggtcgacccacgcgtccgcactcactcactcactcacagtcgccgccgctgcccagtgcccactgctcgccgctagaggaatctgagagagagaggggaaagggcgaaggaggcgcatgcaggcatgggctccccttcctccctccccgccgcggcggcgctcgtgctcctggccctgctcgccggagcccagtgccgcgaggcccagttcgacgccgcggacgccggcgcggagaacttcaacaccagcgaggccgccgtgtactggggcccctggcagaaggcccgggccacctggtacggccagcccaacggcgccggcccggacgacaacggtggtgcgtgcggcttcaagcacaccaaccagtaccccttcatgtccatgggctcctgcggaaaccagccatngttcaaggacggcaagggatgctgctcctgctacaagattcggtgcaggaaggacccgtcctgctcngggcggacggagactgtgatcatcaccgacatggacta

SEQ ID NO: 95876 - DNA, 560 bp, Zea mays
agttggtatgccgattgcgtcgtcgcacgtactgtctgtactcccgtgtcgacccacgcgtccgaattcaacagagaatcatgggcgtgaggtttacctgacaggacgtcgactccaacctacatggacgggctccttatgtgctaggtcgagggccaccaccacctcaccttcgccgtcatcatcggccacgacggcaccgtctgggcccatagcgccgcattcccgctgttcaagcctgaggagatggccaacgtcatgaaggacttcgacgagcccgggttcctggctccgaccggcctcttcctcggccccaccaagttcatggtcatccagggcgagcccggcgccgtcatccgcgggaagaagggatctggatgcataaccgtgaagaagaccggtgaggcgctggtggtcggcatttacgacgagcccatgacccccgggcagtgcaacatggtggtcgagaggcttcgcgactaccttctataccaaggcctgtaaacggaattgcttcatccaaaccggaatggttaataatttggtgttgtcgttccgcc

SEQ ID NO: 95877 - DNA, 540 bp, Zea mays
gggcgttttatcatcgctagtactcgatcgcacgcacgtaccggtccggaattcccgggtcgacccacgcgtccgcccacgcgtccgtcttaccttgccctaatgcctcctcgtccgatccattcctcaaacaataaaatatccccagatagctaggctcggccgggacgtacgcatggaggtggaggaggagctgcctgctagcgctgatcttaccggtggctcaaagcaggcgaccactacgacgcccttctacctcgccttagatcacacagcttccgccaggtcgtctccaccgccggcagaggcgccgccgctgccgcgtgctgctgctgccaacagcgagaggggatccgaaataatcaaggcgaagattatgtcccacccactctatccggctgtcttgagagccttcatagactgccggaaggtcggagcgccgccagagattgtcggccggctttccgccctcgctgatgacgtcgaaatgaattcagacgacagacaagaacagcgacgagcagtagacccagagctcga

SEQ ID NO: 95878 - DNA, 541 bp, Zea mays
  unsure (1)..(541): unsure at all n locations
tgctgcntattactaatcgatagatcgtcgatcgcacgccgtaccggtccggaattcccgggtcgacccacgcgtccgacaggttttcaataacagtccagatgagacagcttatttcaggatgttactcaatcgcgagagtatcactaactcggttgccatgatccagccttccttgatatcattttcctttgattcacctccatctccggtgtttctagatgtggcatcattagcggcagatcgtatactgctacttgatgcgtactttagtgttgtcattttccatggcatgacaattgctcagtggagaaacatgggttatcagaaccaacctgagcatgagcaatttgcacaactattacaagcaccacacgaggatgcgcagatgataataaaaggtcgatttccagttccaagactagttgtctgtgaccaacatggctcacaggcaaggtttttgttggctaagctgaatccatcggccacatataactcagctcatgatgttgctccaggttccgacatcattttcaccgat

SEQ ID NO: 95879 - DNA, 564 bp, Zea mays
  unsure (1)..(564): unsure at all n locations
tgttggttctcctgatagacactcgtacgcacgcacgtaccggtccggaattcccgggtcgacccacgcgtccggcaggtcgcagctgagcagcaacaaggccggaaaggatgtcgtggcagacctacgtcgacgagcacctcatgtgcgaggtcgagggccaccaccacctcacctccgccgccatcatcggccacgacggcaccgtctgggcccagagcgccgcattcccgctgttcaagcctgaggagatggccaacgtcatgaaggacttcgacgagcccgggttcctggctccgaccggcctcttcctcggccccaccaagtacatggtcatccagggcgagcccggcgccgtcatccgcgggaagaagggatctggaggcataaccgtgaagaagaccggtgaggcgctggtggtcggcatctacgacgagcccatgacccccgggcagtgcaacatggtggtcgagaggctcggcgactacctcgtanagcagggcctgtaaacggnatngcttcagtccaatcggaatgggttaataattggtggtgtcgttccct

SEQ ID NO: 95880 - DNA, 561 bp, Zea mays
  unsure (1)..(561): unsure at all n locations
atggctataataggacgattgatcgtacgaccgtccggtccggaattcccgggtcgacccacgcgtccgaatttgacgaagagccaaattatgccaagcttatctctctttttgatggtttgattgaagcgcctgcttcgagacaaatcagaattgatggggctctcaaggttggacagaaacgtggaagattggttgcagatctagaagaagatgaacaacctaaaaagaaggttagattagggagcccagcggctcaatggatttcagtttataatgctaggcggcccatgaagcagaggtaccattacaatgtggctgactcgaggctaagccaacatatagaaaagggcaacgatgatgggctttacattagcagcgtggcttcctcggcaaacctttgggcactcatcatggacgcatgaactggtttctggtctcaggtttatgagctctcaccagttttccttcacaaggactggattatggagcantgggagaaaagctactacattacaagcaatgcttgatcatncaactggagctcaatggtgtcatgtc

SEQ ID NO: 95881 - DNA, 550 bp, Zea mays
gtagcgtattatcacgctcaggcgactaacgcacgacgtaccggtcctgaattcccgggtcgacccacgcgtccgcggacgcgtgggatcgatctcgccgaggaagacgctggctcctcgtcccacggctccggctgctcgtccccgtcggtcgaggcggtcgggatccggcgcctggaggaggccatccacggcgtcatggtgcgccgcgccgcgcccgactggctccccttcgtgccgggagggtccttctgggtgcccccgctgcgccgtccgcacggggtcgccgagctcgttggccggatcgcggctgctgggggcacctaatggggcgcctttgccgtttggtgctcgttcgaagtctgattctttatttctctttttgattaagttttcttattttcttttttgttttattttttttttgtatggatttttctttgtattgtcttatttttttagtatctttattttttttttttcatttttttttcttttttattatatttcctcatttttagtttgtatttatttattttttgtttggctg

SEQ ID NO: 95882 - DNA, 529 bp, Zea mays
  unsure (1)..(529): unsure at all n locations
ttgtattgtgcttgtcactagaaatattgtatgcatgctaccggtccggaattcccgggtcgacccacgcgtccgcccacgcgtccgcccacgcgtccgcccacgcgtccgcccacgcgtccggcagcagccaagtcgctcgagttcagatcgagcgcgcgccaagcaagtcttccggccggccgcgaagagagcaatcaagcaagacaagatggtgaagctcgccttcggaagcgtcggcgactccttcagcgtcacctccatcaaggcctacgtggccgagttcatcgccaccctcctcttcgtcttcgccggcgtcggttccgccatcgcctacgggcaactgacgaatggcggcgcgctggacccggcgggcctggtggcgatcgcgatcgcgcacgcgctggcgctgttcgtgggcgtgtccgtcgcggcgaacatctcgggcggccacctgaacccggccgtgacgttcgggctggccgtgggcggccacatcaccatcctgaccggcgttttctactgggtn

SEQ ID NO: 95883 - DNA, 529 bp, Zea mays
  unsure (1)..(529): unsure at all n locations
tatgtnactgtcatagcatgaggacgtatagaatcgctcgtccggaattcccgggtcgacccacgcgtccggacccacgcgtccgcccacgcgtccgcccacgcgtccgcccacgcgtccgttcatctcgtggagatgctgaaggaattgaaaagcttgcttctttggcaaaagaacatggaaaaaacaatgttgctttcctctgcctttttatgcttggtaaagtggaagattgcatacagttgcttgtagacagtagccgtatacctgaagctgcactaatggcgcgatcgtatcttcctagcaaagtaccagaaatagtagcaatttggagaaacgacctcagtaaaattaatccaaaagctgcagagtctctggcagatccttctgaatatccaaatttatttgaagactggcaggttgctctaactgtagaaaaaagcgttgcttctcagagggatcattatcctcctgctgaccaatacttgaatcatgctgagaagtcagacatgattcttgtggaagcttt

SEQ ID NO: 95884 - DNA, 526 bp, Zea mays
  unsure (1)..(526): unsure at all n locations
gtgtcggggtgtcactgacgtgatagtattgctgctaccggtccggaattcccgggtcgacccacgcgtccgcgccgcagccaatccctccccagcagccgtcgtcgccaccgctgcagcgcggaggcgacgccccatcgccgccaagatgcagatcttcgtgaagaccctgacggggaaaacgatcacgttggaggtggagtcctcggacaccatcgacaacgtgaaggccaagatacaggacaaggagggcatcccgccggaccagcagcggctaatcttcgccggcaagcagctcgaggacggccgcaccctcgccgactacaacatccagaaggagtccaccctccacctggtgctccgcctccgaggtggcgccaagaagcgcaagaagaagacgtacaccaagcccaagaagatcaagcacaagcacaagaaggtaaagctcgcagtgctgcagttctacaaggtggacgacgccaccggcaggtgacccgncttcgcaggagtgccccaacaccgagtg

SEQ ID NO: 95885 - DNA, 529 bp, Zea mays
  unsure (1)..(529): unsure at all n locations
acgtgagtgtcatagcattggattgtattgctcttccgcnctggncttgaattcccgggtcgacccacgcgtccggattgactcgctgtatgagggcatcgacttctactccaccatcacccgtgccagggttgaggagctcaacatggacctgttcaggaagtgcatggagcctgttgagaagtgcctgagggatgccaagatggacaagagcaccgtccatgacgttgtacttgttggtggctccactaggatccccagggtgcagcaactgctccaggacttcttcaacggcaaggagctgtgcaagaacatcaaccccgatgaggctgtcgcctatggtgctgctgtccaggctgccatcctgagcggtgagggcaatgagaaggtgcaggacctgcttctgctggacgtcacccctctgtccctgggtctggagactgctggaggagttatgacagtgctgatcccgaggaacaccaccatccncaccaagaaggagcangtattctccacctacttcgacaac

SEQ ID NO: 95886 - DNA, 521 bp, Zea mays
  unsure (1)..(521): unsure at all n locations
nggaggtgtgctatgaagggagatgactgactgctctaccggtccggaattcccgggtcgacccacgcgtccggtcctacaaggacagcactctgatcatgcagctcttgcgtgacaacttgaccctatggggttccgacaccaacgaggacggcggggatgagatcaaggaagcagctgctgcccccaaagaatccgcccccgagggccagtaagacgatccgatctccggacctgatgcgtgtctgctgatgtcggggagtttaccaggactgtgccgttcttgatttcttatagcttatcttctagtacacttcgtgttgttctcttcgtcacggcgctggcgtgccggtgcgcgtgcgccgaagctgcctgccattgccattgccattgccgctgtttttaattaagcacacactctagatgttatgcccgcatgctatgtttcgattctcaagttgataaatgatggctggatgctggttttcgtgctccaagcctgctgcttcttccagggaaaa

SEQ ID NO: 95887 - DNA, 520 bp, Zea mays
gatgggtgtaccgacgagtaggtatgcactctaccggtccggaattcccgggtcgacccacgcgtccggttcaacgagcttgttccatttaggctgacacgcaacttgcaagctttcttctcgaattttggtgttgaaggtctcattgtgtctgccatgtgctctgctgcccagtcagtggtttctcctaaacaaagccagcacatttggcatcatttggctatgtttttccgagatgaactgttatcttggtcgtggaggcggcctctgggcattccatcagtccctgtcgctgctggaatgatcaacccatcagatttccaacagaaggtggtaaacaatgtggagcatgtcatcagtcgtatcaagtcaatatcgccacattgtctggctgaggaggaggagaatgcaaccgagccacctcagtcggtacaaagaggcgtcaccgagctggtggaagcggcattgtcgtccaggaacctgtgcatgatggatccgacgtggcacccatggttctgaa

SEQ ID NO: 95888 - DNA, 518 bp, Zea mays
  unsure (1)..(518): unsure at all n locations
gtgactgtgtttactttgtangctcngatttctgctcttgaattcccgggtcggccgacgcgtacggttcaacgagcttgtgccatttaggctgacacgcaacttgcaagctttcttctcgaatttgagggttgaaagtctcagtgtgtctgccatgtgctctgctgcccagtcagtggtttctcctaaacaaagccagcacatttggcatcatttggctatgtttttccgagatgaactgttatcttggtcgtggaggcggcctctgggcattccatcagtccctgtcgctgctggaatgatcaacccatcagatttccaacagaaggtggtaaacaatgtggagcatgtcatcagtcgtatcaagtcaatatcgccacattgtctggctgacgaggaggagaatgcaaccgagccacctcagtcggtacaaagaggcgtcaccgagctggtggaagcggcattgtcgtccacgaacctgtgcatgatggatccgacgtggcacccatggttctgag

SEQ ID NO: 95889 - DNA, 536 bp, Zea mays
  unsure (1)..(536): unsure at all n locations
aatgatggggctnataactgataagaaagagtacagcactgctcgtaccggtccggaattcccgggtcgacccacgcgtccgcggacgcgtgggggaagttctgtgggtagaggactagagactgcagatcgagggtctggcagcgggccgtggcagttgggtgattacgacgaagagagatgggcctcctcgacaagctgtgggacgacaccgtcgcaggcccgcgcccggacaccgggctcggccgcctccgcaagcagcctgtgcgtcccgccgccgtcaagatcagtgatccggccggggacgctgcggcgttcgtgccgccctcgccggcttcgggtagcgaggagacgccggtgaaggtgacgcgcagcatcatgatcaagcgccccgcggggtacccgtcgtcgccgaggagcgcggcaagcacgccgncggcctcgccactggggactaccccngccatctcgccgtttgccggcgccggtggtcggttcagaaggaaatcatcgtccgacgcatacgagagggcgan

SEQ ID NO: 95890 - DNA, 535 bp, Zea mays
  unsure (1)..(535): unsure at all n locations
tggatatgcggttactactgaatgcacgatgattgcactgctctaccggtccggaattcccgggtcgacccacgcgtccgcggacgcgtgggcaagacctcctcagacccgagaagcgcatcgggcgctacctcaagaagggccgctacgcgcagcgcgtcggcagcggtgcccccgtctacctcgcggccgtcctggagtacctcgccgctgaggtcctggagctcgccggcaacgctgccaaggacaacaagaagacgcgcatcgtcccgcgccacgtgctgctggcgatccgcaacgacgaggagctcgggaagctgctgaccggcgtgaccatcgcccacggcggcgtgttgcccaacatcaacccggtcctgctgcccaagaagacggcggagaaggcgtccagcggcgggagcaaggaggccaagtcgcccaagaaggccgtcaagccccccaagaaggcataggggttggaggcggatccgattgtgtcatgtgtagggtgtaggcgggcaatgtgaatggctgggan

SEQ ID NO: 95891 - DNA, 519 bp, Zea mays
  unsure (1)..(519): unsure at all n locations
tgaatggctnctacaagccaggacggaaagtatcaccggtccggaattcccgggtcgacccacgcgtccgaattactcgtagatggtccctatggtgcccctgcgcaggattttagaaactacgacgttgtacttctcgtcggcctcggaatcggggcaacaccgttcataagcattctacgggatctgcttaataacattaagatagctgacgagctgatggacttggcaatggagaccagcaggtctgaagacagcgccaacagctttagcgtctcaacggcgagtagcaaccggaagagagcatacagaacaagccgtgcacatttctactgggtcacccgagaagccggatcctttgaatggttcaaaggggtgatgaatgaggttgcagaaatggacaagaagggtgtcatagagctgcacaattacctcactagcgtttacgaggaacgcgacgcacggacaactctgctgtccatggtccaagctctgaaccacgccaagcacggcgtcgat

SEQ ID NO: 95892 - DNA, 525 bp, Zea mays
  unsure (1)..(525): unsure at all n locations
cactggggtattcgggcggagtaaggaatgcatgtaccggtccggaattcccgggtcgacccacgcgtccgcactctccccagctcgagtaaccaccgcgagaaccaatcaccaagcaaaagcccgagaaggaaagaacaaacaggagacagatggcggctgcagcgaaggcgtcgtggatggtggcgatgagcgtcggggccgtggaggcgctcaaggaccaggcgggcctctgccgctggaactacgcgctgcgctccgtccaccgcgccgncaaggccaacgctcccagcttcgcgcaggccaggaaaaagctggcgccgcccgccgcggacaaggccgccgcggaggaggggatgaggaccgtcatgtacctcagctgctggggccccaactagctagggcctctgctagtttcggcttcctgcaaccgtaccgagctcggcttcaaatctgatccatgactggttgccttgccgacccactgtaacataggagtatagcaccacgatgatgatgatgaaa

SEQ ID NO: 95893 - DNA, 527 bp, Zea mays
  unsure (1)..(527): unsure at all n locations
agtctggtttgtatagagtagatggatgcccgtaccggtccggaattcccgggtcgacccacgcgtccgcccacgcgtccgctcagcttccaccaaatgttcgagggcatgggtctaggcggctgcatcgttcaggccaagttcaagctgcggtcgatcgtgacgatggtgctcttcttctgcctgacgacgccggtgggcatcgtggtgggcgtcgggatctcatcggtgtacgacgaggacagccccacggcgctggtcgtggagggcgtgctcaactcggtggcggcggggatcctggtgtacatggcgctggtggacctgctcgccgaggacttcatgaaccccagggtgcagagccggggcaagctgcagctcggcatcaacgccttcatgctcgtcggtgccggcctcatgtccatgctggccaagtgggcctagtttactagccagccactttttgctctctgccctctcgattccagtttttntttttgaggtcagntgcttgtaaatactactggtat

SEQ ID NO: 95894 - DNA, 533 bp, Zea mays
  unsure (1)..(533): unsure at all n locations
tggtagggtgcttgtcatgactgtcctcgattgacgtaccggtccggaattcccgggtcgacccacgcgtccgcccacgcgtccgcccacgcgtccggccgggaagtggcagcctcgctgcaccgatcgcttgccaagtttatcgtgcctgacaacccagagaaaatcctgtcgcttgtcgctgccaaggctagccatcatagagctcttggctctgcggacctcacatgtgccctgcaggcatgcagggggcgaggcaaccgatggccgcttgtgctggagatccacgcgacatcagtcgtgcgtgggcttggggctgaccgccttataggcaacttgctgatcgatctgtatgcaaagaatgggctcgtgtggcaagcacggcaagtattcaaggagctttcttccagggaccatgtctcatgggttgccatgctgtcagggtatgcacagagtggtcttggaaaaggaagctttcaggctttacagccagatgcattggactgcttgtattcctacgccatatngtctgg

SEQ ID NO: 95895 - DNA, 527 bp, Zea mays
  unsure (1)..(527): unsure at all n locations
aggatgggnttncaatcgacagaaagtacatggaccgacgtaccggtccggaattcccgggtcgacccacgcgtccgcggacgcgtgggcggacgcgtgggcggacgcgtgggcggacgcgtgggcggacgcgtggggccgcatccaccgcatgctcaagctgggcctgagcatcgacgaggacgaggaggctccggaggctgacaccgacatgccccctctggaggatgacgctggcgagagcaagatggaggaggtcgactaagctgggtttattcttatggaggaaagagagagaacatcgggtctgttctgtgggtcttaccacttatgctattatgcaatctgttgttggtatgctagtgctactattgtctctgctgtcttctagttaattttggtgttgttttgcgtggtcagtttctcatcgcatcagtggtagaaaacattcacctgtgggactaanaaaatgtttgactgggaatnggaacgcaatcggcaggtcttctgttaaaaaaaaaaaaaaa

SEQ ID NO: 95896 - DNA, 608 bp, Zea mays
  unsure (1)..(608): unsure at all n locations
nggtagtggggttactattgttagcctcactacggtactgnctcgtaccggtccggaattncccgggntcgactccacgccgtctcgtaaatattannngaaacttcacttggtgacccatcactcccgcttggctttcacganntagtgaagaattaccaaggttannattgagcccagtatctgcctcnnaacacacatgcnntcctactcnnacaaggacctgnngtcgctggaacctggagngnnaagttttttcacttttgatcganngatggagatnacttaataagtaccttcaagatatttaaaaataatctgcattaacaagaaatgctatnntatggcacggttcaagggttgacccgaattttgtgggaaattcttaagtcaaagggctttaagaattgcacctnctgaagggcacctgttactggctatantgttcggcaaaaggcctctactttgcaagatctagtaaagcaagagcgcacaatacttgttatgtggataggaataatcctgtaggtttgatgcttctttctgaggttgctttangagacatgtatgaactaaagaagccacgtncatggacaaacctncaagag

SEQ ID NO: 95897 - DNA, 517 bp, Zea mays
  unsure (1)..(517): unsure at all n locations
gagggtcgtgaccagacagacgnacgtatcactggtccggaattcccgggccgaccgacgcgtccgtccattcaaggtaataaagtcaataaaattgatgtagtttatactccatggtacaatttgaaggagacgccttcaatggatgtgggccaagttggttttcacaaccctaaattggttcgcactattaaagtggaaaagaggatcaatgagattgtgaaccgcttgaataagacaaaggtggaaccaaaaacctgatttaaaggctgaaagagaggctattagtgctgctgaaaaggcagatagaaaggcacagcttagagacaagaaacgtagggaagagattgagaggcttgagaaagagaagcacgctgatatcaggagctacaagggtctaactggccaagagaagatgacttccaataagcaaatcgcttctggcatcaagaccctgcaagaacttgactaagactttatgtgatatgcggacattataaatgccatgctgactatg

SEQ ID NO: 95898 - DNA, 522 bp, Zea mays
actggttagttcgggggaagaaggaatgacttaccggtccggaattcccgggtcgacccacgcgtccgggaacccatggcagaagacattggttcctccaagcaagctcctcaggcagatgccagtgcaatggccatcgatgaaccaagcaatgtcaagaatgaacctgagagctcaactaaattgcaaggccaagcagctgcgtaccacaagccatagctgcgaccatcaagagttgctgggtttctgctaggcaacttcctgcttgatttggacagtccagaaaacagaagtgaatccgcaatacgtccctgccatttcaaatttgacttggttacacctatctgtgacaatgttaatgtaatgagaacccattgcactagtgaaagtcccaagtgtccacctgggattgcttgccgttgaaagagacgatagtctgatgacccatgtatacatgaagcccatgatctcaagtgtacagtcattagccaatacaaatatgcagtggactaaaaaaaaaaa

SEQ ID NO: 95899 - DNA, 533 bp, Zea mays
  unsure (1)..(533): unsure at all n locations
tggagggtgctagtccacctgagacngcatgacgtaccggtccggaattcccgggtcgacccacgcgtccgcccacgcgtccgcggacgcgtgggcagtagcaagagggatagagcaaggccacacacacgcacgcaccactagtaggctagcctagccttttagtcgtcgaggaggagcaagaagggcgcgcacgcaagcaggcaagcaagaagagagccgatcgaccgagagctagcacgcgatggcgaggtcttccaagatgatggtggcggcagctctgctggccttggccctggccgtgtcgaccgccgaggcgaggaacatcaagaccacgacgacggagaagaaggacgacgcggtggtgcagccgcagaccttcccgcccttcgaccgcctcggcggcggcgcgtccccggcgttcggcggcctccccggcggcagcattcccgggttcagcatgcccggcagcggcagcagcctacccgggttcagcttggcccgcagcggcagcatgcccctcttcggggcgn

SEQ ID NO: 95900 - DNA, 530 bp, Zea mays
  unsure (1)..(530): unsure at all n locations
aggatgggctngcaactcacgacnctcgatggactgcccgtaccggtccggaattcccgggtcgacccacgcgtccgcggacgcgtgggctcaaactcggtctgagcatcgatgaggacgagcctgttgaggcagaggctgagatgcctcagcttgaggacgacgctggtgaaagcaagatggaggaggtcgactaagtgtcgcatcgcatgcttgccgtttatcttatccctagctaagctacctgtgatagcttaattttcactattgttcgaggtttttggcacgttatcggttgtcctgctggccaggctataagtctggtttatctgttatgtttaccctttttaacagtttgtcgttattattcgtaatggtaaaaatgtagtacatgttttgcccaaaaaaaaaaaaaaaaaaaagggcggccgctctagaggatccaagcttacgtacgcgtgcatgcgacgtcatagctcttctatagtgtcacctaaattcaattcactggcccgtcgttttacaacgtn

SEQ ID NO: 95901 - DNA, 536 bp, Zea mays
  unsure (1)..(536): unsure at all n locations
tggaggcntgttcgtttgtcagtcactcgatgcgactgacgtaccggtccggaattcccgggtcgacccacgcgtccgcggacgcgtgggctcgcggtcgcggtagccggcggcggcggaggaggaaagcaggcaggccatggcgtcgtcgtcgtcgaccccggcggccgtccgcgagatgcagaaggatctcgaggtccaggccaacgccctcagcaagatccagaaagacatcgccaagaaccaccaggtccgcaagcagtacaccatccaggtcggcgagaacgagctcgtcctcaaggagctggagctgctcagcgatggggccaacgtgtacaagctcatcggacctgtgctggtcaagcaggacctcgcggaggccaaggccaacgtcaagaagcgcatcgagtacatctccgcagagctgaagcggatggatcgggcgctcaaagacttggaggaaaagcaaaacagcaagaaagaatccatattcagttgcagcagaggatgcaggctgtacaagctaaggcttanan

SEQ ID NO: 95902 - DNA, 684 bp, Zea mays
  unsure (1)..(684): unsure at all n locations
cgtcggtgnctagtctcgtatgatgactgcactgcctcgtaccggtctcggaatnnntcccgggtcggacccacgccgnntccgcttctggttttggttttccctccacccaaacctctttcaannttccaccatttagacgacnngacgaagagcgagcgcnncgataagaaatctgcgcctgtgcacaanncgacgaagcnggaagggggtacccgtacctnntggagaatcccaagnnnaagctaannngaaatgggtcagccnnncagtttgcnnatccgaagcatggggcttgctatgnnntcaactgcnnaactattgggcaacactttatcctgnngtggtgaaatgggttgccaagcaagtttgttccctaaccaaacgtggtggaactggtntaaaatgggtggtngcatttgtaccanatgggtntgcttgtcncaatgggggatctcnaagtccctntcncaatcaagcaagggcacccgcacttggtcccaagaacaacccaaggttgtcccagaaacaagagggggtttcaaatataaaccaaatttcggggaagcttacganngcaagcctcgtcaaagaaaaatctacgaaaacgccctcccnatgtattccaggggtccaaaccaaatcggcccacaaagtggccaccaanntacgacccttaggagn

SEQ ID NO: 95903 - DNA, 537 bp, Zea mays
  unsure (1)..(537): unsure at all n locations
tggtggcnngttactcctgtccagtcggtcgatggcacgacgtaccggtccggaattcccgggtcgacccacgcgtccgcccacgcgtccgcccaccgtccgcccacgcgtccggccgactacaacatccagaaggagagcaccctccacctggtgctccgcttgcgaggtggtatgcagatctttgtgaagaccttgactggcaagaccataaccctggaggttgagagctccgacaccatcgacaacgtgaaggcgaagatccaggacaaagagggcatccccccagaccagcagcgtctgatcttcgccggcaagcagctggaggatggccgcaccctagcagactacaacatccagaaggagagcactctccacctggtgctccgcctccgcggtggtcagtaagccatggttcatttaagctgctgctgtacctgggtatctgcgtcgtctggtgccctctggtgtacctctatatggatgtcgtcgtctaataaacatctgtggttngtgtgtcatgaatcgtggttgtgc

SEQ ID NO: 95904 - DNA, 531 bp, Zea mays
  unsure (1)..(531): unsure at all n locations
tgtttgggntactactgccaggtctcgtccgactgacgtaccggtccggaattcccgggtcgacccacgcgtccggttatatttgatgaggaagctgtcgagtcaaaactgctaaaagcacggatgaaaaggcggcaaaaatacattgatcagttccatatgttatacgatgacttcaacatcaccaagcttcccttgctttcagaagaggtttgtggtgttcaagctctccaaaacttttcccagcacttccttacaccatacaagtctactcttaaaaggggcaccgtcgaggagctcgaacagagaataactatattaaaatctgcactgcaagaagctgagacagagttagatagggttaggaaagggaagcagtcagtgtgattttttttccacaggtcaagtgtgtaaaaccagagagacgatcaattttttcgtgtcattacactcttgttgatttcactatcatgtttcctcatcgaggagtttagacttngtatagctaatcgcagagaagtgtttgatcaa

SEQ ID NO: 95905 - DNA, 523 bp, Zea mays
  unsure (1)..(523): unsure at all n locations
gtgagtgtataagggggagaacgtattgatgctaccggtccggaattcccgggtcgacccacgcgtccggttattcgggacacgttacttgttggattgacagggtactccaagcagggacaacctgtgtatgcatttggtgtgggtcttagtacttttgacaaggcctcggtgaattactatgtgcaatcacacatacagatgaatgaatatcgagatcgtgttgtcctgccggctgcatcaaagaagtttgggagacagattaatacctgcttgaaggttatggatatgactggcctcaagctgtctgcactgagccaaaataaaaatgttgccgatgattactactgttgatgaccttaattatcctgagaaaacggaaacttattacattggtaatgctccataatgtttttcagcgtggtggaaaggtgtgaagccactcttacaagaaagaacttaaaagaagatccaagtnctgtatggctctgggagggatgagttactgaaggtcatggactac

SEQ ID NO: 95906 - DNA, 520 bp, Zea mays
  unsure (1)..(520): unsure at all n locations
actgggtatggttcagtntcancgtaggagtgtacggtccggaattcccgggtcgacccacgcgtccgtttacgcgtgaaaaaaatggcatttaaatgctgcagaactgcaggccgggacaacctaggtgtgcatttggcgtcgggctgagtacttatgacaaggcctcggtgaatcactatgtgcattcacacatacagatgaatgaatatcgagattgggtagacctgtcggctgcatcaatgaagtttgctagacagattaatacctgcttgaacgttatggatatgactggactcaagctgtatgcactgagccaaataaagatgctgacgatgattactactgacgatgacctgtattatcctgagaaaacggaaactgattacattgctaatgctccatatgtattttcagcgtgttggaatgttgtgaagccactcttacaagaaagaacctaaaagaacatccaagtcctgtatggcttttggacggatgagttactgaatgttatggactt

SEQ ID NO: 95907 - DNA, 534 bp, Zea mays
tgatggggtatctcgatgtaagatggattgcacctaccggtccggaattcccgggtcgacccacgcgtccgagatccggagcagccgcagtcccaccgaccccgccgccggtcgccctccatctcctcgccgctgcctctcgtttctcttttcaataatcaagatgagccgtggtggtagtgccggtggtggtcaaagttctctgggttatctctttggaagcggtgagccccccaaaccagcagtggcaccagctgcaagtgctccacctgttgagaaaccatctgctgcaaagactgatgcggccaagcaggttgctgctggggttaccagccaaaccaataactaccacagggctgatggtcagaacactggcaacttccttacggaccgtccttcaaccaaggtccacgctgctcctggcggtggctcttccctgggctacctgttcggtggcaactgatgcccgtgctggtgcgctcaccaaagttatccctccctgcctgctgcgtgctatgtctgaatcgtgaacaa

SEQ ID NO: 95908 - DNA, 528 bp, Zea mays
  unsure (1)..(528): unsure at all n locations
agtggcgtgnttgtcctccgatagtaagttcgatctactggtccggaattcccgggtcgacccacgcgtccggatcattcaggatgggctggtttttaggcaaaacttctggattcggtcctatgagattggtgccgatcgtacggcttctatagagacattaatgaatcatttacaggaaacagctcttaatcatgtgaaaacagctggccttcttggagatggttttggcgccacaccagagatgagcaaacgaaacttgatctgggttgtcagcaaaattcagcttcttgttgagcaatacccctcatggggagatactgttcaagtggacacatgggtagctgctgctgggaaaaatggcatgcgtcgagattggcatgttcgtgacgaanactctggacgcacaatcttgagagctacaagtgtttgggtgatgatgaantagaacactagaanggctttcgaaaatgccggacgaagttagggcccagataggcccatatttaaatggncggtcagccataa

SEQ ID NO: 95909 - DNA, 533 bp, Zea mays
  unsure (1)..(533): unsure at all n locations
tgtgatgtgnttctcatgaaagacgagtacngtactgctcgtaccggtccggaattcccgggtcgacccacgcgtccgcccacgcgtccgcccacgcgtccgcggacgcgtgggcgcgtgcgaaccaagcagaccccggcagaagaagcgaagtcgtcgccggagcaggaggaagagcgagcagcaagatgtcgtggcaggcgtacgtcgatgaccacctgctgtgcgacatcgaaggccagcacctcagcgccgccgccatcgtcggccacgacggcagcgtctgggcacagtccgagaacttccccgagttaaagcctgaggaggttgctgggatgataaaggactttgatgaacctggaactcttgcaccaactggtctttttgttggaggtacgaagtacatggtgatccaaggtgaacctggagttgtcatccgaggaaagaagggcactggaggcattactatcaagaaaactggcatgtccttgattatcggtatctatgatgagccaatgacttcagggcaatgc

SEQ ID NO: 95910 - DNA, 533 bp, Zea mays
  unsure (1)..(533): unsure at all n locations
ngtaggggnnnaaatgaatggaattgtattggatcgctcgtaccggaatggccgggtcgacccacgcgtccgcatttatggatatgaagttgtccctgaagccattgaagatgcgcgaaagaatgccaagttgaacggtatcaacaatgcaacatttgttcaaggggacctcaataaaatcaatgaatcattcgggaaggaatttccaaagcctgacataatcatctcagatcctaatcgccctgggatgcacatgaagttaatcaagtggctgttagaagttaaagctcctcgaatagtgtatgtctcatgtaatccagctacttgtgctcgggatttggactacctatgtcatggcgtggaggagaaagatttgagaggattctatgaactgaagagtgtaattcctgtggatatgtttcctcatactcctcatattgagtgtgtatgcttattggagctgcgttgattttcagttttggtcaggtaaacccactggagccttgtttgggtgacgagtattcacctcaatc

SEQ ID NO: 95911 - DNA, 529 bp, Zea mays
  unsure (1)..(529): unsure at all n locations
tgtgaatggnntgtccctcaccgtnaagtacagnactgacgtaccggtccggaattcccgggtcgacccacgcgtccggcaaggccacacacacacacacaccactagtaggctagcctagccttttagtcggggaggaggagcaagaagggcgcgcacgcaagcaggcaagcaagaagagagccgatcgaccgagagctagcacgcgatggcgaggtcttccaagatgatggtggcggcagctctgctggccttggccctggccgtgtcgaccgccgaggcgaggaacatcaagaccacgacgacggagaagaaggacgacgcggtggtgcagccgcagaccttcccgcccttcgaccgcctcggcggcggcgcgtccccggcgttcggcggcctccccggcggcagcattcccgggttcagcatgcccggcagcggcagcagcctacccgggttcagcttgcccggcagcggcagcatgcccctcttcggcggcggctcccccggcttcagcggcttcggcgcatgc

SEQ ID NO: 95912 - DNA, 537 bp, Zea mays
  unsure (1)..(537): unsure at all n locations
ngggtggtttgacatcatagaaaaatgtattgatcgaccgtaccggtccggaattcccgggtcgacccacgcgtccgcccacgcgtccgcccacgcgtccgcccacgcgtccgcccacgcgtccgcgtcgtcgggggaattgagtgtgagagctcgaaaaaacccaggggatcggccggaccagcagcgagcgagcgcgagctctgcgtgcgtgtgtgtgtctgctctagattagatcacctccatcgtcaataattgcaggcagatccatagtctgctggtggcgagacaaagcaacggatcgtcgtcgatccggagagcggaaagcgcgcagatcgcgacggccatggggcgcggcaaggtggtgctgcagcggatcgagaacaagatcagccgccaggtcaccttcgccaagcgccggaacggcctgctcaagaaggcgtacgagctctccatcctctgcgacgccgaggtcgcgctcgtcctcttctcccacgccggccggctctaccagttctcatcctccttcgatctgcc

SEQ ID NO: 95913 - DNA, 532 bp, Zea mays
  unsure (1)..(532): unsure at all n locations
tttggggnnnaacggaataccnccatcgcatttcccnnncggnntggaattcccgggtcgacccacgcgtccgcccacgcgtccgcccacgcgtccgcccacgcgtccgcttccatgtcctaagagcatttggagacgcagaaattactcatgttgacgatacagtagatcctgttagagacatggaaactattagtgaagagctcagactaaaggatatagagttcatgaaaaagaaacttgaggaccttgataagtcaatgaagaggagcaatgataagctgctcaaaattgagcatgaattatgtgagagggtcataggccatcttgaggaagggaaagatgtccgtttaggggattggaaagctgctgacattgagatcttgaatacattccagctactttcagctaagccagttgtctatttggtgaatatgagcgagaaggacttccagagaaaaaagaacaagtttctacccaagatacatgcttgggtgcaggaacatggtggtgaaaccatacttcctttcaa

SEQ ID NO: 95914 - DNA, 527 bp, Zea mays
tcgtgcttgtgtacgtatcagacaatgactcgcacgacgtaccggaattcccgggtcgacccacgcgtccgctcaggcaattttgggagggacagttcaagtcccaactctcagtggagacgttgttctagaggtcaagcccggtactcaacctggtcagaaggtagttctgagaggaaaagggatcaagacaagaaactcaccgtactacggagatcaatatgtccatttcaatgtcaacatccccgaaaatttgacgtctagacagcgggagctgatcgaggaattcgcgaaggaggagcaaggcgaagacgagaaggacgccaaggcagcagctggagcatcggggggatagccggttttaggagccacagtagtgccttttagctggtatttataccgtgaccatagacctgtctcaaattcgcagcggaaaaaatatatagataggtctttggttcggattttgtagcttggataaatggataatacgtctaaaactggttttctgtcttaaaaaaaaaaaa

SEQ ID NO: 95915 - DNA, 531 bp, Zea mays
  unsure (1)..(531): unsure at all n locations
nggcggggnnnnncctgaacgaactctgtantggaccgctcgtaccggaattcccgggtcgacccacgcgtccgcgcagtagcagcagccgccgccgccgccgcccagccgcaggaaacaggaggaagatgccggcggggcacgggcttcggtcgcggacccgcgacctgttcgcgcggccgttccgcaagaagggttacatcccgctcaccacgtacctgcgcacctacaagatcggcgactacgtcgacgtcaaggtgaacggcgccgtgcacaagggcatgccgcacaagttctaccacggccgcaccggtcgcgtctggaacgtcaccaagcgcgccatcggcgttgagatcaacaagcaggttaatggccgcatcatcaagaagcgtatccatgtccgtgtggagcatgtgcagcccttccgttgcacagaggagttccgcttgaggaaagcccagaacgatcagctgaaagctgatgccaaggaccgtggtgaggtgatcagcaccaagaggcagcctgtgggac

SEQ ID NO: 95916 - DNA, 550 bp, Zea mays
  unsure (1)..(550): unsure at all n locations
nnnnnnnggtctacggggnnnntacgagtcttactgcaactctcacngnncctgaattcccgggtcgacccacgcgtccgcggtacaagagtggctgcatcagcggcttcgatttctcatggttcagagaggaaagcctggctcatccttgcatgggtcagcaccgtggctgggaaagcctggctcatccttgcatgggtcagcaccgtggctgggaacctcaccctcctaggctctgcggcgaatctgattgtctgcgagcaggccaggcgggcccagttcttcggctacaacctcaccttctggagccacctccgattcggggtcccgtcgaccatcatcgtcacggcgattggtttgctcatcgtcatcagttactgaaacagctgaaggcagaagagcgtagtgtaagagaagcagaatggataaaaatccttccaataagaagtacatgtaaattaggcttgccctataactcaagtgtgtatcggtacgttatgtctccgtctgtgctcttgctcgtgagcaagcagcacatggctgaccgtgt

SEQ ID NO: 95917 - DNA, 536 bp, Zea mays
gaatggtcttatgaaggaaggaatgtgatgacttaccggtccggaattcccgggtcgacccacgcgtccgaccaatttgatgaggcactcctttgttctcatgaaggtgcttcaggttgccacttacatactgtggaagaatgtaccccagggagctgcgactacttgctacgtaggactgagccctcaactcaagggagtgacaggaaagtactttgctgactgcaacgtggagaagacgagcaaactggcgaggagcgaggagttggcgaagcagctctgggacttcagcgaggagctgatcaagtctgcgaagtgagagccgaaagagctggatcagagaaaatgttgtggtcctgcttggcatctagtggtacaagtgatgactgattagtatatagcacggaagaggaacctgggcgatggctggacctcatggtgttcaggaataaaatctgcttgctttcgtacattaattagtcccgtgtggcatacatcaatttgtagtgctgtcaatatctgttcaatatacgtgc

SEQ ID NO: 95918 - DNA, 520 bp, Zea mays
  unsure (1)..(520): unsure at all n locations
aacggggntnnaacgatcagcatatgcacgnatcgacgtaccggtccggaattcccgggtcgacccacgcgtccggtcggggagttcgggggcaacgactacaacgcgccgctcttctccggcgtcccatggtctgatgtcaagacttacgtgccccttgttgcaaaggctatcgccaatggcgttgagaaactgatcgagcttggggcaacagacctcctggtgcctggcgttctcccaattggctgcttcccgttgtacctgacgctgtacaacaccagcagcaaagcagactacaacgcccggaccgggtgccttcggaggtacaaccgnctggccttccaccacaacagggagctgaagcagcagcttgacgagcttcagaagaagtaccccaagacgaagatcatgtatgggagatacttcaaggctgcactgcagtttgtcgtcaaccctggaaaattggttttagcacgggcttgcangcgtgctgcngccccaggagggcaggcaactacaa

SEQ ID NO: 95919 - DNA, 523 bp, Zea mays
gatgggtgttaacagaaagcgactacggactgacgtaccggtccggaattcccgggtcgacccacgcgtccgcccacgcgtccgtccacgcgttcggccacgcgtccgatgaagagggctcacttaggagtggcaagagaaagaatgctcagcaaactaagactaaaaaaacaaaggatgctggaacaaaaactggtgcagaccaagcagggaatggagatgctgaggatgatgtgcaagataaactcacagggaactctgtctcccagaggttaccattaatatttccagataaagttcaacgttcaaaggcattgattgaatgtgatggtgactcgatagatttaagtggagatattggtgcggttgggaggatagtagtttcaaatggtcctactgcaaaacaggatttggtgttggacctgaaaggaacaatatacaaaacaactatagttccatccaggacattttgtgttgtgagtgtgggacaatcagaagcaaagatcgaagctattatgaatga

SEQ ID NO: 95920 - DNA, 557 bp, Zea mays
  unsure (1)..(557): unsure at all n locations
ggggnnnnggggtgaggggcttgttacgaaggtacagggagacgagatatacttctccggaattcccgggtcgacccacgcgtccgcaatcagtcagtcacagctcacagcaaacaccgcgaagccgcccccgctcccaaacccgaccgagcaaagcgcaaagccccccaaccgcggatcaatccgcagcatcgatggcgcccaaggcggagaaaaagccggcggcgaagaagcccgcggaggaggagcccgcgaccgagaaggcggagaaggctccggcagggaagaagccgaaggcggagaaacgcctccccgcgggcaagtccggtgccggcgagggcaagaagggcaagaagaaagccaagaagagcgtggagacctacaagatctacatcttcaaggtgctcaagcaggtgcaccccgacatcggcatctcgtccaaggccatgtccatcatgaattccttcatcaacgacatcttcgagaagctcgccgcngaggccgncaaagctcgccgctacaacaggaagcccaccatcaccttccgcgagatccaa

SEQ ID NO: 95921 - DNA, 540 bp, Zea mays
  unsure (1)..(540): unsure at all n locations
taagtnnntnntatagcagggaatagtactgcttcaccggtccggaattcccgggtcgacccacgcgtccgcgcacggagaggtacgttcaggagacatcttcgagaagctgaaatggctcctaaagctgcggctggcaagaagggtgatgccaagacccaggccttgaaggttgccaaggctgtgaagtctggggcagcctagaagaagaccaagacgatccgcacgtgtgtgacatttcaccgacccacgaccctgaagaaggctagggaccccaagtacccacgaatcagctctaccggaaggaacaagcttgatcagtaccatattctcaagtacccccttaccacagaatcagcgatgaataagatcgaagataacaacactgtggtcttcattgctgaccttaaggcagacatgaagaagatcaaggctgacgtcaagaagatgtatgacatccatgcaaagaaagtcaacaccttgatcaggcctgatgggaagaaagaaggcttacgttgaagctgactgccgactatgata

SEQ ID NO: 95922 - DNA, 532 bp, Zea mays
  unsure (1)..(532): unsure at all n locations
tcgtnctgctagggaggagaaggagacgatgcaccggtccggaattcccgggtcgacccacgcgtccgcccacgcgtccgcccacgcgtccgaaggaattggccttaaaccttgaagttggtcctatgagcatgaccaagtggcagttgtttttacagattgagcagtccttccaggttcatcgtagttatggaagtatgcttgaaggcgaggctgatgaactcaagagggttttccttgaaggaaatccttatcttcttggattgaccatgattgtttctctattacactctctgtttgatttcctggccttcaaaaatgatattcagttctggaacaagaacaagtccatggaaggtctatcggcaaaatctgtggttctgaattttgtgtgtcaactaattgttttcctgtaccttcttgacaatgacacttcatggatgatccttgctagctctggaattggtgtttgcattgagttttggaagatcggaaaggcgatgcatattgaagtcgatagaagtggaaaaaa

SEQ ID NO: 95923 - DNA, 524 bp, Zea mays
  unsure (1)..(524): unsure at all n locations
actggtnttattgaaggggctatgatagcaccgctctaccggtccggaattcccgggtcgacccacgcgtccgcccacgcgtccgggaagagaatcaagctcagtgctgagaaggctatcttcatatttgtgaagaacacccttccaccaacagctgctctgatgtcttcaatctatgaagagaacaaggacgaggatgggttcctctacatgacttacagtggtgagaacaccttcggactgctctagatggctcaccgcaatcgggtcgggtagccttgcccatgcctcctgtaaataagacctgccaagcaactgtgtatattctggtttcgtcgttgcaagtggttgcgctctactgctaaagcctacctatcagttgtggagttgtcgtcgatgttatggacacacttaatcaagtttattaattgactggaccaaaaaaaaaaaaaaagggcggccgctctagaggatccaagcttacgtacgcgtgcatgcgacgtcatagctcttctatagtgtca

SEQ ID NO: 95924 - DNA, 548 bp, Zea mays
  unsure (1)..(548): unsure at all n locations
ggtatttggctagcgtgctgataagaacgggaagtattgctgcaccggtccggaattcccgggtcgacccacgcgtccgcccacgcgtccggcctgcagctggggttagctgcaagggttgggagccatggggaggggtcgggtggagctcaagcggatcgagaacaagatcaaccgccaggtcaccttcgccaagcgccgcaacggcctgctcaagaaggcgtacgagctctccgtgctctgcgacgccgaagtcgcgctcatcatcttctccaaccgcggcaagctctacgagttctgcagcggacagagcatcaccaaaacacttgagaggtatgaaaaaaacagttatggaggaccagatactgctgtacagaacaaggagaacgagttagtccagagcagtcgtaatgagtacctcaagctgaaagcgaaggtggataatttacagaggactcagaggaatttgcttggtgaagatctggggtcacttggtgtcaaagagcttgagcagcttgagaagcaacttgattcatncttaaggcacn

SEQ ID NO: 95925 - DNA, 551 bp, Zea mays
gggtttttttgcgaaacgtggttgatacggggggagaggggaaggtaatactcgtccggaattcccgggtcgacccacgcgtccgcggacgcgtgggctcccccacccgtccatcgccccctccctccggtctgcgctcccacaggctcgcccctgcgcccccgccgattcgcgtcgccctttgttggaaggaacgatggagcagaccttcatcatgatcaagcccgacggcgtccagcggggcctgatcggggacatcatcagtcgcttcgagaagaaagggttctacctcaagggtaagtgcgtttcattttgttctcgaattgattgctggaacacgtactctgtttaaatttcctagctatacgcatgaacttctctgctgttgaggcaagatttgatgtgcagattctggtgatatcttagaattgtttaatctatgtatacgttcggttgcgtgtgatcaccatctgaaaaaggatgttggtcgtggaagcaggaatattgcgtggagattagatttgattgaaaaccattatcttgatgtcact

SEQ ID NO: 95926 - DNA, 538 bp, Zea mays
  unsure (1)..(538): unsure at all n locations
ttggtnctatgctaagtccccacgtangtactgtcgtaccggtccggaattcccgggtcgacccactcgtccgcccactctccgaaggactctttgtgaatacaatgacccaatggatgtgttggtcctgatgcatgagcctgttgttcctggttcgttcctgagagctagagcaattggccttatgcccatgattgaccagggtgaaaaggatgacaagataatagcagtatgtgctgactatcctgaataccgtcactacaacgacatcagcgagctgtctcctcaccgcctgcaagagatcaagcgcttctttgaagattacaagaaaaacgagaacaaagaagtcgcagttgatgcattcttgcccgcgacaacagctcaagaagccattcagtactccatggacctgtatgcccagtatattttgcaaagcttgaagcagtagattgcaagcaacaatttatctatcatgcgtcttggatcggggcgtgattttaataagccgaatcgcttgctatattgcgaaccctgtaan

SEQ ID NO: 95927 - DNA, 535 bp, Zea mays
  unsure (1)..(535): unsure at all n locations
ngtaaggcttggtagacgggagggtaagtaatgctctaccggtccggaattcccgggtcgacccacgcgtccggaaaggtggccttataatgtttgatgtgacagcagattatgtcacctaccatttgattgagttacctccagtaatcactttaggggtttttggaggaatactggggagtttgtacaactttttcctggacaaggttctccgtctctacaaccttatcaacgagaaaggaaaagcttacaaactactactcgctgcaacagtcactgtttgtacatcatgttgtctatttggcttgccatggattgctgcttgcaaaccttgtccaactgacactagagaagcttgtccatcaatagtccgttctggtaatttcaagaaattccaatgtgcaacagatgaatacaatgatttggctagcctattcttcaacacaaatgatgacactattagaaacctctacagtgctggcactgatgatgaattccacatttcgtccatccttgtgttctttattgcatcgta

SEQ ID NO: 95928 - DNA, 518 bp, Zea mays
  unsure (1)..(518): unsure at all n locations
ggagtggctatacgggagtgtattgttgaccnnccnnnncggnccggaattcccgggaaaagatttagagaataaccagaggaatgttgatggagacacttctgcagcacctggagatggatgggtgcttgactcggcgtcaggatattaccatgacaaatctactggactttactacgattcaaactctggcttctattattctgacagtttaggcaagtgggttacccaagaagaggcgtacaagtccgtgcaagcttccaaatcagacgctggccaatcctcagcttcacaaacaaaagctcctgctgccgcagaaacagctgtccccgcgattaaaggaggtgcagctccaggccgggtggtgacgaaaccgttgaacccaatgagaccgattaagggcactcctgctccgtctgctgttgctgttaacaagaggaagagggatgacggcaagcccaaggcggtctccaaggaggaggaagcggncctaaagcgcgngaagcagcaggaagaga

SEQ ID NO: 95929 - DNA, 657 bp, Zea mays
  unsure (1)..(657): unsure at all n locations
ttggttngtttacgcaagcactactactgtaccgcctgtactcggtccggaattncccgggtacgacgccacagcgtaccggcacagttcttatgtatcgagaaggcggtcatttcgagtcctatgtgaaatatggatacgtctgttgacgatagaaatcacctacgtgccttacgattctatttagcgatctaggaatacggtgtaatcagtacctgcttgttgacatatcgtatgcctatcgcttatgttgggtacccatgatgcaccgtctattgggcattctatgtgaactctgagaagatctggattcgtacattcttctctgagttttgatagtcgatctgcgatacgatatagaggtgtatctacgtgataagtgcagatatcgaacgctagttctagatgtcatgacgtcagggcgctaatcatgtactactggacccgatccagatcggaacatgacttcgcagaggacttctcacacgtattcgtacagtagtagtgtcncaatagtnnatcgacatgtacggatangagtgatacagtactntgcatgggagactaccgnacttgcacttctttcagagaatgcacgttcgatgagtcgataaatgcgtcagacgaccgccgaagacttcannaaatcatgcgtgc

SEQ ID NO: 95930 - DNA, 524 bp, Zea mays
  unsure (1)..(524): unsure at all n locations
tgggngtgtgtacgatagagccactacggaccgacgtaccggtccggaattcccgggtcgacccacgcgtccgggaaagggaaaacgccaccacacgcggatcgaattaggctctccgagtctccgggtgcctgctgtcggcggtggctcaggtccctctacatctgcggcgtggcactcggcgtctgacctcaacaagcaagatagcagatggcatgcggcagggtcgcgcatgccaccctcaagggcccgagtgtggtgaaggagatcttcattggactgaccctgggtctgatcgcgggaggcatgtggaagatgcaccactggaacgagcagaggaagactaggtccttctatgacatgcttgacaagggccagatcagcgttgtcgtcgaggagtaaagagttcttcccagatattttcaaagaactctatcgagagcatgacatagtgattgcttgctgtggagatttgtcctggaaataagcacaaccatttgggaacaccagattatgtcgaattt

SEQ ID NO: 95931 - DNA, 545 bp, Zea mays
  unsure (1)..(545): unsure at all n locations
tcgggaggtnacttgaaaggaggnacgatagtgactgctctaccggtccggaattcccgggtcgacccacgcgtccgcccacgcgtccggcctgcagctggggttagctgcaagggttgggagccatggggaggggtcgggtggagctcaagcggatcgagaacaagatcaaccgccaggtcaccttcgccaagcgccgcaacggcctgctcaagaaggcgtacgagctctccgtgctctgcgacgccgaagtcgcgctcatcatcttctccaaccgcggcaagctctacgagttctgcagcggacagagcatcaccaaaacacttgagaggtatgaaaaaaacagttatggaggaccagatactgctgtacagaacaaggagaacgagttagtccagagcagtcgtaatgagtacctcaagctgaaagcgaaggtggataatttacagaggactcagaggaatttgcttggtgaagatctggggtcacttggtgtcaaagagcttgagcagcttgagaagcaactngattcatncttaaggcac

SEQ ID NO: 95932 - DNA, 543 bp, Zea mays
  unsure (1)..(543): unsure at all n locations
agggtgcgtgctagtacacgacggcgactgtactcctctaccggtccggaattcccgggtcgacccacgcgtccgcccacgcgtccgcccacgcgtccgctaaagagggcagggcaggcgaatcgaaggaaaagtagtcaggagaggcgtttccctcgcaatcgaccatcacagatcaaatcgctgcaactagctagggtttcgtcgcctcatctctcgtcgatccatcgatggcgtccgagggcgacaacaagaggatgatcacgctcaggagctccgacttagaggagttcgaggtggaggaagcggtggccatggagtcgcagactctccgccacatgatcgaagacgactgcgccgacaacggcatcccgctccccaacgtcaactccaggatcctctctaaagtcatcgagtactgcaacagtcacgtccacgccgtcgccaaacccgctgactccgctgcctncgagggcggcgaggacctcaagagctgngaccgcgaagtcgtcaaggtggaccangctacgctcttcgacctan

SEQ ID NO: 95933 - DNA, 527 bp, Zea mays
  unsure (1)..(527): unsure at all n locations
tacggttngtaatgacagaacgatgactgtactgnctgtaccggtccggaattcccgggtcgacccacgcgtccgcccacgcgtccgcccacgcgtccgggaggagttccccaccctctcctatgccgatttctgccagcttgccggagttgtggccgtcgaggtcaccggtgggcctgagatccccttccaccccggcagggaggacaagcctcagccgccacctgagggccgtcttcctgatgccaccaagggttctgaccacctgaggcaagtctttggcaagcagatgggtttgagtgatcaggacattgttgccctctctggtggccacaccttgggaaggtgccacaaagagcggtctggttttgagggggcctggactacgaaccctttggtctttgacaactcttacttcaaggaacttctgagtggcgacaaggagggtcttcttcagctcccaagtgacaaagccctgctgagcgaccctgtcttcccgcctcttgtggagaaatatgctgcagatg

SEQ ID NO: 95934 - DNA, 525 bp, Zea mays
  unsure (1)..(525): unsure at all n locations
cgcaatgtggtnttgatgacagaaccactacggactgacgtaccggtccggaattcccgggtcgacccacgcgtccgggatctgaagaaggaattctgctgcaatggtactgtagttcaggacccagagctaggccaggtcattcagctccaaggtgatcagcgcaagaatgttgctacttccctagttcaggctgggattgcgaagaaagagaacatcaagattcacgggttctaagggacctgtaaatgcttgtgccctatattgtgtgcctccacatattggggagcttgaagcatcgacaagttactagtcattgcttacttatataagaacataagtagtatttgctattgtcaagtgtgccttgcttgatgcaagttgtgttttcgtatcattattattatgcacggccatcgtacgtgtatggcttgtatgggttattgccaacttaataaaagcacactctgtttgcctaaaaaaaaaaaaaataaataactaaatattaaaaaaaaataaaataag

SEQ ID NO: 95935 - DNA, 526 bp, Zea mays
  unsure (1)..(526): unsure at all n locations
agtggttnntcctacagaaggctcatccgactgcacgtaccggtccggaattcccgggtcgacccacgcgtccgcccacgcgtccgcccacgcgtccggggcgccaaggcggacaagaacctgcggttcctgctgcagaaggtgctgaagcagagcgacgtcgggagcctcggccgcatcgtgctccccaaaaaggaagcggaggttcacctgccggagctgaagacgagggatggcatctccatccccatggaggacatcggaacgtcgcgcgtgtggaacatgcggtacaggttttgggccaacaacaagagcagaatgtatctgctggagaacacaggggaatttgttcgttccaacgagcttcaggagggggatttcatagtgatctactccgatgtcaagtcgggcaaatatctgatacggggcgtgaaggtaaggcccccgccggcgcaagagcaaggcagtggttccagcgggggaggcaagcacaggcccctctgtccagcaggtccagggagagccn

SEQ ID NO: 95936 - DNA, 542 bp, Zea mays
cggtgggtctgcgtagacgggggaagtaagtgatcgctgcaccggtccggaattcccgggtcgacccacgcgtccgggagaagctccacatggggggcgaccacaagaaggaggatgagcaccacaagaaggccgaggagcaccacaagaaggaggagggggagcaccacaagaaggacggcggggagcataaggaaggcatcgtggagaagatcaaggacaagatcaccggcgagcacggcgacaagtccggcgaccacaaggaaaagaaggacaagaaaaagaagaaggagaagaagaagcacggcgagggccacgaccacgacggcggccacagtagcagcagcagcgacagcgactgagatctggtgtcgcagcacaggtgcaacacaagtatgcttgctggatggaggattcataccagctgatgctgatgtagtgtttcactggtgtcatgcatgcatgtatcgtgctattataatcaaaaagaaaaaagaaataacagtcagggatggtttggttgccatgtgatcttgtacact

SEQ ID NO: 95937 - DNA, 540 bp, Zea mays
  unsure (1)..(540): unsure at all n locations
tgaagcttntgcgacgaagggaatctaaggactgcctctaccggtccggaattcccgggtcgacccacgcgtccgctggtaccagatatccagcctgacgtggaagttgcttcagatctagtcacaatcacaaatgaagaaaaagttgatgagacaccgtctgttgttgctccagcggctgaaattatgccactgcaagacatcaacagcgaagaaaatgctttggtgaatgatgtggaagagagatccaaagaagaacattcatctactgataacctgaaaggcagcaagaggaggtcttcattctcagctaaacctgaatatccagaaaatggctccaaaaattctccagccctgccaagctacatggctgctacacaatctgcaaaggcgaaactgcgggggaatagttcaccaagacttagctctgattcagcagagaaaaacgggttcactcgtcgtcactcccttccgtcccctaacaatggtaagataatttcacattcttcacgtacgcaaaggccaacccatgctggtggc

SEQ ID NO: 95938 - DNA, 538 bp, Zea mays
  unsure (1)..(538): unsure at all n locations
ggcgcgtctgatgctgccagccgctcattgtactgacgtaccggtccggaattcccgggtcgacccacgcgtccgccgaactccatctatctcttccccacgagcgcttgcggcggcggcggcggcggaattaggaggcaatggggcactccaacgtctggaactcgcaccccaagaactacggtcccggatcccgcgtatgccgtgtctgtgcgaaccctcatggactgatcaggaagtacgggctgatgtgctgcaggcagtgcttccgcagcaatgccaaggacattggcttcatcaagtaccgctgaaatcaggtgggaatggaccatgtggtagaggcgaggttgtagttgtatttccagtaatttagatgttttgttcagaagtctgctagtaaagactgctacgtttatgatggagaacttagccatgttggtcatgttggtcatattgatcatgagttacctatgttgagcttaaactatcatgtgtccaaccatcgctgggtagtatgattactggaatgtatgatggn

SEQ ID NO: 95939 - DNA, 527 bp, Zea mays
  unsure (1)..(527): unsure at all n locations
accggttngtgatgacgggaagatgactggactgcccgtaccggtccggaattcccgggtcgacccacgcgtccgctgcgcctctacatttcttctctctctgctcctccgcctccgcctgatccatccaagacagggatcgccatgtcggactcggaggagcaccacttcgaatcgaaggccgacgctggggcgtccaagacctacccgcagcaggctggcaccgtccgtaagaacggcttcatcgtcatcaagaaccgtccctgcaaggttgtggaggtttctacctccaagactggtaagcatggccacgccaaatgccactttgtcgccatagacatattcaatgggaaaaagcttgaagatattgttccttcatcacacaactgtgacattccgcatgtgaaccgtactgagtatcagctgattgatatttctgaggatggatttgtgagccttcttacttcagatggcaacactaaggatgatcttagactcccaactgatgagactcttgtggcccagat

SEQ ID NO: 95940 - DNA, 545 bp, Zea mays
  unsure (1)..(545): unsure at all n locations
tgtatgtcgcntggttccgaccagaaatatnacgcattgactgtaccggtccggaattcccgggtcgacccacgcgtccgctggtaccagatatccagcctgacgtggaagttgcttcagatctagtcacaatcacaaaggaagaaaaagttgatgagacaccgtctgttgttgctccagcggctgaaattatgccactgcaagacatcaacagcgaagaaaatgctttggtgaatgatgtggaagagagatccaaagaagaacattcatctactgataacctgaaaggcagcaagaggaggtcttcattctcagctaaacctgaatatccagaaaatggctccaaaaattctccagccctgccaagctacatggctgctacacaatctgcaaaggcgaaactgcgggggaatagttcaccaagacttagctctgattcagcagagaaaaacgggttcactcgtcgtcactcccttccgtcccctaacaatggtaagataatttcacattcttcacgtacgcaaaggccaacccatgctggtggc

SEQ ID NO: 95941 - DNA, 525 bp, Zea mays
  unsure (1)..(525): unsure at all n locations
agtgggtntttacgacagaatgatgactgaactgctctaccggtccggaattcccgggtcgacccacgcgtccgtgtcgagctcgtcgccgtgaacgaccccttcatcagcaccgactacatgacctacatgtgcaagtacgacactgtgcacggacagtggaagcaccatgaagtcaaggtgaaggactccaaaacccttctctttggtgagaaggaggttgctgtgtttggctgcaggaaccctgaggagatcccgtggggttcggttggtgctgaatatgttgttgagtctactggtgttttcactgaccaggagaaggctgcagctcactagaaaggtggtgccaagaaggttgtcatctctgctcctagcaaggatgcccccatgtttgtcggtggtgtcaacgagaaagagtacaagtctgacattaacattgtctncaatgctagctgcacaaccaactgccttgctcctcttgctaaggtcatcaatgacaagttcggtatccgtgaaggtctgatn

SEQ ID NO: 95942 - DNA, 519 bp, Zea mays
tggttctgtcgcccgcagatgatcgtacgctctaccggtccggaattcccgggtcgacccacgcgtccgctcagtactgcacactgccatcgctctcgtcccttcgctgccgctctatctcggccggagccatgggcggcggtggcgcggcgctgctgctggtgatgtgggcgggcgtggcgtcggcggccgtgtacgaggtgggcggcaccattgggtggaccgtcatgggcaaccccgactacgccgtctgggccagctccaagcagatcgtcgtcggcgacactgttgtgttcacgtataacaagcagttccacatcgtgctggcggtgagcaaggcggactacaagaactgcatcgtcaccaagccgacggacacctggtccacggggaacgattccgtcgtcctcaacaccacgggccaccactacttcctctgcggctacccgggccactgcgctgccggccagaaggtggacatccgcgtcgcctactctgctgccccttacgacggaccgg

SEQ ID NO: 95943 - DNA, 541 bp, Zea mays
  unsure (1)..(541): unsure at all n locations
nagggagggtgagtgtttcagctctgatctgatcgactgtccgtccggaattcccgggtcgacgcggccgcgtcgacccacgcgtccgctgatccttccaatgaagcaacaggctgggccatcaatgatcgtggggttggattcacatttggtcctgataaagtttctgaatttcttgagaagcatgatttggaccttatctgccgagcacatcaggttgtcgaagatggatacgagtttttcgctagccgtcaactcgtaacaatattttcagcccctaactactgtggagaattcgacaacgctggtgccatgatgagtgtagatgatacattgatgtgctcgttccaaatattgaagcctgcaaggaagatgatgggtggttcaactaataacaaatctggcttcaagtcattcaggggatggtgacaacggcctgatggtgggcacgctgcgttcgacagggggtacatcttacagcggctgcaactaacaggcatatgcattttcgcggaaacctgcttgggcctttgaagggcaa

SEQ ID NO: 95944 - DNA, 536 bp, Zea mays
  unsure (1)..(536): unsure at all n locations
nggggtcttgtgacagcaaggaagactcattgacactccggtccggaattcccgggtcgacccacgcgtccgctggaagttatagggttggtgatgttatgaccaaaagggaagagctccatgttgtgaaaccaacgacttcagttgatgacgcccttgagatgctggtgaagcataggatctctggctttcctgttattgatgatgactggaatttggttggcgttgtgtcagattatgatttattggcactggatacaatatcaggagctggaccggctgaagcagacatatttcctgaggtggatagcacttggaagacatttcatgagatacagaagcttttgagcaaaaccaacgggaaggttattgctgatgttatgaccccagcgcctctcgtggtgcgtgaaacaactaaccttgaagatgctgcaaggttactccttgtgactaagtaccgcaggcttncagtggtcgatagctcaggcaaactggttgggatcattacaagagggaacgtcgtncaggccgcctcg

SEQ ID NO: 95945 - DNA, 541 bp, Zea mays
  unsure (1)..(541): unsure at all n locations
tgttgggggtnnnttcgaacagagtctctatggactgnctctaccggtccggaattcccgggtcgacccacgcgtccgcaggaaaacaaagaaggccttgaactattgaaggcagccatagaaaaggctggctacactggaaaggtggtcattggaatggatgttgctgcttctgagttcttcggtgagaaagacaagacttatgatcttaatttcaaggaggagaacaacgatggctcaaacaaaatttcaggcgacagcctgaaagacctgtacaagtcctttgtttctgagtaccctatcgagtcgatcgaagacccatttgatcaggatgactggagcacttatgccaaactcactgatgagattggacagaaagtgcagattgtaggagatgatcttctcgttaccaaccccaccagggtcgccaaggccatcaatgagaagacctgcaatgctctcctcttgaaggtgaaccaaatcgggtctgtgaccgagagtatcgaagctgtcaggatgtccaagcgcgccggatggggag

SEQ ID NO: 95946 - DNA, 522 bp, Zea mays
  unsure (1)..(522): unsure at all n locations
atgctnngtgatacccgcatagtacagtatgctgctaccggtccggaattcccgggtcgacccacgcgtacgcggacgcgtgggcggacgcgtgggctgcaagccatgatgaagttgatcttgatgagttggtggatgaccctgaacttgagaagttgcacgcggagagaattgctgcccttaagaaagaggttgagaagcgtgaagtgctaaaaaggcaaggtcacggtgaatacagggaggtaattgaaggggacttccttggggaggttactggcagtgaaaaagtcatatgtcatttctatcaccgtgaattttaccgttgcaagatcatggataagcatttgaaggcccttgctcctgtctatgtgggaacaaaattcatcaagcttgatgctgaaaatgctccattctttgtagccaaactggcaatcaaaaccttgccatgtgtaatattgttcaagaagggtattgctgttgaccggttagttgggtttcaagatctcggaagtaaagacgatt

SEQ ID NO: 95947 - DNA, 522 bp, Zea mays
gcgacttgtacctgaagaatatgtatggatcgacgtaccggtccggaattcccgggtcgacccacgcgtccgatctattccagagaagaacgttacttgcctgacccgtctggaccacaacagggctcttggccagatttctgagagacttaatgtccaagttagtgatgtgaagaatgttatcatctggggtaaccactcgtcctctcagtaccctgatgttaaccatgccacagtgaagacttccactggggagaagcctgttcgtgagcttgtctctgatgacgagtggcttaatggtgaattcatcacaactgtccaacagcgtggtgctgcaatcattaaagcgagaaagttctccagtgctctctcggctgctagctctgcttgtgaccacattcgtgattgggttcttggaacacctgagggtacatttgtttccatgggtgtgtactctgatggttcatacggtgttccttctggactcatttattcattcccagtaacatgcagtggtggtga

SEQ ID NO: 95948 - DNA, 523 bp, Zea mays
  unsure (1)..(523): unsure at all n locations
ccggngtgtacaggacgactatgcatggactgcacgtaccggtccggaattcccgggtcgacccacgcgtccggcgccaagtcccggaggcggaggcggtgatctttgttcgtttcctcgcctctcctctcctcccctctcctttcattccctgtcccgtggacggcaatggcgggcaccgcgcggcttcttcctgccgcggcggcggcgctgctgctgctgctctgcatcgcgggcggcgcgcgggcggccaacgtgacgtacgaccaccgcgcgctggtcatcgacggcgtgcggcgcgtgctcgtctccggctccatccactatccgcggagcacacccgacatgtggccggggctgatccagaaggccaaggacggcggcctggacgtcatcgagacctacgtcttctgggacatccacgagcccgtgaggggacagtacgacttcgagggcccgaaggacctggccgggttcgtcaagaccgtcgncgacgcccgcctgtacgttgcacctcgcatcg

SEQ ID NO: 95949 - DNA, 540 bp, Zea mays
  unsure (1)..(540): unsure at all n locations
tggtaggccgatgcgtacgacagagctggatcgacgtaccggtccggaattcccgggtcgacccacgcgtccgcggacgcgtgggtccccattccaatacacagatctcgcacccgtaagtggcgacgaatctcgcggtgcggaggcgcgacagaggcggtgtcgactccgacggactcgcagccaccggtggagacgccccaccggcgcactcctccaacgttcatagtttaagggcttgatttggataattagtcatcaacagaagtgataaaaaatggtggttcttgcagcatcaatcgtttcaaagtcgggaaaagcacttgtttcaagacagtttgttgacatgtctcgcataagaattgaaggattacttgctgcgttcccgaaactggttggaactgggaagcagcacacttatgtcgaaactgaaaatgtgcgatatgtttatcaacctattgaaggtttatatcttctacttatcacaaacaagcagagcaatattcttgaagatctggacactttgaggctcctctncaa

SEQ ID NO: 95950 - DNA, 545 bp, Zea mays
  unsure (1)..(545): unsure at all n locations
ntggtgctgagtgatacgaaagggagaggagagaaggagtacctgcgtccggaattcccgggtcgacccacgcgtccggtcagacatacctcacccaggtgtggcctggccccgtctacttcccggacttgctcaaggcgaacggtgtatcgtggtggatcgatgaggtgcggaggttccatgatctggtcccggtggatggcctctggattgacatgaacgaggcctccaacttctgcacggtcaagtgcacgattccgaatacgcaccagtgccctattcctgacaccaagacaccatggctctgttgcttggattgcaagaaccttacaaacacagggtgggatgagccgacgtacaagatcaacgcttgcggtcagactgcccgtctcggcttcaacaccatctgaaccagcgctacacactacaacggcatcctgtagtacaatgcgcacagtctgtatggcttctgacaagccaatgccacgcatacggcgcttcagggnctgcangttaagaggcccgtcaatctgacccggtcacgt

SEQ ID NO: 95951 - DNA, 537 bp, Zea mays
  unsure (1)..(537): unsure at all n locations
tgtaggcnnntgctctgacgagagtatacggattgctctaccggtccggaattcccgggtcgacccacgcgtccgcttgctctgtgaaattgatagtttgaagacacagcaacttctcgataggccttgcagtggcatcaatggcttagtttcatcctttgtttcacggctaagggaagagaactcttctcgagagcataccattttaagaactgctcaaaagcttaagtcattctcgtttaacaagttctcagcaaacggctaccatgatttcctgccatcgcggcttcgtcccaagtttcagaacattgatgccaacgagtgtactttctctgagattctttgcctaatatgtggaagcccgttcagtgaatcagagctcctgaatttggaaaacacaaagctcaaggctcagaagaaaattgatctttatactgcccattgttgtcaaagttgccatttccagattctcccagcagctacagatatgtatggacatttcttttcgctactaccgaaattttggactgaagaagt

SEQ ID NO: 95952 - DNA, 539 bp, Zea mays
aggtacgtgtacgcggaggggaaggtattgcactgctctaccggtccggaattcccgggtcgacccacgcgtccgagagggcgcccccgctccccgctggcgcctcgtcctcctccttcgccaggcccctgcgccgcggcgcggcgcaccacccgcgcctgcgcaccgcgctcgccgtctcctccgacctgctcgctgggaacaaggccgcgcaggccgccgccgcgcatccggcggttacccgggaagaggcactggagctgtatgaggacatggttcttggccgtgtattcgaggacatgtgtgcacaaatgtactaccgtggcaagatgtttggtttcgtccacctttacaatggccaggaggctgtctccactggcttcatcaaacttctgaaccaggctgactgtgttgttagcacataccgtgatcatgtccatgcgctgtccaagggcgtcccggcacgttctgtcatggctgagctctttggcaaggccacaggctgctgccgtggacagggtggttccatgcaacatgtc

SEQ ID NO: 95953 - DNA, 538 bp, Zea mays
tggtgctagtaagatacgagacgtaaagtattgctcgtaccgatccggaattctcgggtcgacccacgcgtccgcccacgcgtccggacaataagcctgtcacaaatagcagggacacccaggaggtgaagctggaacagggcctccagatgctaacaatcttcaagagccatgaggctgagacaacaattgtggaagatttcgacttctatgagcagcgggagaaagccttgcaggagaacagacgtcaacagcatgctgtcagcaccgatactcagaaactggtggataccaaggctcaagatcctgtggccgacatatcagatgcatttgccaaggccgtccagttgaagaatactgagaacagtgggacaacccccaaaactgagggtgcttcagctgaaaagggatccgctgccaccgccaaagttgaaagaagtgcaaacctgaacacaagccctgtggaggaaagcaggtgattcgttttccttctatctgcaaatttggagcagcagatgaatagcatggtgcgatgtga

SEQ ID NO: 95954 - DNA, 528 bp, Zea mays
  unsure (1)..(528): unsure at all n locations
tggcgttctacttctgatgggagatgcatcggactgnccgtaccggtccggaattcccgggtcgacccacgcgtccgcccacgcgtccgcccacgcgtccggtcgatcctgctggacaccgcgcagagcgagaagacggcggcgccgaacctgtcggtgggcgggtacgaggtgatcgacgcgatcaaggcgcagctggagagggcgtgcccgggcgtggtgtcgtgcgccgacatcgtggcgctggcggcgcgcgacgccgtgtcgtaccagttcaaggcgtcgctgtggcaggtggagacggggcggcgcgacggcacggtgtcgctggcgtccaacacgggggcgctgccgtcgcccttcgcgggcttcgcgggcctgctgcagagcttctcggaccgggggctgaacctgacggacctcgtggcgctgtcgggggcgcacaccatcggcgtggcaagctgctccagcgtcaccccgcgcctgtaccaggggaacgccagcagcgtggacccgctgctggactcg

SEQ ID NO: 95955 - DNA, 522 bp, Zea mays
  unsure (1)..(522): unsure at all n locations
tgcggtntnnctgattacggatcctgantgcactgacttaccggtccggaattcccgggtcgacccacgcgtccgagaggatagaaaaattatgatttcgaggcataaccttgttaaattgcacaaggtgcttgaggagcatgatctttcttgtgtggagcttttggatgtgaagttggatggtattgttttaacaaaacaaaaagcggagaaggccgttggttgggctagaaaccactatctgtcatcaacaactcttccttctatcaaaggtgacaggttaatcattccccgtgagagtctggatatatcaatcgagaggctgaaggaacagggtataacagctaagaaatcctctcaaaatctgaaggttttggctaaagatgagtatgagcgcaatttcatttctgctgttgtgcctccgaatgaaattggagtgaaatttgacgacatcggtgcacttgaagacgtgaagagaacattggatgagcttgttacacttncaatgaggagacctgaact

SEQ ID NO: 95956 - DNA, 519 bp, Zea mays
  unsure (1)..(519): unsure at all n locations
tgatggcgagtgttcaggaacgaactgattgactctaccggtccggaattcccgggtcgacccacgcgtccgcggacgcgtgggcggacgcgtgggcggacgcgtgggtcctgcagtgacattggacagtcaggtattttacgtaattgaattgaacacttgatctctgattagcacatggatggaaacacatgtctctgctctacgtcagatgatctccggtgccaagaagaaggaactcttctttgggatgccttaccgccagggcgaccagccagatccgggcgcgggcaccgtcgagagcatcccgcacaacccagtacacttctggagcggcgacccgaggcagccgaacggcgaggacatgggcaacttctactccgccgcgcgcgacccgctcttcttcgcgcaccacggcaacatcgaccgcttgtggtcggtctggaacggccttcgtcccggcgtcagcgacttcaccgaccccagctggctggacgccagcttnctcttctacgacga

SEQ ID NO: 95957 - DNA, 519 bp, Zea mays
  unsure (1)..(519): unsure at all n locations
tgaggtgtantgataccgaacagcancgtaactgcactgactcgtccggaattcccgggtcgacccacgcgttcgcacaggcctgccgccacagcaccgcggatagcagagcagagcggcagccaggtcggtcggcgtcgtcgtcgtcagccatgagcaaggacaagcaccacaagcacgagcaccacctgcggcgttgctgcgggtgcatggcgtcgtgcctcctggcgctggtcctcatcgtggccttcgtctcgctggtggtgtacctggcgctgcgcccctcgaagccgtccttctacctgcaggacctgcagctgcgcaggcccatctcgctgggcgacccgtcgctgacggcgtcggcgcaagtgacgctggccgaccgcaaccccaacgaccgcgtgggcatcttctacaagcgcctggacgtgttcgtcacctaccgcgacgaggccgtgacggtgcccgtgtctctgccgccgcagtaccagggccaccgcgacttcaccgtctggtccc

SEQ ID NO: 95958 - DNA, 530 bp, Zea mays
  unsure (1)..(530): unsure at all n locations
atggtagcgcnnnctnaaaatggacagcaagttttaatgtactgcctctaccggtccggaattcccgggtcgacccacgcgtccgcccacgcgtccgggagagcaccctccacttggtgctgcgcctcaggggaggcatgcagaggttcgtgaagaccctgaccggcaagactatcaccctcgaggtggagtcttcagacaccatcgacaacgtcaaggccaagatccaggacaaggagggcattcccccagaccagcagcggctcatctttgctggaaagcagcttgaggacgggcgcacgcttgccgactacaacatccagaaggagagcaccctccacttggtgctgcgcctcaggggaggcatgcagatcttcgtgaagaccctgaccggcaagactatcaccctcgaggtggagtcttcagacaccatcgacaatgtcaaggccaagatccaggacaaggaaggcatcccaccggaccagcaaccgtttgatcttcgcttgcaagcaacttgaggatgggcgccc

SEQ ID NO: 95959 - DNA, 520 bp, Zea mays
  unsure (1)..(520): unsure at all n locations
tcagagctgactaangttcccaagcanctcaccgtantatcatccggtctggaattcccggtccgaccgactcgtaccgcccacgcgtccggcagagcacccttcactttttgctgcgcctcaggggaggcatggagatgttcgttaagaccctgggcggccagactatcaccctccaagcgcaatcttcagacaccatcgacaacctcaaggccaagatccatgacaatgatggcattcccccacaccagcatcgtctcatctttgctggaaagcagcttgatgacagtcgcactcttacctactacaacatccagaacgagagcacccttcacttggtgctgcgcctcagacgatgcatgcacatcttactgaagaccctgaccggcaagactatcaccctcgaagtggattcttcagacaccatcgacaatgtcaatgccaagatccaggacaaagagtgcatcccaccgtaccagcagcgtttgatcttcactggcaatcagctggatgatggccg

SEQ ID NO: 95960 - DNA, 519 bp, Zea mays
  unsure (1)..(519): unsure at all n locations
cgggaggnnnntaagctgaacagaactttactgattgctctaccggtccggaattcccgggtcgacccacgcgtccgcccacgcgtccgggagatcaaccccgagaacgccatcatggaggagctccgcaagcgtggggaggctgacaagaacgacaagtccgttaaggaccttgtcatgctgctgttcgagacggcgctgctcacttctggctttagcctcgacgatcccaacacctttggcagccgcatccaccgcatgctcaagctgggcctgagcatcgacgaggacgaggaggctccggaggctgacaccgacatgccccctctggaggatgacgctggcgagagcaagatggaggaggtcgactaagctgggtttattcttatggaggaaagagagagaacatcgggtctgttctgtgggtcttaccacttatgctattatgcaatctgttgttggtatgctagtgctactattgtctctgctgtcttctagttaattntgttgttgttttgc

SEQ ID NO: 95961 - DNA, 549 bp, Zea mays
  unsure (1)..(549): unsure at all n locations
ngtcgtgtccatgcctaagatgtagagtgcaacgctcgctcgggattcccgggtcgacccacgcgtccgctcgcggtgaatcctcccgagtcgccttcccctcaagttccacaaacgcaagccccaagctcgccgtcaccacccgcaatccagcaaacgcaaaccccatctcgccgccgccgccgccgccgccgcgatgtctcgccgctatgacagccgcactacgatcttctcgccggaggggcgtctctaccaggtggagtacgcgatggaggcgatcggcaacgccgggtcagccctcgggatcctagcggccgacggcgtggtcctcgtcggcgagaagaaggtgacctccaagctccttcagacctcgcgctccgtcgagaagatgtacaagatcgactcccacctggcgtgcgccgtggccgggatcatgttcgacgcaacattctgataacaacggccggcttcacgcccacggtacgcgctttctaacaggaaccccatcccgttagcagctgtgcaggccctttggacaccaaccggggg

SEQ ID NO: 95962 - DNA, 522 bp, Zea mays
  unsure (1)..(522): unsure at all n locations
gagtaggtgcgntagaaacagaataagaagtgtatatgtatacccgtccggaattcccgggtcgacccacgcgtccggcagttctatgtgaatgtggacaaggaagactggaagctggacacactgtgtgacctgtatgagaccctggccattacccagagtgtcatctttgtcaacacccgccgcaaggtggactggctcactgacaagatgaggagcagggaccacaccgtttctgccactcatggtgacatggaccagaacactagagacatcatcatgagggagttccggtctggctcctcccgtgtgctcatcaccactgacctgcttgctcgtggtattgatgttcagcaggtgtccctggtcatcaactatgatcttcccacccagccagagaactacctgcatcgtattggtcgtagtggtcgttttggtaggaagggtgttgccatcaactttgtgacccgcgacgacgaacgtatgctgtttgacattcagaagttctacaacgtgttgatt

SEQ ID NO: 95963 - DNA, 516 bp, Zea mays
ggctggtagaaaagaaggggattgtactacttaccggtccggaattcccgggtcgacccacgcgtccgcccacgcgtccgcccactcgtccgcccacgcgtccggaaaattcgaagacgaggagcagctacactgcggacggacttcgggcatggagggccagttccaggttggcaaggaggaggtcatccaagcatggtacatggacgacagtgaagaggaccagaggcttcctcatcatcgcgagcccaaagaattcatccctctcgacaaactttccgaactaggaatattaagctggcgcctaaatgctgatgattgggagaatgatgagaacctcaagaaaattcgtgaagccaggggttactcttacatggacatttgtgatgtgtgcccagagaagttgccaaattacgaggctaagataaagaatttctttgaagaacacttgcatactgatgaagagatacgatattgccttgagggtagcggctactttgatgtgagggaccaaaa

SEQ ID NO: 95964 - DNA, 521 bp, Zea mays
  unsure (1)..(521): unsure at all n locations
gcatgcgtntaagctgtatccgacgcgctacgtactgacgtaccggtccggaattcccgggtcgacccacgcgtccgcccacgcgtccgcccacgcgtccgcgggtcgccgcccacggcgtcgtgctgctcgaacctgcgcgcgcaggagccgtgcttctgccagtacgcgcgcaacccggcgtacagcagctacatcaacagccccaacgcccgccgcacgctcacctcctgcggcatcgccgtcccgagctgctagggcgctagctcgtgcctcgtggtgtgggtgaataaaaagatgcatgtcgatctctgcttactgttatcgtatctgtagtacctcgtgtgatatgaacaatatgtattatttaccaagagcggttgtgtcaaaaaaaaaaaaaaaaaaaaaaaaaaaaaaaaaaaaaaaaaaaaaaaaaaaaaaaaaaaaaaaaaaaaaaagggcggccgctctagaggatccaagcttacgtacgcgtgcatgcgacgtcatagctcttctag

SEQ ID NO: 95965 - DNA, 524 bp, Zea mays
  unsure (1)..(524): unsure at all n locations
tggaaggcgnctgacgttgacgcgggttaggatagaaatgctgtaccggtccggaattcccgggtcgacccacgcgtccgcccacgcgtccgcccacgcgtccgcccacgcgtccgcagtcatccacactaacgaacgaggtcttgctccgatcacgagctagctgaggtcgacgatggcggctgtgctgaacagcaggaagacgccgcaggtggtggccgtgctggtggtggtggcgctgctggcttcgtccgcgtcggcggcgatcacctgcgggcaggtggggtcgtcgctggcgccgtgcatcccttacgcgacggggagggccagcgcgctcccctcgtcgtgctgcagcggcgtcaagagcctcaacagcgcggcgcggaccagcgcggaccgccaggcggcgtgccgctgcctcaagagcctcgccaacagcgtcaagagcgtcaacatgggcaccgtcgccaccatccccggcaagtgcggcgtctncgtcggattccccatcagcatgtccaccc

SEQ ID NO: 95966 - DNA, 546 bp, Zea mays
  unsure (1)..(546): unsure at all n locations
cgaaggtgagaagggacgtcgcactacgtaccgctctggaattcccggtggacgcacgcgtccgaagcgaagtcttcggcggagcctgaggactagcgaggagcaacatgtcgaggcaggcgtgcgtcgatgaccagctgctgggcgacatccaaggccagcacctcagcgccaccgcgatcgtcggacacgacggcagcgtctgggcacagtccgtgaacttccacgagttaaagcctgacgaggttgctgggatgataaaggacttcgatgaacctggaactcttgcaccaactggtctttatgttggaagtacgaagttcatggtgatccaaggtgaacctggagctgtcatccgaggaaacaagggcactggaagcattactgtcgagaaaactggcaagtacctgattatcggtatctatgacgagccaatgactgcacggcaatgcattatggccgttgagaagctcggggactacctgatcaaacgaggattctaaagttggcatcatgctatggtggtaatggggacctaaaatttgn

SEQ ID NO: 95967 - DNA, 520 bp, Zea mays
tggaatgtgcgactgaaacgtacccgattctcctggcagtcccgtccggaattcccgggtcgacccacgcgtccgcaggaagctgtccctgactagggccctcttctacattatcatgcaatgcctgggtgccatctgtggagctggagtggtgaagggcttccagcagggactttacatgggcaacggtggtggcgccaatgttgtcgcacctggctacaccaagggtgatggccttggcgctgagattgttggcaccttcatcctagtctacaccgtcttctcggccaccgatgccaagaggaatgccagggactcccatgttcctatccttgccccactgccaattgggttcgcggtgttcctggtccaccttgccaccatccccattactggcactggcatcaacccagctaggagccttggcgctgccatcatctacaacagggatcacgcctggaacgaccattggatcttctgggtcggccccttcattggcgcttgcctggctgccatctac

SEQ ID NO: 95968 - DNA, 513 bp, Zea mays
ggaaggctgctgatcagtatagagatgcatgacctaccggtccggaattcccgggtcgacccacgcgtccgcagaaacaatgggctggaaatatcctggtattggtgagtttcagtgttatgacaggtacatgcagaagaatctacggcaatcagcattgtcccggggtcatttgttttgggcacgtggacctgataacgctggctattataattcaagaccacatgaaactggctttttttgtgatggaggcgactatgacagctactatggacgttttttccttaactggtactctggagtcctcatggatcatgtggatcaggtgctgtcgcttgctactcttgcatttgacggagcagaaatagttgtgaaggttccatctatctactggtggtacaggactgcgagccacgccgcagagctcacagcggggttctacaacactacgaacagagacggatactctccagttttcagaatgctcaagaagcactctgtgatccttaaact

SEQ ID NO: 95969 - DNA, 518 bp, Zea mays
  unsure (1)..(518): unsure at all n locations
attatgcgctgattcgataagcacatgattgcactgctctaccggtccggaattcccgggtcgacccacgcgtccgcccacgcgtccgcgctgttaggttctaccaggagaccttcggcgtccctccggccacgcgagctcgccgaaatggtcgcccacaggttccatcagtaccaggtggtgggtcgcgcgctgccgaccccaaccgatgagcaccccaagatctaccgcatgaagctctgggccaccaacgaggttcgcgccaagtccaagttctggtacttcctgagaaagctcaagaaggtgaagaagagcaatggccagatgcttgccatcaacgagatctttgagcgcaacccgaccaccatcaagaactatggcatctggctgcgctaccagagcaggactggttaccacaacatgtacaaggagtaccgcgacaccaccctgaacggcgcagtggagcagatgtacaacgagatggcctnccgccaccgcgtgaggtccccctgcataca

SEQ ID NO: 95970 - DNA, 561 bp, Zea mays
cgggctgtgtccatgccatgattgtactgctctaccgcgtctcggaattcccgggtcgacccacgcgtccgacaacatctacctcaacttcgacgccttccacggcgacaaggcccacggcggcgtccagtgacggtaccgagatcgtgctctggaagtggtgcgagggcgacaaccagcgctggaagatcctcccttggtgaacgaacgaaagaaactactagctggtaccctaataataattctgctggctgcggcgatcccaaaataaaagaggccgggtgcgatgcatctcggacttctcgagtggtgtttgcgtcagacagccagccactgtggggctagtgttccaacatttgtcagcctgcttgcgcgaggaaggggggtcactgactcaagagaagggcctggtcataggctgctgcattatgaatttctgatgatgtcttatgtctgtactctgaatcaactatggatgagatcttatcttctttcttctactgaatgaatgagtcattaatggctttgcttttgcttcaaaaaaaaaaaaaaaaggccggt

SEQ ID NO: 95971 - DNA, 553 bp, Zea mays
  unsure (1)..(553): unsure at all n locations
agattgtgtgccggttcganagcactgacgtacccgtctcgganttcccgggtcgacccacgcgtccgcccacgcgtccgcaagcttccaggatgacttggtagccagcacttcgtcttcgactggtaccgggtccaagtatatcaacgtaacaaggtggtttaatcacattgatgcgctcgtgaggctgaacggaattactgcagagggccaaggtgttaatgttgaatcgtcagcagttgcttcagccccaactccagatgagactgaagcacaggccccagttgctgaggaggacgacgacgatgatgttgacctttttggtgaggagaccgaatatgagaagaacgctgctgaagagcgtgctgcaactgccaaagcttttggcatgaagatagaatcttggaagtcatcagttttacttgatgtgaagccatgggacgatgagactgacatggtcaaaattctagaagctgttatgaatgtcagaatgaaaggttggtttgaggctcaatcaagcttggtccaattggatattagttcaagaagcttg

SEQ ID NO: 95972 - DNA, 553 bp, Zea mays
gcctgggtgtcatgagcactacagtactgacgaaccgcgtccggaattcccgggtcgacccacgcgtccgaagcgaagtcgtcgccggagcaggaggaagagcgaggagcaacatgtcgtggcaggcgtgcgtcgatgaccacctgctgtgcgacatcgaaggccagcacctcagcgccgccgccatcgtcggccacgacggcagcgtctgggcacagtccgagaacttccccgagttaaagcctgaggaggttgctgggatgataaaggacttcgatgaacctggaactcttgcaccaactggtctttttgttggaggtacgaagtacatggtgatccaaggtgaacctggagttgtcatccgaggaaagaagggcactggaggcattactatcaagaaaactggcatgtccttgattatcggtatctatgatgagccaatgactccagggcaatgcaatatggtggtggagaggctttcgcgatacctgatcgaacagggctttctaagtttgtcataatgctattttgggtcattgggcaccttagcttt

SEQ ID NO: 95973 - DNA, 518 bp, Zea mays
  unsure (1)..(518): unsure at all n locations
tgatgcggttgctgagtatgcattgattcgnatggctcacncgtccggaattcccgggtcgacccacgcgttcgcggacgcgtgggctacaaagctgatcttgaggatggaaccatagttgctgtcaagagattgaaggaagtggtggttagcaagaaggattttgaacagcagatggagataattggtagggttggccagcatcaaaatgtaattccattgcgggcttactattactccaaggatgagaagttgttggtgtttgattatgtcccatctggtagccttgctgctgttttgcatgggaataaagctgctggaagagctccattgaactgggagacaagagtcaagatatctctggacgtggcccatggaatcgcccaccttcatgccgagggaggaaggaagttcatccacggcaacatcaaagcatcgaacgtcctcctatcgcagaacctcgacggctgcgtctccgagttcggcctggcacagatcatgaccaccccacagacccc

SEQ ID NO: 95974 - DNA, 547 bp, Zea mays
gttgtgtgtgctggggactaagaccgtcgtaccgtccggaattcccggtcgaccacgcgtccgggagtcttgacctgcttcattgccatcaccgctctcgccttccgtccctgcgcatccggcgtgcccatggacggtggctggtcgaacggcggcgccacctggtacggcccagccaagggcgctggatccgacggtggtgcgtgtgggtaccagggtgccgtcgaccagcctacgatctggtcaatgatcaccggcggcagccaatccatcttccaggacggcaagggctgcggcacctgctaccaggtgaagtgcaccggacacgcgtcgtgctccggcaatccggtgacagtggtcatcaccgacctgtgccccggcgttggatgccaggtggagcccgtgcactatgacctgagctgtacggcgattcgtgccatggcgaaaccctggtcagttcgaccaggtccggaacggcggtcggctgtgagtacagtacattcaggtggcgtgcacctgggacgggtttgaacatcgctttcagggg

SEQ ID NO: 95975 - DNA, 513 bp, Zea mays
tgaggttttgtttgtgaatggaagtgattgcattaccggtccggaattcccgggtcgacccacgcgtccgagaggacagttatcagcacagaacacagtaatcctcttcgaagccttgcacactgttgccgcacatgctcacaaaataaacagtgatagtgatttgcgttccaagttgcaagagttgggctcgatgacacagatgcaggacccgccattgttacgccttgagaatgagtcgtaccagctgtgcctcagtatccttcagaacatatttctggacagctctcctgatcatggaagcacagaggtggtggagagtcaccttattggcttgtgcaaggaggtccttgaggtatacttgagcacagcaagaccttctcagccttccagtggcacacagccgctaggccattggcttatccctgttggttcatcgaagcgaatggaacttgcggcaagagcacctcttggtgtctcaacccttgcagctatcaacggactaagtgactc

SEQ ID NO: 95976 - DNA, 516 bp, Zea mays
aggagctcactgtaatccgaatgatatctactgcctctaccggtccggaattcccgggtcgacccacgcgtccgaccacgcgtccgtccacgcgtacgaccacgcgtccggagaaagaaggcattactgccgtgcagcatacgctcatctatgctggtaagcagcttgctgatgacaagaccgcagaggactactacatcacgggtggatctgtcctgcatcttgtacttgctctgaagggtggttactagtctaaacctgatgaactagcagtcagataaactgacgtgtcggctgctaaatgtgcaggcctgatgttgaactggcacggagatgattacagcttatcagctctgcacctgtgcccaatggcaggggctgcctttcaagctatcgtctgatctggaactgttccacattatctaatccctgttggttcatgggcgcccgctctacatgatccaagctcacgtacgcgtgcatgcgacgtgatagctattatatagcgtcacctaa

SEQ ID NO: 95977 - DNA, 516 bp, Zea mays
  unsure (1)..(516): unsure at all n locations
taagtgcnctgaacgaacgggagtgtactgactgacctaccggtccggaattcccgggtcgacccacgcgtccgctgacacaagagagcacgctactactcatcactcgccaacgtgcagagatcagggaagcggcactccatccactgactgaccgctcatggcgaaggtccacctctacgtcgccgcggcctgcgccgtcgtcctcgcgctcgccaccccggccctcgccggtgaccccgacatgctgcaggacgtctgcccggctgactacgcctccccggtgaagctgaacgggttcgcgtgcaaggcgaacttttcggcggacgacttcttcttcgacgggctgaggaacccgggcaacaccaacaacccggcgggctccgtggtgacggcggccaacgtggagaagttcccgggcgtgaacacgctgggcgtctccatggcgcgcatcgactacgcgccgggcggccagaacccgtcgcacacgcacccgcgcgccaccgagatcatctt

SEQ ID NO: 95978 - DNA, 526 bp, Zea mays
agtatagtgccgctgtagactgacaagatgcgtaccgcatgcacgtaccggtccggaattcccgggtcgacccacgcgtccggtccaacgcctcctagatggatgagggcaggctccgggccggcggcggctgcaccggagggcgcaagaaggccggcgcgagcggtaagcccaagcgccctccctccgctttcttcgtcttcatgtctgaattcaggcaggagtaccaggcgcagcaccctagcaacaagagcgttgcggccgtgagcaaggcagcaagtgaaaagtggcgctatatgtcagagcaagagaagcaaccctatgtggaccaagctgggcagaagaagcaggactatgagaagaccaaggcaaatattgagaaggagagcacaagctcaaagaaggctaacactgatgacgacgatggctcgaagtccgacgttgatgatgaggatggcggtagtgacgaggaaaacgacgacgacgagtaaatagtatctccgctgtcccgaggtaacaaatcgat

SEQ ID NO: 95979 - DNA, 557 bp, Zea mays
tgccgggtgtgcagggccctaagcactgacgtaccggtccggaattcccgggtcgacccacgcgtccgcggacgcgtgggcggacgcgtgggcggacgcgtgggacagaacttcagaaaaaagaacgaatgttttgtgaagcaaataagtgtcttcgaagaagactggaggagagcaaccaggttatatggcagcatgcgtgggagcaaagcgagcggcattctgaagtgcagccgcagcagctcaatggcaataacttcttccatcccctcgatggtgctggtgaacccacccttcagatagggtatccttcagaggcactgactagctcatgcatgaccaccttcctgcccccgtggttgccatgagatcgaactactgcgcaattccgaattaataagcatggccgcatgcagctgcctgtgctatacgttgtgcttggagtgtactttaaggttcttgcatggccagtatgtgtgtaacatttgtgatgaacatggaaactatgcacttaaatctcgaataatcaatgaactgggtaagaatgtgacatatgt

SEQ ID NO: 95980 - DNA, 557 bp, Zea mays
  unsure (1)..(557): unsure at all n locations
agccctgtgtgttcctgcnacctacagtacctnctatacccgtccggaattcccgggtcgacccacgcgtccgcttgaggatgagacaatagatgcagagatattgaactcgatggctgttacaaatgaccagtttcaagactgcgcttggaacaagcaacccatctgctctccgtgaaactgttgttgaagtcccaaatgtctcttgggaggatattggtgggctggagaatgtcaagagggagctccaggagactgttcaatatcctgtggaacatccagagaagttcgagaagtttggcatgtctccatccaaaggagttctgttttatggtcctcctggttgtggtaaaaccttgttggcgaaggcaattgccaacgagtgccaggctaacttcatcagtgtcaagggtcctgaattgcttaccatgtggtttggtgagagtgaaaccaacgtccgcgaaatttttgataaagctcgccaatctgctactgtgtcctcttctttgatgagcttgactcaatgcgactcanaaaagaagaattgtggtgatgct

SEQ ID NO: 95981 - DNA, 518 bp, Zea mays
  unsure (1)..(518): unsure at all n locations
tggattgctgagctagatttgaatgcaatgacgtacccgtccggaattcccgggtcgacccacgcgtccgcttgcaaataactcagcactttctggtgaactggatgcattgagggagaagataaaagcactacaggcctcagaaaggtctctgaaggatgaaatttcctgttatgtttctgaaaaggttgttcttgcatcagaggtagagatccttggtaaaagtttatctgaggtttcagagaagaattctatcttggatacctcattatgtgatatgaaaactgagttagatgaattgagaacaaagctgaacgattctgaagaatcctgccagactcaccttacaaataattcagctctttctgctgaaaagaacaatctgttctctcagctggagagcattacattggccatgaaagcactagaaggtatgcacaccaatctggaacagatgcactcctctgtatcaagagagaaggattttgcatatgatcaagtaagggaactgcangatc

SEQ ID NO: 95982 - DNA, 512 bp, Zea mays
  unsure (1)..(512): unsure at all n locations
ttacgtacttgaaacagatggcgattgtactgctgctccggtccggaattcccgggtcgacccacgcgtccgcccacgcgtccgatgatctggtgctcgtgcaggctgatctttacaccttggatgatggctttgtcatccgcaacccatccagagcgaatccagctaacccttcaattgagcttggacctgagttcaagaaggttgccaatttccttggtcggttcaagtccatccccagcatagttgagcttgacagcttgaaggtttctggtgatgtctggtttggctctggaattacactcaagggcaaggtgacaattatcgtcaagcctggagtgaagttggagattccagatggagacgtacttgagaacaaggatgtcaatggccctgaggatctttaagcaatgtgtatcatcaccagttgtcccaaggacatgtcacatgaactgtcaagcctaatcactcctactgagctctatantttgtaatgttcatgtgcattccga

SEQ ID NO: 95983 - DNA, 522 bp, Zea mays
  unsure (1)..(522): unsure at all n locations
tggtgtgcgctgctttgacacgacatatatagtatagctgctaccggtccggaattcccgggtcgacccacgcgtccgcggacgcgtgggcgtcggagagggcgtgaccgagctcgcgccaggcgaccacgtcctcccggtgttcaccggcgagtgcaaggagtgcgcccactgcaagtcggaggagagcaacatgtgcgacctcctcaggatcaacgtcgaccgcggcgtgatgatcggcgacggtaagtcccgcttcaccatcagcgggcagcccatcttccacttcgtcgggacgtccaccttcagcgagtacaccgtcatccatgtcggctgcctggccaagatcaaccccgaggcgcctctcgacaaagtctgcatcctcagctgtggtatctcgaccggccttggcgcgacactgaatgtggcgaaaccagccaagggctcgacggtggcgattttcgggcttggggctgtaggccttgctgctatggaaggtgctagactgggctgtgcatcaan

SEQ ID NO: 95984 - DNA, 523 bp, Zea mays
cttagtgcctgctgatatgaataagcacatgatagcactgctctaccggtccggaattcccgggtcgacccacgcgtccgcccacgcgtccgcaccccctcgcggggcgagggacgtggcgtctggccccacgcgccgcagggcgaggtgggccgaagcaggggctgccggcgaaccgcgccgggcgcaacacgtggtgggcgacatcaagttgttctcggtgcagcgtcacggctcgcgggcggacattcggccctatggacccatcgagcgaccgagcttgccctctgaccgcgaccccaggtcagtcgggactacccgctgagtctaagcatataaataagcggaggagaagaaacttacgaggattcccctagtaacggcgagcgaaccgggagcagcccagctcgagaatcgggcgtactcgtcgtccgaattgtagtctggagaggcgtcctcagcgacggaccgggcccaagttctctggatagggacgcctgtgatggtgagagccccgtacggc

SEQ ID NO: 95985 - DNA, 555 bp, Zea mays
  unsure (1)..(555): unsure at all n locations
ttcgtgttgatccagcncactacagcactnctgtaccggtctcggaattcccgggtcgacccacgcgtccgcccacgcgtgcgcggacgcgtgggatccaccatagtgaggtggttggacatgcttcgcgtatatgcacctgtgcttgccttccttcgggacggagctgattggttaatgttcatcgaagacgttgatttgcttgccaaaaaagctagcaacaagggcggccgctctagaagatccaagcttacattcgcttgcatgctacgtcatatcgtcttgatagagtcacctaaattcaattcactggccgtcgttttacaacttggtgactggtaaaaccctgtcgttacccaacttaatcgtcttgcagcacatgtgccttttgacagcttgcgtaatatcgaagaggtccgcacagatcgctcttcgcaacacttgcacagtctgaatgggtaattggacgcgctctgtaactgcgcaattagcgcagaagatgtngtagttacacgcaatgtgaccagtacacttgccaggggccctactgccagg

SEQ ID NO: 95986 - DNA, 560 bp, Zea mays
  unsure (1)..(560): unsure at all n locations
agtatggctagtccctggacctacagcactgccgtaccggtccggaattcccgggtcgacccacgcgtccgcccacgcgtccgcccacgcgtgcgatgaggcggacatacgcagcaagccaagcatatacggatttaaatccgcacaccctatggtatctcggcgcggctgctatggcaagcggcagtcctgacgaaggggaatgcgcgcctaccgccggaagtgaaccgggtgctctacgtgcggaacctgtcgctcaacatttcgtgcgacgagatgtactacattttcggcaagcacagtgcgatccagtggatccgtctgggcaacgccaaggacacgcacaggaccgcttacgttgtctacgaggacatgtacgacatctagaacgtcgtcgaccacctattcggcttcaacgtcngcaaccgttacctaatcgagctctagctaccacccgatcagatgttcgataagtccgatattcaggactaaggagacgataatcacctgctccatgagaaattccgcaattgnttccaagacgcctggtccgggcttcc

SEQ ID NO: 95987 - DNA, 524 bp, Zea mays
  unsure (1)..(524): unsure at all n locations
atgaagcttatntcaattccgagtcgagtgcaatggtctactcgtccggaattcccgggtcgacccacgcgtccgcggacgcgtgggcggacgcgtgggctgcagtacgctaaccagctgtgtgagcgtctgccgagccgggacggagagtcaacagtcagctgccaggagatctccaagatgcccagccttgcgttcaccatcgcaaacaagaccttcaccctaacacccgagcagtacattgtgaagctggagcaaggaggccaaaccgtctgcatcagtgggttcatggcgtatgacgtgccaccgccgcgtggtcctctctggattcttggggacgtcttcatgggagcttaccacacggtgttcgacttcggcaacgacaggattggcttcgcggaatctgcatgagtgtggagagcactctcatctttataaagacgataccctatgtattagggatgtgtaagttattgtctatccactacatgccaacagtacgctgcatataaatcggtggccaa

SEQ ID NO: 95988 - DNA, 514 bp, Zea mays
  unsure (1)..(514): unsure at all n locations
atcacggnntnagctcgatcacgcagtatatcgcattgctctaccggtccggaattcccgggtcgacccacgcgtccgcggacgcgtggtcggacgcgtggggttggattgggttcaaagttgggcttttggacaggtgtggtgtgcacggcagctctgtgacttgtgaggaggaagggaggaagaaagcggatccatggcgtcaaagcggatcctcaaggagctcaaggacctgcagaaggatcctcccacctcttgcagcgcaggccctgttgccgaagatatgttctactggcaggcgacgattatggggccatcagatagcccatacgctggtggcgtatttttggtcactattcactttccaccggactacccattcaaaccaccgaaggttgcattcaagacgaaggtttaccacccgaatatcaacagcaacgggagcatctgtcttgatatcttgaaggagcaatggagccctgcactgacagtttctaaggtcctcctctcaatt

SEQ ID NO: 95989 - DNA, 522 bp, Zea mays
ctatggctgctgagctggtacgtgtctcatagtcacgtcgtaccggtccggaattcccgggtcgacccacgcgtccgcggacgcgtgggattgtccatctttatccctttctcaaaggtttggctggaaggcaaaacaggacaccaacgatcgtcatcgtctggtccattctgctggcttcaatcttctcgctccttcgggttcggattgatcctttccttgcgaaggatgatggtccgcttcttgaggagtgtgggttggattgcaactaggatgtcagtgcatcagctcccgcaatcgtgcatatgcttgaagtactattttcaggtgtttgtacccatattcagtgtctgtcgataagagacatgaaatgtgccacgtctctattgatccatggtgaacctacttaatatctgagagacatactgggggataatggcggctgccgcaatccttgtgcagttgggccgtggaatacagcatatgcaagtgcttgactgtgcagcattcattattactcgg

SEQ ID NO: 95990 - DNA, 552 bp, Zea mays
  unsure (1)..(552): unsure at all n locations
ngacgtgtagtccagcncacgtacgcactgccgtaccggtccggaattcccgggtcgacccacgcgtccggactagttctagctcgcgatctagaactagtccctgggcagattggcaacggctatgcgccagtgctggactgccacacctcccacattgctgtcaagtttgctgagctcattaccaagatcgacaggcggtctggcaaggagcttgagaaggagccaaagttcctgaagaacggtgatgctggtatggtgaagatgataccgaccaagcccatggtggtggagacgttctcagcgtatcctccccttggtaggtttgctgtccgtgacatgaggcagacggttgctgttggagttatcaagagtgtggagaagaaggacccgaccggcgccaaggtgaccaaggcggctgccaagaagaaatgatgcgatcctgcgcctgctttagcaatacctaggtttcatcatcacaaagttttgttgtaatcgttggctgtatcgtgtgaactggtgagatcttgtagcatgtgcactttatctatt

SEQ ID NO: 95991 - DNA, 556 bp, Zea mays
agaactggtgtccatgcattgtattgtactgctctaccggtccggaattcccgggtcgacccacgcgtccggacccattaccaatgccaagaacaagaaaccagagaggacagccgcgaatacaatccgggtcccgtccaaaaacccaccataccgtctcccccatctgcaagaacaagatcaggagagcatcctagggggaagaaacaggagggggaaaaagaagcccagaaagaccaactgaccaaacaaaaaggtggcatctttgtgtcaccgaggcaccgccgatcacagaccaaagtccgctcctctggtccatcccaagcgtacagcagccgagatttcttcgatctgcgcttgcgtttttttttcttgtaaagattttagttttccccccttcaactgttgctagccttgagtcgctgagaagtttcgagaagggtggtgtgagtgtcggatagctcaagatggatccggtgttgcttgacgacgtcatacgccggcttctggaagtgaagaatctcaagccttgggaagaacgcgcagcttgcagagt

SEQ ID NO: 95992 - DNA, 515 bp, Zea mays
  unsure (1)..(515): unsure at all n locations
nttagtnnctaattcgagagggggaggggaaagatatactcgtccggaattcccgggtcgacccacgcgtccgcccacgcgttcgcaggctcaccccaccaacagcaagcgaaaatctcccgatcccctctggtctgcgcggcgaagatgtcggagcgcggcatgggcgggaagggcctgtgcaagggcggcgcgaagcgccaccggaaggtgctccgcgataacatccatgggatcacgaagccggcgatccggcggctggcgcgcaagggcggcgtgaagcgcatctccgggctcatctacgaggagagccgcggcgtcctcaagatcttcctggagaacgtgatccgcgacgccgtcacttacaccgagcacgctcgccgcacgaccgtcacagccatggacgtcgtctacgcgctcaagcgccatggccgtaccctctatggcttcngcggctaggctaggccggccgcgcattgctgtcgtcgatgcggttctatggcttttgcaattcg

SEQ ID NO: 95993 - DNA, 543 bp, Zea mays
  unsure (1)..(543): unsure at all n locations
gtgagctcggttgnngctgagtacgagtctcatagcactgccgtaccggtccggaattcccgggtcgacccacgcgtccgcccacgcgtccgcccacgcgtccgcccacgcgtccgcctatcagacgattgcttgatccgacttcttccaagaacacatcgccatgagctttatattgagtcgtctgttgaaggaccccattgtgggcttttccctgttggagcaccatcaacaagcacaacaactactggcctgaaatggaatctaagtgaatcaaagatgagatttgggagcatgataagcacatccaacattgtgcagtcggagaaagtaactgtagaatctgatgcagatctcttgtggacaatttctctgcgaaatctgacataagcagttcctagtttgttatcttttttcttctctttcctgtcaagtggcaaccaagctcttgtacagccacttttgtgtttatgagttgtgtgtctggtaaataaataccatctgatgacaaatcgatgaggtctcatcattagacaggatgtn

SEQ ID NO: 95994 - DNA, 544 bp, Zea mays
  unsure (1)..(544): unsure at all n locations
agctgaggccgactgtcgactgccaggccggtacagcactgccgtaccggtccggaattcccgggtcgacccacgcgtccgcccacgcgtccgcccacgcgtccggaagaagaaggtgcctgttgctaagaaggatgcgagtganggacaagagggtgaggctatagctgaggaaacaaagaagagtaaccatgtgcagaggaagattgagaagcgacagcaggaccgtgcactcgacactcatattgaagagcaatttggcagtgggagattgttggcctgcatttctgcccgtcctgggcagtgtggccgagctgatggctacatccttgagggtaaagagctcgagttctacatgaagaagctccagaggaagaagggcaagggtgttgcatcttagagcattcttttagctagaactgcaaaatatcttctacttgggggattttgttgttagtctttatgcatatcatttgcggacctgatgaacacttcataagtgaatcaactctcgattctaagaattgataattttcacatgcgg

SEQ ID NO: 95995 - DNA, 538 bp, Zea mays
  unsure (1)..(538): unsure at all n locations
tgtgtgcgctgtcgctggactgatctcactgactgcctgtccggtccggaattcccgggtcgacccacgcgtccgaacgagacgatcgcgctcaagaagatccgcctcgagcaggaggacgagggcgtcccctggaccgccatccgcgagatctgcctcctcaaggagatgcagcaccgcaacatcgtcaggctgcaggacgtcgtgcacaacgacaagtgcatctacctcgtcttcgagtacctcgacctcgacctcaagaagcacatggactcctccacggacttcaagaaccaccgcatagtcaaatccttcctctaccagattctgcggggcatcgcctactgccactcgcaccgcgtgctccaccgcgacctgaagccgcagaacctgctgattgaccgncgcaacaacctcttgaagctcgcggactttggactggcgaaggccttcggcatccctgtccggacgttcactcatgaggtacgtttcgcaccctgatgacacgctctcgatctggtagtatgctggcttgcgg

SEQ ID NO: 95996 - DNA, 547 bp, Zea mays
  unsure (1)..(547): unsure at all n locations
gttagtgcgtattacgcttttcacgcnncagtacagtacctgcctgtccggtctcggaattcccgggtcgacccacgcgtccgcccacgcgtccgaatctccccagcaatccctagcagaagccttccatcctcactcgctcgatggcccgcacgaagcagacggcgaggaagtccaccggcggcaaggcgccgaggaagcagttggcgactaaggcggcccgcaagtctgcccctgcgaccggcggagttaagaagccccaccgcttccgccccggtaccgtcgcgctccgggagatccgcaagtaccagaagagcacagagctgctgatccgcaagctgccgttccagcgcctggtgcgggagatcgcgcaggacttcaagaccgacctacgcttccagagctccgctgtctccgcgctgcangaggcggctgaggcctaccttgtcggtctcttcgaggacaccaacctctgcgccatccacgccaagcgcgtcaccatcatgcccaaggacattcagcttgcccgccgcatccgtggggagag

SEQ ID NO: 95997 - DNA, 554 bp, Zea mays
  unsure (1)..(554): unsure at all n locations
agttgggtatcgatgatccatgcactcatagcactgccgtaccggtccggaattcccgggtcgacccacgcgtccgcccacgcgtccgcccacgcgtccgcttgcacgggccaacgcacacataacacgagctcgtcgtcgatggcgcggtgggctgcggtgctggcgctggccgcggccacggccatcgccgtggcgtccgtggcgggcggcgacatgagcgcggacaagacggagtgcgcggaccagctggtgggcctggcgccgtgcctgcagtacgtgcaggggcaggcccgcgcgccgccgcccgactgctgcggcggcctgcgccaggtgctggggaagagccccaagtgcctgtgcgtgctcgtcaaggacaaggacgaccccaacctgggcatcaagatcaacgccaccctcgcgctcgcgctccccaacgcctgcggcgccacccgcgccaacgtctgccactgcgctcagcttctgcatattcccccgggcttcaaagacgccgncgtcttcagtcccggcagcgacaagggctccactgtcgg

SEQ ID NO: 95998 - DNA, 554 bp, Zea mays
  unsure (1)..(554): unsure at all n locations
agagtgtgatccaggcactgatgtagtagcaccgcggtaccggtccggaattcccgggtcgacccacgcgtccgcccacgcgtccgcccacgcgtccgcccacgcgtccgcggacgcgtgggcaggtagctagcgttcctaatcaccgacgaataatctcttcttcacctcactaacaccgagctagcagctcgctctgtcctgcaacaatggccgctcgctcctcctcccagcagctggtcgcggcggcggtcctggcagcggcgctgctgctgctggcggcgggggccgggacggcgtcggcggcggtgagctgcggcgaggtgacgtcgtcggtggcgccgtgcctcgggtacgcgatgggcagcgcggcgtcgccctccgcggcgtgctgcagcggggtgcgctcgctcaacagccgcgcgtcgtcggcggcggaccggcaggccacctgcaactgccttaagagcatgacnggccggctcggggcngcatcagcatggccaacgccggccacattcccggcaagtgcggcgtcttcgtcggcgtgcccc

SEQ ID NO: 95999 - DNA, 539 bp, Zea mays
  unsure (1)..(539): unsure at all n locations
tgtggccgatagtcgcttcgaagctcctcctagcgctgccgtaccggtccggaattcccgggtcgacccacgcgtacgcccacgcgtacgcccacgcgtacggttggcttctcctacccctccggttcgggtgcgggttcgtgaggttctccggggttcggatacatgggtgagcggatcgagatggctgcgacggatgttgagtaccgctgcttcgtctgcggtctcgtctgggccacggacgaccactcccttcacaacggcttcagcacctacggcgaggtcctagagtccaagattatcctcgatcggtagacgcatagggtcctcggattcagcttcgtcaccttcttcactgaagacgctattccgaacgccatcgagggcatgaactgcaatgagctggaccgtcgaaacattcccgtgaacgaggtccactcaccgggaaggctttgatgctgatgccgctggtacagtggtggtccgcgatggtgctgcttcctgtgttgcgggcgccgtgattgccgctgcagcttcan

SEQ ID NO: 96000 - DNA, 540 bp, Zea mays
  unsure (1)..(540): unsure at all n locations
gtgcgnttncacttccacgcccagtacgggcactgccgtaccggtccggaattcccgggtcgacccacgcgtccgctctagccgccgcctaccgctcgcgctctcctcgcgttcgggaaggtcgtttcgccatggcctcggagacggagacgttcgccttccaggcggagatcaaccagctgctctcgctcatcatcaacaccttctactccaacaaggagatcttcctcagggagctcatctncaactcctncgatgccttggacaagatcaagtttgagagtttgacggacaagaccaagctggatgcacagccagagctgttcatccacattgtccccgacaaggccaacaacacgctgacaatcatcgacagcggcattggtatgaccaagtcagaccttgtgaacaaccttggtaccattgcgcggtcaggcacgaaggaattcatggaggcacttgctgctggtgctgatgtgtccatgattggccagttnggtgtcggtttctactctgcctaccttgttgcaaagagggttg

SEQ ID NO: 96001 - DNA, 539 bp, Zea mays
aggagtgcatttcgcctccccgcccgatcaagcactgccgtaccggtccggaattcccgggtcgacccacgcgtccgcggacgcgtgggcggacgcgtggggctggggtagtaatcccaccagatggctatttgagaggtgccagagacttgtgttctaaacacaacgttttgatgattgctgatgagatccaaactggcatagctagaactggtaaaatgctggcatgtgactgggaaaacatacggcctgacatggtgattctaggcaaagcactcggtgctggagttgttccagtcagtgcagttcttgcagacaagggtgtcatgctgtgtatcagaccaagggaacatggaagtacattcggtgggaatccgttagctagcgctgtggcagttgcatcactgaaagtggtcagagacgaaggtctttgtgaaagggctgcaaagttaggacaggagtttagggaccagttacagaaggtccagcagatattccctcaaatcctaagagaagtgctgcggaagggtttgcttgac

SEQ ID NO: 96002 - DNA, 558 bp, Zea mays
  unsure (1)..(558): unsure at all n locations
gatatggttnaactagctcacctcgtcatagcactgcctgtaccggtccggaattcccgggtcgacccacgcgtccgcccacgcgtccgggcgaatagttcaattctcaaatagcaagggtccaggtccagattcgcggatagtttacatagatggtgcttttgatctgttccatgctggacatgtcgagatcttacgacttgctcgagaacttggagattttttgcttgtggggattcacacagatcagaccataagtgcaacacgaggacggcatcgcccaatcatgaatctccatgagcgaagtttgagtgttttggcttgtcgttatgttgatgaggtgatcattggtgctccatgggatgtttcaaaagacatgattaccacgttcaatatctctttagtcgttcatggaacaattgctgagaacatggacttcacaaaagacgatttacacccatatgcttgttcaatggctatgggcatctaccgncgactggagaagcccctggatattcacaacagtacaatcattcagaggatcggtgcttaacattg

SEQ ID NO: 96003 - DNA, 553 bp, Zea mays
  unsure (1)..(553): unsure at all n locations
cgttggttatctgaaacttttgacantgcactgcctgtccggtctggaattcccggctggacccacgcgtccggggactcttgcattgatgactgctgacacgggtgaaattcgtgcagaggttggggagcgcattgacacaaaagttgcagagtggagagaggaaggaaaagccgatattgtccctggtgttcatgttatcgattaagtccacatgctatacatcgagtgcttctccttgctgaaccgcgcgttgtaaaacgacatggcgccgatcttagcaatcgcaacgaaccgagggatcacgtctatccgcgggacaaactaccgctcgccgcatgggatcccgccagacttccttgaccggctactgattatcacgacgcatatttacacggaggatgagatccggaagatcctggatatccggtgcgacgaggatgacgtggagatgtccgtgtttttaaggttctgctcaaaaagatctggtgggaagatttttttttgtattgcttaaacttattacatttggcgtgcatagctgtcagatggg

SEQ ID NO: 96004 - DNA, 552 bp, Zea mays
tggtgggtatcgctgagcactaaactcctagcactgccgtaccggtccggaattcccgggtcgacccacgcgtccgggttttcttgcattgttcactggtgacacgggtgaaattcgtgcagaggttcgggagcagattgacacaaaagttgcagagtggagagaggaaggaaaagccgatattgtccctggtgttctgttcatcgatgaagtccacatgctagacatcgagtgcttctccttcctgaaccgcgcgttggaaaacgacatggcgccgatcttagtaatcgcaacgaaccgagggatcacgtctatccgcgggacaaactaccgctcgccgcatgggatcccgccagacttccttgaccggctactgattatcacgacgcattcctacacggaggatgagatccggaagatcctggatatccggtgcgacgaggaagacgtggagatgtccgctgatgccaaggttctgctcaccaagatcggtgtggagacctctctgcggtatgccatcaaccttatcacatctgccgagctagcctggca

SEQ ID NO: 96005 - DNA, 539 bp, Zea mays
  unsure (1)..(539): unsure at all n locations
aggcgactttcactggcagcgcctgcatagcaccgccgtaccggtccggaattcccgggtcgacccacgcgtccgctagatgatgccatccaaattataaacagaaacaagtatggcaatggtgcttccatattgacaacatctggcgtctctgccaggaaatttcaaacagacattgaagctggccaggtgggcatcaacgtgccgattccagtccccctgccgttcttctccttcacgggcagcaaagcttcattcgcaggagatttgaatttctacggcaaggctggcgtgcagttcttcacccagatcaagacgatcacgcagcagtggaaggagtcgccggtgcagcgggtctcgctctccatgcccacctcgcagaagtgagacgtcaaggacgctcacgccactctccaaagcttcactcctttccactcctctggacatagacccacgcatgggccacangagaaggataattggtaggcatggcgacactccatgcatggccatgatactagtgtgtgctcgctttgctc

SEQ ID NO: 96006 - DNA, 558 bp, Zea mays
  unsure (1)..(558): unsure at all n locations
aggtggtgtttctgtgaattttgcaactgcagctgccgtaccggtctcggaattcccgggtcgacccacgcgtccgcggacgcgtgggcttgtgcgcagccgcagccgctgcttttcgttcgtcttcagtcctacgggagggcgaaacccacagaccctctccctcccgtactccggcctacacatccaggggcgatgacgctgggtagctccggcgccggatcgagcgtcgtcgttccccgaaacttcaggctattagaggagctcgagcgtggagagaagggcattggtgatggaacagtgagctatggaatggatgatgccgatgacatctacatgcggtcatggactggtaccatcattggccctcacaatactgtacatgagggtcgcatctaccagctgaagtngtttgtgacacggactattcggagaagccaccatctgtcagattccactcaaatatcaacatgacatgcgttaatcacgagacaggaattggtgatccaatgaagttgggttgctagccaactggcaactggacttcccgatggatat

SEQ ID NO: 96007 - DNA, 547 bp, Zea mays
  unsure (1)..(547): unsure at all n locations
tgtcgggttngctgagcctcgactgtngcactgacgtaccggtccggaattcccgggtcgacccacgcgtccgcccacgcgtgcgcccacgcgtgcgcccacgcgtgcgttctcaagagcagccaagtcctgacgggcttctgagaaggactatgaggaagtcggtgcagagggtgccgatgatgagggtgacgagggagacgactattgagtagctggctaataagtagttctctggtggttaatggttgggttattttgagtatatactctatggttccactccattggatactgctgctgcgtgtgtttccattttgtactatgtagtaaattgttcgtagccccctaaaaataacttgaccggataatgagggcggccgctctagaggatccaagcttacgtacgcgtgcatgcgacgtcatagctgtgctatagtgtcacctaaatgcaattcactggtcgtcggttacaacgtcgtgactgggaaaccctggggttcccaactgaatggcttgcacacatccccttttgcagctgcgttat

SEQ ID NO: 96008 - DNA, 540 bp, Zea mays
  unsure (1)..(540): unsure at all n locations
cgagtnctagtgatgnccggatccacagactgactgtaccggtccggaattcccgggtcgacccacgcgtccgcccacgcgtccggtgtccggcgagccctacacgctgcacaccaacgtgttcacgcgggggcaggggcagcgggagcagcagttccgcctctggttcgaccccaccgccgacttccacacctactccatcctctggaaccccaagcacgtcatcttcatggtggacgacatgcccatcagggacttccgcaacctggagagcaagggggtggcgttccccaagagccagccgatgcggctctactccagcctgtggaacgcggacgactgggcgacgcagggcgggcgcgtcaagacggactggtcccacgcccccttctccgcctcctaccgcgggttcaaggccgacgcttgcgtcgccgtcgcgggcggccggacccgctgcggcgccaccgtcggcaccgagggcaccggcgcccccgtctccgncgncggcgccggggactggtacaaccaggagctggacct

SEQ ID NO: 96009 - DNA, 545 bp, Zea mays
  unsure (1)..(545): unsure at all n locations
tgttctaggccgntgtctccgaaccctgacagcatgcactgacgtactcggtccggaattcccgggtcgacccacgcgtccggtcaacgaggacgtctgccggcagtgctcctgctcctcctcctactcctcctccgtcccggccgccgcgcgagcttgggttagtgtctcttcttcgcggagacctgtgaggagagccatcatcatggccgctgttgagactgttgtcctcaaggttgctatgtcatgcgagggctgcgccggggcggtcagaagagtgctctcgaagatggaaggggttgaaaccttcgacatagacctcaaggagcagaaggtgacagtcaaaggcaatgtcaagcctgaggacgtcttccagacggtttccaagtcggggaagaggacctcctactgggagggggaagccacagccccggacgctgcggcggctccagaagccgaagcagctcccagcaccgcggcagaagcgccttctgctgctgctccggcggcgccagagatcaccccagccaaagctgacgcctgan

SEQ ID NO: 96010 - DNA, 542 bp, Zea mays
  unsure (1)..(542): unsure at all n locations
cgtccgcctntttcactaaccagccatccatagcacctgtccgtaccggtccggaattcccgggtcgacccacgcgtccgaagcaatcggcccatttctattctgtggatataactgaaaaacaagctaaaatggggctagtttgtcgtgttcactcaaacgataaaagcaaattcaagttgctatattttgagcttgaagaaaatggcgggcttagtcttgcactacaggaagacagtgtgaaggttgggaaagttactgctgcagggatgtatttccttggttttcctgtgtaccgttttgaacaaaataacctggcagctgctgcaaaagattctgatggtgcattctttaaaagattggatagctttcagccatgtgacatacatgaactgaaacctggaacacacttctttgctgtctacggtgacaacttcttcaagagcgctagttatactatagaggttgtatgtggtgaatcttttcctgccgaaaaggagatgctacgaaatgtggaggccaagatactcacaaaacgagct

SEQ ID NO: 96011 - DNA, 543 bp, Zea mays
gatgggcgactttcaccgtttcgattgcatctgcactgccgtaccggttcggaattcccgggtcgacccacgcgtccgggccaggaaggtgaagctcgactccaagaggaccaagcttaccccggagactgcgaaggtgaaggctgctggcaaggcatggtacaagaccatggtctcggacagcgactacaccgagtttgagaacttctcaaagtggctcggcgtgactcagtgagcggcaagggtagttaagttctgagtagctcagcttatgttgagaggaaagagaatccatcaatctgttttatcctgcatcatcataacaagttgctacaagtcttgcatgttcgagttggttgtgcaaaaaaaaaaaaaaagggcggccgctctataggatccaagcttacgtacgcgtgcatgcgaagttataactcttctatagtgtcacctaaattcaattcactggccggtggttttacaacgtcgtgactgggaaaacccttgcgttacccaacttaaatcgccttgcagcacatttcccct

SEQ ID NO: 96012 - DNA, 550 bp, Zea mays
  unsure (1)..(550): unsure at all n locations
ggtgggtntcactgagacgatagcngtagcactgcggtaccggtccggaattcccgggtcgacccacgcgtccgggactacaacggcgcgaggaccaaggacgccatcgtcgactggatcaacaaggagctcggcccggccgtgcaagatgtcaccagcgtcgacgaggccgagaggatactcaccggggatgacaaagccgtccttgccttcctcgacactctaaccggtactcacagtgacgagcttgctgctgcttcaaggctggaagatagcatcaacttttatcaaacttcgattcctgatgttgctaagcttttccatatcgacccagcagcaaagcgtccatccattgtactgctgaagaaagaggaggagaagttgaccttctatgatggaaagtttaaagcatcagccattgctgaatttgtgtctgctaacaagcttgctttgattaccacactaactcaagaaactttcncttctatttatggcaatgcaatcaagaagcagatttactatttgctgttgcaagtgaggtcttcaaatt

SEQ ID NO: 96013 - DNA, 544 bp, Zea mays
  unsure (1)..(544): unsure at all n locations
tgttagtgcgactgtttccgactccgactgcactggcagtaccggtccggaattcccgggtcgacccacgcgtccggaagtaacatgatttttatacagggatgctccttcgttacggaagaccatgcagaacctgtcaggcccattgccacatcagctgatattactacttctatggatatgcgtctaatgatgaataagatcaagattgttgagttcatctctgttctactatcaattggtagtgcagctgccaaaacacgactgattcaactaggagcaatcaagcatgctatagatctattttttgagtacccgtttaacaacttcttgcaccaccgtgcgagaatatcatcggctcatgtttggagagtaagcaggatcgactgattgaccatgtccttgatgattgtaaacttgttacaagaattctggaagcagagaagaactctgctctgtcgtcagatttaacgaagcatacattgtcttcagagggaagattttcaccatggataggaattgttggtcatatgacacagatagn

SEQ ID NO: 96014 - DNA, 543 bp, Zea mays
  unsure (1)..(543): unsure at all n locations
gatgagggcaaatgnaatgaattagtgtgcaatagcactgccgtaccggtccggaattcccgggtcgacccacgcgtccgcccacgcgtccgacttcagcaaaggtccgcgacaaaggttacctttcctttagtttggagcaatacctgctgcagtcaccctctgtaccgtgagtctgagcttatccaggagaactaccttggtgtgagaaatgcagcacagaggaagctactggatgagctgggcatcccagcagaagatgccccagttgaccaattcacccctctgggccgaatgctttacaaggcaccatctgatgggaaatggggggagcatgagctcgactacctgctgttcatcgtccgggacgtgaaggtgcagccgaacccagatgaagtcgctgatgtgaagtacgtgaaccgcgaggagctcaaggagctcatccggaaggctgacgctggcgaagatggngtgaagatctcccnctggttcatgctggtggtggacaacttcctcatgggctggtgggaccatgttcagaaa

SEQ ID NO: 96015 - DNA, 542 bp, Zea mays
  unsure (1)..(542): unsure at all n locations
ngtatgtgccgntctcgctgagtccagttctcatccgactgccgtaccggtccggaattcccgggtcgacccacgcgtccgcacggtcatggggaaaatcgtggtgtgcatgttcggagcaagcgacgcggatggcatctggttgcagaatgctggtggagcagggatagttgatgtggattcttacgagtggtctcgtgatggttccgcgctttattccttcacccttccgggtctcacgctcagctacaccgccggcgagaagctcagggcgtacatggtctcggtgccctatccggtggcgtccttgagcttcggctgtgagacggtcatcagccgcaagaatcgggcgccggtggtggcgggattctcgtcgcgtggccccaatcctgccgcacccgagctcctcaagcccgatgtcgtcgcgccgggagtgaacattcttgcggcctggtcaggcgacgcaccactagcggnggtcttcgttcccgatgggaggagagcgaactacaacatcatatcggggacttccatggcgtgcc

SEQ ID NO: 96016 - DNA, 572 bp, Zea mays
  unsure (1)..(572): unsure at all n locations
tgtatgcgttgnaaccgagtnccaaaanggctantgcacctgccctgtccggttcggaattcccgggtgcgacgcacgcgtccgcctgaaccaaaaccagagcctaagccagagcataaacctgagccaaagccagaggctaaacccaaaccgaaaccagagccaaagccagagccacaaccaaaaccagagcctaagccagagcctaaacccgaaccgaaaccggagccaaagccagagccccaacctaagccagagcctaagcctgagccatagccagaacgaaagccagagccacaaccaaagcctgagcctaaaccagaaccaaaaccagagccaaagccagagcctaagcccgaaccaaaaccagagccaaagcctgagcctaaacccgaaccaatgtcagaacctaaaccagagccaaaagctgagccgaaaccgaaacccgatccagagccagagccacaaccaaagctagaacctaaagccagaccaaaaccagagccaaagccagagctcaaagcccaaaccaaaaaccagagccaaaagcctgagcctaaacccggaaccat

SEQ ID NO: 96017 - DNA, 552 bp, Zea mays
  unsure (1)..(552): unsure at all n locations
agagggtttaactgggtcaatagcnatagcaccgccgtaccggtccggaattcccgggtcgacccacgcgtccgcccacgcgtccgagataactcattggtgagagacataagccaaatgccgcagagcagcgatgggattgaaggattgtcacatataacagttgctggtgcgctcaatcatgggatgaaggaggtggaagtgtggcttcagacaataagtccaggtcaaaggacgccaatccacaggcattcctgtgaagaagttttcactgtcctcaaagggaagggtacgctcttgatgggatcaagctcactaaagtacccagggcagccacaggaaattcctttctttcagaataccacattttcaatccctgtaaatgatccacaccaggtttggaattctgacgagcacgaagatttgcaagttcttgtgatcatatcgagaccggctgctaagatattnttatatgatgattggagcatgccttatacaagcgtgggactggaattccccctcgtctgggatgaggactgcttcgaagcacat

SEQ ID NO: 96018 - DNA, 555 bp, Zea mays
  unsure (1)..(555): unsure at all n locations
ctcgactatncctgggacgactgcngtagcactgcggtaccggtccggaattcccgggtcgacccacgcgtccggagagacggaaaaatatgcccaaaccctagctcccgatctcgatggcgaaccctcgcgtcttcttcgacatgaccgtcggcggcgccccggcgggccggatcgtgatggagctgtacgccaacgaggtgcccaagaccgcggagaacttccgcgcgctgtgcacgggcgagaagggcgtgggcaagtccgggaagccgctccactacaagggctccaccttccaccgcgtcatccccgagttcatgtgccagggcggcgacttcacccgcggcaacggcaccggcggcgagtccatctacggcgagaagttccccgacgagaagttcgtgcgcaagcacaccgaccccggtgtgctctgcatggccaacgccgggcccaacaccaacggcttccagttcttcatctgcaccgtcgcgacccctttggctcgtcgggaagcacgtcgtctttgggcaggtcgtcgagggcatggacgtttgt

SEQ ID NO: 96019 - DNA, 540 bp, Zea mays
  unsure (1)..(540): unsure at all n locations
ggttgtgcgctgatcatgcatcgagtgtcatgacgtaccggtccggaattcccgggtcgacccacgcgtccggtccagctcgatcgcgatcggaggccagaaatccatggccgctcccgccgccgcgccgctcgacgagggcaaggcgaagaaagtccttcgccaggtcgagttctacttcagcgacagcaacctcccccgcgataagttcctgcgggagacggtcgagcagagcgatgacggattggtgagcttgcccttgatatgctccttctcgcggatgaagtcccacctggggctggacgcagatgtcaagcccgagactgtgccggaggagaccgtgcttgcggttgctgaggtgctccggccttctcttgccctccgcgtatcggaagatggaaagaagattggtagagctagtgaactcttgaagccagatgagatcatagaacaagtagactctaggactattgctgtatctccgctgccttgcaatgtaaagcaggaagacgtncaatcttttttcacaaattatgcana

SEQ ID NO: 96020 - DNA, 548 bp, Zea mays
  unsure (1)..(548): unsure at all n locations
tgatggtgtgccgggacgtcagcactnctatcgctgttccggtccggaattcccgggtcgacccacgcgtccgcggacgcgtgggtcgcccacgcgtccgcccacgcgtccgctcgagaactccgggtcgagctcatttgaaatcaacccatcctcgtttcctccggctagcagcctctcaccctcatggccaagatcaagatcgggatcaatgggtttggcaggatcggaaggctggtggccagggtggccctgcagagcgacgacgtcgagctcgtcgccgtgaacgaccccttcatgagcaccgattacatgacctacatgttcaagtatgacactgtgcacggacagtggaagcaccatgaggtcaaggtgaaagactccaagacccttctctttggtgagaaggacgttgctgtgtttggctgcaggaaccctgatgagatcccatggggttagttggcgctgaatatggtgtgtggtctactggtgtttttggtggccggataaagctggagctcactggaatggtggggccatgaaggtgg

SEQ ID NO: 96021 - DNA, 545 bp, Zea mays
  unsure (1)..(545): unsure at all n locations
cgcggcgatgcgtgtgnaaggatcacacgcactgacgtaccggtccggaattcccgggtcgacccacgcgtccgcccacgcgtccgcccacgcgtccggaggatgcgtgtgctgaggcgccttctccgcaagtggcgtgaggccaagaagattgacaagcacatgtatcatgacatgtacatgaaggtcaaaggtaacgccttcaagaacaagagggtgcttatggagagtatccacaagtccaaggctgagaaggccagagagaagacactttctgaccagtttgaggccaagcgcgccaagagcaaggcgagccgtgagaggaagatcgctaggagggaggagaggttggcccagggtccacgagaaataacaccacctgtctcatccacagctccagctactggggcaccgaagaaagcaaagaagtgaagtattgaaataaagctgtagctttctagtccagtactgcactttcttttataagctctagtcaaattttggagcgcctgaactgttttgctggtatataacttagtgtattn

SEQ ID NO: 96022 - DNA, 542 bp, Zea mays
tggtggccgtattacacgtgccagctctcatcgaactgccgtaccggtccggaattcccgggtcgacccacgcgtccggagccagcttatggtcgagtcaatttcagcgctccaacggaaggagaagtcactgcaggaggagaacaaggttctgcagaaggagaaagcgttactcctgcatgcagctcgcggagaagcagaaagaccagcggcagcaagtgcaacgggaccaaactcaacagcagaccagttcgtcttccacgtccttcatgttaagggaagctgccccaacaacaaatgtcagcatcttccctgtggcagcaggcgggagggtggtggaaggggcagcagcgcagccgcaggctcgcgttggactgccaccatggatgcttagccatctgagctgctgaaagtttgccctcaccgtcgcgatgtgatagcccaaaatccagcaagtcttccccggaccccggactgtccccgcttctccgtctggtgcagtatcgtcgtgatcgcgagaagcagcagcagcggtttgccgt

SEQ ID NO: 96023 - DNA, 543 bp, Zea mays
  unsure (1)..(543): unsure at all n locations
gttggggnnnnnncctgaaatcgatctcatagcactgccgtaccggttcggaattccagggtcgacccacgcgtccgatgaaaggtctggatggcattcagggtccagtttacgtgggaacaggatgctgtttcagtagacaggctttgtatggatacgatcctgttttgactgaagctgatctggagccaaacattgttattaagagctgctgtggtagaaggaagaaaaagaacaagagttatatggatagtcaaagccgtattatgaagagaacagaatcttcagctcccatcttcaatatggaagacatcgaagagggtattgaaggttatgaggatgaaaggtcagtgcttatgtcccagaggaaattggagaaacgctttggtcagtctcctattttcattgcatccacctttatgacacaaggtggcataccaccttcaacaaacccagcttctctactaaaggaagctatccatgtcatcagttgtggatatgaggacaaaactgaatggggaaaagagattggctggatctatn

SEQ ID NO: 96024 - DNA, 551 bp, Zea mays
gaaggctgttcatgagcatgatactcgtagcaccgcggtaccggtccggaattcccgggtcgacccacgcgtccgcaagaacgccgccaggggcgtcagcggcctcaacgccggcaacgccgccagcgtcccctccaagtgcggcgtcagcatcccctacaccatcagcacctccaccgactgctccagggtgaactaaaacctagaccacgcgcgacgacggccgcctgatcgatcgatcgaccattccgccgtcgccgccggccggatcatcgatcgtcgtcatgatgatatctatcaatctacgcgtgatgatcgattgctacttgtctactgctatgtactactaaataaaatctctccgtgtgtacacgtacgcttgcatgtgcatggtagcatgtacgtacgacgtcgtccatgtataagtgtgtgacgtgtgagacagagagagagagagacaggatcgatcgagagacggtcatgttcttttgctagtttggttaatcatatcacaaactttgagtgtatacaagattatttcttgtgccaaa

SEQ ID NO: 96025 - DNA, 554 bp, Zea mays
  unsure (1)..(554): unsure at all n locations
ngtcggagaaancatgaaatcgatgcagtagcactgcggtaccggtccggaattcccgggtcgacccacgcgtccgcccacgcgtccggttctagatcgcgggccgcccttttttttttttttttttggttttttttttctttttttaacggggcaaattaagatctgctgctggcataacattacgacaatagttcatccgttcgacaacaaattttggcacaacttccacaggttcagcacttgaacaatctaagttaccaacacaaggcattttaagttcagagaaaagtgagaaataaacacatggccatttctagtccatctttactccaacaaaaccttagatgctgctcgggtacatgaacactctgaccttgcgccccatggactcaggcgggaggttggacttgaacttggcacggacgacgcccgagtttccgtgcggacgggtgacctttgcccaaatgcaccctgtacgggtctcattgcttttggtctttggccttgtagatgtacgccatgcgcttggcaacgttccacgcgacattctt

SEQ ID NO: 96026 - DNA, 388 bp, Zea mays
  unsure (1)..(388): unsure at all n locations
agccnctcnctgaaggctagctnagtccagcattgccgtaccgggtcggaattcccgggtcgacccacgcgtccgggcaaagttcgctcttggtcaccaccgtgaggcctccgacgccggctgcgtccgtgccgtcctcgccgagttcatcctcaccttcctcttcgtcttcgccggcgttggctccgccatggcaacagggaagctggccggcggcggcggggacacggtggtgggcctgacggcggtggcgctggcgcacacgctggtggtggccgtcatggtgtcagcggggctgcacgtctccggcggccacatcaacccggccgtgacgctgggcctcgccgtcacgggccgcatcacgctgttccgctccgcgctctacgtg

SEQ ID NO: 96027 - DNA, 388 bp, Zea mays
  unsure (1)..(388): unsure at all n locations
ggctttagctgatgnaaccgtccacncgtacgtncggtctgtgcttggtattcccgggtcgacccacgcgtccgcggacgcgtgggcggacgcgtgggcgagactgaacagcagtccgagacgccatgaacgtggaggaggaggtcgggaggctcaaggaggagatccataggctcggccagcagcagcccgatggctcttacaaggtcaagtttggcgttctcttcaacgacgatcggtgtgcaaatatctttgaagcactagttggcaccttgagggccgccaagaagaggaagatcttgacctacgaaggcgagctgcttctgcaaggtgtccatgacaacgtggagataaccctgttgcccccacctgcagttgctgccgcttg

SEQ ID NO: 96028 - DNA, 503 bp, Zea mays
  unsure (1)..(503): unsure at all n locations
cggctgctactgctctgggggaagtagcctccggcctcggtattcccgggtcgacccacgcgttcgcggacgcgtgggtcgcccacgcgtccgttcactcgtccgctcgagaactccatttcgatggcaggttgaaatcaacccatcctcgtttcctccgtctagcagcctctcaccctcatggccaagatcaagatcgggatcaatgggtttggcaggatcggaaggctggtggccagagtggccctgcagagcgacgacgtcgagctcgtcgccgtgaacgaccccttcatcagcaccgattacatgacctacatgttcaagtatgacactgtgcacggacagtggaagcaccatgaggtcaaggtgaaggactccaagacccttctctctggtgagaaggaggttgctgagtttggctgcaggaaccctgatgagatcccatggggttcggttggcgctgaatatgttcgtgagtctactggtgttttcactgaccaggn

SEQ ID NO: 96029 - DNA, 387 bp, Zea mays
  unsure (1)..(387): unsure at all n locations
cgtgctgatgttcgactgttccgtagcacgtcncggttcggaattcccgggtcgacccacgcgtccgcccacgcgtccgcaaatatcgagggaggatctaaaagaagcattcaaaaaatttggagctggccggtatgtggacttcagcatcggagataattcaggataccttcgctttgaagattctaaggcagctgaaaaagcccgcatgtctgcagtacttgctgatggtggcttgataattaaggaccacattgttactttggagcctgtgactggtgaagctgagaaggattattgggacacaatccgcagtattcaaggaaagtacaaggatagtagaagctacaagggaagggcttcaaataaccagagaggaggaaagcc

SEQ ID NO: 96030 - DNA, 387 bp, Zea mays
  unsure (1)..(387): unsure at all n locations
gtgggctgtgnaatcggtatncgtagcatcgncnctgnctcgtattcccggctcgacccacgcgtccgggagctgatagaaaggacgctgctgatatctcgatggtggcatacaaggctgcccagggcggtgctctggctgagcttgctccaactcaccctattaggcttggactggcacttaacttctcagtgttctactatgagattctgaactcacctgatcgcgcctgcagtcttgcaaagcaggcttttgacgaggccatctcggaactggacaccctgagcgaggagtcctacaaggacagcactttgatcatgcagctccttcgtgataacttgaccctatggacttctgacatctcggaggaccctgctgaagagattt

SEQ ID NO: 96031 - DNA, 387 bp, Zea mays
  unsure (1)..(387): unsure at all n locations
ttggtnttgattgttcagtccangtcagnacngatgtaccggttcggaattcccgggtcgacccacgcgtccgcccacgcgtccgcggacgcgtggggcctgaaacagcactccagaatagagagaatgagcaactgaaaagtagccgcaatgagtacctcaaactgaaggcacgtgttgataatttacagcggactcaaaggaacttgcttggtgaagatcttgagtcattaggcataaaagagctggagcacctggagaagcagctcgattcgtccttgaagcacataagatctacaaggacacaacacatggttgatcaactgacagaacttcagaaaaaagaacaaatgttttgtgaagcaaataagtgtcttcgaagaagaa

SEQ ID NO: 96032 - DNA, 505 bp, Zea mays
  unsure (1)..(505): unsure at all n locations
atgctgatagctactacggggatgagtagcgtgctcaccggttcggaattcccgggtcgacccactcgtcaggcgtctcgcacaacagcagctcattttcctaacacacctcaccaagcagagcagagacccggtattcgccggcgcggtagcgagagcgagagatggactggaggatgttcggtctcgagacccccctgatggtggcgctgcagcaccttctggacgtgcccgacggcgacgccggcgcgggctgcgacaaggcgagtggtgccgcggcgggcggcgggcccacgcgcacctacgtccgcgacgcgcgcgccatggcggccaccccggccgacgtcaaggagctcccgggcgcgtacgcgttcgtggtggacatgccggggctgggcacgggcgacatcaaggtgcangttgaggacgagcgggtgctggtgatcagcggcgagcggcgcctggaggatcgcgaggactccaagtacctgcgcatggagcggcn

SEQ ID NO: 96033 - DNA, 386 bp, Zea mays
  unsure (1)..(386): unsure at all n locations
tgtctgatgttcgatcgtncgtacggtcgtcgctgttcggaattcccgggtcgacccacgcgtccggaggaatgccagggactcccatgttcctatccttgccccactgccaattgggttcgcggtgggcctggtccaccttgccaccatccccattactggcactggcatcaacccagctaggagccttggcgctgccatcatctacaacagggatcacgcctggaacgaccattggatcttctgggtcggccccttcattggcgctgccctggctgccatctaccaccaggtgatcatcagagccatcccgttcaagagcaggtcttaagctgccgtggccgtgccgagacatgccagtccgaagaacgggcgtcttcctgtga

SEQ ID NO: 96034 - DNA, 397 bp, Zea mays
  unsure (1)..(397): unsure at all n locations
gttttaacgggctgtatnnccgtaaaccncgnacttacgatcgctgatcggtattcccgggtcgacccacgcgtccgcggacgcgtgggcggacgcgtgggtgctgatcgccatcgagggcatgaacggcaaggagctggactgtcgcaacatcaccgtcaacgaggcccagtcccgcggcggccgtggaggctgcggctgcggctacggtggtggccgtggaggcggcggctacggcggtggcgggcgccgtgatggcggctgcggctacggcggtggcggctgcggctactgtggcggcggtggctactgtggtggttgtggcggctactgcggtggcaaccgtggctgttgctactgcaacttcgacgggaactggaggaactgatctgtgggt

SEQ ID NO: 96035 - DNA, 388 bp, Zea mays
gcggtggtcaaccacgacatcatagtatcgctcgtaccggttcggaattcccgggtcgacccacgcgtccgccggggtcatacccgccacggtgcacgtccaagtgcggcgactgcagcccgtgctacgcggtgcacgtggccgtgccgccgggcgtgcctgtcaccaccgaatactacccggaggcgtggcggtgcaagtgcggcaaccggctctacatgccatgaccatgagcgagcaaggaggcggccagccggtgaagaatctctcgagagcgccggccgctggggccggcgctgcattattgcgccgggccgggtgcctctcgcctgcgcgcggtgtcgtcgtggtcctcgccgcgcgcatgggcgggatctgcgctctgcat

SEQ ID NO: 96036 - DNA, 508 bp, Zea mays
  unsure (1)..(508): unsure at all n locations
atggctgttttgtggggttccggagaagagaaagtctcggtctcggaattcccgggtcgacccacgcgtccgagggtttctacatccagccaacgattttctcagatgtccaggacggcatgaagattgctgangaggagatatttgggcctgtgcagtcgatcctcaagttcaaagacctcaatgaggttatcaagagggcaaacgcgagccagtatggattggccgccggcgtgttcaccaacagcctggacacggtcaacaccctgacgcgcgcgctcagggccgggaccgtctgggtgaactgcttcgacgtcttcgatgctgcgattccgtttggcgggtacaagatgagcggcatggggagggagaaaggcgttgacagcctgaagaactacctgcaggtgaaagctgtcgtcaccccaatcaagaacgccgcgtggttgtagacgctgcaagtgtggccttgtgcacgagaaccacgtatattcatttnctggtcacatcc

SEQ ID NO: 96037 - DNA, 506 bp, Zea mays
agataatctgtttaactgctatcgtagctacgtccaccctcggatattaccgggccgacccactcgttcgacggctcgtacattcactcatcgactgtttcatatgtacaagacggcatgaatatcgcagaggaggagatatatgagcctgtgcagtcgttcctcatgttcaaagacctcaatgaggtcatcaagagggccatctcgagccagtatggattgaccgtcggcgtgttcaccaacagcctgtacacgggcaacaccctgactctctcgctcattgccggcaccgtctgtctgaactgcttatacgtcttcgatgctgctattccgtttggcgggtacaagataagcgacatagctaggcagaaaggcattgacagcctgaagaactacctgcacgtgaatgctgtcgttaccccaatcaataacgacgaatggttgtagacgctgcaagtgtagcactgtgcacgagaaccacgtatattcatttactggctacatcc

SEQ ID NO: 96038 - DNA, 387 bp, Zea mays
  unsure (1)..(387): unsure at all n locations
atggttgttgtgnttcgactgcgttcnagtgacgtctcggttcggaattcccgggtcgacccacgcgtccgagccactcccctgaagcagttgttgctactgagctctttgttgatttgttagtagattattggaatgcttatgcttatgatgctcaaattgctggtttattctattcaatatatgttacttcagctggattccaggtttctttaggtggttacaatgacaagatgagagttctcttaaatgccatactagtgcaaattgtgaaatttgaagttaagccaaacagattttctgcactgaaggaaacttctgtcaaggactaccagaatttcaatttccgacaaccttattctcaagcgtcatactatgtctctttga

SEQ ID NO: 96039 - DNA, 388 bp, Zea mays
  unsure (1)..(388): unsure at all n locations
agaggttgttgaacccgatcatcgtcgcctgctcactgntcggtattcccgggtcgacccacgcgtccgctcttcctctgggcccccgctcctagatcacaatgcccagcaattctaccagcaggaatcagcaaaactgcgcaaccagatccagatgctgcaaaacactaacaggcacttggttggtgactccgtgggaaacctgtcactcaaggagctgaagcagctggagagccgccttgagaaaggcatctctaagatcagggccaggaagagtgagctgctggctgcggagatcagttacatggccaaaagggagactgagcttcagaatgaccacatgaccctcaggaccaagattgaggagggagagcaacagctgcagcag

SEQ ID NO: 96040 - DNA, 388 bp, Zea mays
  unsure (1)..(388): unsure at all n locations
atgctnttgttgntttcagttcancttagnactgctgtaccggttcggaattcccgggtcgacccacgcgtccgcaggtcgagaagattgtcaaaaccctgaatgaaggacaggttcccccttcagatgttgtggaggtcgttgtcagccctccttatgtcttccttcctgtggtcaagagccagctgcgccaagagttccatgttgcggctcagaactgctgggttaagaagggaggtgctttcaccggtgaagtcagtgctgagatgctcgtcaaccttggtgttccctgggtcattcttggacactctgaaaggagagctctgctgggagaatcaaatgaatttgttggagacaaggttgcgtatgccctgtctcagggactaaa

SEQ ID NO: 96041 - DNA, 386 bp, Zea mays
  unsure (1)..(386): unsure at all n locations
gtgctttcgctgttccagcccccagagncacgccgtaccggttcggaattcccgggtcgacccacgcgtccgattgacccaattggtgcaatcgaccaggcgaagctcacgatttcgaactggtctggagcagtgtgggaaaatgcagcatcgctggtaggtgaatcagctcctacagacatgcttcagaagttgacatatctggctatcagacaccatactcagattaagcgtgttgacaccgttcgagcatacacctttggggtgctttactgtgctgaggttgacattgagcttccagaggacttgccacttaaggaggcacacgccattggagaatctctccaaatcaagattgaggagctacctgaagttgagcgagcatn

SEQ ID NO: 96042 - DNA, 393 bp, Zea mays
agttagtggctgatgccccgactattgacgcctgcctcgtaccggttcggaattcccgggtcgacccacgcgtccgcccacgcgtccggcgacggcgcggtggctgcaggttgccgccatggcggtggcgctggtggcggagtgggcgacggcggcggcgcctcggaagcccgtggacgtgccgttccagaagaactacgtgccgacgtgggcgcaggaccacatccactacatcgacggcgggcgggaaggtgcagctgtccctggacaggtcaaccggaccggccttcaaaacccgggcgtccaacttttcgggcaactcaacattgccctggaacttggtcggcggcaattcgggggcaacggtaacggcctttaactggcggcgcaaag

SEQ ID NO: 96043 - DNA, 501 bp, Zea mays
agactgtcacgcgtctggggggaggtagtctcggtctcggaattcccgggtcgacccacgcgtccgtcgacccactcgttcgcggacgcgtgggtcgatgggttggcttctcctccccctccggggcgggttcgggttcgtgaggttctccggggttcggtttcgtgggtgagcggatcgagatggcggcgtcggatgttgagtaccgctgcttcgtcggcggcctcgcctgggccacggacgaccactccctccacaacgccttcagcacctacggcgaggtcctcgagtccaagattatcctcgatcgggagacgcagaggtcccgcggcttcggcttcgtcaccttctccacggaggaggcgatgcggaacgccatcgagggcatgaacggcaaggagctggacggccgcaacatcaccgtcaacgaggcccagtcccgcggcggccgtggaggcggctggggcggctacggtggtggccgtggatgcggcggctacc

SEQ ID NO: 96044 - DNA, 509 bp, Zea mays
  unsure (1)..(509): unsure at all n locations
agagtagtatagtggctctagggggaagagtaggtctcggtctcggaattcccgggtcgacccacgcgtccggcttgctggagagatgctacttttatcacctaggaagactttgcagcctgagcaagcatgtcaccctctggaagaggactcttgttctgtgacttcctcgactacaacatcatcaagagctggcagaactaagacaactgttcctgttgccccatcatttgtgtgtgctaaccgtgctgacaagaggaaggagttctacacaaaattagaggagaaacataaagctttggaagcagagaaggacgaggctgaggccaggaaaaaggaagagcaagacgttgctataaagcaactaaggaagtcattggtgattagagcgaaacccatgccaagcttctatcaagaaggccccccaccaaaggctgaacttaagaaggtgcctnctactcgtgccaaatcaccaaagtttacaagctcaaggagaaagagctgcaatt

SEQ ID NO: 96045 - DNA, 517 bp, Zea mays
  unsure (1)..(517): unsure at all n locations
nagggttantaactgctgaatagttggaggatggacgagtattctcggtctcggaattcccgggtcgacccacgcgttcgaaagcagcacaaatgcttagtgggattgacttggattcaggaatcaggatgcttgatgacgccaacaaattatccaagtgtgttcaaattgcacgactctatttagaggatgatgatgcagtgaatgctgaggcttttataaacaaggcttcatttttggtcaccaacagccatcaggaggttctaaacttacagtacaaggtctgttatgcaaggattttggatctgaaaagaagatttctggaagctgcacttcgatattatgacatttctcaaattgaacaacgcaagattggagacgaagagattgatgaaaatgcacttgagcaagctcttagtgctgctgtgacatgcacaatattggctggttgctgtccacaacgcttccgtgttcttgctactctgtacaaagatgaaagatgctcgaagttgaaaat

SEQ ID NO: 96046 - DNA, 388 bp, Zea mays
  unsure (1)..(388): unsure at all n locations
agcctttcgctgttcagttccacatcgnacaccgtaccggttcggaattcccgggtcgacccacgcgtccgcggacgcgtgggctgcgacatggcgcacatcagcgggctcgtcgccgcgcaggaagctgcaaatccttgtgaatattgtgatgtggttaccacaaccacgcacaagtccctcagagggccaagggctggcatgatcttctacaggaaaggccctaagccccccaagaagggccagcctgagggtgctgtttatgattacgaagacaagatcaactttgcagtgttcccatctctccaaggtggccctcacaaccaccagattgctgcacttgctgctgctctacagcaaactatgtcgactggcttcaaagcctatt

SEQ ID NO: 96047 - DNA, 394 bp, Zea mays
  unsure (1)..(394): unsure at all n locations
gtaaatggttgtggnttcagtnncntgacgtatcatcgtaccggttcggaattcccgggtcgacccacgcgtccgcggacgcgtgggctgacgcgtgggcgtgtcgcgtgggcggacgcgtggtcactggcggggtcgacggggctggagcagaagcagatcaacaactggttcatcaaccagcggaagcggcactggaagccgtctgaggagatgcagctcgcggtgatggatgggttccacccggtcaccgtcaacgccgtcgcgttctacgtcgacgcacgcctagtgggagcaacgccggcgatgttctacgcccggccagatcatggggctcatcatggtctctggcacaatagattcagcccactcacgctaccatgaagtattgaag

SEQ ID NO: 96048 - DNA, 390 bp, Zea mays
  unsure (1)..(390): unsure at all n locations
tgtgttgatgttaagcctacnttgacgtactcatgtaccggtttcggaattcccgggtcgacccacgcgtccggttcattaggattattgtcatgccgcttaccgatgatctatgaatgtggtgaatcttgcaactgttctacaaattgccggaacagagtgacccaaaaagggcccaggctacattttgaggtcttcaggaccaccaatcgaggctggggtcttcgttgctgggaacctgttcgtgctggttcatttatatgtgagtatgctggtgaggtcattgatgaactcaaagttaatttgaatgacaccgaagatgattacatttttcaaactgtatgccctggtgagaagactttaaaatggaattgtggacctgaactattn

SEQ ID NO: 96049 - DNA, 379 bp, Zea mays
  unsure (1)..(379): unsure at all n locations
tgcatgctgctcagccaactcgtacgccgtccggttcggaattcccgggtcgacccacgcgtccgtttttntttcatgaatcggtcaaaaggccgttctgacgagggtgaacacgatcaccggcgtggcatacaaggacgacccgacgatcatggcgtgggagctgatgaacgagccgcgttgccagtccgacgtgtcgggccacgccatccagtcgtggatcacggagatggcggcgcacgtgaagtccatcgacgggaaccacctgctggaggccggcctggagggcttctacggcgcgtcgtcggcccgcaggtccgcgaacccgtcggggtaccaggtgggcaccgacttcatcgccaacaaccgggcgcccggg

SEQ ID NO: 96050 - DNA, 503 bp, Zea mays
  unsure (1)..(503): unsure at all n locations
agtctgttactccgtacatggaaggtattcctcggtttcggatattcccgggccgacccacgcgtccgcccacgcgtccgcccactcgtccggccactcgttcggaagcagcagccaattcgctcgaggtcagatcgagcgctcgccaagcaagtcttccggccggccgctaagagagcaatcaagcaagacaagatggtgaagctcgccttcggaagcgtcggcgactccttcagcgtcaccttcatcaaggcctacgtggccgagttcatcgccaccctcctcttcgtcttcgccggcgtcggttccgtcatcgcctacgggcaactgacgaatggcggcgcgctggacccggctggcctggtggcgatcgcgatcgctcacgcgctggcgctgttcgtgggcgtgtacgtcgcggcgaacatcttgggcggtcaccttgaacccgacgtgacgttcgggctggncgtgggcggccacatgaccatgctgactggcctttt

SEQ ID NO: 96051 - DNA, 514 bp, Zea mays
  unsure (1)..(514): unsure at all n locations
aggggnnntaatgtgattgtgtgttggaagatagtaaccttctactcggttcggaattcccggctagacgtacgcagaaacctccaaacacctttctacctatctactaactacctgccgtcggaaaaccctagagcgctcgaccatggatccgcagcagccggagcctgtcagttacctctgcggagattgcggagctgagaacaccctgaagcccggagatgtcatccagtgccgagaatgtggctaccgaatactctacatgaagcggaccctgcggattgtccaatatgaagcgcgctgaagagtgaagacaagggtaaacactgaagatggtggatctattactcgccacattacctatgtatacagtcttttggtggaaatgaaaatgtgagacaacgtttgcatgtcctgtgcctgctctgaacctgagctggataaatcgtgacgcttgaactcgggactgatttgagaactgagacactgcatcaatattgtgatggatcctaaa

SEQ ID NO: 96052 - DNA, 511 bp, Zea mays
  unsure (1)..(511): unsure at all n locations
tgannnaaattctgtacgatatgagatggatgaaaagtttgtactcggatctgatggctcgacccacgcgtccgctcagcgcatatgtgacatgtttcttgctctagataaggatacgaacggtacactgagcaaacaagagctcaaggaatatgcagatggcacgttgactgagattttcattgaaagagttttcgatgagcatgttcgccggagcaaagttggaggtggaaacagtcgtgagatggactttgaaagctttcttgattttgttttggctctagaaaacaaagatacccctgaaggcttgacatatttatttaggtgccttgatctcaatggaaggggtttccttacaactgcagatattcatactctatttagagacgtacaccagaaatggattgagggaaggaactatgagctttgcatagaagacgtgagggatgaaatctgggacatggtgaaacccgcagatcctttcaagatctcgctatcagaccttctttct

SEQ ID NO: 96053 - DNA, 386 bp, Zea mays
ctgtgctgctactttgttcactacgtacagctgtactgggtattcccgggtcgacccacgcgtccgggagcagcaggctcaactgcgggatgctctaaacgatgcgctgaagcaagaagtggagaggctcaagatagcgactggcgagatgccgaagtccaacgaacaattcaacatggggatgcagcacgtctcgtacagcggcccttctttcttccatctcccggagcagcacgtagacattcagctgccgcaccatttccagcagcctgcgcggaacgtccagatgctgtcccaccccaactccctctcggatatggcgcagcaagactcgcttgggcggctccgggggctggacattggaaaagggtccatggctatgaagc

SEQ ID NO: 96054 - DNA, 392 bp, Zea mays
  unsure (1)..(392): unsure at all n locations
acgtggctgatgcaatcgcacaactgacgtacnactgtaccggttcggaattcccgggtcgacccacgcgtccgcccacgcgtccgcctgttggtacaatggcttacatgggcaatgtacaatatctgatgcaatgcaaatgtgctgttaacacagctgaagattggcttaaccctgttgccatacaagaggcgtttgaagccagggctctcaggatggcagtaaactgtgcccagaacataggccaagcagcaaaccaagaagaaggtttctatgagcggtcccctgatttgctagaggctgcagtagctcacatccagttggtcattgtaaccaagttcatttcgaaggtgcagcaggacattcctggacctggagtgaaggaacagctt

SEQ ID NO: 96055 - DNA, 391 bp, Zea mays
  unsure (1)..(391): unsure at all n locations
agtggctgtgtttttagtcgatttagnnactacagtacctgttcggaattacccggctcgacccacgcgtccgccgacgcgttcgtctgtaggtacattgtctgacatgggcaatgtacaatatctggggcggtgcaaatgtgctgttaacacacctgaagattggcttaaccctgttgccatacaagaggcgtttgaagccagggctctcaggatggcagtaaactgtgcccagaacatatgccaagcagtaaaccaagaagaaggtttctatgagcggtcccctgatttgctagaggctgcagtagctcacattcagttggtcattgtaaccaagttcatttcgaaggtgcagcatgacattcctggacctggagtgaaggaacatctt

SEQ ID NO: 96056 - DNA, 516 bp, Zea mays
  unsure (1)..(516): unsure at all n locations
cggctatgtattgaaatatagtactgatctacnggtctggaattcccgggtcgacccacgcgtccgatcgtatttcatgcgtcctgagtatatttttaagcaactgtatctgattgtccccattaaaaggtggtattccagtaacaagttgatatagaatgacaccaacactccacagatctgcctttgcatcatacttctgaccttgcatgacttctggagccatgtaaagtggtgaaccacaaagtgtttcggctagggcaaagggttgcaaaaattttgcaaatccaaagtcggcaatcttcaacagagtattttcattattttcaacaagaagaatgttctgaggttttaggtctcggtgaaccacgttattatcgcgaagcattttcagaccagatgctaactgacggatgaagtgcttagcaaccttttcagaaactcttttatgacgttgaaggtatgcatgtaagtcaccacctcgacaatactccagtatgagatatatactcccat

SEQ ID NO: 96057 - DNA, 521 bp, Zea mays
aatggctgattcactgaacatatgactaattaccgctccggtctggaattcccgggtcgacccacgcgtccgcccactcgtccgcccacgcgtccgggggcgtgcaaactactttgccaacctttcaaagggacttctgccaaagattggccgccggctgcccaagggccagcaagcaaacagcttgcttgacttgatgactataagggctttccatagcaaggtactgcgttgctttggccttggaacggcagtgggcttccgcatcaggaaaggggttctaaccgatatccctgcaattctttgcttcgttgctcgcaaagttcacaagaagtggcttgatccggcccattgccttcctgccattcttgcgggtccaggaggtatttggtgtgatgttgatgttgttgagttttcgtactacggtgctccagctcaaactccaaaagtgcaaatattcacagagcttgtggataagttgtgtggcaatgatgaatgtatcggctccggctctcaagttg

SEQ ID NO: 96058 - DNA, 504 bp, Zea mays
aggttgttaaagctgggagggaagtaaggctctaccggttcggaattcccgggtcgacccacgcgtccgcccagcgcggcgccaccggcgacccgttctcccctcccccggagagcgatggcgacggagctgacggcggcgcagctgcgcgcgtacgacggcaccgacccgtgcaagcccatctacgtctccgtccggggcaaggtctacgacgtcacctccggccgcggcttctacggccccggcggcgcctacgccgtcttcgcgggccgcgaggccagccgcgccctcggcaagatgtccaaggacgaggccgacgtctccggggacctctccgggctcaccgacaaggagctcggcgtcctcgccgactgggagatcaagttccaggccaagtaccccgtcgtcgcccgactcgccgtcgacgcctgaactcgtcagtctcggtctaaatttactctgtcctgcctcttgcggtgttcagtgctgtgctggctttgctgt

SEQ ID NO: 96059 - DNA, 489 bp, Zea mays
  unsure (1)..(489): unsure at all n locations
ctctgcgtttcgtnntcactgacgttgtctcgattcccgtcgacccaccgtcgcggactcgtgggtctgttggggattgtctctgggaactgctacaggagaagagccgatggtatgtacattatggtgttataataggtggcattggagcaacactctacggccgcagtgcccgactcgcgaccccagtggaggtcactgatggacaatgctggtcaacagaaccatctgagcggccaaacttacagaggttgnattaggctgcgctcatgcggcatctagaaggtcaacaacactagggaccatctgcacgcataagttgtaccagggcagcagtcagtcaaacttgcatgttacatccatgggccgtcaattcacgccatccgccatatatgcctaggatctgttcataacccttcatttgttcgtatattgtaatcaatagtttcccgccctgtggttacatactgtcttcacattggtctcctc

SEQ ID NO: 96060 - DNA, 514 bp, Zea mays
  unsure (1)..(514): unsure at all n locations
tggctgtgtcagtcctacgatggacgttctggtctggaattcccgggtcgacccacgcgtccgcccactcgttcgcccacgcgtccgagtggtataacaaggaggaagtcattctcggaaaggggatgaaggactggatgcgcttcagtgttgcgttctggcacacgttccgtggtactggtgctgatccttttggtgcgcctacaaaggtttggccttgggaggacggcacaaattcgttggccatggctaagagaagaatgagagctcactttgagttcatggagaagctgggggttgacaaatggtgcttccatgatagggatattgcccctgatgggaaaactctcgaagaaacaaatgctaacttggatgagatagttgagctggcaaagcagctccaggttaggggtgagaccaatataaagccattgtggggtactgcacagctctttatgcatnctcgttacatgcacggagctgctactagcccagaagtttaagtatatgcatt

SEQ ID NO: 96061 - DNA, 504 bp, Zea mays
aggctgtatgtatttctgggggggaggagttgctaccggtttcggaattcccgggtcgacccacgcgtccgaacactcatcgcaacactcgtctttcccttccctccctcggaagcagcaaagctagagacgatgactctgacgatcccggacgaggtgcgcgccaaggcggaggtgtacgtgggcgacgcggcggggcaggagaagacgcggctgctcctccaggagacgggcctcccgagcgggctgctcccgctgcgggacatcatcgagtgcggctacgtggaggagacgggcttcgtgtggctccggcagcgccgcaaggtggaccactacttcgccaaggccggccgccacgtgacctacggcgcctaggtgtcagctgtggccgacaagggccggctcaagaagatcacgggcgtcaaagccaatgagatgctgctgtgggtcaccctgcacgagatctgcgtcgacgacccgtccacgggtaagctccacttgcag

SEQ ID NO: 96062 - DNA, 516 bp, Zea mays
  unsure (1)..(516): unsure at all n locations
ttggctagtttcattctngctngactgtctgtctcggattcccgggtcgacccactcgtctcgcgcttggttcttccctgccggaagatacctttcgttcggtgtcgccaactcgccattcgtgggaggtcttggtcgggaccggtgctgatggaggagaggtacgaggcgctgaaggagctgggggccggcaacttcggcgtggcgaggctggtcagggacaagcggaccaaggagctggtagccgtcaagtacatcgagaggggcaagaagattgatgagaacttgcagtgggagatcatcaatcaccagtcgctccggcaccctaacatcgtacggttcaaggaggtttgtctaacacccacacatcttgctattgtcatggaatatgctgctggtggagagctatttgagaaaatctgcttaacatggcgattcagtgaagatgagttcaggtatttatttcaacgtttgatttatgtgttaattactggcattctattggaaatttgcacc

SEQ ID NO: 96063 - DNA, 515 bp, Zea mays
cggctgtgttcgattcttgcagtgacgtctgtctcggattctccggtcgaccacgcgtccgcccactcgttcgcggacgcgtgggctccttaagtaacaaatcccttgaggggctgcaggcgaatgtccagaggcttaagacatacaaggccaagctggttatcttcccaaggcgtgctcgcaaggtcaaggctggtgactctactctggaggagcttaccactgctacccaggtacagggtgactacatgccaattactcgcggtgagaagcgctctgtagaggttgtgaaggtcacagatgagatgaaagcgtttgcggcctatggcaagctccgccttgagcggatgaacaagaagcaccttggtgcccgccagaagaaggcagctgatgcagaaaaggaagacaagaagtgaagccaccaaactttgtagccctgtttgttctgttcagtcatagctagatgctacttccattaagtgcttgtttcaagtttttattgggtgcctggaatt

SEQ ID NO: 96064 - DNA, 504 bp, Zea mays
atgctgataagccggggggtggaaggaaatgttgtaccggtttcggaattcccgggtcgacccacgcgtccgacactgtcaaatccttgctgtggcaactgctcaacggcctcaactatcttcacagtaactggattatacatcgagatctaaagccttccaacatactggtcatgggagaaggagatgaacatggaattataaagatagccgattttggacttgctaggatatatcaagctccactgaaaccattatgtgataatggggttgttgtaactatctggtatcgtgctcctgagctgttacttggggggaaacactacaccagtgctgtcgatatgtgggcagttggttgcatttttgctgaactgcttacactgaaacctctattccaaggtgtggaagcaaaaaatccttcgaacccattccagcttgatcaactcgacaagatttttaaggtcttaagccaccctacagttgaaaagtggcctacccttgccc

SEQ ID NO: 96065 - DNA, 502 bp, Zea mays
  unsure (1)..(502): unsure at all n locations
cggtagttatgtattctagtgagggagagtattaccggtttcggaattcccgggtcgacccacgcgtccgcccacgcgtccggccaagacaaacctgaacgtggagcaagtgttcttctccatcgcacgtgacatcaagcagaggcttgcagagactgattcaaagccagaggacaaggcaatcaaaattaacaagccagaccagggttccgaggcaccagctgcccagcgatctgcatgctgcggttcataagcagacgcacgatagccataatcattggttatttgacactatttatttcctgcttggcttttataggaagaatttgaggaagccacttatgatatactgatgatgtggttgtactcttgtttgcttccactcttcgaagcaaacacctcttgctgttgacgtagctattgcactctggacatccgttggaacaacctgtctnctncctacagactacagtgtgtaatggacgaattccatgtcgttggg

SEQ ID NO: 96066 - DNA, 552 bp, Zea mays
  unsure (1)..(552): unsure at all n locations
tagtgctagtgnttctgacccttcgtatcngtactgtacnggtctcgtgaattcccggtgtcgactccacgtcgtctcggctagtttcataatgtgtcccatctcatattgagctatatatctcgctcacgatgtctgttagacttgacgagcttattgatgcttccttgtactgacaagagtgtcgctgtagcaggggcaacgcagaatctattgttcaagatattgtaaacatggttcgatcttatgttgacaagccaaattgcatcatcttggctatctacccagcttaccaagatatatcaacgtcagatgctatcaagcttgccagggatgtttatccttcatgtgacaggacatttggagtcttaacaaagcttgatttgatggacaagggtaccaatgctgttgatgtacttgaagggagacaatatcgcttacaacacccctgggttggaattgttaatcgctcacaagctgatatcaacaagaatgttgatatgctttcagcaagacgcaaagtaaaagaagtctttgagagtagtcctgaan

SEQ ID NO: 96067 - DNA, 502 bp, Zea mays
tgttgtatgttttttgaggagagatagtttgtaccggtttcggaattcccgggtcgacccacgcgtccgagtcgatctcactgtatacattgtgtaatcgtcaaaggagaaaacttgatgaatggagaatgtacaaagagcaaattatggctaattgaccttgctggaagtgaacgggtagcaaagacagatgcacaaggagaaagattgaaagaagcacagaacataaacaaatcactttctgcacttggtgatgttatatctgctcttgcaacgaagacctcgcacataccctttaggaattcgaagctaacgcacttgctccaagactcactaagtggagattccaaaaccttgatgttcgttcaaatcagtcctaatgagaacgacgtgggtgaaactctttgttcgttgaacttcgcgagcagagtgcgaggcatagagcttggacaagctaaaaagcaagtcgatattggagaattgtcaagatacaagctcatgg

SEQ ID NO: 96068 - DNA, 501 bp, Zea mays
  unsure (1)..(501): unsure at all n locations
cgtggtatgtgtggtggggggggcagttggtaccggtttcggaattcccgggtcgacccacgcgtccgcccacgcgtccgcccacgcgtccgcccactcgtccggttctagatcgcgggcgggcgcgcgctggtggagatcgcgtgcgcgcgcacgcccgcgcagctctttgcggtcaagcaggcgtaccatgaccggtttaagcgatcgctcgaggaggacgttgccgcgcatgtcaccggcgacttgcgaaagcttttagtgcctctggttagtgcgtaccgctatgatggcccagaggtgaacacatctttggctcattctgaagccaaaatacttcatgagaagatccataagaaggcttacagtgatgaggagatcattagaattctgaccacacggagcaaagctcagctacttgcagcattcaatagctactaggatcagttcactcatgcaatcaacatggatctgaangctgaccccaaggatgagtatctt

SEQ ID NO: 96069 - DNA, 512 bp, Zea mays
tggtccaatatacttcgatattttattgagggacgagtatgtaccggtctcggaattcccgggtcgacccactcgtccgaaaggaggtgttgtagctcttgtggatgggcttaagggtttcgttccattttcgcaagtgtcatcgaaaacaaccgccgaagagctgcttgagaaagaattgcctctgaagtttgtagaggtcgatgaggaacaaggcaggcttgtcctcagtaatcgcaaggcaatggcagatagtcaggcccagctaggtattggatcagttgtcttgggaactgttgagagcctaaaaccttatggtgccttcattgacatcggcggaatcaacggccttctccatgtgagccagattagtcatgaccgtgttgcagatatctcaacagttctgcaaccaggagataccctcaaggttatgatactgagccatgaccgtgaaagaggccgagtcagcctttctactaagaagcttgatccaacacctggtgacattatcc

SEQ ID NO: 96070 - DNA, 516 bp, Zea mays
  unsure (1)..(516): unsure at all n locations
atctatgtcatcgtacatagtacgtatctacnggtctggaattcccgggtcgacccactcgtccgaaaagatgatggaagtgacagtattgccgtgcagcttgctgacgaaacacactggaatgatctggtaattattattgcagtggtcagttcaaagcataaggaaaccagtagcaccagtgggatgcgagatagtgttgaaacaagtcctgtcttgcagtacagggcccatacagtggtgccaggtcaggtgttgaaaatggaagaagctatcaagaaccgtgactttgaatcatttgccaaattaacttgtgcagatagcaaccagttttatgctgtatgcttagacacgagctctcgcatgttctatatgaatgacacgtcacaccggataattagccttgtggaaaaatggaaccactcagaaggaaccccacaggtcgcttacaccttcgatgctgggccaaacgctgttcttatcgcccaaaaccgtaaaactgcaacacatttactt

SEQ ID NO: 96071 - DNA, 503 bp, Zea mays
aggtcgtgaccagaaatcgaaagtatcctctactggtttcggaattcccggctcgacccacgcgtccgcagttagaactgatgtcagctcaagcttctgagcttcgcctgactgtggcatcactggaagagagagttcaggctgaaagaaatatttctatgcagcagaaagaaaacgcagaagctatgttgagtactaaagaagaactggaagcacagctgtgttcagcaaccactgaaatggggaaactgcgtgacatggtcaaagcactagagaatgaggtcaaaacggagaaggcactgcatgaagaactaacagcacatatacagataaaggttgaagcagctgttgatgcagttaaagaaccattggaagcacaactgtgttcaacaaatactgaagcagagaagctaagagatgttgtcaaagcacttgaggatcaagtagaaaaagagaaggcattgtgcgaagagcttgcagcaaaggtagagttgaaaactaat

SEQ ID NO: 96072 - DNA, 525 bp, Zea mays
agttctgttgatgttcaagtccatagttatgaagcagacaggtccggaattcccgggtcgacccacgcgtccgcccactcgtccgcacatatcttttagtaacctttcaataggcgtcccccaagaactagtgaacatggcaaaactgttgagcctgttcttagccctctcctttgtagcagctatgtttgccataggctctcatgctgatggagactgtgagaatgacctccaaagcctgataagtgactgcaagacatacgtgatgttcccagctaatccaaaggtccctccttcggatgcttgctgtggtgtcatcaagaaggcaaacgtttcttgcttgtgctccaaggtcaccaaagaaactgagaaggttgtgtgcatggagaaggttgtgtatgttgctgagcagtgtaagaggccatttgagcatggcttccagtgcggaagcttcaaagttccagcaaactgatgatatcacaagagggaagcgcctgacgttaatcttagatttcaattggtgcg

SEQ ID NO: 96073 - DNA, 515 bp, Zea mays
  unsure (1)..(515): unsure at all n locations
agctgtatggggaagaggagagtattactcggtccggaattcccgggtcgacccacgcgtccgcccacgcgtccgcccacgcgtccggacccacgcgtccgcccacgcgtccgcccacgcgttcgtgttgaccatgctgttgagcttgcgcactttgccctgttctttaaccagggacaatgctgctgcgctggatctcgcacgtttgtacatgagcgtgtttatgatgagtttgtggagaaggccaaggctcgtgcattgaagcgcgtcgttggtgatccgttcaggaaaggtgttgaacagggcccgcagattgacgacgagcaattcaaaaagatcttgcgctacattaggtatggtgttgacggtggagctacccttgtgacgggtggtgataggttgggtgacaagggtttctacatccagccaacgattttctcagatgtccaggacggcatgaagattgctcangaggagatatttgggcctgtgcagtcgatcctcaagttcaaagn

SEQ ID NO: 96074 - DNA, 519 bp, Zea mays
aaactgtgttatgcgggggatgtaagggagtgctctaccggaattcccgggtcgacccacgcgtccgcccacgcgtccgagaccacagccagtcagccacatcactagctagctgtgcagaggcaatggcgtccaaggttgagctggtggtggaggtcaagtccccggctgacaagctgtgggcggcgctgcgcgactccacggagctgttccccaagatcttccccgagcagtacaagagcatcgagaccgtcgagggcgacggcaagtcggccggcaccgtccgcctcctcaagtacaccgaggcggtgccgatgctgacgttcgccaaggagaagcttgagacggctgacgacgagaacaaggtggtgtcgtacagcgtggtggacggcgagctggcggacttctacaagaacttcaagatcacgctgaaggtgacttcggccaatgccgacggcgagggctgcgccgtcgtcagcttggccatggagttcgacaaggccaacgaccagttgccca

SEQ ID NO: 96075 - DNA, 517 bp, Zea mays
tgctgtttatgattagatagtacgtatcaccactccggtttggaattcccgggtcgacccactcgtccggatgcctgtgcgtccccgtgcccctcgccagctgatgtcgtcctaggatctcaagccatgttctggacctcacaagtccagggagtgcctgcctctgatcctcattatcaggaacatgctcaagtatgcactgacgtaccgtgaggtcatttctatcctgatgcaacaccatgtacttgttgatggcaaggtcaggactgacaagacctaccctgctgggttcatggttcaagctctgcaaggtgaggtttgttcagtttggccagaaaggcatcccctacatgaacacctatttgttgtacaggaaaacatagaatggaattcaaatttggtggccgcaaaagtgtggagacttgaattcatataaagttaggcttaacattagtgcaaacagttgtattttagtttagatttagagtacacttatgtatgcgttgtttgacaatgg

SEQ ID NO: 96076 - DNA, 516 bp, Zea mays
  unsure (1)..(516): unsure at all n locations
agtgctttcaccgaaaagaaagagtgctctaccggtccggaattcccgggtcgacccacgcgtccggtccgcgcaaaaccctccctgctcagactcgtctgctgcagctcctgctccgccgccgtgtcaaacgcactctcctccgccgtcgcccgaggcaagatggttctccagaacgacatcgaccttctcaacccgccggcagagctcgagaagctcaagcacaagaagaagcgcctcgtccagtcccccaactccttcttcatggatgtcaagtgccagggatgcttcagcataaccacggttttcagccactcccagactgttgttgtgtgcccaggctgccaaactgttctctgccagcccacgggaggaaaggcgaggctcacggagggatgctctttccgccggaagggagactagagctgagtctgttattagtactggatcggttgtcaatctccagtatgtggtcttcaagttttgctctgtgccccagacgttagggtcatgaan

SEQ ID NO: 96077 - DNA, 502 bp, Zea mays
  unsure (1)..(502): unsure at all n locations
cggtagctatagtattatatggagggtaggttctaccggtctcggaattcccgggtcgacccacgcgtccgcggactcgtgggcggacgcgtgggcttgcacgttcaattggcctgatcgggcacaccttcgaccagaagaggcttaagcagccactctaccgccacccatgggaggatgtcctgtacaccaagtgagatagagccattctttgcaaagcataaagtattattgccgcttagggctttcagctgtctgtacacttcataaatcgagcagttgcaaaaaaagctcgaaattgtgattgttgatgaagttaggggcagggggagagacatcgaggggaggcactactagattgtgtgttttgtgtcgagtcgtttcacgatatacggcctcagaatagaagttccctttgaaatgaagtaacgctcgctgatttatgagttgataaacataattgagaagcanaatgatggatcttggaaaatctacgaagcta

SEQ ID NO: 96078 - DNA, 511 bp, Zea mays
tgattcagctgaatggtatttgtgggaaggtaatactctactggtttggaattcccgggtcgacccacgcgtccgcccactcgttcgggaaaggagaagaacattgctgtcattgttggcacagtcacagatgacaaaaggatccaggaggttccagcaatgaaggttactgccctgaggttcacggagacagcaagggccaggattgtcaatgctggtggcgagtgcctcacatttgaccagcttgctcttcgtgctccacttggcgagaacactgtcctcttgaggggccccaagaatgcccgtgaggcagtgaggcactttggcaaggctcctggagtgccgcacagccacaccaagccgtatgtgcgctccaagggaaggaagttcgagaaggctcgtggcaggaggaacagccgtggattcaaggtttaaaacaaattgtggccctccgtgttgccatcagcatagtgcaaccgttgtgtttgatcagtcgacagtaattagtcat

SEQ ID NO: 96079 - DNA, 511 bp, Zea mays
  unsure (1)..(511): unsure at all n locations
tgctgtatagaggagagaagagtatcatcggtcttgaattcccgggtcgacccacgcgtccgcggactcgtgggggaaaacaacaatataactggcgatgtctcttctctgatgaactgctggagcctcaatatcttaaatgtgtcatacaataatttggctggtgctgtccctactgacaacaacttcacacggttttcacatgacagctttttaggtaatcctggactctgtggatattggcttggttcttcatgtcgttccactggccaccgagacaaaccgccaatctcaaaggctgccataattggtgttgctgtgggtggacttgttatcctcctgatgatcttagtagctgtatgcaggccacaccatccacctgcttttaaagatgccactgtaagcaagccagtgagcaatggtccacccaagctggtgatccttcatatgaacatggctcttcatgtncttgatgatataatgaggatgactgaaaacttgagtgagaaat

SEQ ID NO: 96080 - DNA, 519 bp, Zea mays
  unsure (1)..(519): unsure at all n locations
agcttactgtcacgataggaagatagtagtgctctaccggtttcggaattcccgggtcgacccacgcgtccggtcggcttctcctcccactacggttcgggttcgggttcgtgaggttctacggggttcgggttcgtgggtgagcggatcgagatggcagcatcagatgttgagtaccgctgcttcgtccgcggcctcgcctgtgccactgacgaccactccctccacaacgccttcagcacctactgagaggtcctcgagtccacgattattctcgatcgggagactcataggtcccgcgacttcggcttcgtcaccttctccactgaggaggcgatacagaacgccatcgaaggcatgaacggcaaggagctggacggtcgcaacatcaccgtcaacgaggcccagtcccgcggcggacgcggaagctgcggctgcggatacggaggtggcccgtggaagcggacgatacagctgtagcgagacccgtgatcgccgttgctgctaccgcngttgccg

SEQ ID NO: 96081 - DNA, 523 bp, Zea mays
  unsure (1)..(523): unsure at all n locations
cggggnnncctgactgctataccactgcacaaccnctcttgntttgaattcccgggtcgacccacgcgtccgtgcaaagttagacgagatggaaatggtcgatggtttcgagatagctctcaagaaactaaccgaatggctgggggagaatattgacaagaacaagactaggatatttttcgcaggatcgtcaccaacacattcctgggctagcaactggtgtggagaagacaagaacaagtgccttaacgaaacagagccgatctacaaaaccggatacaaagctgcaactacagactacagcttgatggccaaagctaagcactactttcgaacattggagccgaaaggcatacatgttcagatactgaacatcaccgagctgtctgactaccgcaaggacgggcatcctacggtgtacaggaaacagtttgctcctctgacgaaagagcaaatcgcagacccagccagttacgcggattgcacgcactggttgcctcccggagttccagatgtctggaac

SEQ ID NO: 96082 - DNA, 510 bp, Zea mays
aggtccgtttatgtactgttgacggaggagatgagttcctaccggttcggaattcccgggctcgacccacgcgtccggtcaaccttgatcaaggctatggaggaagctgatgtgaagacgaagtgggagaacagctcatggtgcaagaagctgattgtccagaagaggagggctgcgctcagtgactttgacaggttcaaggtcatgctgtcaaggatcaagaggggtggtgctatcaggcacgagctcgccaagctgaagaaggcgttcacggcttaagtccattttggtggatgacatgtcagcttctggtttcatgttggatcagcaatctgttttgagtgttgtcaaagccagaatcagtaatatgttctctgcgtacccgttctaaacttcatcaagaatgactgtgctctggatatttcgtcgggacatgatatggaacacttaaaagttcgctgtcaaaaaacaaacatgtactctgattgcacgcactggtgccttccctaa

SEQ ID NO: 96083 - DNA, 541 bp, Zea mays
gatctagtcatcgaaagtatagtagtactctcccggtctggaattcccgggtcgacccacgcgtccgcccacgcgtccggaaacttaagcgccgcattctaccaagtgatattacaataaatattggaaaaggagctccagtccctgagtgcccgatacctggagaaagttggaaagaagtcaaacatgacaatactgttacatggttggccttttggaacgatccaattaacccaaaggatttcaagtatgttttcctggcagcaagcagctcactgaaggggcaaagtgacaaagagaagtatgagaagtccagaaaattgaagggtcatatacaaagaattcgtgagaattatacaaaagatttcaaaaacaaagatgtgacgaggaggcaaatagctgtggcaacataccttatcgataaactaagccttaaggctggcaatgaaaaggacaacgatgaagctgatacttgtgggtgctgtacgcttaaagttgattatggtacatgtatggcttcaaatcaaattcagttgacctt

SEQ ID NO: 96084 - DNA, 539 bp, Zea mays
  unsure (1)..(539): unsure at all n locations
ntggtgctcatctagccatgaatgacgctcgtaccggttcggaattcccgggtcgacccacgcgtccgcggacgcgtgggcggacgcgtgggcgggcgccgtgatggcggcggcggctacggcggtggcggcggcggctacggtggcggcggtggctacggtggtggtggtggcggctacggcggtggcaaccgtggcggcggctacggcaactccgacgggaactggaggaactgagcggtggggcccgcgcggccaagttatcctgttcgctaccgtgatgtttaccctagtccagagggtttatcttcgttcgtctcgtttgttgttgcccatctgtgtttttgattgcaaggtcgctctgtgtcagttgttagtgctgtgttcatcctcggctccagcagacccatgcatcaaccagcatggactgtggatcgatggatgctgntactcctgtcaggatttggtctaagntaatccctaagaaanaaatgtgcttcttggtgcttgaaaaaaaaatatgtttantgttttatnta

SEQ ID NO: 96085 - DNA, 546 bp, Zea mays
  unsure (1)..(546): unsure at all n locations
gagactggtatatgccaagcctcanacgagcanctgtcncggtctcggaattcccgggtcgacccacgcgtccgcccacgcgtccgcggacgcgtgggctttggagcccagaagacagtgcaaagctggcaattgtgcttatgtgtggcggttggtctctgggctggcttagtcattggttttattactgagtactacacaagcaatgcctacagccctgtataagatgttgctgattcctgcagaactggagctgccactaatgtcatttttgggcttgctctgggttacaaatcagtcattatcccaatttttgctattgcgtttagtatcttccttagcttcagccttgctgccatgtatggtgttgttgtggctgctcttggaatgctgagtaccattgccacaggccttgctattgatgcctatggccctatcagtgataatgctggaagcttaagtctgtatgggtgcatcttatcatatatatggattattgagaagctaaagttttgttaaatagaaaaatttttggaactttaataa

SEQ ID NO: 96086 - DNA, 548 bp, Zea mays
  unsure (1)..(548): unsure at all n locations
nagctgaangccttagctcncatcgatgcatgcactcgctaccggttcggaattcccgggtcgacccacgcgtccgacttgagcagagggaggctgggtctaccatggaggttgttgctgcacaaacaaaagcagttgctgagaagatcaaggactggagcaacgtagttgttgcctatgaaccagtttgggctattggaactggtaaagttgccaccccagctcaggctcaggaagtgcacgcctccctgagggattggctaaagaccaacgtcagccctgaggttgctgaatctactaggatcatttacggaggctctgtaactgccgcgaactgcaaagagctagcagcacagcctgatgtcgatgggtttcttgtcggtggagcttctttgaagcctgagttcatcgacatcatcaacgcggccaccgtgaagtccgcttaagatgttacgctgaagacgaacatactntttttttgctcaactgggctatgtaagctagtagcttttgctcangagcagagactttttttgctgcccccaacg

SEQ ID NO: 96087 - DNA, 581 bp, Zea mays
  unsure (1)..(581): unsure at all n locations
agatattatgatatatgnnngnataattatatattgnnattttaatcggtggttctatgcncactccgtatgctgctccggntcggaattcccgggtcgacccacgcgtccgcccacgcgtccgagggcgtctgagactctgagacacaggaacagaaccctctctgcgcggccgccgccgttgcagtcgcggccacatcgtcgcctatccatccccaccgctcccactgccacgattcacaagaggtgtcgagatgtctcagaacaacccctcccagctcctcccctcagagctgatcgatcggtgcatcgggtccaagatctgggtgatcatgaagggggacaaggagctcgttggcaccctctgcggctttgatgtctacgtcaatatggtgctggaggacgtcaccgagtatgaatacactgctgaaaggcgccgcattacaaaacttgaccagatcctnctaaacggcaacaacatagccattttgggtcctggtggttcaccaccccatgtggtatgagcttttgcttccccgaagtaaccattcaaggccaaggcctttcccttggccttttat

SEQ ID NO: 96088 - DNA, 566 bp, Zea mays
  unsure (1)..(566): unsure at all n locations
tgttgtatatttttaatatatattaatgnnatattaaaaattaatctagtattactgtatgntgtcccggttcggaattcccgggtcgacccacgcgtccgcccacgcgtccggacttcattgtctttcggatcggagagggtgtacgtacgtggattggttgatgctgcgagatgcatgtgtgtcttttgtttcacgttgcattgcataggcaagtcgagatgatgagttggcgttgtacactaagatgaaccatgtttgtgcaataaaaaaaaaaaaaaagggcggccgctctagaggatccaagcttacgtacgcgtgcatgcgacgtcatagctcttctatagtgtcacctaaattcaattcactggccgtcgttttacaacgtcgtgactgggaaaaccctggcgttacccaacttaatcgccttgcagcacatccccctttcgccagctggcgtaatagcgaagaggcccggaccgatcgcccttccaacagttgcgcaaccctaatggcaaatggaactcgcccttgtacgggccattaacccccgcgggtttggtttt

SEQ ID NO: 96089 - DNA, 566 bp, Zea mays
  unsure (1)..(566): unsure at all n locations
atattgtgatatgtnnnaattgtatatatttgtgtttttgagtggtttgtagatatagtatgctccaccggttcggaattcccgggtcgacccacgcgtccgcccacgcgtccgcccacgcgtccggtcgggggaagctccggcgcctgcctcgagatgggcatgcgcagggtccccacaatcaccgagggcatcaacttcgacctccccgacgtcgtcgccgcagcgccgcccatcgccggagtgaggcatgttggcggagatatgttcaagtccatcccctccggtgatgccattttcatgaagtgggttctgacgacgtggaccgacgacgagtgcacggccatcctgaggaactgccacgccgctctgccggacggcggcaagctcgtggcctgcgagccggtggtgccggaggagacggacagcagcaccaggacgagggcgctgctggagaacgacatctttcgcatgaccacctaccggacccaagggagggagcgcctccaggaagaagttccgcaccttggcgttcacgccgaaggctttaacggcttccaagccat

SEQ ID NO: 96090 - DNA, 540 bp, Zea mays
  unsure (1)..(540): unsure at all n locations
atgctagtccctagcctctgacgtagtactcgtctcggttcggaattcccgggtcgacccacgcgtccgcccacgcgtccgatttattggattttggcggcaggtacattcaaagcacttgtgctacaacgggtgagggattgtatgaaggcctggactggctgtccagcaacattgcaaccaagtcctaaattgtcaagcgaggtttggatcatctaggagcttttggatgatgatgatggtgctggatatttagggttgggttggtatttccgtatgtaagatgtatgcccctgagctcggcagtttttgagctctgcttaagattctcacagttaaattgttttatgtaatttgggccttgagatgtttttgaaccaaacagctaaaagagttcagttgagttaactgggtgccattattacattatgagattctttgaaaaaaaaaataanatattatattttttatatttattatatttatatttttatttatgtattttataaaaaaaagggcggttttttttaggtccaaact

SEQ ID NO: 96091 - DNA, 549 bp, Zea mays
  unsure (1)..(549): unsure at all n locations
atgtgctagccctagcctttactgatgnactcgctcgtaccggttcggaattcccgggtcgacccacgcgtccgcccacgcgtccggcggacagtgctggatgcacctgaggatatatatgcatacctgctgtgcttgttgttcatgtcgtcactgtgacgagtccgctgctgatactgcacgtgcgtactctatgtatgtagctgtgtaataaagttcaggggatgtaaattgacactcctaccaagtatgctgatgtatgttctcatgcgtgtcggggtttcttatacatggtttgtgttagatttagtatgaagatgacctctattttatttgatacaaatcgaataaattgtaggtttatattaaaaaataataattgtctctcttaataagtctgatatgacttaccgtctttgttattagtatctatttgtgatggcttttgatgtaacaatgttttcaactttaatgttctgacaatttttttttgtattattaggggaaataacgattttggttctaagttttttttgantaataaggttt

SEQ ID NO: 96092 - DNA, 567 bp, Zea mays
  unsure (1)..(567): unsure at all n locations
tatgaatatatttnnaaattttattgattttttttttaaattgactatgacattatagtatgctcgcccggttcggaattcccgggtcgacccacgcgtccgcagtaaagatatacctgaaatcccagacagtttctcagaggaagggaaaagtttcttgcggctttgcttgaaacgtaaccctgcatctcgtgcttctgcagtccagctgatggatcatccttttgttcaggatcaccctgcagtgagagctgcaaaatccagtgtattgagaaacacaccatcttctccagcagatggcagacacacaatgtccaacagggagttgccatctcggaaaattataactcctctgaaggatattggactgggcatgagagattttactggattttccactactgttccttcaccacacagtcctattcctggaagagcaaacatgtctacgccagtttcaccatgctcaagcccgcttcggcagtttaagcaatccaatgtgaggggcatgcgttcttcacctaatncaatgctctcccctgggctggcaacacattaagttacaac

SEQ ID NO: 96093 - DNA, 573 bp, Zea mays
  unsure (1)..(573): unsure at all n locations
tgatttatatatttgnnagttatatagatgnnatgttaaaaattgatatagacattatgtatgcttccccggttcggaattcccgggtcgacccacgcgtccggctggcaatgctgataagaaggtgcaagagctaaatatgaagctggagaagctccagaggacaagcagtgatcaaaagcgcaggattcagaagactgaacatgctcttaaagctgctgaggaggagctgatgaaggctcagttggaaacaacaacaaaagtaaaacagcttagagaggttcatggagcctggttgccaccatggttagcgacacatgcagcccgctctatggaggtgatgtcaaatcactggaatgaacatgggaaacctgcctttgacagcttcttgcagaaggcatctgaaaaaacagtgcagacaaagaaatgggctgagcctcatctggaaactgctaagacaaaatggatgcctgttgctaaaagaaaaatgggttaccttgaagaaacatggcaaagccctatgtccaaaatggtctcagagaaatcaattggaggctttttaaaccttcaagg

SEQ ID NO: 96094 - DNA, 542 bp, Zea mays
  unsure (1)..(542): unsure at all n locations
agactaggcataagatatatagtagtaatcgctccggtctcggaattcccgggtcgacccacgcgtccgccatgatgcgccacggcctcaacgagcccggcaagcacctcggcgtcgtcggcctcggcgggctcggccacgtcgccgtcaagttcggcaaggccttcgggatgaaggtcaccgtcatcagcacgtccgccagcaagcgccaggaggccatcgagaacctcggcgcggacgagttcctcatcagccgggacgagaaccagatgaaggcggcgacggggaccatggacggcatcatcgacacggtgtcggcgtggcacccgatcacgccgctgctggcgctgctgaagccgctggggcagatggtgatcgtgggcgcgccgagcaagccgctcgagctgncggcctacgccatcgtgccgggcgggaagggcgtggctgggaacaatgtcngcagcgtcagggactgccaggccatgctcgagtttcgcgggaagcacggcatcngngccgaggtcgagggcatcaagattgac

SEQ ID NO: 96095 - DNA, 540 bp, Zea mays
  unsure (1)..(540): unsure at all n locations
atttattccacagatatantatagtattcctcgtaccggttcggaattcccgggtcgacccacgcgtccgcccacgcgtccgaacagcctgcttgatgtatcccagagtgatctagaggctaatctgtgcaagcttatggaaaaacggggatacggagaggagtatataaatcgctataaaatgatgacaaggttccatcatcaacgggttccactagtaattttggtgtgtggaactgcctgtactggaaaatcaacaatcgctacacaacttgctcagaggctcaatttgcctaatgttttgcagacggacatggtgtatgagctgctgcggacatcaacagatgcgccacttacttcagttcctgtgtgggctcgcgattttaattcacctgaagagcttatcactgaattctgcagaaaatgcagagttgtacgcaagggtttggctggcgatttgaagaaagccatgaaagatgggaaaccaattattatagaaggaatacaatttgattcaagcatttatcttattgatgaaga

SEQ ID NO: 96096 - DNA, 536 bp, Zea mays
attgttcatagaatatgatgatcgctcgtaccggttcggaattcccgggtcgacccacgcgtccggccatctattggagcattcactgtccaatgtgctaaatgttttaaatggaggcttattgcaacgaaagagaagtatgaagaaattcgtgaacgtattatagaggaaccttttgtatgcaaaagagctcgtgaatggagacctgatgtaacatgcaatgacccagaagatatatctcaggatggtagcaggctttgggctattgacaaacccaatattgcacaaccccctcgcggatgggaaaggcagattaggataagaggtgaagggggtaccaaatttgctgatgtatactatacctctcctactggaaggaaacttaggtctctggttgaagtcgataggttccttcaagagaatccggagtatggtgcttaaggtgtaactttagctcagtttttcgtccagatacctaaacctctaccggaggactatttgaaatagaaaccgaatttattaattcaagtgatgag

SEQ ID NO: 96097 - DNA, 582 bp, Zea mays
  unsure (1)..(582): unsure at all n locations
tgtattgtaatatatttttgtattgatatctaaggggattttattagacttgcttctagtttatantgtatcgntgtcccggntcggaattcccgggtcgacccacgcgtccgngaagaggacctctcatgaatcaaatttggaaggaagaattgtcaacgtgtcatcagaggggcacagacttgcatatcgggaaggaatccgttttgacaagatcaacgatgaatcagagtatagtagcattggtgcatatgggcaatcaaagcttgcaaacatattgcatgctaatgaacttgccaggcgatttgaggaagataatgtcaacataactgcaaattctcttcatcctggttccattatcacgaaccttcttcgctaccacagtatcctagatgttctccatcggacgctgggtaaattggtgctgaaaaatgctgagcaaggtgcggcaactacatgctatttggcacttcacccgcatgtgaaaggccttttcgggaagtactttttcgactgtaaacttttcgagccaaacgccgaaccccaaggaccattgatttggccaaaagggttttgggcctt

SEQ ID NO: 96098 - DNA, 563 bp, Zea mays
  unsure (1)..(563): unsure at all n locations
taattaatatttgntaattggattgttnnttttttaagagtgttatagcaatatgtatgctcgcccggttcggaattcccgggtcgacccacgcgtccgcgacccacgcgtccgcggacgcgtgggcggggggccacatcaaccccgccgtcacctggggcctcttcctggcgcgcaaggtctccctggtgcgcgcgctgctctacatcgtggcgcagtgcctcggcgccatctgcggcgtcggcctcgtcaaggcgttccagagcgcctacttcgacaggtacggcggcggcgccaactcgctcgcctccggctactcccgcggcaccggcctcggcgccgagatcatcggcaccttcgtgctcgtctacaccgtcttctccgccaccgaccccaagcgcaacgcccgcgactcccacgtcccggttctggctcccctccccatcggcttcgccgtgttcatggtgcacctggccaccatccccgtcaccgggcaccgcatcaaccccgccaggaacctgggcgccgccgtcatttaccaccaggaccaagcccttggaccc

SEQ ID NO: 96099 - DNA, 543 bp, Zea mays
  unsure (1)..(543): unsure at all n locations
atgctcgatgnccaggctcanagnangnancgatctnggntcggtattcccggctcgacccacgcgtccgcatgtacaccgtcttaagagagttaaatgttagtgcttgcctcctgttagattgaatgggcggtttaaccgagacattcagacaagaagaatgagaacaaggaggttgctgcgaatgactttctaccagcgagcgccgcttatgaagccatacagcactctatggacctgtatgctacatacatcgcttgagggcctgaagaggtaggattctgatggctaggaaaggtcgcgaggatgtattcgaaacactgggtgactagttacactatgtgacgagttcaccaatgaattatatgtgtgtttatactggtagctgtttattctttagtcatgtactgtaatataattggcttaagcgtttggacaacgatgcagttattaatctggtaactatgacaattcttttatggtgtgcttgtttaatgtaatttttcttgattgtgattatggattttttttacttttgctaag

SEQ ID NO: 96100 - DNA, 542 bp, Zea mays
  unsure (1)..(542): unsure at all n locations
gatatgtgcttccttagttctntgatgatcactcgtaccggttcggaattcccgggtcgacccacgcgtccgtgttccgtctatccggaaccggttctgttggtgccaccatccgtgtctacatcgagcggtacgagaaggattcctccaagaccggcagggattcacaggaggcccttgctccactggttgatgttgcgctcaagctctccaagatgcaagagtacactggccgctctgcccccaccgttatcacataaatttttgaagagtgatttacaatgagttgaggcgcttacacaaattttcattcaagcctcttgttctatagttctacttcctgttgcatctcaccaatgaataaaatgtatgtatcagactcgccccgtttttttttttgtccatgtactgcaatgcagcggactgaaccggtggcacagcatgcggtaataatcttgtcacaatgacagtgctgtaatcgggagcgtgtttcttgtaatcttgttaggaagtgtttctggttttgttgaacatttgcttat

SEQ ID NO: 96101 - DNA, 545 bp, Zea mays
  unsure (1)..(545): unsure at all n locations
ntgcttagtcctagcctgtatagtagtactctcncggtctcggaattcccgggtcgacccacgcgtccgataaagctgaagaggatggtgtcgcttgcgtagagttcattgctggaaaggaaggccatgttgactatgacacagttcctggtgtggtttatacgcatccagaagttgcatctgttggcaagactgaggagcaggtgacggctctaggaattccctatcgtgtgggcaagtttccacttttggctaacagtcgtgcgaaggccattgatgatgctgaaggggtagttaaggtgatcgcggagaaggaaaccgataagattctaggtgtgcacataatggcacccaatgctggtgaaatcatccatgaagctgtcatcgccttgcagtatggagcattcagtgaggatgttgctcgaacatgccaagcacaccctaacgtgagcgaagcccttaaggaggcttgcttgcaaacctttaaataaagcatccacatataatttctcattttctatttacttggccttcaaaacttttgg

SEQ ID NO: 96102 - DNA, 550 bp, Zea mays
  unsure (1)..(550): unsure at all n locations
atggctnatggnncctagctncactgacgcatctgccagtaccggttcggaattcccgggtcgacccacgcgtccggcagcagtatggcttgaatccttatgaagccacaaccacgattcatgaggcacagagcgcagatgttgatgagagcacgacatgcatatagaggtacagcatatggcacgaggccacgcatgtacccatgtgcagcagcagcttaaatgaaccatggcttactgaccaccgcggaggcggagcaccatgtggagagtgctcttcttctggatgttgtgtcttctagggagcggcccaggttctttagtatgtagtttgtgctgaaactagtatgttattgcctgaagctgattttctaattgttagtcaacttgtttttttatatttacgttggatgattgatatatttctaatttattgtttatttttttatttgatattttttatttatttaatgttattttatttattatttatttatttattatgtttgacaataattttcttttgttgattttttgtntaagtattttt

SEQ ID NO: 96103 - DNA, 568 bp, Zea mays
  unsure (1)..(568): unsure at all n locations
tttatgatatatattnnntatttgatatatgnnatgttaatagcgtgattacgatagctatgcatgcttccccggttcggaattcccgggtcgacccacgcgtccgccacccaccagttcgaagcggaggcgaccggcaacctgcggcggagatgtcaggcaggggcaagggcggcaaggggctcgggaagggcggcgcgaagcgtcaccggaaggtgctgcgcgacaacatccaggggatcacgaagccggcgatccggaggctggcgaggaggggtggcgtgaagcgcatctccgggctgatctacgaggagacccgcggcgtgctcaagatctttctcgagaatgtcatccgcgacgctgtgacctacacggagcacgcccgtcgcaaaaccgtcaccgctatggacgtcgtgtacgccctcaaacgccagggccgcactctctatggcttcggcggctaggttaggtgtgggtaattgcctgtccaggtgtctcggatctgtggtactagtttggctggctttctgggttcgtattggaataattgggggaacttgtttgtttt

SEQ ID NO: 96104 - DNA, 569 bp, Zea mays
  unsure (1)..(569): unsure at all n locations
tgatttttatatttcantatatatgtattggttttataattggttatgcattattgtatacttctccggntcggaattcccgggtgcgacccacgcgtccggagccaaactattccaagttgatttcattgtttgacagtttaattggaccaatcccttgcattataccaatcaatactgatggagcccaaaaggtagggcagaagcgtgccaggttgcttaatgatgacgacgaccatgttaaaaagaagattcggctgggtgctcctgcaacacagtggatttcagtatacaattcaaggcaacctatgaagcagaggtaccactataatgtggctgatgcaaggttagcgcaacatgtggagaaaggaaatgaggatggtttgttgataagttcaatatcatcatgcgcaaatctttgggcaatcattatggatgcaggaactggcttctcagctcaagtttatgagctatcttcacactttcttcataaggagtggatcatggaacaattggataaaagtttctacattaattcttgttgttggcttcaacaatggaagtttttt

SEQ ID NO: 96105 - DNA, 574 bp, Zea mays
  unsure (1)..(574): unsure at all n locations
tgtgtgatatatgggnnatatgatgatatttggngatgttaatagattgcctctagtncttantgtatgactgtcccggttcggaattcccgggtcgacccacgcgtccgctcactgatccagtatggctatggcaatggcaggcgcgccgagggtctcggcggcccggctggtggctctcgggctagcgctcctctgcgctgtcgccggcccggccgccgcgcataactgcggctgccagccaaacgtctgctgcagcaagttcggctactgcggcacgaccgacgagtactgtggcgacgggtgccagtcgggcccgtgccgctcgggcggcggcggcggcggcagtggtggcggtggtgcgaacgtggctagcgtcgtcaccagctccttcttcaacggcatcaagaaccaggccgggagcgggtgcgagggcaagaacttctacacccggagcgcgttcctgagcgccgtcaaggcgtacccaggcttcgcccatggcgggtcgcaagtgcaaggcaagccccaagatcgcggcttttttgggcaccgcaaaggaccaaaccgggccttt

SEQ ID NO: 96106 - DNA, 536 bp, Zea mays
  unsure (1)..(536): unsure at all n locations
tagtctgttccatcgaattatagnatgtatcgccccggttcggaattcccgggtcgacccacgcgtccgcgcgcgcttcccaacgccagggtcatgatccaccagccctcgggcggcgcgcaggggcgagccaccgacatcgccatccaggccaaggagatcctcaaaatgcgcgaccgcctcaacaagatctaccagaagcacacgcgccagcccatcgataagattgagcagtgcatggagagggacctcttcatggaccctgaagaggcgcgcgactggggcctcatcgacgaggtcatcgagaatcgacctgcctcgttcatgcccgacggaatcggtggaggcctcgatgtgcccaggctcggtggcgttggcggcggacgggggagggacgtctaggaaccttccgaggtgtgaggattggcctcaaaggtgaaatccttcctcattcggtggatgaagtgtttgtgatagatgcaaaggttaatttctactttacaggttaaccttgtattatgggtatggaaacgtcc

SEQ ID NO: 96107 - DNA, 544 bp, Zea mays
  unsure (1)..(544): unsure at all n locations
atgtggctagcctccgaacagtgatgtatcgctcgtaccggttcggaattcccgggtcgacccacgcgtccgcggacgcgtgggcttcggcccgacggccggcgcagcgctctgcagccacatgggtgtcgacaagcttgcgttcacgggatcgacgggcacggggcagatcgtgctcgagctggcggcgaggagcaaccttaagccggtgacgctggagctcggtggcaagtcccctttcatcgtcatggacgacgccgacgtcgaccaggccgtcgagctcgcgcaccaggcggtcttcttcaaccagggccaatgctgctgcgccgggtcgcggacgttcgtgcacgagcgcgtgtacgacgagttcgtggagaagtccaaggcccgcgccctgaagcgcgtcgtcggcgaccccctcaaggacggggtcgaacaggggcctcagatcgacggcgagcaattcaacaagatcttggnggacgttcaagtccgggttgacagctgtgccacccttgtcagcggtggttcaggggtaggcaac

SEQ ID NO: 96108 - DNA, 568 bp, Zea mays
  unsure (1)..(568): unsure at all n locations
gattgttatatttnntgatttatattgngatgttttccgttttttagcttttctgtatgatgtcccggnccggaattcccgggtcgacccacgcgtccgatcgnnnctcgcgagccctcgcttcggcatccggaagaaatggccaagtcgaagaaccgcacggcgcacaaccagtcgttcaaggcgcacaagaacggcattaagaagcccaagcgccaccgccagacctccaccaaggggatggaccccaagttcctgaggaacctgaggtattctaggaagggcaacaaaaagagtggtgaggctgaagctgaggagtaggaaggaaagcatggctttgtttcctctgttcttagctcagttccacctttaggacctgnggttttgttaaagatggaacttaagttggtgttactgtatgatggcaaggaccttttgctgccgaaggttatggtttgaagttcatggctccttttaaaataaaaaatataaatnatattataagttgataattgtttaaataattttaagataattaatttgatttgtatttaaataggtggagtaa

SEQ ID NO: 96109 - DNA, 561 bp, Zea mays
  unsure (1)..(561): unsure at all n locations
tatttatataaattttaatagatagattaattaaatgtgtttttagtttttatgtatgntgctccggttcggaattcccgggtcgacccacgcgtccgcacctgtttcgctgctcgcccgatctcgcgctgccggcagcgatctgagatcgagcggggctaagctttttcatcgagatggtgcttgtactgcatgctaacagtggtaacaaaaatgcattcaaaacactaattgccgcagaatacagcggtgtcaaggttgagttggtgaaggactttcaaatgggtgtctccaacaaaactccagagttcctcaagatgaaccctattgggaagattcctgtcctggagactcctgatggtcctgtttttgagagcaatgcaattgcaagatatgttactcgcttgaaggctgataacccactttatggatcttcactgattgattatgcccatattgagcaatggattgactttgctgcaacagagattgatgcaaacattggaaagtggttgtacccacggatggggttttattcccatgctcggttgggtaaaaaaa

SEQ ID NO: 96110 - DNA, 546 bp, Zea mays
  unsure (1)..(546): unsure at all n locations
tatgtgctagcctagtctcatcgatgnatcgctcgtaccggtctggaattcccggctcgacccacgcgtccgcccacgcgtccggagcaaggccacacacacacacacaccactagtaggctagcctagcgttttagtcgtcgaggaggagcaagaagggcgcgcacgcaagcaggcaagcaagaagagagccgatcgaccgagagctagcacgcgatggcgaggtcttccaagatgatggtggcggcagctctgctggccttggccctggccgtgtcgaccgccgaggcgaggaacatcaagaccacgacgacggagaagaaggacgacgcggtggtgcagccgcagaccttcccgcccttcgaccgtctcggcggcggcgcgtccccggcgttcggcggccttcccggcggcagcattcccgggttcagcattgccggcagcggcagcagcctaccccggttcaactttgccggcagcggcagcatggcccctttctggcggcagctccccgggcttcagctgttttggcggaatgcccnggtc

SEQ ID NO: 96111 - DNA, 542 bp, Zea mays
  unsure (1)..(542): unsure at all n locations
cggggtngatccatcgacacagagtatgtatcanctcctcttgntcggaattcccgggtcgacccacgcgtccgtgtttgtgtgcgtgtctcggagaagctctccctcgcctcgcagatccgcggcctgctgtgttgctgctttgccagcaagctgccgcgctcatcctcgcgcgccgccgtcatgaagcgcaatccccgcgtcacgagctcccgccggaagtgccgcaaggcgcactttacggccccgtcctccgtccgccgcgttctcatgtccgccgggctgtcgacggagctccgccacaagtacaacgtgcgctccatcccgatccgcaaggacgacgaggtgcaggtcgtgcgcggcacctacaagggccgcgaggggaaggtggtgcaggtctaccgccgccgctgggtcatccacgtcgagcggatcacccgcgagaaggtgaacggctccaccgtgaacgtgggcattcacccctncaaggtgatcgtcactaagctgaagctcggacaggaccgaagggcgcttctggacgg

SEQ ID NO: 96112 - DNA, 579 bp, Zea mays
  unsure (1)..(579): unsure at all n locations
tgatttatatatttttantatttgatntgattttatatagatagattgtctattgaatatatgcatgctcgcccggttcggaattcccgggtcgacccacgcgtccggcagatcttcgtgaagactcttactggcaagacgatcacccttgaggtggagtcctcagacaccattgacaacgtcaaggccaagatccaggacaaggagggcattccaccggaccagcagcggctgatcttcgccggcaagcagctggaggatggtcgcaccttggctgactacaacatccagaaggagagcaccctccacttggtgctccgcctcaggggtggcatgcagatctttgtgaagacattgactggcaagaccatcaccttggaggtggagtcgtctgacacaatcgataatggtcaagccaagatccaggacagggaaggcatttccaccgaccaacaacggctgaatctttgctgcaagcaacttgaggatggccgtaaccctggccgcctacaacatccacgaaggagaggacccttcaactgggggcttccgtttgcaaggtggtattccaaaattttt

SEQ ID NO: 96113 - DNA, 582 bp, Zea mays
  unsure (1)..(582): unsure at all n locations
tgtgtggaatgatttgnnnnnatggtgatatatggggatattattagagtgatatttgacatatagtatgctcgcccggttcggaattcccgggtcgacccacgcgtccggtcccacgccgtcatcttcggcgtcgtggacgacctcctccgcagggcgcgcgtggccggcggcgacgtcggcgtgctcatcttcaactccagcctgctcagccccacgccgtccttcacgtcgctcatcgccaaccgctacgggatgcggcgcgacgtcgtcagccacaacctcagcggaatgggatgcagcgccggcatcatcgccatcgacctcgccaagcgcctgctccaggtgcacccggacacgtacgcgctggtggtgagcacggagaacatcactctcaacgcctacatgggcaacaaaccgccccatgctggtcaccaacacgctttttccgcgtcggcggcgcggcaatcctgctgtccaaccgccgcgcccgaccggccgccgggccaagtcccaacttaatcaccacggtgcgaaccaaccggggggccgcccaacagagctttgggttggttaacccaa

SEQ ID NO: 96114 - DNA, 526 bp, Zea mays
  unsure (1)..(526): unsure at all n locations
cgcttgctgacgccagggtacgangcacgtacgtactgctctggaattaccgggtcgacccacgcgtccggacccacgcgtccgatcgaggataacctccttagcccacttatttctcgtcaggcaacaagtgtggaaggaaaggagcagtaagcagcatgggcattggcggaggatggcagttggcgtggaaatggaccgagagagagggcgaagatgggcaaaaggaaggtggcttccagcgtatttacttgcatgaggagggcgtacaaggcaacaggggttctatattgtcattaccaggcggggatgttcctactggtggtgagttcatccaggctgcagctcttgtgagccaaccagctctttactctaaggaactgctggagcaacgtgctgctggtcctgcgatgatgcatccatctgaagcagttactaaaggtccaagatgggccgacctatttgagcctggggtgaagcatgcactgtttggtggcataagaatacagatccttgaacagtttgt

SEQ ID NO: 96115 - DNA, 535 bp, Zea mays
  unsure (1)..(535): unsure at all n locations
cggcttgcttgacggtcaggggattcangcacctagcattnnccnnttcggtccggaattcccgggtcgacccacgcgtccgtccaagtctaacaggaagaggacagctaaacgaactgcattttctgattcagattcagaagacctagacctatcaaaggaggaccttgtgaagctgcttcttgagaaagacgaatcattgaagtctaaagatgaagagtttaaagatatgaaggataaggtcctacgcagctatgctgagatggagaatgtccttgccagaacaaagcgtgagtcagagaacaccaagaagtatgccatacagagcttctccaagagcttgttagatgttgcagacaatttgtctcgggcatcatctgttgtcaaggcaagtttctcaaagatagattcatctaacgattctgatgaagctgtaacactactgaaaaccctactagagggtgttgagatgactgagaagcaacttggagaggtctttaagaagtttggagttgaaaagtttgatcctttgaat

SEQ ID NO: 96116 - DNA, 534 bp, Zea mays
gtgccgttttccctgatgtccagttgcgactggactgacgtaccggtccggaattcccgggtcgacccacgcgtccggggcaatgttgaggccactggtgaggatttctctgttgagccagctgatgagaggaggcctttccgtgctctcttggatgttggccttattaggactacgactgggaaccgtgtctttggtgccctcaagggagctttggatggtggcctggatattcctcacagcgagaagaggtttgctggtttcaagaaggatgacaagcagctggatgctgatatccatcgcaagtacatctatggtggccatgttgctgactacatgaggaacctcgctgaagaggagccagagaagtaccagtctcacttcagtgagtacattaagaagggaattgaggctgacgacatggaagctctgtacaagaaggtccatgctgccatccgtgctgatccttctgtggtcaagtcaaccaagcagccaccaaaggagcacaagaggtacaaccccaagaaactgacg

SEQ ID NO: 96117 - DNA, 521 bp, Zea mays
  unsure (1)..(521): unsure at all n locations
agtaggactgctgatacagactngaagtacgctgcaccggcccggaattcccgggtcgacccacgcgtccggaacgggttcgcgtgcaaggcgaacttttcgtcggacgacttcttcttcgacgggctgaggaacccgggcaacaccaacaacccggcgggctccgtggtgacggcggccaacgtggagaagttcccgggcgtgaacacgctgggcgtctccatggcgcgcatcgactacgcgccgggcggccagaacccgccgcacacgcacccgcgcgccaccgagatcatcttcgtcctcgacggcacgctcgaggtcggcttcatcaccaccgccaacgcgctcttcaccaagaccgtcaccaagggcgacgtcttcgtcttcccgcgcggcctcgtccacttccagcagaacagggggcacggccccgccgtcgtcgtcgccgccttcaacagccagctccagggcacgcatgccatcgccatgacgctcttcggcgccgttgccgccgtgccctc

SEQ ID NO: 96118 - DNA, 521 bp, Zea mays
tgagagagtactgaataacgaatttagacaaaagtgtataccgccccggaattcccgggtcgacccacgcgtccgcggacgcgtgggtgagcgcggcggcggcgagctcggtcaccaagttcatcaagtgcgtcacggtcggcgatggggccgtcgggaagacctgcatgctcatctgctacacctgcaacaagttccccacggattatatccccaccgtatttgacaacttcagcgccaatgtctccgtgggtgggagcatcgttaacttgggcctctgggacacggcaggccaggaggattacagcaggttgaggcctctcagctacaggggtgccgatgtgttcatcctctccttctccctggtcagcaaggcgagctatgagaacgtcctcaagaagtggatgccagagcttcgccgattttcacctactgttcctgtagttcttgttggaaccaaactagatctccgtgaagacagatcttaccttgctgaccattctgctgcttccatcatctct

SEQ ID NO: 96119 - DNA, 528 bp, Zea mays
  unsure (1)..(528): unsure at all n locations
gtagcaggtgctgtcgcctgaaacgtatgcatagcattctcgttctnaattccggtcgacccacgcgttcgaagcaggcctagtacgccgnctgcgcgttcctcctattacacatacacgcagggaggggccgatatgtgtaataggaggctccatcgaacatcgatggcttgcttctttatcagaacatgtttgaataaacgctatttggtaaaaaaaaaaaaaataaaaaaaataaaaaaaaaaaaaagggcggccgctctagaggatccaagcttacgtacgcgtgcatgcgacgtcatagctcttctatagtgtcacctaaattcaattcactggccgtcgttttacaacgtcgtgactgggaaaaccctggcgttacccaacttaatcgccttgcagcacatccccctttcgccagctggcgtaataacgaaaaggcccgcaccgatcggcctttccaacaagtgcgcagcctgaatggcgaatgggacgcgccctgtatcggcgcattaaacgcggcgggtn

SEQ ID NO: 96120 - DNA, 544 bp, Zea mays
  unsure (1)..(544): unsure at all n locations
gagacgcaggtgctgtctacatgatatcatagtcgatacgtattgctccggaattcccgggtcgacccacgcgtccgcccacgcgttcgtccacgcgttcggccacgcgtccgttcacgcgtccggcaagtaccagaagagcacggagctgctcatccgcaagttgcccttccagcgccttgttcgtgagatcgcgcaggacttcaagaccgatctccgctttcagtcctccgccgtcgccgcgctgcaggaggccggcgaggcctacctcgtggggctctttgaggacactaacctctgcgccattcacgccaagcgcgtcaccatcatgcccaaggacattcagctcgcgcgccgtattaggggccagagggcctgagcgaggcgaggctctcttaccgtaggcggcgttcgtgttgctttcggcctgcttggaagacttgtgcttctcttgggttactttttggtggcatttggcattttggtaccatagtgctttgtcttagtatcttaggggttgaaaagtcggttaattgcttggtan

SEQ ID NO: 96121 - DNA, 519 bp, Zea mays
  unsure (1)..(519): unsure at all n locations
gtatataggcggtgattacgacatacagacaaaggtcatccgcgccggaattcccgggtcgacccacgcgtccgcacgctgttctggctgttggctacggtgtcgaagatggtgtcccctactggctcatcaagagctcatggggcgctgactggggcgatgagggttacttcaagatggaaatgggcaagaacatgtgcggggttgctacgtgtgcatcctaccctattggcgcatgaaggccttaccaagtggtacatggtctggttgggcttaattaatgctggttaaaccggacctggccaatgggtattccgaaccggaaccttggttgggaattggaaatcatgaaaggggaaggagttgaccggacccttgcttgcacgtctccccgagtgtgtaggtagatggacagttggggttccaaagcactatactcatacgtgtgtgtgacagtatatatgtgacacaatatacgcatagagcgttaaaaaaaaaaanantaattntttaaataag

SEQ ID NO: 96122 - DNA, 523 bp, Zea mays
  unsure (1)..(523): unsure at all n locations
agttnagaggtgctgagcctcgcatctcagactatgcggtancctgctcctgaattctccgggtcgacccactcgttcgcccactcgtccgcccactcgtccgatggtgtgcttcttgtcgcacctatgtgcaagatttgagaagatgtaacaccacctgcacctgtattgaaggcactgagcatattgtcatgtcttcttcctgaggcgaagttatttccgcagaaagatataggagatttggcatttagagatccaaggaaaaggaaagtagctgagtacaatgccatctcatattctgaccaaatgagattaagaacagcagttgaacttttaaaagccacgaaggacattgaatcacagttggaaaagatctcctctccattgctgattcttcacggagccgcagacatggtaaccgatcctcatgtcagcaaattcctttatgagaaagccagcacgaaggacaagaccctcaagctctatgaaggcagctaccattcaatcttagagggagaaccat

SEQ ID NO: 96123 - DNA, 529 bp, Zea mays
  unsure (1)..(529): unsure at all n locations
gagtccggtgctgttgccgtaaactnatcatctgcattcccgcctgaattcccgggtcgacccacgcgtacgcggacgcgtgggtgctctcccgcaacggcgtcaagttcggcgaggccgtctggttcaaggggggcgcccagatcttcagcgagggcgggctggactacctcggcaaccccagcctgatccacgcgcagagcatcctcgccatctgggcctgccaggtcgtgctcatgggtgccgtcgagggctaccgcattgccggcgggccgctcggcgaggtcgtcgacccgctgtaccctggcggcagcttcgaccccctcggcctggccgacgaccccgaggccttcgtcgagctcaaggtgaaggagctcaagaacggccgcctcgccatgttttccatgttcggcttcttcgtccaggccatcgtcaccggccagggcccgctcgagaacctcgctgaccacatcgctgacccagtcaacaacaactcatgggcctacgccaccaacttcgttcccggcan

SEQ ID NO: 96124 - DNA, 545 bp, Zea mays
  unsure (1)..(545): unsure at all n locations
cgatgccaggtgctagttgcagcngaccgtttgcaatcgcgtatctgctccggaattcccgggtcgacccacgcgtccgcggacgcgtgggcgcgcacccggttccgcgtgcctttccccacctactctcgcggctctcggcagccagtctagggtttcggtcccggcgtgcttatccgcccccgccggccatgtcgaagcaaggagggaaggccaagccgctgaaggcgcccaaggccgacaagaaggagtacgacgagacggatcttgcatatctgcagaagaagaaagatgaggaaaaagcactgaaggagcttaaggccaaggcacagaagggcgcgattgggggctcgggtctgaagaaaagtggaaagaaatgagactggtcacccgtctccaatacctagaggatgataaggcaactgtctatctgtgttgcgcttcactaagtgtgattgtaacagtggtaccttctgtggtctgtgttccgcgaagttgcaattgggtgctcgatcgaaagatgtttcaaccctccatctgttagn

SEQ ID NO: 96125 - DNA, 537 bp, Zea mays
gagtcggcgtttcactattaagggggctacagcactgtcgtaccggtccggaattcccgggtcgacccacgcgtccgatgctttcttggcatcagaggccatcatcaagcagattccccgtctccttggtcctggtcgcaacaaggcaggcaagttcccgaccctggttactcaccaggaatccctcgagtccaaggtgaacgagactaaggcaacagtcaagttccagctcaagaaggtcctttgcatgggtgtcgccgtcggcaacttggcgatggaggagaagcagatccagcagaacatccagatgagcgtcaacttccttgtttcccttctgaagaagaactggcagaatgtgagatgcctgtacgtcaagagcaccatggggaagccatacagggtgttctaagtctgctcttttgtgaagtctgctaggttctggcaccgaggttttattgaattaaactcttgttaagagtatgtttttggacgatcctatatttcgtcctggcgctactatgtttcaaaatggtggag

SEQ ID NO: 96126 - DNA, 531 bp, Zea mays
  unsure (1)..(531): unsure at all n locations
gtgcgctctcacttcngtagtntgcgatacgcactgacgtaccggtccggaattcccgggtcgacccacgcgtccggcttcatcatctacaggatcgacgagaagaagaagatggtggtggtggagcaggtgggcaagcccgtgctcggctacgacgacttcgccgccagcctccccgccaacgagtgcaggtacgccatcttcgactacgacttcgtcaccgaggagaactgccagaagagcaagatcttcttcatcgcctggtctcctgacacggcgcgcgtgaggagcaagatgatctacgccagctccaaggagaggttcaagcgggagctggacggcattcaggtggatctccaggccaccgactccgccgaggttggccttgacgtcatccagggccgtgcaagctgaggatgcccagcgatgaactgcccatgccagaggatgtatgagcatcatcagttcagatgagaacttgactgggcgggctatgtaaaaactgcatccaccgcagtgatgaaatcaatn

SEQ ID NO: 96127 - DNA, 518 bp, Zea mays
tggtttgaggtgctgaatcagcaacgggaagaaaattgtacccgccccggaattcccgggtcgacccacgcgtccggttcaggatccacatcttcccgagcgagttcttggttggcctcttcctcttcggaccacctccaaggctcttggtgtagcttgccactctcaccaatcaagttttcatgtctgatctcgacattcagatcccaactgccttcgatcccttcgctgaggccaatgctggggactctggtgcagcagcagggtcaaaggactacgttcacgtgcgcatccagcagcgtaatggtcgcaagagcctgaccaccgtccagggattgaagaaggagttcagctacagcaagatcctcaaagatctcaagaaagagttctgctgcaatggtacagtggtccaggacccagaacttggacaggtcattcagctccagggtgatcagaggaagaacgtctcgaatttcctcgtccaggcccgcattgtgaaagaggagcacatcaagatt

SEQ ID NO: 96128 - DNA, 534 bp, Zea mays
  unsure (1)..(534): unsure at all n locations
atgcgctcngactggttccgtngtcaatagcactgtcgtaccggtccggaattcccgggtcgacccacgcgtccgccttgcttgctggccccacagccataattactgaaatcaatgaaaaaattggtgctgctggtgtagtcagccaggagtgcaagactgttgtttctcaatatggacagcagatcctagatcttttgctagctgagacacaaccagcgaagatctgttctcaggttggtctgtgcacttttgatggcactcatggtgtcagcgctggaattcggagcgtagtggatgatgaagctgggaaatcaaatggtggtctcaagagtgatccaatgtgcaatgcctgtgagatggctgtggtatggatgcagaaccaacttgcccagaacaagacacaggagctcattctgaactacattaatcaagctttgcgagcgtcttccgagtccaatgggagaatcagccgtggactgtggcagtcttgcgtccatgcctgacattgccgtcaccattggaagcaataag

SEQ ID NO: 96129 - DNA, 519 bp, Zea mays
  unsure (1)..(519): unsure at all n locations
agttnagccaggtgctgtgattgcaataggcagtattgatgaactcgctccggaattcccgggtcgacccacgcgtccgcacatagcttcgtcgatttgaatttgatgtactaatggagtctaagggtggcaaaaagtctagcagtagtcgttccatgatgtatgaagctccccttggctacagcattgaggacgttcgacctgccggaggcgtgaagaagttccagtctgctgcttactccaactgcgcgaagaagccatcctgatatcccttttggcttcctcattctagtagtttaggatttcttttctgacactttgattctgaccaatctctctggcctgctgcttcctgataatcgaccagttccccagtcttgctccttgcactcctccctcctccatctccagcattgtgttctgattcacctgctccaatggctgntctttctgctgctgatgcttccccggtctcagctatcgggtttgagggctatgagaagcgccttgagatcacat

SEQ ID NO: 96130 - DNA, 518 bp, Zea mays
  unsure (1)..(518): unsure at all n locations
gggttgagtgccgtgtatccggaacgggaagtattctggataccgctccggaattcccgggtcgacccacgcgtccgcccacgcgtccggggtttcgtgctaggaaaagacgcggttggcaaggccaaagcgttcgatgagaagcacggcttcacatccacagccggtgctaaggtggcctccatcgacaagaagattgggctgagcaataagattaccacgggcacttcgttggtcagcgggaaggtgaaggagatggaccagaagttccaggtctctgacaagacaaagtcagcgttcgcggctgccgagcagaaggtgagcagtgccgggtccgccatcatgaagaacaggtacgtcttcaccggcgcgtcgtgggtcaccggagcgttcaacaaggtcgccaaggctgccacggacgtcgggacgatgaccaaggagaagatggcggccgaggagcagcagaagggcttctccggcccgtcgtctaggagccactcgtacacgcncatccgatg

SEQ ID NO: 96131 - DNA, 535 bp, Zea mays
  unsure (1)..(535): unsure at all n locations
ggtgctgttacataaaacgttangcgatagcaatctgctccggaattcccgggtcgacccacgcgtccggaaatattacaagcaacacttggcaaagcgtcttctttctgggaaggctgcttctgatgatgctgagagaagcatgcttgtgaagctgaagacagaatgtggctaccagtttacttcaaagttggagggcatgttcactgatttgaagacctctcaggatactacacaagggttttatgcatctacttcctcggagctgccggcagatgcccccacaatgtctgtccagatactcacaactgggtcatgggcaacgcaaacctgcattacctgcaatctccccctgaaattgtttctgtctcagagaagtttctggccttataaccttggcccacataatgggcaggaggctaacatgggaaaaaaacattggggaccggttgcattaaagttacatttggaattggaagcagccttaactgaacgtttaaacttcccgatgggtggtcccatgcttgttaaatca

SEQ ID NO: 96132 - DNA, 560 bp, Zea mays
atgcctatcacaagtagctgatgcacatgcatttcgactcgcgactctgaattcccgggtcgacccacgcgtacggtagattgctatgatggttgagatttactcttgaaccaaagatgttctatcttatatcctgaattagttatcccaaaaaaaaaaaaaaaaaaaaaaactaccaaaatactacaacataattaaaaaaaattcaccaattaaaaaaaatcttatagataatacaaaaagagcttattcattctactacctttttaaaaaaaatatgatgcccccacaaagtatcataaatatactcactactcttacaatatcaacgcataacttgattatcctcaatttccctcacctaaaccattatttttataacttaaatatttgtgaaaaaaaatcttggtccaaataataaaagttattgtaacaaaatctcacatacctaatgtcccgtttattttcaaaatctccactctcttattgtcttttatccaatatcttaactccactaaacatctcaaaatataaatatcctcattcattagttaaaaaag

SEQ ID NO: 96133 - DNA, 519 bp, Zea mays
  unsure (1)..(519): unsure at all n locations
gtnatggggtgctgagtatgcatcacagactaagcgtactccgctccggaattcccgggtcgacccacgcgtccgcccacgcgtccggccatctactcttagaaggttcaaagagagagacagaggataagatagggccacgagaaatcgatgctgatgactccgatgtggagcctaaaagcgatgacgagagcgatgaagatgatgatgacgacgacactgaagctctaatggcagagcttgagaggattaagaaagaaagagccgaggagaagcttagaaaggagcggcaacaagcagaagaggaggccaagatgaaggaggctgaactgatgcggggaaacccgttgattaatatcaacaatgctggctccttcagtgttaagagaaggtgggacgacgacgtggtattcaagaatcaagcacgaggagagaccaagacaccgaaacggttcatcaacgacaccatcaggagtgatttccaccgtaaatttcttcagaggttcatgaagtgacgcn

SEQ ID NO: 96134 - DNA, 520 bp, Zea mays
  unsure (1)..(520): unsure at all n locations
agttgagtgtgctaaatgncttttcatcgccattcagtancctctcctgaattcccgggtcgacccacgcgtccgtccactcgtccgggtgaggcagctcaacccgtggcagtatactgcagatatcccgctgatggcaaatttggaggtttggtttcaaaggcctaaggacattgttcgtaaacttcagtcaggcgatcttgaccttggtgttgtgggttttgacatagttagtgaattcggaatctgcaatgaagatttagtggttgttcatgatgctcttgagtttggacattgtcgtttgtcccttgcggtacctaaggaaggcatctttgagaacatacatactatggaagatttgctaaagatgtctgaatggacagaagaaaggccactacgtgttgttactggatttggatatctaagcgataagttcttaagagagaaagggttttaagcatgttcgttttttatctgccgattgaacctctgagtcatattcttccatgggtaattgctt

SEQ ID NO: 96135 - DNA, 539 bp, Zea mays
gaggccaggtgctgtctcagtgttgccgtagcctaagcattgaccgactcggtccggaattcccgggtcgacccacgcgtccggatccgcaagtaccagaagagcacggagctgctgatccggaagttgcccttccagcgcctggtccgtgagatcgctcaggacttcaagacggatctgcggttccagagccacgccgtcctggccctacaggaagccgtcgaggcctacctcgtcggcctgttcgaggacaccaacctctgcgccatccacgccaagcgcgtcaccatcatgcccaaagacattcagctcgcccgtcgcatccgctgcgagcgcgcgtatgcgtatctcgcgctcggccccagtggccgcggagggatggaagaaggcaatttgtaaccttatgctgtttgttcgcttttagacggcgtggtgaagaactagtgtaaaaacggcttttaagtctattttgtgccggagttcctgttagcccgattcgtccctaagcgatcttggctaaagacttattcgtgtggcca

SEQ ID NO: 96136 - DNA, 540 bp, Zea mays
  unsure (1)..(540): unsure at all n locations
gagacaatgcgtnttngcctagntcgtngcatcngcactgacgtaccggtccggaattcccgggtcgacccacgcgtccggaatatgcagctgttgccagagttcttgcaagttgaagcttttgctaagttcagtaatgctattggaaaggtgatagaagcccaacctgacatgccagttgttggagccataactctatatgtatcacttctgacctttactctccgtgtacatcctgatcggcttgattatgttgaccaagtgctgggtgcatgtgtcaagaaactttcaggcaaggcaaaacttgaagatagcagggcaacaaagcaaattgttgcacttcttagtgctcccctggaaaaatatagcaatattgttacttcattagaactttcaaactatcctcgggttatggattatcttgataatgctacaaccaaagtgatggctgtggtaataattcaaagcataatgaaaaacacaacctgcatatctacttctgacaagattgaggcactattcgatttaattaaggggctg

SEQ ID NO: 96137 - DNA, 541 bp, Zea mays
  unsure (1)..(541): unsure at all n locations
gagtcaggtntttncctgagttagttagtcatagcactgacgtaccggtccggaattcccgggtcgacccacgcgtccggttcttaatgtatgctgtaaattgatcaaacagatggtatattatatctgccacaaagatcgctcacaccggactcttctgcgagatcgcgggcatcaggcatcactttgacatcaaaggccaagatagttgcatattctttctttctctcaagcatgacactagccttcataacatccttcttatgcactggccctatactgaaatcacagaagggaatattcacagcagggctcttcaagaactcagtgagagcttccaaagacccaagggtagatgcctgtacatagacaccttcaccactcctgtcaatccggctcctaacccgtgtcatctctttcataacagcttcattcagtttgtctaaatcatcatcaggtcctaacacgtaaagggctgtccctgcaattgcatgttcgagaccctgagcagatattttgactccttgtgcgttctagatcg

SEQ ID NO: 96138 - DNA, 520 bp, Zea mays
aggggagacaggtgcttggtatagacatcgacagtagagatgaaccgctccggaattcccgggtcgacccacgcgtccgcggacgcgtgggcggactcgtgggcggacgcgtgggggtgggaagaacatcgaggttgcagggatgacaaagaaggacggtctccgggaactcgaggagtctgagattgatgagtatgttgccgagatcgaggcagagaaggctgcagctgaggctgcaaagaagggtgcctcgaagaacgcctaatttcccgtcttgtgctatggctcccttcaaccctgtgtgtgtgtcccgtttttatgttccatagcaccatcttaactgttctagaaggatgctagatctttaagtgaaactacgcttatatgcctgtgggttaaatgatgtacaatgtgctcgtctacatgccttcttcggaggttttcaaaaaaaaaaaaaaagggcggccgctctagaggatccaagcttacgtacgcgtgcatgcgacgtcatagctcttct

SEQ ID NO: 96139 - DNA, 541 bp, Zea mays
ggcgttctatcatatccgtagacaatcagtatctctcgaatttccgggtcgacccacgcgtccggctgcatctgtcctttaacctccgcgtaaacatcctttggtatgactattcaggatatgggcaatcgttatgaaagccgagtgatcacaatacttatgctgacatagaggcagcttacatgtgcctcatagagaaatttggtgccaaggaagaagaaataattctttatggacaatctgttggaagtgggcctactgtagatttgtccagtcgtttatctcagctgcgagctgttgtcctgcatagtactatattgtcagggctgatagctttgtatcctttgaatggcacatattggtttgacaatttcaagaatattgatcaattactctaagttacatgtcctgtgcttcattattacatgtacctgctgatgaataggtggatttggtctcatggggaacaaactttgggaactttttctatatacaagtattgagccccttattgcatcatgagtatgaaaagccctcttta

SEQ ID NO: 96140 - DNA, 532 bp, Zea mays
tggtgctgtggctgagtccaaatgcagctgcattgcccgtaccggtccggaattcccgggtcgacccacgcgtccggcaaggagtacttcagcaagtccctcttcctggtcggagagatcggggggaacgactacaactacgccttcttcaagggcaagaccctggacgacgccaagacctacgtccccacggtcgccgccgcggtcaccgatgccaccgagaggctgatcaaggccggcgccacgcacctggtggtgccggggaacctgcccatgggctgctcgtcggcgtacctgaccctgcacccgggccgcaacggcagcgactacgacgccgccggctgcctcaggacgtacaacgacttcgcgcagcaccacaacgcggtgctccagcggaagctgcgggcgctccgggcgaagtacccgcaggcgaggatcatgtacgccgactactacggcgccgccatgtcctttgccaagaaccccaagcagttcgggttcacgcatgggccgctgcggacgtgctgcggcg

SEQ ID NO: 96141 - DNA, 519 bp, Zea mays
agggttgacggtgctgaatacagcaacagaaagtatagaggcaccgctccggaattcccgggtcgacccacgcgtccgcccacgcgtccgcccacgcgtccgcccacgcgtccgcccacgcgtccgcccacgcgtccgatcctctgaagattgtcatcaagacctgtggcactaccaagctcctgctcaccattccaagaatccttgagcttgctgaagagctgtctatgccacttgctgctgtgaagtactcccgtgggacgttcatctttcctggtgcacagccagccccccacaggagcttctctgaggaagttgctgcacttaaccgctactttggcggcctgaaatctggtggtaatgcttatgtgattggagatccagcaagacctgtacagaagtggcacgtcttctacgccactgagtacccagagcaaccaatggttaaccttgagatgtgcatgactggtctggacaagaagaaagcttctgtctttttcaagacttatgctgatggga

SEQ ID NO: 96142 - DNA, 526 bp, Zea mays
  unsure (1)..(526): unsure at all n locations
atgtatgatgcgactgtaggcctgaaaatcccgnccaggttgnanctatctctcaacatttgggtcgacccacgcgtccgcccactcgtccgcccacgcgttcgcccacgcttacgtttacgcgttcgtccactcgtccgagcctctgaagattgtcatcaagacctgtggcactaccaagctcctgctcaccattccaagaatccttgagcttgctgaagagctgtctatgccacttgctgctgtgaagtactcccgagggacgttcatctttcctgatgcacagccagccccccacaggagcttctctgaggaagttgctgcacttaaccgctactttggcggcctgaaatctggtggtaatgcttatgtgattggagatccagcatgacctgtacagaagtggcacgtcttctactccacttagtacccatagcaaccaatggttaaccttgagatgtgcatgactggtctggacaagaagaaagcttctgtcttttttaagactaatgctgatcggaacact

SEQ ID NO: 96143 - DNA, 518 bp, Zea mays
  unsure (1)..(518): unsure at all n locations
tggtnagagggtgctgatctacgcatcgaaagtacgctgcaccgctccggaattcccgggtcgacccacgcgtccgcccacgcgtccggtcgtttccttacaagtggatcaataagaagtggaaagaagggttccatgtgacatccatggccaccgctgggaatcgctggggcgtagtcatgtcaaggaattcagggttctctactcaggttgtagagttggatttcctgtaccccagcgagggcatccaccggcgctgggagagcggctacaggataacttccacggcagccaccaacgaccaagccgctttcatcctgagcatgccgaaacggaagccgatggacgagacacaggaaacgctgcggacctncgccttccccagctcacacgtcaaggagaaatgggccaagaacctctacatcgcttcgatttgcttcgggcggaccgtgtgctgatcgcgcgcgcctgggaaatggaaatcgaaacgagggccaccgatccggtacggtggcgct

SEQ ID NO: 96144 - DNA, 526 bp, Zea mays
tgagcgggtgagtgttcactagatactccgcatatctatgcatccgctccggaattcccgggtcgacccacgcgtccggtaccgtatcagtctcccggattctctccggttcgtgggagggccaaagcttcgagttaggaaaaccgtaccgctgtgggagtagcctccggcgatggctgcggcggcgatcctgccggagctggcgacgcaggtgctcatcccggtcgcggcggccgtgggcatcgcgttcgcggtggtgcagtgggtgctggtctccaaggtgcccgtgatcgcgtcgggggtgtggttcgcgtcggcgcagggcgaggagtgcgcgcgcctggcgcggtggcccgtggccatcctgggcgggctgctcctgctggccgcgctggcgggcttcgtgggcgcgtactggaaccggcgcggcctgctggccttctacctcttcgccatggcgtcgctcgtggtgctcctcatcgcgctcctcgccttcgccttcgccgtcacccgcggggtccgcgcc

SEQ ID NO: 96145 - DNA, 543 bp, Zea mays
  unsure (1)..(543): unsure at all n locations
tggatatggttgctgaaatgatagcactngcaacngctcttaatttccggtcgaccacgcgtccgcaacctgtatggttgccgtcacttgatccctgatggtctgatgagggccactgacgttatgatcggcggaaaggttgccgtggtctgcggatacggtgatgtctgcaagggttgggctgctgcatataagcatgctggtgcccgtattattgtgaccgagatctatttcatctgtgctctacaagcttttattgaaggtctttatgttcttcccttggaagacgttgcctctgaagctagcatttttgttgccaccactgtgaacaaggatatcatatggttgaccacatgaggaagatgaataacaatgccaattgctgcaacatggccactttgatcattaagttgatatgctcgggcttgagacctaccctgggcgtaagcgcattattcataatccccaaactgaccgcttggtgtttcctcggaccaacactggcataattgtccttgcttgagggtttctggtttaaccctt

SEQ ID NO: 96146 - DNA, 558 bp, Zea mays
  unsure (1)..(558): unsure at all n locations
gaatagaggatncatatcatgatncccacggcccatacgactgacgtaccggtccggaattcccgggtcgacccacgcgtccgggcagagcagaggttgctttggatgttgtgctaagccaactccaataatagcagtagacgagccttccaagcggttgaggatccaagggccgaccagtaaggaaggctagcctctcggatgacttttggagcacgagtgcgcatgagatggagaacagcgggatccaatcgcagaggagcatgtcttcgatcagcacgttggctcagtccagcgatcagcatgcgtcaggaagttgcagcaacccgaatgagtttatgaatcaaggtcttatgctctggaaccagaccagacaacagtgggttggaagcaaaaaacgccactctagatctcaacagcctcgagaaccaaagttgagctggaacacaacgtatgaaagtctgctaggaagcaataagctattctcccaaccgataccttttggcaaaatggaaaatttgcttgtggacgctggggagcaagaaggccttnatgaaa

SEQ ID NO: 96147 - DNA, 529 bp, Zea mays
  unsure (1)..(529): unsure at all n locations
tagcggctgtgccaaagccctgcgcatcnactgtaccggtccggaattcccgggtcgacccacgcgtccgcccacgcgtccgcccacgcgtccgcccacgcgtccgcccacgcgtccgagaattcctggagttgagtcagaggggcaataatctgtctgtcgatttgactgtgggggacatatatggggaagaaggttacccgaagattggccttccagcatccactactgcggctagctttggaaaagtgaactcaagcaaactttctgagtataaagtagaggatcttgctgcagccttactgaattctttcacatacaacattggacagatagcctactttgtggctaatctttcaggcctgaagagaattttcttccgaggtgcttatgtctgtggtcatgagaagactatggacaagatttctcgttccctaaaatattggtccaaaggtgaagttcagacgacatttctatgccatgaagggttcttgggaacactangtgcattntggagttatgagaacat

SEQ ID NO: 96148 - DNA, 525 bp, Zea mays
  unsure (1)..(525): unsure at all n locations
aggcggtcgctgagccagcnccntatgcctngcctgcaccggtcctgaattcccgggtcgacccacgcgtccgcccacgcgtccgcgccgccgtcgtcgccgccttcaacagccagctccagggcacgcaggccagcgccatgacgctcttcggcgccgtgccgcccgtgccctccgacatcctcgccaaggccttccgcatcagcagcggcgaggtggaccacatcaaggccaacttcgcgcccaagtagagatccaacgtctgcattcccttgattttctcaataataaatccccgcggtgtgcagttcgatttgttcgtcttcggttggtttgcttcgagacattgctgaccacgcttgtcactgctaatttgtgcggagcggaggagttgcttgtgctccgataaataagataaataatcaattctaaaaaaaaaaaaaaaaggcggccgctctagaggatccaagcttacgtacgcgtgcatgcgacgtcatagctcttctatagtgtcacctaaattca

SEQ ID NO: 96149 - DNA, 549 bp, Zea mays
tggtccatggcgctagggacgatagcacatcccaacgctcctgaatttccgggtcgacccacgcgtccgcgaagttaagccaccatgtggacgatggctttagcgacggtgctgctgttcgtggcaagcgccgcgctgctcggcgtcggcggcgccagcgcgcagcatggcgtgtggagcatcatcactcgtcccatgttccagagcatgctgagccaccgcggcgacagttgtgtcaggggcgccttctacacctacgacgcgttcatcgaggccgtcagcaagttccccggcttcggcaccaccggagacgatgctactcgcatgctgatgctcgccgactttttcagccagacgtaccacgaaaccaccgttggatgtgcgactgctcctgtgggaccgttggcctggggatactgccgggttaaggaacataacccgacggacccaccctactttggactaggacccatacagctaactcatgagtacaactacatgctcgccgggcaagcgctgaaccttgacctgttgggcacccggaccttt

SEQ ID NO: 96150 - DNA, 522 bp, Zea mays
  unsure (1)..(522): unsure at all n locations
gtggtcgtatgccaaaacgaatgnnatcnatggaacggtcctgaattcccgggtcgacccacgcgtccggctggagttggtgcccaacactcacagtgctatgcagcttggtatgcacatgttcccggatggaaagttgtagctccatattctgcagaagatgctcgaggtttgctgaaagcagcaatcagggatccagatcctgttgtgttccttgaaaatgaacttctttatggtgaatcatttcctgtatctgctgaggtacttgattctagcttctgccttccgattggaaaggctaagatagagcgacaagggaaagatgtcactatcactgcattctccaaaatggtgggatatgcccttcaggccgctgatatactggccaaagaaagtatcagtgccgaggtaatcaatcttcgctcaattagaccgctggatagagctactattaatgcatctgtgaggaaacccattggattggtaaccgtaaaagaagctttccttaacatgggattgggc

SEQ ID NO: 96151 - DNA, 528 bp, Zea mays
  unsure (1)..(528): unsure at all n locations
cgtggccgtgtgcatgaactatcagatattcatgcaccggtccggaattcccgggtcgacccacgcgtccgcccacgcgtccgcggacgcgtgggtctcagcatcacttgaccggaggccgaacgggaggccggcatcgaatggcaggagtaactccaggaacccacagtccaggacacagaaggcgcagcaggctgcatccgagaggtcatcctcatcaagtcacagcagcacgagcagcaaccacgactggcgcgaagggtcctcggtccttgatctcaagggcgagaactacttctcctgcgccgtcgggaggaagcggtctaacgcccgctacttgctgagctcgtcggaggaggttgtctccttcctcaaagagttggcgacagcgacagctggcttccaggccacctgtgctgactacatgcatgttcttggataggcagtaaatagactgaagttgaagcctncgtgctttaccagagagaagaagaatattcattcctcgtatgcgcgacagagctacan

SEQ ID NO: 96152 - DNA, 526 bp, Zea mays
agagcgtcgcgtgtcatcgcataacagatattcatgcaccggtccggaattcccgggtcgacccacgcgtccgcagcaatggcatggcgtcctcaccctcgcccttcttccctccaaacttcctcctccaaatgcggcagacgccctccgatcatgacccccaagaacaccaccaccttcctgctcctccccttcatcttcaccacaaccccttcctcccctcctctcaatgcccctccctgcaagacttccgaggtatggcgccaatgctgcggaagcgcccgacgatgtactgcggcgcggacgacgtcggcgtcggaggcgaggaggcgaactgcggcgcgacgaacgaggacgaggtgtcggacgacggctccctgcaagccggcgggcccggggagaagaagcggcggctgaacgtggagcaagtgcggacgctggagaagaacttcgagctcgggaacaagctggaaccggagcgcaagctgcaactggcgcgcgcgcttggcctgcaaccgcggcaggt

SEQ ID NO: 96153 - DNA, 586 bp, Zea mays
  unsure (1)..(586): unsure at all n locations
agttatgtggccggatgagtagtgcctacnnatagatagcacttacgaaccgctcctgaattcccgggtcgacccacgcgtccggagcccgcagccgcccctgtccaatgagtttatcgactagagtcagccggcggatctggtgcagctgaaccagcagagcgagtacgctccaggcctggaggacaccctgatcctgaccatgaagggcatcgtcgtcggcatgcagaacaccggctaggccaagaattattgtgtgcagataacctgtcttccatgagacggttgacgatatgtgtaggcctgtgagcagttagtacaccgtggccagtgtgttctggaggatttgtcatgtcagaagccttctcttgtgtgcttgctgtagatgccaaggggagcttataggctgattgaacctgatggcaaaataaagtatcgaaactattgttttttggtttaactaaataactagcaaaacagttgctttcgtttgcattggaaataataaataaaaaaaaaggggcgggccgctcatatagggatccaagcttactgtaggcattgcatggcaacgttgtatgttttt

SEQ ID NO: 96154 - DNA, 524 bp, Zea mays
  unsure (1)..(524): unsure at all n locations
agtcgctctatgnttgggcacaagttacctcgcacacgtcctgaattcccgggtcgacccacgcgtccgaaaagatcttgcgctacattaggtatggtgttgacggtggagctacccttgtgacgggtggtgataggtggggtgacaagggtttctacatccagccaacgattttctcagatgtccaggacggcatgaagattgctcaggaggagatatttgggcctgtgcagtcgatcctcaagttcaaagacctcaatgaggttatcaagagggcaaacgcgagccagtatggattggccgccggcgtgttcaccaacagcctggacacggccaacaccctgacgcgcgcgctcaaggccgggaccgtctgggtgacctgcttcgacgtcttcgatgctgcgattccgtttggcgggtacaagatgagcggcatggggagggagaaaggcgttgacagcctgaagaactacctgcangtgaaagcggtcgtcaccccaatcaagaacgccgcgttggtgtag

SEQ ID NO: 96155 - DNA, 565 bp, Zea mays
agttagttgctcggatgattattgccaggggtcgatcgccatacgaaccgctccggaattcccgggtcgacccacgcgtccgggagtgttacaaggaggaaatatttggtccagtgcttctcttaatgaaggcggatagcctagatgaggccatccaaattataaacagaaacaagtatggcaatggtgcttccatatttacaacatttggcgtctctgtcaggaaatttcaaacagacattgaatcttgtcaggtgggcattaacttgcctattttagtccccctgccggtcttttccttcacgggcagcaaagctttattctcaggagattttgatttctacagcaaggcttgcgttcaaatctttaaccagatcaagacgatcactcagcaatggaaggagtctcctttgcagctggtcatgctttccatgccaacttgcagaaatgagacgtcaaggacgcttacagcaattttcaaaagctaactcctttccactctttttgacataaacttattcatgggccacatgggaaggataattggtaggcatggcaacacttg

SEQ ID NO: 96156 - DNA, 566 bp, Zea mays
  unsure (1)..(566): unsure at all n locations
ggtaatgtgcgcggntcagtaancctgatnaactgatagcngtacgactgacgtaccggtccggaattcccgggtcgacccacgcgtccgcccacgcgtccgcggacgcgtgggcttcgagaacgtcggcggcgccatgctcgacgccggggtgctcaacatgcgcgtgcacggacggatcgccgtctgcgggctcatctcgcagtacaacctgtcggacggtgagaaggacgccgtgcgcaaccttgtggtcgtcatcttcaagcgcctgcgtctgcangtgttcatcgagcccgaccacaagcacctctacccgcagtacgaggcgtgggtgctgccgtacatcagggacggcacgctcgcctgcgtcgaggacttcgtcctggggctcgagagcgctcccaaggcgctgataggactcttgcacggtcgcaacgtctgaaagcagctcgtccgcgttgccgacgacgagtgatgcgcgccttacttcgattggaccagacgatccatgtgtcgctggtggtatggttcgattccccatgttcatgaataattattgtgcccat

SEQ ID NO: 96157 - DNA, 525 bp, Zea mays
  unsure (1)..(525): unsure at all n locations
tgtcgtgctagacatagtactatagagtatcctgcaccggtcctgaattcccgggtcgacccacgcgtccgcggacgcgtgggcgaaacatgccagacaatggtgcagaaaatggcaccgagggaggaggctcgagagttaaatatgctgtgatggatgttcccatcaccttaccttcgttgaaaccagcttttgacaagcctaaccccaaacaaggcattggtatgctgtcatggagcagcgacagccactatttcttcaccaggaatgacaacatgccaactgttctctggatatgggatatatgccgccttgagcttgccgctgtgctcgtgcagaaagatccaatccgtgctgcagcatgggaccctacctgcacacgccttgttttatgcacagagagccctcacttgtacatgtggacgccatccggtgcctgctgtgtcaacatccnctttctgaacttccgaatcgttgatttgaagtggagctcgaatgggagctgtctcctnctgaaggagcgcn

SEQ ID NO: 96158 - DNA, 561 bp, Zea mays
  unsure (1)..(561): unsure at all n locations
gtaatgattttgggccgaatagttgatcctgagnacgatacgactgacgtaccggtccggaattcccgggtcgacccacgcgtccggggagatgtcgtcggcgttcagcggcgatgagaccgcccctttcttcggcttccttggcgcctccgctgcgctcgtcttctcatgcatgggggcggcgtacgggacagccaagagtggcgttggcgtggcgtccatgggtgtcatgcgcccagagctctgtaagaagtccatcgtgcccgtggtcatggctggtgtgctcggtatctacggcctcatcatcgccgtcatcatcagcactgggatcaaccccaaggccaagccatactacctttttgacggctatgcccacctgtcgtctggccttgcctgtggtcttgcttggcttgctgcaggcatggccattggcatcgttggtgatgctggtgtcagggcgaacgctcatcatcctgagttgtttgtgggcatgatcctcatccttatttttgctgaagcgcttggcccttacggtcttatcgtcggcattattctttcggt

SEQ ID NO: 96159 - DNA, 563 bp, Zea mays
  unsure (1)..(563): unsure at all n locations
tgaatagtacccgggtcagtttcggcagcggtcgatagcnatagcaacngcnnttgaatttccgggtcgacccacgcgtccgccccaacatcgtccacgagcccgtcatttacagattgaatgaagctgttatgcattttggagagagcatcaaggaaatcatcaatgaggagtttggtgatggaatcatgtcagccatagacttctattgttcaatttgccaaggttgaaggggccgacggaaaagatcgtgtggtggtcacatttgatgggaagtatctaccttacactgaacagaaatctgaacatatgatgtctaggcctacccgcaagacatcttgatgtggctggtgaggaggagaaacatgatcgtagtggtaggtatcgggctcagcaaggatcgagcatgccattttctttgggtagtccatatcatcaacacaataaacagacctatattgatgataactgtcaaaaggaacattaaagtcaatgttctacctggcatgattgctggactgtattggatgatgctgagataaaaagagagaaaaagtgaacca

SEQ ID NO: 96160 - DNA, 576 bp, Zea mays
  unsure (1)..(576): unsure at all n locations
tgatgtttagtnagtgctcgtgtnatatncctgaggctagtngctcgatacgactgccgtaccggtccggaattcccgggtcgacccacgcgtccgtaacaagtttggatacagagggccgctaccttctgttgaatgcaatcgctaaccaactgcgctatccaaatagccatacacactactactccttcatcactctgtatctattttccgaggctacccaggaaattacccaggatcaaatcacaagggttcttcgttagcgtctcatagtgaaccgtcctcatccttgggggttacttattactttcattgaattgataaagaatccgtgttacaacttttggagccggtctgttacacactgtgcacctgagatcgagaaactgttcgagtcggtggcaaggtcatgtggcgcaaaagttgtggacgaaggaatcagcgtgcatgatggcagccactaaagccatctgctttgttcaagtgttggttttgagctatttcttctcttgcactgaaaatttctgggcttgtacagatcgtctgtatagtaaagctgttaagtcacacttgttg

SEQ ID NO: 96161 - DNA, 527 bp, Zea mays
  unsure (1)..(527): unsure at all n locations
agcgctgtgcttgatgaattttctaccgctactcatgcaccggtcctgaattcccgggtcgacccacgcgtccgcaaagaattccctcccctagccgccgccgccgctcgtctccctgagaggtgccgggaccgaggaactggccgagttctaggtagagaatcggttttgcttgtctcagcacggggtctgctgcgtctggtggtggtgaaggggagaaattcgtgagatctgttccggatcaggcgtgcgagctcgggaatcaggggtttcacacatagcttcgtcgatttgaatttgatgtactaatggagtctaagggtggcaaaaagtctagcagtagtcgttccatgatgtatgaagctccccttggctacagcattgaggacgttcgacctgccggaggcgtgaagaagttccagtctgctgcttactccaactgcgcgaagaagccatcctgatatcccttttggcttcctcattctagtagtttaggatttcttttctgacactttgattctgaccan

SEQ ID NO: 96162 - DNA, 558 bp, Zea mays
  unsure (1)..(558): unsure at all n locations
agtatttggccggttggtgttgcctgcncactacagtcatagcaacngctcctgaatttccgggtcgacccacgcgtccgaagagatggaaattgattctatagatttacatgctacttaacaatttacaacttatagcacgctcgggtactttcttctctataacataaatataatgtataactatctctctcatatgatttatgttaatataaaaatatattacatgtacaaatatattaacttaattagtttcctctaaattataattagtagaatgaaattcaatttcaacgaaacaaaccgggcccaagagagtattggactgtatggaaaacaggggtgatgagaaatcctcaagatctccaattttttctctactgttttttttaaaatgtatgtcaataatagtgtccatcttgggaatgcaaactaaacgttcaacaacattctgttggtaggctctgaagatataagctcatatgttgtctttatgattgatagtcagtgataacagttctggagttggcaaatgcacatttaaattcaaagataaag

SEQ ID NO: 96163 - DNA, 576 bp, Zea mays
  unsure (1)..(576): unsure at all n locations
tgtgattagatttggccggtccgattgcctgaaaattgtngcctnttagtanngtccgctcncggncttgaattcccgggtcgacccacgcgtccgagaaggggtcccttctccttggttgcgttgcgcctccctcctgtctgcgtgcgtgcaatcgacgcagaggcgcgggcgctcgcaccaccacgaccacgacccgatggctttcatgcgctcccgctcaaatgcatcttctggcatgggagttgctcctaacattagggagacattcgttgagcttcaaatgaagaaggcattccgatatgttatcttcaaaatcgaagagaagcaaaagcaggtggttgtggagaagacaggggctactactgaaagctatgatgattttttggcctctctcccagagaatgactgccgatatgcgctgtatgattttgattntgttactggggagaatgtgcagaaaagcaagattttcttcattgcctggtccccatcgacatcccgcatacgtgctaagatgctgtactccacgtcgaatgaccgcatcaagtacgagcttgacgggttcactacaag

SEQ ID NO: 96164 - DNA, 527 bp, Zea mays
  unsure (1)..(527): unsure at all n locations
aggcgtgctaangctgcnctaaagacanctacgcaacggtcctgaattcccgggtcgacccacgcgtccgcccacgcgtccgcaccatcaagatcgatctggagaccaacaagattgtgtcgttggccttggggagcgggtcagggtagcggatggtgcggccaacgacaccatcaagatcgatctggagaccaacaagattgtggacttcatcaagtttgatgttggcaacgtcgtcatggtgactggtggaaggaacactggccgcgtgggtgttatcaagaacagggagaagcataagggcagctttgagaccattcacgtggaggactcccttggccaccagttcgccacccgtatgggcaacgtgttcaccatcggcaagggtaataagccgtgggtgagccttgccaaaggcaagggaatcaagctgagcatcatagaagagcaaaagaagcgggatgccgcttgccaagctgctgccaacgcataaatcctctgaatgtgcttgggtgagagtttttttt

SEQ ID NO: 96165 - DNA, 576 bp, Zea mays
  unsure (1)..(576): unsure at all n locations
ggatctgagcgggtggctgttgnccgggcgcatcncgtcgctcgancggcgttggaatcctcgggtcgacccacgcgtccgcggacgcgtgggccgagatcgacngcgcccttgggatgggcccgacgttcggcgccatggtgatctgctgccagaatgcggcgcacctggcgctgtaggcactgggcaggcccaacgccgtggacgtgaccatcccagaggtgtcgccagcgcttctcgaggagtttgttgttgcggtctttgacgactagggcttggactccttatcgagcattcacgtgccagcagtctagcagttgtttatctggaccggggcgctatcacggtgtgttcttgtaatcttgtacttttgttgttgttggattaatggtttttgtttatttgtgtcggttattttntaattngtctcgttagagtcttggtctggttgcactattgccacatcttcactttgtcagttttctttagttctggttgttctcacttgggggtttgtttgttgtatttgtgtatttgttagttttaggtttgaatgttttgttatttttctttttt

SEQ ID NO: 96166 - DNA, 528 bp, Zea mays
  unsure (1)..(528): unsure at all n locations
agagctgtgctggngcctttccgcatggactntcgaccggtccggaattcccgggtcgacccacgcgtccgcccacgcgtccgcttctcctccccctccggttcgggttcgggttcgtgaggttctccggggggcggtttcgtgggtgagcggatcgagatggcggcgtcggatgttgagtaccgctgcttcgtcggcggcctcgcctgggccacggacgaccactccctccacaacgccttcagcacctacggcgaggtcctcgagtccaagattatcctcgatcgggagacgcagaggtcccgcggcttcggcttcgtcaccttctccacggaggaggcgatgcggaacgccatcgaaggcatgaacggcaaggagctggacggccgcaacatcaccgtcaacgaggcccagtcccgcggcggccgtggaggcggcggcggcggctacggtggtggccgtggaggcggcggctacggcggtggcgggcgccgtgatggcggcggcggctaccgcggtggctgccgn

SEQ ID NO: 96167 - DNA, 522 bp, Zea mays
  unsure (1)..(522): unsure at all n locations
agacggtactgacatagcacttatgtatcgctcaccggtccggaattcccgggtcgacccacgcgtccgggctccaacaatccaccggcaccaacccagcgcggcgccaccggcgacccgtaccccctcccgcggagagcgatggcgacggagctgacggcggcgcagctgcgcgcgtacgacggcaccgacccgtccaagcccatctacgtctccgtccggggcaaggtctacgacgtcacctccggccgcggcttctacggccccggcggcgcctacgccgtcttcgcgggccgcgaggccagccgcgccctcggcaagatgtccaaggacgaggccgacgtctccggggacctctccgggctcaccgacaaggagctcggcgtcctcgccgactgggagatcaagttccaggccaagtaccccgtcgtcgcccgactcgccgncgacgcctgaactcgtcagtctcggtctaaatttactctgtcctgcctcttgcggtgttcagtgctgtgcttgctt

SEQ ID NO: 96168 - DNA, 528 bp, Zea mays
  unsure (1)..(528): unsure at all n locations
gattgactgcnnatcgatcgtactgaccgtaccggtcttgaattcccgggtcgacccacgcgtccgcccacgcgttcggccggctcgaaattcttcatcagctaccagcactggaccttctacccggggatgtgcatcgccaggataaatcttctcgcgcagtccgccctgttcgttctcacggagaagagggtgccgcagcggttgcttgagatcgcgggggtcgccacattctgggcttggtacccgttgctggtggcttccctgccgaattggttggagagggtcgcgtttgtgcttttcagcttcaccatctgcgggattcagcacgttcaattctgcctgaaccacttctcgtccgacgtgtatgtcgggccacccaagggcaatgactggtttgagaagcagacggcatgcacgctcgacatcctgtgctctccttggatggattggctccacggtggcctgcagttccagattgagcaccatctggttccccgactaccttggtgccaccttcgcaaggtt

SEQ ID NO: 96169 - DNA, 527 bp, Zea mays
  unsure (1)..(527): unsure at all n locations
gactgactgacnatcaatcgtaccgnccnanccggtcttgaattcccgggtcgacccacgcgtccgcttgttggtacggagggacggaggaggctaggttagccgaaagatggttataggtttaaggacacaaggtgaccctgctttttcagggtaagaaggggtagagaaaatgcctcgagccgaggtccgagtaccaagcgctgcagcgctgaagtatgagccccgtgcggacgcgtgggcagcaaggttcggcgaggtcacgcatgtgaggtgctgtccagcattgagcagaataatgcagaatacttgcgggatgagccattgacggctgcttcgctgatcaaaacacctccgtgaacacaaacatgaggcacagaagaaatgatgaaaaataaagggattgtaacagttttggtgcctttgactgtaactggcagagtttctggggacagagtggcatggattaattgcacctgatcactctgtatgtcgctgtcatgtgtgcaatgttcaatacgtacgtn

SEQ ID NO: 96170 - DNA, 528 bp, Zea mays
  unsure (1)..(528): unsure at all n locations
aagcttctgtggctacntangctgnngatcatgnactgacgtaccggtcctgaattcccgggtcgacccacgcgtccgcccacgcgtccggttgactgcttcaaacgtaccattaaggatgagggtttctctgccttgtggaggggtaacactgctaatgttattcgttacttccctactcaggctttgaactttgcatttaaggactacttcaagaggttgtttaacttcaagaaggatagggatggttattggaagtggtttgctggcaacctggcctctggtggtgctgctggtgcttcctctttgctttttgtgtactccttggactacgcgagaacaaggttggccaatgatgcgaaggctgccaagggaggaggtgaaaggcagttcaatgggcttgtggatgtctaccgcaagacactcaagtctgatggtattgctgggctttaccgtggatttaacatctnctgtgttggaatcattgtttatcgtggtctgtactttgggctctatgattccatcaat

SEQ ID NO: 96171 - DNA, 523 bp, Zea mays
  unsure (1)..(523): unsure at all n locations
gtcgggccgnatcctggacaaagaacactaccgcactgacgtaccggtccggaattcccgggtcgacccacgcgtccgcccacgcgtccgcccacgcgtccggacggtgacgccacggatcacggtgagcgacgggcgggtgacggtgcgcggccgtacggtgctcaccggcgtgccggacaacgtgtcggcggcgcacgcggccggggcggggctcgtcgacggggccttcgtcggcgcccacgccggcgaggccaagagccaccacgtcttcaccttcggcacgctccgggactgccggttcctgtgcctgttccggttcaagctgtggtggatgacgcagcggatgggcgtctccggccgcgacgtccctctggagacccagttcatgctcgtcgaggtccctgccagtgacggcgacggcgacggcgacgacgcccccgcgtacgtggtgatgcttccgctgctggaggggcagtttcgggcggcgctgcaggggaacgaccgcgacgagctgcagatn

SEQ ID NO: 96172 - DNA, 529 bp, Zea mays
  unsure (1)..(529): unsure at all n locations
agaggccttatgccaggtangcatgggagtctagtactgnccgtaccggtccggaattcccgggtcgacccacgcgtccggttgaaacgtgtttttgtcatcggtttctcaatcattgtttttggcaacaaagtgggcacagaaactggaattggcacgtccattgccatagctggtgttgctatgtactcttacattaaggctaagattgaagaggagaaaaggaaaaagagcgcatgactgctgtgaataatattatcgggaccttcctcggacacaacatcgtcgacaatcacgacctacttctataccttgttttgttttcatcttgagtcagtcggtccattgtttgatcccagtctggtgattaaaagtctgcaaattctgtttgtggaattggcagcgatacaaatttggcttctttaagtaaatccggttggcggtacacagcggtattaattcacctgtaactgaatggaataccgtaatgcaaaaggcacaacactctgcctgactaaaataaaatggg

SEQ ID NO: 96173 - DNA, 540 bp, Zea mays
  unsure (1)..(540): unsure at all n locations
agtccgcctgacttgctgcctcaccttcatcgatngtacttacnggtcctgaattcccgggtcgacccacgcgtccgatcggcccccaggtgctcaggaactcgacggtcggcgtgctgctgccccccaagcagaaggacgcgacgtcgccgctgcccggctggatcatcgagtcgctcaaggcggtgcggtttatcgacgcggcccacttctctgtccccgcggggcagtacgcggtggagctggtggccgggcgggagagcgccatcgcgcaggtcatccgcaccgtgcccaaccgcgcctacaacctgtcgttcgccgtcggcgacgcccggaacggctgccacggctctatgctggtggaggcgttcgcgggcaacgtcacgcagaaggtgccgttcgattccgccgggaaaggcgggttcaagacggcggcgttcaggttcgtggccggcggcgtccgcacccgnctcaccttttacagcttctactaccacaccaaggtcaccgacggcgtctcgctctgcgggcccgtgctgg

SEQ ID NO: 96174 - DNA, 540 bp, Zea mays
  unsure (1)..(540): unsure at all n locations
tgagtcccgtttgactngctgctagccgattacagtactgacgtaccggtccggaattcccgggtcgacccacgcgtccgcccacgcgtccgcaaatacagatttgttgtgcgatttaccaacaaggacatcacagcacaaatcatctctgctagtatagcaggtgatatggttcttgcttctgcttactcgcatgagttgccacgatatggtcttgaagttggtctgaccaactatgcagctgcctactgcactggccttctgttggctcgccgtgtgctcaagacccgtggtttagataaggaatatgagggcaatgttgaggccactggtgaggatttctctgttgagccagctgatgagaggaggcctttccgtgctctcttggatgttggccttattaggactacgactgggaaccgtgtctttggtgccctcaagggagctttggatggtggcctggatattcctcacagcgagaagaggtttgctggtttcaagaaggatgacaagcagctggatgctgatatccatcgcaag

SEQ ID NO: 96175 - DNA, 544 bp, Zea mays
  unsure (1)..(544): unsure at all n locations
ngaggtgnctcgnnttgactccatgaaagaacgatgattgcactgctctaccggtccggaattcccgggtcgacccacgcgtccgccgccctcttcattaggaccaacagcttgagttatagtcttcatagcctctgccttcatctgcatgactaacttcatgtcatcctcagaaagcccttcaagtggctgcaagtcagtcttgttgcacacaatgaccaaaggcttattcataaacagagactttatactgtggaagagtgcagcttgctgagcgatactgtacccacaagatccagaaatgtccagaaagaacaacactgcagccctcaagtgtgccagcgcagtgatgctacacatttctatgatgttcctatcttcaaaaggccggtcaagtatacctggtgtgtcaatcacttggtagcgcaggtacttgtaatctgtgtggccaacaaacagggattttgttgtaaaggcatatggctggacatccacatctgcccttgtaaccttgttcatgaacgaactcttccccacatttgga

SEQ ID NO: 96176 - DNA, 531 bp, Zea mays
  unsure (1)..(531): unsure at all n locations
agaggtcgtagcaactgagagcctgnnacccttcgcatagactgtaccggtccggaattcccgggtcgacccacgcgtccgcggacgcgtgggctgtcagatccatcccttccccgggctgttaagatctgccgtggcggacgccctgcaatccgcgcgcttttcgtcgggtgggtgcaacgaatcgaccatgcttcaggaagctttggctttaagacgaaggtatacgtgatatggaaatacaacccgaaggtaggatgaacgagcgccgaagctgtggctgaaggagctttggcttagtatgatgatgaaggtggaagatgaaaccgacctaaaagggaaaagactactcagcccttgatagctcaccttatgattagcagtaaatgtcagggatatgaatgtaagtttgtccgggttgcgtcccgtgcctataaatagatgaacagtaacaccgtactgttcacgcggcattgtaatcttgcgtcactctcgcattttcacgttctagcaagccgaaggtattaatgt

SEQ ID NO: 96177 - DNA, 528 bp, Zea mays
  unsure (1)..(528): unsure at all n locations
tggagtgccgattcactaggctataagaatangtaagtactgcacgtaccggtccggaattcccgggtcgacccacgcgtccgcccacgcgtccgggtattgtttggttgccagcaagcaaatggtcggtatatttctgaccatttgggtgcgcagcgaaataagaaatgatgtgagaaacctgaaagtttcttgcgtgggtagaggactaatgggttatcttggaaataagggttctatatccataagcatgtctttgcaccacacaaccttttgttttgtctgttgtcatctgacctctggtgaaaaggagggagatgaactacggaggaactctgacgttatggaaattctaagaaagactagatttccacaggtccgtggtgctgctgatgtcaagtcaccagaaacgattcttgagcatgaccgtatcatttggcttggggatttgaattatcggattgccctatcgtactgctcggcaaaagctcttgtcgaaatgcataactggaagcaactgttagagaa

SEQ ID NO: 96178 - DNA, 541 bp, Zea mays
  unsure (1)..(541): unsure at all n locations
agtagccgtatgagtgttcccagctaccgangcatcgactaccggtcctgaattcccgggtcgacccacgcgtccgcccacgcgtccgcccacgcgtccgcccacgcgtccgcgacgcacgcagagccgcagagatccgtgacactgcaagttttgaaaactgaactgtaagatggcatcagcagagctttcccgtgaggaaaatgtgtacatggcgaagctcgccgagcaggcagagaggtacgaggaaatggttgagttcatggagaaggtagcgaaaactgttgactcggaggagctcactgtggaggagcgcaacctcctgtctgttgcatacaagaacgtcattggagcccgccgtgcctcatggcgcatcatctcctccatcgagcagaaggaggagggtcgaggcaatgaggaccgtgtaacactcatcaaggactaccgtggcaagattgaaactgagctcaccaagatctgtgatggcatcctcaagcttctcgaatctcaccttgtgccgtctttcaccgctcccgagtcc

SEQ ID NO: 96179 - DNA, 540 bp, Zea mays
  unsure (1)..(540): unsure at all n locations
gtaggtccttattgtggctccagcnccatcaagtactgacttaccggtccggaattcccgggtcgacccacgcgtccgcaaggagacacctctacccatggaggatgccttaaatgactacaaaaggctagattacatcgagcgccacatcgctactcttaaggaatcaatagacttgggatcaaatgtgcaaggctacttcgcttggtctctgctggacaactttgaatggttcgccggcttcaccgaacgttatggcattgtctacgtcgaccgcaacaataactgcacgcgctacatgaaggagtctgccaagtggttgaaacagttcaacgccgcgaagaagcccagcaagaagattcttacgccagcttagaaatcgggggcctcatgatgtgggtgcagcccataaaaaactggtgtgtggtttcgaaccgaaaattttctgtttttttccgccacgagaggttctggaggcatactctccagcaccgtggctaataacgcattgttccaattcagtctggccttgtcatgcan

SEQ ID NO: 96180 - DNA, 538 bp, Zea mays
gagtccggttgatggcatccagctgactaccgactgacgtaccggtcttgaattcccgggtcgacccacgcgtccgcccacgcgtccgcccacgcgtccggtggtgcccttaaagcatgggagtgatctctggttttgctgtcgccgagctgggaaataggaagctgaatcgacctcgcaagcggggaatgtatccttttttgctgcaacataaaaaatgctacccaggcatagctgggtaccttttaacttctgtttgtgggatttgctagagtgatggtttcgatatatagggggacttgaatgtctggaaaaaaaaaaaaaaaaaaaaaaaaaaaaaaaaaaaaaaaagggcggccctagttctagatcgcgagcggccgctctagaggatccaagcttacgtacgcgtgcatgcgacgtcatagctcttctatagtgtcacctaaattcaattcactggccgtcgttttacaacgtcgtgactgggaaaaccctggcgttacccaacttaatcgccttgcagcacatccccctt

SEQ ID NO: 96181 - DNA, 528 bp, Zea mays
  unsure (1)..(528): unsure at all n locations
agggctgtccgatgcctcnactcacgacacngtacgcatgcacgtaccggtccggaattcccgggtcgacccacgcgtccgcccacgcgtccgcccacgcgtccgccaaggccaaggccaagcctgtcgctcctggcgccgcgtggcccaagccccgcgggcgccctcccaaggtcgccaagacctccgtcaaggcctcccccgccaaggcagccaagaaggcggctgctcctgccaagaagggaaaggcagcggcggctcctaagaaggtggcaaccccgaagaaggctgctgctgctgccgctccggtcaggaagggcgtggccaggaaggccaagaagtagtctgcccgccttgtcgctggcgagatccccccctcaattccgcctatagattcccctctttcatggattttgatccaatcgtaatattgtcagtagctctagattcgtcggtagctccagcatgagtgtcggtggtagttctgtgcctgtaaaaacttgggatggttgatcgcgtgtgatcagc

SEQ ID NO: 96182 - DNA, 526 bp, Zea mays
  unsure (1)..(526): unsure at all n locations
agggaggtccgatgccatcncatttgaagatgatagcactgnctctaccggtccggaattcccgggtcgacccacgcgtccggcaagcaggagaattgtaaatgtaatcattgaaactatactataacagtcatatgagaatctgtcagtcattatccatatgtgttttaatgcatatatgtataagaatataactaagttcatgattacttgtggcatcggtctttccgccatttttcctttatgtagccatccattttgccttcttgctccttggtttttcttgttgcattctggtttgaatacgtttaatatttttgtccacttctataatatagctttcaaacagcgctgaaggtggttctctactcaaagatattcctgctaccaaggatggaagggttgattggtcacaggatttcttctgcaaaccagcatttctgacagtgtctggacagcttaatggtgaaacatatgcttcagctctatctgatatttacacatttggtccaacgtttagggctga

SEQ ID NO: 96183 - DNA, 538 bp, Zea mays
  unsure (1)..(538): unsure at all n locations
gagtccgtatggatcgctgctagcctcattacagtactgnacgtactcggtccggaattcccgggtcgacccacgcgtccgcccgaccttctggctgtcccgcttcttcgccgacatgtggatgctcttccccaaggaggaagagtacatcgagtggttcaagaaggctgggtttagggatgtcaagctgaagaggattggaccgaagtggtaccgcggtgtccgaaggcatggcctcatcatgggctgctccgtcacaggcgtcaagagagagcgcggtgactctcccttggagcttggtcccaaggcggaggatgtcagcaagccagtgaatccgatcaccttcctcttccgcttcctcgtaggaacgatatgtgctgcctactatgttctggtgcctatttacatgtggataaaggaccagatcgtgccaaaaggcatgccaatctgagtgaagggaatgagctgcatggaagagaggatagccaacgtctgaattttactcttctctatattagacgcttcctgcctgttttgt

SEQ ID NO: 96184 - DNA, 532 bp, Zea mays
agagcaggtcctatgatagaatcatggggggaagtataggactgcctctaccggtccggaattcccgggtcgacccacgcgtccgcccacgcgtccgcccacgcgtccgcaaggcaccacacctcttcctcctcttcctggtcctacgacagctagcgcctgctccccttcgtctgtgatcatgtcttgcagcagcggcaagtgcaactgcggctccagctgctcctgcggcagctcatgcaactgcatgtcccctgacgtggagaccgccgccgccagcagcatcaagaccatggtcctcgctgcgccgaccaccaaggccagcgccggcggcttcgaggcggccaccgagggcggcggctgcgactgcaacacctgcaactgcggcaccagctgcggctgctcctgctgcagctgcaactgagccggcccgcccggcccggcgatggcgcacgagagtcgagaggacgacgacgacgaggcgtataaatataattaatagcagcgtctaaataagatcctgtcaactgca

SEQ ID NO: 96185 - DNA, 544 bp, Zea mays
  unsure (1)..(544): unsure at all n locations
tgttgtgggcctaatgtgcngcctacgccncattganggaacgtcccggtccggaattcccgggtcgacccacgcgtccgccgctgcttcgtcggcggcctcgcctgggccacggacgaccactccctccacaacgccttcggcgcctacggcgaggtcctcgagtccaagattatcctcgatcgggagacgcagaggtcccgcggcttcggcttcgtcaccttctccacggaggaggcgatgcggaacgccatcgagggcatgaacggcaaggagctggacggccgcaacatcaccgtcaacgaggcccagtcccgcggcggccgtggaggcggcggcggcggctacggtggtggccgtggaggcggcggctacggcggtggcgggcgccgtgatggcggcggcggctacggcggtggcggcggcggctacggtggcggcggtggctacggtggtggtggtggcggctacggcggtggcaaccgtggcggcggctacggcaactccgacgggaactggaggaactgagcggtggggcccgcgc

SEQ ID NO: 96186 - DNA, 545 bp, Zea mays
  unsure (1)..(545): unsure at all n locations
gtaatgccgatgacagttttcctganattcatgnatcgacgtacttgtcctgaattcccgggtcgacccacgcgtccgcacatcctgttcgtgactcgtgatttcgccttcggaaagccgagggagagggagcgagatggggtgcgtcggcgacacgatggagtcaatccgctccatgcagatccgccaattgctcacgcagatcatcagcctcggtatgattgttacctctgcattaatcatatggaaggggttgatagttttcacaggttgcgagtcaccagttttttgtggctctctctggtatcatgtaacctggatattataggtgtgtaatcctgttgttgtatattatccttattccttttttcactttgatttattttatctttttatgatttgatattctttaaattcttattttttattttttttttatttgttctttttctttttttcacttttttatttttacttctcttatttttttttctttttatttttatttatttttttcttattttttttattttttattttatctt

SEQ ID NO: 96187 - DNA, 539 bp, Zea mays
  unsure (1)..(539): unsure at all n locations
cgagtgccgcttnactagatcctactctanctccgtactgacttaccggtcctgaattcccgggtcgacccacgcgtccggcagaatgcgttagccatgtaccaattgcagttggagcagaacctgctcattttgacctcttgttggcaaggagcgcaatatctcaaggcacttatttgtcaaatgattggctagtgcttaaactacaggaactggtctcactttcataccagattagtactgggcaatttgaaggaatgcaaccaataggtgtgaagcttttgtgtttgataatggacaagttcggcaaggcagtagatccggaatttcctggccatatcttgctggaacaatttcaggcccaacttgtttctgctgttagaatggctataagcactgcttctggtccacttcttttggaggctggacttgaactcgcttcaagggttattaccagccacattattggtggggatagactagcttttagtcgcttggtttctctgataacacgcccgttaagtgacatagagggcctn

SEQ ID NO: 96188 - DNA, 546 bp, Zea mays
  unsure (1)..(546): unsure at all n locations
cgaaggtgtccgtattgaatngcctacgttncactgacgcgacgttctggtcctgaattcccgggtcgacccacgcgtccgcccacgcgtccggttctagatcgcgagcgccgccctttttttttttttttaagaatatgaaggggcattttttttcaggcataaatataaatccgttctcttgccatggtatttagcacgcacaagcaacgcttgaataagtcttgcaaattcaacacaggttctacgaaagtggctttggctaatgaacgactgcaatgtcgagaaacgacactaagttctttcagcgctttccaccaccgtcgcccaacttggggcccttggaacccttctggaccgcaccctttgtctgcgtcttctgggacttgctcacctncgccttcttcgctttcttctcatccttggtcttcttgatgcgctccttgatctcacgaaaagcagcttctctagcagcaatgcggacctttggcttctcagctctcttcttctggattactttcaaggaagcacccacaatttgacctg

SEQ ID NO: 96189 - DNA, 553 bp, Zea mays
  unsure (1)..(553): unsure at all n locations
gatggnccgtnctgacgataaaggcccctnngaccgnactgtcgtatccggaattaccggatcgaccgacgcgttcgcggacgcgtgggcgtgtgctcgcattaccttccattccatcccgcctccaaacccgaactccagttcgccccgcatcgagggcgcccaaagccgagaagaagcccgcggcgaagaagccggcggaggaggagcccgctgccgagaaggcgcctgccgggaagaagcccaaggcggacaaccctgtcccagcaagcttgtcctatctgcaaggatgtcttctagggaacgaggatccgtaacataggcttgaagtgcttagatcctttctatacctactatataaatgtgccttaatattgtacaattattctgggggggtgtacctaatgaccatttccactattttattcactatctataatttcatccataagctaatcctattatactcctaatctcattatcttatatctcttaatctttccctctcacttatatgatgtataagtctaaatctaccattataacctttttg

SEQ ID NO: 96190 - DNA, 544 bp, Zea mays
  unsure (1)..(544): unsure at all n locations
gagccgtctgactagcggcctcagctctaagctaagnactgactgtaccggtccggaattcccgggtcgacccacgcgtccgcggacgcgtgggcagcaatagagaagggttttaaggaagcttgcaattcaggctcgttgagggggtcatcctgttgaaaatttaagaattgtattgactgatggggcttcacatcaggtggattccagtgaacttgcttttaagctagctgctatctatgcttttcgacagtgctacacttctgccaaacctgtaatattagaacctgtgatgaaggtggaactcaaatttccaactgagtttcagggcacagtaactggtgatatgaacaagagaaaagggatcattgttggaaatgagcaggaaggtgacgacaccattgtagtttgccatgttccgctaaacaatatgtttggatatgcaacagctattcgatcagcgactcangggaaaggtgaatttacgatggagtacctggagcataatgttgtatcgcaggatgtgcagatgcaactagtgacn

SEQ ID NO: 96191 - DNA, 539 bp, Zea mays
  unsure (1)..(539): unsure at all n locations
ggatgccggattgatngccgtcagctccatcatagtactgacgtaccggtccggaattcccgggtcgacccacgcgtccgctagttgctggtggtggtggcatcaagtctgtgaaagtgacctatgcatctgcacgggcccgggatgatcttgacacgagacttctccgtgcaatgatcaccaagggattgattgagccaatctccagcgtttttgtcaatcttgttaatgctgacttcaccgcaaagcagaggggagttcgcatcactgaggagaggatcatcttggacggctcacctgagacgcctatcgactacattcaagttcagattgccaatgtcaagtccaaatttcctagtgcgatatctgagactggagagatcacagtggaggggagagtgaaggatggcgttcctcatctaacaaaggttggagcattccaagtggatgtgagcttggaaggaagcctgatcctttgcaggcaagttgatcagccaggtatgattgggtcggtaggaagtggcttgggtgaagaagag

SEQ ID NO: 96192 - DNA, 531 bp, Zea mays
  unsure (1)..(531): unsure at all n locations
agatacggtnntnnngactgagtctttgtatacctacgnactgcctctaccggtccggaattcccgggtcgacccacgcgtccggtgccattgagcttctgtcaggcaaggagggtatcatctcccagatggttgagaccacccctcagaaggtttacagcctgacgttcacactgggcacagcgggggactcgtgccaaccaccaatggccgtcatggcattcgcgggggatcaggcccagaacttccactactccccaatgggcaatgccaccagccaggctgcgaatgtgacgttcactgcacgcgctgagagaacacgtgtggcgttctatagcgtgtactacaacacgaggagtgacgaccacagctcgctgtgtggcccggtgattgacgatgtccgggtatgggcattgaacgccgcggctgggttgaaggcaagtattggactggttcttggcattgttggtgtcgttggcatggtgctgttctgaaatctgaatctctcggtgccagtggtcttgggaagta

SEQ ID NO: 96193 - DNA, 545 bp, Zea mays
  unsure (1)..(545): unsure at all n locations
tgagatgccgnatgactagttgccagtcgcaccatcgnactgcacgtaccggtcctgaattcccgggtcgacccacgcgtccgcggacgcgtgggcggacgcgtgggcggacgcgtgggtgggaagctcagtggtattcagctctgctatgctggtggatttggttaccatgcctatgggaaagctgggtggtcaagaagagcgagggtactgtctgtgcaacttgagaaaacagacagcggtgaatggcgaggagtcaagtccatcaagacatggaagaggcttgatgataaacatctgagcacaattgactctgaggttctctggaacagaggctctaatgggaggcgcgggaaaaatcctgatggtagttaacttttgatgcagacaggaatggtgcttcctaagggatcttttcattgggggggattggtggattgccagtttactatagaatcagaaatatgcccaagtgtgtacatgggggagaaagtcaaatacagacacatacacgcaggtttctgctggtgcattttttcatgttt

SEQ ID NO: 96194 - DNA, 542 bp, Zea mays
  unsure (1)..(542): unsure at all n locations
gtggttcctacttatgtccagcttagcaccnatcgtacgtaccggtcttgaattcccgggtcgacccacgcgtccgggtgaggctgtcaagtacaagagctcattggacgcattccagcagatccttaagaaggaaggccgcaagtccctgttcaagggtgctggtgctaacattcttcgtgccattgctggcgctggtgtgctttctggctacgaccagcttcagatcctctttttcggaaagaagtactgctcctgcggtgcttaaatggagaaaaatgatgacgaacaagagcagttcgcttccggttcaacccagtcaggatcttggtaaagtttttgcctttcatatcgaagaaattaataatttatgtaggagaattttttcaacattcgtttttggcggagacattgatcttaaaaaaactcgtaactgtcctactaggtggtggcattggttcccaaaacatggtcatagggtgtgtctaatctgcccttctgtgcaaccgggcaatttttcttacatatattgcctttaatca

SEQ ID NO: 96195 - DNA, 540 bp, Zea mays
  unsure (1)..(540): unsure at all n locations
agtcgtccggtttgacttcccaagtttcantctatgtacgtactggtccggaattcccgggtcgacccacgcgtccggcaacgggtcgcgaatctagagtcgtaactgctcttacactgctgaagtcacatctctttaggtgtcaaggccatgtcagtgctgcccttgttcttggtggagtggattgtactggaccacatcttcacactgtttatccacacggctccactgatactcttccttttgccacgatgggttctggatcccttgctgcaatgtcagtgtttgaatcgaagtataaagaatgcctcactagggaagagggaatacaactggtgtcagaagcaatatgtgcaggtatcttcaatgacttgggtagtggaagcaatgtggatgtctgcgtgataaccaatgggaagacagaatacttgagaaaacaccagttgctcaattccatactttatttagttcaaatggtttttgcttctaccatgggccgacttatgttcttttttcattgtttcatcttttatgcagtat

SEQ ID NO: 96196 - DNA, 544 bp, Zea mays
  unsure (1)..(544): unsure at all n locations
tggagctccgttatgggtctccgcctaccgtcgtantgcactgacgtaccggtccggaattcccgggtcgacccacgcgtccgcccacgcgtccgcggacgcgtgggccagcatctccgctccggctgcgctctgccttgcggtgctgctacctgctctagcgcgagcgagagaggtacggcggccgatctggcggcgcaggcggagggctcggccggggccggcaagtcggcgccgaacatggggaggggccgggtcgagctcaagcggatcgagaacaagatcaaccgccaggtcaccttcgccaagcgccgcaacggcctgctcaagaaggggttccagctctcggtgctctgcgacgccgaagtcgcgctcatcatcttctccaaccgcggcaagctctacgagttctccagcacgcagagcatgccaaaaacacttgaaaagtaccaaaaatgcagttttgcagggcctgaaacagcactccagaatagagagaatgagcaactgaaaagtagccgcaatgagtacctcaaactgaagg

SEQ ID NO: 96197 - DNA, 550 bp, Zea mays
  unsure (1)..(550): unsure at all n locations
agaagtcgcgtctgacttgtcttccggctagncactcgatagtactgnccgtaccggtccggaattcccgggtcgacccacgcgtccgcccacgcgtccgcgactactactacatctatcactccagcagcatcccaagcacctaggctgccatcagaaattgttggcaaaaatgttgaggagattattagggactggaacaatgagcttcaagaccgtactgcaaaattcaggaaacatgccaccgcgatagctgaatgggataagagaattctgcaaaacagaaatgttcttattaggcttgaggctgaggtggctaaagttgttgaaacacaaacaggcttggagcgtcaacttgaattgatagaaactcatcagcgagaggtagacaaggctctacagagtatggaagaggaagctgaacgcgtattccaggatgaacgagtgttacttcatgaagatggagctgcttcagcaagagatactatgtatgaacaagcagaagttgtcgagcattaactgcaacatatgacagaacaagtaaaattca

SEQ ID NO: 96198 - DNA, 547 bp, Zea mays
  unsure (1)..(547): unsure at all n locations
tggtctggcttgatgactctccggctagcngtctgtaatgtactgctcgtaccggtccggaattcccgggtcgacccacgcgtccgatcgaactggataaatgtcagaaaagggacctgctgcatatgctgtgagactccgattgacgcccttctgtacagatgtgggcacatgtgcacttgctcgaaatgcgcaaacgaattggttcgaggtggagggaaatgcccgttgtgccgcgcacccataatcgaggtcatccgagcatacttcatcatgtagatacaaaaggaagacagcaagaagatagaagaggcccaaattgtttttggtctgtgtggagtcgttagcgggttgtgtattcaattatgttcattctctctaatgcgtttggttaaggttttttccggcttcattacgttttggtctgcttgccctattgtaagtaatgtacggttttgggtgttgctgtttgaccggaagggtggttttttcttaataggtacttgttaacttgttaattttgttccaaaactccttaatggggttg

SEQ ID NO: 96199 - DNA, 538 bp, Zea mays
  unsure (1)..(538): unsure at all n locations
naggtcggtnntnanngcctggggnccctagcngccctccgtactgcacgtaccggtccggaattcccgggtcgacccacgcgtccgcggacgcgtgggctgacgcgtgggtccagttctacaagtccatgacggatgctggggacagggaagtgaagagcaaggttactgtcaagggtcacctgcacacctacaggttctgtgacaacgtgtggaccttcatcttgacagacgcaagcttcaagaacgaggaggccacggagcaggtgggcaaggtgaagattgtggcatgtgattccaaattgctcggacaataggcctgtgtaccctcgaggtcaaggaaggaagcttttaagtgcggcggtgcggtgtctgtctgcgcgtcagctgtacacgcctaggctacctgccgaggcggtgtctgtctgcttcagctgtacacgcctaggctaccggccgaaacggatttcatttgccttcttcgtactggatgtgtatcttcatttatttttcccttggatacaatctgcttgagctt

SEQ ID NO: 96200 - DNA, 524 bp, Zea mays
  unsure (1)..(524): unsure at all n locations
taccgtgggacgatcgntctgaacgtaccggtccggaattcccgggtcgacccacgcgtccggagcgcttggtgcaggtgctccgacgaggtgaatccgcggaagcagccgtacaagttctccgaccggaagctccgggacctggggctgcagttccggccggtcagccagtcgctttacgacacggtgaagaacctccaggagaagggacacctgccggtgctcggagagcggacgacgacggaggccgccgacaaggatgcccccgcggccgagatgcagcagggagggatcgccatccgtgcctgagagggcgatgccacacatgaacacaaagcagtgttcatactgctgccctgcacctgcacctgcttcttcccctgctgtgtaaacaggcctgtgtttgttctggctgatagtgatgtacccttagaactggaccggtatggtccgtcctgggaaccatagcgaggtgattaaactgggtaatgttggatgttcaaaaaaaaaaaaaaagggcggcc

SEQ ID NO: 96201 - DNA, 545 bp, Zea mays
  unsure (1)..(545): unsure at all n locations
agtccggtttggctagtatccatttgtcttacgnattgcacgtaccggtccggaattcccgggtcgacccacgcgtccggacaagcagtggctggacaagaatgcatcttacatggacttcaatgaggtgctgaagtcgacgacgagcccagctggagagggagcttatgctggacgatgtcatccgcatcgaagacatgccgtcatacagcctgctttgctagtaaccaaaataccaaattcgccggagaacagaactgagttgatggttcaactgtatagtacctccctttgtctgatttctgggaggatttttttttagcaacaaagtagagtgtcgacgtactggtatcatgcttaatttgggctaatgatggtgatatgcacaaaataaaaatatatattattaaattatttttttttattattattattatatatatttataaaaaaaaagggcggccgctctaaaggatccaagcttagttacgcgtgcatgcgaacgtatagtttctttatagtgtcacctaaattcatttcactgg

SEQ ID NO: 96202 - DNA, 548 bp, Zea mays
  unsure (1)..(548): unsure at all n locations
ggaggctctcctgtctggcctccgttacgnnatcgatcgacgtaccggtccggaattcccgggtcgacccacgcgtccgcccacgcgtccgccgccttcttcttcttcttcttcttctcctctgcccctgcttgtcgtttgctcgtgctcccccaccccctttctgattcagcaagggttccttccgcggcgcggcgcgtcgccatgggcaactgctggggcgccaagatcagctccgacagcccgtcccgcggcgcctcatccccgtcagggacggcgtccaagttggcgagcaggaacggggcggcggcagccctgagcgggtgcagcagccacgcgtcgtccgcgtccatgctgccgacgccccgcagcgaggacgagatcctggagtcggccaacgtcagggccttcagcttcaacgagctgaagaccgtcaccaggaacttcaggccggacagcgtgctgggcgaaggcgggttcggatccgtcttcaaaggctgggtcgacgagaagacgctcgccctcgctaggcccggcacggtgattgt

SEQ ID NO: 96203 - DNA, 521 bp, Zea mays
tgaggtccttatgcctttagccagttcactacgcatgactgtccggctgaattaccgggtcgacccacgcgtccgctcaaaaggcaaacattgatgcagcggtgaataagttttcagataacttcacaaggatgttgttccattatgatggtcggacaactgagtgggatgaatttgagtggtcaaaaagggccgtccatgtgagtgtcacaaagcaaaccaaatggtggtatgccaaacgatttctacatcctgacattgttgcccgctacgactacatatttatctgggatgaagatcttggtgtcgaacattttaatgcagaggcgtacattaagcttgttaggaagcatgggcttgagatctctcagcctggtttggagcccgataaaggtttgacatggcaaatgactaaacgaagaggtgatcaggaagtccacaaagtaactgatgagagacctggctggtgtagcgacccttacctgccaccatgtgcagcgtttgttgaaattatggcaact

SEQ ID NO: 96204 - DNA, 530 bp, Zea mays
  unsure (1)..(530): unsure at all n locations
aggagatccgtgtgccttttccnttaaaatcccctgatgtcgtaccggtcttgaattcccgggtcgacccacgcgtccgcccacgcgtccgcccacgcgtccgcccacgcgtccgcccacgcgtccgcccacgggtccgggaaaatggtgaggatggtttaatttatgtaggaaacatggtaaatccggctaccctggaacaaatattcggtgtctcttctttggctgcattaccagcccagttggcgttggagcaatttgacaacgaactctcgaggaaggttaacgaagttgtaaatgaaataagacgccagaggtgctcatacttgaggttaagacaatgcagaaggggtgaaccatctggtgattttttccggtcatttttagtggaagacaaggcccctggcgtcttcttctacgtcgaagttctttggcatgttcacaggccaatcccaaggcagatgaccttgaggcccaagatcctggtggtacatttaggtcaggatatggattggatgtaccccgggagg

SEQ ID NO: 96205 - DNA, 538 bp, Zea mays
  unsure (1)..(538): unsure at all n locations
gtgcgttgactgtggccagttacgcangtactgacttaccggtcttgaattcccgggtcgacccacgcgtccgcagctcctcagttgaaaagagctatgagctactctgatggccaagtaatcaccatcggtgcagagagattcaggtgccccgaggtcctcttccagccatccatgattggtatggaggctgctggaatccatgagacaacatacaattcaatcatgaagtgtgatgtggatatcaggaaggacctctacggcaacattgtgctcagtggaggttcgactatgttccccggtatcgctgatcgtatgagcaaggagatcacttcccttgcaccaagcagcatgaagatcaaggtcgtcgcaccacctgagaggaagtacagtgtctggataggagggtcgatcctagcctcgctcagcactttccaacagatgtggatattccaagaggagtatgatgagtctggcccggcatcgtccacagaaagtgcttctaggttccgcaggttcttattgtatctaatctcag

SEQ ID NO: 96206 - DNA, 538 bp, Zea mays
  unsure (1)..(538): unsure at all n locations
gggtccgtatctctggtttagcctcactcacgtancgacgtaccggtcttgaattcccgggtcgacccacgcgtccggccagagacaacttgaagttcttgcatgttttgttcgccaggttccctcagtacaagggcggggacctgtatatcacaggagagagctacgctggccactacgttccacagttagcccagcgcatggttgagttcaacaagaaggagaagctattcaacctgaaaggcattgctcttggcaaccctgtgctggagttctccaccgacttcaactcgcgggccgagttcttctggtcgcacggcctgatatcggactccacctacaacatcttcacgacggtgtgcaactactcgcggtacgtgagcgagtactaccgcggctccctgagcacggcctgcgacagggtgatgagccaggtggcgagggagacgagcaggttcgtcgacaagtacgacgtcaccctggacgtctgcatcttcgtcggtgctcatgcagtcccaggtcctcgtccttcagcaag

SEQ ID NO: 96207 - DNA, 500 bp, Zea mays
  unsure (1)..(500): unsure at all n locations
cgagtgtccggtgctgaattcagctctcaagctggctagcatctcgttttcgtgtcgctcacgcgtgcgcgccggtcccattccccccgcccacttgtcggactcaagagctcccctcctccgcgccgcgggcacgcgcgccgtcgtcgccagcccgggttcatttctccgttccttggtgcggtggtagccgagcgctccggccatggcgttctatcggggcctcaccgcagtctcgagactgcgatcacgcatggcgcangaggccaccacgctggggggtgtgaggtggctgcagatgcagagcgcgttcgatctcgatcttaagtcccagttgcaggaattgattccggaacaacaggatcgcttaaagaagctcaagtcagagcatggaaagacccagcttggaaacataactgtggatatggtccttggtggaatgagagggatgactggaatgctttgggaaacattcctacttggatccagaggaggttttc

SEQ ID NO: 96208 - DNA, 510 bp, Zea mays
  unsure (1)..(510): unsure at all n locations
agaagttggactcaggtagtgaagactgaantcangnatgtcatagcagttcttattcccggtcgacnacgcgtgcgtgaaattcgtttgtaggtggtggcgctgctccagttgctgctgccgccccagctggaggggctgcaagtgctgctgcccgtgctgcagaggagaagaaggaagagcccaaggaggagtctgatgacgacatgggcttcagcctgttcgactgaggaggccctcgctacccagccattagcaaattcccttatgctgtccaagacttatcttacgctatgtctgtagccttttgttattacaagtactcaagttttgagtttttgagatgtggctatgacaatgtgatgaagaaccctaaaccatcgtattagagtgaaacttgtttctatatagagttccaagtttcttgaacctcaaaaaaaaacaaaaaaaagggcggccgctctagaagatccaagcttacgtacgcgtgcatgcgacgtcatagctctt

SEQ ID NO: 96209 - DNA, 539 bp, Zea mays
  unsure (1)..(539): unsure at all n locations
gtgcgcgtgacgtgttgccatcgctattatcgtacgaacgtaccggtcctgaattcccgggtcgacccacgcgtccgcggacgcgtgggcaaggaccatggtggtgtgctcgacgggacggcccttgtgctgtgggagtggtgcgagggagacaaccagcgctggaagattgttccctggtgaacaaggaaatgtgtgaccgagcccgcaccaaggaggagctcctgccgtaataagtgaagtgattggtactgaagtttctggaaataagaggctcttccgagatgcctgtttgtgtgagtatttgcgtttccattccgttttcatgataataaaacgcattgattattaatatatgtaatgtgatgctacactgagtggcagcgttggtatatatttgtaagaagtaagaacccattgttgttggactaagcgtgacgagtgatgtactgatgtatngaaccttgcttgatgcanaanananaaatntnantttaaaaaaataaagggcnggtcgctctagaggatccaagcttact

SEQ ID NO: 96210 - DNA, 542 bp, Zea mays
  unsure (1)..(542): unsure at all n locations
cggctgcgtntgtgtcgccatcgacagtangatagcatcgacgtaccggtccggaattcccgggtcgacccacgcgtccgctcatcctgctcacctactttgcggtcgtctccggactcgtgtacgacgtcatcgttgagcgccctggcatcggcagcgcccaggaccccggcactggcgccgtccgccccgtcgtcttccttccagggcgcgtcaacggccagtacatcatcgagggactctcctccgggttcatgttcctccttggcggcattggcatcatcctcctcgacctcgccgtcgaccgcacgaggccccggagcctccgcgtctcgtttggaagcgccggcgcagtcgccgttgtcatcgcctacgccatggccatgctcttcctccgcatcaagatccccggctacctctggtgaggttgataaatcttgcctgttaactagaccagatccgtcgcgagatctcgctgcatctaaatagacctgcgtgctgtgcagtgtggactgtgctctntcattntgtcaattaatgtt

SEQ ID NO: 96211 - DNA, 540 bp, Zea mays
  unsure (1)..(540): unsure at all n locations
ggaggtccnttatnactggatgagtggaagtaagcattgctctaccggtccggaattcccgggtcgacccacgcgtccggtgtttcagacacctaatgcagaactacgtgaagcaatttgttggatccgagtacatgtatgctgcagctagagcatataggagggaggtgttcgaccattacttttccgatgtccaagaaattcccaaggtgtctagttggttacatgagcatcatgatagtttgtggtatcgtagtgggtttaatccagccatcaagtgtgactatgttaccaacaacatagcagaagtgttcaacaattggattaaggattggaaagatctgcctgtttgtgacttggctgacaagataaggaaggaaatcatggagttgtttcaaaagaggaaggagataggacagaggttgcaaggtcgaatactaccctncgtggtccatatcctncatgtaaggactagaggtttaggtcacttaacagttaagaaagctgacaattacattgcaaaggtgagggataataatn

SEQ ID NO: 96212 - DNA, 514 bp, Zea mays
  unsure (1)..(514): unsure at all n locations
gaagtgtctaggtgggtgaatctagcctctctacgcatccctagcaatcccgaattcccgggtcgacccacgcgtccgggagcgtagtggatgatgaagctgggaaatcaaatggtggtctcaagagtgatccaatgtgcaatgcgtgtgagatggctgtggtatggatgcagaaccaacttgcccagaacaagacacaggagctcatcctgaactacattaatcagctttgcgagcgtcttccgagtccaatgggagaatcagccgtggactgtggcagtcttgcgtccatgcctgacattgcgttcaccattggaggcaataagttcaagctgaaaccagagcagtacattctgaaggttggtgaangacaggctgcccagtgcatcagcggattcacagctatggatatcccaccaccccgtggccctctctggatcttgggtgatgttttcatgggagtctaccacaccgtcttcgactatggcaagctganggttggcttcgcagaatc

SEQ ID NO: 96213 - DNA, 517 bp, Zea mays
  unsure (1)..(517): unsure at all n locations
tggatgtgtctcgtgttggtgagtctagcctctcaacgtcactcctttagccattcgtattcccgggtcgacccacgcgtgcgcccacgcgtccgcggacgcgtgggacctggtgccctaccctaggatccacttcatgctggcgtcctacgctccagtcatttctgctgagaaggcctaccacgagcagctgtccgtggccgaaatcaccaacagcgccttcgagccatcctccatgatggccaagtgcgacccccgccatggcaagtacatggcatgctgcctcatgtaccgtggtgatgtggttcccaaggacgtgaacgctgctgtggccacaatcaagaccaagcgcaccatccagttcgtggactggtgcccgactggcttcaagtgcggaatcaactaccagccttccagcgtcgtccccggcggtgacctggccaaggtgcagcgtgccgtgtgcatgatctncaactccaccagtgttgtggaggtcttctcccgcattgaccacaag

SEQ ID NO: 96214 - DNA, 510 bp, Zea mays
  unsure (1)..(510): unsure at all n locations
tgagtgtccagtgatccatcatgctctcacgcatgacanaggatctcgaattccctggtcgacccacgcgtccggttcccactgtcagtaacacaaacagaggtatactaaaaacctctgaaaagtcgagttgtgattctgctgagccccgaaggactacttctgattctgctgaacctagacgatctaacaggcgaattcaaccaacttcaaggttactagagggcttgcaaagttccctcgtaatctcgaaagttcctggcgagaaggttcctaggagcaattacaaaagtgcatcctcaagagggagaactcaagctcatgggtgagtgaaggcaccacatagctcatagctgcttttggtgggacagctctcgtgtacatagctgtagccgtccagtatggaaggaggatagggttggagtaggaagtctttattggagcgcatggattcagatgtattataaactaacttaagtgcattgtgttaaccttttcttttacttgctg

SEQ ID NO: 96215 - DNA, 540 bp, Zea mays
  unsure (1)..(540): unsure at all n locations
tgtgtccagtaattgtctcgnnccagcctgancacagtatcgacgcgcnnttgaataaccgggtcgacccacgcgtccgtggcaacatggagatggcacaacaacaaggtggatttattggccatcgcccaagacttgcatgggtcaataaggcatcaaaacaactggaccgtgaaaaaagacctgtgcctagcgggccagaccccatacatcacagcatcccatcacatgctcctcagcatccaccatcatatggcaaagctccttatgaagatgacaagagcatagcatctcctggtctgtccaacccgataggtcctccaccatttttagatagatactagttcatgcaaaagtagtgagtatttatgcacctatgccaatgaataacctctaattacctacatgtattgggctggtgtttggtaacatgaagcaataactttctcttatcgaaaaaaaaaatttaagataaaaaaaaagggccgcccgtttaaaggatccaagctacgtacgcctgcatgcgaagtcataactttt

SEQ ID NO: 96216 - DNA, 538 bp, Zea mays
gtaaggcccgtatgtgtggccttgatccgcctaacgatcttctcggtccggtattcccgggtcgacccacgcgtccgaacattttcaagttagctcaaggagaatacatagctccagagaagattgagaatgtctatgctaggtgcaagttcattgctcaatgctttatatatggtgatagtttcaactcttccctagttgccattgtagcagtcgaaccggaggtgttgaaggcttgggctgcatcagaaggaatccagtacgaggacttgagacagctctgtgctgatcctagagcaacagctgctgtcctggctgatatggattccattgcgaaggaagcacagctgagaggtttcgagtttgctaaagcggttactcttgttgctgagccattcacattggataatggccttctcaccccaacattcaaggtcaaaaaggcgcaagccaaagcatactttgcaaagaaatctcaaacatgtattcacggttgctagagacagagttagctatgtccaagttgtaacttgtgcgt

SEQ ID NO: 96217 - DNA, 538 bp, Zea mays
  unsure (1)..(538): unsure at all n locations
tgtgccgtnattagtcgncctagcctcagctacgnattcaccgtaccggtcctgaattcccgggtcgacccacgcgtccgggtcggcttaaattcctggagagatttgcttatatcaacacaacaatttatccactcacatgaatcccgctcctcctgtactgcatattgccagcagtttgtcttctcactgggaagttcatcatcccaaagattagtaacctagagagtgtttggtttatatcgctctttatctcaatctttgccactggtatccttgagatgaggtggagtggtgttggcattgatgaatggtggaggaacgagcagttctgggtcattggtggtatttctgcgcatttatttgccgtcttccagggtctcctgaaggtgcttgctggtatcgacacgagcttcactgtcacctctaaggccactgacgaagaatgtgattttgccgagctctacatgttcaagtggacaacgcttctgatcccaacaaccactattttgatcattaactggtcggcttggtcgtt

SEQ ID NO: 96218 - DNA, 541 bp, Zea mays
  unsure (1)..(541): unsure at all n locations
tggtcccgtttgacttgactgacgaagtntgatgcattgaccgtaccggtctggaattcccgggtcgacccacgcgtccggctatctcaatcactgctaccagcaattgtagaacttgcagaggataggcactggagagtgcggcttgcaataattgagtacatcccattgttggcgagtcaattaggtgttgggtttttcgatgacaagctgggggcgctctgcatgcaatggttggaagacaaggtcttttcaatcagagatgctgccgctaacaacttgaagcgccttgcagaagagtttggtccagagtgggcaatgcagcatataatccctcaggtgctggagaagatcaacaacccacactatttataccgcatgacgattctgcaggcaatctccttgctagctcctgtcatgggtgcagagatcacctgtcaaaagctgcttccagtcgtcattaattcttcgaaggacagggttcccaacatcaagttcaatgttgcgaaagtactacagtcacttgtaccgatcctcgacn

SEQ ID NO: 96219 - DNA, 506 bp, Zea mays
ggatgtgccagtggtaatcagctctcacgcatgtcgtaccgatctcgaattcccgggtcgacccacgcgttcgcccacgcgtccggaggaacaaaatgagctcgtagaatcagctgcagagatgctttatgggctgatccatgcacgatacattctgaccagtaaagggctggctgcaatgctggagaagtataggaactatgacttcgggcggtgcccgcgtgtttactgctgtggtcaaccatgcctgccggttggacaatcagatattcatcgatctagtaccgtgaaaatatactgccccaagtgtgaagacatctactacccacggtccaagtaccaaggcaacatcgacggcgcatattttgggacaacgttccctcacctgttcctgatgacatacgagcacctcaagctacagaagcccttgcagcgctatgttcctcgtgtctttggcttcaagctccataagccatgagcctcatgtatttggcttcaagctccat

SEQ ID NO: 96220 - DNA, 544 bp, Zea mays
  unsure (1)..(544): unsure at all n locations
gggtggggggcgtgtgtgttccctcgctantanctacggaacgtctcggtccggaattcccgggtcgacccacgcgtccgcggacgcgtgggtctgatcgtcctgttcctcacagcagcagccatggcggccgagccggagaagggggcggcccccgcggcacaggagacggccgtgcacatcgtgtacgttgaccgccccgaggacgccgaccctgaggagttccacatccgcaccctcacccccgtcctcggcagcgaacagaaggccagggacgcagtgctctaccactacaagaacgccgccagcggcttctccgcgaagctcaccccccagcaggtcaaggatctcaaggagcaaccaggtgttctccaggttgtgccgagccagacttaccagctacatggtcctgggtctggcactcaccagggcacgacacacaccttgggccttatgtgaaagcgtatgagaatcaagaagattgtgttagtatggctgtattgcacaggtctgacgaatgtgtatagtacagtactatgtaagg

SEQ ID NO: 96221 - DNA, 548 bp, Zea mays
  unsure (1)..(548): unsure at all n locations
tgtttgagctccgtatgacttgcccccacctgcgcgacgcactgacgtactcggtccggaattcccgggtcgacccacgcgtccgcggacgcgtgggcggacgcgtgggcgacgatacattcagatccagaagatggcacttccctgtggtacaattttacgatctcccttgtctgggcaccattcctggtcaaagctaaaatatttgaggacgacgatggagtttctactgctgatctccagctgcaccttgacgttctcgagacagactggactagtcaatgggagaagttcgattacgcggtgatatccacgggccaatggttcttcaagactgcagtgtactgggagaatggagctgcgattggctgccactcctgccagaacaaaaccctggaagagaggcctncggagtactccttccgcagggcactcagggtggccttccagttcatcacattctcaccttacaagccagtagtcttctacagaacgtgggcttccctcgcattttgagaaacgggcagtggttcaacggcggtacttgg

SEQ ID NO: 96222 - DNA, 509 bp, Zea mays
  unsure (1)..(509): unsure at all n locations
gttatggtctctagtgataaagtcagctnatgacgatancttagcgatctctattccgtgtcgacccactcgtccggactagttctagatcccactctgcctctgtgctggaaagggcagaaagcattcaaatctgtgtttgacgtcaagaatgaattcaagtcaatgtttctgagctttgccagttccaagaatgccgccatggagatcccacctgaaaactacctcattgtcacaaaaaatggaaatgtgtgcctggtcattcttgatggaacggctgccaagctgagtttcaacgtaattggagacatcacgatgcatgatcagatggtgatctatgacaacgagaaatcgcagctgggatggtcgcgttgggcatgcactatgagcgccaagtctattctgtcttcctttccctgagctcagttctatgtacttctgatagagtttaagaaaatcactatatcaaaccttctcgcaatgcatgaatttcctaactgaagaaggag

SEQ ID NO: 96223 - DNA, 510 bp, Zea mays
ggagtgtctcagttagtgaatctagctccgacgtaggccgtagcaatctcgaattcccgggtcgacccacgcgtccggggagatcagtatgcagttgcacttggactacttgatgagggcaaagttgttctgggtgtgttgggaggtccaaatcttccattaaaatcaacaaacaagaacaatagcagctcttttggggatcgaataggttccctcttttttgctacaattggttgtggagcgcaagttgaggccttagaaggatctgagccacaaaagattagtgtttgctccaccaataatccagttgacgcctcattctttgaatcctttgaagcatcacactccaagcgtgatttaactagctccattgcagagaaacttggtgtccgagctcctcctgttagaatggatagccaagcaaaatatggtgccctagcacgtggtgatggtgccatttttctgcgcatcccgcacaaaagttacatagaaacagtttgggatcatgca

SEQ ID NO: 96224 - DNA, 510 bp, Zea mays
  unsure (1)..(510): unsure at all n locations
ggtagtgtctcagtggtgaagctgcccatcagggaaggcttagcagtctcttattcccgggtcgacccacgcgtgcgatcgagtacagtcggctaggtaatctggtggtacgacgacatggcggccaccagcagcgggtcgtcagcgtcctcgagctcggcgcagcgggcagctgccgcactgctcgtggccgccgccgtggcggtgtccgtcctggtggtgggcgcggcggcggtgtgcgacatgagcaacgagcagttcatgtcgtgccagcccgcggcggccaagacgacggacccgccggccgcgccgtcgcaggcgtgctgcgacgcgctggcgggggcggacctcaagtgcctgtgcggctacaagaactcgccgtggatgggcgtctacaacatcgaccccaagcgcgccatggagcttccggccaagtgcggcctcgccacgccgtccgactgctagcagtgtgctagccaagccaagccaagcatgaaagccccctgcttn

SEQ ID NO: 96225 - DNA, 539 bp, Zea mays
  unsure (1)..(539): unsure at all n locations
ggagtcgccgtgtgtctcggnncaggttcacgacgtatctccgctgnccgttttcccggtcgacccacgcgtccgctcgtctgtttcctctacggccgccaccatcgcctcgcgaccgcctgccgctccgctcgaaagggtttagtgaagattttttgaagccgagaagatggtgctgaagacggaactctgccgctttagtggccagaagatctatcctgggaaaggcattcggtttattcgtgctgattctcaggttttcctttttgccaactcgaaatgcaagcgctacttccacaaccgcctgaagcctgcaaagcttacctggacagcaatgtacaggaagcagcacaagaaggacattcatgctgaagctgtcaagaagaggcgccgcgctaccaagaagccatactcgaggtccatttggggtgcttccttggaagtgatccataagaagagagctgagaagccttgaattcgtgatgctgctagaagagcttgttctttgtgggatcaaggagcgcattaagaagacccan

SEQ ID NO: 96226 - DNA, 543 bp, Zea mays
  unsure (1)..(543): unsure at all n locations
acgggtgcggatgancgtgtgcccacgtcccanccgtgcactctctcggtccggaattcccgggtcgacccacgcgtccgcggacgcgtgggcggacgcgtggggtcgcactagccaatcgtgcagcagctttgaatgctgggggggtctctatcaaagaaaccatcaccgctgccatcataccgaatgcatggtctgcactgaatgttggtgcaccccattgtaaagggtatggaatgcttatcctaagagagtggaaagttacatgaaaaatgtaaaaacattgatgttaaaattagtcaatgatacatagggaagtctccaaaccattgtgatgaagatatgagattggcacggtctgtccgacagttgatctgggtgacaagtgctgtgtgcttgtatgcaccacttgctgtgaggatgtgggcatataaccatacangagtgatgcacatcaacagtgagaaccctttcgaaaacagaacatgacgaatatgcacatgcttgagatactgggaaagcccgacatattagattagcctt

SEQ ID NO: 96227 - DNA, 539 bp, Zea mays
  unsure (1)..(539): unsure at all n locations
cggtccgtatgtcgtggttagtctcgataagtattgacgtaccggtccggaattcccgggtcgacccacgcgtccgctctcgtcgccgtcctctcccgttcgcaacgccacgctccccaccgctgaaatggccccgaagcgaggtggcagggcaccggtgccggccaagaagaagacggataaagtgacgaaccctctgttcgagaaaaggccgaagcagttcggcatcggcggcgcgttgcctcccaagaaggacctgcaccgattcgtcaagtggcccaaggtcgtgcgcatccagcgccagcgtcgcatcctcaagcagcgcctcaaggtgcctccggcgctcaaccagttcacccgcaccctcgacaagaacctcgctaccaacctgttcaagatgcttcttaagtaccggcccgaagacaaggctgccaagaaggagaggcttctgaagagggcccaggctgagaatgaaggaaaaactgttgaatccaagaaaccaattgttgtgaagtatggccttaaccatgtgacttacn

SEQ ID NO: 96228 - DNA, 536 bp, Zea mays
tggccgtttactgactacgaacattacgcactgctgaccggtccggaattcccgggtcgacccacgcgtccgcgactcatggactccagaccagctgaagatgatggcattcggaggcaacaaccgggcacatgctttcttcaagcagcatggatggaccgatggcgggaaggttgaggcaaaatacacatcaagagccgctgaactgtacaggcagatgcttaccaaggaggtcgctaagagcgccacgaccgataatgccctgccatcctcacctgtcgcatctgaggcttccaagccgccatccgatgacttccctgaattcaaactcccagatgtggcagcaccaccggcagagaatctgaatgggaagcatgagcccaagtcccccaaagctgctcctcgttcaccaaaggccgctactcattccacctttgccacttctgtgaagaagcccatttgcgcaaaagaagtttggaggcaagactggaaggcttgggtgtcgaaagcttacttacaaagccaaatgaaagcct

SEQ ID NO: 96229 - DNA, 543 bp, Zea mays
tggtagtgcccgtatgtgtgtttccggttcacgcacgatctacgtaccggtccggaattcccgggtcgacccacgcgtccggagattggtatcatgtcgcagtgttgcttgtataaaaatgttagaagtgcacgccctgcgtggtttgctaatcttgctattaagatcaatgccaagtttggaggaagaaacttagaatttgctaatcccaaataaagcttaccgggtgttacaattgaaccaacaattatatttggtgctgatgtcacacaccctgccgttctagatgataccgccccttccattgcttccgttgttgcctcccaagactggcccaaggtggctaactataatgggattgtccgtgcacatggtcatcgtaaagagctcatcaatggcctggaagacattgtcaaggaactcctacttgcattctaggagagttctaatcggatacccaaacagcttgatcttctacagggattgccttatgttatggccaattcaaacatgttctggtccatgaaatccctgtatagatat

SEQ ID NO: 96230 - DNA, 504 bp, Zea mays
  unsure (1)..(504): unsure at all n locations
gagttcgcgtggtaattcagctctcacgtatgctcaccaatctcgaattcccgggtcgacccacgcgtccggatgagataaatacagcattagttcgaccacttgctcatggagttaaacttcatgcactgattgatgcgtgtcatagtgggactgcacttgatttgccttatctctgcagaatgaacaggattgggcaatatgtatgggaagatcaccgaccgcgatctggtgtctggaaaggcactagtggtggggaagctatttcctttagtggttgcgatgatgatcagacctctgcagatacctatgctttatcaaagatcacttcgactggtgcaatgacattctgcttcatccaagctattgaacgtggacagggcaccacctacggtagtatcctgaactctatgcgttccacaatacgcaacacaggtgactcaacgggtgtaagtggctgtactgttacatcactaattacaatgcttcttactggaaggagcn

SEQ ID NO: 96231 - DNA, 505 bp, Zea mays
  unsure (1)..(505): unsure at all n locations
gtatgtgccagtgagtaattcagctctcacgtaagacancggatctctattccgtgtcgacctacgcgtccgcccactcgtccgcccactcgtccgctaaatggtactggccaaaaggtgcatagcttagttgattctgagaaaccaagcaatcagagctttgccatgattgtgaaatctcacacattaaggctccctgtcggtaatccggatgggacaatcattataagaaccgaccagtacaacagagatgatctccgagttgactatatgtatgcaaagttctttgttatcaagtcaattggtgaggcagatgtgcacaaatcgataaagtatggtgtatggtcaagttcctccaatggaaacatcaagctagatagcgcattcagggatgctgacaggatatcaaggaggcattctactaagtgtccagtattcttgttcttctctgtgaatgggagtgggcacttctgtggcatggctgagatggttggtcctgttgaat

SEQ ID NO: 96232 - DNA, 540 bp, Zea mays
  unsure (1)..(540): unsure at all n locations
agtagtgcgtatgacgtgagttcaaaccctancgatgacttcaccggccggaattcccgggtcgacccacgcgtccgtccacgcgttcgtccacgcgttcgcagatcctccctaagattgccatggcggaccagctcacggacgaccagatcgccgagttcaaggaagcattcagcctcttcgacaaggactgcgactgctgcatcaccaccaaggaacttggaactgtgatgcgctcgttggggcagaaccctactgaggctgagcttcaggacatgatcaacgaggttgatgctgatggcaatggaaccatcgacttccctgagtttctcaacctgatggcacgcaagatgaaggacacagactctgaggaggagctcaaggaggccttccgcgtgttcgacaaggaccagaacggcttcatctctgctgctgaacttcgacatgtcatgaccaacctaggtgagaaactgacggacgangangtggatgagatgatccgtgaagccgacgttgacggtgatggccagatcaactacg

SEQ ID NO: 96233 - DNA, 535 bp, Zea mays
  unsure (1)..(535): unsure at all n locations
ggcgtatgactgatgnccagggctcaccgactancttcccggtcctgaattcccgggtcgacccacgcgtccgcccacgcgtccgaagactctgatttggtccctggaaaatatgaaggtgggttgaagctgtggggaggttcattagacttggtgaaagccctgaattctgatatcaaagaagataaatttcatctggaaggcaaacgcgtattggagcttggatgtggacatggtctccctggcatttttgccggtctcaagggtgctgacctgattcatttccaagatttcaatgcctacgtgcttaggtgcttgactataccaaatgtacaagtcaatcttttcaaggattcaccacaaggaacatgtacatgtccgaattgcggttactttgctgctgattcgagtcgaatggatcagctactattctgcaacgatatctgagcaggacataacaaccattgaggatacacaacgttaaatgtttatgggtattgtatcattccgatggcttagacttgttacacggacg

SEQ ID NO: 96234 - DNA, 506 bp, Zea mays
agagtgtctcagtgctaatcagctctcacgatgcctcagcgatctcgaattcccgggtcgacccacgcgtccgggagttctacaagtgggagggcaatctctcccagctgctgcagaacgtccgcaacaagggtaaccaaggcgcttcgagctggtcttgggaggagaaggaccactgcctggaggagacggagaagtcgttctcttactcaggaggcctcctccgccatatattcacctgatctatcgttgctggttgatccagtctcaaacgctgtaaatacatagtcctttgactgttaaaactttattactggtgagggggatctcctcccccaggtacggtttacctgcattcaagttgcccagtgtcttactggattgctggtgtttggtgtttctgtgatgcaatctgtattctgtaggtcatttcatgactaatagagtcgaccccttccaatgccgtcaatggcaagagctcttccaatcaacatgcctaggctagc

SEQ ID NO: 96235 - DNA, 543 bp, Zea mays
  unsure (1)..(543): unsure at all n locations
cgtgccgatgactagttgnccaggcttcacncgcactgacttaccggtccggaattcccgggtcgacccacgcgtccggttccgtgtccgcgtccagtgtgtccgctccccctcagtcctagcggtagcgtgcgcgcgggggacgtagatggcggcttcggcggcggcggcggcgacaccggtggcgccgacagaggggacggtgatcgcgatccacagcctggaggagtggagcatccagatcgaggaggccaacagcgccaagaagctggtggtgattgacttcactgcaacatggtgtcctccgtgccgcgccatggctccaatttttgctgatatggccaagaagtccccaaatgttgttttcctgaaagttgatgtcgatgaaatgaagaccattgctgagcaattcagcgtagaggccatgccaacattcctgttcatgaggganggcgacgtcaaggacagggtcgttggcgcagcanaggaagagctagcaaggaagcttgaactacacatggncttcgagatcagtgattgcct

SEQ ID NO: 96236 - DNA, 544 bp, Zea mays
  unsure (1)..(544): unsure at all n locations
ggagagccgtntgtctaaactgcagtncactgaccgtaccgnccgtaccggtccggaattcccgggtcgacccacgcgtccgcccacgcgtccgcacgcgtccgcccacgcgtccgcccacgcgtccgcccacgcgtccggcagcattttatgatccatcaaaatcaaggaaaatatgcactgccccgcagcttgtgagtgagaatgaaccacaaaagtatcgggatgtaatttatggtgactatgtctcatcttggtatagcaaaggtccagagggcaagcgaaacatcgacgccctcctgattcagcactagagccataggtatgccttaaaacagggttgggccactcatctgtttcctaaacttctaatgcatgtacaatatatcagtttccaactttaaacaatcaggataaggaaaccaacttgtatactggatgcagtgcaataaagtaccttttcattgtcaaaaaataaaaaaaagggcggccgctctagaagatccaagcttacgtacgcttgcatgctacgtcataactcttt

SEQ ID NO: 96237 - DNA, 516 bp, Zea mays
aggagttctcagtaggtacagtccttactgcagctgcttagcagtctcgtattcccgggtcgacccactcgttcgcggactcttggtcggactcgtgggcggtctcgtgggctgactcgtgggctcttcttaagattgttgtgagagtaggtttggcatcccttactgaggccttctttaactgggctggattttggagtgcaatggcttcaaatgtaaccttccagtcaaggaatgttctaagcaagaaacttatggtgcacaaagaggaatctctctacaacattaacctattctcgatcattacagacatgtcattctttctgtacatcatagtaaccttacttacagatggtgctcacgttattccagcagatttaacagccttaatgttttgaactttctacacgtatacactattcaattgacagcttcattttgctcccttgcttaccttcaattccttaacttttaacaccgtaaaggcaatttttctgttaacagtttttattcatt

SEQ ID NO: 96238 - DNA, 542 bp, Zea mays
  unsure (1)..(542): unsure at all n locations
tgagcgccgtntgtgttgnnccaggttcancgacgcagcnaccggtcttgaattcccgggtcgacccacgcgtccgcaacaaagcagctcacttgagttcaattcagccatgaggagccaggtcgcagcagtagccaggtggttgctcctcctggccttgggtgctgaggccgacctctgcgtcacgcgtagcaggaccttcaaagggtggtgccaccagagcgagaactgcatcaccgtctgcaagagcgagggcaataccggcgggttctgcaagctcggggcttgcatgtgcaccaaagagtgtgtccgaagtactgacgctgctggtgctaataaagccccacagcagcatttgagttgatgagtagtaaagaagaacgcttttgttatgccaacgcatgctctagaattcgaggccgaaatgaccaaaaataaatgaattttgtactctaaaaaaaaaaataaaaaaaaaaaggccggacgctctagaagaacccaagcttacgtacgcctgaatgcaacgtcataacttttctatt

SEQ ID NO: 96239 - DNA, 515 bp, Zea mays
tgaattcctcacgttgatgaagctaattggctaagcatgtcgtagaagtctcgaattcccgggtcgacccacgcgtgcgcccacgcgtacggcatcttggacgatgttgtctacccagctgagattgtggggtagcgtgtcagatgcgcgtctggatggttccaagattatcaagattttcttggacccaaaggagaggtacaacactgaatacaagctggagacctgcactgcggtctaccgcaagctgtgtgggaaagatgtggtctttgagtaccctatgaccgaaaatgcataaatatgatgccctatggatatctgcactctatttcggtgattctgaatgttatgttgggtctccctatgtacttcaaaaaacatagttttgatgctaaagttgcctaagaatttggtacggggaagtggcagtggacgtgaacaatgtttagttttgagcatttaaatcaaacctttgccctgaaaaaaaaaataacatttttattaaaaaaaaaaaa

SEQ ID NO: 96240 - DNA, 519 bp, Zea mays
  unsure (1)..(519): unsure at all n locations
agaggtttctcggtgactgaagtaccgatnctcacgtataccttagcaatctcgaattcccgggtcgacccacgcgtccggttcttggcttgaatcccgagaccaggaagtttatctctgaaaatgttgaggagcaaagtgagcaggtgatgaaaaacatgggcgagatattgaaagctagtggtgctagctattcttcagttgtgaagacaacgatcatgttggctgatctgcaggatttcaataaagtaaacgagatctatggcaaatatttcccggcgccagcacctgcacgatcaacctaccaagtggcggcgctgccactgaatgcccggattgagattgagtgcatcgctgctctctaatcagatcatccaaccactcattaaatcatcaataagcacccaggaatttgtggtagaggtacctgtaccagttcagtgtctgaaaactgcgggtaacaaacctttgtgtaccggataagtgatgtgtgtgtgtgtgagtgaacaatgcatctaa

SEQ ID NO: 96241 - DNA, 531 bp, Zea mays
  unsure (1)..(531): unsure at all n locations
cgcntcttactgactccgaaacgggatcgactgtactgtcgtaccggaattgcagggtcgacccacgcgtcccgctggacgtctgcgtggaggacgagacgatgcggtacctgaaccggaaggacgtgcagcaggccgtgcacgcgcgcctcgacggcgtgcagaggtggacggtctgcagcagcgttctggagtacaagcagctggacctccagatcccgaccgtgaacaccgtgggcgcgctcgtgaaagcgggcattcccgcgctggtgtacagcggcgaccaggactcggtgatcccgctgacgggcagcaggacgctggtggggcggctggcggccaggcttcggcttaacgccacggcgccgtaccgtgcctggttccaggggaagcaggtgtgcgggtggacgcaggtgttcggcggcggcgcgctgtcctttgccacggtgcgcggcgcgttccacgaggcgcccttttcgcagcccgagcgctcgctcggcctctttagggcgttcctcgtccgacagcaat

SEQ ID NO: 96242 - DNA, 539 bp, Zea mays
  unsure (1)..(539): unsure at all n locations
tgcntctttactgactcccggtacgtcatcgcactgtactgacgtaccggacctgaatgtcccgggtcgacccacgcgtccgcggacgcgtgggccgcttccttacaatgtaaaactggaggaagtcgaatctttttttgctgagtgtgtcaaggtaaatagtgtgaggctacctcgacatgtttctgacaaaaggcatttctgtggcactgctttagttgaattttcagaagaagatgaggcaaaaggcgtttttgagaaaaatctcatttttgctggggcagacctggaaataagaccaaagaaagaatttgatactgaaagagaggcaaagaaagaagcatatgagaagtcacatcctaataagagcagtcatggtgaaggctatccaaaaggtctgattctggccttcaagctgaagaaaactgcagatgatggtgagacacgaaaaagtggtggtggcaaagtagatgacactgaccttactaataataataaaactttccatgcttctaaaaaatccatcgtttataatgata

SEQ ID NO: 96243 - DNA, 539 bp, Zea mays
gatgagcgtccgtctgagtacgaccgccctccgactgtactgcccgtaccggtccggaattcccgggtcgacccacgcgtccggacaagcgaggcggcggccccgcgttctccgtctccgtctccgtctccgtccgcccggcgtgaagaaaagcctctctcaccacagccgccacgccatggccgaggagaccgacaccaggcctgcctccgcgggctcccgaggccgccccgcgcccgaggacgacgacagggaggagggcgagatcaccgacctcgcctgcgctccttccccgcccgccacgcacccgctcgagcactcctggaccttctggttcgacaacccgcagagcaagtccaagcaggccgcctgggggagctccatccgccccatacacaccttctccaccgtcgaggaattctgggggctttacaataacattaatcaccctagcaaattgatcgtgggagctgatttccattgcttcaagaacaagatcgagccaaaatgggaagaccctatttgtgcgaatggtggtt

SEQ ID NO: 96244 - DNA, 509 bp, Zea mays
cgttggcgcagctagataccttcacgcacctcactgtaatgtctgtaccggtctcggaattcccgggtcgacccacgcgtccgcccactcgtccgctctaaccctacagcgacgacgagagcgaggctatgaaggggaagaagccggtcaaggagctcaagctcaccgtgccggcgcaggagaccccggtagacaagttcctgacggcaagtggcacgttcaaggatggtgagctgaggctcaatcagagcggcttgcggcttatctctgaggaaaacggggatgaagatgaatctacaaagctgaaggtggaagatgtgcagttatcaatggatgatcttgagatgattcaagtcattggcaaaggaagcggtggtgttgtccagctagtgaggcacaaatgggtgggcacattgtttgccttaaagggtattcaaatgaacattcaggagtcagttcgtaaacaaatagtacaggagctcaaaataaaccaagcatcacagagccct

SEQ ID NO: 96245 - DNA, 542 bp, Zea mays
  unsure (1)..(542): unsure at all n locations
cgtcttggaggtgtccgacgtgtctaccggttacgnntactactgtcgtatcggtccggaattcccgggtcgacccacgcgtccgcccacgcgtgcgtccacgcgtgcgcccacgcgtccgctcgctacccctctccctcgaggccgtttgcggcgaagagcgcccaggcgcccaccaggatgaagtttgttgctgcctacctgcttgctgtcctcgctgggaactccagcccctctgccgaggacttgacagccattctggagtcagttggctgtgaagttgacaatgaaaagatggaactccttctgtcccaactgagcggtaaggacattaccgagctcattgctgctggcagggagaagtttgcttcagtcccatgtggcggtggcggtgtggctgttgctgcagctgcccctgctgctggcggcgctcctgcagctgaggcgaagaaagaagagaaggtggaggagaatgaagaaagtgatgacgacatgggctttaacctcttcgactaaacctgtgcaatagtcaagagtattgt

SEQ ID NO: 96246 - DNA, 537 bp, Zea mays
  unsure (1)..(537): unsure at all n locations
ggttagagcggccgtctgtccccgcaccgcntcgcactgncgtaccggtcctgaattcccgggtcgacccacgcgtccgtccacgcgtgcgcacacacacacacagacatttggtttccaaaaccaagtgtgtgtactatgaacgagctagctcgggcggcggcaggcagccatcatgtcggaggagaagcaccaccacttcttcaaccaccacaagaaggacgaggagcagcccgccggcgagtacgggtactccgagaccgaggtggtcaccgtcaccggcgagggcgagtacgagaggtacaagaaggaggagaaggagcacaagcacaagcagcacctcggcgaagccggcgccatcggcgtcggcgccttcgcactctacgagaaacacgaggcgaataatgaccccgagcacgcgcacaagcaccagaatcacggaggaggtcgctgccgcggccgccgtcggctccggcggctacttattccacgagcaccacgagaagaagaaggaccacaaggacgccgaggaggcca

SEQ ID NO: 96247 - DNA, 548 bp, Zea mays
  unsure (1)..(548): unsure at all n locations
tgcgttgagtcgctacagtcngcttacgnactgnacgtaccggtccggaattcccgggtcgacccacgcgtacgtccacgcgtgcgcgcaagtacaaccaggacatagattatctgccgcaaatgctattcacgagggcggcctaattctgtcagctgccgcaagaagaaatgtggtcacagcaaccagctgagggccaagaagaatatcaagatctgaagtgctgatcctagtcactttcatggacaatgttacgctttattgctgtgtggtttatgaacagggtttggttacccaacatttgtgcacttctgtatgtgcaccttgtatgctgagacactactttatgacaatatcaactctttcattgtcattatgatcactgttcatattaaaaatctcttaatattgttgtcaaattattaatttttatattaaactttgtgtcatttcattattttaaaatttaatcatttttatccattaaaataacaggtgaactcaattttcaatgtatcctataattatgttaaccctttgttatttca

SEQ ID NO: 96248 - DNA, 533 bp, Zea mays
  unsure (1)..(533): unsure at all n locations
gggccgtctgacgttgcccaccacactacgtactgacgtaccggtccggaattcccgggtcgacccacgcgtccgaaaaccgagaagagaccaggccgaaggaaaacaatcctgaaaccaagccatgggtctgcaggaggaatttgaggagcatgctgagaaggcaaagaccttgcctgagaacacgagcaatgagaacaagctgatcctatacgggctctacaagcaagccacggttggagatgtgaataccgatcgtccgggcatattctaccaaaaggacagggccaagtgggatgcctggaaggctgttgaaggcaaatcgaaggatgaggcgatgaatgactacatcaccaaggtgaagcagctccaggaggaggctgccgcctcttaaaagtctcttaatagtgttgccaaacagctatttgtcagatgagctntgtgccatttcctcattagaagtatatcattcgatccattgnggatctgtgaaccatgtacctgtttatgtaactggttaccagtgttatccn

SEQ ID NO: 96249 - DNA, 511 bp, Zea mays
cgagttctcgagctcaagctgaacatcacgatagctagcacgtcgtaccggtccggaattcccgggtggacgcacgcgtccgagcgaccggtccagcactttcacgctcagctccagcaatggctgcctcgaccatggcagtctcctccacggcgatggccggcacccccatcaaggtgggctccttcggcgagggccgcatcaccatgcgcaagaccgtgggcaagcccaaggtggcggcgtccggcagcccctggtacggccccgaccgcgtcaagtacctcggccccttctccggcgagcccccgagctacctcaccggcgagttccccggcgactacggctgggacaccgccgggctgtccgccgaccccgagaccttcgccaagaaccgcgagctggaggtgatccactcccgctgggccatgctcggcgcgctcggctgcgtcttccccgagctgctctcccgcaacggcgtcaagttcggcgaggccgtctggttcaaggccgg

SEQ ID NO: 96250 - DNA, 515 bp, Zea mays
  unsure (1)..(515): unsure at all n locations
gggagtgtctcangcttgaattgatactntagctngactanagtactngttntaccggttcggaattcccgggtcgacccacgcgttcgcccactcgttcgtccactctttcgcgtccatcgccccctccctccggtctgcgctcccagagcctctcccctgcgcccccgccgattcgcgtctccctttgttggaaggaacgatggagcagaccttcatcatgatcaagcccgacggcgtccagcggcgcctgatcggggacatcatcagtcgcttcgagaagaaagggttctacctcaaggggatgaagttcatgaacgtggaaaggtccttcgctcatcagcactacgctgacctttccgacaagcctttcttccccgggttggtggagtacatcatttccggccccgtggtggcgattgtgtgggaagggaaagacgtcgtgttgactggcctcatgatcaatggggccaccaggccttgtgaggcaacccccggtaccatttccggggact

SEQ ID NO: 96251 - DNA, 543 bp, Zea mays
  unsure (1)..(543): unsure at all n locations
aggagtaactcaggtaactcaagcttgattaccgtctagtngagcttagtactgtctgtaccggttctctgaattcccgggtcagacccacgtcgtccggccgcttcacagtcgacgggtaaagaagctggtcgttctaaagagccacggtggctttgagtggtcttgaaggtccatctatgctggtcacatggtatcctatggatcaatccgaaggctagcttctggagatgcctgaagaaggtggacttctggaaactctttcggagccattcttcaagcttcccagaaggcttgattttacaatgtaacaaaacacacatgctgctcatgacatttcgagcatgtacctctggatgtttgtaggctcagaaaaggtcctggtcttaggctctgaaaacctcatctggcgaccatacgttatttaccttgtatgggcgctcctcttgctggtgagacacggtgttacgagttacgactcgatgaacatgtaataaagcttttcagagaaaaaaaatatatatatttatattaattaaatta

SEQ ID NO: 96252 - DNA, 508 bp, Zea mays
  unsure (1)..(508): unsure at all n locations
cggagtgcacaattgattacagtctaacggagcttacgaatgtccgtaccggtccggaattcccgggtcgacccacgcgtccgcggacgcgtgggttgaactgacgggcgcggaccgcccgggcctcctctgggaggtgtgggccgtgctcgccgccctgagctgcaacatcgtgaaggccgaggtgtggacgcacgacgggcgcaccgtcgccgtgatccaggtcaccgacgaggccaccgggcgcgccgtccacgacgcgggccggctgtccagggtgcaggagcttctccgcgacgtgatgcggggcgacggcacgtgcaaccacggcggcacgggaatctccgcggagaggcgcctgcatacgctgatgctggacagcgtcngcggcggcggtgccgatgaagctggtggcggcggtgacgagaggggtggatgtggcgtggcgaagcccaaggtcgtggtgatggactgcgcggagaggcggtacacggtggtgatcctgcgg

SEQ ID NO: 96253 - DNA, 534 bp, Zea mays
  unsure (1)..(534): unsure at all n locations
tgtgtccgtatgtcgtctgtnaatttttgcgaagtactgtcgtaccggtccggaattcccgggtcgacccacgcgtccgcgagtttttcgctagccgtcaactcgtaacaatattttcagcccctaactactgtggagagttcgacaacgctggtgcgatgatgagtgtagatgatacattgatgtgctcgttccaaatattgaagcctgcaaggaagatgatgggtggttcaactaataacaaatctggcttcaagtcattcatgggatggtgacaacggcctgatggtgggcacgctgcgttcgacagggggtacatcttacagcggctgcaactaacaggcatatgcattttcgcggaaacctgcttgggccttggaagggcaaagcagatgtagaactgtgcatcttccatgttggattaacacttgatgtaatgtattgttatcggtttttaataaaaaatttaaagggccgccgctctagaggatccaagcttacgtactcgttcatgcgacgttatagcttttctat

SEQ ID NO: 96254 - DNA, 521 bp, Zea mays
  unsure (1)..(521): unsure at all n locations
aggtgtagtctcaggggttccagctgataccgtccagcctcattcnagtcatgtctgtaccggtccggaattcccgggtcgacccacgcgtccgcccacgcgttcgcccactcgtccgcccactcgttcgcccacgcgtccgcgcactcgtcggcaaccaatgaacctggtgcactgatgaatcttgtagaagaatcaactgccgatgatgcagatgatgatgatactaaagattgtaaaggtttatttaagaacttaaagttctacttgagtcgagaggtgcctagggagtccctgttatttataattccagcatttggagggactgtttcatgggaaggagaaggagctccatttaaagaaatagacgaagatatcactcaccaggttgattccatttgcaataatttattacaccaaagtttaactatatagacggagacattgtgtaccatccctaaagtaagatgccactctaagtaccacgacagcaatgccatactagggcaatagttactaca

SEQ ID NO: 96255 - DNA, 504 bp, Zea mays
  unsure (1)..(504): unsure at all n locations
tgagtcctgctgatacttctagcccactacgtcactgacgtaccggtccggaattcccgggtcgacccactcgtccgattggatacaggtctcgtatgtccttgacactgaagacttctcgtcccggcttcctaagagaaggaaaatacttcggagtggaactgtgtctgacagtctctcagatttcaacagtatatgctgcaaaagtgcaccgcttcaatatgttcctatccaaagcataagatcattagtcctacaaactgtcatcatcattgtatctaaacctggagatattgctgagaccccagctgctttgcttcttcaaccataatattcagcagttggcagatggtgactccatcgacattcagtctcataacgccctttttgaataacaaatggagagatctatagggtaaatacagcacaacgaatcgagcatgtaagccacaacactcatctctgatgtgcggatagatgtgtatatctgcatcagcaacacgn

SEQ ID NO: 96256 - DNA, 539 bp, Zea mays
gtctgagcgtctgcgtgtttccagttgactacgtactgacgtaccggtccggaattcccgggtcgaccgacgcgtccgattgcttctgaagacgatactaatatggatgttgatgttgtggctttgatttcaatcaaagattgatgtttagacacagttcgttacttacaacaagccaacaaatggaaacagattgatcaaattgtctccactacttattgaaagggaaatgtgcccttgggctatttctaagtattttggtgattaagtgtccaacacaagtgcctaagtgttaaattataccaaggactcaagaagtgaaaatcaacataaaggtatttttctaagacttagtactttgttttaaggactaatgtatcgtgtctaagtactggtaatagtataaatcaattttggaaaagagatgtctttgttcatccatagacagttcattctggtagcaccgtacagtttttttgtgctccagtctttctttgtctaactttcttctcttttattttttaaatttcttactattt

SEQ ID NO: 96257 - DNA, 538 bp, Zea mays
tagtggccgcgtgagaactgccagccactgcatagtactgtccgtaccggtccggaattcccgggtcgacccacgcgtccgcggacgcgtgggtttttttttttaatatcagaaaatgttggatacacataatccggaaatgaagcttgggagcaacaacactaggactgactgacgcactccgcaaaagtgacacaatcttgagcgagaacacgagctgtgcttaggccagggcagggaactgagcctggtcttcgatcgctggagcagcagctggtccccgataaccgccgttgtaaccaccacggaaccccccacggcccctaccacggccacggccactagggttatagtacctttcgccttcagctggctttaagaactcgttgatgctcatggacttcttgccccgttcttctctttcagcactttctttctttttcaagtccttgtcagagcccagcttgataaacacttcatcgccatcctttttaactgacagttgttgcatggcctgtagctccttgtcaatttcaat

SEQ ID NO: 96258 - DNA, 543 bp, Zea mays
  unsure (1)..(543): unsure at all n locations
agatttgggtcctatagtgtgtctggaacgnnatcgactgtactgtatgtaccggtccggaattcccgggtcgaccgacgcgtccggagcacccctcgagatctctccctccccgcgccgccatggacgcagttgactcggtggtcgacccgctccgggagttcgccaaggacagcatccgcctcgtcaagcgctgccacaagccggaccgcaaggagttcaccaaggtcgccgcgcggactgcgatcggcttcgtcgtcatgggattcgtcggcttctttgtcaagctcatcttcatccctatcaacaacatcatcgtcggctccggctgatccgtaaacctcaggctagtggctgcaggagtggacaatggcgtcactaccttggaggcagcaccgttttcagctctgatttccgcaaagcaattcctttaggacttgtgttgttaaagggcaactcccttatcttttcctctcttgaggtcgtgtggtagatctggaactcttttgtacctggtgtcgaatagtcttattgggatcagcg

SEQ ID NO: 96259 - DNA, 527 bp, Zea mays
  unsure (1)..(527): unsure at all n locations
aggagttgtctcgaggtgtgtcaaaattgaagtactattcgaactgagcttacgaatgtccgttccggtccggagattcccgctcgacccactcgtacggatcgacgtcgtcatcgacatgggaaaccccttcctcaaccgcaccgtcggcagcttgggcaagatcggcgccttcggcgcctgcaaggtggctgccgaggagaccttcgagtgcctccacaggggggatgtttcgaagcacaaggttgagcatgccctgacgaagatgtgcaaggagggcccatattggcgcactgttgctggagtttatgtgatcatggtgtacggcgtacaaaggatccgtatccgcagtgactggaagaacgcgattatcggaggcgccttgtccggctccctgatctcctgctccagcaacaacgacagatgcaatgtcgttaaggacgccattaccgtcagtgcggtagccacaaccgtcgagttcaataactggattacctaactgagcaaagagcaacctcattttcatn

SEQ ID NO: 96260 - DNA, 528 bp, Zea mays
  unsure (1)..(528): unsure at all n locations
ttgcgtttgagtgtctaccatcngcatctccatgntcgtaccggtccggaattcccgggtcgacccacgcgtccgcggacgcgtgggcggacgcgtgggctagttctagatcgcgagcggtcgccctttttttttggttgggaaatctcgagccaactagccaattgaactcaatgccaatttcacaagttcgcacacagacacagtgtgcagtttttgacattgctggtcacatttgcagtttgaattgcaaaaccatattgccagcattattgccacaactcatattccatgatcacatcgaatgaccgaaattgatgacaagaactagcccatctcaacaactaaacccctctttcgctggtggcacggaacaacaacgacacctttggagcaaccactgcatatgcataaagcaacccaatctctagtacacgttctacttcttttttgtgttgatgacgcaatctgccttggggtaagagatgcatgtgaagaggtacccctttgtcatttggtcgttcttta

SEQ ID NO: 96261 - DNA, 538 bp, Zea mays
  unsure (1)..(538): unsure at all n locations
gtgtagcggctgtgtggagtccgaaacgnntacgtatgacgtaccggtccggaattcccgggtcgacccacgcgtccgtccacgcgtccgcccacgcgttcgatcgctggaagatcgtcccctggtaaatgtgctgttgtgtggctgcactggtcatcacgatgatctggagctttgaaggcatagccacctgtggtcagcaactgctgccgtgttgctagaataaagttggtggcgatcgatcgatcgatctttggtgatgggtgtccctccctgtgtgtttgtgtttagttccagtcgtttgtgaggaagtcagttatgtttgagtgagaggggtacttcgctcttcggttaactctgtacttgtcatgaggagagttttcatacccggagtgtacgatccgagtacatactcggatccttcctttttcatcgaaatgggttttatcttatcaaataatataattcatttatgttttttataaaaaatggctgtctttttatagaatctcatcttccttacccttgtattctaatg

SEQ ID NO: 96262 - DNA, 530 bp, Zea mays
tgcgtccgtcttgagtccgggaaggcatctactgactgtcgtaccggtccggaattcccgggtcgacccacgcgtccgcaccacccgaagctcatccaagagagatcgacggacagcctcaattccaagtacctgaatcgcttcaatcagatggttacttgttgtccttgtagcatcaacatcctcgtgacacatgacagctaaaagattcacaccttctgtatcaagcatccattcattagctgctttgaaaccgtcatcttgatagaaggtattgaccttcccttctttgatgaacactttgttgatatctggaatgcctcgaagcgccatctctgtcaacatattgccctctatcttttttaggaagacatcatcctcagcagactcatcttgtatttctcctttttggagcttcatcatttgtgatgcggatactgaggataagcttatccccattatcaataattgaaatgcatggataatcatcattcaactcacggttaatcttctcggaatatcagccatgc

SEQ ID NO: 96263 - DNA, 518 bp, Zea mays
  unsure (1)..(518): unsure at all n locations
ggaagtggcccagatgtgtcaagactgattctngtgncatgtcatagtactgtcttaccggtccggaattcccggttcgacccactcgtccgctgtagttcaggacccagatctaggcctggtcattcagctccaaggtgatgggcgcaaggatgtttctactttcctagttcaagctgggattgcgaagaaagagaacatcaagattcacgggttctaagggacctgtaaatgcttgtgccctatattgtgtgccttcacatattggggagcttgaagcatcgacaagttactagtcattgcttacttatataagaacataagtagtatttgctattgtcaagtgtgccttgcttgattcaagttgtgttttcgtatcattattattattcacggtcatcgtacgtgtatggcttgtatgggttattgccaacttaataaaagcacactctgtttgcctattaaaaaaaaaaaaaaagggctgccgatctataggatccaagcttacatacgcgttc

SEQ ID NO: 96264 - DNA, 513 bp, Zea mays
  unsure (1)..(513): unsure at all n locations
agggtttctcagtgggtatactgatacgttcacgtccctacggatgtcgtaccggtccggaattcccgggtcgacccactcgtccggaagaaaaagggaagaattatcaatatatcatcggttgttggtcttactggtaatgctggacaagctaattatgctgctgccaaggctggggttattgggttcacaaaaacagttgctagggagtatgccagcagaaatattaatgcaaacgttatcgctcctggatttattgcttcagatatgactgctgaacttggtgaagagttagagaagaaaattctgtcaactattcctttagggcgctatggtcggccagaggatgtagcggtcctggtggaattcttagccctcagccctgctgcaagctacatcactggacaggtcctcaccatcgatggaggaatggtaatgtaaggcttcgaatctgtgccgctggcctctaatgtgtcgcagaaaaaaatgtaattcagttttttgagtgtcatn

SEQ ID NO: 96265 - DNA, 538 bp, Zea mays
  unsure (1)..(538): unsure at all n locations
aggcccgtctgacgtccgatccgcctacgtactgtacgtaccggtccggaattcccgggtcgaccgacgcgtccgctctgctttcaccccccgcatcgaacctcatccccgatctgatcgaatcgaaggctgcggcggcgattggcggtgaccatggcggtgggcacgccggcggcgacttccgccagaaggtatggagcatgacgggcggcccctactgccgccccgtccactggcgccgtaacaccgtcatcgccatgttcggcgtcttcctcatctgcatccccatcgctatgaagtccgcagagctcgagcaacgcccgcatcacccagtccggccaatcccatctcaactgtggtgcaaaaactttggtaagaaggaatactgaaggacccttcaactagcatgaagtgtgtgcaccttgcttttgccttctttttgtggaaacctgtgcctagccataatgctggggtaagtgttaggagcatctctggaatgcttctcgtagtatcttttggatcttcttttcctttggtn

SEQ ID NO: 96266 - DNA, 557 bp, Zea mays
  unsure (1)..(557): unsure at all n locations
agatagcgctgtgtgactttccaattgncaccgatgnacgtaccggtccggaattcccgggtcgaccgacgcgtacgcgggtgttggcttcctgcagttctgcaacctgaacagcttccgaacaaaattcatcctggggttgtctttgtttatgggtttgtcggtgccacagtatttcaacgagtacacttccgtagcaggctttggcccggtacacacgcgtgcaagatggttcaacgatatggtcaacgtggtattctcctcgaaggcgttcgtcggcggggctgtggcgtatttcctggacaatacgctgcatcggcgagatggcgccgtgaggaatgaccgttggcaccatttctgggacaggttcaagtcctttaaagacagacccgcgcaaccgaggaatttctacttcctttccattcaaccttaaacaagttctttccggtccttctgaaccttattgcctggtaactgaaaaatgcttgtttcggtcacgttggttgtgaattattgatttttggccaaaattgccaccgccccatactggctgtttt

SEQ ID NO: 96267 - DNA, 526 bp, Zea mays
cactgacctgagatctgatagtactgacgtaccggtccggaattcccgggtcgacccacgcgtccgcccgactcacgaatcccagagagcctccatggcgacgcaccgccactgcctcccactcctgctcgtggccgccgccctcgccctcgccgccgtccctgctcgcgcggcgctgggcggcgggcgcggcccgctgctgggcgggtggaacccgatccctgacgtgagcgactcgcacatccaggagctaggcgggtgggcgctggggcaggcgaagcaccagaagctggccgccgacgggctgcggttccgccgcgtggtgcgcggcgagcagcaggtcgtgtccgggatgaactaccgcctctacgtcgacgccgtcgaccccgccggccgcaccgtgccctacgtcgccgtcgtgtacgagcaggtctggacccgcacccgtcagctcgcctccttcaacccggtgccccgcgccccctgaaaccatacggacacgggtggcccgaagcgaccacgacga

SEQ ID NO: 96268 - DNA, 526 bp, Zea mays
  unsure (1)..(526): unsure at all n locations
gggatggtctcaggtgctgaatttagctcctcacagtagtccctcngtnactgtcagttcngnnttcgngattcccgggtcgacccacgcgtccgccggcttcctcctctacatggagctcggccgcaggctcaagaaaaccaggccggtcgtggcggagatcttctcgctcatgtcaagggacgaggcgcgccatgctgggttcttgaacaaggggctgtctgacttcaacttggcgctggacctggggttcctgaccaaggctaggaagtacaccttcttcaagcccaagttcatcttctacgccacctacctgtccgagaagatcgggtactggaggtacatcaccatcttcaggcacctcaaggcgaacccggagtaccaggtgtaccccatcttcaagtacttcgagaactggtgccaggacgagaacaggcacggcgacttcttctctgccctgctcaaggctcagccgcagttcctcaatgactggaaggccaagctctggtcacggttcttctgcctc

SEQ ID NO: 96269 - DNA, 528 bp, Zea mays
  unsure (1)..(528): unsure at all n locations
ggcgttgtctgtcgactgatgcngttcgattgcacgtaccggtccggaattcccgggtcgacccacgcgtccggctcaaatttgcttgtgggacattaaagcaatagtagaaacaaaagtcttgacgccttgcggatggttaagcatcatgatggtgtcgttgaagatgttgcttggcacttgaggcatgagtacttatttgggtcagttggtgacgattatcatcttttgatttgggacctgcggtctcccgcccctactaaacctgttcagtcagtggtggcgcaccagggtgaggtgaactgcctggcttttaacccgttcaacgaatgggttgttgcaactggttctactgacaagactgtcaaattatttgatcttaggaagattgatacttctctgcacacctttgactgtcacaaagaggaagtttttcaagttggatggagtccaaagaatgaaactgtacttgcatactgttgtcttggcagaaaggctaatggtccgggatcctaaacagggtcaacc

SEQ ID NO: 96270 - DNA, 527 bp, Zea mays
  unsure (1)..(527): unsure at all n locations
atagaactgaatacaatcgactgtcgtaccggtccggaattcccgggtcgacccacgcgtccgcccacgcgtccgcccacgcgtccgctcagctcgatgagaaagatgcaaggttgcaaatgcgtaagtgtatgcctccctggtgataacaactgctcctgtacgcatcgaaatgctggtgaccttccttacagtgcttcaggcatacttgttagccgaatgcccgttttatacgagtgtggtgattcctgcacatgttcacaaaattgccggaaccgagttgtacagaaaggtacgcagatccgttttgaagtttttaagacaggagatcgtggttggggccttcgtagttgggatccaattcgagcaggcacatttatctgtgaatatgcaggtgaaatcattgacatanatagagtgaatggtgaagatgactacatttttgagacttntcctttaaagcagaaattaagatgaaactattgcaccggaattgctgggtgaacccaagtcttttctgactaaat

SEQ ID NO: 96271 - DNA, 517 bp, Zea mays
  unsure (1)..(517): unsure at all n locations
agaagtgcncagctggtgcagcctgaanccccatctccctcagcgatgtcgtaccggtccggaattcccgggtcgacccacgcgtccgaaaaatatccccaaaccctagctcccgatctcgatggcgaaccctcgcgtggtcttcgggatgaccgtcggcggcgccccggcgggccggatcgtgatggagctgtacgccaacgaggtgcccaagaccgcggagaacttccgcgcgctgtgcacgggcgagaagggcgtgggcaagtccgggaagccgctccactacaagggctccaccttccaccgcgtcatccccgagttcatgtgccagggcggcgacttcacccgcggcaacggcaccggcggcgagtccatctacggcgagaagttccccgacgagaagttcgtgcgcaagcacaccgcccccggtgtgctctccatggccaacgccgggcccaacaccaacggctcccagttcttcatctgcaccgtcgcgaccccttggctcgacggcaag

SEQ ID NO: 96272 - DNA, 514 bp, Zea mays
  unsure (1)..(514): unsure at all n locations
tcgtgctgtaataaagcaataagttatgctctaccggtccggaattcccgggtcgacccacgcgtccgagcgaatccctcgcatcgcattcgcagcctttgctgcatcacaccaccgcgaaaccccagcagccgcatcgatggcgcctaaggcggagaagaagccggctgcgaagaagccagcggaggaggagcccgctgccgcgaaggccccggcggggaagaagcccaaggccgagaagcgcctcccggcggccaagtcgtccggcaaagaaggcggcgacaagaagggtaagaagaaggcgaagaagtcggtggagacctacaagatctacatcttcaaggtgctgaagcaggtccacccggacatcggcatctcttccaaggccatgtccatcatgaactccttcatcaacgacatcttcgagaagctcgccggcgaggctgccaagcttgcgcgctacaacaagaagcccaccatcacctctcgggagattcaaacctctgtccgcctn

SEQ ID NO: 96273 - DNA, 503 bp, Zea mays
  unsure (1)..(503): unsure at all n locations
tatgtgnnntgtatatgcatgcgantgtactgcactgctcgtccggactcggcagggtcgacccacgcgtccgcaagtttcgtgggtagaggaggcactagatactgtgccagatcggggtctggtagtggcagttgggtgattacgacggagtgggatgggcctcctcgacaagctgtgggacgacaccgtcgcgggcccgcgcccggacaccggcctcggccgcctccgcaagcagcccgcgcgccccgccgccgttaagatcagtgatccggccggggacgctgcagcgctcgtgccgccctcgccggcttcgggtagcgaggagacgccggtgaaggtgacgcgcagcatcatgatcaagcgtcccgcggggtacccgtcttcgccgaagagcgcggcaagcacaccgncggcctctccactagggactaccccngccatctcgccgtttgccggcgcttgtggtcgctttagaaggaaatcatcatccgacgcatatg

SEQ ID NO: 96274 - DNA, 500 bp, Zea mays
  unsure (1)..(500): unsure at all n locations
tcgtgnctgcgctagtcgggacagctacgcactgccgtaccggttcggaattcccgggtcgacccacgcgtccgcccacgcgtccgcccacgcgtccgcggacgcgtgggcaagccttccacacacccgacgccgaagccgaccccaccgacgtacaccccttccccaaagcctccgacgcccaagccgaccccaccgacgtacaccccttccccaaagcctacgacacccaagccgaccccaccgacgtacactcccacaccgaagtcgccggccaccaagccgtccacctacactccgacgccgccggtgtctcacacgctcagcccgccgtcaccatactactagaaagcgatgcctaccataccacactgctgtcagtctctggagcatttaggtggtctggatcaatggaaagggtgggtcctagtcaggcggcaaagatgagctggtgatgggtatgatgatgataagggccacttgttacctactacctcccc

SEQ ID NO: 96275 - DNA, 508 bp, Zea mays
  unsure (1)..(508): unsure at all n locations
ggagcgttcgctgaagtcagtnatcgatagcactgtcgtaccggtccggaattcccgggtcgacccacgcgtccggccagactcggctgtggaagttcgagggcgaggcgcgggagcaggcgaagaaggacctggtggaggtcctggagaccctggagggggagctcgccgacaagcctttcttcggcggcggcgccctcggcttcgtggacgtggctctggtgcccttcacgtcctggttcctcgcctacgagaagctgggcgggttcagcatccaggagcactgccccaggatcgtggcctgggccgcgcgctgcagggagcgggagagcgtggccaaggccatgtccgaccctgccaaggtgctcgagttcgtccagttcctccagagcaagttcggtgccaagtgatcgatcggaagcactgtgtgtgctgctatgcangccangctggtgctttgatcagctcgatcagcttcatgcccatgctagcgttgcatatcgcagtt

SEQ ID NO: 96276 - DNA, 511 bp, Zea mays
  unsure (1)..(511): unsure at all n locations
ggggtgctgcttaagccnacgtaccgactgccgtaccggtccggaattcccgggtcgacccacgcgtccgcggacgcgtgggattgtggggatctcttcttgctgcctgtcgaagccacagttgtgttgagctggctgagttatcagtggaacgtcttgcagatcttggagctgatgattctggagtctatgtccttctgtcaaatatctatgctgatgaaggaatgtggggtgatgttttgaggattaggaaattgatgagtgatgagggaatgagaaaggatattggacggagtgtgattgaagtggatggtgaaatacatgagttcgtgaatggagtcggctcatatattggtaaggatgaaatgtacttgatgctgtggaatttgtctaacatggtggcatctatttgatgctactttgtctaccaaaacaaagtactaatcctctagattaaaaccttacaaaattaataacatgagccatcttccccctttgcgtttctagctcg

SEQ ID NO: 96277 - DNA, 503 bp, Zea mays
  unsure (1)..(503): unsure at all n locations
cgagcggnntgagtatgatcagcaaatcattgcactgccgtaccggtccggaattcccgggtcgacccacgcgtccgctggaagatgagtaccttgagataccaggagacaccgtgaagcgtgtttttgcagggcttatactccgagaaataaaggagttttggcgggtggcgctgcttctatccattctcttctaccgagaaactgaaaccgctgctggcaccctcaacgagcatgacgagctgcgtcggaggaaagagaaatacatcagagtcgagcgttccataaccgagctagatcttgacggggtatggaagctgaagccgatactcgacgggaaatcgattatgggagtcatgcaagtcaagtccggaggtccactgataggaaaatggcaacaacgtgtgctgaagtggcagcttgcgcatccggacggaaccgtggacgagtgcgtcgagtggatgaagcagtcgcagtcaaaacgacagaaagtggagtccagc

SEQ ID NO: 96278 - DNA, 510 bp, Zea mays
  unsure (1)..(510): unsure at all n locations
tgttggttnngtgaatacagacnacggagcgtatcatggaatggctccggaattcccgggtcgacccacgcgtccgccagaacgacatcgaccttctcaacccgccggcagagctcgagaagctcaagcacaagaagaagcgcctcgtccagtcccccaactccttcttcatggatgtcaagtgccagggatgcttcagcataaccacggttttcagccactcccagactgttgttgtgtgcccaggctgccaaactgttctctgccagcccacgggaggaaaggcgaggctcacggagggatgctctttccgccggaagggagactagagctgagtctgttattagtactggatcggttgtcaatctccagtatgtggtcttcaagttttgctctgtgccccagacgttagggtcatgaacttccttagctaaggctttccgcatgttgttctgtgctgctatgtatcgcacgttggttcttgctgaacttatagcttgtttggttcgg

SEQ ID NO: 96279 - DNA, 507 bp, Zea mays
  unsure (1)..(507): unsure at all n locations
tgatggctactntagaccgaaacaagaagtattattataccgctccggaattcccgggtcgacccacgcgtccgggggtttggagatctctgatcttaagaaacaactcgaagatgctcggtcaaaaggcattgatgttagggccttggtggttatcaatccaggaaatccgactgggcaggttcttgctgaagacaaccaatatgatatagtgaaattctgtaaaaatgagggccttgttcttctagctgatgaggtatatcaagagaacatctatgttgacaacaagaaatttaactctttcaagaagattgcaagatccatgggatacggcgaggatgatctccctctagtatcatttcagtctgtctccaaaggatactatggagagtgtggtaaaagaggaggttacatggagattactggcttcagtgctccggtaagagagcagatctacaaggtagcttcagtgaacctgtgctccaatatcactggtcaaatccttgc

SEQ ID NO: 96280 - DNA, 509 bp, Zea mays
  unsure (1)..(509): unsure at all n locations
cgttggntagctaagtaagtngcgcttcgcactgacgtaccggtccggaattcccgggtcgacccacgcgtccggttcgttcagttcatccgtgttcttgttcgcgaggtcgagagagaggatgtcgtgctgcggaggcaactgtgggtgcggctccggctgcaagtgcggcaacggctgcggagggtgcaacaagatgtacccggacatggctgagcaggtgaccaccaccaccacccaggctctcgtcatgggtgtcgcaccatccaaggggcacgccgagggcgggttcgaggcggccgctctagaggatccaagcttacgtacgcgtgcatgcgacgtcatagctcttctatagtgtcacctaaattcaattcactggccgtcgttttacaacgtcgtgactgggaaaaccctggcgttacccaacttaatcgccttgcagcacatccccctttcgccagctggcgtaatagcgaagaggcccgcaccgatcgcccttcccaacn

SEQ ID NO: 96281 - DNA, 497 bp, Zea mays
gacgtgctgttacgatcgattgtatgctgtaccggtccggaattcccgggtcgacccacgcgtccgctccgccatcgcgccctgcctctcctacgcccgcggcacggggtccgccccctccgcgtcctgctgtcttaatcgaccaacaccctttgtgggtctagcgttcaagaggaaatggcagaacaagaggaaggagcaggggaaaccgtgtgacagacccaacatcgtcaccggtgccaacgttcaggtctgctgggagaagttcgcaaggtattttgaggtggagctgaaggaggttaagctatcagaagggtactacgtcatggaccccgtcaaggctgttgagatggtggatgagaacactatctgtgtcgcggcgatcttggggtcgactctcaccggagagttcgaagatgtcaagcagttgaacgaccttcttacagacaagaacaaggaactgggtgggacgtgcctattcacgttgacgccggcag

SEQ ID NO: 96282 - DNA, 505 bp, Zea mays
  unsure (1)..(505): unsure at all n locations
ngaacggnttgctctcgactagcaatatatagtactgctctaccggtccggaattcccgggtcgacccacgcgtccgcccacgcgtccgcccacgcgtccgctcattgtgccggctgatggcccacaccatgtacagatcttgcatgagccaattggtgttgcaggtcagatcatcccatggaactttcctcttctgatgtatgcctggaaagttggccctgctttggcatgtggaaatactctcgtgctcaagactgctgaacaaacccctctatcggctttgtatatctccaaattgttgcatgaggctggactacctgagggtgttgtgaatgtcgtttctggttttggccctactgctggtgctgctcttgctagtcacatggatgttgataagatcgcatttactggatctaccgatactggaaaaattattctcgagttggctgcaaagagcaaccttaagacagtgacactggagttaggaagcaagtcccctttcan

SEQ ID NO: 96283 - DNA, 504 bp, Zea mays
  unsure (1)..(504): unsure at all n locations
gagcgttcgttggtcatntcagatcgtacctgcattctgctctcggaattcccgggtcgacccacgcgtccggggcaaagcagaagttgcggttggcctgttcttcttttcttcgtcgcggctcagatctgtgcgtgcggcgatggcgtcgttctcggaggctccccccgggaacccgaaagccggcgagaagatctttaagaccaagtgcgcgcagtgccacacggtcgacaagggcgccggccacaagcaaggtccaaacttgaacggtctttttgggagacagtcgggtaccactgcaggctactcctactctgcgggtaacaaaaacaaggctgtagtctgggaagaagacactttgtatgagtacctgcttaaccctaagaagtacattcctggaaccaagatggtcttccctgggctgaagaagccgcatgagcgtgctgatctcatcgcgtacctgaaggaagcaactgcatagttcattgacatgcctttttgcan

SEQ ID NO: 96284 - DNA, 500 bp, Zea mays
cgaggctgctaattcagcttagactgactacgtaccgctccggaattcccgggtcgaccacgcgtccgggcacagctatcatccgcgacacagtcgacgtgctcacgaaggtccaggcaataaccaagcggatgcggtgggagagccgcatcatggaccacgaggacggccccttcaacccggagaaggtcctcatggcggtcaagacgtactggaccgccgaagccgaggaggagcactagcacacgagtgacaccgagctcacttgaaagcgtgaaccaagcctgttctacacttctactaccggtcgagagggatggcgtcagcgttttgcgtctcagtgtagtatgtatgtcccttttcaccttttctctagttctttgtagctagctacaatcagatgggaaggtaagggagagttttgagacgggggggggggggttgttggtcctctagttgagatacaggaagcggttttgtagcaggggaaggtttcgctg

SEQ ID NO: 96285 - DNA, 513 bp, Zea mays
agtgctgtggttcccgcactacgtatcgatctactggtccggaattcccgggtcgacccacgcgtccgcccacgcgtccgcccacgcgtccggtttactacttacgttgtacgactctattcccccggttcgctactggcttattaagtttggcgtcattgttttcttgatctctgagatgctttgctttcaccacctgcttttttgtcatctgtgtacattgagtcgacggacaatcattttcttgcttcgagcaggcgagagcagcacacgagttgcagacacaacatggaattacactctgtatataggtttgagtttttgcatatgaaatgcagctcatgtataagatttcagtctatactgctatgatatgttacaagaatatgaggggacctcgttgaatcttaataaatgcgggggggctattattaacaacaactttggctgccgttctataggatccaagcttccttctactgcctccaatgtaacactccctgggcgcgtaag

SEQ ID NO: 96286 - DNA, 502 bp, Zea mays
gatgggctgctgactgacagcaaagtaccgactgccgtaccggtccggaattcccgggtcgacccacgcgtccgcggacgcgtgggcggacgcgtgggttctagatcgcgagcggccgcccttttttgtgttgtttttttttaggccgacgaaggagattgctcggccaattgttctgtagatcaagctgacacaaattgccatagtggcacggcattgtacccagctgtggccgctgggttcgtgcacgctcagctcagttagttccgatctagttttgtaaatttgcgcgctcaaattagtttgttttcctgggacaaattggagcggaagaaacacacggacatcaagatgggtccgcgaggagcatctggagcagcatgtcgttccagacgtcgatggggccggggaggcaccagtgcacgcagtcgttgtacagcgtcacgttctcgtgcggccagtggccgtaccggctcgggtggccgtccggccgaagcaccat

SEQ ID NO: 96287 - DNA, 515 bp, Zea mays
gatggttgctatcgtaagcatattattgaatcgctcgtaccggtccggaattcccgggtcgacccacgcgtccgcggacgcgtgggggcggcgtcgggcgagatgaagcttaacgtcaagaccctcaagggcaccaacttcgagatcgaggcgagccccgatgcgtcggttgctgacgtgaagaggatcattgagaccactcagggtcagagtacctaccgggcggaccagcaaatgcttatataccaagggaaaattctcaaggatgagaccactttggaaagcaacggagttgctgagaacagcttccttgttataatgttgtccaaggctaaggcatcgtcgagtggagcttctaccactactgctgcaaaagctcctgcaactctggcccaacctgctgccccggtgccccctgctgcatcagttgcaagaacaccaacacaggctcctgttgccacagctgaaacggcaccttcaagtgcccaacctcaggctgctccagctgctacggt

SEQ ID NO: 96288 - DNA, 516 bp, Zea mays
  unsure (1)..(516): unsure at all n locations
tagtggctgggntttcatntcnncgtangnacggtctgtacttgtccggaattcccgggtcgacccacgcgtccggatccaaatctttcgaggaagcacttgccgctggattcaccgaagagagcggaagcttgggcgatatttgggaaaccgtctccggcagcgatcttgtgtcgctgctgatatccgatgctgcacaggctgacaactatgagaagatcttctctcacatgaaaccaaacagtatccttggtttatctcatggatttcttctgggacatttgcaatcactcggactcgatttaccaaagaacatcagtgtgattgctgtatgccccaagggaatgggtccatccgtccgcaggctttatgttcagggcaaggaagtcaatggcgctggcatcaactctagctttgctgtgcaccaggatgttgatggaagggcaactgatgttgctttagcatggtcagttgcacttggttcccccttcacgtttgctactactttggaacagg

SEQ ID NO: 96289 - DNA, 508 bp, Zea mays
  unsure (1)..(508): unsure at all n locations
tgcagcggtgctgagttcgtnctgcacgtattgactgtaccgcgtccggaattcccgggtcgacccacgcgttcgcccacgcgtccgggtgggttggcttctcctccccctccggttcgggttcgggttcgtgaggttctccggggttcggtttcgtgggtgagcggatcgagatggcggcgtcggatgttgagtaccgctgcttcgtcggcggcctcgcctgggccacggacgaccactccctccacaacgccttcagcacctacggcgaggtcctcgagtccaagattatcctcgatcgggagacgcagaggtcccgcggcttcggcttcgtcaccttctccacggaggaggcgatgcggaacgccatcgagggcatgaacggcaaggagctggacggccgcaacatcaccgtcaacgaggcccagtcccgcggcggccgtggaggcggcggcggctgctacggtggtggccgtggatgctgcggctactgcggtggcgggcgccc

SEQ ID NO: 96290 - DNA, 507 bp, Zea mays
  unsure (1)..(507): unsure at all n locations
tgtaccggtgctagagtcatntagtatcgtattgacatatcccgtccggaattcccgggtcgacccacgcgtccggttactgattctagccgccgtcgctgctcatctgacattcctcgagaagacgcctgctcggcgccgatcgatacgatggccgtcttctccgacctccacaccggcgacggcctcaagtccctagaggctcacctcgccggcaaaacctatgtgtctggtgactccattactaaggatgacattaaggtcttcgccgcggtgccgtcgaagcctggcgctgagtttcctaatgcctgccgctggtacgagaccgtctctgcggctgtagcctcaagattccctggtaaggctgttggtgtaaatctgcctgcgggatcagctcctgcggcagctgctcctgcggatgaggctgacgacgatgatgaccttgatctttctggtgatgaaactgaggaggacatgaaagcagctgatgagcgtgccgtcgctgcc

SEQ ID NO: 96291 - DNA, 510 bp, Zea mays
atgtctgtgtatagtcatacgtattgctctaccggtccggaattcccgggtcgacccacgcgtccgcggacgcgtgggcggacgcgtgggcggtttcaggtatgtggctcccgagtatgccaatggaggtctgttaaatgagaagagcgatgtctacagttttggggtgctactactggaagcagtgactgggagggatccagttgactatggtcggcctgctaatgaggttcatctggtggagtggctgaaaatgatggttggcactagaagagccgaggaggtggtggatcctgacatggagttgaaaccagcgattcgtgctctgaagcgtgctcttctagtggcactgcgatgtgtagacccagatgctgagaaaaggcccactatgggtcaggttgttcggatgctcgaggcagaagacgtgccttcacgggaggaccgccggagccggagaggccacagcagccacgcagacaacgagtccatggcaagttcaagcgaatttga

SEQ ID NO: 96292 - DNA, 503 bp, Zea mays
ttacgtgctgtgatccgcctatagtattgctctaccggtccggaattcccgggtcgacccacgcgtccggcgaaggagaaaagcagttcttcagctatgagggcacaggaaggaggagatggcgtcaaagaggattcagaaggagctcaaggatctgcagaaggaccctcccacctcgtgcagtgcaggtcctgttggtgaagacatgttccactggcaggcaacaataatgggtccatctgatagcccatattctggtggagttttcctagtcacaatccattttcctcctgattatcctttcaaaccaccaaaggtggcatttcgtactaaagtgttccatccaaacatcaacagcaacgggagcatttgcctcgacatcttgaaggaccagtggagtccggcactaacaatctccaaggtgctgctgtccatctgctccctgctgactgatccgaaccccgacgaccctttggtccccgagatagctcacatgtacaaga

SEQ ID NO: 96293 - DNA, 510 bp, Zea mays
  unsure (1)..(510): unsure at all n locations
ccggctgtgtaacgaacaatgattgactgccgtaccggtccggaattcccgggtcgacccacgcgtccgcccacgcgtccgcccacgcgtccggcactggtctccagggcttcctcgtcttcaacgctgttggtgggggaacaggctctggccttggttccctcctcctagagcgcctgtctgttgactacggcaagaagtccaagcttgggttcactgtgtacccttccccccaagtttctacttcggtagttgagccatacaacagtgtactgtccacccactccctcctcgagcacactgatgtggctatactgctggacaatgaggccatctacgacatttgccgccgatcccttgacattgagcgcccaacctacaccaacctcaacaggcttgtgtcccaggttatctcatcccttactgcctccctgaggttcgatggtgctctgaacgtggatgttaacgagttccagaccaacctggtaccctacccgaggatccacttan

SEQ ID NO: 96294 - DNA, 508 bp, Zea mays
agtggttgactgaataccgaacatcgaagtactgacgtaccggtccggaattcccgggtcgacccacgcgtccgattggtgtgggcaccaaacctcaagaacagactcaagacccaaacaatctgcagaggcaacaacagtccatgaaccaactacttccattgagccaatctcaaaccaatcttgtccaggctcaggtccttatccagaatcaaatgcagcagcaacagcaaccaacatccatggctcaaaatcagcagccagctgccagccagtcactgatcctgccccagcagcagcaacaacagcaacaacatcaacaacaaaagttggtacatcaacagcagcagattttactgcagcagcaacaattgcagcaacagcaacaaaatcagcaacagctaaataagatggctgcacaaatgccaaatctggtatcacatcagccgcaactgtctgatcagcagcttcaactgcaactgttacaaaaactgcaacagcagcagca

SEQ ID NO: 96295 - DNA, 508 bp, Zea mays
  unsure (1)..(508): unsure at all n locations
agagtgnttgctgaatttcgtnacgtaccgcactgtcgtaccggtccggaattcccgggtcgacccacgcgtccgcccactcgtccgcccacgcgtccggatttttggcgcaccggacactgttcggtgcaccaggtctggcgccctccaaaccagccactctcgagaattccagggcagtctccgctatagttcaccggactgtctggtgtgccaccggaccgtccggtgagccagcggagcaacggctaactgtcgccaatggtcgactgcaaaagcgttctgcagtaaacagtgcctcaacagaagtcagagcacagaagttagagggcactgaactgtccggtgcagctagaagacaaacatctccaacggtcaactgctccgaaccctaacagttgcgctgacgtggcgcgcaccggacaatgcacagtggatgtctggtgcgcccatcgccagcagcctttgctaacggctaggaagtggttgggggctataaatagacccc

SEQ ID NO: 96296 - DNA, 505 bp, Zea mays
attgtgctgtgctacgccagactgatcgctctatcggtccggaattcccgggtcgacccacgcgtccggaatttctgcaagcagttatgaaggccagcgacaaaaagtttcagattggtgtacagtcagatccagtggaatttatgacatggctcttaaacacactgcatgcgaaactaaaaagttcaaagaagaaaaacagaagcataatacacgattgttttcagggagaacttgaagttgttaaggaggttcataggaagcatataatggaaaaaagagaggatggcggtgagctgaatggtgaggcaggttcagtggtgggaactgcagatggaattgttactgaaacatccaaggtcccattcctgatgctcggtcttgacctgccaccttcacctcttttcaaagacgccatggagaaaaatatcattccacaggtaccattgtttaacatactgaagaagttcgatggtgagacagttacagaggttgtccgaccttt

SEQ ID NO: 96297 - DNA, 510 bp, Zea mays
  unsure (1)..(510): unsure at all n locations
cgtnctgtactaagacagatcgtatgctctaccggtccggaattcccgggtcgacccacgcgtccgcggacgcgtgggtccggacgcgtgggctacgctcacctttcgtccgggcttgcctgtggccttgctgggcttgcagctggcatggccatcggcattgttggtgatgctggagtcagggcgaatgcacaacagccgaagctttttgtgggcatgatcctcatcctcattttcgcagaagcgcttgctctgtacggtctcattgttggaattatcctttcatcccgtgctggtcaatcccgggcagattaagtgcactaccattctgcaattaccgtactgtttattatgctattctaagagaattgaaaccctatgcccttgtctagtttattcttgctaccatgtattaatgaaacaatttgtagctgaaggaaagtgacacttccagccatgttggttttggcggtgttaagcagaggttatttattgggttaaggttggagg

SEQ ID NO: 96298 - DNA, 505 bp, Zea mays
  unsure (1)..(505): unsure at all n locations
tgtggttcgctgatgtcaacctcgtactgtcntgacgtacccgtccggaattcccgggtcgacccacgcgtccgcccacgcgttcgggcttctcctccccctccggttcgggttcgggttcgtgaggttctccggggttcggtttcgtgggtgagcggatcgagatggcggcgtcggatgttgagtaccgctgcttcgtcggcggcctcgcctgggccacggacgaccactccctccacaacgccttcagcacctacggcgaggtcctcgagtccaagattatcctcgatcgggagacgcagaggtcccgcggcttcggcttcgtcaccttctccacggaggaggcgatgcggaacgccatcgagggcatgaacggcaaggagctggacggccgcaacatcaccgtcaacgaggcccagtcccgcggcggccgtggatgctgcggcggcggctactgtggtggccgtggaggctgcggctactgcagttgcgggcgccgtgattg

SEQ ID NO: 96299 - DNA, 507 bp, Zea mays
  unsure (1)..(507): unsure at all n locations
tggagtgcgtntgtttcagttacgcacgtatcttattctcgtccggaattcccgggtcgacccacgcgtccggtactgcacactgccatcgctctcgtcccttcgctgccgctctatctcggccggagccatgggcggcggtggcgcggcgctgctgctggtgatgtgggcgggcgtggcgtcggcggccgtgtacgaggtgggcggcaccattgggtggaccgtcatgggcaaccccgactacgccgcctgggccagctccaagcagatcgtcgtcggcgacactgttgtgttcacgtataacaagcagttccacaacgtgctggcggtgagcaaggcggactacaagaactgcatcgccaccaagccgacggccacctggtccacggggaacgattccgtcgtcctcaacaccacgggccaccactacttcctctgcggctacccgggccactgcgctgccggccagaaggtggacatccgcgtcgncttctctgctgncccttc

SEQ ID NO: 96300 - DNA, 510 bp, Zea mays
  unsure (1)..(510): unsure at all n locations
acgtactagtgtagtcgcatcactgncatgnccgtaccggtctggaattcccgggtcgacccacgcgtccgcccacgcgtccgcccacgcgtccgggggctgatcgagctgcgcggcatcgagttccggtgcccgtcgaggcccgacgtgaccgtgttcaagggacttgacctgctgatgaaggctggcaagagcatggcgcttgtcggcatgagcggctccggcaagagtaccgtgctgtcgctcatcctccgcttctacgacccgatcgccggaagagtcttgatcgatgggaaggacatcaagaagcttaagctcaagtgtctcaggaaacacatcggcctggtccagcaagagccggcgctgttcgcgacgacgatctacgacaacatnctgtatggcaaggacggggccacggaagccgaggtcgtcgaggcggccaagctggcgaacgcgcactcgttcatcagctcgcttgccgaggggtacaagaccaaggtcggggagccn

SEQ ID NO: 96301 - DNA, 509 bp, Zea mays
  unsure (1)..(509): unsure at all n locations
acgtactagtataagatgagtacgtactgctctaccggtccggaattcccgggtcgacccacgcgtccgccaatcctttgggcacatttgtcatatggatgcttcttgggtatagcattgctgctgcatattctcgatatgacaaagttactgaagattgcagaaagatggaagagctaaaaacgcaggcagaagctgctgatgttgcaaaatctcagttcctggcaactgtgtcacatgagatcagaacacctatgaatggcgtccttggaatgctggatatgcttttaggaacagatctaactatgacacagaaggattatgctcaaactgctcaaatgtgtggcagagcattgattacactgataaatgatgtccttgatcgagcaaagattgaggctggaaagttagagcttgaagcggtgccttttgacctgcgttctctcatggatgatgttngttacttggtttcttcaaagtcacgggagaagtgcattgagcttgccgta

SEQ ID NO: 96302 - DNA, 512 bp, Zea mays
acggctgaaaacgcaacgaaagtatagtatcgctcgtccggaattcccgggtcgacccacgcgtccgcccacgcgtccgcccacgcgtccggcgcacagtcgatagaagcggaaacatacttcctggcaccgtggtcgattcgaagatttgccatcctactgagtttgacttctacctgtgtagccatgccggcattcagggaacgagccgccctgctcactaccatgtcctgtgggacgagaacaagttcacagctgacgagctgcagaccctgacgaacaacctgtgctacacgtacgctaggtgcacccgctccgtgtccatcgtgcccccggcgtactacgctcatctggcagccttccgagctcgcttctacatggagccagacacctctgacagcgggtcactggccagcggtgcccgtggccccccacccggtgcggcacgcagcagcacgagaagggccgggagtgtcgaagtcaggcccctacctgctctcaggagaacgtga

SEQ ID NO: 96303 - DNA, 506 bp, Zea mays
  unsure (1)..(506): unsure at all n locations
cgcgtctgactgtttagccccagtangnacgaacacttatgattttccgaccgaccggcgcgtccgtccaggcgtccggccacgcgttcggtggctgatttagctgcgcggcatctagttccggtggcgggcgaggccccacgtgaccgggttcaagggacttgacctgctgatgaaggctggcaagagcatggcgcttgtcggcatgagcggctccggcaagagtaccgtgctgtcgctcatcctccgcttctacgacccgatcgccggaagagtcttgatcgatgggaacgacatcaagaagcttaagctcaagtgtctcaagaaacacatcggcctggtccagcaagatccggcgctgttcgcgacgacgatctacgacaacatactgtatggcaaggacggtgccccggaagccgaagtcttttaggcgggctagctggcgaacgcgcacttcgttattaacttgctgccggaggggacaagaccaggtcggggagcgcggn

SEQ ID NO: 96304 - DNA, 511 bp, Zea mays
gggatggtgctgaaatcgagatcggaagtatactgcatctgctccggaattcccgggtcgacccacgcgtccgcccacgcgttcgatcaggccgtcccttgccaaagtttggtgaatgggatgtcaacgatccggcttccgcagacggatttactgtcatattcaacaaagccagagatgagaagaagggtgggaatggtcaagacacagactcaccttccaaggaccccaggactgagagggtggagtcttatgctgcaaaaccaagcacgaagaaatggttttgttgtgtgacatccagccctacgcaatcctgaggaaggcaattgcatgcgctggaaatactgcccctttaattttctatacatactatccataagacactgtagaggtacccatggctctctgggctccaggatgggtgtctcataaaactctggcgtgcatgtatgtatggtgtgagagttgtcggcatacatttgcaaagtggacttctgcttgtaattctaaa

SEQ ID NO: 96305 - DNA, 519 bp, Zea mays
  unsure (1)..(519): unsure at all n locations
gacggnntgctctacctgcacatagtagtgctcnttccggtctcggaattcccgggtcgacccacgcgtccgctgatcaaggccaaccatccgccctacggcatggacatgttgaaccacgaggccaccggacgctactccaacggcctcataccaacagacctcattgcgcccagcccagcagctcggcgtgaagcagctgcttccgccctacctgggcgtggacctgagccccgatgaccttctcaccggcgtcagcttcgcgtccggcgccaccggattcgacccgctgactcccgtcgtggtcagcgtcatctcgatggaccagcagctcgcctacttcgacgagtaccggtggaggctggtggacatcgccggcgaggccgagacggcgcggatcatcgagggcgcgctgttcctggtgtgcgccggcaccgacgacgtggccaacacctacttcaccacgccgttccgcaacgccgaatacgacatcccgggctacgtggacctgctggtggg

SEQ ID NO: 96306 - DNA, 512 bp, Zea mays
  unsure (1)..(512): unsure at all n locations
tacggtntgctgtattcgacacatgactgactgccgtaccggtctggaattcccgggtcgacccacgcgtccgcccacgcgtccgcggacgcgtgggtgctcggccttgagacctaccctggcgtcaagcgcatcaccatcaagccccagactgaccgctgggtgttccccgagaccaacactggcatcattgtccttgctgagggtcgcctgatgaaccttgggtgtgctactggccatcctagctttgtcatgtcctgctcattcactaaccaggtcattgcccaacttgaactgtggaaggagaagagctctggcaagtatgagaagaaggtgtatgtgctccccaagcaccttgatgagaaggttgctgctctccacttgggcaagcttggtgccaagctgaccaagctcaccaagtctcaggccgactacatcagcgtgccgatcgagggtccctacaagcctgcccactaccggtactaggcagccagcacacggcttgcagctca

SEQ ID NO: 96307 - DNA, 515 bp, Zea mays
  unsure (1)..(515): unsure at all n locations
agggacggtccgnnaaaactgatacagcatgtttatgtattctcgtccggaattcccgggtcgacccacgcgtccgactcggaggggtgcctgttcgacaagcacgcgcggacggcgctggccttcgtgacgctcaagcacgacggggagcgcgagttcatgttctacaggaacccgagcgcggacatgctgctgacggaggcggagctggacctgggcctggtgcggcgcgccagggtgttccactacggctccatctcgctcatctccgagccgtgccgctcggcgcacatggccgccatgcgcgcagccaaggccgcgggcgtgctctgctcctacgaccccaacgtgcgcctcccgctctggccgtcgcccgacgccgcacgcgagggcatcctcagcatctggaaggaggccgacttcatcaaggtcagcgacgacgaggtggccttcctcacgcgcggtgacgccaacgacgagaagaacgtgctgtccctgtggtttgacgggctcaa

SEQ ID NO: 96308 - DNA, 535 bp, Zea mays
  unsure (1)..(535): unsure at all n locations
cgagtcggtgctctgnnccgtttcagnctgncggtcggactatcgactggagttaccgggctgacccactcgtccggtttttgagtcgcggattctgatggacgtataatcgtagtcatgtttggactttaactttgggttatgttggaaagtacttgaaagacttttcctgtggtaattctaggcgtatgttgctgtgctggttggggtttactggtgaaccagagtttttctatctcccactatgaatttgttacctcaagttacctggatgttcactaattttgttggtacaaaaaaaaaaaaaaagggcgggcgctctagaggatccaagcttacgtacgcgtgccttgcgactgtatagcctcttctatagtgtcaccctaaatcaattcactggccgtcgttttacaacgtcttgactgggaaaaccctggcgttacccaacttaatcggtttgtagcacattccccttttttcagctgtctttatttctaaaaaggcctgaccgattcgcctttccaacaatttggtt

SEQ ID NO: 96309 - DNA, 535 bp, Zea mays
  unsure (1)..(535): unsure at all n locations
ggtggttcgtctcancctagnctagctacatgcatcatcctcggatatccggccgaccacgcgtccgtccacgcgtccgccctcttccgcacccgcttctcgcttcggattccggattccctctggggtttccctaacgaaggtagccatggcggggagaggtaaggcgatcggctcaggcgccgccaagaaggccacgtccaggagctccaaggctggcctccagttccctgtgggaaggatcgccaggttcctcaaggccggcaagtatgccgagagagtctgcgccggcgcccctgtctacctcgctgccgtgctcgagtatcttgctgctgaggttcttgagctggccggcaatgcggcacgtgacaacaagaagacccgcatcgtatcgtgccacattcagctcggcgtccgcaacgacgaaaagctcttccgctttgctgggacggtgaccatcggtagcgggggtgtaatgcccaacattcataaacctgttggttcctaagaaagcctgcggttgtatctccaatgt

SEQ ID NO: 96310 - DNA, 528 bp, Zea mays
  unsure (1)..(528): unsure at all n locations
ggatgggctctgnnccttacngttcgcatcngcgtgactgattcggnctggaatacccgggccgacccacgcgtccgcccacgcgtccgcggactcgtggtttcacttgcaacacagtcctgcttcctttcggccattgacgtccacaatcattattcttatcaggtcatgctacctgaagcaattgcaatagttatggcacctactgacacaagaaaacatggtatatttcatctcacggatccaggtggcatgggcgtgatccatgattgtcaagagagaggtttccatcctcacaaggcaccacttgatgggtcgccaatatatgagcagtgctcccatgtgtacatggacaccgatataaagttcgatatgattgatctgcgacaaagatgacgaagctcacctttgggtttattttgcaacctatacttctcgcagttaaatcaattgctgcccttattttttcttagctcaaggattgtgaatttctatgtacgctggtgtacatagctattgggttgtatg

SEQ ID NO: 96311 - DNA, 511 bp, Zea mays
  unsure (1)..(511): unsure at all n locations
gacttgggacgcttgnacgtactgactcgcnttggattacccggccggacccacgcgtccgcccacgcgtccggaaggttattactcttgtcttggggctccttgttgctggaactaaataccgaggagagtttgaagagagactaaagaaacttatggaggaaattaagcaaaatgaagacattattctctttattgatgaagtgcacacactgattggagcaggtgcagcagaaggtgcgattgatgctgctaatattttgaagccagctcttgctagaggtgaacttcagtgcattggtgccacaacactggatgagtataggaagcatatagagaaagatcctgccttggaaagaaggtttcaaccagttaaagttccagagcctactgtggatgaaacaatacagatcttaagaggacttcgtgagagatatgaacttcatcacaaactgagatacacagatgatgctttaattgctgctgcacagctgtcttatcagtatatcag

SEQ ID NO: 96312 - DNA, 538 bp, Zea mays
  unsure (1)..(538): unsure at all n locations
cgtggtgttgtctcggcctttccttgccatgtacagtaggactgctccggnatggaatacccgggccgacccacgcgtccgcccacgcgttcgatcaagttgattgaatgtgggaggacgctgtgtcaaagcttggccctgctgaaagcttcctcaaggcggtgctcgcgatcccattcgctttcaagagagtggaagcgatgctgtacatcaccaacttcgatttagaggttgactacctcaagacctcctacaaaactcttgaggcagcatgcgaagagctacagggcagcaggttgttccacaagatactagacgcggtcctgaagacgggcaaccgcatgaacaccggcacgaaccgtgggaacgcccacgcctttaagctggacgcgctcctaagctagtcgacgtgaaaggcctttaccggaagacgaccctnctgcactttngcgtcgaaaaaatcatcaggtcccaatgaaccaaccattttaccaccgggccagaattttgtcaggcaagcgccctttcagataccttg

SEQ ID NO: 96313 - DNA, 524 bp, Zea mays
tgaactgtgtcagccctcccttagccaaattgatgtcctgcacggcctggaatacccgggccgacccacgcgtccggccaaagagaaggaggagaaagatcttgtgtctcagcagaacatgtatgcgcaactgcttcctcttgctctgcctgctccgccaatgcccggcatgggtggccctccacctccgatgggcggaatgggcatgcctccgatgggcgggatgggcatgccgccgatgggccctggtccgatgccagcattcgggatgccaccaatgggaagctactgagatgtttttttttggcagaaagcttagatgatgatttgatatgttcctgtgtaagcagaggcggaaacctcattggagttgtagatggttacattttggaattaatattctttatggtaccaggaaatttttggccagtgaaaatctggccagagtcatcgaattgaacgggatgattaagttgggtgaacatgaaccggtgaaagctgggaccaattgtatagtgggaaga

SEQ ID NO: 96314 - DNA, 520 bp, Zea mays
  unsure (1)..(520): unsure at all n locations
gcggacttgctcnnnaagtttcanccgtactntacagtgcntcgtaagaccaggctccacccacgcgtccgcgtgcctttccccacctactctcgcggcttatgccagccagtctagggtttcggtcccggcgtgcttatccgcccccgccggccatgtcgaagcaaggagggaaggccaagccgctgaaggcgcccaaggccgacaagaaggagtacgacgagacggatcttgcatatctgcagaagaagaaagatgaggaaaaagcactgaaggagcttaaggccaaggcacagaatggcgcgattgggggctcgggtctgaagaaaagtggaaagaaatgagactggtcacccgtctccaatacctagaggatgataaggcagctgtctatctgtgttgcgcttcactaagtgtgattgtaacagtggtacctcttgtgatctgtgttccgcgatgttgcagttggttgcttgatcgaaagatgtttcaacctcccatttgctagctatgatacaaa

SEQ ID NO: 96315 - DNA, 521 bp, Zea mays
  unsure (1)..(521): unsure at all n locations
ttgcgtctactctcgnccagcctcancgagcantgctncggntcggtaaaaccggccgacccacgcgtccgcaagcaaccaccgccttcccgatctcgtttagaggaagccccatcccgaaaccgccgccgtattccaatggcgcccaaggccgagaagaagcccgccgccaagaagcctgcggaggaggagccggcggcggagaaggccccggcggggaagaagcccaaggccgagaagcggctccctgcgggcaagtccgcgggcaaggagggtggcgagaagaaggggaagaagaaggcgaagaagtcggtggagacgtacaagatctacatcttcaaggtgctgaagcaggtgcacccggatattggcatctcgtccaaggccatgtccatcatgaactccttcatcaacgacatcttcgagaagctggcggcggaagcggccaaactggcgcggtacaacaagaagcctaccattacgttccgcgagatccagaccttcgtccgtctcgttcttct

SEQ ID NO: 96316 - DNA, 517 bp, Zea mays
  unsure (1)..(517): unsure at all n locations
tcgttgctcatgnnccaggttttcgagcagtaccaatgctcggtaaacaggctgcaccacgcgtccgagctcatggatccagtggatcgcgccgtgtgtatcgacagaaacgaatgatcaaaaacgcgggagtctgctgcccggtcacgggagaggaagcaggcttatatcgccgagctagaatcgctggtaacgcacctcgaggaggagaatgccgagttgttgagagaacaggaagagcggcaccagaagcggcttaaagagctcttggaacgggtgacgccagtcattctgaggaaaaaaccatcaggagatcttagaagaacgaactcaatgcagtggtagattggagccaagctcagtcgccgtctctttacagttattaacatagaatttgcccctgtatgtcatttttctatttatatatgcgccaactaagttgtagtatcttagctgaaatagcatgggcaattagccgacacaaatgttaaaccaaatcatattatgtaggagtgct

SEQ ID NO: 96317 - DNA, 534 bp, Zea mays
  unsure (1)..(534): unsure at all n locations
nggctgtatcggctggcactancatgataggataaggattgatgcaccggtttggaatacccggcccgacccacgcgtccgtgaagacgatggtgcctgcggtggtggcgtcgctggtgggcggcgtggagcggctgctggacgagggcgcccgccacgtcgtggtgccgggcaacctccccgccggatgcatccccatcacgctcaccatgtacccgtccgaggaccgctccgagtacgacccgcgcaccggctgcctcaagaagtacaacagcgtcgcgctctaccacaacgccatgctccgcgtcgcgctcgaccgcctgcagcgccgccgcccggagtcccgcgtcgtctacgccgactactacacgccctacatacagttcgcgcgcacaccgcacctctacggctacaagcgcggcgctctgcgggcttgctgcggcggcggcgggccgtacaactacaacgtgagcgcgtcgtgcgggctccccggcgccaccacctgcgaggaccccgacgcgcacgtcagctggg

SEQ ID NO: 96318 - DNA, 512 bp, Zea mays
  unsure (1)..(512): unsure at all n locations
agcattttctctgtcctgnactacatacatcttcctcttagagaagacgcccnggacatttatccgcgggagtttagatattttctccactacttctaacccacagggagccgagatcgcgggggacatttttgacgagtttgacgcccgcatgaccaacgccaaagagcatggcaagctagtggtcatttacttcatggccccctggtgcagagggtgccagatgatggccccggtgtacgcggactgcgccagcaagtacccttccgcggtcttcctcgaggtcgacgtcgacgaactgctggaagtcgcgaagatctacggcgtccatgtgatgccgaccttctgctacatcaggaacggcgagacgctcgagagctttgctaccgtcgacgaggacgagctccgggacgccgtcaggaagtacgccgtcgttggcactacgacggctcctgccttggcgttcgcctaattcatgagatgtgatgtgtagcaaataactctctcccatg

SEQ ID NO: 96319 - DNA, 525 bp, Zea mays
  unsure (1)..(525): unsure at all n locations
gatggtgtctctagcataaagattaatcgcaccatcgttccggaatccgggccgacccactcgttcggcaagaacaaagggcgcttttataaatgtttcttactttgaacaatttggtgttaccttgatagaggctgccatgcacgggctgcctgttattgcaacaaaaaatggggctcctgttgaaattcatcaggttctggaaaatggtctccttgttgatccccatgatcagcatgcaatcgcagatgccctctataagatgctgtctgaaaagcaattttggtcaagatgtcgagagaatggattaaaaaatatacaccagttttcttggcctgaacattgcaagaattacttgtcaaggatattaactctaagtccaaaacatnctgctttcgcatgcaaagaaaaccattaagtgcctgtgaagtgcangaagcatatattccgtattgcttgagactccgntaacaaggaaggaattattcagattatcagatattctggttgaggttcacgctctgt

SEQ ID NO: 96320 - DNA, 532 bp, Zea mays
tgatgcggtcgctcggcctttcctgtctctgtatgtcgctgcctcgggctcgaatacccgggccgacccacgcgtccgcgccaataggattcgcatctccatatgcactctgggctgaggtgctgatactcggcatccgctccttcgtcgggccagccattgttccaggccacatgatcacattctggctctggattatactccgtcaggtggaggctatcgagacacatagcggctttgatttcccattcaccccgacaaagtatattccattctatggaggagcagaataccatgactatcatcattatgtacgaggccagagccaaagcaattctgcttctgatttcacttactgtgattacttatatggcactgacaaaggttacagattccacaaaacatacctagcaaagcttaaggatctggggcataatgatggccagaaaggagacggcagctgaccccgctacttttaactggattagattgcatgatatagtgcattctgaggtgttttattggcaacttg

SEQ ID NO: 96321 - DNA, 500 bp, Zea mays
  unsure (1)..(500): unsure at all n locations
gtggttgtctattcaatccatacgagntcttcgctgtagaaaggctcaccaacgcttcgtcgactttccaaaatttaccaacgccgtgatcttcgagtcccggcgggcgtgctgcggcacgttcacgatcgagacgtcggtgctgtgccaccagggggcgccggggacgtgcaccaacgccacgggctacgtcttctgggacggcttccaccccacggacgccgccaacaaggtgctcgccgacgcgctcctcctgcagggcctacagctcatcgcgtgagccacagccacgcaacggcctcccgtcgcccttatacgtaccttgctgcttctgtcgttccctcctgctactgtgtctcgtgtgcttgtctgtctgactgtctgtctgtctgtctgtccatgatctctcgtagctttgtgatgcttggaaacacttgggagtgctgtaagatttctggtctgtttaatacattcatcgtcttcccaaaaaaaaaaaaatt

SEQ ID NO: 96322 - DNA, 523 bp, Zea mays
ttggcttgctcgtgccggatccgcgacgtagtactcgtcccggtttggaatacccggctcgacccacgcgttcggcgagggagaggcatggctgctccgaagttcgtgacgctggcgctggccgtgctcctggcggcgaccgcggtggctcccccggccgcggtgcgcgcggcgatgtcgtgctccaccgtgtacagcacgctgatgccgtgcctgccgttcgtccagatgggcggggccatgccgccccagccgtgctgcggcggcatccgcagcctgctgcagcaggccaacaacacccccgaccgccgcaccatctgcggctgcctcaagaacgtcgccaacggcgccaacgggagcggcacctacatcagccgcgccgccgcgctgcccagcaagtgcggcgtcgccctgccgtacaagatcagcaccaacgttaactgcaacacgattaattaaatgaggcgtcctgtgcgcgtccgggcgaggaatgcatgcatggccgaaagtaataaagtaatgc

SEQ ID NO: 96323 - DNA, 529 bp, Zea mays
  unsure (1)..(529): unsure at all n locations
atagaatctcactatgtatgtggggggatagtagtcctgctccggnttnggncagnnnncngtgnncgnnggggcgttggcggattcgngtgtggactcgtggtctcccaaggtcccttttttttctcgatctggaagcgccgcagtagcagccatggacgtgagcggagcaggcgggaaggcgaagaagggcgcggcggggcgcaaggccggcgggccgacgaagaagtcggtgtcgcggtccgccagggccgggctgcagttccccgtcagccgcgtcgggcggtacctcaaaaagggccggtacgcgcagcgtgtaggcacgggtgcccccgtctacctcgccgncgtcctggagtacctcgcggccgaggtgctcgagctcgccggcaacgcggcaagggacaataagaagacgcgcatcatcccgcgccacgtgctcctcgccatccgcaacgacgaggagctcggtaagctgctggccggcgtcaccattcgccacggcggcgttcttcccaacattcacact

SEQ ID NO: 96324 - DNA, 534 bp, Zea mays
tgttgcggtgctctggccatggcacagactagtgggatcgctgcaccggtctggaatacccgggccgacccacgcgtccgcccacgcgtccgcccacgcgtcctgcgaagtcgaccctccctccttcgctccttccccgccgcctcccggccgtcgccgccatggtgaagtactcgcaggagccgggcaaccctaccaagtcggctaaggccatgggcagggatctgagggtccacttcaagaacacaagggagacagcctttgcgcttcgcaagttgtctttgaccaaggctaagcgataccttgaggatgttattgctcacaagcaggcaattcccttccggagatactgtgggggtgttggtcgcaccgcgcaagctaagtctcgccactccaatgggcagggccgctggccggttaaatcagccgggttcatcctggatttgctgaagaatgctgagagtaacgctgatgtgaaaggctcggatgtggacaacctctatatttcacacatccaggtgaaccaagcccaaa

SEQ ID NO: 96325 - DNA, 525 bp, Zea mays
  unsure (1)..(525): unsure at all n locations
atgcgtcttgctctnnccaattacancgatnatctgtcactggcttcgtttaccaggctcgacccactcgtccggcaacttgatatgtcataattatgtctatttgtatgcctctctcgaaacatgccagacgatggtgcataaaatggcaccgagggaggaggctctagagttaaatatgctgtgatggatgttcccatcaccttaccttcgttgaaaccagcttttgacaagcctaaccccaaacaaggcattggtatgctgtcatggagcatcgacagccactatttcttcaccaggaatgacaacatgccaactgttctctggatatgggatatatgccgccttgagcttgccgctgtgctcgtgcataaagatccaatccgtgctgtatcatgggaccctacctgcacactccttgttttatgcacagagagcctttacttgttcatgtggaccccatccggtgcctgctttgttaacattccccttttgaaacttccaattgttgtattgtatgtgatt

SEQ ID NO: 96326 - DNA, 540 bp, Zea mays
tcggaattctggtgtcatgacactgttttgaaggagagatgatactctcggattggaacacccggcccgacccacgcgtccgctcacgcgtttcgtggttgctctcgacgtttatccgattgaactggttgtgtggcttccagccctgtgcaggaagatggaggtcccttactgcattgataaaggaaaggctcgccttggatcgattgttcacaagaagaatgcatcagtcttgtgtctgaccactgtcaagaacgaggataagcttgagttcaacaagatcttgaacgctcttaatgcaaacttcaactacaagttcaatgaggtcacgaacgaactcgagaggcggcatcattggatacaagtcacatgccaagaccaacgaccgggaaaagcttctcgccaaagaagctgcgcagcggatgacctaaatcgtctactgctgtgtctggcctgtaatttgacagggtagaactgatgaactcgtattggggctttccgaatctagttcatatgtttctgttcacaaaacatggtaat

SEQ ID NO: 96327 - DNA, 527 bp, Zea mays
agtgcgtttgcctccgttttgtgagaagtagtcgcatgctccggtctggaatacccgggccgacccacgcgtccgcccacgcgtccgaccgtgacaggttatctttcaacaaattccagattgccaagatcacaactgaaggatcaaccatctacccaccatattccttgaagacctactggggcttctctcactttgaaaacccagcccagggcgctgtgggatcatggtagattaatgcgccgcgcacgccgcatatcatgccatgaacttagttgaggccaatctgtgctgctgaaatcaaacacttatgaacgtttgttctgaacatcactggaactctccatttgcttgtatgacatgcttatggttcagcgagtttaattccaacgtttggtcaaaaaaaaaaaaaaaaagggcggccgctctagaagatccaagcttacgtacgcgtgcatgcgacgtcatagctcttctatagtgtcacctaaattcaattcactggccgtcgttttacaacgtcgtga

SEQ ID NO: 96328 - DNA, 556 bp, Zea mays
  unsure (1)..(556): unsure at all n locations
agaaatggtgtnnncctaaatctcagcctgatnctttaccactccctccggnatccgggcaagcgccggatccacgcgtcccgtgactcgtggtcggtgccccgttgcgtctctgtaaaaccagacggcgaaccactgctgcggtccactgcatcccgggtccgtcttctcgtgccatgctacggttgctttctcccgtcggcgcctgcgcagatttggccgccgtcgccgctgacccaggctgtcttgatggcgcccgatgcagaagccgctaaggggacaggcaccgttccacaaaggtgctctgccattgaacgaaaggatactggcatgcatgtccaggaggtctgctgctggacacccttggcatgatctggagataggccctggagctccaaccatattcaactgcgtcattgagatacccaggggcagcaaggtttaatatgaacttgacaaggaaactggactgatcaatgcggaccgcgtgctgcattcatcagatgtttaccctcacaactatggatacattacttgcacgctttgtgaagacagt

SEQ ID NO: 96329 - DNA, 522 bp, Zea mays
  unsure (1)..(522): unsure at all n locations
gtgcgtgtctgtngnttagccncattacgnattgntacggnttggtataccaggctcgacccacgcgtccgctcaagcattcccttggccagtcacaccttgttcttctgacccgccataatccagactccctggacgagtctgtcctgtggacagagagcagggacgttggtgatgggttccgctgcattaggatggtcaacaacatctacctgaactttgatgctttacatggagacaaggaccatggtggtgtgcgcgacgggacggcccttgtgctgtgggagtggtgcgagggagacaaccagcgctggaagattgttccctggtgaacaaggaaatgtgtgaccgagcccgcaccaaggaggagctcctgccgtaataagtgaagtgattggtactgaagtttctggaaataagatgcttttcctagatgcctgtttgtgtgagtatttgcgtttccaatttcgttttcatgattattaaacgccttgattttaatattatgaatgtgttgctact

SEQ ID NO: 96330 - DNA, 516 bp, Zea mays
  unsure (1)..(516): unsure at all n locations
cggtgctcgtncctgccgtatcgtgnactctcccggntcggtattaccggccgacccacgcgtccgcccacgcgtccgcccacgcgtccgagagctcttataaggcactagcacgcaaaaaccccacgagagagacgaatcttccgaatctctcggtgcgatggcgctctccgaccgctcccgcgagtcgctcctcccgagcttcctctacgcctcctcggcgcgctctttcgctgccacaggagccgccgcgcgcctccctgtctcctccccggcgcctgccgcggctggagcaggaggcggcgtgccgttctcgatccaggcgcccaaggagaagatcgagatgtactcgccggccttctatgccgcctgcactgccggaggaatcgccagctgcgggctcacccacatggccgtcacgcctctcgacctcgtcaagtgcaatatgcagattgacccagcgaaatacaagagtatctcatctggatttggtatcctgttaaaggagcaaggggg

SEQ ID NO: 96331 - DNA, 521 bp, Zea mays
  unsure (1)..(521): unsure at all n locations
tggcnaacacctgncctgccttttgattgatcacgggcctcggtataccaggctcgacccacgcgttcgcgaggaaggagggagagagcacgggggattgttcgaagatggatgccggagcaaaggtggtgaagaaggccgcggcggggcgtcgcggcgggggcggccccaagaagaagccggtctctcgctccgtgaaggccggcctccagttccccgtaggccgtatcggccgctacctcaagcagggtcgctactcccagcgtgtcggcaccggcgcccccgtctacctcgctgccgtcctcgagtacctcgccgccgagctcctcgagttggcggggaacgcagcgcgggacaacaagaagaaccggatcatcccgcggcacgtactgctggcgatccgcaacgacgaggagctcgggaagctactggccggcgttaccatcgcacacggcggtgttctggccaacattcaacctgtgctgctccccaagaaaccggtggcgctgctggcaagaaag

SEQ ID NO: 96332 - DNA, 462 bp, Zea mays
  unsure (1)..(462): unsure at all n locations
gaagtccgcctcatttgtaggcacactctcggaataccggctcgacccacgcgtcggccggggtgaccttccaaggcattanttagctgacatatagaaagcaaggaagcggatgccgtgccagctgctgcacgcataaatcttgaatgtgctggttgagagttttttagttgctctgcaggattagacaatgttctaagactaccatgttttaagtctgctgatgctatattcatgaacgattttgcagctagctgtaaaaaaaaaagatattatattatttttattatattaaatgttttattttatatttttttttgaaattaatgcttttaaaaaaaaaaaaagggcgcccttttaaagaccaatttagtcccataaggataaaaagattttttaattgcctataatttaatattggccggttttaaaacttgatatgaaaaccatggggttccaata

SEQ ID NO: 96333 - DNA, 544 bp, Zea mays
  unsure (1)..(544): unsure at all n locations
gaaaaatgttccatgattcgaggtanagtatacttctaccggatcggaatacccggctcgacccacgcgtccggctgcattaacaccactccagtatcagtttatatggtgtaggtccgcaacagaaaagttgttctgtgagctgggtgcccactaacgtctcaggcagaagcaaggcggcgttgccttcgcatgatcctgaaatggaggtagatccatggaatcttctcgaagatggcacaagctgcccctcaacagcatctggaagccatggcgcgagtggagtgacgggtgaccatgctaatctgaaagcgtgcagctggcttaagggtgctgtgagggtgaggaggacagaactgacctacattggctctntagacgatgacacctgacgtgtgtatgattattttggtgaattgtggaagaaattagtctcacctgttggcactggagtgaatggtggaaaccaaccattggccttggctttaggatggttgntggttggtgtaaatacatacacatcggtggacatctttgtgttgat

SEQ ID NO: 96334 - DNA, 552 bp, Zea mays
ggttaaatgtctgccctgccatttgtactattagtatgcactcttcggaatataccggctcgacccacgcgtccgcgccaggagtgctggaatcagtaagattgaaattcaaacgatcccagggaagcagttaagggagcagatgttgtgtatacagatgtttgggccagcatgggccaaaaggaagaagctgattatagaaaacagaagttccagggattcacggtggatgaagccctgatggagattgctggcccacaggcctaccttatgcactgtttgcccgcagagagaggagtggaggtgacagacggtgccatcgaggctccaaattcaatcgtgttcctccaggctgagaacagaatgcacgctcagaacgccatcatgcttcatgttctcggtgcttaactctcctattgcacaccaagggttaacttttcttggaattgcttagggattgatgcaattttggctttagggcaattatgagagcttaatttaacgaaatggtcaataagcgtacttgtcagtaacctggtaactggtcttaaa

SEQ ID NO: 96335 - DNA, 547 bp, Zea mays
  unsure (1)..(547): unsure at all n locations
ngtaaaatttcctcatgtttttgactattagtatgcttgctccggttcggaatacccggctcgacccacgcgtccgcccacgcgtccgcaatatccatcaatacttaattgatatggcagatgaggtcattaatgctggtcgttttgatcaaagaacaacccatgaggaaagacgaatgactctggagacactcctgcatgatgaagagagatatcaagactctgttcatgatgttccttcattgcaggaagtgaaccgtatgattgctaggactgaaagtgaagtcgagctttttgatcagatggatgaagactttgattggacaggtgatatgacgaagcatgatcaggttccaaagtggcttcgtgttaactccaatgaagtagatgctgtggtggctagtctgtccaaaaagccgtcaagaaatatgtcatctgggggcattgctttagacactaacgaaacactttaaaaaaaaataaaaagggcggtcgttctaaaggaccaacttacgtccgcctgcattcaacgtgatacttttttttt

SEQ ID NO: 96336 - DNA, 526 bp, Zea mays
  unsure (1)..(526): unsure at all n locations
atgctgtcttgtctcgnnccagggttcangacgnatntactgtaccgtttcggaatacccggctcgacccacgcgtccgtacctctggcgtttaattagggaaagtagtaggacaaaaggctggaatctctttctgccgtagaagagaaaataagagtagttctctctgttctaggattgctaccttcaagttatcatgaggctttgcaacagctgcgggataaggcactgagacgagcttccatcaccgaggagcttgtggtgcagaagattgaagagaggactgcagcaaggaaggcaaagcagtatgaaaaatccgacgagatccggaaagaactggctgccataggaattgccctcatggatggccccgacggaaccacttggagaccatctttgccaattttagaggaagcggtggttgcgaaaacatgatctgtgcaagggattccaattcgacccatggacaccagttctagtcgtgtatcatggatttgctatatgtgacgaacttgttcggttgata

SEQ ID NO: 96337 - DNA, 543 bp, Zea mays
  unsure (1)..(543): unsure at all n locations
agagtggtccccctcagctagattagtagtcttctacccgttcggaatacccggctcgacccacgcgtccgcacgggaacatcaagtcttccaacgttttgcttggttcagactttgaggcttgccttacagacaattgcttgtcgttcctcctggaatcatcagaagtcaaagacgatgctgcttacagagcaccaganaacatganatccaacagaatgctaacgcccaaatcagacatatatgcttttggtgtcctncttcttgagctccttagcggaaagccaccgcttgagcactcaatcttggtcgcaagcaatcttcaaacctatgttcagtcagcgagagaagattaaggaattgacagtgatcgcattacaaatgatcgttgacataggcaccaacttgggtccgttcttaaccagaaagtcgacccgcaactggcaaagtactaaagatgaatcaagaggtgaaaggaaggcgacccaacttgtgataatgacagtgatcttaccaggcactnctagttgcctgtgtgggtcc

SEQ ID NO: 96338 - DNA, 544 bp, Zea mays
  unsure (1)..(544): unsure at all n locations
agaaatgtcctcatgaatggggagtagnctgcataccctntcggaattaccggctcgacccacgcgtccgcccacgcgtccggccacgtcagacaacatcaaatgttgggcacctaaataagccatctattcaggctcttatccatgggctgaatagacactactactcaattgcaatcaattaccggaaaaatgagcttgaggagaaaatgctgttgaacttgcacaaaaagaaatggaccgatgggctaattttgaagaggtttgacactcactcgaaaaccaacgagcagactgtccaggaaatgctaaacctagccatcaagtacaacaaggcagtgcaagaggaggacgaactgcctnctgagaaacttgcgatagcaaatgtgggtcggcaagatgcaaaaaagcatttggaagagcatgtgtcgaatttgatgtcatcaaacatagttcagacccttagaaccatgctcgacacggttgtcttttagtctactaatattatggtgtcccaactgaacatagcacactatcggagcac

SEQ ID NO: 96339 - DNA, 523 bp, Zea mays
  unsure (1)..(523): unsure at all n locations
agtgggttgctcatgnnctaggcncancgtagnagtactantccggnttcggaatacccggctcgacccacgcgttcggagagggtactccctctctacgagcgctgtgcgggagattgtcagggacataaaggagaagcttgcctacgttgcccttgattatgaacaggagctggagactgccaggagcagctcctctgtcgagaagagctacgagatgcctgatggtcaggtcatcaccattgggtcagaaaggtttaggtgccccgaggtgctgttccaaccatcccttgttggcatggaatcgcctggcgtccatgaggccacgtacaactccatcatgaagtgtgatgttgatatcaggaaggatttgtatggtaacgttgtcctcagtgggggatctaccatgttccctgggattgccgatcgtatgagcaaggagatcacgttcctggctcctagcagcatgaaggttaaagtgattgcgccacctgaaaggaagtacagtgtctggatcggtgtn

SEQ ID NO: 96340 - DNA, 522 bp, Zea mays
  unsure (1)..(522): unsure at all n locations
atgcgcttgctctanttggtcgacttcgatacgactgtaccggctggaatacccggctcgacccacgcgtccggccgccgtcgcaggctttcccccatcgtctcacaagatgcagatctttgtgaagactctgacggggaagaccatcactttggaggtggagtcctcggacaccattgacaatgtgaaggccaagatccaggacaaggagggcatccccccggaccagcagcggctcatcttcgccggcaagcagctcgaggactgtcgcaccctcgccgactacaacattcagaaggagtccaccctccacctggtgctccgccttcgcggtggctccaagaagcgtaagaagaagacgtacaccaagcccaagaagatcaagctcaagcacatgaaggtgaagctctccgtgctgcatttctataaggtggacgactcctcatgctatgtgacccgtcttcgctaggagtgctctaacacatattgctgctcggttcgtttcattgccaaccacttttt

SEQ ID NO: 96341 - DNA, 526 bp, Zea mays
  unsure (1)..(526): unsure at all n locations
ngtaaatgctccctccagctagtacagtagtcttcatacccgttcggaatacccggctcgacccacgcgtccggtttaagatattcaacactaacaacttgtgggtgaaccttaaagctatcaagagactcgtagaggctgaggcacttaagatggaaattattccaaaccccaaggaagttgatggtgtgaaagtccttcaactcgaaaccgcagctggtgcagctattcggttcttcgacaaagcgattggaattaatgttccccgctcaaggtttctcccaatgaaggctacatctgatctgatgcttgtgcagtctgatctttacaccctggttgatgggcttgttaatcgaacccatccagagcgaatcaggctaccttcaattgacctggacccgagtcaaaaaggtgccaatttctggtccggtcaagtcattcccacataagtgacctggcaacttgaaggttctggtgatgcctggttggctctggattacactaaaggcaaggtgcaattatcgcc

SEQ ID NO: 96342 - DNA, 549 bp, Zea mays
  unsure (1)..(549): unsure at all n locations
taagatgtccctccgtacttcgttctagagtgcacctcgntcggaattaccggcccgacccacgcgtccgagctcttgcactagctagagaccgaactgagagttattggagaaccatgatgaggtctggccttatctcgctatgtttccacctagccctggccatcacactggctgcaagtgttcctggccttgctcgtagtagggtaatcgacatggaaccgcaactcaaaccgacgctgcaactagaaccaaagcatggtgtatctcaaccagacagaaaccaagaacccaaaccgacaccacaatctgagccaaaaccagagcctaaaccggaacctgaacctgcaccacaaccagaccccaaacccgcaccacagccggacccaaaacccgcaccacaacccgaccccaaaccagaacccaaacctacaccacagcccgacccaaaacccttaacaacaccaggccccaagctcaaacccaaagccagcggcccagtctgaactcaaacccagaacccaaacctacaccataaccggacccaaa

SEQ ID NO: 96343 - DNA, 548 bp, Zea mays
  unsure (1)..(548): unsure at all n locations
agagactgtggcccctccagtttcctattgctancttcttccggttcggaatacccggctcgacccacgcgtccgcccacgcgttcgccctcgcgttttcccacgcgtccgactagttctagatcttgcgacagtactcactgacgctgaggtccccctggacggctacggtggtggccgtggaggcggcggctacggcggtggcgggcgccgatcggtttcggagaagagaagcaaatcaagatgtttctcggctcgctcccgcggcgcccgagcaaggaggctgcttacaagcagctgcngtcggacatcatcatcatggcctgctgcgccgtcgtgaatgcggccaccccttacattctgcaattcgctcgcccgcgacggcgacattcaggaactcaagctagatctggaagcccgtccgttgctttcccaccttcagaggtgcttcaaaggcaaccgttagtttgagctcacctcaatgtacctatggagttagtgcttttgtgcccgcttaaggttttttggtggtacaagtttagtgacag

SEQ ID NO: 96344 - DNA, 524 bp, Zea mays
  unsure (1)..(524): unsure at all n locations
atgcgttttactcgnnctagcctcatcgatgcancgntcgtacctgnttggaatacccggctcgacccacgcgtccgggaaaggagaagagagggtcggaatatattcggccgaggagggtgccgtgatcgcgtgccacaccaaggacgagttcgacgcccgcatggccaaggccaaggagcagggcaagctggtggtcatcgacttcatggccccctggtgcagtgggtgccagatgatggccccggtgtacgcggactgcgccagcaagtacccttccgcggtcttcctcgaggtcgacgtcgacgaactgctggaagtcgcgaagatctacggcgtccatgtgatgccgaccttctgcttcatcaggaacggcgagacgctcgagagctttgctaccgtcgacgaggacgagctccgggacgccgtcaggaagtacgccgtcgctggcactacgactgcttctgcctcggcgtacgtctaattcaggagatgtgatgtgtagcaaatagcgcgcgcgcacg

SEQ ID NO: 96345 - DNA, 522 bp, Zea mays
  unsure (1)..(522): unsure at all n locations
actggtttgctcgncctaggctcattgangcantgctgtaccgtcttggaatacccggctcgacccactcgtccgcccacgcgtccgcactttgcctctgtgctggaaagggcagaaagcattcaaatctgtgtttgacgtcaagaatgaattcaagtcaatgtttctgagctttgccagtgccaagaatgccgccatggagatcccacctgaaaactacctcattgtcacaaaaaatggaaatgtgtgcctgggcattcttgatggaacggctgccaagctgagtttcaacgtaattggagacatcacgatgcaggatcagatggtgatctatgacaacgagaaatcgcagctgggatgggcgcgtggggcatgcactaggagcgccaagtctattctgtcttcctttccctgagctcagttctatgtacttctgatagagtttaagaaaatcactatattaaaccttctcgcaatgcatgaatttcctaactgaagaaggaaggaaaaagagagagagat

SEQ ID NO: 96346 - DNA, 544 bp, Zea mays
  unsure (1)..(544): unsure at all n locations
cgaaaaatgattgcattgtattgaaattatagtagtgttgctccggttcggaataaccggctcgacccacgcgtccgcccacgcgtccgagataccattctcgattgaaaacaatcctgaaaccaagccatgggtctgcaggagaaatttgaggagtatgctgttaaggcaaagaccttgcctgagaacacgatcaatgagaacaagctgatcctatacggtctctacaagcaagccacggttggagatgtgaataccgatcgtccgggcatattctaccaaaaggacagggccaagtgggatgcctggaaagctgttgaaggcaaatcgaaggatgangcgatgaatgactacatcaccaaggtgaagcagctccaggaggaggctgccgcctcttaaaagtctcttaatagtgttgccaaacagctatttgtcagatgagctttgtgccatttcctcattagaagtatatcattcgatccattggggatctgtgaaccatgtacctgtttatgtaactggttaccagaggtaatcatctatt

SEQ ID NO: 96347 - DNA, 531 bp, Zea mays
  unsure (1)..(531): unsure at all n locations
actggttctctgannccggttcacgacgctatactgtacctnttcgatacccggccgacccactcgtccggcggacgtcagcacgttcctcctcagcctcggcgtgctgtgccagtcgctgccgcgcgtgctgcgctacgcggtgggcgccggcgagcactccgtcgccgcggccaccacggtgctcgacctctcccgcgcctgcagcgtcgtcatgctgctcgcctacgtcgcctacctcttctatcagctcaagacgcacgcgcagctgttcgagccgcatgaggtggacgacggctgttaggcttaagaagactagtaagccgttttctgtttttgttagctgttatatttatgctggttttatactctgtctctattttaatttctgtctcagttctgttttctgttttttatgtgtttacttttaatattttggtgtttttttctttatgttttataattttttttaattttatttattttgtggtttcttttcatatttattttctaattatttatttttttttt

SEQ ID NO: 96348 - DNA, 525 bp, Zea mays
  unsure (1)..(525): unsure at all n locations
gttggtgntnctcgnnccaggttcancgangnantagctgtccgtnttcggaaaacccggctcgacccacgcgtccgcggacgcgtgggcggactcgtgggcttgatgcgtgggaccgtgacttcatcaagaacatgatcaccggcacctcccaggctgattgtgcggtgctcatcattgactccaccactggtggctttgaggctggtatctccaaggacggccagacccgtgagcatgcgctccttgctttcactcttggtgtgaggcagatgatctgctgctgcaacaagatggatgccactacccccaagtactccaaggctcggtacgacgagatcgtcaaggaagtgggttcctacctgaagaaggtggggtacaacccggacaagatccccttcgtgcccatctctgggttcgagggtgacaacatgatcgagaggtcgacgaacctggactggtacaagggccccacccttcttgaggcgctggaccagatcaacgagcccaagcgggccttggacg

SEQ ID NO: 96349 - DNA, 542 bp, Zea mays
  unsure (1)..(542): unsure at all n locations
cgataaatgtcgccctcgaatggaaggtagcctgataccggttcggaattaccggctcgacccacgcgtccggggaacgggagcggtaggggaatccaattgcgatggcctccgactcgggcgatttcggtggggagaacaagtcgttggaaacggtgaggcggctgctggaggagaccttcacgagtgaggcagatgcggaggcgctaccgagcttgccctcggggttctacgacgccttcgtcctgaggggaatccgcgtcgtccaggccctccagcccggcacactcctctgccacttcaacgtgccctccagactactcaactcgggcggcttcctgcacggcggcgcaaccgccttcctcgtggatctggttgccttcgncgccttcgccactgccgggctacgcaccaggggctcaccccttgagatgaacatctcctaccttgatgctgcttttgctgatgaagagattgatatcgaggcgaaagttcttcgcgctggcaaagcagtaggggttgccttgtgggactgaagaaga

SEQ ID NO: 96350 - DNA, 549 bp, Zea mays
  unsure (1)..(549): unsure at all n locations
gttatgcgttgnncctagttttcgtggatgcntcgttcgttccgggtaggaatacaccggctcgacccacgcgtgcgcccacgcgttcgcggtcgcgtgttctctttcactcgggcatcatcgacatcgagttcaccagggtgccgtgcgagtgccctggcctcaagatcgggttccacgtggaggagtactcgagccccgtctacttcgcggtgctggtggagtacgaggacggcgactgcgacgtggtgcatgtggacctgatggagtccaagacggcgcgcgggccgtcgactgggcgctgggctttgatgcgctagtcctgtggctctcgatggttcatggacaccaaccaccgcatggcatcgtccttttacattcgcattccgaacgagttcgtcaagacgcttcgttgtcaggaaccttatccctgtcatctgtttgcccaacaacttataccggttctttgttcaatacatgtagttagcttgttttggcgccttagttatttctactaacttgggccggtaggatgtgcatacttccata

SEQ ID NO: 96351 - DNA, 523 bp, Zea mays
  unsure (1)..(523): unsure at all n locations
tgggtttgtctcnnttaaatcgattcnagataagactgtaccggtttggaatacccggctcgacccacgcgtccgcccacgcgtccggaatttccaactgcgagttttcaggacaccacccagatccacacccacgtgtgctactccaacttcaacgacatcatccactcgatcatcgacatggacgcggacgtgatcaccattgagaactcgcggtccgacgagaagctgctctccgtgttccgcgagggcgtcaagtacggcgcgggcatcggccccggtgtctacgacatccactcccccaggatcccgtcggctgaggagatcgccgaccgcatcgacaagatgctggcggtgctggacaccaacatcctctgggtgaaccccgactgcggccttaagacccgcaagtacacggaggtcaagcccgccctgaccaacatggtctccgtcgctaagctcatccgcacccagcttgccagcgccaagtgagcaccttttttttgcctttttcgattccgag

SEQ ID NO: 96352 - DNA, 552 bp, Zea mays
  unsure (1)..(552): unsure at all n locations
ntgataagctggcttcgccctggcattctgccntagatgncacacccgntcggaattaccggctcgacccacgcgtccgcccacgcgtccgcctacgcgtccggaatcagatgtaggctggccggcgatgtcgccggcactcggaaggccgtcatcgacatcgtcgagctctgctacaaggccggcgcgtggaagacgctaaacgaccagatcgttctcctctccaagaggagaggccagcttaagcaggccattactgctatggttcagaaagcaatggactacattgatttgacaccagacattgacacacgagtcgagctaatcaaaacactgagcagcgtctctgctggcaaaatttatgttgagatagagagagcaagattgatcaaaaggcttgcaaatatcaaagaggagcaaggaaagattgacgaggctgctgatttgatgcaagaagttgctgtcgaaacatttggctgcatggcaaaaacggagaaaaatggtttcaatcttgagccaggtccgctattcccaagactgtaagattatgta

SEQ ID NO: 96353 - DNA, 545 bp, Zea mays
  unsure (1)..(545): unsure at all n locations
gaaatgtttgccctcacgtcctagttatgctacactactaccggtttcgaatacccggcccgacccacgcgtccggacgcgccgccctactggatcttactncttcacgcacctgcccacggggcggttctccaacgggctcaacatccccgacatcatcagcgagcacctcggctcccagcccgcgctgccgtacctcagccccgacctccgcggcgaccagctgctcgtcggcgccaacttcgcgtccgccggcgtcggcatcctcaacgacaccggcatacagttcgtgaacatcatcaggatctggcagcagctgcacaacttccaggactaccagcagaggctggccgcgttcgtcggcgacgacgcggcgaggcatgtcgtgagcaatgcgctcgtcctcatcacgctcggcggcaacgacttcgtcaacaactactacctggtgcccttctccttccgctcccgacagatcgccatcccagactacgttcccgacctcatcttcgagtacagggaaattcttacgccggctggacaac

SEQ ID NO: 96354 - DNA, 542 bp, Zea mays
  unsure (1)..(542): unsure at all n locations
agtgttgattgcactgnccattncgcancgtcagttcagttccggttaggaatcaccggctcgacccacgcgtccgcccacgcgttcgagctcacgttgaaattttcgacctgcaaaggagcatataaggcataccagaatctgcagaaggtatacatgggagcgacagtaatatgctgtgctgccgctggtattcctccagatgttcagctcatgttatcgatcggtacggctgcttaagtcagtgccgctgtagcatacgcattccatgagctccagaagtatgttgtattcgaggaaaatgttaatgctgacattgaatgaaagaatctagaatgaaagtaagtagacatcgcttgacagattagacatgattgagtctaaggctctaagcgtcttactaggggaaagtacttatatgccgtgataggtctatttgcttacatatgatttatgtatataagctacaattaagagtaatcatataaaggtgtaaaaatagaccattaagcacctttgaagaaaaattgaatttagtaata

SEQ ID NO: 96355 - DNA, 527 bp, Zea mays
  unsure (1)..(527): unsure at all n locations
tgagcttgctcattngcaagtcacancgatgcattcccctgtcctgttcggaatacccggctcgacccacgcgtccgcccacgcgtccgctcattcagaacattcttggtcgcttcaccactccactcgccggaggccgtctgtcgccgccgaggggatcggagcaagatgttcttccacatcgtgctggagcggaacatgcagctgcacccacgacactttgggccgcaccttcgcgacaagctcgtttccaagctcatcaaggacgtcgagggcacctgcagcgggcggcacgggttcgttgtggcgatcacgggtgtggaggacatcggcatggggctcatcctgtaaggcacgggatacgtcaccttccccgtcaagtaccattgcgttgtctttagaccctttaagggcgatatcctcgaagctgtcgtttccatggtgaacaagattggcttatttgctgatgcttggccggttcatatctttgtgtccaaccattttatttcatactattttgagatatg

SEQ ID NO: 96356 - DNA, 522 bp, Zea mays
  unsure (1)..(522): unsure at all n locations
agacntttggcttgnnttagggtcattancgnatcgatcgtccggtttggaatacccggctcgacccacgcgtccgctgaggtagacgaaatttttgatgtactcttggagatgttcctcaaggatgagaacagggcatcgtatgagcgagaaaagatgggccagacattcacagttcattacttcacttatgagaacggaatccagaagtacttaatctggggtctgaccgcccgcatcttgatccatgctgcttcagttgtatacgagcgaccgccagactttacagagcgaagagcacatttcaaattgccaaagttcacaaaggactgctcttcaatgcgcaggacctgctaaacattagtgcacactgcctacgctgctatctcagctacatgctatttggattacatgatgttgcaccaacagagtttattgaatctaataggcgtccaaatcacttgatgtcatatgaaattaaattctttcgtcataacacttttatggtatttatgtttagat

SEQ ID NO: 96357 - DNA, 539 bp, Zea mays
gtaatgtgcccctccctgtatgtagcctgcatacccgttcggaattaccggctcgacccacgcgtccgcggacgcgtgggcggtcgcgtgggcggtctcgtgttcggacgcgtgggtgggattccacatcttaagtggttcggggtggaggggcagtacaatgtcatggtgattgatctgcttggtccaagtctggaggacttatttaactactgcagcagaaagttctcccttaaaacagtactaatgcttgctgatcagatgatcagtagagtagaatacatgcacacaaggtgtgttctacatcgcgacatcaagcctgataattttctcatgggtttaggacgtaaagcaaaccaggtatttgtcatcgactaatggcctgccaaaaagtattcggatcttcaaactcattagcaccttccattcctgggaaaccaaaattttaccaggacaacacgatattccaatggaaatacccatcttggaggtgagcaaagcataaaaattatcttggaatcttttgggtatgtgcccat

SEQ ID NO: 96358 - DNA, 541 bp, Zea mays
  unsure (1)..(541): unsure at all n locations
ngaaattgttgcactgccatgccatgttatgtatcacttcttccggttcggaatacccggctcgacccacgcgtccgcaacactctccccagctcgagttaccatttcgagaaccaatcaccaagcaaaagcccgagaaggatagaacaaacaggagacagatggcggctgcagcgaaggcgtcgtggatggtggcgatgagcgtcggggccgtggaggcgctcaaggaccaggcgggcctctgccgctggaactacgcgctgcgctccgtccaccgcgccgtcaaggccaacgctcccagcttcgtgcaggccaggaaaaagctggcgctcgccgtcgcggacaaagccgtcgctgaggatgtgatgaagaccgtcatgtaccttaactgcttgggccccaactagctagggcctctgctagtttcggctttctgcaaccgtaccgagcttcggttcaaatctgatccatgactgggtggctttccgaaccattgtaccttagagtattgtaccccatgataataatgataggtctgtcg

SEQ ID NO: 96359 - DNA, 549 bp, Zea mays
agatgagtgtgtttgcccctgaacttgacctatctgcatacttctaccggttccgaatacccggctcgacccacgcgtccgtgattcacctgcccatagtgattgttgatggagatgtttcagagaaaaaagtagaagttcaagaccagaatgaagtgggtgggatgccctcacgacaagaggaggaggcagcaattaagaaaaagtatggaggaatattgcccagaaagactccacttatatctaaggatcatgaacgtgcttactttgattctgctgattgggctctaggaaagcaaggtggtggtcttttcatgcctaaatgtccttttgaggcactgtgtcttaagcttcagcctacgcaacagattgcccgggcctgctgaactttatatgcgtctggtgacagtgtcaacactttgaatttgtccccctaggatctggtactgcaaggagacccttgcctgcagggtaaatatgttagtgttagaactttggtttaatttcttggcattatttcttcttgcttttatcttgattaattcaaag

SEQ ID NO: 96360 - DNA, 524 bp, Zea mays
  unsure (1)..(524): unsure at all n locations
agcggcattgctcgncctagcttctgtgatgttgtcatcgtaccggnctcggaatacccggctcgacccacgcgtccggccctgtatgttgttgtagtgttctggacttctggtcaacttggtatgatttaaaactaagttcgggcataatcaggaaagtgaagcagccagctcaaatgaagaatggtgtatcttggcgctgaaacgattgaaagaggcctctccgttagctttgaaggtctcactgcgatcgatacgcgagggtagatatcagacacttgatgagtgccttgtccgtgagtaccgcatgtccatgaatggaatctcaaagcaattttctcatgaattctgcgagggagtcagagcacgactagtcgacaaggacttcactcctaagtgggatcctcctgcccttgagtatgttacgaatgacatggttgacgcatacttcgcacctcttggcgattcggagcctgagttgaagctgcctatagaatcgcgagaggcatttgtatgatcacaan

SEQ ID NO: 96361 - DNA, 530 bp, Zea mays
  unsure (1)..(530): unsure at all n locations
agggcatngtcggctgncctagcctcgangtacgnatcgntcgtcctgnttggaatacccggctcgacccacgcgtccgatctcctcgcatttcttcccatccctttttgcaacccaaaccccaactcgccccgcatcgatggcgcccaaggccgagaagaagcccgcggcgaagaagccggcggaggaggagcccgcggccgagaaggcgcccgccgggaagaagccgaaggcggagaagcgggtccccgctggcaagtccgctgccaaggagggcggcgagggcaagaggggcaagaagaagggcaagaagagcgtggagacctacaagatctacatcttcaaggtgctgaagcaggtgcacccggacattggcatcttctccaaggccatgtcgatcttgaactccttcattaacgatatcttcgagaagctcgctgctgaagccgncaagctcgcgcgctataacaagaagcctaccatcaccttccgtgagatccagaccttccggcgccttgttcttcccgggg

SEQ ID NO: 96362 - DNA, 522 bp, Zea mays
  unsure (1)..(522): unsure at all n locations
atgggcattgctcnncctagtccatcgatgtatgcgctgctccggtttggaatacccggctcgacccacgcgtccgcccacgcgtccgaagcgtttgccgaggcctgcgacgccgggaacatggagcacgcgttcaaccagatgcgttccgagggcatgaggccggacactaagaccttctgctgcctgatcgacgggttcagcagggcaggccaattccataaggtggtaggcatggtgaagctcgccgagaggctcgacgtgcccgtgaacacgcctttccacaacgctgttcttggcgcgtgcgctagagcggatgatcttgtggagatggagagggtgttcaggcgcatgaagcatacgcagtgcgagcctgatgcttcgacgtactctatcttggtggaggcttatcgcaaggagggaatgaccgacaagatctatgctctgcattaggagaacccggctctggtttcagcttgatttgtcatggtttgaatgacccagtgacttgagtcacggtcc

SEQ ID NO: 96363 - DNA, 530 bp, Zea mays
  unsure (1)..(530): unsure at all n locations
tcttcgacgggtangcatcagcaatcctccttagaaaacccggcccgacccactcgtccgtaaaattggaacgatatagagaagattagtatggcccctgcgcaaggatgacacgcacaaaaagagaaatggacccaacattttctatagtcgattttggtaaaaaaaaaaaaaaaaaaaaaaaaaaaaaaaaaaaaaaaaaaaaaaaaaaaaaaaaaaaaaaaaaaatgaaaaaaaataaaaaagaaccaaaaatttgtactactttaatacaacttaaaacaatataaatggtaataataaaattaaatttattggctttgatttttataatttaataaattgataaaaccttggagtatacctattttatttgtatttcattatatattcatttttaaaattctacttaaattataaaaatttcattaactatgtggtatatttcaaaaaattgacataccttaaatattttaataaatatcatcattttataaaataaaaaaataatttattatttatataaaaag

SEQ ID NO: 96364 - DNA, 521 bp, Zea mays
  unsure (1)..(521): unsure at all n locations
aggtttnaatagtgtagtggtttgaaaggagtaagtatgtctcgaattaccgtgctcgacccacgcgtccgcccacgcgtccggatggactgcagtatgtggagttgaagctctaccttgtattgcactatctacacttagtgcctcagtgatgcataaactacgaccgcagcctgcatgggatcgtacctgcactgcagcagctgcagctggcctcctctgggagttgagctcgcggcctgagctcattgcatttgggttggaaaagcaagccgaggcggtggagtgctcgttagacaacttgctggatgctctcactgccagacggcttcgtctgggccgatcgataactcggaaacagagacatagtaggaactgcatatagggaaagaagaaactcacagtaacagaggagcatggtgtgccatcaagtggaaggctgatttcattcttttttgtagaactcaggagctgatcattgtcaacaagttttcttccctttctatataaggtcctagatc

SEQ ID NO: 96365 - DNA, 527 bp, Zea mays
  unsure (1)..(527): unsure at all n locations
agtcaaatctgagncctgacttttcacgcattggaatccggcttccgntaaggatacccggctcgacccacgcgtccgcacgatcggttccaatcgactttttngttgaatcgcgactaatccaggccgtgtgcgtgtggggctttggactctgctatgcgtgtccctgaattggactctgcgtgttcggcaggctgcaagccgacactgttgcagctgttcggactgctgcagctgcaatccataggagagaaaaatactggagaagcctcagccgtagacggaatgcatccgcatctagccgcatggatacaagcggtaacacgatgctaactaagctcatcagcagacacgtttgaatctactgctggaaaatgggataacttaaataggtagataacgactataataatctattgtgatgaatggtatgtctcactttttagttgactaatgttatggtaacggcttttaagtgaaaatttttaattttttgggaacaaaattttgatatttattggtctatt

SEQ ID NO: 96366 - DNA, 523 bp, Zea mays
  unsure (1)..(523): unsure at all n locations
agatnaataatgttttgttttttgttatgaaaaatgttgtatcgggtcggaattcccggctcgacccacgcgtccgctcaacttcctttggtttcaggtttgcttatagaggattgctgtgattactcaaggtgctgatccagtggttgttgctgaggatgggaaggtgaaaacgttccctgtgatcctattgcccaaggagaagcttgttgacaccaacggcgcaggtgatgctttcgttggaggcttcctctcacagttggttctaggcaagggcattgaagactgcgtgagggcaggttgctatgccgcaaacgttatcatccagcgcccgggctgtacttacccggagaagcctgacttcaactagtgcaaaactgaggcacgtcatgagagggactgttataggcacacttaattgttaaccagtgcgtggttcggtgtctacacaccctgtattcttccgaggcttctcttctgatccggccaatatttttgccgtgaaaattgtgttctgcaactt

SEQ ID NO: 96367 - DNA, 516 bp, Zea mays
  unsure (1)..(516): unsure at all n locations
nttttaattaacttgtgtttgctgagggagagcttctttcggttcggattaccgtgctcgacccacgcgtccgcccacgcgtccgggctgaacttacctttggccatactggcaagacagttttgttcgtcctcctaggagtgggggccgtcgttctgttgtcatttttcattttcaagtattggcagaagaagaaaagggaggaacaacatgcacgtctactaaagctatttgaagaggatgatgacattgaggttgagcttggtcttagagactgataatcttcaatgtacagcaagagtatctcggctgaccaggttttgctggcttgccttcagagcattttcacgttaatgtaaagaatttgttgtatttaaacttggtagacccccacaagaaagttcctgtgtacttccactttatatgaacatctttgcgtgcaaggtgtgcttgaaaatagctttaaagaggaagtttcaaggttttcagaacattcctggattttaaaggtttctt

SEQ ID NO: 96368 - DNA, 522 bp, Zea mays
aggttatataattatcttagtttgagggaatagtagtgttgcatcgattcgaattaccgtgctcgacccacgcgtccgcctacgcgtccggcctctaggattcgattggcctgtatgatggtcacttcacaacatcggctctctctgggtttgtccgtgctcagggcgatgcagacagctccttggacaggctgtggcagaagaagaaggctgatatcaagcagtagattttacatctagtttaccaagaattggacactgccttagctatgttttgaattcatgtcactatatgcaatgttgtgatttcagctggtaccttaaatctgaagatttagtatctttgttgggttccttctgagtttgatgtgtggtgttcgtttaattcccttgtacaaccccatttagtatcattgtgatgattttggattcaatcttgctcgagtcagggtacgattccaataaaaatataaagaggaagaaaaaaaagggcggccgctttaaaggatccaagcttacgtt

SEQ ID NO: 96369 - DNA, 516 bp, Zea mays
aagtggtcatttgttttttttggaagggaggtagcttgcgattagcgtctcgacccacgcgtccgcctacgcgtccgcggtcgcgttggccgttagcgtactctttctctatcgactggcgacgactccgtcaccgtcgccgctctacgcgagacgcccaggtcttcgccaacgacgagcatccgggttagagaggaagaaattgcaaccgaaacaatggcggcagattccggcgctcgcagacaaccaagcttcaccaaggtcgaccagctgcgccctggaacccacggccacaacctcatcctcaaggttgttgactccaagatggtcgtccagagaggccgcgagggagggccccagggaagacagatgaggattgcggagtgcttggttggtgatgaaaccggcatcattgtcttcactgcatgaaacgatcaagtggatggaattaggcctggaacaactgttgaactgaggaacgcctagttcgacatgttcaaaggtcgatgcggtttt

SEQ ID NO: 96370 - DNA, 524 bp, Zea mays
  unsure (1)..(524): unsure at all n locations
ngtttgaatgtggcatgttattttgttgagagggagnatcctttcggttcggaattaccgtctcgacccacgcgtccgcctacgcgtccgccttcgcgttttggcattttactttaatcaagtcatggctgctattgggggaaacactgctggtccaggtgatgctgttctcaatgtatacataaatcatgacaagaaatttgcttttgtggagatgagatctgttgaggaagcaagcaatgcaatggccctggatggcattatgttcgaaggggcaccggtgaaggttagaaggccaacagactacaacccttcccttgcagccgccctgggcccaagccagccaagccccaatctgaatcttgctgcagttggcctaacagcaggatctaatggaggactagaaggtccagaccgtatttttgtgggtggcctnccgtattacttcactgaagcgcaagttcgggagttgcttgaatcattcggtcctttttgagggtttgaatctgggaaagatgggaaac

SEQ ID NO: 96371 - DNA, 513 bp, Zea mays
tgttgcgtgttagtgtttttggggaagtagtattcgctcggattaccgtgctcgacccacgcgtccgcctacgcgtccgccctcgcgttcgcggatgcgttggcgctggccatgggggagacactggcaatgtcacctgatatcatcaaagggaaccagatggcgtcctcggtgttcgagatcctggaccgtaagaccgacgtccggatcgacacaggtgaggacatcaagagggtcgaggggctgatcgagctgcgcggcatcgagttccggtacccgtcgaggcccgacgtgaccgtgttcaagggacttgacctgctgatgaaggctggcaagagcatggcgcttgtcggcatgagcggctccggcaagagtaccgtgctgtcgctcattcctcggttctacgacccgatcggccggagaagcttgatcgaatggaagacatcaagaaccttaactcaaatgtcttatgaaacacatcggcctgtccagcaagaagccgcgcttttcgtt

SEQ ID NO: 96372 - DNA, 519 bp, Zea mays
agtttttattgctgataatttttttgggaagagattagcatcagaataaccgtgctcgacccacgcgtccggttatgggtgctacataccggccaaacatcatttatcctgctcttagaagatttggaaggtttgaccgggaaattgacattggagttcctgatgaagttggccggcttgaggttctccgtattcacactaagaacatgaagctagctgaagatgttaatttggaactcatttcaaaggatacccatggatacgttggtgctgatcttgctgctctttgtactgaggctgctcttcagtgcattcgtgagaagatggacatcatagatcttgaggatgagacaatagatgcagagatattgaactcgatggctgttacaaatgaccatttcaagactgcgcttgggacaagcaacccatctgctctccggtgaaacgttgttgaaggtccaaatgtctctttggagggatttggtggctggagaatggtcagagggacctccaggatct

SEQ ID NO: 96373 - DNA, 521 bp, Zea mays
  unsure (1)..(521): unsure at all n locations
ggataaatgggtatgttgtggagggaaaggtagtcttctatcggatcggaattaccggctcgacccacgcgtccgatttgacagtggtagtacctattctgattttactgctcaaccataccaagctgttgtttctgcgctcaaaggtggtctcagcaaatcacttaaacaggtgtcagatcccactctgcctctgtgctggaaagggcagaaagcattcaaatctgtgtttgacgtcaagaatgaattcaagtcaatgtttctgagctttgccagtgccaagaatgccgccatggagatcccacctgaaaactacctcattgtcacaaaaaatggaaatgtgtgcctgggcattcttgatggaacggctgccaagctgagtttcaacgtaattggagacatcacgatgcangatcagatggtgatctatgacaacgaggaatcgcaactgggatgggcgcgtggggcatgcactaggagccccaagtctattctgnctttccttccctgagcctaatctt

SEQ ID NO: 96374 - DNA, 528 bp, Zea mays
  unsure (1)..(528): unsure at all n locations
agttaataaggaatgctttctacgtctttctacgaccgtgtttgtctaggatcagaatacccgtctcgacccactcgttcggttctatcttactattgaagcgtttgattgcaataccaagaagctnnatgaagctaaggtctggtagaagccatgggagaacttcaagcagctgcaggaattcaagcctgttgaagagggtgctagcgcctaaggatctgtcgtctccctgtgcaatttgctgcctgaagcgcaaaactaagttacagaataaggagctgcttcgtaacatgccagagcatgcaccctcgcgtaatttcataaaatcacagggctcttaatgtaatatcttgaattgccgtgccatgtgtaataagtaatatcatgaataacagttgctattatgggttctaaaggtttattaacagccatccatgggccatggcagaattctcatattaacttgttgaagtctttgttggaatatacatgacagaattctcaaaaaaaaattgtttaaataaatat

SEQ ID NO: 96375 - DNA, 519 bp, Zea mays
  unsure (1)..(519): unsure at all n locations
gggtntttagatgttgtatttttttggaagaagatttgcttggatttcccggctcgacccacgcgtccgcctacgcgtccggactggactagacttttacatgctgacacggccgagaagcagcttgcattgcatgcgtagtacgtacccagcagcagctagcactagcagtccatcggagcgacgatggtgagaaggacggtgctggcggcgctgctggtggccgccgccctcgccggcggcgcgcgggcgcagctcaaggaggggttctacgactactgctgcccacaggcggagaagatcgtcaaggactacgtgaaggcgcacatactccacgcgcccgacgtcgcctncaccctgctccgcacccacttccacgactgcttcgtcaggggctgcgacgcgtcagtgctgctcaacgcgactggcggcagcgaggctgaaaaagacgcggcgcccaacctgacgctgcgcggtttcggcttcaatgaccggataaggcccctgttgagaagagtt

SEQ ID NO: 96376 - DNA, 523 bp, Zea mays
cgcagaatgtggctcctaagtcttttaatgcatgtgtgctactcggttcgaatacccgcctcgacccacgcgtccgcttaaccctcgttcctctagccttctcgtgcagccacagcctccatttctcctccgacggcggtgctgctagctcaaccatggcggactccaaggccacctcggcggtcaccctccgcactcgcaagttcatgaccaaccgcctgctggcccgcaaacaatttgtgcttgaggttatccaccccggccgcgccaacgtctccaaggcggagttgaaggagaggcttgccaagatgtacgaggtgaaagaccctaacaccatcttcgtcgtcaagtttcgcacacacttctgtggaggcaagtccactggctccggcctaatctacgataacctcgagcctgccaagatattcgagcccaaatactgtcttatcaggaatggtccatgctcctaaagttgagaaagttcgctagcaaatgaaattgctgttgaactcggccatgtttt

SEQ ID NO: 96377 - DNA, 522 bp, Zea mays
agttttctttgcgcctcccgttatattagcatgcactcggtcgaattaccgtgctcgacccacgcgtccggatggacatcatagatcttgaggatgagtcaattgatgcagagatattgaactcgatggctgttacaaatgaccatttcaagactgcgcttggaacaagcaacccatctgctctccgtgaaactgttgttgaagtcccaaatgtctcttgggaggatattggtgggctggagaatgtcaagagggagctccaggagactgttcaatatcctgtggaacatccagagaagttcgagaagtttggcatgtctccatccaaaggagttctgttttatggtcctcctggttgtggtaaaaccttgttggcgaatgcaattgccaacgagtgccaggctaacttcatcagtgtcaaaggtcctgaattgcttaccatgttgtttggtgagagttgaacccaacgtcccgaaatttttgataagctccgcaatttgcttcctgggccctcttttttat

SEQ ID NO: 96378 - DNA, 523 bp, Zea mays
gttattattgccatcaggtcttctcggaggagaagtatgcatcgatcagccggctcgacccacgcgtccgggttcacttctccagttaaagtgttcgtattcattgcgccgccgcagccaaagtcgggcctcttcgttggcatcaacaagggtcatgtcgtcaccaagcgcgagctgcctcctcgcccgtgccaccgcaaggggaaatcaacgaagagggtgtctatggtcaggggcctgatcagagaggttgctgggtttgctccttatgagaagcgtatcactgagcttctgaaggttggcaaggacaagcgtgccctgaagcttgctaagagaaagcttggaactcacaagagggcaaagaagaagagagaggagatggccggcgtcctcaggaagatgaggtcggctggtacgcacactgacaagaagaaatagagagcatttcaaggtcatggaacctgccaaagattatgttccagtgtctgattttccatacatgtaggacctaatagacaatgca

SEQ ID NO: 96379 - DNA, 517 bp, Zea mays
agttagagctctagtgtttctggggagtagtactcgctcgaattaccgtctcgacccacgcgtccgctcttccccacgagctcttgcggcggctcggttgcggaattaggaggcaatggggcactccaacgtctggaactcgcaccccaagaactacgggcccggatcccgcgtctgccgtgtctgtgcgaaccctcatggactgatcaggaagtacgggctgatgtgctgcaggcagtgcttccgcagcaatgccaaggacattggcttcatcaagtaccgctgaaatcaggtgggaatggaccatgtggtagaggcgaggttgtagttttatttccagtaatttagatgttttgttcaaaagtctgctagtaaagactgctacgtttatgatggagaacttagccatgttggtcatgttggtcatattgatcatgagttacctatgttgagcttaaactatcatgtgtccaaccatcgctgggtagtatgattacggaaaggatgatggttaagg

SEQ ID NO: 96380 - DNA, 514 bp, Zea mays
ggataatgtttttactcttttcgggggggtagttatcggatcggaattcccggctcgacccacgcgtccgtgttgctcttctctatgcatcgtatgagtgcgataagttgcagacagcaaattttgatcagaagattggtgtgcaaatcattcagaatgctttgaagacacctgtacacaccattgcctccaatgctggggtggagggagcagtagttgtgggcaagcttttggagctaggaaacactgaccttggttatgatgctgctaaagacgaatacgttgacatggtgaaggctggtatcattgatccgctaaaggtcatcagaactgcattggtggatgctgctagtgtgtcgtccctgatgaccaccacggaatccataattgtagagatccccaaggaagaagcaccggctccagcaatgggtggcatgggtggaatggattactaagtgttaagcacactcacgatacaacaacatcaaagcaaagatgacgaggttggtggcat

SEQ ID NO: 96381 - DNA, 523 bp, Zea mays
aggttttatcgatgttttttttaggggaggaaaaatagccttcgaattaccggctcgacccacgcgtccgcccacgcgtccgccctcgcgtccgaaagtggctatcgaattagaagatgctggacaagctgtgggacgacgtggtggccgggcctcgcccggagacgggcctcgagaagctccgcaaggccaccaccgcccgcccgctcgtcatcaacaaagacgcggacggcggcagctacaagcgggcgcagtcgacgccgtcgaccccgacgacgccggtgacgccgtcgtcgtcgacgacgccgcgcggcgccggcaacgtgtggcgcagcgtcttccacccggggagcaacctggccaccaagggcatgggcgccaacctcttcgaccggccgcagcccaacttccccaccgtctacgactggctctacagcgactagaccaggagcaaccaccgctagatcgggcgagaatgattgacagttgaaaggccatgtttgctagatcctggtgggtattc

SEQ ID NO: 96382 - DNA, 519 bp, Zea mays
gtaagagctgtgattgttttctcgaagaaggattgtgtcggattacccgctcgacccacgcgtccgcctacgcgtccgccttcgcgttcgtgcttgtggtgcaggacgggccgccgccgggcggtttcgcgcccgtgcgcttcgcccgccggatccccacctcggtgcccagcgccaccgccatcttcctcaccaccttcggtgctttcgcatatggcatgtaccaggtcggccaggggaacaaggtccgccgggcgctcaaagaagagaaaattgctgctcgcagtgctatactgccgatgctccaagcagaagaggatgaaagatttgtcaaagagtggaagaagtgtcttgaggaggaagcgaggatcatgaaagacgttccaaggtggaaaggccgccagagcgtgtaccactctgggaaatggattcccccggctactggtgagcctccccccgagggttggtaggggcctgttgcagcactgaatgccattattttacgggggcacggatatt

SEQ ID NO: 96383 - DNA, 517 bp, Zea mays
  unsure (1)..(517): unsure at all n locations
tgttttattgtcctgcactgttttttagagagaattggcttcgatttaccggctcgacccacgcgtccgggcgaagtcattgagtagtctttcggattggatcatttgtgctttaggacactgcaacgtttcacggctgcgacccttgaacatggtatgcaccctccaatttcgccgaaaccagaatggcgtgctttgatggatgagatggctatcgtcgccacaaaggaataccggtcaatcgtatttgaggaaccgcgctttgttgaatatttccgccttgcaacgccagagatggagtatggcaggatgaacatcggaagcaggccatcgaaaagaaagccgagtgcgggcatcgagtcgctgcgcgcaatcccttggatcttcgcttggacgcagactcggttccaccttgccgtgtggctgggtttcggcgcggcgttcaagcatgtcttggacaaggacatacnggaatctcagacccttcaggagatgtccaccagtggccgttttttag

SEQ ID NO: 96384 - DNA, 514 bp, Zea mays
agaattctaggttccctcgattctttttgctagtactcgatcgtgattaccgtgctcgacccactcgtccgcctacgcgtccgcctttgcgttcgccctgcgttctcccacgcgtccgaaccaagacctgatcagttacttcatgtctgaccctgtccacggtgccatcgaagtctgcgctcagctgaggcccactgttgacatctcagtgaccgctgatgcagatttcgtgcgcccagagcttcgacagtcttcataagcttgtatggatccgcagtgtgactgcaatggctagcttgtaagaacttaatatgcctgggctcttgaactctcagattgtgcctgtatagctcatgtttgaggaccagatagatatactctcggcggtgtggtactgctgtgttttgtaagaataaattctatgggatttactttacgccgattagtctttcttgctattatctgatttccttgatctcttttatctttgcatatttctatggttttttttctc

SEQ ID NO: 96385 - DNA, 511 bp, Zea mays
  unsure (1)..(511): unsure at all n locations
gttaatttttattttttttgaagaagatttgttcgatttacgcttcgacccacgcgtccgaaaagatcttgcgcttcattatgtatgttgtagtccgnggagctaccctngtgacgggtggngataggttgggtgacaggggttgctacatccatccaacgattttctcagatgtccaggacggcatgaagattgctcacgaggagatatttgggcctgtgcagtcgatcctcaagttcaaagacctcaatgaggttatcaagagggcaaacgcgagccagtatggattggccgccggcgtgttcaccaacagcctggacacggccaacaccctgacgcgcgcgctcagggccgggaccgtctgggtgacctgcttcgacgtcttcgatgctgcgattccagttggcgggtacaagatgagcggcatggggagggagaagggcctttaccgcctaaagactaactgcnagtgaaagccgtcgtaacccaatcaagaacgccgcgtggtttt

SEQ ID NO: 96386 - DNA, 522 bp, Zea mays
tgattggcttagtttttttttgagagagtagtcttcatccggttttaggatctccggctcgacccacgcgtccggctgcacgcttgagctgtaatgtggccttgcttaattattctgttgccgttgctactgtatctatatgcgcctatgcctgcgtgcatgaactatgctttaggtggttgctgctccacactgtggtggtgtgcttttgcttttgtgtggtcgtattgtatgcgtaacctgacagatggatccctgattgctacatgtttgaataatttgcatgatctagctagtttctgcctaaaaaaaaaaaaaaaaaaaaggcggccgctctagaggatccaagcttacgtacgcgtgcatgcgacgtcatagctcttctatagtgtcacctaaattcaattcactggccgtcgttttacaacgtcgtgacttggaaaaccctggcgttaccaacttaatcgccttgcagcacatccccctttcggcagctggcgtaataccgaaaaggcccgactc

SEQ ID NO: 96387 - DNA, 519 bp, Zea mays
agagagttgcttcagttttgtggggggatgtgttctccggttcggataccctgctcgacccacgcgtccgcacgacctttgactgtacccattggaatacaggtccacctacatccgcaagggtacgtacctggagggcatgtccatgacgccgcctgcagccccgcccacggtgacggaggcctactgcctgctcaaccttggggacagcatcaccacggaccacatctcctactcggggaagatccccgagggcacacctgcggccaagtatctgctcgagtatggcgtggagcccaagaactttagctcctatggtggccgccgcgggaacaatgaggtggtgatgaggggagcgtttgccaatattaggatcgtgaataagcttcttgatggcaaggctggtccctggacgatccatgttccttccggggagaaacttcacgtgtacgacgccgttattaatatacaagtcggaaggttttgacattgtccatattgctggcttcagttcccgtg

SEQ ID NO: 96388 - DNA, 522 bp, Zea mays
aggtgatgtactatggtttgaaagagtagtactcgcctcgaattaccgtgctcgacccacgcgtccgtactttcttgagctgttgaatgaggaatttgatgtacttttaaagctcccaactgacaaggcactgttatcagatcctgaatttaagcgctacgtggagctctatgcaaaggatgaaaattccttcctcaaagattattctgaatcacacaagaaactctctgaacttggcttcacgccttgcaacacaacaccattcaaatcagatctttcaaccggcggcgtgcttgcacagaatgcctttggggtaacaattgctgcaaccgcaattattgctggctacttgtaccaagctttcaagaaggccaagtttaaggccaagttctctttcacatggctttgctttagaaagtctgaagatcgaataacacgaccatatttgaagatcgaatatacggatcatatatatgaggggctctggaaaatgttcttaaatactttcgaacaagaacgttt

SEQ ID NO: 96389 - DNA, 525 bp, Zea mays
  unsure (1)..(525): unsure at all n locations
ngaatatggggnnaatcgaattgatactcatgctcataacacctccnnttaaggggcagnggctcgacccacgcgtccggttcttgatcagatgtgactctactagactggtcagatggctacggtcggaatagtcctggacttcaactggtacgaggctcttacaaactcacctgatgaccaagcagcagcataaagagccaggcacttgcacattgcctggccagtagatccattgataaacggacactatccacagataatgcaagatctcgcgaaggagaggctgcccaggttcactcctgagcaggctaaactggtgaagggctcggcagactacatctgtatcaacgagtacacatccagctacatgaaggggcagaagctggtacagctggcccccagtagctactgtgccggatggcaggttcaatatgttcgtgcacgcaatggcaaaccgattgtaccacaggcgaatgtctagtggctctacgtagtctcgaccgggatgtacggctgcgtgaa

SEQ ID NO: 96390 - DNA, 520 bp, Zea mays
  unsure (1)..(520): unsure at all n locations
cgttattttnaaatgaactctagcatttcattaaccctcnnnttaggnnannnnccngtcncacgcgtccggttcttgatcagattgttgacttttacttgaagggaaagatagctccacaatgcttcaagaagtttgctgagacagccgagaagtgtgtttctgatcagagtattgaccgcccttcgatgggcgatgtgctctggaacttggagtttgcccttcagatgcaggagagcgcggaagagagcggaagcctcggttgtgggatgtcggacgagggcactccccttgtgatggtcgggaagaaggatccaaatgacccgtcgatcgaatcgagcaccaccaccacaaccaccacttctttgagcatgggcgatcagagcgtcgcgagtatggactcggatgggctgacgcctagcgccgtcttctcacagatcatgaaccccaagggcggtgaggtaaaactggtcccattcgttaccttgcattcattcagcatgtttttttcacgaagtct

SEQ ID NO: 96391 - DNA, 515 bp, Zea mays
  unsure (1)..(515): unsure at all n locations
agtagaattgtgcnttttgtattcgttgctagcagtcgcttcgatttacccgaccgacccacgcgttcgcttgccaaggccttctgtattgcaagttttaataggagttattaggggggcattggaaatggtgtctatgaaggcggaggtgacatgtgtgcgcgacatgcttcgcggggacgatgcctatgagatgcgggtgaagcttatcaagcaagtgccggaggaatacccctacatggatgatgactagttctattttagtgcaagattgcttgtttggattttgacatcgttttcgtcgatggtccgtagttctgctataacctgatatcatacgaggaaagctgcgtctgttttgcttgtgtattgtagaaatcatacataatctttcctgagttgcggctcagaaataatctgctggattcagggcgttcgctatgcaaaatggggttatctagaaatatttttatctttattccttttataaaggggctacggtttataggtccagt

SEQ ID NO: 96392 - DNA, 523 bp, Zea mays
  unsure (1)..(523): unsure at all n locations
agtgntccatagtatgaagtaanctgcccncgcttggaattaccgggctcgacccacgcgtccgcccatcgccgccaagatgcagatctttgtgaagactctgacggggaagaccatcactttggaggtggagtcctcggacaccattgacaatgtgaaggccaagatccaggacaaggagggcatccccccggaccagcagcggctcatcttcgccggcaagcagctcgaggacggtcgcaccctcgccgactacaacattcagaaggagtccaccctccacctggtgctccgcctccgcggtggcgccaagaagcgtaagaagaagacgtacaccaagcccaagaagatcaagcacaagcacaagaaggtgaagctctccgtgctgcagttctataaggtggacgacgccacaggcaaggtgacccgncttcgcaaggagtgccccaacacagaatgcggcgcgggcgtcttcatggccaaccacttcggaccgcactactgcngccagtgcgggcttact

SEQ ID NO: 96393 - DNA, 529 bp, Zea mays
aggatggtcacttgtttgagtgggggaggatgtatccttccttcggttcagaattaccggctcgacccacgcgtccgcccacgcgtccgcccacgcgttcttgttcttcggcatcagccagggcaagcttgttgcgtgttcctgaccggcgagaggctcaagtcccccggcgaggagtgcaacaaggtgttcgtcggcatcagccagggcaagctcgtggaccccatgctcgagtgcctcaaggagtgggacggcaagccgctgcccatcaacgtcaagtaaagaacgccaaggagaagaggaaggaggggaggaaatacgtggaaaaaaaaataaataaaacctgtacacgtgtatgtccagatcgcgtgccgtcgatcgttcttcgttgttgatttttggttgtattgatcgatccgtatgtgtgcgtgcgtgtgtggcgttgctctttcttcttttgtgtagcttgccctgccaccggccgacgtgcatgccatggtgggcgacagcggtttctaaggccatatcc

SEQ ID NO: 96394 - DNA, 521 bp, Zea mays
  unsure (1)..(521): unsure at all n locations
agaataaatagtgcttcttgtcatctctgtcgtcatgtctacgatcagaataancggctcgacccactcgttcgcctacgcgtcttccttcgcgaccttgaatgacagcctcagccagggcaagcttggagcgtgttccttaccagcgagaggctcaagtccaacggcgaggagtgcaacaaggtgttcgtcggcatcagccagggcaagctcgtggaccccatgctcgagtgcctcaaggagtgggacggcaagccgctgcccatcaacgtcaagtaaagaacgccaaggagaagaggagggaggggaggaaatacgtggaaaaaaaaataaataaaacctgtacacgtgtatgtccagatcgcgtgccgtcaatcgaacaaagtgctgattatagggtgaattgaacgatccccattagtgcgtcctaaaaccacgttgttgtgtgggataacccaaagttgccctgccaccggccgacgtgcaagccatggagacggacagtgttttccataggcatt

SEQ ID NO: 96395 - DNA, 527 bp, Zea mays
  unsure (1)..(527): unsure at all n locations
ggtaggaggggnnttcgtttgttggtggaatgggagactttccccggttcggaatacccggctcgacccacgcgtccggcgatgagattcggctacctcccttcgtgggcagtcgaactttctgcacttatccgcgaagctatctgcgtcggcgacaccagtgtcggtcttggtgcggaggggacgaacgaggacgaggatgcgtgccctctgccatcagacttgttgtggcgggagccattttttgatcagatgatcacgaacagatacagaccagggcatctgtgctcacgtcgatctgatgcgctttgatgatgggatcgcgatcgtctcgctcgagtcagcctgtgtgatgcgcttcagtcgagcagaaccagcctctgactcaccgaagcaagggggcagtgccagtgaatctactgcagaggtccccgttctgctgaacccgggctcccttgcgctcatgtctggcgatgccaggtatctgtggatgcatgagattaaccggaaaccaagcaggcagctgt

SEQ ID NO: 96396 - DNA, 525 bp, Zea mays
  unsure (1)..(525): unsure at all n locations
nggatttagttgcatgttggtttggaagaagagaggagtttgcatcggttcggaattaccggcccgacccacgcgtccgcccacgcgtccggcttacattcttcgtttcattgctggtgctggtgtgctttctggctatgaccagctccagatcctcttcttcggaaagaagtacggttccggcggtgcttaaatggagaaatatgatgacgaacaagagcagtgtgtgttcccggtcctttccaatcaggatctggtgaagtttttgcctttcatatcgaagaaattaataattcatgtagagggaggattcttacaacaatttgttttggatggagacttagatctccaaacactcgtaactatcctactaggtggtgacatcagtccccaaaaacgtctatggtcatagagtctgcccttcgtttgtcagtcgggcaatttttcttgcatacaatgccttcgtttaagtatcggatgagttgctgcgactaataaaaaanaatgcntatctcaatgctgtaa

SEQ ID NO: 96397 - DNA, 518 bp, Zea mays
agtatattctgatgttttagggggtagtattcggttcggatattaccggctcgacccacgcgtccggatggccccaacccttaccggtaccgtctagtttctcgacgagccagtgcccaccttacgctggtagtaccaccaaggggaaggaagtgggtgtacaattttcttcgacgagcctcagcgccgatctgtctggaccggtttctgggaatgaagcgcctctagttctgaagaacaaagccccgcgctggcacgagcagctgcagtgctggtgcctcaacttccgggggcgcgtcaccgtcgcgtctgtgaagaacttccagctcgtcgcgtctgttgacccttccctaaacgtccacgcagcggagcaggagaaggtgatcctccagttcgggaagatcgggaaggatatattcaccatggactaccggtacccgctctcggcgttccaggccttcgcgatctggctgaccagcttcgacacccaagcagcgtgcgaataactgaaggtggct

SEQ ID NO: 96398 - DNA, 519 bp, Zea mays
ggtatgtgatatttttttggggggatatttgcatcggatcggaatacccggctcgacccacgcgtccgatttggaaggatctataaattatttcattataggacattgaagacatcaggaactgtgcctttgtccaaaagcaattgctgctagctgctattgatttggttgatgccaactccaaaactggtggttacattgtttactcaacgtgttcgataatgattccagagaacgaggcagtaattgactatgcacttaaaaagagaaatgtaaagcttgtgccttgcgggttggattttgggcgtccaggattcatccggtaccgggagcatcggtttcatacttctttagaaaaaacaagaagattttatcctcatgtcaataacatggatggattttttgtagctaagctgaaaaagttgagcaatacaatccccgtgacgtctgagccgtctaaagcatctgaagaagcagctaaggttgatggcgaagatgagaaagctatttctaatgaac

SEQ ID NO: 96399 - DNA, 522 bp, Zea mays
atgtggattgtgttttatctaggggaggggatgctctcggatcggaatacccggctcgacccacgcgtccgcgcagcagtagccatttttttgtctccttaggccttgggtgctgaggccgacctctgcgtcacgcgtagcaggaccttcaaagggtggtgccaccagagcgagaactgcatcaccgtctgcaagagcgagggcaataccggcgggttctgcaagctcggggcttgcatgtgcaccaaagagtgtgtccgaagtactgacgctgctggtgctaataaagccccacagcagcatttgagttgatgagtagtaaagaagaacgcttttgttatgccagcgcaagctctagaattcgaggccgagatgaccaaaaataaatgattttgttactctaaaaaaaaaaaaaaaaaaagggcggccgctctagaggatccaagcttacgtacgcgtgcatgcgacgtcatagctcttctatagtgtcacctaaattcaattcactggccgtcgttttac

SEQ ID NO: 96400 - DNA, 517 bp, Zea mays
ggtaaaatgctattgtttcgcaggagaagatttcgcttcgataaaccggaccgacccacgcgtccgcccacgcgtccgcccttgcgtccgcccatgcgttcgggccaacgcctccaagaaggatgagggcatgctccgggccggcggcggcggcgccggaaagcgcaagaaggccgccgcgagcggcaagcccaagcgccctccctccgcttacttcgtctacatgtctgaattcaggcaggagtaccaggcgcagcaccctagcaacaagagcgttgcggccgtgagcaaggcagcacgggaaaagtggcgctctatgtcagagcaagagaagcaaccctatgtggaccaagctgggcagaagaggcaggaccttcaaagggtggtgccaccagagcgagaactgcatcaccgtctgcaagagcgagggcaataccggcaggttctgcaagctcggggcttgcatgtgcaccaaagagtgtgtcgggagtactggcgctgctggtgctaataaagc

SEQ ID NO: 96401 - DNA, 525 bp, Zea mays
  unsure (1)..(525): unsure at all n locations
ngaaattccgttgtgggcttagggacgagtagtcttccatcggatcggaatacccggctcgacccacgcgtccggataaatctgaggcttgtttctttacattcgcagttgccgcctaagagctttcgccttgccaggcttgagagctagtgctgctaaatccttccttggatgtctgatgcgattcaaatccaattcttttgtgctttggttgtagagggttccgtaggtttcggtctaaaatcgtgtgctttgcaagatcagcttcttgtttggacttcgaaactgaaacctggtccaggcaatcggcaaatcatcctgccatcttgcgatactgtatccaagccagcttaaactcacctggatctgacgtcctgattttctgggccctttcggctgcacatgccttctgtttcacccatttatggctctcttttcctgcggtgctttgacctgggtacttgattggtttacttgcttaccctagcttaaaatttcttggaatggctatttgctatggcacaa

SEQ ID NO: 96402 - DNA, 514 bp, Zea mays
  unsure (1)..(514): unsure at all n locations
agtgttggtagtctttttctgggaggggtattcctgggtcggaattaccggctcgacccacgcgtccgccgccgcctccgacattggccctttgtctccacgagcaaccgataatccgccggcgttgagatgttggtttatcaggatctcctatctggcgacgagctcctgtcggattcattcacctacaaggagctcgagaacggcgtcctgtgggaggtcgagggaaagtgggtcacccaaggtcctgttgatgtggacattggtgccaatccatccgccgagggtggtgaggacgaaagcgttgatgacacagctgtgaaggtggttgatattgttgacacattccgtctacaggagcaacctccttttgacaagaaatcatttgtgtcttacatcaaaaaatacatcaagaatctcactgctgtgttggagccagagaaagcggatgagttcaaaaagggtgtcgagggtgcaaccaagtttctncttagcaagctgaaggaccttcaac

SEQ ID NO: 96403 - DNA, 523 bp, Zea mays
aggggaattgtcatgaatttctttggaggaggaggttccattgggtcggaattaccggctcgacccacgcgtccgcctacgcgtacgccctcgcgtctttccatgcgtccgcccacgcgtccgattgactgctactcggaggctagcacctctgtctttgggcaaaagttgcgtgagcaagtcgaggagagactggaattctatgacaagggtgttgcgcctcgtaaaaaccttgatgtgatgaaagccgctattgacagcatggtcaatggcacctcaatggatgatgatgatatcgagaagaccgatgcatctcccaagaaaagcaagaaaaagaagaccaaaaccaaggctgatggtgatgcaatggacgtggataaaccctgcaacgttgctggtggagaagctgagcctggaactgagaagaagaagaagaaaaagaagcataagctggaggaggaagcacaggatgagaacggtgcatcagatactacccctaaagaaaagaaaaagaagagccgtt

SEQ ID NO: 96404 - DNA, 526 bp, Zea mays
  unsure (1)..(526): unsure at all n locations
ngattattcctccatgcataaggggaagagaagagctcgctctcggatcagcggaccgacccacgcgtccgcgacgactactgcgactagcctttcgtcgtagattgacggcgtgatggacgagtttacgcttgtgaaattagtggatgttcggaaggaagtgcaatgccctatatgcctaggaattattcggaagacaaggacagtcatggagtgtttgcaccggttttgcagggactgcatagataaatcgatgcggcttggaaataacgaatgcccagcgtgccgcactcattgtgctagtagacgttccttgagggatgatcctaactacgatgctttgattctagctntatatccagatattgataagtatgaggaagaggaacttgcattcagtcgagggcatgaacggcaaggagctggacgggcgcaacatcaccgtcaacgaggcccagtcccgcngcggccgtggaggccgctgcngctgctaccgtggtggccgtngaagcntgcgctaccgcgg

SEQ ID NO: 96405 - DNA, 520 bp, Zea mays
tgttttaatggtcatctattagaggagatagtcttcggttcggaattaccggctcgacccacgcgtccgccattgagcagggattgcaatatcattattggttatgtgaatgtgaagaaccaaatatcgagggaggatctaaaagaagcattcagaaaatttggagctgtccggtatgtggacttcagcatcggagataattcacgataccttcgctttgaagattctaaggcagctgaaaaagcccgcatgtctgcagtacttgctgatggtggcttgataattaaggaccacattgttactttggagcctgtgactggtgaagctgagaaggattattgggacacaatccgcagtattcaaggaaagtacaaggatagttgaagctacaagggaagggcttcaaataaccagagaggaggaaagcgtttcaacgcgaaacgagatagaaacccagactcggagaagaattctaacaaggctcggaaagttgaagctatcgcatgaggttaatttaggt

SEQ ID NO: 96406 - DNA, 520 bp, Zea mays
  unsure (1)..(520): unsure at all n locations
agtcatgtgggggtggagagggagagcttgctatcggatcggaatacccggctcgacccacgcgtccgccgtagtcctacgagctgtcgcactcatgtgtcaagagacgaaacggtcgacatggctcgcacccaatctgccgtagcggtcgccgtggtggccgcggtgctgctgctggcagcggcggcgacgacctcggaggccgccatcacctgcgggcaggtgagctccgccatcgcgccctgcctctcctacgcccgcggcacggggtccgccccctccgcgtcctgctgtagcggcgtcaggaacctcaagagcgccgacagcaccgtcgtcgacaggcgcgccgactgcaactgcctcaagaacgccgncaggggcgtcagcggcctcaacgccggcaacgccgncagcatcccctccaagtgcggcgtcagcatnctctacaccatcagcacctccaccgactgcttcagggtgaactaaaacctagaccacgcgcgacgacggccgcctgatc

SEQ ID NO: 96407 - DNA, 519 bp, Zea mays
ctgtgcactgcgtgttgttggaaggaagtcatctaccgggtcggaatacccggctcgacccacgcgtccgggcttccatcaaagcctacatcttatcctatctgtccctcagagatagtcaactcgctgcacaatttcaggaaatccctctggatctgaagatgattgaggcggaaaaggctggatttgagatcctgaaatctactatggtagagaagctccccaatgatctggaaggaatggagtcatcgatggggaagctttacattcttatcgatgagatctacaaatacgtcgatgatgttgtggaaggacgcgtggcacccgacaacagaattggaaggttcatctctgattcttttgcttcggtgccgaaattgtccccggctgctttcgataagcttttcaatgacaagattcaggataaccttgcgctggtatacctgtcaagcatcacaaggacacaaatcagcatcgccgagaagttgaacactgctgctcaagtgctgtaggtttggc

SEQ ID NO: 96408 - DNA, 523 bp, Zea mays
  unsure (1)..(523): unsure at all n locations
gggatttggttgtatgttgtttatttatgagggagatgtctcggttcggaattaccggctcgacccacgcgtccgcggacgcgtgggcattaccacattggtttctccgatcagagttcaactcggttctttgccgagtcagataagaaccccaacagtttttaattgcgcgccaatctgttttatatatacggagagagcactcctgtttttactagctgcaaaagggcgtgtttgagactagcggaccgaccggcctgcgcggcgatggatgtcaagtgccggcgtctggaggggaaggtggccatcgtgacggcgtccacgatggggatcggcctcgccatcgccgagcgcctcggtctggagggcgccgccgtcgtcatctcctcccgcaagcagaagaacgtgaacgaggcggtggaggggctcagggccaagggtatcaccgcggttggtgccgtctgccacgtcttcgacgcacagcagcgcaagagcctcatcgagacggncgtcaagaactttg

SEQ ID NO: 96409 - DNA, 523 bp, Zea mays
gttatgttattgttttttttgaggaaaggatattggtttcggaattaccggctcgacccacgcgtccgcccacgcgtccggacctaattgaccaggttgtctctacaatatacactgatataagaggacacaatattcattcgaaccagttctcggtaacggaacattttagggatggaaatgttcgtccgaaaccccaacctggagtttttttcttctatgatttctcacctataaaggtgatattcacagaagaaaatagatctctactccactacctgacaaacctttgtgctatagtgggaggtgtgttcactgtctcgggtatcgttgactcggttatataccacggacagaaggcactcaagaagaaaatggagctaggtaaatacagatgatcaacatcgaccttgtactggccccatcgtttccaagttttgtggcatgtaaggaggggatatgcctgctaaatacgacaagatgccacttacattgcttgaggtgcaatttggcaggccatcaa

SEQ ID NO: 96410 - DNA, 516 bp, Zea mays
  unsure (1)..(516): unsure at all n locations
ggtaggattctgtttttggggagagtagtcttcctttcgtttaccggaccgacccacgcgtccgaattattgcatcaatttccacaacctattagcttcatccggtacccgtgttcaataaaaacaaaccgctacaatgtgtgctttctagctgcattaagctgcttactacgagtatttgggctgtggctttctttttcatgtatctcaccaaatcgttattgttgtgagagctatactacacggtggtatcaagagtatcacaatgcccaacaggcgatggattgagctttcctaattttttcatgataaattaagttctattccctccgtccaaaaaaaaaaaananaaaaaaaaatttaaaaaaaaaaaaaaaaaaaaaagggcggccgctctagaggatccaagcttacgtacgcgtgcatgcgacgtcatagctcttctatagtgtcacctaaattcaattcactggccgtcgttttaaaacgttctgactggtaaaaccctgccgttac

SEQ ID NO: 96411 - DNA, 516 bp, Zea mays
atttattgtttttgggagagagagtattatcggtttcggaattcccggctcgacccacgcgtccgcctacgcgtccgccctcgcgtctttccatgcgtccgcccacgcgtccgcccacgcgtccggtgggatgggtggtgcctactacttcaagaacatttggggagagcgtgtggcaattgtcaagccaactgatgaggaaccatttgctccaaataatccaaaaggttttgtggggaaagctcttggacagccgtgcctgaaaaggtctgtacgggttggggagacaggcttcatagaggttgctgcttacctactcgactatggtcactttgcaaatgttcctaccaccatgctggtccagatatcacacacaatcttcaatgtgaactactgtgttagcttgcaaaaggaaagtgttctggcacaaatcagacgctgtgagcaaagatgcattgatgcaggagttcatttctgatgatttcgattccagtaaccatgggacctcaagctttc

SEQ ID NO: 96412 - DNA, 517 bp, Zea mays
tggtaattgatggtattttctctgggggagtatgtctcgggtcggaatacccggctcgacccacgcgtccgatccggagcagccgttttcccatttacttcgccgccggtcgccctccatctcctcgccgctgcctctcgtttctcttttcaataatcaagatgagccgtggtggtagtgccggtggtggtcaaagttctctgggttatctctttggaagcggtgagccccccaaaccagcagtggcaccagctgcaagtgctccacctgttgagaaaccatctgctgcaaagactgatgcggccaagcaggttgctgctggggttaccagccaaaccaataactaccacagggctgatggtcagaacactggcaacttccttacggaccgtccttcaaccaaggtccacgctgctcctggcggtggctcttccctgggctacctgttcggtggcaactgatgcccgtgctggtgcgctcaccaaagttatccctccctgcctgctgcgtgctatgt

SEQ ID NO: 96413 - DNA, 529 bp, Zea mays
  unsure (1)..(529): unsure at all n locations
aggaaagtggttgccttgttgttatatggaagggaggagtttccctcggttcggaattcccggctcgacccacgcgtccgcgcagagctctcatctcctctctttctcgcgctcgctttgcttcctcgtcgaggtccaagttcctgcattgatggcgaccgaggtggctgagactcccgcgccgttggcggaggcggtccccgagacccccgcggaggcaccggcggcgcccgccgccgaggcgaagcctaccaaggccaagaaggcctctgcgcccaagaagcgtgccaacccgacccacccgccgtacgccgagatgatctcggaggctgtcacgtcgctcaaggagcggacggggtccagccagtacgcgatcgccaagttcgtcgaggacaagcacaaggacaagctcccgcccaacttccgcaagctcctgctcggccagctcaagaagctcgtcgccggcggcaagctcaccaaggtgaagaactcctacaagctgcccgcacgcgccccggccgncgncaac

SEQ ID NO: 96414 - DNA, 514 bp, Zea mays
  unsure (1)..(514): unsure at all n locations
gttattttgttattttttcgaagagagtttgcttcgaattaccggctcgacccacgcgtccgcggacgcgtgggcggtcgcgtgggcggatgcgttttcggacgcgtgggtgaatcttgcagttccatttgatgttttgtccagaatcctttctcgcacacctaagctagaggatttaggcacaggatcctttttacaaggcaatgaccctgctgcatatgccagtttatgtagagctcttgagaactgcacttcactgaagagtatatctggtttttgggatgctccaggcttttatgttcaaggaattttgtcaaattgcaagatcagaaatcttacatgcttgaatctcagctatgctacattgattcagagtacccagcttatcggtattattcgtcattgtaagaagctccatgtcttatgggtgttagatcacattggtgatgagggcttgaaggctgtgtccttttcttgtcctgatcttcangaagtgagggtatatccaagtgtt

SEQ ID NO: 96415 - DNA, 523 bp, Zea mays
  unsure (1)..(523): unsure at all n locations
ngttgagatctagtgtatcttttgagagggaggatgtctcgggtcggaattcccggctcgacccacgcgtccgggcaagctgcataatttgggcgctgcgttagagctcaccgagcagcaggccaggcagctcaacttcgacctcgactcggcctacagtgcctttttggctgcgctgcccgccgctggtctgtaaccgggcgtggacctggttcgttctttacttctattacagtactatagatatctgtaatttcggtactgctattttattgttaataagaaagttctgttttctttatatactgtaaatatgtttatcgcatgatatacattcacatgacaacgcttgcaaatggcctgtagcctgtttacttgggtaaaaaaaaatatgggtataaggtgaaatgataagaagataggtagtggtaggtgaaaaaaaaggggcggccgatctaaaggatccaagcttacgtacgcgtgcatgcgacgtcatagctcttctatagtggcacctaaattc

SEQ ID NO: 96416 - DNA, 520 bp, Zea mays
  unsure (1)..(520): unsure at all n locations
ggagaatgtgtcatattgtgaggatggtagagttgctactcggttcggaattaccggctcgacccacgcgtccgcatcactaaatctgttctatgcttctgttcgaggccctgaactgattaaattcattagcagatgcaaaaatttgcaactcttatgggtgatggacttgattgaagaccatggtcttgctgttgtggcatcgtcttgtaacaaactgcaggagttgcgggttttcccttctgctcctttcgaagcagctgagcaggtctctttgactgaaagaggtcttgttgatgtatctgccagttgcccaatgctggagtcagtcctctacttttgcagacggatgaccaacgaggcccttattaccatcgcgaagaaccggcccaacttcacttgcttccgcctatgcatcattgagcctcgcacaccagattacattacacaccagcctcttgatgcangttttagtgccattgtggaatcatgcaagggcctcangcngcttttctgttca

SEQ ID NO: 96417 - DNA, 520 bp, Zea mays
  unsure (1)..(520): unsure at all n locations
tgaatatgtgaaaatgatttttgagaatagtattctccnctccttcnagnttaccggctcgacccactcgtccgcccacgcgtccgcagtatctattgttcgtgaacaccctcgaaccaagccatattccggatccagtgtcaagttgaaaacaaatttagagattttttgttgtcaaagaactttgttgggatccacaccccaaaattgatttctggatctagcgaagggggtgcagctgtattcaagcttctgtacaacggtcaacctgcttgtttggcacaatcccctcagttgtacaagcaaatggctatctctggtggttttgagcgagtatttgaggtcggccctgtgtttagagcagaaaattcaaacacacacaggcatctatgcgagttcgttggtcttgatgctgaaatggagattaaggagcatcattttgaggtctgtgacattatagatggcctattcgtatcaatatttaaacacttgtctgaaaacttgcagaaagaacttcgat

SEQ ID NO: 96418 - DNA, 523 bp, Zea mays
  unsure (1)..(523): unsure at all n locations
agtnataatctcctagatattggggggggagtgttctactcgggtcggaatacccggctcgacccacgcgtccgcctacgcgtcctcggtcgcgtgttctctatactgcacaaggcatgtactacaggagggataacagggtcccttcttattcagaccaaacgtcggaagaaatcatgaagatagttcaagatgcaaggaccatgccgaaatcatccagatcaggctatgggtggagcagtgagtattcggatgaagaagaagagaaggaagaggaacacagaccagaggagcatgaggaagaggaagatgaatacgataggagggtgaaggaggtccatgcaagcggagaactccgtatggacgctcttcacatatgaaagctagtggaagagaaagttgcatgtagataactgggttgttgcggatctgaaggatccagtgggatgtatgcagttttggcttgagaacatggtagtctggtgtctcggtgtattaaattatgttacatgaaaattgacaa

SEQ ID NO: 96419 - DNA, 521 bp, Zea mays
  unsure (1)..(521): unsure at all n locations
aganatgatacctatgtcttacgagagggatgatgtagccatcggattagcggaccgagccagtcgcacgcgtccgctgacgcgtgtgtcttcccacgtgtccttggacgcctgggcggacgcgtgggcggacgcgtgcacgacgctgacgacctgcgcgcgaccgaacgaccctccgtcgccaccatgacgctgatcgacggggaggacttccagcatatcctgcgtaagctgaacaccaacgtacgataggaagcagaagatcatgttcgacatgacctcaatgaagggtgtcgggcgccgcttctgcaacatcgcctgcaagaaggccgacatcgacatgaacaagagggccggcgagctgacacctgatgagctggagcgcctgatgacagacgaggccaaccctaggcagatcaaggtgccggactggttcctcaacatgaagaaagcatacaaggaccgcaggatctcgcaagtcgtctccaacgcccttgatatgaagctcaaggacgaccttt

SEQ ID NO: 96420 - DNA, 517 bp, Zea mays
atgcatagttggtttgagaggagtaagtctcggtttggaattaccggctcgacccacgcgtccgcattttttcatggcttgtatttaggatttgcatttgagcagaatgcaatgtctgctgatgtactgaagaaggcatatgaagctacagaagatggattcttctccattgttaccaaacaatggcctgtaaagcctcagatagcagctgtcggctcatgctgcctggtcggtgtaatttgtggtggcatgctttatgttgccaatgttggggattcccgtgtcgttttaggaaaacatgttaaggccactggagaagttttggctgtccaactgtcagcagaacataatgttagtattgcgtccgtgagaaaagaactgcagtcaatgcacccagaagataggcacattgttgttctcaagcacaatgtttggcgtgttaaaggactaattcaggtttgtagatcaattggtgatgcatatctcaaaaagcaagagttcaacaaggaacccctat

SEQ ID NO: 96421 - DNA, 525 bp, Zea mays
  unsure (1)..(525): unsure at all n locations
agctntaatgctcatgatcaagggtgagaagcnatctcctcggatcggaattaccggctcgacccacgcgtccggccggaaaagagaaatcaggagctctcaattcggcgcatagccaagccaaggaaatggcgcactaccaccccgtgtccgcggacacttaccaagacctcgaggctggcttctccggccactcctcctcccctctgaagcccgcggcctcgccgaggcggcccggccgcatgttctgcgacccctgcgacgacggcgacgagctccacggccgccaccactacctcgacatctgcttccggtgccgtaaactcctgtccggcaacagagacatcttcatgtacagaggtgacctgccgttctgcagcgaggagtgccggcaggagcagatcgagatcgacgaggcgagggagcagcggctgaagcagacggggcgggccgagcagcagcggcagcggcagcagaagcagagcccccagaggatccccatctgggcgtggtaggatgagaaat

SEQ ID NO: 96422 - DNA, 513 bp, Zea mays
  unsure (1)..(513): unsure at all n locations
attttatagcgtggtgggagggggcgatgttgtttcggataagcggacngagctagacccacgcgtccgcccacgcgttcgcctacgcgtttgacctgcgtccgcccacgcgtccgcccaccgcctgcgccgccgacaacagcgtagtgtagtgtagttccggagagggttggggagagtagtagtgatccgcaatgtcgacggaggaggctgttgtggctgacgtcccggtgaccgaggtgccagcggaggtcccggcggcccaggtggccgaggcgcccaaggcgaagaaggcgcccaaggagaagaaggcgcctaaggagaagaagccgtccgcggcgaagaagccggcggcgcaccctccctacgctgagatgattgtagaggcgatcgctgccctcaaggagaggaaggngtcgagctcggtggccatcagcaagtacgtcgaggggaagcacggcggcaagctccccaccaactttcgcaagcagctcatcgtgccagttaagaagt

SEQ ID NO: 96423 - DNA, 525 bp, Zea mays
  unsure (1)..(525): unsure at all n locations
nggtatctgtgnnacgcactagctaagcnagngttanactccatcgggtcagaatacccggctcgacccacgcgtccggaaaatttgcgggcttcactcattaatatgggcgttggtgggcatgcattggaagagataatagataaagtgaagaacaggcattaccagctagcttgcacattaacatttgagaccacacacggtgtctcctgtgattctggaatcaaccatccaaacctatatttcagtgaaagccagaaagttctgcgggccaaaaaccagaaaatggagagccaatcagcaacctaaattgtattgcagctggagaaactatgcatcttcaaaaatcttaccagcaggtaagcactgaagcaatattcatccttgaagccaattatgttatcattactgattgttgaccattggcgtctacctggaatattgttgcttcctgctgttaccaaattccagctgctggctttgcctanaaagaccaggctcagctgttaacctccatgcnctaac

SEQ ID NO: 96424 - DNA, 535 bp, Zea mays
acgcttgctgaagctaggagcgatagcaatagcactttctttctggtctcggaattcccgggtcgacccacgcgtccgggtggcggagcggaaggcgaaggagtagcagcagcaggcggcgccgagtagcggctccccacctcgagcttgccaccatggctagaggattgaagaagcatttgaagaggctcaatgcgcccaagcattggatgctggacaagcttggcggagcttttgctcccaagccatcttctggacctcacaagtctatggagtgcctgccactgatcctcatcatcaggaacaggctcaagtatgctcttacataccgcgaggtcatttccatcctgatgcaacgccatgtacttgttgatggcaaggtcaggacagacaagacttaccctgctggcgttatggatggcattttcatccccaagaccaatgagaactacaggctgctgtacgataccaagggccgcttacggctttacccaatcagggatgacgatgctaagttcaaacttttgcaaggttg

SEQ ID NO: 96425 - DNA, 521 bp, Zea mays
  unsure (1)..(521): unsure at all n locations
cgagtgcgnctgacactgagtaggtgcgatacgactgccgtaccggtctggaattcccgggtcgacccacgcgtccgggctatgtgtgggcttgcaagaactacgatggagatgtgcagagtgatttcttagctcagggttttggatctttgggtttgatgacatcagtgttggtgtgccctgatggaaaaaccatcgaagctgaagctgcccatggcacggttacccgtcatttccgtgtccaccagaaaggaggcgaaaccagcacgaacagcattgcttcgatctttgcatggacaagaggacttgcccacagggcaaagctcgacgacaacgctagactactcgacttcgctctcaaactcgaggctgcttgcgttgagaccgtggagtccgggaagatgactaaagatctggcgattcttgtccatggatcttccagcgtcacgagaagccattacctgaacaccgaggagttcatcgacccattcgttactgagctccgatcaagactgggagcc

SEQ ID NO: 96426 - DNA, 513 bp, Zea mays
  unsure (1)..(513): unsure at all n locations
agaggtttgacgtgagactgaaaaactaagncagtagcactgtcgttccggtccggaattcccgggtcgacccacgcgtccgggcgaaggcaaagggggtttctcttttgcttcccactgatattgtagtagcggacaagtttgcagctgatgctgagagcaagattgtccctgccactgctatccctgatgactggatgggtcttgatgttggccctgatgccaccaaaacattcaacgaagcattggacaccaccaagactgttatttggaacggccccatgggagtgtttgagttcgagaagtttgcagctggcactgaggcgattgccaagaagctagctgagcttacaaccacgaagggtgtcactaccatcatcggcggcggcgactctgttgctgctgtcgagaaggctgggctggccgacaagatgagccacatttcgaccggcggcggtgcgagcttggaactcttggaaggcaagactctacctggtgtccttgccctcgatg

SEQ ID NO: 96427 - DNA, 510 bp, Zea mays
  unsure (1)..(510): unsure at all n locations
cgagtgtccgataacctganttcagttgcaatagcactgtcgtaccggtccggaattcccgggtcgacccacgcgtccgaccgagcccaaacctctccccttttctccgtcctctcctagtccacacggcagacgccgccgccgggggagaggagaggaggggaggggatcggctccaagggaacaggtgagatggcaatcctgtacgcgctggtggcgcgcggcacggtggtgctggcggagcacagcgcggcagccaccaacgcgggcgctatcgcgcgccatgtcctcgagcgccttcccgacggcggcgccgacagccacgtcttctacacgcatgaccgctacgtgttccacgccaagcgcaccgacggcatcaccgggctctgcatggccgacgacgccgccggaagacggattcccttcgcatttttggaggatattcatggaaggtttgtcaagacatatgggcgggctgcgctaaccgctcttgcttttccaatgaatgag

SEQ ID NO: 96428 - DNA, 528 bp, Zea mays
  unsure (1)..(528): unsure at all n locations
tgagtccgtctgtcgccttgaacgtngattangtactgacgtaccggtctggaattcccgggtcgacccactcgtccgtgtaactgcttccaatgggaagacaattgaggtaaataacactgactcagaaggaaggcttgattttgctgatacttttatctatgcttgcatccaatgtgttgataagattattgatttggcgactctgaccgtcgcttgcgttgtctcactctggcctagcatttccggtattttcacgccgagcgactatcttgccaatgaggttgccgctgcttccgaggtatccggctagaagttctggagactgccgctggatgatagctactggtagtctatgaagtctggcatgtctgatatgttcaacactgccgtcaggcttttatgttctatttacctccgtctgttcctgaaccttttcttctactactatgttccagtgtatgcacatttgcattggccttctctgtttgtatcctatctgaaatcttctcttcaccggttttcgct

SEQ ID NO: 96429 - DNA, 511 bp, Zea mays
tggcggctcgctgatactagcataagtacgtatctagcattgtcgtaccggtccggaattcccgggtcgacccacgcgtccgattgagaacccacttactctgttgaatgatccgtcctctgttgagccactgggcaactgtgggaagaaggtcctactgtggtggcttcgtgttgaagcacgggctgatagcaagtttcctgaagggtgggtaattgagccacctttggaagtcgtcgtccctgcaaagcgcactccatggcctgaaacaaccaccgagctgccagccgagttattggatgacaagcaagagcaggaggataggcgcttgtcaagagccaacaaatcatctcggccccgaggcaccacgaagcggaagggcgaccctcaaggacaagataactgatgcagaacgtactggccttgtgatgtatatcttacaccctgcaaaaacacagtagcaagcatatcctgttaatctggcggtgtctgtttaatttttcttttcttt

SEQ ID NO: 96430 - DNA, 531 bp, Zea mays
  unsure (1)..(531): unsure at all n locations
cgtcgtgctatgnttcaaagttngtcatgcatactcttctcgattcccgtgtcgaccactcgtccggctactccttgctccacccgtgccctcaaattcgtttctagatcggatgtccatttccaggtatggctacctttataacctaaagcaatatatatatatatacactacctatcaagtactacccaaaattctactgcgtcatccacacccacaaggaaagctacctgcactatggctatgcctattcaattaggcgagcgaccaaaaatgctctagagcggtgtcacttctatcaaagctacatctgtgctccctacctccatgcgctaaactgtctctcatcaaaacacgtcttcctcctccctttctaaatcctccttaatttattatccgatgaaccgtcgtaatatacctatcttaattaccataatacctaaacgggcactcccttctaaaagaatccacatttactaacgccttcattccaagataatatctatcctttatagtcaccttaaatcaacn

SEQ ID NO: 96431 - DNA, 533 bp, Zea mays
  unsure (1)..(533): unsure at all n locations
cgagcctgctgatggttgcaatgctnatgcatgacgttctcggtccggaattcccgggtcgacccacgcgttcgggcaagggtctgggcaagggcggcgccaatcgccaccgcaaggtcctgcgcgacaacatgcagggcatcaccaagccggcgatccggaggttggctaggaggggcggcgtcaagcgcatcttcgggctcatctacgaggagacccgcggtgtgctcaagatctttctggagaacgtcattcgtgacgccgtcacctacaccgagcacgcccgccgcaagaccgtcaccgccatggatgtcgtctacgcgctcaaacgacagggccgcaccctctacggcttcggcggctaggtcgcttactcatctggtggcgaactgcatgtgttgtcgccggtggttgtgttgtgtgcctaattagtctagtccgttctctttatcgtcgctggggtcctgcggtgcatggtagcccattttcctgcaataccaaactggccattttcaaggaaaaaaaaaaaaaag

SEQ ID NO: 96432 - DNA, 522 bp, Zea mays
gtccgtctgacgctgggtcgggcctcgactgtactgacgtaccggtctcggaattcccgggtcgacccacgcgtccgcgctcccaggacgccgccgctggggacggcaccacgactgttgtcgtcctcgctggatcgctcctccgccgcgcccagtcgctcctctccgccggggcccacccaaccgccgccgccgacgctctccaccgcctcgcgacacgcgctgttgagatcctccacggcatggccatccccattgagctatctgaccgggaatccctcgtgaagtccgcgtccactgctctcaactctaaggtcgtctcccagtactccacccttctctcgcccctcgccgtcgacgccgccctctccgtggtggatcccgctcaattataagctgctgaaggccgctggtctgtttgcgggatccatcttcctgatgcggaacttcggtgatctgatggccatttagtaagcttatcagcgttgtttacttggatcctatggaatgtgtttgatgttc

SEQ ID NO: 96433 - DNA, 529 bp, Zea mays
  unsure (1)..(529): unsure at all n locations
cgaggggntntaactggccagcccatcatgtactgccgtaccggtctcggaattcccgggtcgacccacgcgtccgcggacgcgtgggcggacgcgtgggtcgcgtcgcaggccgccaagcccaccgggaaggagatcaaggttccaaaggctctgtttggcggcacaggcaactatgccagtgcactgttcctcacagcagctaaatctaatgcattggacaaagttgaatctgagattaaagctattgtagaggcttccaagaagagcccgttgttttctcaattcataaaggacttgtcagttccaaaagcgaccagggtgaaagctatagcccgaaataattgcttccgctggggttttaaaatgtaccaagaaattcctggcttgtcctgccggccattgccagcctgaatttaatggaccccttggcgaaaagattggtggattgacctatggaccttagggggaaaatgaaggtggtggccaggccagtatattaactacccaaggaggaggagaaagaact

SEQ ID NO: 96434 - DNA, 506 bp, Zea mays
gagagccgcttaaaactagaccgccgcatacgcactgtcgtaccggtctcggaattcccgggtcgacccacgcgtccgcccacgcgtccgagcgttacaagaaccgtgagttgcagaccatgcgccttcttgaccaccgctaatgttgttgctttgaagcattgcttcttttcaactactgagaaggatgagctttatctgaacttggtccttgagtatgtgccggagacagttcatcgagttgtgaagcatcacaacaagatgaaccaacgcatgccacttatttatgtgaagctgtatatgtaccagatatgtagggcattggcttacattcatggcactattggtgtctgccacagagatattaagccacaaaaccttctggtgaacccacacacccaccagcttaaactatgtgactttggcagtgcaaaagttctggtcaagggggaaccaaacatatcgtacatctgctcccgatactatagggctccagagctcatatt

SEQ ID NO: 96435 - DNA, 505 bp, Zea mays
  unsure (1)..(505): unsure at all n locations
agagtgccgnttaagactagtgtatttgctcatagactgtcgtaccggtccggaattcccgggtcgacgtagacaatgccataacgttcggtgaagccggcgaaccattcaaagttgtccagcagagaccaagcgaagtagccttgcacatttgatcccaagtctattgattccttaagagtagcgatgtggcgctggatgtaatctagccttttgtagtcatttaaggcatcctccatgggtagaggtgtctccttggtatcaacatccccgattccgttctccgtgatgtagataggtgggtttccgtatttgttcttcatgatcataaggagatccttcaagccctcagggtacatgtagatccatggatttcccataggaggaccaatgggcttcccgtcaggcccgttaacttcttgactggcgtaggcgtcgtcagtgttgagcacaggtgagtagtttggtgagatatcgatgtttttggagaaccgtgaggtgtatn

SEQ ID NO: 96436 - DNA, 529 bp, Zea mays
  unsure (1)..(529): unsure at all n locations
cggctgctgtgcctgaaatgctncgctttcgcgtttccgtctcggaattcccgggtcgacccacgcgtccgcatcctctgatcacttgtgcagtgcccaaaggatgggatcagggtctcctgggaatgtgcgtcggggaaaagcggaagctgaagatcccatcaaagcttggctatgggcctcaaggctcgccacctactattgctggtggagcaaccctcatatttgacacggagcttgtcgctgtcaatggagaaccaaccaaccaatctgacgagctctagattcatcatacaaatgaatccattcaccttgttactcggaactcagcagatgtcatactatgcaagagatgagccttcattccctgccacttgtatagtgtcgaaaaagagccagcgttggaaatcaaaaaatccgctgtgtataaaaaaaaaaaaaaaaaaggcaaaaagggcggcccgtttcaaggctccaaacttacgtacgcctgcatgcgaacgtctaagtcttttatcgtggcaacaaa

SEQ ID NO: 96437 - DNA, 525 bp, Zea mays
  unsure (1)..(525): unsure at all n locations
cggctgctgacgcttggaacgtnatcnactagcattgtctgtaccggtctggaattcccgggtcgacccacgcgtccgcggacgcgtgggcggacgcgtgggctggtacatccagagcacttgtgccacaactggcgagggtctgtatgagggcctggactggctgtccagcaacattgcgagcaaggcttgaggcctaccttgaatatcaactgcgaactgactaggagctccgggtgtatcatggaaactcaggacagaatcgcagttgcaacctgttagatgtcttctaccggcactatatatgtttattgcttgatgtgtactgatgttactgttcaacgcttattaccctactatactgttggatgttctttggacctgtttcattcgcacaaagaatggactttcaatgtcatgcttaaaaaaatataatgatttatcttgaaattatcttttacaaatacagttgattattatattaataccctactttgttgaaaatacttacatttttataaaaaa

SEQ ID NO: 96438 - DNA, 524 bp, Zea mays
tatattgggctttagagctaggccgactgagactcgtacgccgcctaccgcactgacgtaccggtccggaattcccgggtcgacccacgcgtccggggttggcttctcctccccctccggttcgggttcgggttcgtgaggttctccggggttcggtttcgtgggtgagcggatcgagatggcggcgtcggatgttgagtaccgctgcttcgtcggcggcctcgcctgggccacggacgaccactccctccacaacgccttcagcacctacggcgaggtcctcgagtccaagattatcctcgatcgggagacgcagaggtcccgcggcttcggcttcgtcaccttctccacggaggaggcgatgcggaacgccatcgagggcatgaacggcaaggagctggacggccgcaacatcaccgtcaacgaggcccattcccgctgcggccgtggaggcggctgcggcggctactgtggtggccgtggaggcggcggctacggcggtggcgggcgccgtgatggctgct

SEQ ID NO: 96439 - DNA, 505 bp, Zea mays
  unsure (1)..(505): unsure at all n locations
agggtccgttaagactagcccagccgtccatagcactgtcgtaccggtccggaattcccgggtcgacccacgcgtccggtcatccacactaacgaacgaactcttgctccgatcacgagctagctgaggtcgacgatggcggctgtgctgaacagcaggaagacgccgcaggtggtggccgtgctggtggtggtggcgctgctggcttcgtccgcgtcggcggcgatcacctgcgggcaggtggggtcgtcgctggcgccgtgcatcccttacgcgacggggagggccagcgcgctcccctcgtcgtgctgcagcggcgtcaagagcctcaacagcgcggcgcggaccagcgcggaccgccaggcggcgtgccgctgcctcaagagcctcgccaacagcgtcaagagcgtcaacatgggcaccgtcgtcaccatccccggcaagtgcggcgtctacgtcggattccccatcagcatgtccaccgactgcnacatgatcagctaag

SEQ ID NO: 96440 - DNA, 527 bp, Zea mays
  unsure (1)..(527): unsure at all n locations
cgctacgtgtggtcaggtcgtatncgctactggtgtactcggtccggaattcccgggtcgacccacgcgtccggttggcttctcctccccctccggttcgggttcgggttcgtgaggttctccggggttcgggttcgtgggtgagcggatcgagatggcggcgtcggatgttgagtaccgctgcttcgtcggcggcctcgcctgggccacggacgaccactcccttcacaacgccttcagcacctacggcgaggtcctcgagtccaagattatcctcgatcgggagacgcataggtccccgccggtttcggcttcgtaaccttttcaacggaggaggcaatgcggaacgccttctaggccttgaccggaagggacctgaccggccgcacatcaaccgtaaccaaggccaatcccgccggcggccttgaagccgccgccgccggttccggggttgcccttgaagccgccgcttccgccgtggccggcccccttattgccggcgccggttacggcgttgccgccgccgg

SEQ ID NO: 96441 - DNA, 574 bp, Zea mays
  unsure (1)..(574): unsure at all n locations
cgcttactagtgttcagttcgtatnctcactggctatactcggtctcggaattcccgggttcgactccacgtcgtctcggaaatctcacaagtcagtcccatgggtnctagaatttgtacgtgtcttcataccagtagaccaaagtattatgcgatgtactcatgttggtgaattattatactcagaaggggtgttnnccttacatattaacagctcaactctggctgtannaatggagtagaaatctcgacttcgtccttactgggttggttgggnngtggtcctggagggcttacgtttattcagaaggggcctacctcgtaattcttctgcgcaaanggagaagttggactcaactaattgagaagatcaaagcanttcccttctctcacttacattgctgtgaacaaggatggagaaacattctccaatatttcaccgaacgccgtgaatgcttgtacgtggggtggtttccctggcaaggagattatccagcctacggttgtggatcatgcaagttttatggtttggaaagacgaaacatttgaaatctggactcggggtggggtttca

SEQ ID NO: 96442 - DNA, 521 bp, Zea mays
  unsure (1)..(521): unsure at all n locations
atgctgctgaggttgcaaagtncgtacagcattgccgtactcggtccggaattcccgggtcgacccacgcgtccgactctgcaagggcttcggatcccacaccgaggaaaggagaagagagggtcggaataatggcggccgaggagggtgccgtgatcgcgtgccacaccaaggacgagttcgacgcccgcatggccaaggccaaggagcagggcaagctggtggtcatcgacttcatggccccctggtgcagtgggtgccagatgatggccccggtgtacgcggactgcgccagcaagtacccttccgcggtcttcctcgaggtcgacgtcgacgaactgctggaagtcgcgaagatctacggcgtccatgtgatgccgaccttctgcttcatcaggaacggcgagacgctcgagagctttgctaccgtcgacgaagacgagctccgggacgccgtcaggaagtacgccggcggtggcactacgacggcttctgactcggcgttcgtctaattcaagaat

SEQ ID NO: 96443 - DNA, 522 bp, Zea mays
agctactgtgaccgacacgcatgtattgcattgctgtaccggtccggaattcccgggtcgacccacgcgtccggtgttctattacacaaaagaggcaaaaaacaaaagccggtaacggaaaccctaatcccggcaaatcccgaatccctctcgaatttctatttaatgttcctgttcttcccctccgatccgatgtccccaactgcgctcccgtcggcgatcaaacaccggatcgcggcactcgccgccgttgaggaggaggtttccggcgctgcttccagcgccttgccgtcagcaccatgaggaagaagctggacacgcgtttccccgttcctcggattaaaaggatcatgcaaccagatgaagacgtcggcaagattgctcaagctgtacctgtcctagtgtccaaagcattggagctatttctgcaggattaatgtgataggacatatgatattccaattcgaaagggggtcaaagactggggttcttcccattggaaacattgcatacaaacgtaca

SEQ ID NO: 96444 - DNA, 506 bp, Zea mays
  unsure (1)..(506): unsure at all n locations
agttccgcttaaccctgcatctntgcaatagcattgtcgttccggtccggaattcccgggtcgacccacgcgtccggcagggcaggttttgcgaggcaaagcccgacgtctacaagcgctgggccaagtccatccacttcgcgctcggcgactccatctgggtcctgtacccgccgagccaggactcggtgctgcaactggcgccggcgggcttcgcgttctgcgacctgtcgcgccctgtggccaggctcggcgacggcaactcattattcaaccttaccgcgcccggtcgcgcctactacgccagcggcgcgccgggccactgtcgcaagggccagaagctctgggtcgatgtgcccttgcccaacgggacctaccttcagccctacgtcaccgacctcgacgcgctcgcgcacaccctcgtcgtcgacccgaacgacgggttcgcgtccgcggacgctctagacgatccaagcttacgtacgcgtgcatgcgacgtcataccg

SEQ ID NO: 96445 - DNA, 511 bp, Zea mays
agttatgctcgttaaccctgcatccttaggctaagcactgtcgtatccggtccggaattcccgggtcgacccacgcgtccgccgaggtcgcgctcgtcgtcttctccccgctcggcaagctctatgaattcgccagcggaagtgcccagaaaacaattgaacgttatagaacgtacacaaaggataatgtcagcaacaagacagcacatcaggacattgagcaagtaaaagctgatgctgagggcctggcaaagaaactggaagcacttgaagcttacaaaagaaaacttttgggtgagaggttggaagaatgctcctttgaagaactgcacagtttggaagtgaaactcgaaaagagccttcattgcatcaggggaagaaagactcagctgctggaggagcaactccataagctgaaggagaaggagatgaatctgcgcaagagcaacgaagatttacgtgaaaagtgcatgaagcagccgtcgtcgtcgtcgtctatgctgatggctcc

SEQ ID NO: 96446 - DNA, 508 bp, Zea mays
ggaatggccgttactcgataaagaccctcactgcaccgacgtaccggtccggaattcccgggtcgacccacgcgtccgcccacgcgtccgcccacgcgtccgcccactcgtccgcccacgcgtccgatgataatgaggtgctgagtaaggcgatagaggttgctgaggctattgtgaggaacaaccgcaacttagttgtattgtacaaatcggttataaatgatggatttaagctggatttggagcatgctcaagcacttgagaaggaaagaggtcacaactattacaatggaatgacaaaggaacagttcacggatatgcagaaattcatccagggccggagttctaagaaaacaccatcaaagctgtaggttgctggtgacattttctgtggtccgtgtacgatgtacagctactgaaagcgtgttcagtagtctgaaaaataaagatgtcggtgtggcaatatatacagttaccgtcttctcatacttttacgtaagtttatatt

SEQ ID NO: 96447 - DNA, 523 bp, Zea mays
acgtgctgtgtccgcattatatagtactgctcgtaccggtccggaattcccgggtcgacccacgcgtccgcccacgcgttcgatgccctgaatgctacaaaggcagctgtcgaggaaggtatcgctgtaggtggcggctgtacccttttgaggcttgcatcaaaagttgatgcaattatagagacccttgagagcgatgaacataaggttgctgctgaaattgtaaggaagtgcttgagctatccacttaaattgattgcaaataatgcatgcgttaatggcagtgtggttactgagaaggttcttgccaataaaaacttcaggcatgggtacaatgcggctactggtgagtatgaggacttgatggttgctggttcaattgatccaaccatggtgttaagttgctgctggaacaatgctgattaggtgggaaaaactctaataacttttgttgccttggtttttaaccccaggttgcttaacaaagaacattattttcttgcaacccaattggcattggtgt

SEQ ID NO: 96448 - DNA, 523 bp, Zea mays
atgcgctcgcgactgcccagctcatcacctgcactgccgtaccggtccggaattcccgggtcgacccacgcgtccgcccacgcgtccgcccacgcgtccgcccacgcgtccgctcaaaccctagccgcctgctgcgagtttcagagctcaggaatctgcgccatggcgagtgagacggagaccttcgcatttcaggctgagatcaaccagctgctctcactcatcatcaacaccttctactccaacaaggagatcttcctccgcgagcttatctgcaactcttccgatgcgctggacaagatcaggttcgagagtctcactgacaagagcaacctcgatgcgcagcctgagcttttatccacctggtccaaaccaaggccacgaccacgctttcaatcttggacggcgcattcgccttgaccaagtccgaccttggcaacaacttgggtccaatggcaggttccggaccaaaggattcattggaagccttgttgtccgggctctaatgttcacaaatgggcca

SEQ ID NO: 96449 - DNA, 527 bp, Zea mays
  unsure (1)..(527): unsure at all n locations
tatgtggctngtggcctgcacncgccngcctacagcactgtcagtaccggtccggaattcccgggtcgacccacgcgtccgcggacgcgtgggcggacgcgtgggcggacgcgtgggggcggtatcaaaattttccatcagcttgggagccagccgaagctcaagaatggagaaatgtcagccatatgtccagtcgtcagtcacttcccgtgacaagcaaaagttgtttgtccgattctttggtgtgctctacagagtgttcaacaagatgaacttcatgctgctgttggacgacgattgggagccactgatggataattaccggcctttgggaataaaatctctgaggttcagcacattttctcttggaaatatgtcaccaaagatagaagagcaaaaaattcagtacaccattcataccattggaggaagcgtaactgcagttcatggattttttgtccaacttggtgtcaatgtggatacgagtgactgggagcttcaaactctgggaagactntcggttactg

SEQ ID NO: 96450 - DNA, 560 bp, Zea mays
  unsure (1)..(560): unsure at all n locations
ttatgcgncntgtgtcatgttccactncgctacagcagtactcggtccggaattctccggtgtcgactccacgtcgtctcgtgagtaatactcatatgagtaacccttctcgtcatggtgacatggtctacttgacatnctgtgaagtgaagtatattcagcaaggagctgaaggagtagnagaagtnggaagaagnttctgtatntggacaattggtaaacaaatctatagatcatccacatatgcctgcttgaatacacaatagcctgacttagggcatcccgttctgctaagggaagccattctgcaaaaataattccatgtaatgtagtaatgtacaagtagaacacttctttcctttgaggtcacaacgaagctaacttaatcctctcccccccttgtgtcaggacaaaaaacgtgcaaataggctttgtagttgtagttcgtttttgctaacatgtatacggttgaccattattttttggagaagtatacatcaaaagtttcaannaaaaaanaaaaaaggcggccgctctagaagatccaagctaacgtacgc

SEQ ID NO: 96451 - DNA, 523 bp, Zea mays
  unsure (1)..(523): unsure at all n locations
agggtgctagtgtctagctccgatagtactgctctaccggtccggaattcccgggtcgacccacgcgtccgcgagttggattgggttcaaagttgggcttttggacagctgtggtgtgcacggcagctctgtgacttgtgaggaggaagggaggaagaaagcggatccatggcgtcgaagcggatcctcaaggagctcaaggacctgcagaaggatcctcccacctcttgcagcgcaggccctgttgccgaagatatgttctactggcaggcgacgattatggngccatcagatagcccatacccctgtggggtaattttgggtaactatcaactttcaaccgaactaccaattcaaccaaccaaaggtggattcaagaacaaaggttaacaacccgattttaaccagcaccggagcctttggcttgaaattttggaagaaccatggaacccttgaatgacaagttcttaaggccttctcttaaattggtcccttctgaccgagccaaacccttaccattcgt

SEQ ID NO: 96452 - DNA, 519 bp, Zea mays
cgtgctgtggttgcaggcccgtacagtcgtgtcgtaccggtccggaattcccgggtcgacccacgcgtccggccagcgcatggtcgcggcggcttccgacgcgctgtcggcggccgtgggccccgaggtgtcgcacctcggctggggccactggtacacgctgcgggagctggaggaggccaccgtcgcgttcgctcccgagcacgtcgtcggcgagggcgggtactgcatcgtctaccgcggcgtcctcgccgacggctaccaggtcgccgtgaagaacctgttcaccaccaggggacaggccgaccggaagttcagggtgaaggtggaggccatcggccgcttccggcacaggaatctgttccggttactggcctacgtgcccaagggcgcccaacggttcctggggtccaagtacttgaacaacggcaactctaggcagtggtgtgcacggacacttgggccattgagccggttaacttggacactccgattgacaatgtgcgctggtttggcaag

SEQ ID NO: 96453 - DNA, 515 bp, Zea mays
  unsure (1)..(515): unsure at all n locations
aggcggntcgtgtagactaggaccgangagtangcacctgtcgtaccggtccggaattcccgggtcgacccacgcgtccggaaagcaggagatggagaagttactgctatagcaggaagttatgaggacctcgcttctggaatggtgctatgccagctacagtgaggttttcagttcctggatgcacttctgcgccgtgcgcatatttgtagagagcattcttagatacggtctgccaccatcgttcctgtctgccgttcttgctccgtctacaaagggcgagaagaaagtgaggagcatcttagaggacctttgcggcaatgtccatagtatttattggaaaggcgaagatgacgtggcagttgctggtctgggaggtgaatcagaggtccatccttacgtctcattcaccataaactntgtttgagcattactggtgttacgccgtcaagtaaatcgaaacgatggaatggttctgtacattgctagtgttacggcaattctttggtgatctn

SEQ ID NO: 96454 - DNA, 522 bp, Zea mays
  unsure (1)..(522): unsure at all n locations
aggatgaggtgtgtcatgaatgggagtactctatacccgtccggaattcccgggtcgacccacgcgtccgcgcccagtcgtcgtcctacgccgccgtgccgtgcgggggccccgtgtgcgcggggctgggcatctacgccgcgtccgcctgctcggcggcgcagtgcggggcttcttcttcggctgcgggcacgcgcagagcgggctgttcaacggcgtcgacgggctcctgggcctcggccgcgagcagccgtcgctcgtggagcagacggcgggcacctacggtggggtcttctcctactgcctcccgacgaagccgtccaccgcggggtacctgacgctgggcctgggcgggccgtcgggcgccgcgccgggcttctccacgacgcagctgctgccgtcgccgaacgcgccgacctactacgtcgtgatgctgacggggatcagcgtcngcgggcagcagctgagcgtgcccgcgtcggtgttcgccggcgggaccggggtggacaccggcacggtcgn

SEQ ID NO: 96455 - DNA, 527 bp, Zea mays
ggttcctgggctgaccatcaggaggaagtaaagtagtgctcgtaccggttcggaattcccggctcgacccacgcgtccgcctcaatgccatgaacaagctcagcaccatgaagccgtggtccctgtctttctccttcgggcgtgccctccaggcgagcaccctcaaggcctgggctggcaaggtggagaacctggagaaggctagagctgccttcctcgccaggtgcaaggccaactctgaggctaccctcggcacctacaagggtgatgctgccgccgacaccgagagcctccacgtcaaggactacaagtactgagttgcttctctttgcgtgcccgttttggaactcctgcctacgagctaggttgcggagtgtggtttgctcgttagagcttattttcggacatccaaaaaacatgcttcctatgtgggatgatggttatctttatatttgtatgttaattagtctctttgctggtaaatttcgtgtaagttggtcctgccgatggagaatcgagcagctccc

SEQ ID NO: 96456 - DNA, 544 bp, Zea mays
  unsure (1)..(544): unsure at all n locations
agacatggttgctnanggnctgggggcccttcncgagactgnatcttcctggaattaccgggtcgacccacgcgtccgaaaagattgattctgagaatctgctacatttggcatttagtgtgttccttttcaactcagagtatgagctgctacttcagcaaaggtccgcgacaaaggttacctttcctttagtttggaccaatacctgctgcactgcatgtttatcaaaagttatcgctcctgctcgcggaaagtgagcttgactgttgccggggtggaagtatcgttttggactgatgcatgagtgctgcggaggggtttgttgtttggttgtttgttcggtgaccgaatcgcgagctggacgcctgtttaatccgtgcttatacatcggctgaagtaacagcaataagagggacaatccgtagctctttccgaaaaaaaaaatttttgttattcttttttcttttaattcttattattaaatatttctgtataagttataaaaataaaagggccgccgttttaaagtttccagcttaacctt

SEQ ID NO: 96457 - DNA, 523 bp, Zea mays
  unsure (1)..(523): unsure at all n locations
agtaatgtctaagccatgccattgattaggctgactcacnnctgaatttccgggtcgacccacgcgtccggccgctaccgcattattacagagagaacactcctagccatgcctgaaaatggtattggcgtgttcggagatgttggctttgcttacattggtgcaaaagcaccaggagggggtgcagttggagtttaccttgggattactggaaaaaggatatcatcacctgctgatgctatgttcataggccttggtactcactatgtaccttctgcaaatttgggttcactcaaggagtccctgctgagtgctaacttcaccaatgatcctcatagagacgttgagtcagttctgacaggatacaagaaagaaccagagtctgaaccacaactaaaaaagcttttgccatatatcatttcttctttcagtcctgataaatcagtggctgaatctgtggaagagctaaagaaatgtagccgaagtggtgatgctgcaatggcagaatgggccaatgaagctn

SEQ ID NO: 96458 - DNA, 517 bp, Zea mays
  unsure (1)..(517): unsure at all n locations
tgttatgctgatatgttttgggaggaatgcttccnctggaattcccgggtcgacccacgcgtccgtttcgcccgtcgcgcccctgcgactgcgactgcgacggagagccagtggggtctgggatgagacatcgaaatgacgctttgtgattcttaagctcatccatttcttgtcagctgcacggatgacaaactaagttctctattgtgttgacgggtgcagttggatgactgggtcctgtgccgcatctacaacaagaagggcggcgggctggagaaggcgccggcggccggcggcgaccacaagcctgtgttcgccacggcggcggtgagctccccgccggagcagaagccgttcgtggcggcggcgggcgggctgcccccggcgttcccggaacttgcggcgtactacgaccggccgtcggactcgatgccgcggctgcacgcggactactccagctgctcggagcaggtgctgtccccggagcagctggcgtgcgaccgggaggtgcaaaacc

SEQ ID NO: 96459 - DNA, 531 bp, Zea mays
  unsure (1)..(531): unsure at all n locations
agataacgcgcttgtgccatccaatcgaaatactgatgtgctccccggaattcccgggtcgacccacgcgtccgagctgctctcgtccctagaaataaagcagctcctccgcggggcggcgaactactacccatcgccgaaaccctagccccgatccggtcgaggagcactacttcttggcatggcgggcacccctagccaggcaagcctcctgctccagaagcagctcaaggatcttgcgaagaaccccgtggatgggttctccgcagggcttgtagacgatagcaacgtcttcgagtggcaggtcaccatcatcggcccgcccgacaccctatatgatggaggctacttcaatgcaataatgaccttcccccagaactatcccaacagcccgccatcagtaagatttacttctgggatgtggcatccgaatgtttatccggatgggcgtgtttgcatttctattcttcatccaccttgtgaagatcccaagtgttatgagcttgcangcgaacggtggacaccagtgct

SEQ ID NO: 96460 - DNA, 532 bp, Zea mays
  unsure (1)..(532): unsure at all n locations
aggtnatgtggcttggcctggggatgtagagggaatgatagtactcgtccggaattcccgggtcgacccacgcgtccgctctacgacatcaacaccgaggagtccagcatcggcctgcgcaatgtgcggtcctttggaaccgaaggtcggaagaaagacggagtgcagattcctgctagcgacaaagtttacgagtatatcctcttccggggaactgatatcaaggatttgcaagttaagtcatcaccaccacagccgccaccaccacaagcagcttccctgcacaatgatcctgccataatacagtcacattattctcaacctgcatcaacgtcatcaagtttgccttcagctgggggtgcagttttaccagactttagctcccaggcagttcaatatgggcttcagaggccaacctttcagagtaaccttcctctctaccaaccagggaatactccgtggggctcttcagtggcacctncagcaggaaaatgctcattgggctcttcagtggcgcctccacaggaaatgt

SEQ ID NO: 96461 - DNA, 526 bp, Zea mays
  unsure (1)..(526): unsure at all n locations
tggactcgtgctgtccatgaggaaaggggatcgtagcactcgtccggaattcccgggtcgacccacgcgtccggaaaaatgagatggaggagaagaagggcctgtacgccaagttctggaatgagtttggcagatcagtcaagctgggtatcattgaagacgcaactaacaggaaccgccttgcgaagcttcttagatttgaaagtaccaagtcggatggcaaacttgccttccttgacgagtacatttcaaggatgaagccagggcagaaagacatcttctacctcacgggaagcagcaaagagcagctggagaagtctccgttcctcgagaggctaaccaagaagaactacgaggtcatcttcttcaccgaccctatggacgagtacctgatgcagtacctgatggactacgaggacaggaagttccagaacgtgtccaatgagggcctgaagctgggcaaggactcgaggctcaaggacctcaaggagtcgttcaaagagctgacngagtgctggaagaagac

SEQ ID NO: 96462 - DNA, 523 bp, Zea mays
gtagtaggtctgccatgatggaggggtaagtattgctctaccggttcggaattcccgggtcgacccacgcgtccggttcgccgccggccggcccatcggcaaggtggacctgtcgtggaactacctcgacttcgagctcagcaggctggtgttcccgccggagctcacgtacctggacctgtcccacaacctcatccgcggcaccgtgccgctgtcgctggagcgcctgtccacgctgcagaagctggacctcagctacaaccgcctgtgcggcccgctccccaaggggcacggcgtcatcaagcacgggtgcaagccgtacgcgcacaaccagtgcagcaaagggaccccgctcgcgggatgccaggacctggagtgagtgagtgagccggtggccatggttttctatactctgctatgctctccctcgccggcgttccaatcgtgggtgtgtgtgaaggacgacggtacggtgcctggtttagttatagacaaaaaaggtacggccgcgtggtggcggtgc

SEQ ID NO: 96463 - DNA, 531 bp, Zea mays
atggtatatgcgctgcccatccagaaggggtatagtagcgctcctaccggtctcggaattcccggctcgacccacgcgtccggtctgccatggccagcgagaataaggtctttgggttcgaggaagtcgccaagcacaacggcaccaaggactgctggatcatcatcgccggcaaggtgtatgacgtcactccgtttatggatgagcatcctggtggagacgaggttttgctagctgtaactgggaaagatgctacagctgatttcgaagatattggccacagtgattccgcaagggacatgatggagaagtaccacatcgggcagatagatgcttcaacaatcccagcaaagcgtgctcatgtgcagccccagcaagcacccagccatgcagacaaggataatgacctccccatcaagatcctacagttccttgtgcccattatgatcctgggccttgcatttggtatacggcagtacaccaaatcagagtagtaactattcttagaggcttgccttttgagcctgtctt

SEQ ID NO: 96464 - DNA, 531 bp, Zea mays
  unsure (1)..(531): unsure at all n locations
tgatgcgctgtccatgcaagttgtggaggagagtaactgcacttgaatttccgggtcgacccacgcgtccgcccacgcgtccgcctggcgccgccagatgccacgcctcgcgctcaccctcggactcgaggaacaaatggccgatatcattgaggaactgattgctaagaggcagcagcttgatgctgtaaatttcgcttatgaggctgggcttcaggagaagttccctccagttcctcttttgaagtcctacctggaagactctaagaagacatcaaccgctgcttcagataattcaagcactagcagcggccaatcagggagcaatgtgaacaagaaagaacagtctgcactgcgagctgtcatcaagtgtgttgaggatcgtaaactagaagctgagtttccactggaggggtcttcggaagcaactttgaggaactagagaaagccaagaccgagaagaagaaagcagcatcaagcgctaacaagtgccggagcggcggccttgaaccaagcgcaatcgtgcgagan

SEQ ID NO: 96465 - DNA, 523 bp, Zea mays
agatatgtgcctagctagtttggggatgcatgctccgctctggaattcccgggtcgacccacgcgtccggaaatgatctatctggctggtgctgtgcttgcttgttggttacctcgtggaagcttaaagtatctcgtcttgttgacatccttgcagttgtcgcgtgaacaagtaatctatgatggcaatgtttgcctggtcatgaagtattattactttcgttgaaaccgtgatgctattaagacttaattttttttatggaacatcgaatgtaaggcatacatggttaaaaaaaaaaaaaaaaaaaaaaaaaagggcggccgctctagaggatccaagcttacgtacgcgtgcatgcgacgtcatagctcttctatagtgtcacctaaattcaattcactggccgtcgttttacaacgtcgtgactgggaaaaccctggcgttacccaacttaatcgccttgcagcacatccccctttcgccagctggcgtaataacgaagaggcccgcaccgatcgccctt

SEQ ID NO: 96466 - DNA, 534 bp, Zea mays
  unsure (1)..(534): unsure at all n locations
agatagtggtgctagtgccgttaccgcncgnagctgcactcncactctcggaattcccgggtcgacccacgcgtccgcccacgcgtgcgtccacgcgtccgaccactcgtctttccacgcgtccgcccacgcgtccggccaggcgtcctcccacgcgtgcgcccacgcgtccgcaacacatggttgatcaactgacagaacttcataaaaaagaacaaatgctttgtgaagcaaataagtgtcttcgaagaagactggaggagagcaaccaggttatatggcagcatgcgtgggagcaaagcgagcggcattctgaagtgcagccgcagcagctcaatggcaataacttcttccatcctctcgattgtgctggtgaacccacccttcagatagggtatccttcataggcactgactagctcatgcatgaccaccttgctgccctcgtggttgccatgagatccaactactgcccaattccgaattaataagcattgccctattgcaactgcctgtgctataccttgtgcttagt

SEQ ID NO: 96467 - DNA, 533 bp, Zea mays
  unsure (1)..(533): unsure at all n locations
agttctggagcgcttggccccatcgcaacacgtagcntcnagtcctgtccggaattcccgggtcgacccacgcgtccgctggaggcgacctggcaaaggtccagcgtgccgtgtgtatgatcagcaacaacactgccgttgctgaggtgttctcgcgcatcgatcacaagttcgaccttatgtacgccaagcgggcgttcgttcactggtacgtcggtgagggtatggaagagggtgagttctccgaggcccgtgaggacttggctgctcttgagaaggactatgaggaagtcggcgcagagggtgcagatgacgagggtgacgagggcgatgactattgagtagccggttaataattagttcgctggtgcttaatggttgagttattttgagtatactctgtatgggtccactccattgcgtgctgctgctgtgtgtttccattttgtattttgtgataaattgttcgtagccccctattggccatgattgttggtcatatcatcctgctttgatttgcaatgccattcatc

SEQ ID NO: 96468 - DNA, 532 bp, Zea mays
  unsure (1)..(532): unsure at all n locations
nagttnaaatgtgcgtggcagtgggtaagggggagcgtagtactcgtccggaattcccgggtcgacccacgcgtccggttgggttcaagggttttgcagtgccaaaggagcagcaggataaggttgtcaaatttgagtttcatgggcagccagcagaaatcaagcatggtagtgttgttatagcagcaataactagctgcacaaacacctcaaatcctagtgttatgcttggtgctggtcttgtagctaagaaagcttgcgagttgggtcttgaggttaaaccatgggtgaagacaagccttgcccctggatcaggagttgtcacaaagtacttgcttcagagtggtcttcaagaatacctcaaccagcaaggattccatatcgatggctatggctgtaccacttgcattggaaactctggtgatctcgatgaatccgtatcaactgccattacagaaaatgatgttgttgctgctgctgatatgtcgggtaaccgtaacttcgagggtcgtgtgcaccccttaactcggct

SEQ ID NO: 96469 - DNA, 536 bp, Zea mays
  unsure (1)..(536): unsure at all n locations
agttctgtctggttnngccgctcacgctcgcgatgcactgctcgtaccggttcggaattcccgggtcgacccacgcgtccgagacgctctactggcgcggcgtcgtcggttttgtgtgccactgctatcctgtgatctgggctgagtggctcctatcgtgttatgtttctgtcggttcttatctatctgtcgctgtgtggtttacaacttacgtcgtaagactttattcccccgctttgctactgggttattaagtttgtcgttattgttttcttgatctcaaactactactttatcctatccattaaaatagtatatcacttctacaatgactacaagtttgctcatattctttacatctgcagcgaccaaaaaaatgggcctgccgttcaatacgttccaagcttatgtacccgtttatttaacgccttatctttttttacgtgtcaccttagattacttaacttgctggtggttttaaatgttcttacctgtaaaaccctttgctttcccagcataatgcgtcttgcttcatt

SEQ ID NO: 96470 - DNA, 529 bp, Zea mays
  unsure (1)..(529): unsure at all n locations
agggagcgtatgccactcagggtgggaaggagagtagccgctcccggaattcccgggtcgacccacgcgtccgactagttctagcgcgacccgcagctggcgcggctgctgcagagcatcccgcagcgcaaagtgctgtgcaccaactcggaccgcgcgcacatggagcgggcgctggagcggctgggcgtggacgaggccgccttcgacgccgtcgtgtgcttcgagaccatgaacccgcacctgttcggcgacgacggtggcgaccggcgcccggccgtggtgctcaaaccggcggtggacgcaatcgtcgccgggctgcgcgccgctggctccaacccacgccggacgctgttcctggacgacagcgagaggaacatcgccgcggggaaagcgctcggcctncgcaccgtcctggttggcaagagcgcgaggagcaaggaagcggactacgcggtggagagcatcggcgcgctccggcgggccatcccggagatctggggcgaggccgcttgacgctccttcgaca

SEQ ID NO: 96471 - DNA, 520 bp, Zea mays
  unsure (1)..(520): unsure at all n locations
agatatctgnctaggtggttgggaaaggatacccgctcttgaattcccgggtcgacccacgcgtccgcaaagtggacaaccctgtcgccctctcggtctccctcgagcttttcttgtgcgcagccggagccgctgcttttcgttcgtcttcatcctacgcgagggcgaaacccacaaaccctctccctcctgtactccggccgacacatccaggggcgatgacgctgggtagctccggcgccggatcgagcgtcgtcgttcctcgaaacttcaggctattagaggagctcgagcgtggagagaagggcattggtgatgggacagtgagctatggaatggatgatgctgatgacatctacatgcggtcatggactggtaccatcattggccctcacaatttgctttgtgacaaagactatccggagaagccaccatctgtcagattccactcaagaatcaacatgacatgcgttaatcacgagacaagaatggttgatccaaggaagtttggtttgctagc

SEQ ID NO: 96472 - DNA, 519 bp, Zea mays
agttatgctgatagtggttttaaggaatgatacctcctggaattcccgggtcgacccacgcgtccgtaagaacccaaaggatcccctttggctggctgttttcccagaaggcactgattatactgagaagaagtgtatcaaaagtcaagaatatgcagcagagcatggtttgcctgttctgaaaaacgtactccttcccaagacaaagggtttcaattgctgtttgcaagtgctgaggagtaccatagatgctgtgtacgacatcacgatcgcctacaaacaccggccgccgacatttctggacaacgtctacggcgtgggtccttcggaagtccacatccacatcagcagcatccaggtctccgacataccggcgtccgaagacggggtggctggctggctggtggaacggttcaggctcaaggacgagctgctgtcgggcttcttcgcgctgggccactttcccgacgaaaggaaaaggacccgaggggacctgtcgacggccgactggctcgccaa

SEQ ID NO: 96473 - DNA, 528 bp, Zea mays
  unsure (1)..(528): unsure at all n locations
aggtatgagcgttatgccgtcacccgtccnattgcagtatcgcctcggaattcccgggtcgacccacgcgtccgcccacgcgtccgcggacgcgtgggccgaagctgctctgtcctttgaagatacaaaagatgcttgggccgaagctagcataattggtggaaaattttttaccgatatctgggataatggtggccgagagatggccggagaaattattcgaagaagtgagaagggcattcacgatgctagagaagtagctgaggctgctgacaagagcgcagaagccgaaggtcaattaggtactaaataatagttcttatcgtgttgtaatctttaggcttttaagatctgtttgcgatttgtaatagcaatgtagccgggtcctgcttcagatccgactaaagcgccttcggaccctcagccgaagggggacgacgaaattaaaaagatggccgaagatatcatggaccaagttgttgatcgaactgttgaacaaagcgtcataagtggtctaaggaggactaa

SEQ ID NO: 96474 - DNA, 530 bp, Zea mays
agttccgctggtggcccgtcccgttagcgatgcactgctcgtaccggtctcggattcccgggtcgacccacgcgtccgcggacgcgtgggcgatcagactcacattcttttccgaggtagcaaattaactgaggtccggcgtgactcattcattggagactcacgcactgtcatgatatcatgcatttctcctagttctggctcttgtgagcatactctgaacacattgagatatgcagacagagtgaagagtttgtcaaagggaagcaatgccaagaaagatgtgtctttggcagtgcctttaagagagtcgagcccttcctcactgccttcagatgtaccctcattctctgcatctgaagtgatgaatgatatcaccgagagaaacaattttggttggcccaagcagcagtatgttaaagaacggcctgctacgacatttgttgaacgaatgcccaaagtgaaagatgccgtggagttcggaacatcagacagtgcttatttgaaaggacaaatgagcccatgctgtg

SEQ ID NO: 96475 - DNA, 534 bp, Zea mays
  unsure (1)..(534): unsure at all n locations
agttttatagtgttgngacgtaccagttatgtgatggtagtactcgtactcggttcggaattcccgggtcgacccacgcgtccggcaaaactgaactttgctgataatgctgtttttagacagaaagaaatatttgcactgcgtgatactactcaggaagaccccatggaggtcgctgatgccaaagcagatttgaactatattggtcttgatggagagattggttgcatggtgaatggagcaggattggccatggcgaccatggatattataaagttgcatggtggtacgctcgccaattgtcttgatatcagaggaagtgcatcagagggtcatgttgtgcaaactctcaagatactgacttcagatgatagagtgaatgcaattctagtgaacatttttggaggcattatgaaatgttatgtgatagcaagtggaattgataatgcagcncaacatgttgacctgaaagttcctgaggtagttcggttggaaggcacctatttataccaaggaaagaggattctttaggac

SEQ ID NO: 96476 - DNA, 522 bp, Zea mays
  unsure (1)..(522): unsure at all n locations
agagatctgttcagtaggggggggggagagtaaccctcccggaattcccgggtcgacccacgcgtccgcccacgcgtccgcggacgcgtgggcgccgtttccgcattcgactccgccgggttcggtgtggcggtgcagccgcccggctccagtgccgtggatttcagtattcaggatgtcaagggctcatccaaaagcttccccaagcacgaggtgaagcatgtctctgaccataagaacgctgcccggtgtgcgaaatttagtcctgatggaaagtattttgcaactgggagtgctgatacatccattaagttttttgaggttgctaagattaagcagactatggtaggagactctaaagatggccctgccaggcctgtgatacggacattttatgatcacacacaggccatcaatgatctggattttcatcctgagagtccaatactgatatcagctgccaaagacaggacaataagattctttgacttttcaaaaaccaatgcnaggaaagcggtcata

SEQ ID NO: 96477 - DNA, 525 bp, Zea mays
  unsure (1)..(525): unsure at all n locations
agggagtgtagtttcagctccactcagatgagcgtaccagcnctggaattcccgggtcgacccacgcgtccgcggacgcgtgggcggacgcgtgggcgtggttgagcggatcgagatggcggcgtcggatggtgagtaccgctgcttcgtcggcagcctcgcctgggccacggacgaccactccctccacaacgccttcagcacctacggcgaggtcctcgagtccaagattatcctcgatcgggagacgcagaggtcccgcggcttcggcttcgtcaccttctccacggaggaggcgatgctgaacgccatcgagggcatgaacggcaaggagctggacggccgctacatcaccgtcaacgaggcccagtcccgcggcggccgtggaggcggctgcagcagctaccgtggtggccgaggaggctgcggctacagcggtggcgggcgccgtgatggctgcggcggctacagcggtggctgcggctgctacggtggcggcagtggctactgtggtggttgtggccn

SEQ ID NO: 96478 - DNA, 497 bp, Zea mays
  unsure (1)..(497): unsure at all n locations
cggaggacccgccccggaattcccgggtcgacccacgcgtccgcggacgcgtgggcggacgcgtgggcggacgcgtggggacgccctcaaggaggacgccgggtccaggctcaccatggtctccaccgaggagatcctcctcgagcgcccccgcgccccagggagcaaagctgaggagtcagctgcatctggtgatccgctggctatggcgagcaagggaggtgctgttctcatggtttgcagaacctgtgggaagaagggcgatcactggacctcaaagtgtccgtacaaggacctggcaccaccgactgaaactttcacggacaggcctncaacgtcagatggccctcctgcaccaggtggtcctgctaagggagcatatgttcctncaaccatgagaggaagtgctgataggactggagactcgatgcgccgcaggaacgacgagaattccgtccgtgtgaccaacctctcggaggacacccgcgagcctgact

SEQ ID NO: 96479 - DNA, 529 bp, Zea mays
  unsure (1)..(529): unsure at all n locations
tgagagtcgtgatgctgatgtctgggaggagatgtactcctcnctggaattcccgggtcgacccacgcgtccgcggacgcgtgggtaactcgtctgctcgcatttcctcccaatccatcccgcctccaaaccggaactgcaagtcgccccgcatcgatggcgcccaaggccgagaagaagcccgcggcgaagaagccggcggaggaggagcccgctgccgagaaggcgccggccgggaagaagcccaaggcggagaagcgtgtcccagcaggcaagtccgccggcaaggagggcggcgagggaaagaggggccggaagaagggcaagaagagcgtggagacctacaagatctacatcttcaaggtgctgaagcaggtgcacccggacatcggcatctcctctaaggccatgtccatcatgaactccttcatcaacgacatcttcgagaagctcgccgccgaggccgncaagctcgcgcggtacaacaagaagcccaccatcaccttccgtgagatccagacctccgtgc

SEQ ID NO: 96480 - DNA, 526 bp, Zea mays
  unsure (1)..(526): unsure at all n locations
tgggtctccgtctgtccctgcnagagaagtagcgtgctacccgtccggaattcccgggtcgacccacgcgtccgcggacgcgtgcggaactgccatcataaggtacgcgatacatatgcggaattcattggtggcctacttctacacgctgttcagagaggctcgagtaaatggcatctctgtcatgcgtcctttatggctagaatctcctgacgatcaagaaactcatcacactggcgaggcatccatggtgggacccagacttttagctcaaggaatatacgactagggccagaaatcagtgtcggtctaccttcctgggaaggagtcatggcatgactcgagaaatggatctgcatacaagggaagcgcgacacacatgctacaggatctagaagatagccattccagcttccatagaggctgtacaattgagccagacaggacagactcagacgcatgtatactcacatggtgaatgatccatacactctgntgataacacttaatagcttaggtgctggga

SEQ ID NO: 96481 - DNA, 530 bp, Zea mays
  unsure (1)..(530): unsure at all n locations
tgtttcagtggtggncccttcncgatcctncgctcagctncgcctggaattcccgggctcgacccacgcgtccgcccacgcgtgcgcacacgcgtgcgcagtttcctgttttttactatcaggtacatctgtgtattgtgactgatgtactaccggcaaatctttatgagtttcagaaatataaccagcagtctggtgactaggtgtactattcactgctcagaatacacgctatagctcgacaatgcttggaggactcggtgtacttgcatcatttaaacatagttcactgtgatctgaaaccatagaatatccttctgaagagctacagccgatgtgaaatcaaagttattgatcttggaagcagctgcttcttgtcagataacttaaacttatatgtccaatcacgtgcttaccgatctcctgaggtcatctcgggtttaccatatgatcagaaaattgacatttggtctcttggctgcatcttatctgaactgtacactggtgaaatactctttcctaatgaattn

SEQ ID NO: 96482 - DNA, 523 bp, Zea mays
agattacagtgtggcccgtacgcttgcgatgcactgctcgactcggtctcgattcccggtcgacccacgcgtccgcccacgcgtacgcccactcgtccgcggactcgtgggttttactatcaggaacagggctgggttgacactgagttactacgggcaaatctttatgagtttcagaaatataaccaggagtctggtgacgaggtgtacttttcactgcccaaaatacaggctatagctcgacaatgcttgaaggctgtggtgtacttgcatcatttaaacatagttcactgtgatctgaaaccagagaatatccttctgaagagctacagcagatgtgaaatcatagttatagatcttggaagcagctgcttcttgtcagataacttaaacttatatgtccaatcacgttcttaccgatctactgaagtcatcttgcgtttaccatatgatcaaaaaattgacaattggtctattggcttcatcttatctgaactgtacaatggttaagtactctttccta

SEQ ID NO: 96483 - DNA, 532 bp, Zea mays
agaatgatgtggtatcccacgcgatgatgtattgtattgctcgtaccggttcggaattcccgggtcgacccacgcgtccggcttcatcgaggtgtgctggttgccaaggttctggctttaaggtccaaatccggcagtgggggcctggaatgatccagcaaatgcagcatccttgcaacgagtgcaagggttctggagagacaatcagcgacaaggatagatgcccacagtgcaagggtgataaagttgtgcaggagaagaaggttcttgaagtgtttgtggagaaaggcatgcagaatgggcagaagatcacattccctggtgaagctgatgaagcgcctgacactgtcactggagatatcatttttgttctccagcagaaggagcatcccaagttcaagagaaagggcgatgacctcttctacgagcacaccctgaccttgactgaatctctgtgtggcttccagtttgttgtgactcacttggataacaggcagctgctgatcaaatcaaatccgggcgaagttgtgaa

SEQ ID NO: 96484 - DNA, 528 bp, Zea mays
agtttgcgatggctggccatgaggtaggagaatgagattgctctaccggttcggaattcccgggtcgacccacgcgtccgcccacgcgtccgatacgtaacatttctcgtcctgtggatgttcctgacgttggtcttctatgtgatctgttatggtcggaccctgataaagagattgttgggtggggtgagaatgacaggggtgtttcctacacctttggagctgacatagttgctgagtttcttcagaaacatgatctagatttgatctgcagggctcaccaggtcgtagaggatggctatgagtttttcgcaaatcgtcggcttgtaacaatattctcagcaccgaactactgtggagagtttgacaatgctggtgcactgatgagcatcgacgactccctagtatgctcgttccagatactcaagccttctgaaaagaaaagaaaagcaggagctgagaacatgccaaagcccggtacaccttccaggaagataaaaataagtgttacccgcatttagccagatt

SEQ ID NO: 96485 - DNA, 519 bp, Zea mays
  unsure (1)..(519): unsure at all n locations
tggaggtgtctacgtactttgtcagaagctgcactcctggaattatccgggccgacccacgcgtccgcggacgcgtgggcggacgcgtgggcggactcgtgggctggcttctcctccccctcttaggcaatgtcctcgggttagggttccttacggttttgtggaggggcgatggcggcggctgatgtggagtaccgttgcttcgtcggcgggcttgcctgggccaccagcaacgagtcgctggagaatgccttcgcctcctacggcgagatcctcgactccaaggtcatcaccgaccgggagacggggaggtctcgcggcttcggcttcgttaccttctcctccgagaactccatgctcgacgctatcgagaacatgaacggcaaggagctcgacggccgtaacatcaccgttaaccaagcccagtcccgtggcggttgcggtggcggcggtggctacggccggngtcgccgcggccgccgctattgtggccggcgccgtgactgccgttatggcggc

SEQ ID NO: 96486 - DNA, 524 bp, Zea mays
agatatggtgaccatgatgtagggagaagtatacttcgtccggaattcccgggtcgacccacgcgtccgcccacgcgtccgcccacgcgtccgcggactcgtgggttttactatcaggaacatctctggattggcactgagttactacgggcaaatctttatgagtttcagaaatataaccaggagtcttgttacgaggtgtacttttcactgcccagaatacaggctatagctcgacaatgcttggaggctttggtgtacttgcatcatttaaacatagttcactgtgatctgaaaccagagaatatccttctgaagagctacagcagatgtgaaatcaaagttattgatcttggaagcagctgcttcttgtcagataacttaaacttatatgtccaatcacgttcttaccgatctcctgaggtcatcttgggtttaccatatgatcagaaaattgacatttggtctcttggctgcatcttatctgaactgtacactggtgaagtactccttcctaatgaatc

SEQ ID NO: 96487 - DNA, 527 bp, Zea mays
  unsure (1)..(527): unsure at all n locations
tgggacgaaggcatgtttggatgggagggagaagaagatgatctaccggttcggaattcccgggtcgacccacgcgtccggctcactgttgaggagcgtaacctcttgtcggtcgcatacaagaatgtgattggggctcgccgtgcttcatggcgcattgtctcttctattgaacagaaggaggagtcccgtaagaacgaagagcatgtgaaccttatcaaggaataccgtgcgaagatcgaggctgaactgagcaatatctgtgatggcatcctgaagctgcttgactcccacctagtgccttcttctactgctgctgaatcaaaggtcttctacctcaagatgaagggtgactatcacaggtatcttgcggaatttaagactggtcctgagaggaaggaatctgctgagagcacgatgatggcctacaaggctgctcaggacattgcgctggctgagctggcacctacccatccgataaggcttgngcttgctcttaacttctcagtgttctattatgagattct

SEQ ID NO: 96488 - DNA, 527 bp, Zea mays
  unsure (1)..(527): unsure at all n locations
tgacagcatagtggttgngacgtgcaagcttgtgatgttgctaatcttccggcctggaatacccgggtcgacccacgcgtccggctgagcgttcacgagcgcaacctctcgtttgtcgcatacaacaatgtgatcgggactcgccgtgcttcatggcgcattggctcttctattgaacagaaggaggagtcccgtaagaacgaagagcatgtgaaccttatcaaggaataccgtgcgaagatcgaggctttattgtgttatatcttatatgtcatcctgaatttgctttactcccacctagtgccttcttctactgctgctgaatcaatggtcttttaccttatgacgatggtttactatcaaaggtatcttgcggaatttaagactggtcctgataggaaggaatctgttgagagcacgatgaaggcctacaaagctgctcaagacattgcgctggctgatctggcacctacccaatccataaggcttgggcttgtttttaacttctcagtggtctattattagat

SEQ ID NO: 96489 - DNA, 531 bp, Zea mays
atggtaggctgtatgctcgggcgccgtggggggatgggttccgtcctggaattcccgggtcgacccacgcgtccgcggacgcgtgggcaaccggcggtccatcttgagaggaccaagaaacagagagagcggttgtacgtccgagtcgtcgcatcaggtcccctcgattcgccggcggcggcgccaccaaccaagctcatacatctgaattgactagtccaactcagggatttctttggggaccaatcaaactcaagaactaagtttcatgtctgatctcgacgtccagcttccatctgcttttgatccgtttgcagaggcaaatgctgaggactccagtgctggtgctggatcaaaggactatgtgcacgtgcgtattcagcagcgcaacggaaggaagagtctgacaactgttcagggcttgaagaaagagtacagctacaacaagatcctcaaggatctcaaaaaagagttctgctgcaatggtactgtagtccaggatccagagctaggccaggtcattcaactgca

SEQ ID NO: 96490 - DNA, 522 bp, Zea mays
agttatgtctgatgtgggttaagggaaatggaatcgtccttgaattcccgggtcgacccacgcgtccgcaggaacacttatctagccaagcaagaagagtgcacgaagaagatccgagatttgggcttgttgcctgctgatgcttttgaagcgtacaagaggaaacaagaaacagctacataagatactctatgactgtaatgagcagttgaagcagtttagtcatgtgaaccaaaaggctcttgaccaatatgtgaacttcacagaacaacgcgaacaactgcagagaaggcgagctgaacttgatgccggtgatgtgaaaatcatggaactcatatcggttttagaccaaaggaaggatgaatccattgagcgcacatttaaaggggttgcaaggcacttccgtgaaagtgtttctgagctggtgcaaagtggtcatggatatttggttatgatgaagaaaaaggatggggatgcaattgatgatgatgaagaagaagatggacctcgtgatccaagccc

SEQ ID NO: 96491 - DNA, 528 bp, Zea mays
agagatcatggttcgccatgatgggggggaaaaagtagtgctctaccggatccggggtcgacccacgcgtccgggtggagcttctttgaagcctgagttcatcgacatcatcaacgcggccaccgtgaagggcgctgaagatgttacgctgaagacgaacatactttttttttgctcaactgtgctatgtaagctagtagcttttgcgcaggagcagagactgttttgcctgcccccaacttttagcttgagcttgctaataatgtttacctctggacgtatcaataatggtgcttatgtaccccttttttgtgccgaattacggtggatccgtcatctgaaccatgggtttggtgtatgtaattgcgtcacccgatgcctaaggtgagactgaagtttttggacatttgggacaaggtagccttgtgccccacattggtcgaatgctgccaaaactgtaccggtcatctgtgctccgtacggattagcctgatctgcgaatgcaacttgtcagctaatcgttgcacg

SEQ ID NO: 96492 - DNA, 536 bp, Zea mays
  unsure (1)..(536): unsure at all n locations
agatcgtactgagcatgatgtggtgggggtatcagtatatacttcctcnncnttngaaatcccggctcgacccacgcgtccgcccacgcgtccgctagccagccggcaaatatgagctgctgatggtaatgatgatgataagaggccactgctaccctactacgtaccctcctctttgtgtgctgccatccgtccccgttagacgatcgaggagagaataacgcagagctctctgctcccggcctgtcttctgccgtcccggccgtttaatttactagtgtgttcgtcctatatgtttagcagcagcaggtgtattgtgcgggtatgtaatggtattgcaactatattgggtgtaaaaccataataaatgtgggcaaatatgcaaggaaaaaaaaaaaaaaaaaaaaaaaaagggcggccgctctagaggatccaagcttacgtacgcgtgcatgcgacgtcatagctcttctatagtgtcacctaaattcaattcactggccgtcgttttacaacgtcgtgactgggaaaaccct

SEQ ID NO: 96493 - DNA, 525 bp, Zea mays
cgatcgtgctgtccatgacaggaaggtatgctgccccgctctggaattcccgggtcgacccacgcgtccggccagtcagccacatcactagctagctgtgcagaggcaatggcgtccaaggttgagctggtggtggaggtcaagtccccggctgacaagctgtgggcggcgctgcgcgactccacggagctgttccccaagatcttccccgagcagtacaagagcatcgagaccgtcgagggcgacggcaagtcggccggcaccgtccgcctcctcaagtacaccgaggcggtgccgatgctgacgttcgccaaggagaagcttgagacggcggacgacgagaacaaggtggtgtcgtacagcgtggtggacggcgagctggcggacttctacaagaacttcaagatcacgctgaaggtgactccggccaaggcggacggcgagggcggcgccgtcgtcagctgggccatggagttcgacaaggccaacgaccaggtgcccgacccggacgtcatcaaggagacc

SEQ ID NO: 96494 - DNA, 524 bp, Zea mays
agtgcgtggtgggccttgcacagctattagtagtcgctcctccaatttccgggtcgacccacgcgtccggaagaaatggtacctcacaccatctgtcattgcgcttatgggaggactgcttccttttggtagtaggtctattgagatgtactttggcttcacatcgttctggaactataagggctactatgtttacgggttcatgtcgctgggctttctgatactcatcattgtcaccatatgtgtaacaattgtcggctcatatttcttgctaaatgcggagaactaccactggccatggacttcattcttctctgctgcttccactgccgcgtatgtttacctatactccatatattattaccacatgaagaccaagatgtctggattctttcagaccagcttctataacggctacactctaatgttctgcctacgcttatgaacactatgctgtgccgactagtatcttggatcgacatttgttgtgaagaagatctacaggaaccataagtgtgactaat

SEQ ID NO: 96495 - DNA, 527 bp, Zea mays
aggaatgcagtgcttaggccggtacgggccgctacgcactgccgtactcggttcggaattcccgggtcgacccacgcgtccgcggacgcgtgggtgcgcctctacatttcttctctctctgctcctccgcctccgcctgatgcatccaagacagggatcgccatgtcggactcggaggagcaccacttcgaatcgaaggccgacgctggggcgtccaagacctacccgcagcaggctggcaccgtccgtaagaacggcttcatcgtcatcaagaaccgtccctgcaaggttgtggaggtttctacctgcaagactggtaagcatggccacgccaaatgccactttgtcgccatagacatattcaatgggaaaaagcttgaagatattgttccttcatcacacaactgtgacattccgcatgtgaaccgtactgagtatcagctgattgatatttctgaggatggatttgggagccttctgacttcatatggcaacactaaggatgaatctagacttccaactgagat

SEQ ID NO: 96496 - DNA, 527 bp, Zea mays
  unsure (1)..(527): unsure at all n locations
agccggactgactagtaatgggggagggctgcactaccctnnnnnntnnnnctnccggctcgacccacgcgtccgattgatatgctcggccttgagacctaccctggcgtcaagcgcatcaccatcaagccccagactgaccgctgggtgttccccgagaccaacactggcatcattgtccttgctgagggtcgcctgatgaaccttgggtgtgctactggccatcctagctttgtcatgtcctgctcattcactaaccaggtcattgcccaacttgaactgtggaaggagaagagctctggcaagtatgagaagaaggtgtatgtgctccccaagcaccttgatgagaaggttgctgctctccacttgngcaagcttggtgccaagctgaccaagctcaccaagtctcaggccgactacatcagcgtgccgatcgagggtccctacaagcctgcccactaccggtactaggcagccagcacacggcttgcagctcactcgggcccgtgtgtgctatgaagttcgct

SEQ ID NO: 96497 - DNA, 531 bp, Zea mays
  unsure (1)..(531): unsure at all n locations
agatactgctccngcctaacctcgtaccntcagtgcactacatccggcctggaatccccgggccgacccacgcgtgcgcccacgcgtccgaagccggagaattcgcccttaggagcacaagccgacgccgaccgcgtacgcccatagccccaaacccacgccgacgacgtacactcccaccccgacgccccccaagccgacgccacccacatacactcccgaccctacgccccacaaacccacaccaaaacccactcccactaatacgacgtacaccccgacccacaaggctccgacacctaagccgaccccaccaacgtacactccaaaccccaaacgctagacgcccaaaccgaccccagctacttacaccccttgccgcaagccttcgacacctaatccgaccaactctacgtacactccaaaccctaagccacctgataccaagcccttcacgcccaatccgaccacgtcaacgtacacccattcgccaaagcctacgacacccaaagcgaacacgtccacgtacac

SEQ ID NO: 96498 - DNA, 526 bp, Zea mays
agtatgaggggtgggccattcaatttgaactatgatcgctcctccaattcggaattcgacccacgcgtccgcggacgcgtgggtttgaagaaatggctatttcaacaaataattttgatctatcagcccgagttgggcaaggaggttacggcaaagtctacaagggaattctaggcgatggagcacttgtagcaatcaaacgagcacacgaggattcccttcaaggttcaagggagttctgcacggagatagagctactatcaagattgcatcatcgcaatttggtttcattggttggctattgcgatgaagaggatgagcagatgctggattatgaattcatgtcaaatggcactttacgtgatcatctttctgccaagtccaagagacctctaagttttggcttgaggttgaaaatcgcattgggtgctgcaaagggaatttttgatctacatactgaaacagatccacctatatttcaccgtgatgttaaggccagcaacatttctgttgacttcaaaatcgt

SEQ ID NO: 96499 - DNA, 525 bp, Zea mays
  unsure (1)..(525): unsure at all n locations
tgtgtagcggttataaaggctaagnncgcnatngcataatcttctttaattcccgggtcgacccacgcgtccgcccacgcgtccgtccacgcgtccgatcaataagacatatctggtagaatcataaccataggatacgaccctaatcgaaatgcatacattcgtctcatacactatggggatggtgagaagagatatattttacatcccaaacgggctataattggagatactattgattctggtacaaaagttcctatatcaatgggaaatgccctacctttgaccgatatgcccttaggcacggccatacataacatagaaatcacacgtttaaagagtgggcaattatctaaatcaacatgtgctttatctaaacttattgcaaaagaaggtaaattgccactttaaaataccatctttggagggccctttggaattccaaaacttgttaaccacaaactggtctactttggtaatgttggtacgtacctaaaaaactaagtgattaacctgatccaattg

SEQ ID NO: 96500 - DNA, 522 bp, Zea mays
tgtagagtggtggccatgatggggggaaatagtatcgctctaccggtccggaattcccgggtcgacccacgcgtccgcccacgcgtccgcccacgcgtccgcggacgcgtgggttccactccgacattcacgtgcagctgtcgggagcaggcaatggcgccggatctaagcgaactcgccgccgccgcggcagcccgtggcgcctacctcgccggcgtcggtgtcgcggtcctcctcgctgcctccttcctcccagtagccgagtcgtcctgcgtgcgagataactcattggtgagagacataagccaaatgccgcaaagcagctatgggattgaaggattgtcacatataacagttgctggtgcgctcaatcatgggatgaaggaggtggaagtgtggcttcagacaataagtccaggtcaaaggacgccaatccacaggcattcctgtgaagaagttttcactgtcctcaaagggaagggtacgctcttgatgggatcaagctcactaaagtacccaggg

SEQ ID NO: 96501 - DNA, 530 bp, Zea mays
  unsure (1)..(530): unsure at all n locations
tagggagcgtgtcgccgttttcactgctncgctgacgtatcgtaccccctcgaattcccggctcgacccacgcgtccgcggacgcgtgggcgcgcggcggtcgcggatgcgcaagcagcgccacctcgacgagctgagcgcgcatgcggcgcacctgcgccgcgagaacgcgcacgtggccaccgcgctcggcctcaccgcgcagggcctcctcgccgtggacgccgagaacgccgtcctccgcacccaggccgccgagctcgccgcgcgcctcggctccctcaacgacatcctcgcctgcatgaacaccaacgccgtcggcgccgtcgccgtctccctcacagccgccgccgccgccgccgtcgcttcctccgacccctgcctcgccttcgacggcgccaccgtcctggacgacctnctcagatcctgccccgagaacatgttccagtaccagctctgctagctccagaccgcgcgaagtcaccatggcagcgcaaaacaccttcttttcttttcttttggttgctttt

SEQ ID NO: 96502 - DNA, 521 bp, Zea mays
gaattctgccatccagtggggagattgatgcgcttccatccggtccggaattcccgggtcgacccacgcgtccgcccacgcgtccgagtttatctaccggtattcgtcgaaggagcgaatcttagcaggggtgggatgcacttctctcagggcgatggtgaagtttcgttttgtggagcaattgaaatgagtggattccttgagctcaggtgcgagatcataagaggcgggatgaaggaatacttgaccccagttggtccgacaccgctacacgtgaaccctatctttgagatcggtcctgtcgagccgcgcttctcggagtggctagtgtttgagggcataagcgtggatgaatctgggaagcagcatttccttgatgcgtcagttgcttacaagcgtgcagtcctgaacgccattgagtacattgctagatttgggtactcaaaggagcaagtgtatctcttactatcatgctgtccctgtgaaggtaggatctctggaatagttgactctcctaatgc

SEQ ID NO: 96503 - DNA, 536 bp, Zea mays
  unsure (1)..(536): unsure at all n locations
atccacgcgctaggtaacgctacgcttggggaaggacgtaaccagcgctggaataatccgggccgacggatggacccacgcgtgcgccgagctcattgctgctggcatgtagaagtttgcttcagtcccatgtggcgggggcggggtggctgttgcggcagctgcccctgctgctggcggcgctcctgcagctgaggcgaagaaagaagagaaggtggaggagaaggaagaaagtgatgacgacatgggcttcagcctcttcgactaagcctgtgcaatagtcaagagtattgtttttgagtcgcggaagcagagggaagaaaaatcgtagtcatgtttggactttaactttgttttatgttggaaagtacttgaaagacttttcctgtggtaattctaggcgtaggttgctgtgctggttggggtttactggtgaaccagagtttttctatctcccactatgaatttgttacctcaagttacctggatgttcactattttgttggtacatgtcgattttgcctaaaaaaaaaaan

SEQ ID NO: 96504 - DNA, 526 bp, Zea mays
tggcggctggcaatgccgtttggggagagaggatgccttgcctccggtttggaattcccgggtcgacccacgcgtccgcacttgctctctttctccccagtttcaactgccgcgcatcctccgccgccgcaggaaacgctactccatgtacccaggtctgcgtcgggcccttgccggcgatgagaacccgtcagttccaaagatggctcgtcgtggattgatggaacaggacttaagcaaactggatgtgacgaagcttcaccccctgtcacctgaagttatctcacgccaagcaacaatcaatatgggtaccattggccatgtggctcatggaaagtccactgttgttaaagctatatctggtgttcagactgttcggttcaagaatgagctggaacgtaacattactataaagctgggttacgctaatgcaaaaatctacaaatgtgaggatgacagatgtccgcgaccaatgtgctacaaggcctatggaagcggaaaagaagatagccctctatgtgatgtg

SEQ ID NO: 96505 - DNA, 501 bp, Zea mays
ccggcggacctcttccggaattcccgggtcgacccacgcgtccgcaagaactgtcgcaatgggaggtctccgaaagagaccaggtggtggttccatgatgacggcgtgtgatgggtgttccgattattgttgtcctgtatgcatttagttgccagactatatgggagatggacttatttcgaacgacccatttgaccagaaattaacatgctcttgtggtttgtagatgaatgtgcatcagcgtcggcctgtactttctgattcttacaccgtcgatgatatatagaataatgtttgtatcttgtcaatttacggaacagacatgaaattcaatgcaggtcactggtttctgaatcaaaaaaaaaaaaataaattaaaaaaaaattaaaaaaatattaatttaaataaattttaaaaaaaaaaaaaaaaagggcggcccgtttaaaagatccaagcttacgtacccctgcatgccaagtcatagcttttttattgggcacc

SEQ ID NO: 96506 - DNA, 519 bp, Zea mays
  unsure (1)..(519): unsure at all n locations
agaacgtctgagcctcgccaactaagaatggtacntcttctcggaattcccgggtcgacccacgcgtccgctcaccattgccgacgcaagctgcgactgaacctccgtggcgacggaggagacggccatggtggcggcgatggagctcgagatcctaggcatgaatttcgggtgcgtcctcgcggctctgtccgacgccaagatccccgacaagggctgcctgctcccgctcatctctaagctgctcggctacgccatcgtcgccgcatccaccaccgtgaagcttccccagatactgaaaattttgaagcatggaagtgttagaggactaagtgtggcatcctttgaacttgaggttgtcggctacacaattgctttggcatattgtattcataaaggacttcccttttcagcttatggggagctagcttttctgttaatccaagcaattattttggttgcaatcatttactattactcaccaccaatgggaaccaaaacatggatgaaagctttatt

SEQ ID NO: 96507 - DNA, 525 bp, Zea mays
  unsure (1)..(525): unsure at all n locations
tgacttggcttcgnnccattcccagtacgactcatgcctcgtactcggttcggaattcccgggctcgacccacgcgtccgggtgggttggcttctcctccccctccggttcgggttcgggttcgtgaggttctgcggggggcggtttcgtgggtgagcggatcgagatggcggcgtcggatgttgagtaccgctgcttcgtcggcggcctcgcctgggccacggacgaccactccctccacaacgccttcagcacctacggcgaggtcctcgagtccaagattatcctcgatcgggagacgcagaggtcccgcggcttcggcttcgtcaccttctccacggaggaggcgatgcggaacgccatcgagggcatgaacggcaaggagctggacggccgcaacatcaccgtcaacgaggcccagtcccgcggcggccgtggaggcggcggcggcggctacggtggtggccgtggaggcggcggctactgccgttggcgggcgccttgatgggcggcgggggttctggt

SEQ ID NO: 96508 - DNA, 528 bp, Zea mays
  unsure (1)..(528): unsure at all n locations
tgtagtggntngccatcncattgactgattagtagctgctctaccggtccggaattcccgggtcgacccacgcgtccggcacaagcgcactctagcaatggcttctgaggttgtccgccctagcgacgccgagctacgaaaggcacaagccgacatatggcggctcagcctctcctacctcacgcccctgtcactgaggtgcgccgtggagcttggcatccctacggcgatctaccgccatggcggggctgcctcagccgctgagctggtcacggcgctgtctctcccctccactaagctgccgttcctccgccgcctgctgcggctcctcgccgcgtcaggcgtgttcaccgtcgacaagcagagctcggaggaggagcggtaccgcatcagccccgtgtcctacctcctggtggacggcatccctcacgaggaccacatgaaccacaccgctctggtgctcacctgcacctcgacgcgctacattcgaggcgggatagggcttgcggaatggttcaagaaggaccn

SEQ ID NO: 96509 - DNA, 522 bp, Zea mays
tgaagggtgcagtcaattgtttggggaggagtcttgctccggtctggaattcccgggtcgacccacgcgtccgagcgcaggtacgctcatctaccaaagaagactacaacgaggacccagtgccagtgccggggcttaacgacacacggagttccacttcagctaccatggaagaggcagaccttccacaggtggtggcggttcccgtccccgctctaaacagcacagagggcgacgaaggagacagccctccggaagacgaaggacgaggcaggccgagctaccagaggaccttgtcaggcgggctgcagagccccagagccacccaagtgccccagagggcgatcctcgagaggatgaagtccaagggcgagttgtccaagtcgtaccagctcgggcacaggctgtccctcaaatggagcaccggggctggcccgaggatcgggtgcgtcaaggactacccgatggagctccggatgcaagcgctggagatggtggacctttcgcccagagggttgtcgt

SEQ ID NO: 96510 - DNA, 531 bp, Zea mays
  unsure (1)..(531): unsure at all n locations
atggtgcgagtgcgtagccatcncatcgaaagatagtatcgctctaccggttcggaattcccgggtcgacccacgcgtccgcccacgcgtccgcggacgcgtccgcccacgcgtccgtacccgccgccgcagccatggcggggaccaaggtccagcgtattatgacccagcccatcaacctcatcttccggttcctacagagcaaagcgcgcatccagatctggctattcgagcagaaggacctccggattgagggtcgcattatcggattcgatgagtacatgaacttggtcctcgaagacgctgaggaaatcaacgtcaagaaaaacactaggaaatcactgggccggatactcctcaaaggtgacaatataactttgatgatgaacagtggcaagtgaagattcttatggcaggaacgatgtttggtgctcgcttcgattatctgtgacacaatgtactccattcatgcgtncagacttaaatgatgtatcatggtcatgtggtttagtgagaagtgtataactaccn

SEQ ID NO: 96511 - DNA, 524 bp, Zea mays
  unsure (1)..(524): unsure at all n locations
cgagtagggctcgggcattcaattgacntattgttgtgctcgtaccggttcggaattcccgggtcgacccacgcgtccgggtcaggagaggctgcgttcacttttattcttgatgatcctgcaggaaacagcgttatggagaatccgcatgctccgttattagatcctttactatctgtgagattctacgaaagaactcgtgaacaacaagcagcacttggctttcttgctgaaccaccaaaagaacaacctggagaggctgtattgcctgcttcagcagtggaatccaattctgatgggttgcaaagtgtgccccatggctcagttggagctgttgcaggtcgtcgtgctatagctcagggaaaccctgatgaagttgctgcagcattgtgtagatattcagcaccagaagaggttgatactttaccatcaacatgtggagcctgtggaacaaaatgcgtcacacgtttctttgctacaaaaatcccataatttcgggaggtgattgttatggcaacaacatn

SEQ ID NO: 96512 - DNA, 533 bp, Zea mays
  unsure (1)..(533): unsure at all n locations
atgaaatgggtgccaattcagttttagagtttgatgcgcatctaccggttcggaattcccgggtcgacccacgcgtccgcattccttccccaactctgcaggctgctcgtcgccctccctccacgccggacgcgcccgggtccagatccaggggcgtaacatggcatcaaaacgtatcctcaaggaattaaaggacctgcaaaaggaccctccaacgtcatgcagtgctggtcctgctggtgaggatatgttccactggcaggcaaccatcatgggtcctcctgatagtccatatgctggaggtgtcttcttagtgaacattcatttccacccggactaccctttcaaagccncaaaagtatctattaaaaataaaggctttcatgcaaacatcaataggtatgggaaccttatgtctcgaactttttaaagaaccagtggaacccatggttatgaccatctttaagggttctgctttctatctggttccttgttactgatcccaacccagacgatcctcttgtacctgagan

SEQ ID NO: 96513 - DNA, 528 bp, Zea mays
tgaacgtggtcgccatgacgtggggcaggataagtttcgctacttccggttcggaattcccggctcgacccacgcgtccgggagtgcctctgaaaagaaagctaagggaatttcctgtcactgaggatgcgctggttcgtgttggcacaagcatcacagttcgtcactttgttcctggacaatttgttgatgtcactggaatcacgaaggggaaaggttttgcaggtgtaatgaaaagatatggtttcggtgggatgcctgcatcacatggaacatctttggcgcatcgcagtggtggctctactggtcaaagagatgctcctggaagggttttcaaaaacagaaaaatgcctggacgcatgggtggtgtgcaacgcacagtgaagaatgtatgggtctatcaaatagacccagccaggaacttactgtatctgaagggccaggttcctggtcctcaaggtagctttgttttcgttaaggattctatatataagaaacctgacacggctatgctcccatttcctacat

SEQ ID NO: 96514 - DNA, 525 bp, Zea mays
  unsure (1)..(525): unsure at all n locations
ngacgcgtgctgtgncattcnatgataagtatgggtacactgtctcggaattcccgggtcgacccacgcgtccgaaatgtatcaaaattaaatctggaccttataaaggatatcgtggccgtgttaaagaggtgactggtgcacttgtacgtgtagagcttgattcattgatgaagattgtcacagttaaaagagacgatatcgctgacacacctactgttgcaacaccattccgtgaacctcgttattcattgggtggtgaaactccaatgcacccgtctcgaacaccacatcatgcttatcagactccaatgcgggaccctggagcaacaccaatacatgaagggatgcggactcccatgcgaagtcgagcctgggctcctatgagccctccgagggataattgggaagatggaaatcctgctacttggggtagcagtccagcttaccagccaggaaccccacaagctcggncatacgaagcccccacaacctgatcanggtgggcaaacactccangagttg

SEQ ID NO: 96515 - DNA, 651 bp, Zea mays
  unsure (1)..(651): unsure at all n locations
tagtatgctggctggatctgnggcattttncgtcattcgcagtcaactatctcggtctcggaattccctggctcgacccacgcgttccggatactccctaagcaccagctgcggcgtgcggtttatccatggctgtccgtaaagcaacaatgaggatgggtccaatgtgaaacgaatggtggctaagaataaagacccgtcgactcctgttctctaataatggacttggtactgatcatcacacgcatccgtactgtgttcagttgtgtctcaatcatctgtgacagacatctcagtatctcactgacatcatcggtacccagcgattgcttttttgatgtgtcttgacagcacactatgtcttatgacggctttgcgctacgcttgattcttctagtgtcacatcctaggtatcatattcttactaggccaatatctattctttcattgcttgaaatatgttgccatgtcattgtttcctgccttacttctatctattcgttgtcttgcatcttttacttctttttctatatcttaatatatctttattcttatataagtttgttagatatgtttctctttgcatccaattattttattatgatacatatactcctgtctattttccatactttattctatttgttgtta

SEQ ID NO: 96516 - DNA, 529 bp, Zea mays
tgaaatgcttgccatgccagtgtggaggatggatgcgctcgtccggttcggaattcccgggtcgacccacgcgtccgatttggatttacgtctcgctagataccaatggcttctattggaccctgtagcggattgccgtaatgtctgaggctaatgaagataaaacatctggagacttcaaagaaatgggtagcatgttggccgacgaggtaattgccttcctgaagaagaaaatggataagctttctagatatggaggctgcaaagagctgaagttaagcatcgtcatccattccattgtgaacatcatcattagaagtgccctggcagaacctgcatcgcagctcatacttgaagaacctgtacacttacatgtcaatatcagggcctaacttgagttactgctacaggccatagttgatgggcaattctggacttctggtgctgaaatagctcaggaactgctagtgcatccagtaacttactgtcagtgatgatcgataccccgatttattgacaacaatttttg

SEQ ID NO: 96517 - DNA, 529 bp, Zea mays
  unsure (1)..(529): unsure at all n locations
agatgattctggtttccatcgggctgtagagggatagnatccctctctctgaattcccgggtcgacccacgcgtccggagttgaggcgcttacacaaactttcattccggcctcttgttccatagtttttcttgcatgttacgtctcaccgatgaataaaatgtatgtatcagacttgtctcgtttttttgcccatccaagcagcaaattagccgctggcacagcatgcggtaataatcttgtcacagtgctgtagttgggagcgtttttcttgttagaagtgtttctggtttgtttgaaaaaaaaaaaaaaaaaaaaaaaaaaagggcggccgctctagaggatccaagcttacgtacgcgtgcatgcgacgtcatagctcttctatagtgtcacctaaattcaattcactggccgtcgttttacaacgtcgtgactgggaaaaccctggcgttacccaacttaatcgccttgcaacacatccccctttcgccaagctgcgtaataacgaagaagcccgcaccgatcg

SEQ ID NO: 96518 - DNA, 526 bp, Zea mays
agttgctgctgttagcatgcaaggggggaatagtattcgctcgtaccggtccggaattcccgggtcgacccacgcgtccggacaaagatggttaccactggctgactggaagagtagatgatgtcatcaatgtcagtgggcaccgaatcggcacagcagaggttgagtcagctttagtgtcacatccacagtgtgcagaggctgctgttgttggtgttgagcatgaggtcaaaggtcaaggaatttatgcttttgtaactttggtggatggtgttccgtatagtgaggaactacgaaaaagcctcataatgacagtgcgcaaccagattggggcatttgcagctcctgacaagatccactgggcaccgggacttcctaaaacccggagtggcaagatcatgcgaaggattttgcgcaagattgctgcacggcaactggatgaacttggggacataagcaccctcgctgaacctgctgtagttgaccagcttatttcgctcagcaattgttagggtgcaacgtaatt

SEQ ID NO: 96519 - DNA, 526 bp, Zea mays
tggtacgggtggacgtgaaatatttttaaggaatagtcatccaccggtctcggaattcccgggtcgacccacgcgtccgcggacgcgtgggtgacaatccccaagggaaccttgttccccatgtgcggcatgaaccttgccttcgacagggatctcattggccctgccatgtacttcggtctcatgggtgatggccagcccattggtcgctacgacgacatgtgggccggatggtgtgtgaaggtgtgtggtctcgctgttcttgcttccacagctagttacttcttacccaaaacataatgtccactggactgatgatgattttacaactgaaacaaaataacttaggtcatctgcgaccacttgagcctgggagtcaagactggcttgccatacatctggcacagcaaggctagcaaccccttcgttaacttgaagaaggaattcaagggcatcttctggcaggaggacatcatccccttcttccagaacgtgaccattcccaaggattgcgacaccgtccaga

SEQ ID NO: 96520 - DNA, 530 bp, Zea mays
  unsure (1)..(530): unsure at all n locations
gatctctgagtgttttgccgatttcaagtccaggttgncgtctacttctctgaattcccgggtcgacccacgcgtccgattttgttcactaacatttccgccggcaactgaactctgttctccttagatatgcttgtttggtggctgaagaagctgaggcagccgaccagctgtcaaaggcactaacatttcccagattgtccaagttctataattcattaggaagaaagaaaacctgcatcttccagctgtatttgctgctcgtattgcagcacaatcaaaccgtaatctgagacgtgtgatactgttttttcagacttgcaaagtgcaacagtaatctgagacgatgaggacttgaacttgggtggtttgggtatattcacacccttaaccaactgaactaggagcacaagatacgccttggatcaaaagctatttttcatctagaaggcactgcttccaggtcggtttttgcgcaacaacggtttatcaaaggataggaaggccccatctgttggccgaagggaacn

SEQ ID NO: 96521 - DNA, 526 bp, Zea mays
  unsure (1)..(526): unsure at all n locations
agtattcggatgtaagnnnttttngcacctcnttgcgcttcagtactccatccggaccgacccacgcgtcacgcggggctccgcgccttcgagcccacggcattggcttcttctccggcaaggaccccaccagggtggggccgattgagccctacgtcgccaggcacgccgacaagagcatcgtggccagcggcctcgcccgccgctgcctcgagcaggagtcctacgccatctgcgtgccggagcccctgtccgtgttcgtcgactcctacggcaccgggaccatccccgacaaggagatcctaaagatcgtcaaggagaacttcgacttcaggccagggatggtcaccatcaacctcgacctcaagaagggcggcaacaggttcatcaagaccgccgcatacggccactttggccgtgacgacgccgacttcacctgtgaggtggtcaagcccctaaagaaagcatccgcttaagaatgtattgagaagttcactggacatgaggatcatcttcctctggctcg

SEQ ID NO: 96522 - DNA, 527 bp, Zea mays
  unsure (1)..(527): unsure at all n locations
tgagccgacgggtggactacagtcggggggaagagagtgcatctaccggtccggaattcccgggtcgacccacgcgtccgcccacgcgtccgagcccacggcgggggcgccttctccggcaaggaccccaccaaggtgggccgcagcggggcctacgtcgccaggcaggccgccaagagcatcgtggccagcggcctcgcccgccgctgcctcgtgcaggtgtcctacgccatcggcgtgccggagcccctgtccgtgttcgtcgactcctacggcaccgggaccatccccgacaaggagatcctaaagatcgtcaaggagaacttcgacttcaggccagggatggtcaccatcaacctcgacctcaagaagggcggcaacaggttcatcaagaccgccgcatacggccactttggccgtgacgacgccgacttcacctgggaggtggtcaagcccctaaagaaggcatccgcttaagaatgtattgggaagttcactggacatgangttcatcttcgtctggctcn

SEQ ID NO: 96523 - DNA, 528 bp, Zea mays
  unsure (1)..(528): unsure at all n locations
agtaatccagggctgtccatgaatggggggggaatatattcaccactccggntcggaattcccgggtcgacccacgcgtccgaatggggatgctcagactgttctgattgttaaagatacagaaggatcaatttatggtgggtatgcttcacagccttgggaaaggcacagtgatttttatggtgacatgaagacattccttttcaaatgctatcctcaagcatccattttccgccctactggagcaaacaagaatttgcaatggtgtgctgtaaacttcagctctgagaacataccaaatggtattggatttggagggcagccacatcatttcggactctttttatcagcaaattttgaccaagggcactcatttacgtgtagcacatttaccagccctcccctttccaagacaaataggttcaggccagaagttattgaatgttggggtatacaaatgagaggagcacaagatgaaaaactggagttagtcaaggggacagtcctcgagagattcaaggaggaccg

SEQ ID NO: 96524 - DNA, 526 bp, Zea mays
  unsure (1)..(526): unsure at all n locations
agtatctctaggtctgccattcgggtgggggaagtagtgctcgcccggtctcggaattcccgggtcgacccacgcgtccgcctgaaccgcgccatcggcgccgacgtcttcgtcaccgccaacacctaccgcatgaacggcgactacctcgcaaacccgcaggacttcgggttcacgaacgtgcaggtggcgtgctgcggccagggcccgtacaacgggatcgggcagtgcacggcggcgtcgaacgtgtgcgacaaccgcgacgtgttcgcgttctgggacgcgttccaccccacggagagggcaaaccgcatcatcgtcgcccagttcatgcacggcgacaccgactacatgcaccccatgaacctcagcaccatcctcgccatggaccaggagggcctctagactatagctcgatcagccggacacgattatacgtacatgcgtgatgtgtctcacgtgcctagcacgttagtcatgtgttggatgatggcagcccaatttgccaataatattcgtgcctcgn

SEQ ID NO: 96525 - DNA, 534 bp, Zea mays
  unsure (1)..(534): unsure at all n locations
atgttgcccagtgggtatngccatcgcatacgcagncatcgcacttacgctccggttcggaattcccgggtcgacccacgcgtccggagcacgatggccctcgcgctcgccacgaccccactcgcgcatctcgcccttgccccgggctcgatcttcggctcccaatcctcgctgctgctgctcccgcgccgcgcgtcgcccgcccccgtctccctctctcaccgccgcatcatcgcggccgtcgcgaccaaggaacccgagctcggcggcggcggatcgggggccggcgacggtgccggagggagcggcggcggcagcgacccgaggggaggagggcaggaaggagactgggaggaagagaagatggggcagggcctgtccatgtcgcagaaactcaccctcgcctacgccgcgctcgtcggagctggtggtgtaatgggatatatgaagagtggaagccagaaatccttggctgcaggaggcatatcagccctggtcctgtacgtcgtccacactcaactnccagtgagacct

SEQ ID NO: 96526 - DNA, 521 bp, Zea mays
agatactagagtacgttggggataggagcgctcgtaccggttcggaattcccgggtcgacccacgcgtccgagcccaacgagaagagcggcggttcgggctgacaaggagcaggcggaggaggagctgtggcaagccacaatgggtatctcacgcgactcgatgcacaagcgccgtgccaccggtggaaagcagaaggcctggaggaagaagcgaaagtatgagcttggtcgccagccggccaacaccaagttgtcaagcaataagacagtgaggagggtccgtgttcgtggaggtaacgtgaagtggagggctcttcgccttgatactggtaactactcatggggaagtgaagctgttacccgcaagacccgtatcctcgacgtggtctacaatgcatcaaacaatgagcttgtgaggacacatacccttgtgaagagtgccattgtgcaagttgatgctgccccattcaagcagtggtacctcactcactatggagttgacattggtaggaagaagaaa

SEQ ID NO: 96527 - DNA, 525 bp, Zea mays
  unsure (1)..(525): unsure at all n locations
ngttaggncttgactacattgttggggggatggtatcgctctaccggtccggaattcccgggtcgacccacgcgtccgtggatgggaaagaaacaagagtcagttgaggatgttccttgtggtaacactgttgctatggttggtctggatcagttcatcacgaagaacgctacactcactaatgagaaggaggttgatgcatgcccaatcagagcaatgaagttctctgtctcccctgttgtgcgtgttgctgttcagtgcaaggttgcttccgaccttcccaagctagtagaaggtttgaagcgtctggcgaagtccgatcctatggttctgtgtacaatggaagaatctggtgagcatatcattgctggagctggtgagcttcatcttgagatttgcctgaaggatctgcaagaggacttcatgggaggtgctgaaattattgtttctcctcctgttgtgtccttccgtgaaaccgttcttgagaagtcctgccgcactgtcatgagcaagtcacctaacaag

SEQ ID NO: 96528 - DNA, 524 bp, Zea mays
agggtgctgtctacgtacgttgggaggatagtactactcctccggattggaattcccggctcgacccacgcgtccggctgtatcagctgcgggaggtgttggacatgaagcccgagacctttgccagcgttgtcgctgcgctcctctacgagaagagattcgggccatatttttgccagccagtcattgctggacttggagatgacaacgtaccatttatttgtactatggactgcttaggtgcaaaggagctggccaaggattttgttgtatctgggacagcatcagaatctttgtatggtgcttgtgagtccatgtacaagccgaacatggaacctgatgaactcttcgaaactgtatcccaagctctgaattcatcaatagaccgtgactgccttagtgggtggggtggctatgttctgattgtgacaccgactgaagtgagggagcatgtgattaagagcaggatggactaaatcatggccactatcactataattcttagctggtttccaatgcttaga

SEQ ID NO: 96529 - DNA, 528 bp, Zea mays
agatagataatgggctgcacgtgccagcctatgatgcattgactcgtaccggtctggaattcccgggtcgacccacgcgtccgaagagacgtccagctggctgccatacatatgtatcgtgtggtgtgtgtgtgagagagagggaaacagagttcttcagtttgctatctctctctgcatgtttggcgtcagtctttgtgctcatgtacgtgtgtctacatgcatgttggttgatccgattgcgtctgctgctaccatatattaattggaccacgatgatatgatttgatactatatatatatactaaaaccggacttattattatgaaaatacaatagggcggtcgctctagatgatccaagcttacgtacgcgtgcatgcgacgtcatagctcttctatagtgtcacctaaattcaattcactggccgtcgatatacaacgtcgtgactgggaaaaccctggcgttacccaacttaatcgccttgcagcacatccccctttcgtcagctggcgtaatagcaaagag

SEQ ID NO: 96530 - DNA, 529 bp, Zea mays
atgaagggctggaatgcagggggggagatagtagcgctctaccggtccggaattcccgggtcgacccacgcgtccggtcagtcacagctcacagcaaacaccgcgaagccgcccccgctcccaaacccgaccgagcaaagcgcaaagccccccaaccgcggatcaatccgcagcatcgatggcgcccaaggcggagaaaaagccggcggcgaagaagcccgcggaggaggagcccgcgaccgagaaggcggagaaggctccggcagggaagaagccgaaggcggagaaacgcctccccgcgggcaagtccggtgccggcgagggcaagaagggcaagaagaaagccaagaagagcgtggagacctacaagatctacatcttcaaggtgctcaagcaggtgcaccccgacatcggcatctcgtccaaggccatgtccatcatgaattccttcatcaacgacatcttcgagaagctcgccgcggaggccgccaagctcgcccgctacaacaagaagcccaccatcacctcc

SEQ ID NO: 96531 - DNA, 522 bp, Zea mays
  unsure (1)..(522): unsure at all n locations
cggttgtgtgnccagcctgacgcagagctaccggtcctgaattaccgggtcgacccacgcgtccgcccacgcgtccgcggacgcgtgggcggacgcttgtgcggcaccttcgtgctcgtctacaccggctgcttcgtcaccgaccccaagcgcaacgcccgcgactcccacgtcccggttctggctcccctccccatcggcttcgccgtgttcatggtgcacctggccaccatccccgtcaccggcaccggcatcaacccggccaggagccctgggcgccgccgtcatctacaacaaggacaagccctgggacgaccactggatcttctgggtgggccccctcgtgggccctggcatcggggccttctaccaccaggtcatcctccgggctggcgccatcaaagccctcggctccttcaagagcaacgcgtgatgagcggggcttggctgtggagcaatggcgggcgacctacgggcggggggccgtgagcgaagagaatgccatcattcatcgatcgactn

SEQ ID NO: 96532 - DNA, 525 bp, Zea mays
  unsure (1)..(525): unsure at all n locations
tactggtgcttgatgnccaggcctcnacgnacggatctntctggtcttgaatacaccgggtcgacccacgcgtccggtcacgccgccgcagtcccagttcgcttcgtttcacccagagctcgtcggcctccgtccgcgctggaagcgagagcatggacacccaagtgaagcttgctgttgtggtaaaggtgatgggcaggaccggctccaggggtcaggtgacccaggtcagagtgaagttcttggatgaccagaaccgtctcatcatgaggaacgtcaagggccctgttcgtgagggtgacatcctgaccctgctcgagtctgagagggaggccaggaggctgcgctgaagcccttgttgtcttggatgtaattctgttaattttgttcaatgtttgtcgaacttgccgtgtgacccatactatatctgctttgggatttagtaagcctggattgcaagttttttttatgatcctggtggaaattgcaattgtttgtcggcatgttctcttgaatataatgcgt

SEQ ID NO: 96533 - DNA, 534 bp, Zea mays
  unsure (1)..(534): unsure at all n locations
acgtctgtcttgncccacgcctacacccagcnatntcctagtgnctggatattaccgggtcgacccacgcgtccgacgtgttcgaggcagccatcgagacctcatatctggtgctggagtccgccatggccgagcgcaggaaccacaggcccgtcatgaagaagctgcaagcggaggtacgggcgtacggagcggagaagaagctggacatgatcagggaggacgacctgagcagcctgccgtacctaaaggcgtccatgaaggaggcgctgcggctgcacccaccggggcccctgctgctgccgcactactccaccgccgactgccagatcgacgggtaccacatccccgccaacacgcgcgttctcgtgaacggctgggccatcggcagagacccggcggtctgggagaagcccgaggagttcatgccggagaggttcatgcgcgacggctgggacaagtccaacagctacagcggccaggacttcaggtacctgccgttcgggtctgggcgccggatctgccccggggcca

SEQ ID NO: 96534 - DNA, 529 bp, Zea mays
  unsure (1)..(529): unsure at all n locations
tgctcggtgctgagnttaaaccgcatgcaggaacaaccggtcctgaattcccgggtcgacccacgcgtccgcctgagtcctgcctgcgctcgcctcctttcttcccccccggccccttggcttttgcttgggggcgatcgggccggtcgagccggagaggccggaaaagctagctagctaccagctctccggtgtggtagtacgtctgcctgcagctggggttagctgcaagggttgggagccatggggaggggtcgggtggagctcaagcggatcgagaacaagatcaaccgccaggtcaccttcgccaagcgccgcaacggcctgctcaagaaggcgtacgagctctccgtgctctgcgacgccgaagtcgcgctcatcatcttctccaaccgcggaaagctcttacaagttctgcagcggacagagcataaccaaaccactggaaaggtttgaaaaaaccagttttggaggaccaaatcctgttgtccaaaccagggggaccaagttagtccaaaccatccttatn

SEQ ID NO: 96535 - DNA, 530 bp, Zea mays
acgctgtgtgccctagcctcattgacgcatgcacgtatccggtcttgaattcccgggtcgacccacgcgtccgcccacgcgtccgcccacgcgtccggcttgattatattgttccttcatcacacaactgtgacgattccgcatgtgaaccgtactgagtatcagctgattgatatttctgaggatggatttgtgaggcttcttacttcagatggcaacactaaggatgatcttagactcccaactgatgagactcttgtggcccagattaaggaagggttcgaaagcgggaaggatcttgttgtgactgtccagtctgcgatgggggaggagcagatctgcgcgttgaaggatgttggccccaagtaacttccttggctttggagacggaaccctactgtatctcaacttaaatcggaaaagaagtgtatcaccaaaggattgctaccgagacattcacctggcttgagctggcttttgctatagcgtgcaaggggttgctgggtgtcgtacctacctgacttatcatt

SEQ ID NO: 96536 - DNA, 528 bp, Zea mays
  unsure (1)..(528): unsure at all n locations
agtgttnactgcacctcgaataaagtacggatcgactactcnctgaattaaccgggccgaccgacgcgtccgggtgaacgtgtgcgtgtgtatatacatacacacggtcgccgccgccgcaggcctcgctccgaccgccaccggactcccctttcgcgtccgcttctcttgttgttgctgtgctctcctgttaccgggacccggaggaaggcaggaaggaaggaaggaaggaaggcggtgatggcggaggagacggtgcgggagctgcgcgcgagcttcgcggcggggcagacgcgcccggccgagtggcgggcggcgcagctcaaggggctcatccggatgatcgacgagaaggaagccgagatcagcgccgcgctccacgaggacctcgccaagccgcatatggagtccttcctccacgagatatcacttacaaagtcgtcgtgcaagtttgcgctcaaggggctcaagaactggatgaagcccgagaaggtacctgcggccataactacattcccgtcctncgcn

SEQ ID NO: 96537 - DNA, 518 bp, Zea mays
  unsure (1)..(518): unsure at all n locations
acctanctatgccaacgaatacagnaccgcatcacactcctgaattaccgggtcgacccacgcgtccgattacaaagatatcaaggagctcccacctcatcgcttggctgaaatcaggcgcttcttcgaggaggacaataagaatgagaacaaggaggttgctgtgaatgactttctaccagcgagcgccgcttatgaagccatacagcactctatggacctgtatgctacatacatcgttgagggcctgaggaggtaggattctgatggctaggaaaggtggtgaggatgttgacgaaaaactgggagaccatttaccgcatggaacgagtaccgttattattttatttgtgtcgcgtatactgctagtagtgaaccctcaatcaaagaccgaaatcccctgaggagtcggagtcggtagtaggtgaagctagtaacaaggttggcgaaatattattttctggcctgactgcctatatatgttgtacgtgattggtatcgtaatattcattcgcttn

SEQ ID NO: 96538 - DNA, 525 bp, Zea mays
  unsure (1)..(525): unsure at all n locations
ttggtgctaggcttcacctgtaatcgtatgaatcctcggtcctgaattaccgggtcgacncacgcgtccgcactcatcttttctcgtttagaacctctaaaatttcccccactcgccagtcgcagcagcacgtgtagcagccatggacgccagcggagccggtagcaaggggaagaaaggggcggccgggcgcaaggcaagcggccccaggaagaaatcggtgacgcggtccgtcaaagccgggctgcagttccccgtcggccggatcgggcgctaccttaagaagggccggtacgcgcagcgcgtgggcactggcgcccccgtctacctcgccgncgttctggagtacctcgccgccgaagttctggagttggcagggaacgcggcgaaagacaacaagaagacgcgcatcatcccgcgccacgtgctcctggcgatccgcaacgacgaggagctcgggaagctgctggccggcgtcaccatcgcgcacggtggcgtcctccccaacatccactccgtgctcct

SEQ ID NO: 96539 - DNA, 521 bp, Zea mays
  unsure (1)..(521): unsure at all n locations
cgttgtgaccctagcncttnccacntgctgcncggtcttgaattcccgggtcgacccaagccttcggccaagccgtccgggggacctaaacccccttttttttgaaccatgaatggggttacgtgctggcgtcgctttcctgggcagctgaattctgacctccggaagcttgcagtgaacctgatccccttcccacgtctgcacttcttcatggttggatttgctccactgaccttgcggggctcccagcagtaccgcgctctcaccgtgccagagctgacccagcagatgtgggactccaagaacatgatgtgtgctgctgaccctcgtcatggccggtacctcacggcatctgctatgttccgcgggaaagattaacaccaaggaagtggatgaacagatgcttgacgtgcagaacaagaactcttcctacttcgtagagtggatccccaacaacgtgaagtcgagtgtgtgtgacattccaccaattggcctgaagatgtcctncacattcgttggcn

SEQ ID NO: 96540 - DNA, 525 bp, Zea mays
  unsure (1)..(525): unsure at all n locations
ttgtgctgcgcccacgcctcacgacgtattgctgtaccggtcttgaattcccgggtcgacccacgcgtccgggacccttcaaagggcacagccagcatcagcacggttgctggctcatttggttacattggtgcagagtatgcctacacgatgcaggtgacggtgcccggcaatgtgtacagctacggcgtggtcctgctggagatcctgacatccaagctacccgtggacgacgtgttcggcgagggcgtggacctcgtcaagtgggtgcacaccgcaccagcaaggggtgagacgccagagcagatcatggacccccggctgagcaccgtgtcgttcgcgtggcgcaggcagatgctcgccgtgctcaaggtcgcgatgctgtgcacggagcgcgccccggccaagcgacccaggatgaggaaggtggtggagatgctgcaagaggccaagaacagctgagttgatgtgtttctctgctgaatcctgaatgctgcggttgcctgcttggaagtcgagccgacn

SEQ ID NO: 96541 - DNA, 523 bp, Zea mays
  unsure (1)..(523): unsure at all n locations
agttgctgccacgaaatatacagcaaccttcaccggtcttgaattcccgggtcgacccacgcgtccgcacaatgatatatgtttattccatcgactggcaaaatattagagagcagaaacttcaatgggccgtcattttgaacggtaccttgttctctcgagcattttaccatctggagacatttgaactagccttatattctacacaatcatacagaatgggtgctacaaaatggtaggcagctgataacactgaaaaggaacaaaatctcaaacgaaagtaatctacagcaataaacactgctactggcagttgctccgtttctgtgaaactcaagcaaagattctcgcaggtcgaacactgacccaatcaaattgggcagtctgattatgtggcaaagctttctgtcgccagcattccccagtcctggaactaataaaactttctcatttacttctggatcaatcattcctgtgtacacgtggagcccaaggaactntgtattgaacttttgcagggcaa

SEQ ID NO: 96542 - DNA, 530 bp, Zea mays
  unsure (1)..(530): unsure at all n locations
atgtgactggcctagcnctatgtcactgcactcaccggtcctgaattcccgggtcgacccacgcgtccgcccacgcgtccgcttcatgccggcatggctactcctgaagatggatctttgaggcaaagggggtaaataaagatgcgatggcagaatcatattgtactgcaagagtgacaattgtgtgttccactcacatatatgacctagttttgtgtgtctatatgtcgaaacccatatgtctgtgattttattatatgttatgtaagcacaaatgaaacatgccggactagttgcttttgcttgtctatgtaaaaaaaaaaaaaaaaaaaaaaaaaaaaaaaaaaaaaaaaaaaaaaaaaaaaaaaaaaaaaaaaaataaaaaaaaaaaaaaaaaaaaaaaaaaataatataaaaaaaaaaaaaaaaataaaaaaaataaaaaaaaggggcgccctttttaaggagccaaattttacgtacccttacttgcaacgcaatagttttttttatgggcccctaaaattaag

SEQ ID NO: 96543 - DNA, 529 bp, Zea mays
  unsure (1)..(529): unsure at all n locations
acggtcgctcgcctcagtcntantgacgncancgctgcaccggtcttgaattcccgggtcgacccacgcgtccgcatcgatccaccgaggtttcttgtgcgtgccgccatggccatggcagtagctcaccttctgcctcagctctccgccgaaggcaatggagctagcaggaacagaatggccattctcttgattcttcagctttttctcttgacggcgctaggcgtggatggagcggcgtcgttcatcttcaccaacgcctgcaagcacgcggtgtgggtgggcgcgctccacggcgccagctcgccgccgctcgcgcggtcgggcttctacctggcgccgtccgccacgtccagcatggacgcgccgtcgtcggggacatggtccggcacgttgtgggcgcgcacgggctgcgtggccgaccccgccaccgggcgcttctcctgcgccacggccgactgcggcacgggcgacgtcgcgtgccagggccgcgggccggcgccttcggtctcgctcgtcgaggtcaccn

SEQ ID NO: 96544 - DNA, 523 bp, Zea mays
  unsure (1)..(523): unsure at all n locations
aggactagtccaccctgaaaaatcacgnactcactggtcttgaattcccgggtcgacccacgcgtccgcggacgcgtgggcggacgcgtgggcggacgcgtgggccgcacatggggccccactctctggagagggacctatcctcgctggctatacgtctcccctccgcgcacaaaaaccctagcacgcaggcgcagccaggcctgcacccaaagcttccggagaattcctcccttgccccgccgtcgcatcctcttcgaagttcgaatcgaatcgcgccgcgatcacccacctcatggcggacaaggagcctgtcgtggagcggccagaggcgggtgaggaggaggaggacgcctcagccgccgccgccgcgggggaggaggaggacacgggcgcccaggtggctcccatcgtgcggcttgaggaggtagccgtcaccaccggcgaggaggacgaggacgtcctgctcgacatgaaggcgaagctgtaccgattcgacaaagacggttaccaatggaaggaa

SEQ ID NO: 96545 - DNA, 526 bp, Zea mays
  unsure (1)..(526): unsure at all n locations
gggtanttgccctagtcncattaggcatgtctgtaccggtcctgaattcccgggtcgacccacgcgtccgcggacgcgtccgcccacgcgtccggtttctatagccctctctgccactcgtgatcccacgggtcacaatgcctgccctcgccaagcccgcctcccgcaccgccaagcccgccgcggctccgaagccgaagcctgccgccgccaagccgaaggcggccaccgctggtgcctcccacccgccttacttcgagatgatcaaggaggctatcacggcgctcaaggagaggaccggctccagctcgcaagcgatcgccaagtatgtgggggacaagcacggcgcgtctctgccggccaacttcaagaagatgctttccatccagctccgtgggtccgcagccaaaggcaagctcgtgaaggtcaaggcttcgtacaagctctcggacgccgncaagaaggcatcccccaagaccaaggctaagccggcaaaggccgncgctgccaagaccaccgnccccaa

SEQ ID NO: 96546 - DNA, 520 bp, Zea mays
  unsure (1)..(520): unsure at all n locations
tatctggttatgccaacgatcacgcacgncatcacggtcctgaataaccggtcgacccacgcgtccggggcccgctcgaggtcggctccgacggcactttctagttcgaggagaaggacggcatcgaggacgcctacgtcaccgtgcagctcccggtgggcgagcgcgtgccgttcctcttcaccgtcaagcagctcgtcgccaccggcaagcccgagagcttcggcgggcccttcctcgtgcccagctaccgtggctcctccttcctcgaccccaagggccgcggcggctccaccggctacgacaacgccgtcgcgctccccgccgggggcagaggtgacgaggaggagctccagaaggagaacatcaagaacgccgtcttctccaccggcaacatcacgttgagcgtcaccaagagcaacccggagaccggcgaggtcatcggcgtcttcgagagcgtgcagccgtccgacaccgacctcggggccaaggcgcccaaggatgtcaagatcccaggggg

SEQ ID NO: 96547 - DNA, 521 bp, Zea mays
  unsure (1)..(521): unsure at all n locations
tgggtgggagtgactgccgtaagttcagtcacgacgtncggncctgaattacgggccgacccacgcgtccgggagtggtgaagggcttccagcagggactttacatgggcaacggtggtggcgccaatgttggcggacctggctacaccaagggtgatggccttggcgctgagattgttggcaccttcatcctagtctacaccgtcttctcggccaccgatgccaagaggaatgccagggactcccatgttcctatccttgccccactgccaattgggttcgcggtgttcctggtccaccttgccaccatccccattactggcactggcatcaacccagctaggagccttggcgctgccatcatctacaacagggatcacgcctggaacgaccattggatcttctgggtcggccccttcattggcgctgccctggctgccatctaccaccaggtgatcatcagagccatcccgttcaagagcaggtcttaagctgccgtggccgtgccgagacatgccatn

SEQ ID NO: 96548 - DNA, 521 bp, Zea mays
tgtggtgacatcgaatatatagtaagactcaccggtcttgaattcccgggtcgacccacgcgtccgcccacgcgtccgtgctgagtatatcctcagatggcttcctagaggcacacatgagtggtccggactggttaccccggaggagcttgtcctaatgctgcaaaaggcttccgtctccgtcgaagagatggcagggttcgtttacaatccgttgagtggagaatggtccctgtcagatgatatcagtgtgaactacattgcttttggcgtcaagaagggtgaagcatcatcgacaaatggcagagatgcaagtttatcatagctgaagaaaaacacgtgaccttgaattgtcgggcatcattttcagaggaccaattcatgtcactgaaatcttactgctaaagatgcaaccaagtagcagaagagaattctcttgccctttgttagtcttggaaactggagcttgtggagtgatgcttcctggaagcgccattgagaagtcaagttgacaacaagtg

SEQ ID NO: 96549 - DNA, 531 bp, Zea mays
ccgttcgtgtgcatcgacattatagcagtaactacttcggtccggaattcccgggtcgacccacgccttccgaaaggaccatatacctatttacataacaaattctatggtaggtcgcaaattgggggaattcgtgcctactcggcatttcacgagttatgaaagtacaagaaaggatactaaatctcgtcgttaattgaattcagaatagaaagattcagaataaacaaaatttataggattcaaataatcaaataaagtaaaggtaggcgggtaataaccttatttatgacaagtttcaaattggtaaagtatacccctaggataaagaagaagaaggggctgagaaaactcgcaagaaaagttccaaccgatcgtctacttaaattcgaacgggttttcaaagcacaaaaacgcatacatatgtctgttttcaaagcacaaagagttctagatgagattcgctggcgttactacgaggaaaccgttatgatactgaatctcatgccttatcgagcatcgtatcccatc

SEQ ID NO: 96550 - DNA, 522 bp, Zea mays
atgttgactgccctagcttcagtgacgcatcactcaccggtcctgaattcccgggtcgacccacgcgtccgcaacctctcattctgaatgtactgctgaagaagcatataactggactcagggtcgtgtgatatttgccagtggcagtccatttgaccctgtggagtacgatgggaaggtttttgtacctggacagtcgaacaacgcctacattttccctggatttggcctcggtcttgttatctctggagccatccgtgtccacgaggacatgcttcttgccgcctcggaagcactagctgctcaggccacacaggagaacttcgacaagggatcaatcttcccgcccttcaccaacattagaaagatctctgcgcgcattgccgcagccgtggctgcaaaagcttatgaactcggtttggcgacccgtctgcctcccccaagggacctggtgaaatatgcacagagctgcatgtacactcctgtctaccgtaactaccggtagtgctgctgggatcaatt

SEQ ID NO: 96551 - DNA, 522 bp, Zea mays
  unsure (1)..(522): unsure at all n locations
atggtgtctcgccatcgaaatagtaagtatgcctcaccggtctggaattcccgggtcgacccacgcgtccgcggacgcgtgggcggacgcgtgggcggacgcgtgggcttgaccctatggacttctgacatgtgggaggaccctgcggaagagatcagggaggcgcccaagcacgactcgagcgaggggcagtaaagccggctttacatgcctagaagctagtacctagtgtttgctgctgtctaatgacattatgcaatgtgatctggaccctggtttcttgggtgcgacgcttgtagcagccgtcttatgattatttgtcgggaaaatttgggggctccccatatgagatgctgccgggcaagacctcgccatcccccacctcgtttcaagcgggggacgctggagcctggtccggttgggttgggaagccccttaaactgttgtcgcttgcattttaaccttttcatcggcgttcagtggtcctaaatctatggctcgtctcagtggtcaaaaaaaaan

SEQ ID NO: 96552 - DNA, 529 bp, Zea mays
  unsure (1)..(529): unsure at all n locations
agttctgtgcacagaaggtatacgataatctctccggtcttgaattcccgggtcgacccacgcgtccggccacgccgtcggaaaaaggtccggaccgccgttcagatggcaccgggtgcgtgagacgtgtgagcgaagcaatctgtacgcgccgcagtaattggcatcgaccgtgaattttatcgagcagctgacattcctgtgacgtggtgccgatctcgtggttatgttatattgttatgtttcttcctcttggtgtgacgcagggaaccgcgcctccggccggacgccgctggactgggagacgcggtcggcggtcgcgctggcggcggctcgcggcgtggcgcacatccactccacggggcccacggcgtcgcacggcaacatcaagtcctccaacgtccttctcaccaagaactacgaagcgcgcgtgtcggaccacggcctccccacgctcgtcggcccctccttctcgcccaccagggtgtccggctaccgcgcaccggaggtcaccgacatccgccgcgtn

SEQ ID NO: 96553 - DNA, 530 bp, Zea mays
  unsure (1)..(530): unsure at all n locations
acggtgnctgaggccaggggcactacgcatgctacnactcggtcttgaattcccgggtcgacccacgcgtccgatcacgccgccactgatctgctctgttgctgtgtgactaggagcagtagcgagagggattctggatggccaagtcgaagaaccacacggcgcataaccagtcgttcaaggcgcacaagaacggcatcaagaagcccaagcgccaccgccagacctccaccaaggggatggacccgaagtttctgaggaacttgaggtactcaaggaagggcaacaagaagagtggcgaggctgagtccgaggagtaagatgatggtgattgagtttgtggcgacaaatgcatctctggtatcgctaaaagtcttagctgtgaaactagttctcacttctgtgtgactgtgatcaaaggacttgtgtatgatcaaaggagatccatcagttggtaccgaaagtgattttatgtcttggtggttacctggaatttaattaaaaccatcacttgtatccttttgagaaaa

SEQ ID NO: 96554 - DNA, 535 bp, Zea mays
  unsure (1)..(535): unsure at all n locations
atgcgttgcncctgattcgacnctcttgactctactncgtcctgaattcccgggtcgacccacgcgtccgggagcccttccatatttaccggtgaggagtctttcgcacaaacaatcgccacagttgaagagcgccgcggacctcatcgacaagcttgttgctggcaaagcgtagttctgtacctcctctatcgttgtcctaccactctaggtctatcccttgatctaggtttctatggtcttaagatttgtgattttctccgcactgttgttgctatccccgtgtcgtaataatacgagatgttttaagcggttgaacattacggtggtgtaatcagagtaatctgttgctgttaaggtgcattgttgtatgaattgtctctacccgagtagaagaatcagaccattcgggattcaaaaaaaaaaaaaaaacaagaaaaaaaacaaaataaaaaaaataaaaaaaaaaaaaataaaaaaaaaaaaaaaaaaaagggcggccgctctaaaggatccaagcttacgtacgcgtgcg

SEQ ID NO: 96555 - DNA, 520 bp, Zea mays
  unsure (1)..(520): unsure at all n locations
ngggtatttgcctcagccctattatgaancactcaccggtcctgaattcccgggtcgacccacgcgtccggagcacctcgcctcattccatcccacgtcaagctagatctgccggctctaggcttagaacacatccggataatggtggatgcatcgttctttctgttcgtcgtaagcagttctttgtatcaagtgagatggcagtgacgactcggtaaaattcaagctcaacagaccaaatcacaggtctctctctacatgagatcgatctgtatgccgattttcccgctgaactgagccatctaatttttctctgcttatttgctattcggaatattttctctctacatgaaattcccggttgcttttttttcccaattcgaggtggaaacatattggtgcgatgaggataccaagctcctcttctgaagcagtgaggacacttgccggcagaatcgacccaataccttatttgcaccactgagtnacagcagatcttcaatcttngtttgttggtttn

SEQ ID NO: 96556 - DNA, 529 bp, Zea mays
tatgttctctgcaatcgaaataaacgctactactcaccggtctgaattcccgggtcgaccacgcgtccgcccacgcgtccggagctctactccatcctctcgatctcgaagcgcagcagcagcagtgggggggccatggacgccagcgcagccggagccggcgggaaggcgaagaagggcgcggccgggcgcaaggccggcgggccgaggaagaagtcggtgacgaggtccgtcaaggccgggctgcagttccccgtcggccgcatcgggcggtacctgaagaagggccggtacgcgcagcgcgtcggcacgggcgcccccgtctacctggccgccgtcctcgagtacctggccgccgaggtgctggagctggccggcaacgcggccaaggacaacaagaagacccgcatcatcccgcgccacgtgctcctggccatccgcaacgacgaggagctcggcaagctgctgtccggcgtcaccatcggccacggcggcgtccttcccaacatcaacccggtgctccttgcca

SEQ ID NO: 96557 - DNA, 524 bp, Zea mays
  unsure (1)..(524): unsure at all n locations
cgatgcgtttcctcgtaaatangacgtatgctctcaccggtcttgaattcccgggtcgacccacgcgtccgctagcaaattgatcgtgggagctgatttccattgcttcaagaacaagatcgagccaaaatgggaagaccctatttgtgcgaatggtggtaaatggaccatcagctgtggaagaggaaaatctgatacattttggctgcacactctgctggctatgattggtgaacaattcgactatggtgatgaaatttgtggcgcagttgtcagtgtgcgtgggaagcaggaaagaattgctatttggacaaaaaatgctgccaatgaagccgctcaggtaagcatcgggaagcagtggaaggaacttctggactacaaggactccattggattcattgttcatgacgatgcaaagaagatggacaaaggcctgaagaaccgttacacggtttgatcctgatgctggaatcccagagagttgtagcagtagctggcccaaatgcatgctgggtggttttatc

SEQ ID NO: 96558 - DNA, 520 bp, Zea mays
  unsure (1)..(520): unsure at all n locations
cgctgagtgcngcatgcctgaccagtacgcacgacttacctgacttgacgggccgacccacgcgtccgccttctcaaccctccgggccgtcaacctcttcagcaacctcatcgttcatatctcccctggatcgctgcccaagggcctccactctcttgatctgtccaggaacaagattgccagcgtcgagggcctccgggagctcacaaagctacgcgtgctcaacctcagctacaacaggatttcgcggattgggcatggtctgtcgaactgcacggccatccgggagctgtacctggcgggcaacaagatcagcgacgtggagggtctgcaccggctgctgaagctggcggtgctggacctgagcttcaacaagattacgacggccaaggcgctggggcagctggtggccaactaccactccctcctggcgctcaacctcgtaggcaacccggtgcaggccaacatcggcgacgacgccctgcgccgggcggtcacgggcctnctnccgagccttgcc

SEQ ID NO: 96559 - DNA, 524 bp, Zea mays
  unsure (1)..(524): unsure at all n locations
cggttgagtagacatgaatggtaatgcattgcacgtacgtaccggncttgaatgcccgacccacgcgtccgcggacgcgtggggtctcctaataactagtttctatcttgctccccaaaccagcgcaaaccgtgccctgacaccggcagcgacacgtccaccggcggcgccatggtgctcgaggcaacgatgatctgcatagacaattcggaatggatgcggaacggcgactacgctccgtcgcggttccaggcgcaggccgatgccgtcaacctcatctgcggcgccaagacccagtcaaacccggagaacacggtaggcgtgatgacaatggccgggaagggtgttcgcgtgcttgtcactcccaccagcgacctcgggaagattctcgcctgtatgcacgaagttggcgctgaggcaaacttggctgcggcaatccaggttgcccagcttgctctaaagcatcgccagaacaagaggcagcagcagaggattatagctntcattggaagtcctgtgaagta

SEQ ID NO: 96560 - DNA, 518 bp, Zea mays
  unsure (1)..(518): unsure at all n locations
caggtnttgggcaacgtacgnacgacgactntcggncttgaattaccgggccgacccacgcgtccgcccacgcgtccgaagaatcccagcttctttttgaggtttactttgttttaggccttcctagggtgttatatctactcttgggaccatatcaaattcacaaagtctcgacacaatcggatggtttgcacgagatccatgtattcttcatcgtgttggtgaagttcttttaccagccgctgtaggtggacttaagcaaacaaggcaatttgtttttgccgatgactgctttcagctgctaaaggtctctaatcagaaaactgtgcatgccataaaaaatgctgtccaggcattacgtggatccacctaaacacatcaatattggccaatatatttattccaatgtacctagcctgaaggagttttgcgaaccagctacaaagttagaagaaggaacatcagccctgaaagcaatctccacagtgatgttgttattacagagatatgagtttaat

SEQ ID NO: 96561 - DNA, 514 bp, Zea mays
  unsure (1)..(514): unsure at all n locations
taggtttgcttagagnnnccgaattcnnccnacgnacggacaggtcttgatttcccggatcgaccgacgcgtccgagcatgaatctggaacgagaacagttgatcagaatgtttggggggagatccgcaacttcaggaagtgtctgctgaagatgtttgcacagcaggacaaggatgtgttgtttatggagactgtcataagcctggccagacaacggagacactgcatgattgagtgcattcctgtcccttgtgaagtgtcaagcaatgccccaatgtacttcaaaaaggctattgatgaagctgaagaagaatggacccaacatgagatgaagaaggttatcccgacaagtgcaagccgcaacttgaggcaagtcatcccggagaactttgcctacttccatgtggagttcgggctggaccgtggctttgttcatgtaatagatgacgagagcaagttcagtgctggaatttgattgaatgtcattagagggatgcctcaattggcaaaagg

SEQ ID NO: 96562 - DNA, 511 bp, Zea mays
  unsure (1)..(511): unsure at all n locations
catgcttgctagtgaaaggggcttangcangnactgactctcctgcttgaattaccgggtcgacccacgcgtccgcggacgcgtgggcggacgcgtgggctagattaatatgagaaggggctacagttacaggccgtcaccaccaaggggctacaggagaagggcgcgcagtccaagtcctcatgatcattatggtggtcgtggtagggatctcccaaccagtcttctggtcaggaatctccgtcgggactgcaggccagaagacctccgtcgcccatttggacagtttggtcgagttaaagatatatatcttccaagagattattacactggacgcaacacaagcctaaaagattattgttgaagagaaggaagaaatagagaaattcaattaagtgatctgcaacttaaaagagtactcagtactgttcaagaaatggaaagaaatagagtttcaagtttaaaagatcctaccttattgaaaagtttcaggtttgaatttaacctcttt

SEQ ID NO: 96563 - DNA, 514 bp, Zea mays
  unsure (1)..(514): unsure at all n locations
ngcgtcgctgactaacggtcgggcactacgtatcgacgtaccggtccggaattcccgggtcgacccacgcgtccgagaaccgccgccacgccacacaaaaagcagtgactcagtgagaaaggacagcaagcaagccctccctccatctccgccccgtcgccatggtccttctcttcgtggagaagctcctggtcggcctcttggcgtccgtcatggtcgccatcgcggtgtccaagatccgtggccgcaagctccggctgcctcccggccccgtccccgtgcccgtcttcgggaactggctgcaggtcggcgacgacctcaaccaccgcaacctcgccgcgctgtcccgcaagttcggcgacgtcttcctcctccggatggggcagcgcaacctggtggtggtctcgtcgccgccgctggcgcgggaggtgctccacacgcagggcgtggagttcggctcccgcacccgcaacgtggtcttcgacatcttcacggacaaagtgcaagacatggt

SEQ ID NO: 96564 - DNA, 524 bp, Zea mays
  unsure (1)..(524): unsure at all n locations
gttagttnctaatgcactgacaaaagtagcatgcacgtcntgaattacgggccgacagctgctacgtacgantcgggcaaaatagctgtagaggatgaatatgaagagctagcacgggcagtagcggctgctctagaggagagtaaagaagtcattgaagcatcagacgccagtgatgacatggttgaagctgaacccgaggaggaaaatgagcccaccctaaacaccaagcctgattaccctcctctccctgaagaacctacaggaagcagggaccttctctgcagggttgcgattcggctaccgaacaaccggaggatccaaagaaacttccttcacacagatcctatcaagctcttgtggtcattctgcgctcctcaggtcgaggacggngagaggagggctttccacttcgtccaggcaattcctggggcatcccagaaactggagttgggaagcgacctaacattcaaggaagccgggctggccaactcgatgatcaacctctngttggactgagccgc

SEQ ID NO: 96565 - DNA, 526 bp, Zea mays
  unsure (1)..(526): unsure at all n locations
cggtgctagtgncccaaatcncngnacngnacgaancnctcctgncttgaattaccgggccggccgacgcgtccgcaagatgctgttgacaatttgagagctggaaagacctgggtactgatagcaacggaagtcgtggcccggggaatggacttcaaaggtgtcgcctgtgtgataaactacgattttccagagtcggctgctgcctatattcacaggatagggcgatccggaagagccggtaggtccggggaggctatcacgttcttcacagaggaggacaagccattcttgaggaatatcgccaacgtgttggtatcttcaggctgtgaagtgccttcctggataatggcactgccaaagctcaagcgaaagaagcacagagtggatagggacccaatctcctacctacctgacgaagtttgagagcggctngtncattcgctatacttttatttttaatcttacctaccattcaaagttaaccagactgtcctaacttatataatcaacctctttgttgacg

SEQ ID NO: 96566 - DNA, 511 bp, Zea mays
  unsure (1)..(511): unsure at all n locations
tgagcgtnattgctccactcagaatatagtatgnatcnactggtcttgaattcccgggtcgacccacgcgtccgcccacgcgtccgcccacgcgtccgcggacgcgtgggctacaacgagtacaactacagcaagttgcggctgtggcagctggccgactacgaccgcgtggtgttcgtggacgccgacatcctggtgctgcgcgacctggacgcgctgttcgcgttcccgcagctggcggcggtgggcaacgacggctcgctcttcaactcgggcgtgatggtgatcgagccgtcggcgtgcacgttcgacgcgctcatgcgggggcgccggaccgtccgctcctacaacggcggcgaccaggggttcctcaacgaggtgttcgtgtggtggcaccgcctgccgcgccgggtcaactacctcaagaacttctgggccaacaccacggnggagcgcgcgctcaaggagaggctgttccgggcggacccgnccgaggtctggtccgtccact

SEQ ID NO: 96567 - DNA, 507 bp, Zea mays
  unsure (1)..(507): unsure at all n locations
cggtnattactgnccacgcatcacgctacgacnactggtcttgaattcccgggtcgacccacgcgtccgggaggaggtgagccaccggaagcggagacgtgagtagtcgaccaaccccgtcggtccggggactccggctgcggcgcggcgtgctagatcgctaccgaccatggtggtggaggagatcgccgagggggtgaaaaacctcaccgttaccggagatgcggcggcttcaggcggagaggggcagaggaggggcggcggcggcagcagcaaccgcatccaggtgtccaacaccaagaagcccctcttcttctacgtcaacctcgccaagaggtatatgcaacagcacgacgatgtagagctatccgctcttgggatggccatagcaacagttgtgaccgtggcagaaattctgaagaacaatggatttgccgttgaaaagaaaattaggacctctactgttgaaataaacgacgaatcaagagggcgtccattccaaaaggc

SEQ ID NO: 96568 - DNA, 513 bp, Zea mays
  unsure (1)..(513): unsure at all n locations
tgtagcgttactgtgnaatcgaaatacgctcgnacanatggtcctgaattcccgggtcgacccacgcgtccggctgcaggttcgttcccgagaagttcgaggagatattcgccaggcacgcgaggacagtccgcgacgccctgacctcggacgagatcgaccagctgctccaagcgaacagagagcccggggactacagcggctggtaagtaattaatgacggtaatttccctccccgatgctcgctcctgcctgcagcaccagctctctcactctctccgtttgtcttttttctgtcctcgaaagggctggcgcggaagcggagtggaagatcctgtacagtctcggcaaggacggggacggcctcctccgcaaggacgtcgcgaggagcgtctacgacgggacactgttccaccggctcgcgcccagatggaaatctcccgacagcgacatggagagaagctgataagcgtggtccgggagaacctgaaccggtctggacatgctgtcaaa

SEQ ID NO: 96569 - DNA, 512 bp, Zea mays
  unsure (1)..(512): unsure at all n locations
tgccgctcgctgcccttaaaagagctangtacgtacataccggtcttgaattcccgggtcgacccacgcgtccgcccaacaccacctcgcctgcgatcttcgtatcctccgtcgcgtcgagcatcgatcatgtggggctactgcggaaagtacaaggatgagctcatcaagaatgctgcctacattggcacccccggcaagggtatccttgctgctgatgagtccactggcaccattggcaagcgcctttccagcatcaatgtcgagaacgttgaggagaaccgccgtgccctccgtgagctcctattctgctgccctggtgctctccagtacatcagcggtgtgatcctcttcgaggagaccctgtaccagaagaccaaggatggcaagccttttgttgatgtcctcaaggagggaggcgtcctccctggcatcaaggatgacaagggcaccattgaagttgttggcactgataaagagaccaccacccaatgccatgacgaccttggcaa

SEQ ID NO: 96570 - DNA, 511 bp, Zea mays
  unsure (1)..(511): unsure at all n locations
tgatgctgtctagtgcctagtttccacgtacgnacngacataccggtcttgaattcccgggtcgacccacgcgtccgcccacgcgtccgcccacgcgtccgcccacgcgtccgcccacgcgtccggtatgattgcctggagccagtgcttcttgttggtaccctgcaggataacttcttggccagcttcttgctcgggtggggtataaccattggtgctggccttgcctcctaccccattgacactgttcgccgtcgcatgatgatgacatctggtgaggccgtcaagtacaacagctccttggacgctttcaagcagattgtcgcaaaggagggtaccaagtccctcttcaagggtgctggcgcaaacatcctccgcgctgtagctggtgctggtgtccttgctgggtacgacaagctccaggtggttgtcttcggcaagaagtacgggtctggtggtggctaaggatgtataatgatgatgacgacgaacaacanacatgatgttttan

SEQ ID NO: 96571 - DNA, 506 bp, Zea mays
  unsure (1)..(506): unsure at all n locations
gtagcgtattatgccatcgaaacacgctcgtactnactggtcctgaattcccgggtcgacccacgcgtccgagaagggggctgtgcctcaggactacgaggacttcaagagaatgctggcatccctatggtgggagttgtatggaagaggtggcaactctagctgctcttctgcctttgagcatgtgtttgttggtgagatcaaaggacggggacaaggggagagtgaggtatcaggcttccataactggattcagttttacctggaagaagccaagggaaatgtggattaccaaggttatatatttccaaggcgccgtggtgaatcgcctgattcagagatacagctgctgactgttcagtttgagtggcatggcgtgctgaaatcggtatccagcacgttgattggcgtcagtcctgagtttgaggttgcactctacacgttgtgcttttttgttggaggggaagataaccgcgtcgatattggcccgtatagtgtgaacgtca

SEQ ID NO: 96572 - DNA, 514 bp, Zea mays
  unsure (1)..(514): unsure at all n locations
tggagcgttatctgtgnnccagggctcancgcacgnacgnactggtccggaattcccgggtcgacccacgcgtccgcccacgcgtccgcccacgcgtccgcccacgcgttctgagaagagcggcggcgcgggcggacaaggagcatgcggaggaggagctgtgccaagccacaatgggtatctcacgcgactcgatgcacaagcgccgtgccaccggtggaaagcagaaggcctggaggaagaagcgaaagtatgagcttggtcgccagccggccaacaccaagttgtcaagcaataagacagtgaggagggtccgtgttcgtggaggtaacgtgaagtggagggctcttcgccttgatactggtaactactcatggggaagtgaagctgttacccgcaagacccgtatcctcgacgtggtctacaatgcatcaaacaatgagcttgtgaggacacaaacccttgtgaagagtgccattgtgcaagttgatgctgtcccattcaagcagtggtg

SEQ ID NO: 96573 - DNA, 510 bp, Zea mays
tgcgaatgctgcttttagttcactacgcacgacataccgttctggaattcccgggtcgacccacgcgtccgggtgctctgaacgttgatgtgaacgagttctagaccaacctggtgccctaccctaggatcgacttcatgctttcgtcctacgctccagtcatttctgctgagaaggcctaccacgagcagctgtccgtggccgaaatcaccaacagcgccttcgagccatcctccatgatggccaagtgcgacccccgccatggcaagtacatggcatgctgcctcatgtaccgtggtgatgtggttcccaaggacgtgaacgctgctgtggccacaatcaagaccaagcgcaccatccagttcgtggactggtgcccgactggcttcaagtgcggaatcaactaccagcctcccagcgtcgtccccggcggtgacctggccaaggtgcagcgtgccgtgtgcatgatctccaactccaccagtgttgtggaggtcttctcccgcattg

SEQ ID NO: 96574 - DNA, 509 bp, Zea mays
  unsure (1)..(509): unsure at all n locations
tgctagctgtgnnccaggctcnangcacgnacggacataccggtctggaattaccgggccgacccacgcgtccgcccacgcgtccgccaagaaccacagccaccgtgatggcgcagatcatcgatggcaaggccgtcgccgccgacgtccgccgcgaggtcgccgccgatgtggccgcgctctcgtcggcccacggactcgtgccggggctggccgtggtcatcgtggggagcaggaaggactcgcagacgtacgtgaacatgaagcgcaaggcgtgcgccgaggtcggcatctgctccatcgacgtcgacctcccggaggacatctccgagaccgcgctcgtcgccgaggttcatcgcctcaacgctgaccccgccgtgcacgggatccttgtccagcttccacttcctaagcatatcaacgaagagaagatactgagcgagatttccatcgagaaagatgtggatggcttccatcctctcaacattggcaagcttgcaatgaaaggt

SEQ ID NO: 96575 - DNA, 527 bp, Zea mays
  unsure (1)..(527): unsure at all n locations
atagggctactgcactgaaactacgctcgnatcgaccgtaccggtccggaattcccgggtcgacccacgcgtccggttgatatggctacaaaaggccaaaaggttgctattaagattattgcgaacaattctgatgagcagcagaggagcttcggcagacactttgatatggaagatgagcttgtcagccggatatcaagaagatctattgatattttgaaacagaactacagggaggatttgacaactgaagactggaaacttgttgtaaagttgaaatcaatattgaagatacaatgaaaagccccctcccctaacacacctgcccatgaatttgggagttgtggttctgtggcgccacacctatctctagttctctacaccggagttccccagggagggttaccaattttgatacggtttgatttttgtaatttgctcggaaggcgcttcattttacaaccacattccgtaataacataatattttgtgtttgtttctgtacttttcatgaactctgaagcctn

SEQ ID NO: 96576 - DNA, 525 bp, Zea mays
  unsure (1)..(525): unsure at all n locations
acggtgnctngggcccaccgcttcacngcacgnacngaccnctccggtcttgaattcccgggtcgacccacgcgtccgcggacgcgtgggtgaaggagagcagcccggaggagggggagcaagcagcagccgtcggtggaagatgtcgtacctgctgccgcatctgcactcggggtgggcggtggaccaggccatcctcgccgaggaggagcgcctcgtcatcatccgcttcggccatgactgggacgagacctgcatgcagatggatgaagtgctagcagcagtagctgagaccataaagaactttgcggtcatctaccttgttgacatcacagaggtccctgatttcaacaccatgtatgagctgtacgacccttcgacagtgatgttcttcttccggaacaagcacatcatgattgatctcgggactggaaacaacaacaagatcaactgggccctgaaggacaagcaagagttcatcgacattgtggagaccgtatacaggggcgcccggaaaggccgtgg

SEQ ID NO: 96577 - DNA, 508 bp, Zea mays
  unsure (1)..(508): unsure at all n locations
agacgctncttgtcctcagaaatacgctcgtatcnactggtccggaattcccgagtcgactcacgcgtccgggaaggaaatgagttgcctcgcctcgtttatgtctcgagagaaaagaggccaggttataaggatcacaagaaggctggtgccatgaatgcactggtccgtgtctccgctgtcttatcaaatgctgcatacctactgaacttggactgtgatcactacatcaacaatagcaaggccataaaagaggctatgtgtttcatgatggatcctttggtggggaagaaagtgtgctatgtacagttccctcagaggtttgatggtattgacaaaaatgatcgatacgctaacaggaacgttgtcttttttgatatcaacatgaaaggtttggacggtattcaaggacccatttatgtgggtactggatgtgttttcagacggcaggcactgtatggntatgatgctcctaaaacgaagaagccaccatcaagaacttgcaacn

SEQ ID NO: 96578 - DNA, 508 bp, Zea mays
  unsure (1)..(508): unsure at all n locations
tgcctattctgnnaaggtttangcangtacgacttatccttcttgaataaccgggccgacccacgcgtccgcccacgcgtccggatggatttgcttgtgatggaaaatcttttgtttggacggaatatggcgaggctctatgatctaaagggatcttcaaggtcaaggtataatgcagattcaaatggtagcaacaaggttcttcttgaccagaacttaattgaagcaatgccaacttcaccgatttttgttgggaacaaggcaaagcggctactggaaagagctgtttggaacgatacatctttcctagctggaatcgatgtgatggactattccttgcttgtgggagtcgacgaggagaaacatgaactggtcttaggaattattgattttatgaggcagtatacatgggacaagcaccttgaaacatgggtaaaatcttctggcattctatgtgggccgaaaaacgcttcttcaactgtcatttaacctattcaatataagaatc

SEQ ID NO: 96579 - DNA, 527 bp, Zea mays
  unsure (1)..(527): unsure at all n locations
agtgtctactccactagaatatatgatagaatcgctctaccggtccggaattcccgggtcgacccacgcgtccggtcccccgtcacagtcccaatcgcaacccccgcctgcagcacgcgtcacgccacgccggctgtccccagggtccggcgatgtcggcgccctccgacgccgcggtggcagccgcagcgcccgcatccacgaccaccgccgccgcctccagcggtgggctcaccttcaagctccacccgctcgtcatcgtgaacgtctccgaccaccacacccgcgtcaaggcccaggccgcctgctccggggacagctcttccccctcctcgtccgccccgggggccgggcagccgccgagggtgttcgggtgcgtgatcggggtgcagcgcggccggaccgtggagatcttcaacagcttcgagctcgtgctcgaccccgtctccggaaccctcgaccgcgccttcctcgacaagaagcaggagctctataagaaggtgttccccgacttctacgtgctcggn

SEQ ID NO: 96580 - DNA, 515 bp, Zea mays
  unsure (1)..(515): unsure at all n locations
atgcactggttgctagtgcccctagcctctacgtacgnnacnancnggtcttgaattcccgggtcgacccacgcgtccgcggacgcgtgggcggacgcgtgggcggacgtgtgtgtggaaaagaaagattgtttatggaggtggctcgtttgcttcagaagaaagtatatgttggagctgcaaagctgcaaatactgaaacatttagagcttcctcaggagattatgcactggtttacagccaatgaagcagaaagtcacatacatgttgtccccatgtggactctagcaagcttcaagcggatgaaatatctatcgaatcaatatgctggccggtatgaccttatagtggcgttttgtcctactggttgggcatttggcaaaggtaggaaaaagacaccaggcaaaaggtggcaacaaggatcaatcattagatatgaagtgccctacagtgaacacagcagtttcacggaactgcagcagtttgtcaagttcatatcaccagagcacataatc

SEQ ID NO: 96581 - DNA, 518 bp, Zea mays
  unsure (1)..(518): unsure at all n locations
tgtatgccgtgctatgnnncccaaatcnncgnacgnacgtacacatcttgaattaccgggtcgaccgacgcgtccgcccacgcgtccgcacaggctcaccccaccatcagcaagcgaaaatctcccgatcccctcgggtcggcgcggcgaagatgtcggggcgcggcaagggcgggaagggcctgggcaagggcggcgcgaagcgccaccggaaggtgctccgcgataacatccaggggatcacgaagccggcgatccggcggctggcgcgcaggggcggcgtgaagcgcatctccgggctcatctacgaggagagccgcggcgtcctcaagatcttcctggagaacgtgatccgcgacgccgtcacttacaccgagcacgcgcgccgcaagaccgtcacagtcatggacgtcgtctacgcgctcaagcgccagggccgcaccctctatggcttcggcggctaggctaggccggccctgcctggctgtcgtcgctgcggttctatagttattgcaatg

SEQ ID NO: 96582 - DNA, 511 bp, Zea mays
  unsure (1)..(511): unsure at all n locations
agagtgcgtatcgcttccaatccccgattangttacgacattccgtncttgaattcccgggtcgacccacgcgtccgccgcaaggggtggtggcagaagtacaactacgtgctctcggccgcgctcgacgccgggacggccttcatgggggtgctcatcttcttcgccctccagaacgcgcaccacgagctcaagtggtggggcacggaggtggatcattgcccgctcgcctcctgccccaccgcgccgggcatcgccgtcaagggctgcccggtgttctgaatcttccgagacctgagcgtagtaagcagtgtgtgtaacagtgtaaggaaatgtttgctacgggagccatggattcaaccaagcatcgattaaccgatgcagtgctttgtcactcgtgaatgtaacaccatagcgccagtggtggattcagatttcaaaaaaaaaaaaaaagggcggccgctctagaggatccaagcttacgtacgcgtgcatgcgacgtcatagctct

SEQ ID NO: 96583 - DNA, 513 bp, Zea mays
  unsure (1)..(513): unsure at all n locations
atgccgctgcttcccttaaaagagtangtactgacattccggncttgaattaccgggtcgacccacgcgtccgagcccgatcccgatccagcgaggcggcgaccctccctcctccccttgcttcgctcgtgcaggcctgaccacccgcatccccgtcagtcatggcagcggcagcaggcggaggcgcggtgcgtgcgctgtcccagaaggagcaggacatacagatgatgctcgccgccgacgtccaccttggcaccaagaactgcgatttccagatggagcgctatgcctttaagcgccgcaccgacggcatctacatcatcaaccttggcaagacatgggagaaactgcagcttgcagcgagggttatcgttgccatcgagaacccgcaggacatcatcgtccagtccgcccgcccctatggccagcgtgctgtcctcaagttcgctcagtacactggcgctcatgccatcgctgggaagcacacccctggtaccttcactaaccagcttg

SEQ ID NO: 96584 - DNA, 514 bp, Zea mays
  unsure (1)..(514): unsure at all n locations
cgttcgtctnctatgcgtaacgtnacgtacgtacngacactccggncttgaattcccgggtcgacccacgcgtccgcccacgcgtccgcccacgcgtccgcccacgcgtccgctagtcccctgctccattctgaggggccgccaatcccttcccgtgctccgcaaccgctgagtgagaagaagagatggccggcaagggcgatggcccggctatcggcatcgatctcggcacgacgtactcttgcgtcggcgtgtggcagcacgaccgcgtcgagatcattgccaacgaccagggtaaccgcaccacgccctcgtacgtcgccttcaccgactccgagcgcctcatcggagatgcggccaagaaccaggtcgccatgaaccccatcaacaccgtctttgatgccaagcgtctcatcggcaggaggttcagtgatgcgtctgtccagagtgatatcaagctgtggcccttcaaggtcatttctgggcctggtgagaagccaatgattgttgtcca

SEQ ID NO: 96585 - DNA, 518 bp, Zea mays
  unsure (1)..(518): unsure at all n locations
ntgtccgcgtgtcgtgtgnccatcgaaatatagtacgtactcaccnggtcttgaattcccgggtcgacccacgcgtccgcggacgcgtgggtcgcgacccagcgtccatacacacagcagcctttttgttctccccgcgagcgcgtctctttctctatcgactggcgacgactccgccaccgccgccgctctacgcgagacgcccaggtcttcgccaacgacgagcatccgggttagagaggaagaaattgcaaccgaaacaatggcggcagattccggcgctcgcagacaaccaagcttcaccaaggtcgaccagctgcgccctggaacccacggccacaacctcatcctcaaggttgttgactccaagatggtcgtccagagaggccgcgagggagggccccagggaagacagatgaggattgcggagtgcttggttggtgatgaaaccggcatcattgtcttcactgcaagaaacgatcaagtggatgtaattaggcctggaacaactgttgaac

SEQ ID NO: 96586 - DNA, 517 bp, Zea mays
  unsure (1)..(517): unsure at all n locations
ntgtgagcgtgatctgtgnnccatgccacgacttacgtnacgnacaggtccggaattcccgggtcgacccacgcgtccgcccacgcgtccgcggacgcgtggggcactatcttgctaaggcaaagattctggtggtgaaggacggggagagggatgagatggagttcatcaccaagaccctaaactgccttcccattgccaacattgagcacttccgcacggataagtttgggtatgcagatgttgttgaggaagtctctgttggagagggcaaggttgtgaagatcactggaatcaaggacatgggtaggaccgcaactgtacttgtcaggggatctaaccaattggttattgatgaagctgaacgcagtctccatgatgcactctgtgtcataaggtgcttggtcagcaagagatttttgattgctggtggtggtgctccagaaatagagatgtcaatgcagctggctgcttgggcaaaggagcttcgagggatggagagttactgcatcaagga

SEQ ID NO: 96587 - DNA, 514 bp, Zea mays
  unsure (1)..(514): unsure at all n locations
tgatcagctgcttcccaaggtttagcnagatcgatcaatcacggacttgaataaccgggccgacccacgcgtccggctggcttctcctccccctcttaccaagtttttctcgggttagggttccttagggtggtagagatgttcgatggcggcggctgatgtggagtaccgttgcttcgtcggcgggcttgcctgggccaccagcaacgagtcgctggagaatgccttcgcctcctacggcgagatcctcgactccaaggtcatcaccgaccgggagacggggaggtctcgcggcttcggcttcgttaccttctcctccgagaactccatgctcgacgctatcgagaacatgaacggcaaggagctcgacggccgtaacatcaccgttaaccaggcccagtcccgtggcggtggcggtggctgcggtggctactgtggctgtcgcggcggcggcggcaatggtggcgggcgccgtgactgcggttatggcggctgtggccggttacggcggtct

SEQ ID NO: 96588 - DNA, 513 bp, Zea mays
  unsure (1)..(513): unsure at all n locations
agctgcgnntnctactgctagtccactacgatcgacgtaccggtcttgaattcccgggtcgacccacgcgtccgcccacgcgtccgcggacgcgtgggaacgtgtgatttatgatcagtatggtgaagatgccgggaaggaaggaatgggtggtggtgggtcccatgctgatccattcgacattttctcatcattctttggaccctcttttggaggaggtggtggaagcagcaggggaagaaggcaaaggaggggagaagatgtagtccactcacttaaagtttctctggaagatctttacaatggaatctcaaagaagctctctctttcacgcaatgtcatctgctccaagtgcaagggcaagggctcgaagtctggtgcttcaatgaggtgccctgggtgccagggctcaggtatgaaagtcaccattcgccagcttgggccttccatgatacagcagatgcagcagccttgcaacgagtgcaaggngactggggagagcatcaacgagan

SEQ ID NO: 96589 - DNA, 528 bp, Zea mays
  unsure (1)..(528): unsure at all n locations
agaggagcttacttgaagcagtcngacatgcatagtacatacgctccggtcttgaattcccgggtcgacccacgcgtccgcccacgcgtccgctctgcaagggcttcggatcccacaccgaggaaaggagaagagagggggggaataatggcggccgaggagggtgccgtgatcgcgtgccacaccaaggacgagttcgacgcccgcatggccaaggccaaggagcagggcaagctggtggtcatcgacttcatggccccctggtgcagtgggtgccagatgatggccccggtgtacgcggactgcgccagcaagtacccttccgcggtcttcctcgaggtcgacgtcgacgaactgctggaagtcgcgaagatctacggcgtccatgtgatgccgaccttctgcttcatcaggaacggcgagacgctcgagagctttgctaccgtcgacgaggacgagctccgggacgccgtcaggaagtacgccgncgctggcactacgacggctcctgcctcggcgttcgcctaa

SEQ ID NO: 96590 - DNA, 507 bp, Zea mays
  unsure (1)..(507): unsure at all n locations
agcgaatgctgccttagggccactacgnactgactggtcttgaattcccgggtcgacccacgcgtccgcccacgcgtccgcccacgcgtccggaccaggcaaactatattgaatgggagaggataaagcgtggcaacaaatgagagggatatctcaaggtcatagctggtgtggataaaaacatcaatgtgacatcaaagggtggagatgatgagttctcagagctatatacattcaaatggactaccttattgatacctcctaccacctcgcttctattgaacttcattggtgttgttgttggcattttgggtgattgcattacctcccgaggcactgaggtcgttctcaatttatttggtagtgttgacttgatccttggcggcaacccctggactggtctttgagttgcagcagagcgttgtcactaggaacgccatgatacacgagtatgcgtgcgacaacgcggaggctcaggagtgggcgttggagttgttactgcaatcc

SEQ ID NO: 96591 - DNA, 508 bp, Zea mays
  unsure (1)..(508): unsure at all n locations
tgctgactatgnncccgactcnccgacgnatcgacgtcctgaattcccgggtcgaccacgcgtccgcccacgcatacgaggacgcttgagcacacgtttgtctgccgcgctctctggccttgcgtccgccgggctctttcaacccaacggactctcaatgatgtcaaccctcacgagttcggtgttctgcaatgtcatgacctacaagcctgagttcaccgaccacctcacgcacaagctgaagcaccacccctgacagatcgaggccgccgccgtcatggagcacatcttggaacgcagctcctacatgaagctggcgaagaggctcggcgagctcgacccgctgatgaagccgaagcaggacaagtacgcgctccgcaccttcccgcagtggctcggtccacagatcgaagtcatccgcttttccaccaagtccatctagcgctagatcaactncgtcaacgacaacccgctcatctacgtgttccagtgcaaagctcttcaattt

SEQ ID NO: 96592 - DNA, 513 bp, Zea mays
  unsure (1)..(513): unsure at all n locations
tgagagctnctnctgaattgaaatgactacgnacgacttaccggtcttgaattcccgggtcgtggtcgcccagtaatatctcaacctcatttcatatctgtctgcatttcaaattagatggaaagaaaaaattattgctgcagaatagcttatatcattacttgcactatagctgatagtagtcaaatacataaacttaaatttcccaatagtagttccttttttattatatctgagagcatagtagctctttcgctaatacatcgatcacccctatactaatttctcaggttggagcagcagattatatagcactagctaggaactaccatacaattttcatatcagaaattccagcgatgagtatgaagattcgtgacaaggcaagaaggtttatcactcttatcgatgagttgtacaaccaccactgccgccttatatgcctagctgcctcatccattgatgatctttttcaaggaactgangaaggacctctttttgatttagagagtn

SEQ ID NO: 96593 - DNA, 516 bp, Zea mays
  unsure (1)..(516): unsure at all n locations
gacgcgnntnatggctacngtacgatcnatngtactnnacnctntgnnctgaattaccgggccgacccacgcgtccgcgcaagccactccgaggccaagtctagggtttgggaatctgtaggaggggagaggggagcgcgctcagggtcagggaggcgaagatgatcgaggtggtgctgaacgaccgcctggggaagaaggtgcgggtgaagtgcaacgaggacgacaccatcggcgacctcaagaagctggtggcggcgcagacggggacgcgccccgagaagatccgcatccagaagtggtacaacatctacaaggaccacatcacgctcaaggactacgagatccacgacgggatggggctcgagctctactacaactaggcgccctgaccccaaccgtgccctgatgtaaggttaatccgaattctgaagtcatgggtgcgcttccagtcacagcgtctntagctaacaagctcgcatacatataggcaacttgagtgagctatgtagtacc

SEQ ID NO: 96594 - DNA, 516 bp, Zea mays
  unsure (1)..(516): unsure at all n locations
gtcgacgctaattcctgncctaggggccactgangnactnacnggtcctgatttcccgggtcgacccacgcgtccggttgcccgttgtgctctctctctttattcgttcctcgcctcaccccgagccagccgtctcgctggggtttctccgccgccgccgccgccgccatgcctcgccgcagctcaggaaggtctgccccacgcccagctccccgtgctgctccagtgaggaacccgccacagccagcacgccaggctcctcctccagctcctgttcgagatggtggtggctccatgtttggaggaattgggtccaccattgctcaaggtatggcgtttggcacgggtagtgccatggcacacagggctgttgatgctgtattaggtccccggaccattcagcatgagactgttgcctcagaagctgctgctgctgcccctgcccctccagtgatgaatgctgatgcttgcagcatccattctaaggctttccaagattgtctcaacaactatggc

SEQ ID NO: 96595 - DNA, 512 bp, Zea mays
  unsure (1)..(512): unsure at all n locations
taggtgagtgagnnnccaaatcncgacgnacggacactcctnctggaattaccgggccgacccacgcgtccggttgagagagagagagagggatcgagagcgttgcggaggcgatggcgagcggaggggggggactcaacgcgactggggagttcttccggcggagggacgagtggaggaggcaccctatggcggggaaccagctgcgccacgccacacccgggctcggcatcgccatcgtcgccttcgggatctacctcgtcggcgaggccgcctacaaccgcctctaccgcccctccggcgacaaccaccactagatcgccggcaggatccgtgactcggtcaagaagctggagccaactttaccaagcactggtgctgttgatgtttttacagttttgagctcataaggtcagccatgaccatattgtaatctgtgaccaggtagacttgcccactggtccgtccaactattgtcttgggatcctgtgttaatccttgctatatggatg

SEQ ID NO: 96596 - DNA, 512 bp, Zea mays
  unsure (1)..(512): unsure at all n locations
cgatgccgctgactgccgttcagggagctangcatcgatctaccggtctggaattaccgggccgacccacgcgtccggaaggtttggtcggtttgatcgtgagattgttatcggtgttccagatgaagttgggcgcggtgaggttcttcggattcacacgaaaaacatgaagcttgctgaagatgttgacttggagctcattgcgaaggatactcatggttatgttggtgctgatcttgctgccctttgtactgaagctgctcttcaatgcattcgtgagaagatggatattatagatcttgaggatgagacaatagatgctgagatactgaactctatggctgtttcaaatgatcatttcaagactgcacttgggacaagcaacccatctgctctgcgtgaaactgttgttgaagtgccaaatgtctcttgggaagatattggtggcctggaaaatgtaagagggagctacaagagactgttcaatatccagtggagcattcagagaaatt

SEQ ID NO: 96597 - DNA, 517 bp, Zea mays
  unsure (1)..(517): unsure at all n locations
acggttattntngactggttagnnntgcatgnacntacataccggtctggaattcccgggtcgacccacgcgtccgcggacgcgtgggcgccgccgctgcagtgtccatagccaccgcaggagactgagatggggggttttgtcaagacccacaagagcaatgcatacttcaagcgtttccaggtgaagttcaagagaaggcgcgctggcaagacagactacagggccaggataaggctgattaaccaagacaaaaacaagtacaatacacccaaatacagatttgttgtgcgatttaccaacaaggacatcacagcacaaatcatctctgctagtatagcacgtgatatggttcttgcttctgcttactcgcatgagttgccacgatatggtcttgaagttggtctgaccaactatgcagctgcctactgcactggccttctgttggctcgccgtgtgctcaagacccgtggtttagataaggaatataagggcaatgtttaaggccactgttaag

SEQ ID NO: 96598 - DNA, 513 bp, Zea mays
  unsure (1)..(513): unsure at all n locations
ccggnntnnttaactnggtaagcagtagtacnnncggnnnggaatncccgggtcgacccacgcgtccggttggcttctcctccccctccggttcgggttcgggttcgtgaggttctccggggttcgggggcgggggtgagcggatcgagatggcgccctcccatgttgagtaccgctgcttcgtcggcggcctcgcctgggccacggacgaccactcccttcacaacgccttcagcacctacagcgaggtcctcgagtccaagattatcctcgatcgggagacgcaaaggtcccgcggcttcggcttcgtcaccttctccacggaggaagcgatgcggaacgccatcgagggcatgaacggcaaggagctggacggccgcaacatcaccggcaaccaagcccaatccccccgcagcccttgaggcggtggtcgcggctaccgttgtagcccttgatgcgggggcttcagcaggggcggcccccctgatgaccgcggcggcttcagcggtggcn

SEQ ID NO: 96599 - DNA, 512 bp, Zea mays
  unsure (1)..(512): unsure at all n locations
ctggngtgnncccaccgttacnnangcagtcttnccggnctggaattcccgggtcgacccacgcgtccggttctagatcgcgagcggccgctcggacatggtaattgtaccagctacaactggtcagatgggcgttttgccaggccatgttgccacgattgcagagctcaagcctggtgttctctcagtacatgaggggaacgatgtgaccaagtactttgtgagcagtggatttgctttcgtccatgcaaactccattgctgatattgtggctgttgaggctgtccctgtggatcagatcgacccagcttttgttcagaagggtctcgctgaattcactgccaagcttggttcggcctctactgacctggagaaggctgaggctcagatcggtgtcgatgttcacagtgcgctcaatgctgcattgaccggttaattggtgtcatcttaaattgtctgtcttttagattgagtttaactttgcaaatcctaaataaattatagtccatctg

SEQ ID NO: 96600 - DNA, 508 bp, Zea mays
  unsure (1)..(508): unsure at all n locations
ggcnntnnnnnnaactggcaactggctatgncngccgnaccggtccggattcccggtcgacccacgcgtccgcggacgcgtgggcggacgcgtgggcactgacaggttccctggatgattttggatttgaagattatcttaacatgcctcatgattctgacagtttccgtcaacctgacatgcaccatggaatggaggttcgccttggtttgtccaagggacctatctgtcctagcttcaattgaggcagtaatgtaattctgctgcaagttcacctctcagtccagtacttcagtcaatagaccatattaagatggtgaaatatgaaaactggtagcttgcatctgttcaatgttatgttttaatcaacgctgaatttaatatttgtcaagtttgaacttaaaaaatttaaaaaatattttttttataaatgggcggccgttctagaggatccaagcttacgtacgcctgcttgcgacgccataactcttctatagtggcacctaan

SEQ ID NO: 96601 - DNA, 746 bp, Zea mays
  unsure (1)..(746): unsure at all n locations
agtatgactnttactaacgctacgngcatagccagctgcttccggtcctgaattcccgggtcgacccacgcgtccgggttggcttctcctccccctccggttcgggttcgggttcgtgaggttctccggggttcggggtcgtgggtgagcggatcgagatggcggcgtcggatgttgagtaccgctgcttcgtcggcggcctcgcctgggccacggacgaccactccctccacaacgccttcagcacctacggcgaggtcctcgagtccaagattatcctcgatcgggagacgcagaggtcccgcggcttcggcttcgtcaccttctccacggaggaggcgatgcggaacgccatcgagggcatgaacggcaaggagctggacggccgcaacatcaccgtcaacgaggcccagtcccgcggcggccgtggaggcggcggcggcggctacggtggtggccgtggaggcggcggctacggcggtggcgggcgccgtgatggcggctgcggctacggcggtggccgcggcggctacggtggccgcggtggctaccgtggtggtggtggcggctacggcggtggcaaccgtggcgggcgctacggcaacttcgaccggaactgggaggaactgaacggtgggcccgtacgggcaattatcctgttcgctaccgggatgttaaccttaatccaaagggtttatcttcgtcgtctcgttggtggtgcccatcggtgttttgattgcaggtcg

SEQ ID NO: 96602 - DNA, 505 bp, Zea mays
  unsure (1)..(505): unsure at all n locations
nagttgttttccccaaggttcccgnaagacnancgtccggaattccgggtcgacccacgcgtccggttgaaacgtgtttttgtcatctgttactcaatcattgtttatggcgacaaaattagcacacaaactggaattggcacgtccattgccatagctggtgttgctatgtactcttacattaaggctaagattgaagaagagaaaaagaaaaagagcgcatgactgctgtgaataatattatcgggaccttactgggacacaacatcgtagacaattacgacctacttctataccttgtttagatctcatcttgagtcattcggaccattgtttagatcccagactggtgattaaaagtctgcaaattatagtggtggaattagcaaccatacatacttagctactttaataaatccggctggcgggacacagcggtattaattcacctgttactgaatggaataccgaaatgcaaaaggcacaacactctgcctgactaaaa

SEQ ID NO: 96603 - DNA, 516 bp, Zea mays
  unsure (1)..(516): unsure at all n locations
acgttggtgnncccacggttgcaagccagcacctaccggtccggaattcccgggtcgacccacgcgtccggaaggcgaagaagtccgtggagacctacaagatctacatcttcaaggtgctgaagcaggtgcaccccgacatcggcatctcgtccaaggccatgtccatcatgaactccttcatcaacgacatcttcgagaagctcgcggccgagtccgccaagctggcgcgctacaacaagaagcccaccatcacctcccgcgagatccagacctcggtgcgcctcgtcctccccggcgagctcgccaagcacgccgtctccgagggcactaaggccgttacgaagttcacctcgtcttaggatccttgtaatggtcatgtgggcgtcggcggtaggcgtggctcagtttatgtgatactgctagcgatggatgatgatgatctgcgtgtaattgaattaaagaattgtgctgatctttctacaacactgttccacatcaaaaaaaaaaaaaaag

SEQ ID NO: 96604 - DNA, 505 bp, Zea mays
  unsure (1)..(505): unsure at all n locations
agtgtggnnnntaccgtcactgccgtagtcagccgnaccggnccggaattcccgggtcgacccacgcgtccgcccacgcgtccgcattcatcttgcaatgctaaatgccgtcctgtcgtgaagaaatgtttgatttggtggaacttcacatagtantgttggaatggaatcgtcttccagttgaattcgttgggatttcttgactcttgaaatgtgttatatattactgaatataaaggtgtaagagggacgcggaatggaagacctgtgtcgctgccacagactgcagctggaagcagatcgcggagccggtgatgtgcctgtacagggagacgacggacggctcaaccatcgaggacagggagacggtgctcgtgtggaactactaggacgcggaccccgactttgggtcgtgccaggccaaggagctcgtcgaccaccttgagagcgtgctcgcgaacgagcctttgtctgtgaaaaccacgcctcactcatttgaagtgaa

SEQ ID NO: 96605 - DNA, 500 bp, Zea mays
  unsure (1)..(500): unsure at all n locations
agcgggtnnntactgccgatccgtatgtcnnncggnnggaatncngggncgacccacgcgtccgtgacgcgtgggcggacgcctgggaacaggatatggtgcacgtgtgaccccttatgacgagggagctgttgtaaatgacatcaatccatacaacaaggatatgttccctgattttttgagatggctaccggagagaaacctttcaagcgatgatcggacaatgcgcctaaaagaaggatacatcaaggaaggtatcactgtgagtgtgatgggggttgtccaaaagaatgacaatgttctgatgattgttccttcatcaaagcccatctcaactggttgtaagtgggccaaatgcaatttcccaaccaaccttaaagggcttattttaagatgccaaaaatcttgaaattttaatgggataccattttaacttgccgtggaaaggttattgcaaaaaaaaatgcccctgtaaaatttgaaatattttcttaattgag

SEQ ID NO: 96606 - DNA, 510 bp, Zea mays
  unsure (1)..(510): unsure at all n locations
aaggggtgnccccccaattccagcagcacgancggtccggaattcccgggtcgacccacgcgtccgcccacgcgtccgccgcttccaagatgtcgaagcgaggacgtggaggttctgctggtaacaagttgcggatgtcactgggtctaccagtggcagccactgtgaactgtgctgataacactggagccaagaacctttacatcatttctgtgaagggaatcaaggggcgccttaacaggcttccttctgcctgtgttggtgacatggttatggcaactgtgaagaagggaaagcctgaccttaggaagaaggtgatgccagctgtcattgtgaggcagcgcaagccatggcgccgaaaggatggtgtctacatgtactttgaagacaatgctggagtgattgtgaacccaaagggagagatgaaaggctctgccatcactggacccatcggaaaggagtgtgctgatctgtggcctangattgccagcgcggcaaatgcgattgtct

SEQ ID NO: 96607 - DNA, 750 bp, Zea mays
  unsure (1)..(750): unsure at all n locations
atgatggacgtnttgttagatacgggaagcacgatagggtacgcacgtcccggtccggaattcccgggtcgacccacgcgtccgcatttcttctctctctgctcctccgcctccgcctgatccatccaagacagggatcgccatgtcggactcggaggagcaccacttcgaatcgaaggccgacgctggggcgtccaagacctacccgcagcaggctggcaccgtccgtaagaacggcttcatcgtcatcaagaaccgtccctgcaaggttgtggaggtttctacctccaagactggtaagcatggccacgccaaatgccactttgtcgccatagacatattcaatgggaaaaagcttgaagatattgttccttcatcacacaactgtgacattccgcatgtgaaccgtactgagtatcagctgattgatatttctgaggatggatttgtgagccttcttacttcagatggcaacactaaggatgatcttagactcccaactgatgagactcttgtggcccagattaaggaagggttcgaaagcgggaaggatcttggtgtgactgtccagtctgcgatgggggaggagcagatctgcgcgttgaaggatgttggccccaagtaaccttcttggctttggagacggaaccctactgtatctcaacttaaatcggaaaagaagtgtatcacccaaggattgctaccgagacattcacctggcttgagctggcttttgctatagcgtgcaag

SEQ ID NO: 96608 - DNA, 503 bp, Zea mays
  unsure (1)..(503): unsure at all n locations
gggtctnnncccggcaggtgacgcacgcacnaccggnccggaattcccgggtcgacccacgcgtccgcccacgcgtccgatgaaaagttacctcactggcaatccggaaatccgtcttgctctcaatgaggatttgagcatcggaagaactggatcttcttcatacgattacagaagttcttctggaggaggaacagtcattcttgatgattgcaatttccatgagtcagtacatctggacagttttgatattgacagaactttgactttaataccgcccgatggagaatttcctgtaatgaactaccgtatgacccaagaatttaagccaccattccgtgtaaccgcactaattgaagaagctggaccagcgagggctgaagttctactgaaaataagagctgacttctccgcgagtgccactgctaacacaatcgtagtacaaatgccagtgcctgcatacacaatgagagcgagtttttagttggaagctggaacaattg

SEQ ID NO: 96609 - DNA, 510 bp, Zea mays
  unsure (1)..(510): unsure at all n locations
ccggggtgnccccaaaatgccagacagacnancggnccggaattcccgggtcgacccacgcgtccgcgcaagaccacctccgcgcccacctcgcatcctccgaatccgcggccgtcgctcaggtttggaggggcttcgcgtcgcaggccgccaagcccaccgggaaggagatcaaggttccaaaggctctgtttggcggcacaggcaactatgccagtgcactgttcctcacagcagctaaatctaatgcattggacaaagttgaatctgagattaaagctattgtagaggcttccaagaagagcccgttgttttctcaattcataaaggacttgtcagttccaaaagcgaccagngtgaaggctatagccgaaatatttgctgacgctgggttttcagatgttacaaagaatttcttggctgtcctggcggacaatggcaggctgaaatatattgaacgcattgcggagagatttgttgatttgactatggaacataaaggggagatga

SEQ ID NO: 96610 - DNA, 504 bp, Zea mays
  unsure (1)..(504): unsure at all n locations
tggtgtnnncccagcgtagccagcacgcacnancggnccggaattcccgggtcgacccacgcgtccgcggacgcgtgggcggacgcgtgggtttcgtcacccctgacgctcgacgcctcttctcctgtcgtgccccgccgattcgcgtcgccctttgttggaaggaacgatggagcagaccttcatcatgatcaagcccgacggcgtccagcggggcctgatcggggacatcatcagtcgcttcgagaagaaagggttctacctcaaggggatgaagttcatgaacgtggagaggtccttcgcgcagcagcactacgctgacctttccgacaagcctttcttccccgggttggtggagtacatcatttccggccccgtggtggcgatggtgtgggaggggaaggacgtcgtgttgactggccgcaggatcattggggccaccaggccttgggaggcagcccccggtaccattcgtggggactacgccgtggaagtcggcaagag

SEQ ID NO: 96611 - DNA, 514 bp, Zea mays
  unsure (1)..(514): unsure at all n locations
atggttnnttacgcttggggcgttgcacgccgtaccggccggaattcccgggtcgacccacgcgtccgcggacccgtggccggacccttggcccgaccggagtctaaattcaaaaccaccttggactggcggattttttttccacccacaccttgtctgcgccgtcgtttgctgcaacgatagccttccccgacctgctcttcaatctgcggaacctcttctacctgggcgcctaccaagcagtcatcaacaacagcgacgttccgggcctttacgccgacgccgtcgtttagcgcgacgccattgtgtttcgctcctacatcagcctctgcttctaccagctggtgatcaacgagatcgactcgttggccgctacctctcttcaagccgcgaaactgctcgcgcttgtccttactggagacaaagaaagtgctttcttcagtctcaaaggatgggtgagtggatcacaaattggaagcaatccttttcttcccattgaattgcttgaattttn

SEQ ID NO: 96612 - DNA, 746 bp, Zea mays
agagtgcctctttttaatttcagcccctcactgcaagtacatccgtatcagaacttcacggacgaccacactctttcggacacgcatgctctgtaccgttgcatcaacgagtgctcaatctacacccacgatcatcggggtacttaagcaatcagacattaactcgaccgtgacaacaaacgcacacaaacagcaccacatgtccaaaggccacatgacctatacatcagcatcctttgcctacaggctgtcgcacatatcaccgaaccctgactcatctgaccatgatcttctcactgctcgaacggaggtagacaaggctgctcgcgcctcaccatacatatactctggtggccgaaggcttgtgtgcctcggtgaacacttagcctacctgcacatcaaggcaatctggacacacctactgaggaactttgagctcgagctggtatatccatttcaagagaacgactgtcacgacatggttgatggcatcaaggccgacgtgatggttcactacaagaggcggaagcttgacgtggacaactaagattgtggccacaatctctacatgcttgcttcttggcgattcaactgatttcacatgcttgtcagcatctggtcagtgcaagttctgctggacgcaagccagccctgtttagggtgtatctggtgtttaagaatctgaaatttgtttcctatggggccgccatgatctgcaacttttgcaatgtcactttctggcttaa

SEQ ID NO: 96613 - DNA, 751 bp, Zea mays
  unsure (1)..(751): unsure at all n locations
agagtgcctntttttgactttcgtnnagctttgcatgacntccggactctgcaatttccgggtcgacccacgcgtacgcccacgcgttcgctgacacgtgggtaccccttctccacatcccccctcccatgaaccggcggtgtacttctccagcggcgatgactacgcgcttcaagaagaaccgcaagaagcgcggccacgtgttcgccgggcactgccgcatcggcaagcaccggaagcatcccggatgtcgcggtaacgccggtggcatgcaccaccaccgtatcctcttcgacaagtaccatcccggctacttcggtaaggtcggcatgcgctactttcacaagctcctgaacaagttctactgtcccgcggtcaacatcgagcgcctctggtcgatggtgcccgccgacaaggcggcctaagccggcagcgacaaagccccgcagatcgacgttacccaattcggcttctttaaagtgcttcggaaaggggttctttctgccaaacccatcgttgtcatagccaaacttattttcaaagtcccccaaaaaaaaatcaaggccctcttcggtcccgttgtgctaaccgtctaatttttaatgcttatttgccctcttggtttttaaatctttatttgaactagcatagcctttcttgactcaaccattttagggtaaaaagacctaagttttaaaatccttcgtcctttctcttttgaaaatgcttttatttaaaatttttatggttt

SEQ ID NO: 96614 - DNA, 516 bp, Zea mays
  unsure (1)..(516): unsure at all n locations
gctgtgttgtnncccgaaatgccagcaggcacgnacnggtccggaattcccgggtcgacccacgcgtccgctcccccaccggttcgtgttcaggttctggttcgtgggcgagagggaagagatggcggcggcggacgttgagtaccgttgcttcgttggcggcctcgcctgggccaccgacgaccactccctcaacaacgccttcagcacctacggcgaggtcctcgagtcgaagatcatcctggatcgggagacgcagaggtcccgcggcttcggcttcgtcaccttctccacggaggacgcgatgcgcagcgccatcgagggcatgaacggcaaggagctcgacggccgcaacatcaccgttaacgaggcccagtcccgcggcggccgctctagaggatccaagcttacgtacgcgtgcatgcgacgtcatagctcttctatagtgtcacctaaattcaattcactggccgtcgttttacaacgtcgtgactgggaaaaccctggcgttaccca

SEQ ID NO: 96615 - DNA, 512 bp, Zea mays
  unsure (1)..(512): unsure at all n locations
caggntnnncccggccagtttgccagcacgnctcaccggnccggaattcccgggtcgacccacgcgtccgctctggacaagtgaaggagaagctgggcacgattgacccctactttgtcaagctcggtgaggccatggtcacctggatcgaggcctgggatgagctgaacccgtcgacccctgccgccgcaaatggcaaggccaagtagatgtgccatcacttcggcactggagtgaaaaagaaagtatgattgggtcctgcctaggccccatagatatagctcttttttgagaaggaagagagattaattcagcagcagcttttataaattctttgttgtcatgaagcaggtggttcttttgtagttgatgaaagggatttgtcgtcgctatcgtttacataattcagacaataattttatattgtgtaattctgagaatcaaagcactgtttgtgttatagcatatctaagaatgagcatttgctgttgtttaaaaaaaaaaaaaaaaaa

SEQ ID NO: 96616 - DNA, 513 bp, Zea mays
  unsure (1)..(513): unsure at all n locations
acggggtgnccccaaaattcanagcangacgnaccggtccggaattcccgggtcgacccacgcgtccgcggacgcgtgggcgccaacgccttcgacaacaagatcgatgccaagcgcacgctccgcgagatcaagctgctccgccacatggaccacgagaatattgttgcaataagggatatcatacctcctgcgcagagggctgcattcaatgatgtgtatattgcatatgaattgatggatactgatctgcatcaaattattcgttcaaatcaagctttgtcagaggagcactgtcagtattttctttatcaaattcttcgtggcttgaagtatatacattcagcaaatgttcttcaccgtgacttgaagcctagcaatcttcttttgaatgcaaactgtgacctcaagatatgtgattttgggcttgctcgcaccacctcagaaactgattttatgactgaatatgttgtcacaagatggtatagagcaccagagcttttgttgaactcc

SEQ ID NO: 96617 - DNA, 745 bp, Zea mays
agagtgacctcttactaagtttcatttaggctagccacgattcgttcacacttgcatcaccaatgtcgacccacgcgttcgggttttctcgccgccggcgccgtcgtttcctcgtttccggcgcatcgatgcctcgccagggactttcggatcaagaggaagctggcgaagaagatgcgccagaaccgacccatcccctactggatccgcatgcgcaccgacaacaccatcaggtacaacgcctagcgcaagcactggcgccggaccaagctcagcttctgagcgctcagatcggtcggctactgcatcagaattctaaggtctctacctttgctttggttctatcaaagtctcttgaggttatgaaagctagcgatactcctcagaaagcttttgttaagattttgattacactaagaagattgatgcttctatgccgtgctcaagattccatgctgcattgggatactaaatgaaaaaacctctggtaccttccaaacaaacttaaaaggcggccgatctattagagccaaacttacatacgcgttcattcgacatgatagctcctctataatgtcaccttaaatcacttcaccggcccgcgatttacaacttcttgaatgtgaaaacactgcgttacccaattaacccccttgcagcaaaaaacccttttgccagcttgcggattttcaaaaagccccaaacgttgggccttcccacaatttttcattccaaaatgggaatg

SEQ ID NO: 96618 - DNA, 754 bp, Zea mays
  unsure (1)..(754): unsure at all n locations
agagtgacctnttnttaagttcagtnaggtttgcattatcgtaccgactgcgcttaccatgcatccgaccactcgttcaggttatcgcgccgccgccgccgccgcttcatagactgcgacgcagcgatgccgtatcacagaaccttccacatcaagagagaactggcgaataagatgcgccagaaccgccccatccgctactggatccgcatgcgcacggacaacaccatcaggtacaacgccaagctcaggcactggcgccgcaccaagctcggcttctgagcgcgcggatcggccggctcctgcgtcagaattctacggtctctacctttactttggttttatcgatgtctcttgcgtttctgtaagctagcaaacaattccagaaaagctttgttaagattttgatgacgctaaaaagattgatgctactatgctgtactcaagattccatgctgcattgcgatgcttaattaaaaaacctttgttaccttaaaaaaaaaaaaaaagggccgtccctctaaaagattccagctttcgtatcccctgcattccacatcataactcttttataaaggccaccttaaatcaaattaaatgggccgacttttacaaacttttaacctgggaaaaactggggttcccaacttaaatggcttgcatgacaatcccctttttccaagtggcgtaatatcccaaaaagccccctaccgattgcgcttttcaaaaaattggcaaaccctaattgcgaaag

SEQ ID NO: 96619 - DNA, 511 bp, Zea mays
  unsure (1)..(511): unsure at all n locations
aagggttggtnnnnaacttttagcagacgancggccggaattcccgggtcgacccacgcgtccgagttattcgataagatcgtcaattctggaaggctaggagaggatgaagctaggatatacgttcatcaacttataaatgcggttgattattgtcatagccgaggagtgtaccatagagatctgaagccagagaatctacttctggactcacatggaacccttaaagtttcagactttggcctaagtgcatttgcaccacaaacaaaagaggatgggcttctgcatactgcctgtggaactccaaactatgtagcacctgaggtgctcgctgataaaagctatgatggtatggctgcagatgtatggtcctgtggcataatcttgtttgttcttatggccggatacttaccctttgatgatgtcaatctgatgagactgtacaaactgatctgccatgcaactttttcttgcccaccatggttttcttctggagcaaggaagtttattn

SEQ ID NO: 96620 - DNA, 510 bp, Zea mays
  unsure (1)..(510): unsure at all n locations
tggntnnnttaggcaatttacgatagcacgcgcnacnggnncggaattcccgggtcgacccacgcgtccggggaagcggttggcatcgcttgagatggagctggctgcagcaaagcatgaaggtttggtgggcaaatatactcccgagacaaatggaactcattctgggaaaaagccactggttgttattggaataatgactagctttgggaggaaaaactaccgtgatgctgtcaggaaatcatggcttccgacaggttcaatgttgaagaaactagaagaagaaaaaggcattgtagtacgttttgttgttggaagaagtgcaaatcgaggagatacttttgatagggagatcgatgacgaaaataggagcaccaaggatttcttgatattggatgatcatatagagtcagatgaagagctttctaagaagacaaaaagtttctttgctaatgcaacaaatacattcgatgctgcattttatgctaaggtcaatgatgatttatacat

SEQ ID NO: 96621 - DNA, 748 bp, Zea mays
  unsure (1)..(748): unsure at all n locations
aggatgacctnttgctcaatgttcagtntnggctangcatttacgtccacacttgcatcaccagatgtcgacccacgcctacgcgagtggagactcgagacgcacctgatccttactttccgtatttctcacacactaccctgagccttgctgccacgagagtgagccgcagagggtacgtggcgaggctgctcagatacgtctgaggcctgtgcagctgcgcccgatcgatatcaagatcaaccgccaggtgaccttctgcaaacgcctgaacgggctgctgaataaggcccaccagatctccctgctctgcgacgcagaggtcgcgctcatcgtcttcttcactaaggggaagctatacgagtactctagccattccaacatggaaggcattcttgagcgttaccagcgttactcatttgaagaaagggcaactcttaacccaagcattgaagaccaagcttattgcagatatgaatatgtccggatgaaatgcaaacttgatgcacttgacaagagttaaaggctgctgttacgagaacaattgagttcactgaccatgaaagaactacagtaactggtacaacaactggtcagctattttaaaccttttagtcaagaaaggattaacccatgttcaagtcaatatccagcttaagaatatggtcaagctcttacggatcaaaacgttttcccgctaaagtacaaggaagccgcacaaggtcaaaacaaggctttttttaccacc

SEQ ID NO: 96622 - DNA, 510 bp, Zea mays
  unsure (1)..(510): unsure at all n locations
tggnctgnttcccctggtacagnagcacgcgcnaccggncggaattcccgggtcgacccacgcgtccgcggacgcgtgggcggacgcgtggggcctcgccgagctccgcgtgctcagcctcaagggcggcgcgctccacgggcccgtcccggacctctccccgctcgccaacctcaaggcgctcttcctcgcggggaaccgcttctcggggcccttcccgccctcgctcgcctccctgcgccgcctccgctccatcgacctctccggtaacaggctctccggcgcgctcccgcccggcatcgaggccgccttcccgcacctcaccctcctccgcctcgacgccaaccacttcagcggcaccctcccgccctggaaccagtcgtcgctcaagtgctcaacgtctcctacaacaactttttcggggccagtgcccgtcacgcccgtcatctcgcatgtcggcgccgccgcgttcgctggcaaccccgagctctgcggcgaggtggttcggcc

SEQ ID NO: 96623 - DNA, 518 bp, Zea mays
  unsure (1)..(518): unsure at all n locations
gtggggnnnnnnaacgggggagtccgnangnacnnncgnnnnggaatnangggccgacccacgcgtccgtcacaacccagtcgctcaaaaccctagagctctcgcctgctcgcctccgccgccggagcgagctgcccatcttcatccgtcaaccatggcgacccanatcagcaagaagaagaagttcgtcagcgacggtgttttctacgccgagctcaatgagatgcttaccccggaacttgccgaggatggctactctggcgtggaggtgcgcgtcacgcccatgcgcacggagatcattattcgcgccacacgcacacacaaaatgctctgcgagaaagggcccaagatcacagagctttcctctccggtgcacaaaaaaggtaaatttcccctgaaataggcctaactctacaccccgaaagggttttaacccgtgctctttgcatttcgcacggcgaggcctctcttataaaatcttctagaggccttgccccccagaggttttctatggtgtt

SEQ ID NO: 96624 - DNA, 548 bp, Zea mays
  unsure (1)..(548): unsure at all n locations
cttgctgnttcatcctgatctgntgcctcnccggntggaattcccggtcgacccacgcgtccgcttactcttggtctgactcgttggaaaaattaaaaaataaaaaaaaaaaaaaaaaaaaaaaagaaggatttaattaatttatatataaaatccattaaaattcccttcctttcttataatatccttctttattttcctcctctttcctttcttttttcttctttttttttttttccctctaataaaacttaacattcccctcttttttccactcttttatatttcttaaaactctttcttctccccactttattttttctgttattccatatttccctttttccctcattatcctttaatttataaaaaacctctacttatttttcttttctctttctatttttttcattttttttattttataatttcctattttcttttttcttctctttttttcccctcttatattttttttttacccccctaataatctcttttttatttattctatctcttatttcctcttcctttttcttttttttttt

SEQ ID NO: 96625 - DNA, 511 bp, Zea mays
  unsure (1)..(511): unsure at all n locations
gctgtctgtnnnnnaaacttttgnangcnacnncgnnccggaatgacacgggccgacccacgcgtccgctacttctagatccctaccattgccttctgtgatactgactcttccattccgtacctcgatgtcggcattccagctaacaacaaagggaggaacacctttgggtgtcttgttttgccttctgcccaggatggttctgcaattgaggggctctattcttcctgcgcacaagtggaaactcatggtcaatcttcttttctacagacccccagaaaactcaaaggcccgggaggagaattttcccgtcccccctgattttcccgcattcactgattaccaacgaactgatcagtggggtggtgatcagtggacctcttattggggtgcttctccggctccagttcctaccggtgatggctgggatcaagctggggcccctgtacctgcggacggtactgcacctccaggggttgctcctactggttggcaccaaacaaccccgccn

SEQ ID NO: 96626 - DNA, 560 bp, Zea mays
  unsure (1)..(560): unsure at all n locations
agagtattcgagttttgatgctacnccctcgtactgctcaccggttcggaattcccgggtcgacccacgcgttcgcccacgcgtccggccagtcttgcatcccgtccccgtccgcgccggccgacgccgccttggcgtccccgcgtcagcgtcgcggctccactgagcgtgcgtgtcaccggcgggaggcaagggcaggcggtggtggcgatggcgtccgctgacgcgcgcttggcggggatcgcctcctccatccgcgtcatccccgactttcccaagccagggatcatgttccaggacatcacgacgttgctggttgattccaaggcgttccgtgacaccatcgacctctttgtcgagcggtacaaggaccaagggatcaccgtggttgctggtgttgaagctagagggttcatttttggtccttctatcgctttagccattggcgcaaaatttgtgcctttgatgtaaccgaataaattgccagccaagtggatctccgagaggattttttggagatttgaactttccagataggaatggcttgctagggttgatcc

SEQ ID NO: 96627 - DNA, 553 bp, Zea mays
  unsure (1)..(553): unsure at all n locations
ggtagcgctantggtgacctagccctccaacctctcggcacgtctggaattcctcgggtcgacccacgcgtccgcccacgcgtccgcttcctggaaggcggctagggctttgacaccgacatcaccggcaccggcgcgctgcgcatgatgcccttcggcgccggccgccgcatctgccccgccgccacgctcggcgtgctccacatccagctcatgctcgccaacatggtgcgcgagttccgctggctgccgcccgccggtgagggcccgccggaccccaccgagaccttcgcattcaccgtcgtcattgagaacccgctccgggcagccttcgtcgagcgggccacgactgagacggcgacaaccgcgtgacgagtgacgaccgaaaggtataaaaaagggggagggtgagaattttctagttcaaggtactcttgcactgggctatggctttgttgggaagttattgcaacctgtcggtttagcggggggtaattagtccctgactttgttggttgaatttcaggggatttaatttattagtttcgtgtgt

SEQ ID NO: 96628 - DNA, 571 bp, Zea mays
  unsure (1)..(571): unsure at all n locations
cgtaggacacattaattatgatcactgaaccactcganctcattcgtaggtctgtaccggttcggaattacccgaggcgtacccacgcatccggccacgtttgcgctctatggtgacggtgcggctaaccagggacagctctgggaggctcgcaacatttcggccctctggaagctgcccgccatattggtttgcgagaacaaccattatggtatgggaacagcggaatggagggcagcgaagagtcctgcttactacaagcgtggcgactatgtgcctggattgaaggttgatggaatggatgttcttgctgtgaagcaagcgtgcaaatttgcaaaagatcatgctgttgcaaatggcccaattgtccttgagatggatacctacaggtaccatggccactctatgtcagatccaggaagcacttaccggaccagggattagatttcaggtgtcatgcaagaaccggaccccaattgaaagggttagaaattgcctttgtggtaaaaatttggaatctggtgcttagctttaaggttattgggaaagggaatttggaacaaatttgatt

SEQ ID NO: 96629 - DNA, 782 bp, Zea mays
  unsure (1)..(782): unsure at all n locations
tgaatccagtnttttttgagattgtggggtagtatgtgatgcctcaccggtccggaattcccgggtcgacccacgcgtccgcctcctctccttcgggctcagcgtgctcatcctcctctccgtgtacgagacccggttcaggacgatgaggagcgtcagtgcgtggtccagtgacggtggggattatccattgccaatgctccggaaccttgtcatggtggctgggcattcgatctatacgagctcaagatgcggggagaccgagagtgagaattcctggttcttggagccgtaccagaagcacgctggacaggcggccaccttcctggctcacatcaaggagggggtggggatcgcggcgagggatgagggggcactcctgttgttcagcggcggggagacgaggagagatgctggcccgaggagtgaggcacagagctactgggctattgccgagtcgaaaggatggttcggaaatgatgagggtgtaaggagccgagcactcaccgaggagcatgcacgagatagttttgaaaacctcctatttagtgtgtgccgtttcagagagctaactggaagatacccacagaacataactgttgttagctacgatttcaaggaggaacgttttgcacaactgcacagaaccgcactcggattcccggaaggaaggttcttctttttaagtacaccagctacgccctttcccggcccaaaaaagaggggggggggggaaaaaaaaaaaaggggggggggccccccctttttttggggggccccct

SEQ ID NO: 96630 - DNA, 790 bp, Zea mays
  unsure (1)..(790): unsure at all n locations
aggagtcgcagantgtngtggaattgcgggacatgataggactgcctcaccggtccggaattcccgggtcgacccacgcgtccgcccacgcgtccgcctgaagtctgggacggtggcgtcgggttcgtgtcgaaggaaatgatccagactcattgcccagcgcctgccgccgacattcaggtattgcgatgtggacctcctcccatgaacaaagccatggccgcgcacctggacggccttggctacacgaaggagatgcagttccagttctaagcgttacattctctctaccagtaccagaataaacggcggtggaacaaagtcacagtcacagagcgtcgtacttactctacctggatgaaagcagcagtacagtacccacctaatttgtatcggtgtcgggacattgtaccgtgccgttcttttgtatcggtttgtcactcactcactcactccgcgagccagcagcccagcacacgatccatcgtgtcgttttggcaacgtcaaaaaaaaaaaaaaaaaaaaaaaaaaaaaaaaaaaaaaaaaaagggcggccgctctagaggatccaagcttacgtacgcgtgcatgcgacgtcatagctcttctatagtgtcacctaaattcaattcactggccgtcgttttacaacgtcgtgactgggaaaaccctggcgttacccaacttaatcgccttgcagcacatccccccttttttcgggcccccccaaaagggccccccctttttttttggggggggggccccccccggggggtttttttaaaaaaaa

SEQ ID NO: 96631 - DNA, 556 bp, Zea mays
gggagaattaattggtgaccctagcctctccacctggctgcgcaggttcggaattcccgggtcgacccacgcgtccgcggacgcgtgggcaaaaaatgtgattatttgttataatggtctctgttcttaaggcgtggcctaggcgtcgcctaggcgacgcctaggcgtccgggcggtggtctaacgcctaggcgccttgcccgcctacctcgcctaggcgtccaggcggtggtccaacgccttggaccgccttaccgctttaaaaaccatgataatggtaaacgtaagttttgtgctatgagcctatagcttctcccctatcgtgggcagtcgtgtcaggatacttggtttctgtgaaacattcaggctgtcattatgtctggtctgtagaatgtgctagtgtgaatgttctgctatttcaataggtaattgattccaggttagaccaattattatctaccaactgattgagaactttaccggtagcttattacttaacctgacaactggaaaaaaatgaaaataagttttattgtgttgatatggattattgcta

SEQ ID NO: 96632 - DNA, 561 bp, Zea mays
  unsure (1)..(561): unsure at all n locations
aggtgcgctaattagtgtgcctcnccgcatcgatctcatcgtatgtcagtaccggttcggaattcccgggtcgacccacgcgtccgcggacgcgtgggcggacgcgtgggttctcctccccctcttaccaagtcctgctcaggtggagggttccttagggttttgtggaggggcgatggcggcggctgatgtggagtaccgttgcttcgtcggcgggcttgcctgggccaccagcaacgagtcgctggagaatgccttcgcctcctacggcgagatcctcgactccaaggtcatcaccgaccgggagacggggaggtgttgcggcttcggcttcgttaccttctcctccgagaactccatgctcgacgctttcgagaacatgaacggcaaggagctcgactgccgtaacatcaccgttaaccatgcccaattccgttgcggttgctgatgcagcgtgtgtttccgtaggatgttttgtttgagagggtttttgtgccgtgctccttaatcgttgtatttgctgctgggggggtttaagtggtttttctaggtgtaatcttc

SEQ ID NO: 96633 - DNA, 554 bp, Zea mays
  unsure (1)..(554): unsure at all n locations
agttgcgctaattggtaccataaactatagatcactccgcacgctcgtccggttcgaattcccgggtcgacnacgcgtccgcccgttagactaggttaggctaggctagggtgtcgaccagctcgcggtaatggtggcggtcaggttccatcagtaccaggtggtggggcgcgcgctgccgacgcccggcgacgagcaccccaagatctaccgcatgaagctctgggccaccaacgaagtccgcgccaagagcaagttctggtacttcctgaggaagttgaagaaggttaagaagagcaacggtcaggtcctggccatcaacgagatcttcgagcgtaacccgacgacgatcaagaactatggcatctggctgcgctaccagagcaaaaccggctaccacaacatgtacaaagaggtccgggacacaacccttaaccgtgccgtagaacaaattgtccaagggataggcttttggcaaccggttgaggtcccctgtattccagacctttagaacgcacagagtacatttaacctcttccaagagggacaacccc

SEQ ID NO: 96634 - DNA, 552 bp, Zea mays
  unsure (1)..(552): unsure at all n locations
ggatgttatngttgcgtcatgagctccagctcactccgcactgctgtaccggtccggaattcccgggtcgacccacgcgtccggttgcaagaaggggaattccgctgcgagatccgtgaacggttcagagatggcacagacggtgttcaccccctctttggaagcgatgaagcatgtcaaggcagagaacggagtcattctcaccaagcccttccttgatgtctgcaagcaaatattgcctgtcctcgataaatttggagctgctatggcaattgtaaagagtgatatcggcggcaatatcacaagactggaaaacaagtatacttcagaaccatcaaagtatgaacacttgtacagcatgattcaagaagaagttcaaaacaagaccgcaaaaagttccttaagctgcacaaatgggcttttgtggcttaccaaggccattgactttcttggtgagattgtttggaacctgtgttagcattcaaacatgggcattagctaaacttgcctcatttattaccccagacctttaaaaatatttatgggttggtc

SEQ ID NO: 96635 - DNA, 788 bp, Zea mays
  unsure (1)..(788): unsure at all n locations
aggagccagattgttttgggtaggggggtagaagggaatgctgcaccggtccggaattcccgggtcgacccacgcgtccggttctgcgacggcaagtgcgcggtgaggtgctccaaggcgagccggcacgacgactgcctcaagtactgcgggatctgctgcgccacctgcaactgcgtgccgtccgggaccgcgggcaacaaggacgagtgcccatgctaccgcgacatgaccaccggacacggcaaccgcaccaggcccaagtgcccctgatgatattcattccttcgctccctccggggagccagctgtcttgcatgcgtatatgtaatgtatgtataggctgtgcaatgcatgcatacatgatacatgccgtgactctggatcggcggatgcctatgcatgcttttcactagctattattactactactactactcttcctgtcttcctactgtgtgcaccagagtgagagggacgacatgcatggcgatgacatgtcgtgttatgtgcactggcggccgctctagaggatccaagcttacgtacgcgtgcatgcgacgtcatagctcttctatagtgtcacctaaattcaattcactggccgtcgttttacaacgtcgtgactgggaaaaccctggcgttacccaacttaatcgccttgcagcacatccccctttcgccagctggcgtaatagcgaaagaaggcccccccggnncccaaaaaacccccccccggggggggaaaaaaattttttccccggcggggggggcgccccccccccccc

SEQ ID NO: 96636 - DNA, 788 bp, Zea mays
  unsure (1)..(788): unsure at all n locations
ggagtcccgttgacttgattagtggagtttatgtaatgcctcaccggtccggaattcccgggtcgacccacgcgtccgcccacgcgtccgatctcagtcacctgcgccgccgcttcgttcgtgtggaggggagaagagaggaaatggcggcgaccgagggcgtgctcctggggatgggcaaccccctcctcgacatctccgccgtcgtcgatgacgccttcctgacaaagtatgacatcaagctgaacaatgctattctcgctgaggagaagcacttgcctatgtatgacgagttggctagcaagagcaatgttgaatatattgccggaggagccacccagaactctatcagggttgcccaatggatgcttcaaactcctggtgcaacaagttacatgggatgcattggaaaggacaagtttggtgaggaaatgaagaaaaacgctcaagctgcaggagttactgctcattactacgaggatgagactgctcctactggcacatgtgctgtatgtgttgttggtggtgaaaggtcattgattgcaaatctgtcagcggcaaactgttacaaatctgagcatctaaagagaccagagaactgggcactagttgaaaaggcaaaatacatctacattgctggatttttccttacagtgtcgcctgattctatccagctagtcgctgagcatgctgcagcanataacaaggtggttttccccttttgggaaaaatttttgggggaaaaaaaaaaaaaacccccctccctttttttttccctttttttttcc

SEQ ID NO: 96637 - DNA, 783 bp, Zea mays
  unsure (1)..(783): unsure at all n locations
tgatccggtttcttgaatgggagaatgatgtgactgcactcaccggtccggaattcccgggtcgacccacgcgtccggcggacgtgatcaccattgagaactcgcggtccgacgagaagctgctctccgtgttccgcgagggcgtcaagtacggcgcgggcatcggccccggtgtctacgacatccactcccccaggatcccgtcggctgaggagatcgccgaccgcatcgacaagatgctggcggtgctggacaccaacatcctctgggtgaaccccgactgcggcctcaagacccgcaagtacacggaggtcaagcccgccctgaccaacatggtctccgccgctaagctcatccgcacccagctcgccagcgccaagtgagcaccttttttttgcctttttcgtttccgaggagggcgtcgtcgatgccaatttgtttccaataaacagggctgtgcccgccgttctgttgtactccgtctgtggttaggttagtagttttcttgatctcgcccccacgcggtacctgttttactactctctgtttggtggtttctgaggcaagttgcccgtgtacttgtatcgtaaaaaccgagtgggacatctgcatcgtttcatctgccaccactcccccgaggtgtgctgtttcacggcttaaagaaagatgtcgtatcggcaaaaaaaaaaaannnnannnnnnaanannnannanaaannaanaaaaaaaaannaaaannanaaaaanaaaaaaaaanaaaaaanaaaaaaaaaaanaaaaaaa

SEQ ID NO: 96638 - DNA, 561 bp, Zea mays
agtatgtatttaatgaggtgagccctccgctatgaggagattattgcatggctcggaattcccgggtcgacccacgcgtccggggtaagggtacttctgctgtgctcatgctgcttagggaccatgtgacaaatggaagtgctgttgctgccatgaattctgcgtcggttgcagagtgggcaacctctctgtcattgctatttgatcccaaatgtccaggattggagtcacttgtggagaaggtgaaggagattgttgagagcaatgaagtgaggagattgcctaaaattccaaagggtacacgcgactttggtaaagagcaaatggcgataagggagcgagcattttcaattataactagtgtattcaagatgcatggtgctactgcgcttgatacacccgtatttgagctgagagaaacccttatgggaaaatatggtgaagactcaaagttgatatatgacttaactgatcaaggtggtgaactttgctctttgccgtattaactggctgttccatattgccgttatttttgcatgaatagcattagagcattaaaga

SEQ ID NO: 96639 - DNA, 556 bp, Zea mays
  unsure (1)..(556): unsure at all n locations
tggatgatttattaagtatcctacacttttagctcgtgcgtactgctgtacatgcccgggtcgacccacgcgtccgacgcctaccgacacgcgttcgccaaagcctccgacacctaagccgaccccgccgacgtgacccctgctcccaagcctccgacgcccaagccgaccccgccgacgtacactccaagccccaagcctcccacacacccgactcccaagccgaccccaccgacgtacaccccttccccaaagccttcgacgcccaagccgccggccaccaagccgcccacctacactccgacgccgtcggtgtcttacaccctcagcccgtcgtcaccatactactagaaagcgatgcctaccataccacactgctgtcagtctctggagcatttaggtgggctggatcaatggaaaggttgtgttctaaccagccgtgcaagattagctgcttatgggaaagatgaatgttaggggccactggtaccctattacggactttncttttgggttctgtccttccttccccgttgactatcgaagggagatttac

SEQ ID NO: 96640 - DNA, 547 bp, Zea mays
  unsure (1)..(547): unsure at all n locations
agtagattatnaggcttattggactagaaaaactgaggactgctgtaccggtccggaattcccgggtcgacccacgcgtccgctgcatttgcaaatgcattccacatgctacaacccttgagagttcctgcctggagctgtgcttggcttgagctggtgagtcacaggagcttcatgccaaaactgctgatgtgcaattcacagaaaggttggccattttttcagcgactgcttgttgctcttctcaagttcatggaaccatatctgagaaatgctgaactcccagaggcgatggaccttttatacaagggaactatgcgagttctgcttgtactactgcatgactttcctgaatttctttgtgattatcacttcagtttctgcgatgtgattccttcaagttgcattcaaatgcgcaatgtcattcttagtgcttttccacgtaacatgagactgtcagaaccttttaacccttatctaaaaaatgatttgttggctgaaatttcaaatatcccccgaaataatgtgatatttatgggcccctata

SEQ ID NO: 96641 - DNA, 779 bp, Zea mays
  unsure (1)..(779): unsure at all n locations
ggggtgcgnttgtctgagatggcacatgattgatgcactcaccggtccggaattcccgggtcgacccacgcgtccggacccgaagaacccgtatgccgacccggtggcgatgctcgagtaccgggaacacctggtgcgagagaagtggatccagatcgagaccgccaagatcatccgggagcgcctccgctggtgctaccgcatcgagggcatcaaccaccaccagaagtgccgccacctcgtcgaccaatacctagaggctacccgcggcgtgggttggggcaaggatgcccgcccgcctgaactccacgagcccaagaagaccgtcaaggcggagtagcggcgctgctgccttgcttctcgtgctgctgttcctggattggagaggtgatctgacccttccattgagttgaatgaagtagcctggaactgtggtagttcgtcttttacatcttaagctgctgatagacttcaaataaaatcttgtccaagaaaacattctgtgagcgtacatgttgtcgtcgagctgtgtaattgagcaaatcgtcagattgaaactcggtgtctgccttgttcttcaaataccgcttatccagacggtgcttttgttttgaaaaaaaaaaannnaaaaaaaaaaagggcggncgctctagaggatccaagcttacgtacgcgtgcatgcgacgtcataactcttcttataggtgggtttccccaaaaaacccccccttttttttaaaaaaaaaaaaaaaaaattttttttttttttcccaaaaaaa

SEQ ID NO: 96642 - DNA, 555 bp, Zea mays
  unsure (1)..(555): unsure at all n locations
ngttgtcgctattggttgtccatgccccatagcanctcatcggccggtccggaattcccgggtcgacccacgcgtccgcccacgcgtccgcccacgcgtccgcccacgcgtccgtccacgcgtccgcccacgcgtcggctgagatgattggaagcattgttggggtctacaacggcaagaccttcaaccaggttgagatcaagcctgagatgatcggccactaccttgctgagttctccatctcctacaagccggtcaagcacggcaggcccggtatcggtgccacccactcctcgcggtttattcctctgaaatgagctgttactcggctctttagtatcccaagagtccgttggcaatgttcattcagatttttctacttctttagtatcccaagacatttgtgttgttccattccagcttaagaattcaaagcttagcattgcacaattatgctggtttgatgggagtatttgagttaatcatatctaagcttgaggttgttaaaaaaaaatatgtttaattggtttatattttgttataatttttttatag

SEQ ID NO: 96643 - DNA, 560 bp, Zea mays
gggaggatttataagtggtccactgagctataagcagatagtggcactgctcgtaccggtccggaattcccgggtcgacccacgcgtccgcccacgcgtccgcccacgcgtccgcccacgcgtccgcgcttctccacctccgtcacatgggctactctccgcgcgcctaccgttccgcgccgcatcggattgggtggtcggggcctagtcgaggttgcgcgggacagcgtcagtccatggcggagcttgtgggaccgcgcgtctacagttgctgcacttgccggaaccacgtttgccttcacgacgacatcatctccaaggcctttcaggggaggaatggccgtgcgtttctgttctctcatgccatgaacgtagttgtgggggcgaaggaagatagacacctcatgacagggctacacacaggtgctgatatctactggaatgaccggcgtgaggtggtaggcctggaagttgttaaagcatccaagaggccccgaaattccagggaaggaaattcatttttcaaaaagtcaagaatgggaagggaaaacgtgttgtcc

SEQ ID NO: 96644 - DNA, 788 bp, Zea mays
  unsure (1)..(788): unsure at all n locations
aggagtccggatttactgagttgggggatttaagtgaagactcaccggtccggaattcccgggtcgacccacgcgtccggcctcaaggaaatggccttgcttttacggtatcttcccttacaataacattggtggttcacagctaatttggattgcaccgagtggtggtagagatcgcccaaatccttcaacaggagagtggtacccgggcaggcgccttttgattcatccacagtggacaatatgaggaggcttctggagcatgctggtgttcctgggcacatatatccactattattactgtgctacgaggttatgcctccaccacaacaggtcgagaaagagattggtgaacagagggtgatatccttccatggagtaggcttgtcagcaactgaagaaacaaagtatggggatattacttgtcataccaagaatgctgatgagggaagggagctattcacaaatactttgtacaactcagttgttaatcagtacaatgtcctcaaatctgctatctttagagatcgtggagcagctgtatcaaacaatgccatctcactgtcacaaccatggcgatgaatgttagctttcccagtccagattcgatactgaagttaccttttcagaagaacaggtgaactgcaattgtgcaaattttctgggaaaaactcttgaaagttaatctttctgatatcactggacttttaacccaaaattttttcccaaattttttgtggggnggggggttttttttgggggggggggaaaaaaaagggccccccccc

SEQ ID NO: 96645 - DNA, 561 bp, Zea mays
  unsure (1)..(561): unsure at all n locations
tggagtgcgctatgtggtgtcccatgccttacctganctcatctacacggtccggaattcccgggtcgacccacgcgtccgcaaatactgatctcactgatccagtatggctatggcaaaggcaggcgcgccgagggtctcggcggcccagctggtggctctcgggctagcgctcctctgcgctgtcgccggcccggccgccgcgcagaactgcggctgccagccaaacgtctgctgcagcaagttcggctactgcggcacgaccgacgagtactgtggcgacgggtgccagtcgggcccgtgccgtctnctcaagctcttcgcccgcctcgccgtccttggcagctcgcgcaagcgccgcgctgcctccgcggggttccagcgcctncgctcctnctcggctcctacggcttcgactacgactcttgctctggcttcgcagaaccccgcggtccgcgcgcaatccgcggcgctgccggcggcgccgtcggcagggaagctgacgcttntcctggacctcgacgagacgctcatacacttccagacaggaggcgccgcccc

SEQ ID NO: 96646 - DNA, 543 bp, Zea mays
gtatgcctaaggtggcagcactgaagagagttgtaccgctccgaattcccgggtcgacccacgcgtccgcccacgcgtccgagtcgctcgcgccgttcccgcaaggctgcttctactccaacgccctgggagggcgcaagtgctacgagaaccccaagcacaaggtcaccgctgtccccgccgacgaagaagagatctgcggtgccactttcaaggtggtggaagggtctactgtcctgacggcgctgcactgatctatcatcatcaggcggaggcgatgcgatgatgatgcagaactttgtacatgcgttggtggatggtggtgtaacatagtggctgccaacaagtcatgctcatgcaaaccgatgaatctatctctgtatcatcgatctcgggtgcttgctagtccagacttcagacatggctatatatatatagctggggctaataaataggagtataatcgccatatcgatcgggtgcctgtggaaagcccatcatgtgtgggaactggtgggcaaaaacaaaccctttgttctgtct

SEQ ID NO: 96647 - DNA, 783 bp, Zea mays
  unsure (1)..(783): unsure at all n locations
gaagtccgattgtttgactgggggatttatatgatgactcaccggtccggaattcccgggtcgacccacgcgtccgcaatttgaaggctgcccaacccttgcgccggtaggcggtggcggtgaggatagagggttacctgaggaggcagtgatggcggccacgattcagtacaaccggagcaacccggcggtgaagcggatcctgcaggaggtcaaggagatgcagtccaacccctcacccgacttcatgtccctccccctcgaggaggacatcttcgagtggcaatttgctatccttggtccgagagacagcgagtttgagggtggaatttatcatggcaggatccagctaccttcggattatccattcaagccaccgtccttcatgctacttacgccaagtggacgctttgagattcagaagaagatttgcttgagcatatccaattaccaccctgagcactggcagccttcatggagtgtccgcacagctttggtagccttgattgccttcatgccgacgaacccaggtggggcattgggctcactggattacaaaccagaagacagacgagcacttgctataaaatcacgtgaggtgccgncgaaatttggctccccacaacgtcagaaactaattgatgagatccatgagcaaatggctagtaaggcttctnctattccccaaacgctgccaaaatgtgcccaaaacccgccaaaaaggggggggaaaaaaaaaaaggcccccccttttttttttccgggggggggtccaaaaaaaaa

SEQ ID NO: 96648 - DNA, 784 bp, Zea mays
  unsure (1)..(784): unsure at all n locations
ggatccggatttctttgaatgtgaggatgatgtgatgcatcaccggtccggaattcccgggtcgacccacgcgtccgcatgcactgttttatgtggtcttcatgctgtcagcctgtgctctgttctcaaagacatggattgaagtttcgggttcatcagcaaaggatgttgctaagcagctcaaggaacaacaaatggtgatgccaggccatcgtgagtcgaacttgcagaaggaacttaaccgatacatccccactgctgctgcatttggtggtgtatgcattggcgcattgaccgtcctggctgatttcatgggtgcgattggttcaggaactggtatattgctcgctgtgacaatcatataccaatacttcgaaacctttgagaaggaaagggcgactgagcttggtttctttggtttttgattagtagctgtggaaccttaacttggctatagctgaattttcttgtaagtccctgtagtgcttagccagttgtaacttaaagagttctgtttaagttgccttcttgcggccacaatcatgtagcagaatgtgcgtgtgtttcaagttagcgtgggggtatgtgcatctgtccaaagagtctgcaatttggcaaccggatattttgntatcaatttcagttacttcgaactgagcatgttctcaaaaaaaaaaaaannnnnnnaaaaanaaanaaaanaaaananaaaaaaaaaaaaaanaaaaaaaananaaanannaaaaanaaaaaaaaaaaaaaaaaaaaaaaaaaggggggggac

SEQ ID NO: 96649 - DNA, 788 bp, Zea mays
  unsure (1)..(788): unsure at all n locations
aggatccagannttacttgaattggtggactatatgtgaacgactcaccggtccggaattcccgggtcgacccacgcgtccgcccacgcgtccggagagcgcgaagttaagccaccatgtggacgagggctttagcgacggtgctgctgttcgtggcaggcgccgcgctgctcggcgtcggcggcgccagcgcgcagcagggcgtgtggagcatcatcactcgtcccatgttccagagcatgctgagccaccgcggcgacagcgggtgccagggcgccttctacacctacgacgcgttcatcgaggccgccagcaagttccccggcttcggcaccaccggcgacgagcagacgcgcaggcgggagctcgccgccttcttcggccagacgtcccacgaaaccaccggtggatgggcgactgctcctggtggaccgtttgcctggggatactgccgggtgaaggaacagaacccgacggacccaccctactatggacgaggacccatacagctaactcatgagtacaactacaggctcgccgggcaagcgctgaacctgaacctggtgggcaacccggacctggtggcgagcgaccccgtggtagccttcaagacggccatctggttctggatgacgccgcagtcgcccaagccgtcgtgccacgccgtgatgaccggcgcctggacgccgtccgncaccgaaccgggccgtccccggggggtnngagaggggggggggccccccctttttttttttccccccccccccccccccccgccgggggggggg

SEQ ID NO: 96650 - DNA, 552 bp, Zea mays
  unsure (1)..(552): unsure at all n locations
gtagttcatttggcatcatagctattgcagtactgcatgctcgtaccggttcggaattcccgggtcgacccacgcgtccggtttctatgaggggaaatcttctgatttctaactcaggacattatgctcctggttttgggattggagctctcgaagaacttgatgttgaagatgaagatatttatgcatcaggttttgcttatgaacaaactgaagttgatattgagccttcaaaaactgccaatgacagtaattataaacttgatgacagaaaaagaggtttctatctgagctttaagattgcctcaaattctgaatacaaacttgaacggtaatgcttcctctgattcatacttttcttcatcttgatggaatagtgtgaactaccttcgaaagtctgggctttggtttttcattctaccttctgtggggtacccttttaaaaggtttagcttacctaatcatttaactgtttttgatccaaaattcaatttttggaagntaactaatgggaccttttttggaaaatttactctcctccattttttattc

SEQ ID NO: 96651 - DNA, 555 bp, Zea mays
  unsure (1)..(555): unsure at all n locations
cgtgtgccatatagtgtcctgagncgctcagccccttcgtactgctgtaccggtccggaattcccgggtcgacccacgcgtccgaacgaggccaccgacgtctggagcgcgggggtcatactctacatccttctgagcggcgtgccgccgtttaggggcaagaccaagtccaagatcttcgactgcatcacgtccatggagctgcagttcccttctgacccatgggacagggtttctgattccgccaaggagctcgtcaccgggatgctgcggcgcgaccctaggctgcagctcacggccaagcaggttttagagtatccgtggatgcaggaacacgcggacccacaagactcgagcggtcagtgccactagaccggcctncaacgggagggctccggctcgtgctccttcttcactccattggcgtttcggagcaagtcccttgagctttgataatccttgcctccatttagttgaaaggtttggggccaagtccatggaatatgcattttatcatagtatctcttctgttgatagtgttgtgttctggtttag

SEQ ID NO: 96652 - DNA, 787 bp, Zea mays
  unsure (1)..(787): unsure at all n locations
tgagtccgattgattgagcatcgaacagtagcatgcctcaccggtccggaattcccgggtcgacccacgcgtccgtccaacttagaggttgagaaccaagttcttcgtcaacatgcaacttcaactccaccgtctacgtgctaaatctccagcttcacgctcaaagatctcaaggatccatagaagtccagagaatggccatattttgaatggtgacattaggcaaactgaaatgaagccctcaactggcacatcagcagcaattacctcagtagctaatgttcctgacttgggcgaccaaaaggagtttgaacatggagaaaaactgcaaagaataccaaaacagaaatatcagccttcccataaccagcagccccaagacgatcagcagtggctagtcacttgtatttcacaatatcttggattttctgggagcaaacctgttgcagctctccttatataccaatgtcttctccattggaaatcatttgaagccatgaagacgggtgtctttgatagcattttgcatgctataaactcagccacagaggttcaaaatgacatgagaacattggcgtattggttgttcaacttatctacattaacagttttncttcaacggtcattcaaaactactaggaccacaatcttaacttcacaaaggggaagattttcgtcccgaagggttgttgggaattaaacctttcaaaatttggcccccttttttgtagtgtgtggttcccccccctttttattttttttggggcccccctttttttttttttct

SEQ ID NO: 96653 - DNA, 838 bp, Zea mays
  unsure (1)..(838): unsure at all n locations
agagtcgcgnnttatttgttagggggatgatgtgacgcctcaccggtccggaattcccgggtcgacccacgcgtccggcgtgattctcttcctgcgacggaagcaaacactgcccgagatacagacagcgggacgtcgagatggccgacggggaggacgccgccgcgcgcgccggccggccgtcatcacagactaccgcaagaagctgctcaactgcagggagctagagtcgcgcgtcggcaccgtgagagaaagccttaaaactgcaaagaaggattttaccaagactgaggacgacttaaagtctctgcagagtgtggggcaaataattggagaagtactccgacctcttgataatgaacgctntatcgtgaaagccagcaatggtccccgatacgtggtccggtgcccgaagtaaagtggacaaggaggaagttgccatcttggtactcgtggttggactttgccaatgaccacccttgaccattaatgccccactttttccacgggaagggggattccggggggtatattaacaggccttaatgaaaattccaggaaatgtacagtacctcttgctttaagtgggcccggcttgatccaaattataaaagcttaagggagggccatttggagttacccacttatggaaaccctggaactcttttctttcggggggggaattaaaccctccctaaagggggggtctacatctacagggccttcagggaactgtgggaaaaagccccccccttttttttgttggtgggcccgcacaaaaaataaaagcagagggggggggagggggggggcggccggcttttttttttatttattc

SEQ ID NO: 96654 - DNA, 552 bp, Zea mays
  unsure (1)..(552): unsure at all n locations
gtatgtaatnagtgttccatgagacttcagtccctacggactgctgtaccggtccggaattcccgggtcgacccacgcgtccgcggacgcgtgggcggacgcgtgggcggacgcgtgggcggacgcgtggggaagatcacgagaaggatgtcctattagttggtgatgacccatgggaggacttcgtgaactgcgtgcggtgcatcaggattctttcgccgcaggaagagaggcaaatgaggctggccagcgactacggagacagctttgttggcaaccaagcgtgcagcagctcggacggaggtcgcccgtggagtggcaccggcgactagaaatagcaggcgatgtctgagcacaaatgtttggtataatccgtccaacgattgcaagaaaatgatacccgatttctgagcacaaacttttgcacttagatgatcgtgccaaccattatcatttttagaaaaaagtttccatttaatgtaactctcggaaatttttttatttattccttttcaatggggaactttaaaaatgattgcgcaagttttcttg

SEQ ID NO: 96655 - DNA, 787 bp, Zea mays
agagtccgatttattgattggggagtgatgagatgcctcaccggtccggaattcccgggtcgacccacgcgtccgcgcagaagccagaacccctcgtctcccggcgcctgttccccgcgcgcaccgcggctacacatgccctctccccatcccatttcccagatcccaccaacgcagcgcagggatcgagtagcccaccaccccaccccgcgacgctaaccgacgcaatggcgacgctcaccgttccttcctccgtcccggccgtcgccgaggactgcgagcagctccacaaggctttcgaaggttggggcaccaacgagaagctgatcatctccatcctggcccaccgcaacgccgcgcagcgccgcgcgatccgccgcggctacgccgaggcgtacgggaaggagctgctccgcgctctcggcgacgagatccacggcaagttcgagagggcggtgatcctgtggacgctggaccccgcggagagggacgcggtgctggcgaacgaggaggcgaagaagagccaccccggcggccgctctagaggatccaagcttacgtacgcgtgcatgcgacgtcatagctcttctatagtgtcacctaaattcaattcactggccgtcggtttacaacgtcgtgactgggaaaaccctggcgttacccaacttaatcgccttgcagcacatccccctttcggcaggcttggccgtttaaaaatttttaaaagggcccccccgcggggtaaaaaaaaaaaaaaggagtaaaaaaaagggggggggggcccccc

SEQ ID NO: 96656 - DNA, 803 bp, Zea mays
  unsure (1)..(803): unsure at all n locations
gggatcgcggattttttttgaaaagggggactgtatgtgactgcactctaccggtccggaattcccgggtcgacccacgcgtccgcaagttgtcaagcaataagacagtgaggagggtccgtgttcgtggaggtaatgtgaaatggagggctcttcgccttgatactggtaactactcatggggaagtgaagctgttacccgcaagacccgtatcctcgacgtggtctacaatgcatcaaacaatgagcttgtgaggacacaaacccttgtgaagagtgccattgtgcaagttgatgctgccccattcaagcagtggtacctcactcactatggagttgacattggtaggaagaagaaaacccctgctgcaaagaaggataatgctgagggacaagaggttgaggcagcagctgaggaaacgaaaaagagcaaccatgtcacgaggaagcttgagaagcgcaaggagggacgtacccttgacccacacattgaggagcaatttggcagtggacggttgctggcatgcatttcttcccgccctggacagtgtggccgagctgatgggtacatccttgagggtaaagagcttgagttctacatgaagaagctacagaggaagaagggcaagagcgctgtaacttagagcattctcatggattgtcttgcaccgaaatgtgtgtcctgatgagtacactttttttggttaagtccgtcttcaaagggttttttccccaaaaanngnaaaaaaaggaaaacccccccccggggggtttttttttttttttaaaaaaattttttgggt

SEQ ID NO: 96657 - DNA, 556 bp, Zea mays
agtcgttatatttgtttcatgagcttctactgctacgcgcatgctgtaccggtctcggaattcccgggtcgacccacgcgtccgataatgctggagtcggaatgcagatttaagagaatcaggaagcccccttatgttaacaggtggatcaacttgagggtaccgttccaggaagtgtacggggacgtccgctgcaacctgaaggaggcagtccagctggccgggctcacatgggaggggcgcgctcactgcgggctcgacgacgcccgcaacaccgctcgccttctggcacttctgatgcaccggggctataagttctgcatcaccaactcactggtgtggcaacctgccgacgctccgcagtcaaccgtcggcacctgtcacttcttcccggaccggtcttcggacccaagtcgtcgtcagcttcaggaccagcagcttcagcacaagcccaaagaggccctctggtcttccgcagttcttggggaaaccattgtatgccatatccctcggaagggaaggcacaaccatttgttggtcatttgggggcttatac

SEQ ID NO: 96658 - DNA, 788 bp, Zea mays
  unsure (1)..(788): unsure at all n locations
ngtgaagatatcgcatccagtancgcatgcactcaccggtccggaattcccgggtcgacccacgcgtccgcccacgcgtccgcccacgcgtccgacacagacaagtggtttccaaagccaagtgtgtgtactagcaaccagctagctcgggcggcagcaggcagccatcatgtcggaggagaagcaccaccacttcttcaaccaccacaagaaggacgaggagcagcccgccggcgagtacgggtactccgagaccgaggtggtcaccgccaccggcgagggcgagtacgagaggtacaagaaggaggagaaggagcacaagcacaagcagcacctcggcgaggccggcgccatcgccgccggcgccttcgcactctacgagaagcacgaggcgaagaaggaccccgagcacgcgcacaggcacaagatcacggaggaggtcgctgccgcggcggccgtcggcgccggcggctacgtattccacgagcaccacgagaagaagaaggaccacaaggacgccgaggaggccagcggcgagaagaagcaccaccacctcttcggctgaccgtagtaccggccggcgcgcgaccgagctagctagctccggcgcacacaaccacacacctgtttaattctgtactgcatgcgtgtgtaatttgatggttcacaataatgagtccctctncggaccttggtagctggccttggccttttggggnttttgggggggggttttttttggggggggttgaaaagggggttttttgtgggggaaaaaaaaaaaaaaa

SEQ ID NO: 96659 - DNA, 553 bp, Zea mays
  unsure (1)..(553): unsure at all n locations
aggagccagatgagtgatgncttttcacgctaacggcatgcacaggtactggaattcccgggtcgacccacgcgtccgggcggattcctgctacctcgaccgtccccgttcccgtccccttccggcgcgcgagctcgcgcgagattgcaaacgctagatcgggtgtcgctgtgaatgacgagtgcatgctcaagttcggcgagctgcagtcgaagaggctgcaccgcttcctaactttcaagatggacgacaagttcaaggagatcgttgtggaccaagtcggggatcgcgctaccagctacgaggacttcacaaacagccttcccgagaatgactgccgatacgcgatctatgatttcgactttgtcactgcagaagatgtccagaagagcatgatcttctatattctaaggtccccattctccgccaggtgaaaagcatgatgctttaagcaggctcaaaccaaaatttcaggaatgggcttcatgggcattaaggttgtaattgcaggcactgatgccagttaaatcagccttgattagttcagggtttt

SEQ ID NO: 96660 - DNA, 543 bp, Zea mays
  unsure (1)..(543): unsure at all n locations
taggcttggcnngagtgcttgccccagtcccacaagcagagctcngcactgactnttccggtccggaattcccgggtcgacccacgcgtccgcccacgcgtccgcccacgcgtccgcactcgtagagagaaggaaaaatatccccggaccctagctcccgatctcgatggcgaaccctcgcgtcttcttcgacatgaccgtcggcggcgccccggcgggccggatcgtgatggagctgtacgccaacgaggtgcccaagaccgcggagaacttccgcgcgctgtgcacgggcgagaagggcgtgggcaagtccgggaagccgctccactacaagggctccaccttccaccgcgtcatccccgagttcatgtgccagggcggcgacttcacccgcggcaacggcaccggcggcgagtccatctacggcgagaagttccccgacgagaagttcgtgcgcaagcacaccgcccccggtgtgctctccatggccaacgccgggcccaacaccaacggctcccagttcttcatctgcaccgtcgcgac

SEQ ID NO: 96661 - DNA, 533 bp, Zea mays
  unsure (1)..(533): unsure at all n locations
agggtatctgnatgctgcccactcacatgggagcatgaatgcacggtctggaattcccgggtcgacccacgcgtccgcaaaagaggaaggtcttgcttttgctgaagaatatggatgtctgtttcttgagagcagtgcggaaacacgagaaaacgttgagaaatgttttgaggaacttgcattgaagattcttgaggtgcctagtctcctagaggaagggtcttcttcggttgtcaagaggaacatcctgaaacagaagcaggaaagtgatgcaaagaacggtagtggatgctgtcaatagatgtatgtgctgatccacaccacacggttggctttcttcgtgtgagctgccctgattgtctgctgtacatgttcttgtgagtaagaagggcgagcataattgatttgtacaaaggacatgtcagtttggtgtcatagttttcctcatctccagtttagtatagcaattttgttgtcgccctatcaaaaaaaaaaatattattttttttttattattattataaaagggcggg

SEQ ID NO: 96662 - DNA, 539 bp, Zea mays
agaggtgcgtaattgtgcgccctccgctgggggagaagtaagtacggctctgcactggcccggaatgcccgggtcgacccacgcgtcctcggacgcgtgggtcaacacagctcaggcagctcgagagagagagagagagaaggatgtcggggttcgggcaccaccaccacaaccagccggctcccccggcgtcgggccccaaccaggtgttcaagatcttctgccgcgccaacgagaactactgcctggccgtccgcgacggcgccgtcgtgctggccccggtcaaccccaaggacgaccaccagcactggtacaaggacatgcgcttcagcacccgggtcaaggacgaggaaggcatgccggcgttcgcgctcgtcaacaaggccacggtgctcgcaatcaagcactccctcggccagtcccacccggtcaagctcgcgcctttcagcccggaccaggaagacgcgtcggtgctgtggacggagagcaaggacgtgggcaagggcttccgctgcatccgcatggtcaacaacaccctt

SEQ ID NO: 96663 - DNA, 534 bp, Zea mays
  unsure (1)..(534): unsure at all n locations
atgattatgggnnagttgtgccccagtccattaagataggattgcacggccggaattcccgggtcgacccacgcgtccgcccacgcgtccgcgcagaagaaaccccagagtactctgatcataggaagaaattctggtctgctgtcaagcctgcccattttggcgtgaagatcgcctccagatccctgctgatccttgtgcgcttcatcttcaccggaatcttcatcggcctgctcgccaacttctccttcggcaggtccctcctgctgaagtaccctgagtttttctccgctgggctgttcagcagagccggcccgaccgaggaagaggtgaagagcgcctcgttcaagatgtggtttgtcggtcacggctacagcaacgtggatagctcgttggagctcggaagaagcaagccggacaaggaggtgatcaccaaggtttcgggacccgaggtcggttacgtcacaactccgatcgggctgtgtcagtgcgctcttgtcctgctgagccagcgtgccaacctgtccaagggtc

SEQ ID NO: 96664 - DNA, 549 bp, Zea mays
  unsure (1)..(549): unsure at all n locations
agtttatcgntttgattatgnttgggcttccacttggctgcgnactgtctgtacactccccggtcgacccactcgtaccgaatcgccaagtcgaagaaccactctttttgtttgtcagttagttaaccaatttcttaacaagctggcttggtagagttctataccgcagaagccctccttgcgctgcaagaggcagcataattccacttgatagaactgtttgaaatggcgaatctgtgtgccatccatgccaagcgtgtcacaatcatgcaaaatgacatacaacttgcaaggcgtatcggaggaaggcgttgggcatgatatataatatccattctgattgcatcattcttgtgaatttgtttgtatgagctagacattagtgttgttgaatgctgcatggttcctaatccttttcgcagtctaacatctgtggagttagtatgttacatggcaacagctgaacatctgtggactataactatatggcaacatccgaagattgtgtctgtgggataactggttgttttggttgctcttcagtagttt

SEQ ID NO: 96665 - DNA, 543 bp, Zea mays
agtatctcgtaatcttatgcctttcctccactgaggtacgactgacgtacacttcctgtattcccagctcgtcccactcttcctaccatggttacccactatctctttatgatcctggagtacgactccaagctccgcctcatggagcacctcaagcacctctccagcatccacctcaccatcctctcctcccagatcactcaatcaactgactatgcatatctcgtgagccatcaaccatttctctcaaccatgaacctagttctgaatcctgatatgctgatctagaagcgtttaaatagcatcctattgtctctcaactttcatttcaatcaattcaatgtatttgtcaaggatcagctttcgctttatgttgattattattattgcaatgctccaatcacgaccttcatcatctatccattttatccacattatcaagatttcttcctttctatttgttcataaatttttttcaacaccatcatctttttaaattgttaatttatttatattttttataatcaatttattgtttatttc

SEQ ID NO: 96666 - DNA, 538 bp, Zea mays
  unsure (1)..(538): unsure at all n locations
tgtggtgtggtgctattgatggatagtagtatgactcggtccggaattcccgggtcgacccactcgtccgcccactcgtccgggacgactagatacgcgtgggcccggaccggtcgtcgcagctcgtcggccggtaccagggcgtcttcttcggcacgagcgtgcagctgggcgccggctacctgtcgtccatcacgctggtgttcaccgccggcgagtacaaggggagcaccctgtccgtgcagggccccctgctcgggttcacgggcaccatcgagcgcgccgtggtcggcggcacctgcaagttcaggctggcgcgcgggtacatgcttttcaagatgataagcaagccgacgcctgagacggacgtcaacgagatcaacctgttcgtgctcatgcaccccgctggcaagtactagcgcacacaccttgagactcgagtgagtggctactaccgcattgttgttgggcagaggttgggtgaagtgtctatgtncaatccaaccttttcaggattaattcctttggtggaacccat

SEQ ID NO: 96667 - DNA, 541 bp, Zea mays
tgttgagtggtgttatcgacaagataggtacgcatgcatctcgtccgtaattcccgggtcgacccactcgtccgcccactcgtccgaatcttagtggccctctgtcacttccaactcgtgcttctgcaaatagtctgtctgctcctattcgatcttctgcaggttatgtaggctctttgggtgataaacctaagcgcactatggtggaaattaaaggccgcttctcagtgacatctgagaatgtggaccttgcaaaggttcaagaaattccagggagcagtgcctcacgtaaattgcaagtggtaagaattttccttggtcccttgttcataaggaactgttactttgctttagatatatccattttttcaggggccttcactgagaaaatcagccagtgttggcgattggtcagcaaatgataagacaacgtctactaatcatcaaaagaaggaactctgcaatagctctgtatctacatcaattctgatttccgatcttcaaaaccttgtgaagcatactgcaactcaagcaggtctgg

SEQ ID NO: 96668 - DNA, 536 bp, Zea mays
  unsure (1)..(536): unsure at all n locations
aggggcagggtgttaatcgacacatagtatgtcatgctccggtccggaattcccgggtcgacccactcgtccgcggactcgtgggatgttgaaactgttgagtacaagaacattagcttcacggtctgggatgtggggggtcaggacaagatcagacctctctggaggcattacttccagaacacacagggtcttatctttgttgtggatagcaatgaccgtgaccgtgttgttgaagccagagatgagctgcacaggatgctgaacgaggatgagctacgtgatgctgtgctgcttgttttcgccaacaagcaagatcttcctaatgccatgaatgctgctgagatcactgacaagcttggattacactccctgcgccagcgacactggtacatccagagcacttgtgccacaactggcgagggtctgtacgagggcctggactggctgtccagcaacattgcgagcaaggcttgaatatcaaatgcgaactgactaggagctccggatgtatcatggaaacttangacagaatn

SEQ ID NO: 96669 - DNA, 537 bp, Zea mays
  unsure (1)..(537): unsure at all n locations
agtttgcgntagtgtgtccctgcctcccactgaggtacgcacgccgtaccggtccggaattcccgggtcgacccacgcgtccgcccacgcgtccggccaactcctccgcggcccacgcgggaggcccgcacgccgggcgcgtctgctgcaaggccggcggcgaggactacagcctcacggtgcgcaacggcacggcgtgcctggcgcccaccaacccgcgggacgagtaccagcactgggtcaaggacatgcgccacagcacccgggtgcgggacgaggagggctacccggccttcgcgctcgtcaacaaggtcaccggcgaggcgctcaagcactccacggggcagggccaccccgtcaagctcgtgccctacaacccggactaccaggacgagtccgtgctctggaccgagagccgcgacgtctgcaacggcttccgctgcctccgcatggtcaacaacatctacctcaacttcgacgcctttcacggccacaaggcccactgcggcgttcatgacggtaccgagatcgtgctcn

SEQ ID NO: 96670 - DNA, 543 bp, Zea mays
  unsure (1)..(543): unsure at all n locations
tgattgccggagttgtgtccatcncttncagctctcatcgtnatnncgtaccggtccggaattcccgggtcgacccacgcgtccggaccgaggcagagctagaggaccgcaagctccgcatagaggacgcgaagaatgcgacttttgcagcaatagaggaaggtattgttccaggaggcggtgcagcatatgttcatctatcgacattcgtaccggctatcaaggagacgttggatgatcctgaggagcgcctaggtgctgatatcattcagaaggctttggtggcacctgcagcgctgatagcccataatgctggggtggaaggtgaggtgatcgtggataaaatccggtaacgctagtgggagttcggttacaacgccatggcggacaagcacgagaacctggtggaggctggtgtgatcgaccctgtcaaagtgactaggcgcgccctgcacaacgctgtctccgtggctggaatggtgctgactacccaagcaatcgatgtggagaagcccaagaaggctccagcagcagctgctgctg

SEQ ID NO: 96671 - DNA, 536 bp, Zea mays
tagggtgcggtagtgctgccccatccaaggtgattagatgcaccggtacggaattcccgggtcgacccacgcgtccgtccaaagctgctctcgcccccataaataaagcagctcctccgggggcggcgaactactcctggtcgcctgaaccctagtcctgcttctttgccatggcgagcagcgctagccaggcgagcctcctgctccagaagcagctcaaggatcttgcgaagaaccccgtggatgggttctccgccgggcttgtagacgacagcaacatcttcgagtggcaggtcaccatcatcggaccgcctgacaccctatatgatggaggctacttcaatgcaataatgaccttcccccagaactatcccaacagcccgccatcagtaagatttacttctgagaattggcatccgaatggttatcctgatggacgtgtttgcatttctattcttcatccacctggtgaagatcccaatggttatgagcttgcaagcgaacgattgacaccagtgcacacggtttgaagtatt

SEQ ID NO: 96672 - DNA, 539 bp, Zea mays
  unsure (1)..(539): unsure at all n locations
tgtataatgattacggtcccgacncctcgctcgaccgtctcggtcctgaattcccgtgtcgacccactcgtcctcacacgcgtctgaccacaccatcgaccacgcttacgactctagatcgccagcggtcgcagaggagtggctttatcgataaggcaactatacttggttacacaatccatattcttaaagatttgactactcatgtgaacaagctgaaagctgaatacacttcactttctgaagaatcgtgtgagttaacacaagaaaagaatgagcttagagatgagaaagcttcactgaaatctgaggttgataatttgaataatcagtatcagcaacgaattctggtgctatacccatgggttggaatggagccttctgttgtcatggggccaccttctgcatatccctacccagtcccagttccaataccctttggtgctgtacccattcattctcaattgcaaacataccacttatttcacagtcaagctttttgaaccattccaaacacattcattccttacatggcatat

SEQ ID NO: 96673 - DNA, 537 bp, Zea mays
  unsure (1)..(537): unsure at all n locations
tggggatgtggtgttaagtacgagaaggaagtagtactctcgtccgaattcccgggtcgacccacgcgtccgcccacgcgtccgcccacgcgtccgggccgccctttttttttttttttgatccagggggaaagggagtaagcttggccgtgacctctatatcaggatatcaagtagtaagtccgtaaatctagaaattctgtactaaacagcaaagccaaacgaatatgtagagtgagcgaacagacgggacgaatcccaaaacgttttcctactactgccctacagccttcgttcgcatgatgtagggatcgagagcgccctcatagcggtggccctccgagcccgtcatcgttgtcgaactcgtgcatgtgatccaagaggtagttggcggtcagctgctcattcttgttgcacgcgaagaacaacttcaggaccagtgcccggtcaaagcccatcccttcaagacgaagtatagcttcgttctcctttggagtcactgcaatggtctcagctgcattcgncatctggtccagg

SEQ ID NO: 96674 - DNA, 539 bp, Zea mays
  unsure (1)..(539): unsure at all n locations
aggtatgcnagagagctacccatgcactaaagaaaangtaagcactgctctaccggtccggaattcccgggtcgacccacgcgtccgcggacgcgtgggtgcaaaacgacattgacttactcaatccaccggcagagcttgagaagctgaagcacaagaagaagcggctagtccagtcccccaactccttcttcatggatgtcaagtgccagggctgtttcagcataaccactgtgttcagccactcccagactgtggttgtgtgcccaggctgccaaactgttctgtgccaacctaccggtgggaaggccagggctcaccgaggggtgctccttccgtcgcaagggcgattaggtcctgcttctcttaacgtgagaagagataaatttggtgttttgcaactttctcaggatatgtactcggtgaggattttgttaattattatggctgttagcgtggcctgacaatgcttgtgtaaacctgcactttgtttgagcgtagtgacagctaatatggtgcttgttggcttttgctgaggn

SEQ ID NO: 96675 - DNA, 536 bp, Zea mays
  unsure (1)..(536): unsure at all n locations
agattgcnanagagctatccctgcnctaaagcagncttagcatctgctgtaccggtccgggattcccgggtcgacccacgcgtccgcccacgcgtccgcggacgcgtgggctcaaggagggaggcgtcctccctggcatcaaggtcgacaagggcaccattgaggttgttggcaccgacaaggagaccaccacccagggccacgatgacctcggcaagcgctgcgctaagtactacgaggccggtgcccgctttgccaagtggcgtgctgttctcaagattggccccaacgagccgtcacagcttgccattgacctgaatgctcagggtctggctcgctacgccatcatctgccaggagaacggtctggtgccaattgttgagcctgagatccttgttgatggccctcatgacattgatcgctgcgcttacgtcactgagacagtccttgctgcctgctacaaggctctcaacgagcaccatgtcctcctggagggtacccttctgaagcccaacatggtgactcctggctccgac

SEQ ID NO: 96676 - DNA, 533 bp, Zea mays
  unsure (1)..(533): unsure at all n locations
gtggtatgcgggagtgctgacccatgccataagataggcatggacggtccggaattcccgggtcgacccacgcgtccgcacacgccaaatttacagctagttagctgaattcgatcgatatccaggaactaataatccggcgacccggctcatggcggcttcgtcgcgaatgggcttatccgtctacctcgccatcatggcggcggtgctcgcctcggcgctcggagcggagctcaccgcggactactatagcgagacgtgcccgcaagcgctgaccaccatcaagctcctcgtcggcgccgccatcctgagggagcccaggatgggggcgtcgctggtccgcctgcacttccacgattgcttcgtcaatggctgcgacggctccatcctgctggacgacaccgacgacatggtcggcgagaagaccgcgaagcctaacaacaactccgtgagaggctacgatgtcatagacaccatcaagtcggcggtgaacacgatatgcttggcaacgtnctcttctgcgccgatttctg

SEQ ID NO: 96677 - DNA, 525 bp, Zea mays
tggtaggtatgggtgagtgagccatgaacacgtacgctacgtggtactcgctctcggaattcccgggtcgacccacgcgtccgcccacgcgtccgcttcccgagcaggaggcggacaaggtaagcagcaatcgcaggaacccgagcgccgccgcacccgcaggaatgggtatcgacctcgtcgccggtgggaggaataagaagaccaagcgcactgcgcccaagtctgacgatgtctacctcaagctcctcgtcaagctctaccgtttcttggtcaggaggaccaagagcaatttcaacgctgtcattctcaagaggcttttcatgagtaaaaccaaccgaccaccaatctccatgcgccgccttgtcaagtttatggaaggaaaggagaagaacattgctgtcattgttggcacagtcacagatgacaaaaggatccaggaggttccagcaatgaaggttactgccctgaggttcacggagacagcaagggccaggattgtcaatgctggtggcgagtgcctca

SEQ ID NO: 96678 - DNA, 517 bp, Zea mays
aggtatgtgcatactgagcaatgaaatgatgcacgctgtactcggtctcggaattcccgggtcgacccacgcgtccgaggccaacagagagaaaatgacgcagattatgtttgaaaccttcgaatgcccagcaatgtgtgttgctatccaggctgttctttcgttgtacgctagtgggcgaacaactggtattgtgatggattccggtgatggtgtgagccacacggttccaatctatgaaggatacacacttcctcatgctattctccgtttggatcttgcggggcgtgacctcaccgaccacctaatgaagatcctcacagagagagggtactccctcactacgagcgctgagcgggagattgtcagggacataaaggagaagcttgcctacgttgcccttgattatgaacaggagctggagactgccaggagcagctcctctgtcgagaagagctacgagatgcctgatggtcaggtcatcaccattgggtcagaaaggtttaggtgccccgat

SEQ ID NO: 96679 - DNA, 508 bp, Zea mays
gtaggtggtccttcctgaggcctgccatgccgcactgcctgtaccgtccggattcccgggtcgacccacgcgtccgtgatctccaactccaccagcgtcgtcgaggtgttctcccgcatcaacagcaaggtcgacgtcatgtacgccaagcgcgcgttcgtgcactggtacgtcggcgagggcatggaggagggggagttctccgaggcacgcgaggacctggccgccctggagaaggactacgaggaggtcgccgcagagggcggcagtgatgacggcgacgaggaggaggaatactgatctgcttgcatgaatctgtttggctgtcgagccaggttgtggtgttgaaaaacctttgtttgtgtcctgggtaatgtttgggtgtttccttccatcatcacttgctgaactgctctagtatttgcatttgtaattgaagtctgtcgctttaagcactcttggttctaaagatctctgtgcttttggggggtgtttttgcattgcctct

SEQ ID NO: 96680 - DNA, 515 bp, Zea mays
agtttgtcttcgtgtccatgacatgtggtgtaagtgcgactcgctccggaattcccgggtcgacccacgcgtccgctgatgtttgacggtcaggacgacaagctgtttgagcacttctccatggtcgcgcagaggcttggcgtttacactgccagggactacgccgacattcttgagttccttgttgacaggtggaaggtggcggacctgactggtctgtcgggtgaggggaacaaggcgcaggactacctctgcacccttgcttcaaggatccggaggctagacgagagggcccagagcagagccaagaaagcaggcacgctgcctttcagctgggtatatggtagggaagtccaactgtgaaatcggaaacccattgcgactgcttgagttggagcatagtctatcatgcaccctaagacgcatcgcgacgacaagacctggtgtgtcgcgtgacatagttgttcaggttttgaccaaatggtctgggagcatttgttttgccttgtgccgtt

SEQ ID NO: 96681 - DNA, 520 bp, Zea mays
  unsure (1)..(520): unsure at all n locations
tgtatggagagtcgtgaaccatcgataatgggagtatcaatgtactcggcccggaattcccgggtcgacccacgcgtccgcagaaaaatccccagttctttggtccgcgtcagagaggcggcggcgatgtctgggcgcggcaagggcggcaagggtctgggcaagggcggcgcgaagcgccaccggaaggtgctccgcgacaacatccagggcatcaccaagccggcgatccggaggctggctaggaggggtggcgtgaagcgcatctcggggctcatctacgaggagacccgcggcgtgctcaagatctttctcgagaacgtcatccgcgacgccgtcacctacaccgagcacgcgcgccgcaagaccgtgaccgccatggacgtcgtctacgcgctcaagcgccagggccgcaccctctacggcttcggaggctaggctaggcgcctcttcgtagtcggggactggttaggggacatgtctctgtgtgatgctttctgaggtagtattgctgcaatan

SEQ ID NO: 96682 - DNA, 512 bp, Zea mays
  unsure (1)..(512): unsure at all n locations
agaatgggtctgaccatgttagaagcacgtgcgactcgctctcggaattcccgggtcgacccacgcgtccgcccacgcgtccgggtatactctctgcaattgatgatgggaagtctgagggaggtccatgtggacgacattgggtgcttgatccgattgacggtactaaaggtttcttgaggggcgaccaatatgccattgcattggctctgcttgatgaaggtaaagttgttttgggtgtattggcttgtccaaatcttccattgtcatcaataaacaacatcaatggtaactcttcgggagataaagttggtgccctgttttctgctacaattggttgtggggctgaagtagagtccttagatggctctccaccacaaaagattagtgtttgctccatcgacaatcctgtcaatgcatcattttttgaatcctatgaaagtgcacactccatgcatgatttgactggctctattgcagagaaacttggtgtccaagctcctncagttaga

SEQ ID NO: 96683 - DNA, 522 bp, Zea mays
  unsure (1)..(522): unsure at all n locations
atggatggagagtcctgtcgcatcgagtctcgaacagtccgcnactgctcgtaccggtccggaattcccgggtcgacccacgcgtccgcggacgcgtggttcatccggcttcgcctgcaaccgcgtgcgctccacgcctggtccagggaagcgagagcttctgcataagaacaacaaatcaaaagcgtgatcagctcggtgccaacaaaacctcaacaaccaagtttcatgtctgatctcgacgtccagcttccatctgcctttgatccgtttgctgaggcaaatgctgaggactctggtgctggtcctggaacgaaggattatgtgcatgtgcgcatccagcagcgcaacggcagaaagagtctgactacagtccagggtctgaagaaagagttcagctataacaagatcctcaaggatctgaagaaggaattctgctgcaatggtactgtagttcaggacccagagctaggccaggtcattcagctccaaggtgatcagcgcaagaatgttgctactttn

SEQ ID NO: 96684 - DNA, 544 bp, Zea mays
  unsure (1)..(544): unsure at all n locations
tgggagacggnntngttacgatgggggacggatagtaggcatgcaccggtccggaattcccgggtcgacccacgcgtccgcggactcgtgggcggactcgtgggcggactcgtgggcggactcgtgggcggactcgtgggggcgtgctctgctcctacgaccccaacgtgcgcctcccgctctggccgtcgcccgacgccgcacgcgagggcatcctcagcatctggaaggaggccgacttcatcaaggtcagcgacgacgaggtggccttcctcacgcgcggggactccaacgacgagaagaacgtgctgtccctgtggtttgacgggctcaagctgctcgtcgtcaccgacggggacaagggatgcaggtacttcaccaaggacttcaagggcagcgtgcccggcttcaaggtcgacaccgtcgacaccaccggcgccggcgacgccttcgtcggcttccttcctgtcaacgtcgcccaggacgactccatcttccacaacgaggagaaacctcccgaggcctctaaggtcttcaacggctg

SEQ ID NO: 96685 - DNA, 511 bp, Zea mays
  unsure (1)..(511): unsure at all n locations
agaaagccgtctgaccatgcaagaagcacgctcgtaccgtccgnattcccgggtcgacccacgcgtccgcggacgcgtgggcggacgcgtgggcgacctcggcggcaacaccatcgtcgtccactggtgcctaaggaagaccaacctgcaccacgtatgggacgtgaacgtcatcgagacggccatgaaggacttctacggcaacgaccagagcaccatgatacaggccatccagcagaacattacggaggaatgggctgatgaggagaagaagtgggaggcctgccgtagccggacaaagacctgcgctgacaagtacgctgcagagagcgcgaagctggcctgcacggcgtacgagggtgtcgaccaagactccacctnggaagatgactacttcttcgccgcgctgccggtggttcagaagaggatcgcccaaagaggcgtcaggctggccgcgatcctcaacagggatattggtgggaacagcagatcaagcttcagagcagttgat

SEQ ID NO: 96686 - DNA, 516 bp, Zea mays
  unsure (1)..(516): unsure at all n locations
tgtaggtcggttctacgctgatcatgacgctancgtcactgtcgtaccggtctcggaattcccgggtcgacccacgcgtccgcggacgcgtgggcctgaaaacctcacaaaaccctcgctcgctccccaccaccgcgccgcgccgccgcctgtaccagctgcgtcaagatgagtcggcaccctgaggtgaagtgggctcagaggatcgacaaggtttacatcactgtacagttacctgacgcaaaggatgctaaggtcaatttggatccagatggtgtcttcacattctctggcagtgctggtacaaacttgtatgaattgaaactagatctgaatgacaaagtaaacgttgaggctagcaaaataagtgtgggggtcaggtccatattctgtatcgtagaaaaagctgaagccaaatggtggaagaaactcgttcgagatgatcaaagggcacctcactttgtgaaagttgattgggacaaatgggttggtgaagatgatgatggtgctgatatt

SEQ ID NO: 96687 - DNA, 544 bp, Zea mays
tggacgaagagcttacttcagtccgccaagatagtatgcctgcaccgtcctgaattcccgggtcgacccactcgtccgcacctgttcctcctcttcctcctcctagcacatctagcgcctgctccccttcgtctgtgatcgtgtcttgcagcagcggcaagtgcaactgcggctccagctgctcctgcggcagctcatgcaactgcatgtcccctgacgtggagaccgccgccgccagcagcatcaagaccatggtcctcgctgcgccgaccaccaaggccagcgccggcggcttcgaggcggccaccgagggcggctgctgcgactgcaacacctgcaactgcggcaccagctgctgctgctcctgctgcagctgcaactgagccggcccgcccggcccggcgatggctcacgagagtcgagaggactactactactaggcgtttaaatattattaatagcatcgtctataaaaagattcttgtaactgcatccctcaattatcgatccatgggtgctcctggggttcatgttattcttatct

SEQ ID NO: 96688 - DNA, 541 bp, Zea mays
atataaatttatctcatgttcacgtacgtatcctgcactcgtcctgtattccctggtcgtccctctcttcctctgtctcttggtctgtctcttggggcatcatagtttcttccggtacacccaatccttccgcagggataccacatccaatataggtcaagttcaagatcctagctcagggttccaccatcatcatcaccaccaacacatcatcatctcgcatctcgtccagtctatgcttgatctatattggatgtggtatcactggagacggcttgggtctgggggatgcatgatcctgctcatctcttctgcactctctttcgctgactcttttgtatgcccggtttttctgtaccgattccttcattctttcttgcttttttctagatccattagttatatctttttcttttttatattgttttccttttactttattttattattttaatttaatatttaatattaaatttttttcatatttcatttttatatatactatcatatatatttttttatttatattattatcattttt

SEQ ID NO: 96689 - DNA, 522 bp, Zea mays
agtttatcacggttagtgagcagtgggagtagatgagacgtggtaccggtccggaattcccgggtcgacccacgcgtccgcggacgcgtgggatttccaccggacgctcatatatggcggggtcgctatgaacccaagggaccatctgcggctggtttatgaggcgaaccctctcagtttccttgctgaacaggctgggggtagagggtcagatggcaagaacagaatcctcaccattcagcctgtgaagttgcaccagaggctgcctttgttcttaggaagcatggatgacatgcttgagttggaaagctacggagatgtgcagcagaaggtcaatcctggatatgaagtttaacgatatgtaaaaaaaggttcagattttttcaagcgcccaagcagaaaataaggtaacactcgtgtggcaaccctgtatctgccgatactataccttgtcttttcctctcggtttttagcccaccgcaacttgattgggactaaatccagttgttgttattgttgttc

SEQ ID NO: 96690 - DNA, 517 bp, Zea mays
  unsure (1)..(517): unsure at all n locations
tgaatttgtgtgccataatgancctagctacttagtcactgctcgtaccggtccggaattcccgggtcgactcacgcgtccgcatgaagggttttcctgagtctccaatgtgtggcttcagtgcactggctgttaaggtctggcagcaatatggcgtccctatctgtggtagagacattcttggggatctcaagctcaaagagagtgttaaagcccacactaactggcctacatttccacaaatatttatcaaaggagagtttgttggggggtctgacatcatattaagcatgcaccagaagggtgagcttaaggatcttcttggggatattgcacaaagagacgaacaaaaagtgcatgctcacgattcatgaagcaatcaacagtaggttcttttactatgcgctatctacttagccactaaaatgttctatctcggagtctttaggcgacagcgtacgtgacattgtgaactgtcctacgcattggacatggatgaccggatgtgttcccagan

SEQ ID NO: 96691 - DNA, 540 bp, Zea mays
tgtttttgttttagtttgagggggatgcacagtattgcatgctaccggtcctgaattcccgggtcgacccacgcgtccgggaactggaggaactgatcggtggggcccgctcggccaagttatcctgttcgctaccgtgatgtttaccctagtccagagggtttatcttcgttcgtctcgtttgttgttgcccatctgtgtttttgattgcaaggtcgctctgtgtcagttgttagtgctgtgttcatcctcggctccagcagacccatgcatcaaccagcatggactgtggatcgatggatgctgttactcctgtcaggatttgttctaagttaatcctaaggaaaaaatggtgcttcttggtgctgcaaaaaaaaaaaaaaagggcggccgctctagaggatccaagcttacgtacgcgtgcattctacgtcataactcttctatagtgtcacctaaattcaattcactggccgtcgttttacaacctcctgaccgggaaaacccttgccttacccaacttaattggcttggaacaca

SEQ ID NO: 96692 - DNA, 519 bp, Zea mays
  unsure (1)..(519): unsure at all n locations
tgtnatgtgtaggtccgtgtcatagagataggagtaactggcgaccgctccggaattcccggtcggcaccaggcgtccgaattggccgacaatctggggtccatggacactctaatggaggacaacctaacccaggagccaatcgaatgagtccgtccagagttgcgacattgtggctttcaacaagatctagagttcagtttctgagtttgggcaacggcagcggctcagctcgtcaagtttgtgctgggatgccagtttatcccttctagtctattacagaaatgttgttcggagctgagtctattataaacatcttggtctgagtttattgttgagtggtgccagtttttttcaatatacatttatcttaaaaaaaaaaaaaaagggcggccgctctagaggatccaagcttacgtacgcgtgcatgcgacgtcatagctcttctatagtgtcacctaaattcaattcactggccgtcgttttacaacgtcgtgactgggaaaaccctggcgttac

SEQ ID NO: 96693 - DNA, 522 bp, Zea mays
tggttgggtcagtgcctatgcatgatactgggggaatattgtatcgctctaccggtccggaattcccgggtcgacccacgcgtccgagccgccgccatgtcgaagcgaggcaggggaggttcggcggggaacaagttccgcatggggctgggtctgccagtggccgcgacggtgaactgcgcggacaacacgggcgccaagaacctctacatcatctccgtcaagggcatcaagggccgcctcaatcgcctcccgtccgcctgcgttggcgacatggtcatggccaccgtcaagaaggggaagcccgacctcaggaagaaggtgatgcccgccgtcatcgtccgccagcgcaagccgtggcgccgcaaggacggggtctacatgtacttcgaagataatgctggagtgattgtgaatcccaagggtgagatgaaaggttccgctatcactggacctatcggcaaggagtgtgctgatctttggcctaggattgctagcgcagcaaacgctatcgtttgagag

SEQ ID NO: 96694 - DNA, 525 bp, Zea mays
agtcatcttgttcctatcgactgtgaatgggcacgtactattgtcgtactcgtctcggattcccgggtcgacgcacgcgtccgattgctgaccaatctctctggcctgctgcttcctgataatcgaccagttccccagtcttgctcctttcactcgtccggcctgcatctccagcattgtgttctgattcacctgctccaatggctgttctttctgctgctgatgcttccccggtctcagctatcgggtttgagggctatgagaagcgccttgagatcacattctctgaggcacctgtctttgtggaccctcatgggcgtggtttgcgtgccctttccagggcccatattgacttctgttctggatcttgcacgtttcacatttgtgtctgagtctttttaacattgatttcttctcatatgttctttttttatttttgctatttttatttattcttttttatttgtcttttttatccttttttttactatttttcttcttttatttctatatttattttatttt

SEQ ID NO: 96695 - DNA, 519 bp, Zea mays
  unsure (1)..(519): unsure at all n locations
gtnttgtttagtgccaatgatgatatctgccactatgcatagctcgtaccgtctcggaattcccgggtcgacccacgcgtccgcgatcacccttgaggtggagtcctcagacaccattgacaacgtcaaggccaagatccaggacaaggagggcattccaccggaccagcagcggctgatcttcgccggcaagcagctggaggatggtcgcaccttggctgactacaacatccagaaggagagcaccctccacttggtgctccgcctcaggggtggcatgcagatctttgtgaagacattgactggcaagaccatcaccttggaggtggagtcgtctgacacaatcgataatgtcaaagccaagatccaggacaaggagggcattccaccggaccagcagcgcctgatctttgctggcaagcagctggaggatggccgtaccctcgccgactacaacatccagaaggagagcacccttcacctggtgctccggttgcgaggtggtatgcagaatcttgt

SEQ ID NO: 96696 - DNA, 524 bp, Zea mays
  unsure (1)..(524): unsure at all n locations
agttatggcgcgtnatgaggactgagccctgcnccctcactcactgccgtaccggtccggaattcccgggtcgacccacgcgtccgcattattcgacctcacctcaccttgccaccagccatggctgccgtgaccgccggggccatctctctgtcctcctcctccgcctcctcccctgcggctgctgccaaggccaaggcggcgtccccgtcgtcgtcgccatgcaggcacctccagttcctgtcggcagcgagcccgcggcggcggtggcgggccggcgcccgcgcggtacgggcgcaggtgtccaccaccgagaccgcggcggcggggccggcgaagacgtccaagaagcaggacgaggggctggtcaccaacaagtacaagcccaaggagccgtacgtcgggaggtgcctgtccaacaccaggatcaccggcgacgacgcgccggtggagacgtggcacatggtcttcagcaccgaatgcgagatcccgtatagagagggtcagtccattcgcatcatccg

SEQ ID NO: 96697 - DNA, 534 bp, Zea mays
  unsure (1)..(534): unsure at all n locations
cgtatgatctcgcaagaaaaagacgtattcctcaccggtccggaattcccgggtcgacccacgcgtccgcccacgcgtccgtctgcccttgccgccgccaccgcaaccgcccgatccaggtccgcagactgcgcactcctcctctccgctccgaatggcccgcacgaagcagacggcgcgcaagtcgaccggcggcaaggcgccgcggaagcagctggccaccaaggcggctcgcaagtcggccccggccacgggcggcgtgaagaagccgcaccgcttccgccccggcaccgtcgcgctccgcgagatccgcaagtaccagaagagcacggagctgctcatccgcaagctccccttccagcgcctcgtccgcgagatcgcacaggacttcaagacggacctgcggttccagtcctcggccgtggctgcgctgcatgaggccgcggaggcgtacctggtggggctcttcgaggacaccaacctctgcgccatccacgccaagagggtcaccatcatgcccaaggacattcagcn

SEQ ID NO: 96698 - DNA, 541 bp, Zea mays
  unsure (1)..(541): unsure at all n locations
tggtggatgtggtgatttaatgtaagatagtacgnatcgactctaccggtccggaattcccgggtcgacccacgcgtccggcgaagagataaattaaacgagcagttccaggacttgggaaatgcacttgatccagaccgtgccaggaacgataaggcaactatacttggtgacacaatccagatgctgaaagatttgactactcaggtgaacaagctgaaagctgaatacacgtcactttctgaagaagcgtgtgagttaacacaagaaaagaatgagcttagagatgagaaagcttcactgaaatctgaggttgataatttgaataatcagtatcagcaacgaatgctggtgctatacccatgggttggaatggagccttctgttgtcatggggccacctcctgcatatccctacccagtcccagttccaataccctctggtgctgtacccatgcatccgcagttgcaaacataccacttcttccacagtcaagcttctggaaccatcccatacacatgcatcccttacatggcatatn

SEQ ID NO: 96699 - DNA, 519 bp, Zea mays
tgtattagcgtcgtgtgccatgacactacgctactctcgtaccggtccggaattcccgggtcgacccacgcgtccggaaatgatcgattcgaagaataagcaaccgtcccgagtttgtctaaagagacccaacagcactatacgagtgacaccggttgaaaaaatatacaggggaaagcaaaagaatgctggcatgagataattggttgtgaattgcagcacaccgattgcagactcattcaacttccccatgttcctccttcacagcatttcctgagacctgcggacacattgcctaaccttcttcttgaactcattccgcttctctctccaatccttggcagcttcaatatttgctggagactcgtcattcggactagagagcattgaaatgatgctcagaactatactttcaaacgtgtgcactggtgttcaccgttcgctttgaagctcattaccactgggatctttaacaggtggattgagaaattgaaatgcttacacgcccattccggtaaa

SEQ ID NO: 96700 - DNA, 524 bp, Zea mays
  unsure (1)..(524): unsure at all n locations
gtttttnttagagcctatgctgagcctagctcatccgcactgacgtaccggtccggaattcccgggtcgacccacgcgtccgcccacgcgtccgcccacgcgtccgaaagatatcttaccctcagcaagttgctgttgcatgcactggaatcatttggtcaaggtacagcttggttatcacaccgaaaaactggaaccttttcagtgttaacgttgcaatggcgggtacaggcctgtatcagctttcacggaagattaggcaagattacttgtctggtgagaaggatgctgctccacaactgcaagaatagataatgacaacacacaaaaaaaaaaaaaaaaaaaaaaaaaaaaaaaaaaaaaaaaaaaaaaaaaaaaaaaaggacagacgtaatagatgatccaaagcttaattactctttctttcaaccttataatcttttctttgtgtaatctaaattacaatttattggtctaaatttgtctactttttttattgttatatactttttctttcctatttt

SEQ ID NO: 96701 - DNA, 537 bp, Zea mays
  unsure (1)..(537): unsure at all n locations
ggntaatgagttgttagggggggggatggaaaggtatctctcaccggtccggaattcccgggtcgacccacgcgtccgagtcactgagctgccaaccatgtgaccaagaaggcgaccctcttccaggcacggagctgaaggagatctggagagtcgcccctgccccacagaacgacgggtatcagtacacacactttgcgcacaaaataaacagcttcaacacggcacctaagaagctgttggcatctgattcccggctgaagcccgatagatatgccctcgagaagggcgacatgtccaagtctggctcagaaaagagcaggctggaggagcagcagagagccgagaaaaggactcgagaggccaagggcgagcagttcactccgcgatggttcaacgtgacggatgcggtcgccttcacgccgtggggtgacctggaaatttgcgagtacagcggcagatacacggagcaccgggctgccatagacagcttcagcaccaacgacgacgacgaccaggtagacgtcacttccggcg

SEQ ID NO: 96702 - DNA, 517 bp, Zea mays
  unsure (1)..(517): unsure at all n locations
ggtagtttaggttcgtgtcctgcncagtcagncagtcgtaccggtccggaattcccgggtcgacccacgcgtccgctgaggggcgccgacaacgacccgagcaaggacatcgtggagatgaagtcggaggaggcgtaccggctggtgctgcaccaggtggtccggtggctggagcgcaacgtggaccccgtcaagtcgcgggtgttcttcgtcaccgcttcgccgacgcacacggacggcagggcgtggggcgacgacgacgcggagggcagcggcaactgctacaaccagacgtcgccgatcagcgccgcctcgtcctaccgtggcggcacgagccaggagatgctgcgcgcgacggaggaggtgctggccacgtcgcgggtgcccgtcgggctggtcaacatcacgcggctgtccgagtaccgtcgggacgcgcacacgcagacctacaagaagcagtgggtggagccgactgccgagcagcgcgccgaccccaggagctacgccgactgcacgc

SEQ ID NO: 96703 - DNA, 521 bp, Zea mays
  unsure (1)..(521): unsure at all n locations
gggattagcttgngtgaccatagggatgggaggtacgtggtaccgcgtcggaattcccgggtcgacccacgcgtccgcccacgcgtccggatctttcccccgtcctccctcgccttcgcctcgccggcaggagattgccaccaccaccgccggaccaccccgaccctccttccctctcgcgctatggcccagactgttgtgctcaaggttggcatgtcctgtgagggctgtgttggagctgtcaagcgggtcctgggcaagatggaaggcgtcgagtcctacgacgtagacatcatggaacagaaggtcaccgtgaagggcaatgtgacacctgacgccgtcctgcaaactgtttccaagactggcaagaagacttcgttctgggaggctgaagccgtgacaagtgaatccgccacacctgccggccaccgcctgacaggttcgatgatctggaagtgcccagcaaaaaaatgtgaatgtatntagcttggatctgttacaaataattgcaaactgctagn

SEQ ID NO: 96704 - DNA, 520 bp, Zea mays
  unsure (1)..(520): unsure at all n locations
gttatgtttcgtgcctatgatgattacgaggacttagcgactgctgtaccggtccggaattcccgggtcgacccacgcgtccggcgccggcaaccgccgccatcgatcgatcgcccggaaactgacctctaccgatgtctggagccggcgaggaggataagaagcccgcggagggcggcgcccacatcaaccttaaggtcaagggacaggatggcaatgaggtgttctttcgcataaagaggtccacccagctgaagaagctgatgaacgcctattgcgaccgccagtctgtggacatgaatgccattgcattcctgtttgatggccgcaggcttcgcggcgagcagacccctgatgagctggagatggaggacggcgacgagatcgacgccatgcttcaccagaccggaggcagcgttcctagcaccacctaaaagcagcagctgcggagcctcgttttgctctccgccctgcgtagtactaaacaaaagggaaaaagtctttttaaggaacttgtgan

SEQ ID NO: 96705 - DNA, 522 bp, Zea mays
  unsure (1)..(522): unsure at all n locations
agttagtacgggtnttntngactgaacactgagctgatcgtatgccgtaccggtccggaattcccgggtcgacccacgcgtccgcccacgcgtccggcttgacgggcgcgggcctcgtcgaccagatgggcaacttgttctgcaagacgctgctgttcgccgccgtcgcaggcgtgctgctggtcaggaaaaacgaggacgtcgagtcgctgaagaagctcgtcgacgagaccacgttctatgacaggcagtggcaggcgacctggcaagatgactccgctgggggaccaaacaactagttcagcgttgtggtacaaaaaaaatgcaaaacgctttcttgttacgtagcttatctatttcctcggccttcttgttttccctgtgtagtgagatctttttttttttttgtttttgacaaacgcaatgatctacgtcatgttgtaaaattgtatggaaaataattctgcagtttcagtttttttttaaaaaaaaaaaaaaaagggcggccgctctagaggatcc

SEQ ID NO: 96706 - DNA, 534 bp, Zea mays
  unsure (1)..(534): unsure at all n locations
agatttttggntnatatgacagaagtgtattgatgcactgcaccgtcctgaattcccgggtcgacccacgcgtccgcccactcgtccgtaagaaatccttggaccctgtggctccgctacacaaatatggtgttgtctgcatatcaaatatactgaccactacctgccagtatgaggccctcaagtatgtaagcttccctgtccaaacgcttgccaaatgcgccaagatgatacctgtcatgatctggggcacaataataatgagaaagaagtatgttgcaaaagattacttcttttctgtcgtcgtgactatgggttgcgcattgttcattctatatccggcgtcgatggatgtgagtccatttaataaaggcagagaaagcactatttggggtgtttcactcatgctcggttatcttggttttgatggggtcacaagcacgttccaagataaactcttcaaagggtatgacatgggaaatcacaacccgatattctacacaacagtctggttctgggctcttaagttaagcg

SEQ ID NO: 96707 - DNA, 540 bp, Zea mays
  unsure (1)..(540): unsure at all n locations
tgttgccggggnnnaacctgaaccgagatggtatgtacgtactctacctgtcctgaattcccgggtcgacccactcgtccgcccactcgtccgatctacagcaacttcatcgatgcactcccagtggtcaagtactgctccgagaacagcaagcgtctcatccacttctccacgtgcgaggtctatggcaagaccatcggcagcttcctccccaaagaccacccgctccgcaaggaacctgaattttatgttctgaaagaagatgagtcaccctgtatttttggtccaatcgtgaaacaacgatggtcctatgcttgcgcgaagcaacttattgagagacttatatttgctgaaggtgcagaaaatggcctngaattcacaatcgtgagaccttttaattggattgggccaaggatggatttcattcctggtgtcgatggtcctaatgagggtgtaccccgggtgccggcctgctttaataacaatctggctcgccgagagcccttgaagcttgtccaatggggccaagctcagaagacc

SEQ ID NO: 96708 - DNA, 512 bp, Zea mays
  unsure (1)..(512): unsure at all n locations
ttggtnaaaggttaaaagctaagtgtccccggtccggaattcccggctcgacccacgcgtccgaagaaataatagtaacgtggtcccgggcatctagcattctacccgcaatggttggggatacaatcgcgattcataatggaaaagaacatatacctatttacataacaaatcctatggtaggtcgcaaattgggggaattcgtgcctactcggcatttcacgagttatgaaagtacaagaaaggatactaaatctcgtcgttaattgaattcagaatagaaagattcagaataaacaaaatttataggattcaaataatcaaataaagtaaaggtaggcgggtaataaccttatttatgacaagtttcaaattggtaaagtatacccctaggataaagaagaagaaggggctgagaaaactcgcaagaaaagttccaaccgatcgtctacttaaattcgaacgggttttcaaagcacaaaaacgcatacatatgtctgttttcaaagcaa

SEQ ID NO: 96709 - DNA, 511 bp, Zea mays
  unsure (1)..(511): unsure at all n locations
aattgtcgcagcgtcacggagactcgtccggtccggaattcccgggtcgacccacgcgtccgcacaaatggttagagggacctccagtttgtggaaaaaaaggaacggatatactgcgaggactgcaggacatctattgttgacttccacagaacctgcaataaatgtaactatgatctctgtctccagtgctgccaggagcttcgtcgaggccttgtttctggtaatgatgccaaggttgatggtggaggcaagcaagattttctatcgggagttagtcatgataaaatcataagcgaagggccatccgatggacagaatgacatgttgatagatagcgtagttcctggtgaaaacaacacttctagcttgagacagtggagtgtgaataaaagatgaaccataccttgcccaccaaatgcattnggtggttgagggagctctctctttgactgaagtgcttgttaaaaagaagttttttggtgaattcttgaggaaagctatttctcgg

SEQ ID NO: 96710 - DNA, 513 bp, Zea mays
  unsure (1)..(513): unsure at all n locations
natactgtagggcgccacccgggcctccccggtccggaatcccggtcgcccacgcgtcggccacgcgnttcgccacgcgttcggccattcgttcggccacgcgttcggccacgcctggggaggaaaccattaaaggtcaagttgaaggtcttggtttcaacaattcattccttgatccttgtgggtttccttctttagattgtgggtttcactgtcttccatccaagaaacactgtacaaatcacctaaacaggtaatgtactcaggagggggtgatgaaaacaagaacctcaaactcaaataagtacaaagagggttctcatgttatggagtatggtgataagaccttcaaggatgagaagctntccttttatcaaggttttgatcctgctaatgccaacattgcaaacatgctgctttggccaggcccaaaaggtgcagtcaatcaaagagatgctgatcttctcttcatgtggaaaaagtaccagcacgttaaattgggggacccaaaaa

SEQ ID NO: 96711 - DNA, 511 bp, Zea mays
atgtaccgcgggagtgcgggagacctctaccggtccggaattcccgggtcgacccacgcgtccgcccacgcgtccgcagctagctagcgttcctaatcaccgacgaataatctcttcttcacctcactaacaccgagctagcagctcgctctgtcctgcaacaatggccgctcgctcctcctcccagcagctggtcgcggcggcggtcctggcagcggcgctgctgctgctggcggcgggggccgggacggcgtccgcggcggtgagctgcggcgaggtgacgtcgtcggtggcgccgtgcctcgggtacgcgatgggcagcgcggcgtcgccctccgcggcgtgctgcagcggggtgcgctcgctcaacagccgcgcgtcgtcggcggcggaccggcaggccacctgcaactgcctcaagagcatgacggcccggctcggcggcggcgtcagcatgggcaacgccgggcacattcccggaagtgcggcgtattcgtggggtggccttaaa

SEQ ID NO: 96712 - DNA, 517 bp, Zea mays
  unsure (1)..(517): unsure at all n locations
atgctgtctggggcgagtgcggggggatgcaccggttcggaattcccgggtcgacccacgcgtncgcccacgcgtncgctggaagaccggcaaggggctcggcaagaacgagcaaggtatactggagccaataagagctgacatgagagatgcaaaattaggtgttgggaagcaagaggaagatgacttcttcacatctgaagagaatgtgcaacgaaagaaattgaatattgaacttgaggagactgaggaacatataaagaaacgggaggtatgcaatctaacacctggtgctagtttctctacattcatgcagttttttccctgggctgatgcttgacatgctggaacctagatataatagttgtaagacctctataggctagaagtagctgtactttcgtgatgtgaggatagctagcatcaaccattaaagagtcttcagcattttgtgcgctttttatttggtgggttcttttccctgcgttgggcaaattatgacaattcacgtttatcc

SEQ ID NO: 96713 - DNA, 518 bp, Zea mays
  unsure (1)..(518): unsure at all n locations
atgtgtaagagcaagtagcaaaggagatgctccggttcggaattcccgggtcgacccacgcgtccgcccacgcgtccgtaaaattccccattccaactcacacagatctcgtacccggcagtggggacgaatctcgcggggcggaggtggtggcccgactgaagcggtgtcgactccgacgaactcgcagccaccgggggatacgcagcagcagcaccggcgtactccatcgacgttcatatttaaggacttggtttggataattctactcgtcaacaaaagtgattaaaaatggggggtcttgcagcttcaatcgtttcaaagtcgggaaaagcacttgtttcaagacagattgttgacatgtctcgcataaaaattgaaagattactcgctgcgttcccgaaactggttggaactgggaaacagcacacttatgttgaaactcgtaatatgcgcgtattgtattcacccttttgaagaatatattnttttacttttacacaacaagccaggccatt

SEQ ID NO: 96714 - DNA, 517 bp, Zea mays
  unsure (1)..(517): unsure at all n locations
atgtgtccnngggcaaattttcggacgcaccggntcggaattcccgggtcgacccacgcgtncggtgcaaggcangaatgtgctcacaaacttctggggcatgaattttaccaccgataagggcagatctctagtaaagaagtggcagacattgattgaagcccatgttgatgtcaagacaaccgacaactacatgctgcgtttgttctgcattggttttaccaagaggcgcccaaaccaggtcaagagaacctgctatgctcaggcatcccagattcggcagattcgccgcaagatggttgagattatgatcaaccagtcttctacatgtgaccttaaagaacttgtttctaagttcattccggaagttattggcaaagagattgagaagtctacctccagcatcttcccactgcanaacgtcttcatccgcaaggtgaagatactcaaagcccccaagtttgatctccggaagtttattgagagttattgcgactacaaagagggccattttgtt

SEQ ID NO: 96715 - DNA, 515 bp, Zea mays
gtggctgcccggggagtggcgggagagttgtaccggtccggaattcccgggtcgacccacgcgtccggtctccaccaggtgctccggtgggctactggatcagtggagatcttcttctcccgagcaacgcgctgctggcgagccgcagaatgaagttcttgcagaggatcgcgtacctgaacgtgggtatctacccgttcacgtccatcttcctgatcgtctactgcttcctgccggcgctgtcgctgttctcggggcagttcatcgtgaagacgctgaacgtgacgttcctgacgtacctgctggtgatcacgctgacgctgtgcctgctggcggtgctggagatcaagtggtcggggatcagcctggaggagtggtggcggaacgagcaattcttgctgatcggcgggacgagcgcgcaccttgccggcgtgcttcaggggcttgttgaagttgtgtgggggcattaggaatttctttaattttacactcaaatttgggcgggaaaaaattgg

SEQ ID NO: 96716 - DNA, 517 bp, Zea mays
  unsure (1)..(517): unsure at all n locations
natcgctgttgatagcaacaacgtaagaggtggtaccggtccggaattcccgggtcgacccacgcgtccggcatgttgtctctcgctctcgctctcatcaaaatgaagggtacgacataccgcggggggggaaaatcctgccggttctagcggcggtgcacctggactcgtcgctgtacgaggatcccagccggttcaacccttggagatggaagagcaacaacgcgccaagcagcttcatgccgtacggcggcgggccgcggctgtgcgccgggtcggagctggccaagctggagatggccatcttcctgcaccacctggtgctcaacttccggtgggagctggcggagccggaccaggccttcgtctaccctttcgtcgacttccccaagggcctcccgatcagggtccagcgggtcgccgacgaccaaagcaatcgtagcgttttgaccgagagcacaaaggcttagagggaggaggccantcaaattttcgtgctttttgagggctggggctc

SEQ ID NO: 96717 - DNA, 513 bp, Zea mays
  unsure (1)..(513): unsure at all n locations
atctatccccgcactcgcgcgagcctctaccggtccggaattcccgggtcgacccacgcgtccgattatggctagtatctgttatctgcgatgtctggtttgccttgtcttggcttctaggtcagttcccaaaatggtatccaatcaaccgtgagacatatcttgacaggcttgcattgaggtatgatagagagggagagccatcacagctggctcccattgatgtcttcgtcagtacagtggatccattgaaggaacctccactgatcacagccaacactgttttgtccattctttctgtggattaccctgttgacaaagtgtcatgctatgtttctgatgatggttcagctatgctgacttttgagtctctctcagaaaccgcagaatttgctagaaagtgggttcccttttgtaagaagcacaatatngaaccaagagctccagaaatttaccttgctcannnnnnannnnnnnnnnnnnnnnnnnnngaaanggcggcccccctacaag

SEQ ID NO: 96718 - DNA, 520 bp, Zea mays
atgtgtgcccggacgggtgaggcgaggcctgccccggttcggaattcccgggtcgacccacgcgtccggcggcaagtcgctcgcgccggtcccgcttgggtggttctactcccacgcccctcgaggggctcagtgctacgagaaccccaagcacaagggcaccgctgtccccgccgacgaagaagagatctgcggtgccactttcaaggtggtggaagggtctactgtcctgacggcgctgcactgatctatcatcatcaggcggaggcgatgcgatgatgatgcagaactttgtacatgcgttggtggatggtggtgtaacatagtggctgccaacaagtcatgctcatgcaaaccgatgaatctatctctgtatcatcgatctcggttgcttgctagtccagactccagacatggctatatatatatagctggtgctaataaataagagtataatcgtcatatcgatcgggtgcgtgtggaatgcccatcatgtgtgtgaactgtttgcacaaaaccc

SEQ ID NO: 96719 - DNA, 519 bp, Zea mays
  unsure (1)..(519): unsure at all n locations
atgctgctattggaggagagaaggaagtggtactganctcgaatncccgggtcgacccacgcgtgcgggcgggggccgttgctaacaccaaaaatttgggaagaagagggtcaggcagttcaagagggccccatctngaccgctacaagtgccttaagccaagctggcgcangcccaagggtattgactcccgcgtcaggcgtaagttcaagggatgcaccttgatgcccaacatcggatatggctccgacaagaagaccaggcactaccttcccaacaagttcaaaaagtttgttgttcacaatgtctccgagctggagctgctgctgatgcacaacaggacttactgcgctgagattgcccacaacgtgtccacccgcaagcgcaaggagattgtcgagcgtgctgcgcaacttgacatcgtggtcaccaacaagcttgccaggctccgccacccaaaagaccagtgaaatgttgggaagatttaatgtgctctctggtggtgtaaattatttccta

SEQ ID NO: 96720 - DNA, 519 bp, Zea mays
  unsure (1)..(519): unsure at all n locations
atgtcttgcccccgcccagtcgcncgcgagctacctgtccggaattcccgggtcgacccacgcgtccgggggtctctccacatgaccatccagaccggcaagatccccgatccggagtccaccgagaacgctgagttcaagatcgtgctcaccatcatccgcgacgggctcaaggctgaccccaagaagtaccgcaagatgaaggagaggcttgtcggcgtctctgaggagaccaccacgggtgtcaagaggctctaccagatgcaggagaccggcgccctcctcttccctgccattaacgtcaacgattccgtcaccaagagcaagtttgacaacctgtatggttgccgacactcgctccctgatggtctgatgagggccactgacgttatgatcgccggaaaggttgccgtggtctgcggataccgtgatgtccgcaagggttgtgcttgttgaactcaccnngcttgtggccgtgtcattgtgacccgaaacgacccatatgttggctttagggtt

SEQ ID NO: 96721 - DNA, 520 bp, Zea mays
  unsure (1)..(520): unsure at all n locations
taggcttgncccagcttgcanngnaggncgtaccggttcggaattcccgggtcgacccacgcgtccgcccacgcgtccggagcttaatggcgatatttttggagcacgtgcagaatatcagcgggtgtattcagatttatgccctggctttctagaggccattgtgaagcattctaatatggaacaccgactgggagataaagaattgtcctgttcagtttatgaaaaggacatcgctgctgagaagggaatggaacagagccagctcttaccaacattgcttattcagtactaccgcttcttattttcggtcatcatagacttggaaaaggcaagggagatattaactgtgctgcatgagcagtttaatttaacaaaaccagtgcttgaggctgtcatccatctagagtcgattttttcatgcgaaaagcgtattgaaattttagactcacttgtggaaaaattttgtacacctgaatcatcttacggaaaagattgcaattttgattacacagaatta

SEQ ID NO: 96722 - DNA, 515 bp, Zea mays
  unsure (1)..(515): unsure at all n locations
atggtgtnccccgcccactgccccgcgccgtaccggtccggaattcccgggtcgacccacgcgtccggtggtggcgcgcacgggatgcagctcctggcattcccggtgcgagacgggaagcgtggcgccggcgacggtggtgcagctggtggtgcacgcggaggggcaagacctggcgtcgtacagcgtgagcctggtggacgggttcaacgtgcccgctgtggtgagcccgcatgcggtgggcggcgggcagtgcccggccctggggtgcgcggcggacctcaacgccgggtgcccgccctcgcagcgcgtgctgggggccgggggcggcgtggtggcattctagggtgtngtggactancttatggagcggagataagctgagctcgtcactggcatacatgtagagtcagtttttcaatggggatagccgcatggactgttacaatcagttttttagacatttgttattgctgattaggctttttccccaattcgcactgggggcaaatttt

SEQ ID NO: 96723 - DNA, 517 bp, Zea mays
  unsure (1)..(517): unsure at all n locations
atgtgcctcccgcccacccttccccagccccggnctcggattcccgggtcggcccaacgcgtccggggaggcgctggtgctggagatcgggatgaccttcgggctggtgtacacggtgtccggcgacggcggtggacccgaagaagggcatcctgtgcaccatcgcccgcatcgccatcggcttcatcgtgggggccaacatcctggtgggcggcgccttcgacgtgccgtccatgaaccccgccgtgtccttcggccccgccctcgtcagctgggagtggggctaccagtgggtgtactgggtcggccccctcatcggcggccgcctcgccggcgtcatctacgagctgctcttcatctgccacacccacgagcagctcccctccaccgactactaaaagccgaagccgaccgacccaggggtgcgcagcgcatcgcagctagcatgcagctctttcttcccggaccgctcgcccggcattaaaatctttcgtgcacgtgtacgtacattagataa

SEQ ID NO: 96724 - DNA, 514 bp, Zea mays
  unsure (1)..(514): unsure at all n locations
gtggctgatgggggcacgcggggggtggcaccggtccggaattcccgggggaaggcccagcgcgccaccggccccgccaccgtgctggcgatctgcaccggcaccccccgcaaatgcgtgtgcaggccgactaacccgactactactttcngatcaccaagagcgagcacctcaccgacctcaaggagaaattcaagatgatgtgcgacatgtcgatgatccggaagcgttacatgcacctgacngaggagttcctggcggagaacccgagcatgtgcgcgtacatggcgccgacactggacgcgcggcaagacgtggtggtggtggaggtgcctaagctggggaaggcggcggcgcagaaggcgatcaaggagtgggggcagcccaagtcgcggatcacgcacctggtgttctgcaccacgtccggtgtggaaaatccgggcgccttctaccaacttaaccaagcgctttgccctggccccttcgtggaacccgttatgatatgacccacagg

SEQ ID NO: 96725 - DNA, 519 bp, Zea mays
  unsure (1)..(519): unsure at all n locations
aagtacccagcnatcacgnagacctctcccggtccggaattcccgggtcgacccacgcgtccggtggaggcttacgacagagaaggaagcccgtactactccactgctaggctatggggcgacggggtcatcgaccctgctgacaccaggcgggttctgagcctctgcctctccgcttcggccaagccggttccggaagacacaagatacggtgtattccggatgtgaataaatgtgtgtgagtaataacgcagacgtgtttaataaaaagctgcctgcacgcacccaatgtgtgtgcacaaataaaaatttcgccctggtttctgtcgtcgaaatatgttgaagagtgttgttcatttcatatattactatctgatgaaaaaaaaagacacgaaaaaaaacaaaaatgaaaaaatcaccnagncccgaagncggaaagacgggcaaccaangcgcggccagcaaaggaaaacggcaccttaccaggcgggtggaacccntaaatatgtaatttttttc

SEQ ID NO: 96726 - DNA, 518 bp, Zea mays
  unsure (1)..(518): unsure at all n locations
aagcgtccncccccgacctccccggcctctcaccggttcggaattcccgggtcgacccacgcgtccgggacccgcccacctcctgcagcgcatgttctgttggtgaggacatgttccattggctgtcgaccatcatggggccatcggacagcccatttgcaggtggggtattcttggtgaacattcacttcccaccggattaccctttcaagccaccaaaggtgtctttccgcaccaaggttttccacccgaacatcaacagcaacggcagcatttgccttgacattcttaaggaacagtggagccctgctttaactatctcaaaggttctcctgtcaatctgctcactgctcacggacccaaaccctgatgatcctcttgtccctgagattgctcacatgtacaagaccgacagggccaagtatgagtccaccgcacgcctctggacacagaagtatgccatgggctagaagcaacgctaaaagcttgccccactggtgaaaatgcccgggacccaa

SEQ ID NO: 96727 - DNA, 520 bp, Zea mays
  unsure (1)..(520): unsure at all n locations
natgtgttaaagacaaaaaataaggcaagcctccgttcggaaatcccgggtcgacccacgcgtccgcaaacgaatcggcacgacgcatcggcatcgcctccgacgatcttgagacaaacaaaagccaccgctgcggcaactccgcctcccgccgacccggggatcgcctgacaacaggcagcgaaaaggggcgcagggtttgcccgccaagatggaggacgtggacgtctcgcggcagctgaagcagatgacggacttcatccgccaggaggccgtcgagaaggccgccgagatcgaggccgccgccgccgaggagttccaaatagaaaagttgcagctggtggaaagctgaaagaagaagatcaggcaggaatatgacaagaaagagaagcaagttggcatcaagaagaaaantggatactcgatgcaactcaatgcttncagaantaaaggtccttcaactcaggatgatttgggaaacaaaatttttggggtttcaaaaagcaaaaaacctctgtgc

SEQ ID NO: 96728 - DNA, 515 bp, Zea mays
aattcttgaagggaaggaataaggaggaggaaccggtccggaattcccgggtcgacccacgcgtccgcccacgcgtccgggatcatttacggaggctctgtaactgccgcgaactgcaaagagctggcagcacagcctgatgtcgatgggtttcttgtcggtggagcttctttgaagcctgagttcatcgacatcatcaacgcggccaccgtgaagtccgcttaagatgttacgctgaagacgaacatactttttttttgctcaactgtgctatgtaagctagtagcttttgcgcaggagcagagactgttttgcctgcccccaacttttagcttgagcttgctaataatgtttacctctggacgtatcaataatggtgcttatgtaccccttttttgtgccgaattacggtggatccgtcatctgaaccatgggtttggtgtatgtaattgcgtcacccgatgcctatggtgagactgaagtttttggacatttgggacaaaaaaaaaaaaaaa

SEQ ID NO: 96729 - DNA, 497 bp, Zea mays
cagacccctcggttcggaattccgcgggtcgacccacgcgtccgggaaccgaaaattgcagatttcgggttggcaaggcttctaggagaaggccacacgcggactcagacaggcagagttgttgggacattcggttatatggcgccagagtatgcatcacatggtagtgtgtcgcctaagattgacatctttagcttcggcgtcttgatccttgagatcgtgaccaggagaagcaactgcagctctgatgaccacagcactgtgaatctcctaagtgatgtctgggatcactggaagaaagggacgatgccacaaatgcttcaccggtcactggatgagtttgctcgaagccaagcgctgcgatgcatccacatttgtctgctgtgcgtccagcccgaaacctgacgataggcctgacatatcacgccggagtgttcatgtttacccagggtagcatatagcttcaaaccggccgggcaagaccttgtttttttttg

SEQ ID NO: 96730 - DNA, 491 bp, Zea mays
  unsure (1)..(491): unsure at all n locations
ngggggatcgatcggaattcccgggtcgacccacgcgtccgcagcaagcccgtccctgctattctggagatcccatccaaggaccatccatatgatccgtcgcacgactctgtgctctctcgagtgaaatatctgttctctgcagaatcggtggcgtctgataggcgatgaaggcatccttgcgtagcagtacccttcgatgcatctattttgttatggtattgaaaagaagatggcacgtaccattgggtgcgagcgagccagcatgaataataatgagcttgcaaacaatgattggttgaactaaaccaacacaatttttttttaataaatggttcgaatgatgnannnnacangaaaggataattagttaacaataaaaagaaaaattgatacttgggtcttgnttgttccctccaaagttgggcccctccccctcgcgatttttcttcccccaaatgtgtgcgtatttggactttaacacctccgcg

SEQ ID NO: 96731 - DNA, 508 bp, Zea mays
  unsure (1)..(508): unsure at all n locations
ngtatgactcnnnnctggcnnntnggtcnccccccnnnnncngggggaccaggcgtccggtttaacacggtgtgcactcttcatttcaggaagctggacttcgaagagttcgcgggttgcgtcatcagtgtttaccagatggaagccttggagacgtgggagcagcacgcgcggcgtgcgtacgagctgttcgacaaggaaggaaaccgacccatcgtgatcgaagagcttgcatcggaactggggcttggcccgtcggtgcctcttcacgttgtcctccaggactggatccggcacgccgacgggaagctgagcttcctggggttcataaagctcttgcacggtgtgtcgtcgcgctcgatccccaaagcctagccatgcgccatccattactcatccctgcccatccatatccatcaagaaccaaggagatgatgaccggtggcttagccagtctcttgcttgtgcgtgcctgcgtgccctgcccctgtttattgttgttttgcaa

SEQ ID NO: 96732 - DNA, 520 bp, Zea mays
  unsure (1)..(520): unsure at all n locations
atgctgtccgggggcgaggtcgcgggcacgctccgntcggaatncccgggtcgacccacgcgtccgcccacgcgtccgcagggacaacaagaagactcgcattattccgcgccacgtgcttctggcgatccggaacgacgaggagcttgggaagctgctgggcggcgtgaccatcgctcacggcggtgtgctccccaatatcaaccctgttctgctgcccaagaagacggcggagaaggcgtccagtgtggggagcaaggaggcaaagtcgcccaagaaggccgccaagtcccccaagaaggcatagactgactgtctggagtgatctgatgtttagcaggaccttgataccagtatgcggtgatgcgtaggctgtagatgggtcgaatgtgcttgtgtgtgtatgtgccctgctgcaagttgccctttgctatttaaaatggaagaagaaatgccttgtttctcaaaaaaaaaaaaaaaaaaagggcgggcgctctataagggtctccgttttgccctc

SEQ ID NO: 96733 - DNA, 534 bp, Zea mays
  unsure (1)..(534): unsure at all n locations
ctgtnntnnttactgtcatcacctgaccgcgtccngcgcncggaannccggggcggaccaagcgtgcgaggacagacaagtacacctcgtatgttttcatcgtttacaatgctaaccgcatcacacagtgccttgctacccttgctaagggcattcatgacaacttcggcattggtgacggtctgataacaactgttcatgccattactggcactcatactactgtttactgaccctcatcctaagactgtagaagtgagcaggctcccatctctaacatcattcatagcagaaccagttctgccaagggtgatggtcaatttctgcctgatctggacagcatgctgacatgtatgtgcttccgacttcctacttgggaatgtttagctggtgacctgaccgacagcatcgaaaaggggggccttctatgatgatatcaagaaaagctatttatgctatttttcgaagggtccaaaaaaagggaaaaaaattgggtaatgtgggggaaagatttttggacaattacggaccacc

SEQ ID NO: 96734 - DNA, 518 bp, Zea mays
  unsure (1)..(518): unsure at all n locations
gagccggtagtgtgtgttcgtnctcgcaagtccgctangcaggttcggaattcccgggtcgacccacgcgtccgcggacgcgtgggggcttctcctccccctcttaccaagtcctcctcgggttagggttcctgagggttttgtggaggggcgatggcggcggctgatgtggagtaccgttgcttcgtcggcgggcttgcctgggccaccagcaacgagtcgctggagaatgccttcgcctcctacggcgagatcctcgactccaaggtcatcaccgaccgggagacggggaggtctcgcggcttcggcttcgttaccttctcctccgagaactccatgctcgacgctatcgagaacatgaacggcaaggagctcgacggccgtaacatcaccgttaaccaggcccagtcccgtggcggtggcggtggccgcggtggctacggcggctgtcgcggcggcggccgctattgtggccggcgccgtgacggcggttattgccgctgtggcggctaccgctg

SEQ ID NO: 96735 - DNA, 523 bp, Zea mays
agatgccagtagtgctgtgttcgttcatctccagtccgctaccatgtatcgaattcccgggtcgacccacgcgtccgcggacgcgtgggcggacgcgtgggctgagaaggttatgtgcagagaagggagtgaacccctggattgaggttgatggtggtgttggtccgaaaaatgcctacaaggttattgaagctggcgcaaatgccattgtcgcaggttctgcagtttttggggctccagactacgctgaagctatcaaaggaataaagaccagccaaagacctctagctgtagccgcataaggagctggacgtgtaatcatttactctgtgcaagtttaccagtgatgcgatctgtatagatgtgtgtcttgtccagccatacgtataccggagatgaaaagagacggaagcagtgaagaaatatcctttttttttcttctcatttttcacgaagatgccgtgcactgcttccagaatgctgtggtcaatttacaaacgcacaggtggcacatgaactatct

SEQ ID NO: 96736 - DNA, 517 bp, Zea mays
  unsure (1)..(517): unsure at all n locations
aggtggtntnntaaaaacagaantatatcgcatcgtctgcaccggcccggaattcccgggtcgacccacgcgtccggtggggaagacggtggggctctacttctcggctaaccattgcgcgccgtgtatcaagttgacgacgaagctggcggccatctacagcagcctcaggggcaaggcggaggacttcgagatcgtgtacgtccccatggacagggaggaggacgggtacctgcgctcctgcggcgacatgccgtggctggcgctcccctacgacggcgcgccgtcgcgcgcgctggcgaggtacttcgacgtgcgggagatcccgacgctggtggtggtggggcccgacggcaggacggtgacgcgggacggccggaacctggtgaacctctacttcgacatggccttcccgttcacggacgcgcagatcaggctgctgcangaggcggaggacgaggcggccaaggagtacccgcggtcgctgcgccaccggggccaccgtcacgagctcatc

SEQ ID NO: 96737 - DNA, 511 bp, Zea mays
  unsure (1)..(511): unsure at all n locations
agaatgctgctgattacgattaccgctagtactgacggcttcggaattcccgggtcgacccacgcgtccgggaggaaggagatcgcgagcagccggagccggaggccgagaggatgaagacgttcgacccgtggccggtcttcttccgccgggagtggaagcgcaactggcccttcctcacggggttcgccatcaccggcttcatcatcaccaagatgacggccaacttcaccgaggaggacctcaagaactccaagttcgtccaggaacacaagaagcgctgaccaaccgggagtcgtccgaatcgcctgcggatgaaaaattagccccctatttatcttgtctttttttttatctagatgcgtgcactctattgtaataatgtaataagaggcaattggattgatccaacagcaaccggcttctgattttgatccgcttcgctgacataatatgtgccttttttctgaaaaaaaaaaanntaaaaaaaaaaaaaagggccgccgctcta

SEQ ID NO: 96738 - DNA, 517 bp, Zea mays
ggggccggagatgtgtgtcggtcatttcagctgagctagcagtctcgaattcccgggtcgacccacgcgtccggacaaaattaataactggagggagacagctcttatattgacatccatccttttcgctgcagttgtgttgtggttcattggcatatttgtccccagcgtcgaccgtttcaacgaagtgagcgagtatggccttactgccgccgagagatcaagtctcaggccactgcttggtgaaaacgagccacggacatcggactaaaatctgcgcaatccataaccatttgttacttggaagggcaatcttagggtatgtttgttttcctcctagattatataaactggattatagtgaaaataagctaaaataagctagcattgggtaatttatttcagttgcatgcgagttgcaatcttagggtacgagggtacaatatcactttggaaggctaaaataggttatcataattcaacttatataatttagaaaaaaccaacagggctgttg

SEQ ID NO: 96739 - DNA, 523 bp, Zea mays
  unsure (1)..(523): unsure at all n locations
agatgccgaatgctagtgtctntctcacggaccgctgacacaggtacggaattcccgggtcgacccacgcgtccgcccacgcgtccgcatcaccatcctaaccacattaaggcttttcggttagctctcaatccatgtggattgagtgggattggatgagtttgaatcccaaacaagtcaaactttttaagaatttttttcaatctcatccaatccatgtgtattgggaataaccgaacaaggccttagatgtctcgtgagcatggatcggctatggtgattagcatgaatgtgttgtggtaactagttggaagactaaatttcctgacgtttggatgtttgcaactgctatgtactataaagactcctcgtgccacagatgtttttgttaaattagtaacgcttttgcatcttgtaaaaaaaaaaaaaaaaaaagggcggtccctctaaaggatccaagcttacgtacgcgtgccttcgacgtcatagctcttctatagtgtcacctaaattcaattcactg

SEQ ID NO: 96740 - DNA, 522 bp, Zea mays
agagcctggaggtcgtgcctttgcttccactggcatccatctgcctgtaccggtccggaattcccgggtcgacccacgcgtccgcgaaatgataaattattgtcaaccatcttttcgattagtcggtcgacagactgtccgttgagattgtatgttgttgtatgaagaggagaagttgcagttaattgagcagtttacaaagttgaaatctcatgttagtttgactgctgatctttggtcctctaaccaaaaccttggatatcttggtgtaacagcacatttcattagtgaagattttgagttgcacaaaaagattattgcattcaagaagatttccttcccacatacatcttatgctgtgcaagatggtattacctcttgtttgctagagtggggattggttggtgatttgtttaccctgactttggataatgctagtgttaacaatttagcaatgaaagatttgctagatgctttgggcagccagaattttttcagtggtgaacaccttcttttgaggtt

SEQ ID NO: 96741 - DNA, 529 bp, Zea mays
  unsure (1)..(529): unsure at all n locations
agatgcctaagtgccgtgccaaagcctacagcacatcantgtactgcctgtaccggtctcggaattcccgggtcgacccacgcgtccgcccaaggtccctttttttttctcgatctggaagcgccgcagtagcagccatggacgtgagcggagcaggcgggaaggcgaagaagggcgcggcggggcgcaaggccggcgggccgacgaagaagtcggtgtcgcggtccgccagggccgggctgcagttccccgtcagccgcgtcgggtggtacctcaaaaagggccggtacgcgcagcgtgtaggcacgggtgcccccgtctacctcgccgccgtcctggagtacctcgcggccgaggtgctcgagctcgccggcaacgcggcaagggacaataagaagacgcgcatcatcccgcgccacgtgctcctcgccatccgcaacgacgaggagctcggtaagctgctggccggcgtcaccatcngccacggcggcgttcttcccaacatccacactgtgctcctncccaagaa

SEQ ID NO: 96742 - DNA, 514 bp, Zea mays
agtaatggtgagtgattttgacgtcgggggagaaatagtattggtcccggaattcccgggtcgacccactcgtccggctgaaatgcttgtgatggcatacggaaggtcttatggtcttcctgtgattaccactcgtggcaacaatgtgtatgggccaaatcaatttcctgagaaactcattcccaaattcattcttttggccatgcaaggtctgcctcttccaattcatggagatggctccaacgtcaggagctacctgtactgtgaggatgtggccgaagcttttgaggtggtccttcacaaaggagaagttggacatgtgtataatattggtactgtgaaggagaggagggtgattgatgtggccaaggacatatgcaagctctttggcttggatactgagaaagtcatcaagtttgttgagaacaggcccttcaatgaccagaggtacttcttagatgatcagaatctaaagagattgggatgggcagagcgcacaccatgtgaagagggc

SEQ ID NO: 96743 - DNA, 510 bp, Zea mays
  unsure (1)..(510): unsure at all n locations
tgagcggtgctgattctgacatacgaagtagcgtcgcaccgctccggaattaccgggccgacccacgcgtccgcccacgcgtccgtccccatccgcacctctctccatctccctgctcctccgcctccttcttgatccagccaagccagggatcgccatgtcggactcggaggagcaccacttcgaatcgaaggccgacgccggagcgtccaagacctacccgcagcaggctggcaccgtccgtaagaacggcttcatcgtcatcaagaaccgcccctgcaaggttgtggaggtttctacctcaaagactggtaagcatggccatgccaaatgccactttgttgccatagacatattcaacgggaaaaagctcgaagatattgatccttcgtcacacaactgtgatattccgcatgtgaaccgtactgagtaccagctgattgatatatcagaggatggatttgtgagccctcttacttcagatggcaacactaaggatgatnctagacn

SEQ ID NO: 96744 - DNA, 521 bp, Zea mays
  unsure (1)..(521): unsure at all n locations
agatgccgggatgctgtgttagtnctcacagaccgctaacaggtncggaattcccgggtcgacccacgcgtccgggggtttggagatctctgatcttaagaaacaactcgaagatgctcggtcaaaaggcattgatgttagggccttggtggttatcaatccaggaaatccgactgggcaggttcttgctgaagacaaccaatatgatatagtgaaattctgtaaaaatgagggccttgttcttctagctgatgaggtatatcaagagaacatctatgttgacaacaagaaatttaactctttcaagaagattgcaagatccatgggatacggcgaggatgatctccctctagtatcatttcagtctgtctccaaaggatactatggagagtgtggtaaaagaggaagttacatggagattactggcttcagtgctccggtaagagagcagatctaccaagtaacttcagtgaacctgtgcttcaatatcactggtcaaattcttgcgaagcctgtcatga

SEQ ID NO: 96745 - DNA, 519 bp, Zea mays
  unsure (1)..(519): unsure at all n locations
gggccagtaggctagtgtcgttctctcagctccctcgcaggtacggaattcccgggtcgacccacgcgtccgatgagtcatggggccccctctttgggaagctattctttgcattttgggtgattgtccatgtttatccggttctcaaaggtttggttggaaggcaaaacaggacaccaacgattgtcatcgtctggtccattctgctggcttcaatcttctcgctcctttgggttcggattgatcctttccttgcgaaggatgatggtccgcttcttgaggagtgtggtttggattgcaactaggatgtcagtgcatcagctcccccaatctgcatatgcttgaagtatattttctggtgtttgtccccatattcagtgtctgtagaatagagacatgaaatgtcccaagtttcttttgatccattgtgaacctacttaatatctgagagaattactgggggaaaatggaagcttcggcaattcttgtgcaatttggccgtggaatacagcatattcn

SEQ ID NO: 96746 - DNA, 523 bp, Zea mays
  unsure (1)..(523): unsure at all n locations
agatgccantagggctgaatgtcggtcctacaagcaagtctcgtagntgttcgtaccggtccggaattcccgggtcgacccacgcgtccgaggagggccttcttcctgggtttcagccagtccccagtggagttcatcaatgctctgatagcttctcagagcaaagatttaaagctggttgctggcgaggcgaataggaacattgagaaagaaagacgtgccgacttctataaccaaccatgggttgaagacgccgttataagatacttgaaccgcaaaccggctaacgagggcctaggtggtggtgctggtggttcttgaagcgtggatttctcctagctattttagtgtataaacaaattatctgttctgtattggcagtaaatttcaggcgtattaatgaagagaattgtccatagttgtgaaatgatgttcaggctaatcatggttggttgatgattgggtctaaattgtcaagtgctgaactgaaaccgaatggtgcttggtgtggccttaaaaatat

SEQ ID NO: 96747 - DNA, 525 bp, Zea mays
  unsure (1)..(525): unsure at all n locations
atggnccttagatgccgngtcagttctcacagctatgtatagtattgcttctaccggtccggaattcccgggtcgacccacgcgtccgcctctgtcaagggtgcaaaagttgtgactgataaattgacaatgcgcacaaagggttatggatttgtgaaatttggtgatcctacagagcaagctcgtgcaatgactgaaatgaatggaatgccttgttcttccaggcctatgcgtattggtcctgcagcaagtaggaaaaatacaggaggtgttgttcaagagagagtaccaaattctcaaggagctcagtctgagaatgatcctaacaataccactatatttgttggtgggcttgaccccaatgtcactgaagataccctaaaacaagttttttctccttacggtgaagtcgtccatgttaagatccctgttgggaagagatgtggttttgttcagttcggtaccagacctttttgttgagcaagcgctgctaatgctgcaagggcccttgattggtgcacaaat

SEQ ID NO: 96748 - DNA, 508 bp, Zea mays
ggatgggctgctgaactcgcaacgggggggaaatgtatcactcccggaattcccgggtcgacccacgcgtccggactagttctagaagtattacaggataggaagtacgtgacagcaaaaagtcgagttctacaccctgagttccgtggtcgaatggtctcggcattccttttgcaccatttctctgaggttgctgattacagctttacagctaacatggagacagagctagataatgtctctgctgggctaactgaatggaagggtcttctaaaaggctactgggaacgattcagcaaatattgtgcagatgcgagtaatctggatggcagaaaggtagagagaatgctcgaagaaaaatttggtcctatcctcttccctaatgttgacacagacaatagaatttgccctagttgttctgaaggaaccttgagattcaaagttagtaggtatggtgaaggctattttataggctgtgatcgacatccaaaatgcaagtacattgctc

SEQ ID NO: 96749 - DNA, 509 bp, Zea mays
gttgaggtccgtgtatcagcaatcagatagcgtggaaccggcccggaattcccgggtcgacccacgcgtccgggagaagttaagggagaagaaattgtcctgggttgatatttttgaggagataccaataaaagtttccaactcagcgcttgtcagtgcctttatgaaggagctggaacctgagtcacctgttacccagtgtgacctggaccgacttaaattgtcaaccgccccctttatggaaaggaacttggaatttctgattgggtgcatggatgatctttcatcagagcagaacaagttccaatattataaccgcaatctctcaagacaacagtcacagcagcaggcatggcttcaaaagagaaggcaggagaacatggcgaggaaagcagctggtgaggagccactaccagaagaagatccatccaatcctatatttaagcctattcctgagccctcacgattggagggctatctagtaactaatcagatctgcagttactgca

SEQ ID NO: 96750 - DNA, 525 bp, Zea mays
  unsure (1)..(525): unsure at all n locations
aggtcctgtagtgctagtgtcgttcatctcagctcgcctcgcaggttcggaattcccgggtcgacccacgcgtccgtgctttctaaacaaacgcaggtgcagtgtggtttcgggcgcacaggccacctctgggcgcacgaggcgtacggagtggaaccagacataatgaccttagcgaagccactggccaacggcattcccatcggcgttgtcctggtgaaggagaaggtcgccgcagccataaactacggcgaccacggcacgacgttcggcggcgggcctctcgcctgccagaccgcgataacggtgttcgacaagatcacgagacccggtttcctggccgaggtgtccaggaaaggggagagcttgaagctgctgctccgggccaagctgagcggggacccgcacgtgaaggaaggtccgcgggtccgccttttcggtngcgttcaacttgacgttcccgcttgtcctttggtgcacgcctgcttggacccccgcctagtcgttcttactggcgggtaaggn

SEQ ID NO: 96751 - DNA, 524 bp, Zea mays
  unsure (1)..(524): unsure at all n locations
aggtctcttgaggctgtgttcgtncatctcagcncncttcgatgtcccgaattcccgggtcgacccacgcgtccgcccacgcgtccgaacgaaacggtcaggtttaaaccagacacaacggacttcacaaggtaatacatgagttcaacagggcacaatggtcctcaaaagtccattcatacttgtgacttgactggttatttaggtgataacgatttggggtccggcacattcaccagtttggccagcttttagccttgcttctagcccatggcatacttctgtgtccaggagcgtgcggtggactcatacttggccctgtcggtcttgtacatgtgagcaatctcagggacaagaggatcatcanggtttgggtccgtgagcagtgaacagattgacagggagaccttttgagataggtaaaagcaggctccaattgttcttaaaaatgttcaaggcaatgctggccgtgcttggtgatgttcggtggaaaacctttgtgccgaaagacacctttggtggcg

SEQ ID NO: 96752 - DNA, 527 bp, Zea mays
  unsure (1)..(527): unsure at all n locations
agtgcccggatgctgtgcctttgctttcgacnctcanctnattagntcgtaccggtttcggaattcccgggtcgacccacgcgtccgcgcgccgccgcaccctgctcaaggtcatcatcctcggcgatagtggggttgggaagacggccttgatgaaccaatatgtgaacaagaagttcagcaatcagtacaaggctacgatcggcgcggatttcctcaccaaggaggtgcagttcgaggacaggctcttcactctgcaaatatgggacactgctggccaggaaaggtttcagagtctcggcgttgcattctaccggggagcagattgttgtgtcctagtctatgatgttaattctatgaaatcatttgacaacctgaataactggcaagaagagtttctaattcaggctagcccatcagatcctgataaattcccttttggtcttgttggttaacaagctgatgtagatggtggcaacaaccgcgttgtatttgagaaaaaggccaaagcatggtgtgctttcaat

SEQ ID NO: 96753 - DNA, 513 bp, Zea mays
  unsure (1)..(513): unsure at all n locations
gtagcaggtgctgattctgccntacgacgtatcgtcgctaccgctccggaattcccgggtcgacccacgcgtccggaaggcgagaacgtactccgtccctcccctcccctcccctccccttcccctcgaggctcgaggaccgtctcctcgcctgctcatccgccgctgcttcccttctctgggctcggagaaccggagagaagcgcgcgcggccatggcgtccagcgcctctcggttcatcaagtgcgtcacggtcggcgacggtgccgtgggcaagacatgtatgctcatctgctacaccagcaacaagttccccactgactacatacctacggtgttcgacaatttcagtgcaaatgtagttgtggatggcaccactgtgaaatttgggcctttgggataccgctgggcaggaagattacaaccgnctgaggcctctaagctaccgaggtgcagatgttttcgtgcttgcattctcacttgtgagccgagctagctatgaagatatcatga

SEQ ID NO: 96754 - DNA, 513 bp, Zea mays
  unsure (1)..(513): unsure at all n locations
tggagacggtgcgtatcctcgccataggaagtagcgctgctaccgctccggaattcccgggtcgacccacgcgtccgagatcgtccccgtcgacctcaccaccggcgcccacaagcagcccgacttcctcgccctcaaccctttcggccagatcccggctctcgtcgacggagacgaagtcctcttcgagtcccgtgcgatcaaccggtacatcgccagcaagtacgcgtcggagggcacggacctgctccccgcgacggcgtcggcggcgaagctggaggtgtggctggaggtggagtcgcaccacttccacccgaacgcgtcgccgctggtgttccagctgctcgtgaggccgctcctgggcggcgcccccgacgcggcggtggtggagaagcacgcggagcagctcgccaaggtgctcgacgtgtacgaggcgcacctggcccgcaacaagtacctcgccggggacgagttcacgctcgccgacgccaaccacgcgtnctacctgctctc

SEQ ID NO: 96755 - DNA, 516 bp, Zea mays
gatgccggaggctagtgtcggtctctccacctcccatcgcagtatcaactcccgggtcgacccacgcgtccgatcaaaattatgtaatgaagagtagcacttattattgctacatgacgaaggttgagcatgcatggaggcgagattatagacagacaccctgattttacacgacgaatcgcaagaagcgcatgcattggatatccttagccggagagggcgctggtgttgtagacgaggagggcgccgccgccgaggatcccagcgagggtgacggcccagatcagaagcccagtggttccaccgacgtagacgtcgccggtgggagaccagtcatcctcgttgtagattgggctgtatccgtcgacgttcgcgccgtacttgtcgacgaactggtacacgcccttgcccttgccctttctcccgttggcgtcgacatcgacggtcaggccacccccaatcccgtagggcttgtcggtcttgatcttcttcttggagcagacgacggcgaatgag

SEQ ID NO: 96756 - DNA, 512 bp, Zea mays
  unsure (1)..(512): unsure at all n locations
aggagccggtgctgattacagaaataacgacaagtctggctccgctccggaattcccgggtcgacccacgcgtccgctggaaaacctcaggagactacaattaatgcttctttcacaaatttagcaactactgcattaacagatttcgtcttccaggcagccgtgccaaagttcatccagttgcgtttggacccagctagcagcagcactcttcctgccagtggaaatgtgtcagtcacacaaagcctcagtgtcactaacaaccagcatgggcagaaaccacttgcaatgcgtatccggatgtcttacaaagtgaatggtgaagacaggctggagcaagggcaaatcagcaactttccttctgggttgtagtgccacctgtgtctatggngttggggttgctctttcagcgtgctacaggcaaggcgtttgtattcttgttcttgaacattttcacttctgcttgcctgctaatgagttgtgtacactggtagttgggtttggtcgcccat

SEQ ID NO: 96757 - DNA, 512 bp, Zea mays
cgtagccggtgctagttacgaattacgcagtagcgtggctctcgctccggaattcccgggtcgacccacgcgtccgcccagatccaattcgcgagttctccctcctctgccgccatggcgctctctgtggagaagacctcgtctggacgggagtacaaggtcaaggatctctcgcaggcggacttcggccgcctcgagattgagctggccgaggtcgaaatgcccggcctcatggcgtgccgcgccgagttcggcccgtccaagcccttcgccggcgctaggatctcggggtctctccacatgaccatccagaccgccgtcctcatcgagaccctcaccgcgctcggcgccgaggtccgctggtgctcctgcaacatcttctccacgcaggaccacgccgtcgtcgtcatcgcgcgcgactcggccgccgtgttcgcctggaagggggagaccctcgaggagtactggtggtgcaccgagcgctgcctcgactggggcgaggcgggcggccc

SEQ ID NO: 96758 - DNA, 526 bp, Zea mays
  unsure (1)..(526): unsure at all n locations
agatgtccggtatggcttagtgtcagttcatcataagactcgcctccgaggtctcgaattcccgggtcgacccacgcgtccgcgcatatgttggtatggcaggtgttgggttcctacagttctgcaacctgaacagcttccgaacaaagttcatcctgngattctctttgtttatgggtctgtcggtgccacagtatttcaacgaatacacttccgtcgcgggctttggtccagtgcacacgcgtgcaagatggttcaacgatatgatcaatgtggtgttctcctcgaaggcgcttgttggcggggcggtggcgtattttctggacaacaccctgcacaggcgcgatggcgtcgtgaggaaggaccggggccaccatttctgggacaggttcaggtccttcaagaccgacccgcgcagcgaggagttctactccctcccgttcaaccctaacaaattctttccgttcttctgatccttgcttgtgctagtaactgagagcagaaaaatggttgtggttaggttggt

SEQ ID NO: 96759 - DNA, 527 bp, Zea mays
  unsure (1)..(527): unsure at all n locations
aggccagtagtgctgtgttcaggtcatgtccagctccccttgcacgaccggaataacccggcccgacccacgcgtccgcggacgcgtgggtcaacacagcacaggctgctcgagagagagagagagagaaagatgtggtggttcgggcaccaccaccacaaccagccggctcccccagcgtctggccccaaccaggtgttcaagatcttctgccgcgccaacgagaactactgcctggccgtccgcgacggcgccgtcgtgctggccccggtcaaccccaaggacgaccaccatcactggtacaaggacatgcgcttcagcacccggttcaaggacgaggaaggcatgccggcgttcgcgctcgtcaacaaggccacggggctcgcaatcaagcactctctcggtcagtcccacccggtcaagctcgagcctttcaacccggaccaagaagacacgtcagtgctgtggactgagagcaaggaccttggccaaggctttcgctgcattcgcatggtcaacaacacccn

SEQ ID NO: 96760 - DNA, 523 bp, Zea mays
  unsure (1)..(523): unsure at all n locations
aggccgtagggtgtgtcagctcatacaagcacatcantgcactgcctgtaccggtccggaattcccgggtcgacccacgcgtccgcccacgcgtccggttccaacgcatgctataaaaacagaaattcaagttcgtgctcaagacaaaggttgttgggtgtgataccagtggagatggcgtaaagctgacactggagcctgcagctggtggtgagcagaccatccttgaagcagatgttgttcttgtctctgctggcagaagcccatttacttctgggattgggcttgaaactcttggtgttgagacagacaaggctggcaggatccttgttgataagcgcttcatgaccaatgtgaagggagtctatgcaatcggngatgccatccctggtcccatgcttgcccataaagctgaagaggatggtgtcgcatgcgtagaattcattgcttgaaaagaaggccatgttgactatggcacaagttctggtgtggtctatacacattcagaagttgcaatttgtgg

SEQ ID NO: 96761 - DNA, 527 bp, Zea mays
  unsure (1)..(527): unsure at all n locations
gggtctcttagtgcgcgcgcctttgccttacgccactcatctnactagntcgtaccggtccggaattcccgggtcgacccacgcgtccgctttttctccttccgtttggaggagtccttcttctccttcctcttggtgcgggactcttgcgatgaagtgctcccgtggcttgtagtgggctattcacccccccccccccctctaggcgactatcaattggtatcaaagcccggtgcttcattagagcctaaccgctcgaagtgatgtcgggagatcacgccaagaaggagatggagaccggcgaaaaggttctagatcgcgagcggccgctctagaggatccaagcttacgtacgcgtgcatgcgacgtcataactcttctatagtgtcacctaaattcaattcactggccgtcgttttacaacgtcgtgactgggaaaaccctggcgttacccaacttaaatcgcctgcaacacaatcccctttcgccagctggcgtaattaccaataggcccggaccgatcgccc

SEQ ID NO: 96762 - DNA, 517 bp, Zea mays
gtgtccggagtgtgtgttcagctctaaagcacgcatcgcatgacccaattcccgggtcgacccacgcgttcgcccacgcgtccgcactggcataatagaaggcttgatttggtcccctaaagcaagtgattcagatgatagacatgatgattgggctttcgaggagggaccacactctgactttactgggccaaattgtgggagtacagcatgtgtagcattagtcagaaataggcaactcgttgtggcaaatgctggtgactcccgctgcgtcatctcaaggaatggccaggcatacaatttgtcaagagaccataaaccagagcttgaggcagagagagaaaggatacaaagtgccgggggttacattaaaatggggcgtgtaaatggaagtttaaatttgtcaagagctattggagacatggagcttaaacaaaacaagttcttgtcccctggatagcaaattttgacccgaaaccctgacataaacattgtcgagctatgtgacgacgacgaa

SEQ ID NO: 96763 - DNA, 520 bp, Zea mays
gatgcccgtaggctggtttaggcatgaaagaccgcctcgcaggtctcgaattcccgggtcgacccacgcgtccgcccacgcgtccggagagacagagagagagactgccaacgaggcgaagcagccggccaatggagcatccgcgcgcggggtctgagagcagagcggcagggcgccatggcggcgtcggtggcgctgagcagcgggcaccggatgccggcggtggggctgggcgtgtggcggatggagaaggcggacatccgcggcctcatccacacagcgctccgcgtcggctaccgccacctggactgcgccgctgactaccagaacgaagctgaagttggtgacgcgctcgcagaggcattccagaccggactcgtcaagcgggaggacctgttcatcacaaccaagctgtggaactcagaccatggccatgtgcttgaagcctgcaaggacagcctgaagaagctgcagctagactatctcgacctctaccttatccatttcccagtagccactc

SEQ ID NO: 96764 - DNA, 517 bp, Zea mays
  unsure (1)..(517): unsure at all n locations
agggcttagggctcgtttcgttcataccgaccgctccgatgtctgaattccgggtcgacccacgcgtccggttgagtacaagaacattagcttcactgtctgggatgtcgggggtcaggacaagattagacctctttggaggcattacttccagaacacccagggtcttatctttgttgtggacagcaatgaccgtgaccgtgttgttgaagccagagatgagctccacaggatgctgaacgaggatgagctacgtgatgctgtgctgcttgtttttgccaacaagcaagatcttcccaatgccatgaatgctgctgagattactgacaagcttggattacactccctgcgccagcgacactggtacatncagagcacttgtgccacaacttgcgaaggtctgtatgagggcctggactggctgttcaacaacattgcgagccaagcttganggctaccttgaatattaactgcgaactgactaggagcttccggtgtatcatggaaactcaagaca

SEQ ID NO: 96765 - DNA, 526 bp, Zea mays
  unsure (1)..(526): unsure at all n locations
tgtgccgtagtgtccgcngccggggctgaccgccagtgatcgnactgccgtaccggttcggaattcccgggtcgacccacgcgtccgggcttgtagacgttccgaggaggaggggaggtacccgccgccgcagccatggcgtcgagcaaggtccagcgtattatgacccagcccatcaacctcatcttccggttcctacagagcaaagcgcgcatccagatctggctattcgagcagaaggacctccggattgagggtcgcattatcggattcgatgagtacatgaacttggtcctcgaagacgctgaggaaatcaacgtcaagaaaaacactaggaaatcactgggccggatactcctcaaaggtgacaatataactttgatgatgaacagtggcaagtgaagattcttatggcaagaacgatgtctggtgctcgcttcgattatctgggacacaatgtacttcattccatcgtncagacttaaatgatgtatcatgtcattgtggtttagtgagaagtgtataa

SEQ ID NO: 96766 - DNA, 505 bp, Zea mays
  unsure (1)..(505): unsure at all n locations
gagaggtgctgattaagcaatagaagtatagtgcaactgctctcggaattcccgggtcgacccacgcgtccgcccgacctcaggaagaaggtgatgcccgccgtcatcgtccgccagcgcaagccgtggcgccgcaaggacggggtctacatgtacttcgaagataatgctggagtgattgtgaatcccaagggtgagatgaaaggttccgctatcactggacctatcggcaaggagtgtgctgatctttggcctaggattgctagcgcagcaaacgctatcgtttgagagcttgttggaatatgttcagacttctatatgatcatcttattatcagttgctaagagggctattgggcttaatgggccctttatgtttgttcactcaattttgtagtaaacagaatttggtataccaaggggatctatatatcaatgtatgccataaaaaaaaaaaaaanannaaaaaaaaaaaaaaaggcggccgctctaaaggatccaagctt

SEQ ID NO: 96767 - DNA, 524 bp, Zea mays
  unsure (1)..(524): unsure at all n locations
atgtgccnggagatgcgtgnctggggcttacgcacatcgacggactgactgtaccggtctcggaattcccgggtcgacccacgcgtccgcggacgcgtgggtgaaccctgccttcaccattctgattggtggcatacttgcgttcggagcagtcttcatcgagctcttcttcatcctgacgtcgatctggcttcaccagttctactacatctttggcttcctgttcctggtgttcattatcctcatcatcacctgtgcggagatcacgatcgtgctgtgctatttccaactgtgcagtgaggactacctgtggtggtggaggtcctttctgacctcaggatcatcagcaatctacctcttcctgtacgccgggttctacttcttcactaagctacagatcactaaagttgtgtcaagcatggctgactttggctacatgctttttggcttcgttgctttctgtgtgcttaccggtacgatcgggttcttacgctggttctgcttcacaagattgaattattcat

SEQ ID NO: 96768 - DNA, 531 bp, Zea mays
  unsure (1)..(531): unsure at all n locations
tggcccgagttgnnnaanaactgagnacgctcagctcgcttcgtattgcctgtaccggttcggaattcccgggtcgacccacgcgtccgcccacgcgtccgaggagttataaatacctttaaccaggacccagcaaatgctgcttccggtttccagatcagtgttggtcttgctggaactaccaataaaactgttaaggtgccgaagaacttcactcttaagactccaggccctgggtacacatgtgggcgtgctattgttggcaggccaacaaagtttttcactgcggatgggcgcagggtaacccaagctctaatgacatggaatgtgacctgcacatattcccaatttcttgctcagaagactccgtnctgctgtgtatctctctcatcattttaataatgacacaattgtggactggccgacatgcttaatgtgcttgcagaacccaaatggggcaaactgtgtgaaccaagattcaactaaatttcaagccggaattgatggtcctggttaatggacccggcagcg

SEQ ID NO: 96769 - DNA, 514 bp, Zea mays
  unsure (1)..(514): unsure at all n locations
atgtcggntgntnaattactgcaaccccgccaatatagtatcnactcctcggaattcccgggtcgacccacgcgtccgcccacgcgtccgtccagatctggagaaatcgcgaagtcgtcgtcgttcggttcggagcggatctgaggcgacgatagatggaggcggcgggatctctcggtctgcagtcctgctccacctcgatggatgatgtctctgcgctgataattattggatcaatttcgataattattagtagatctatgagatatgccgcctggaagaggcgaggtaagctgcagcatgtaaaaaagagaaaaaagatgtgacatcctagaggaggaggcctttgccatgatgggtgcgctcgcatggcaggccaggcaataataaaaagatgattattgcgtgccgggggaggagatcgcacggnggttgatgtttttggccccgggttcttcttcctcatcttgttccgtgttcctgtatgcgttgctttcgctcctgttggtccgct

SEQ ID NO: 96770 - DNA, 528 bp, Zea mays
  unsure (1)..(528): unsure at all n locations
acgactaggccctgcccggattgagcangcatctaccggtccggaattcccgggtcgacccacgcgtccgcggacgcgtgggcggacgcgtgggcggactcttgggtttctcttggcacatgctactgcggttgcaagataccgtacgaaatatcagggtctatatatgcttggaagttggaacaatggctgctcagaagggtaaggtcggaatagtcctggacttcaactgtgacgaggctcttacaaactcacctgatgaccaagcatcatcccaaagagcctgggacttctacattggctggaatgttgatccattgataaacggactctattcacagataatgcaagatctcgtgtaggagatgctgcctaggttcacttctgagcttgctaatctggtgaatggctcggcagactacatcgttatcaacgagtacacatccatctacgttaaggggcagaatctggtccagctggcgcccagtatctactcttccagatggcaggttcaatatgcttttgaac

SEQ ID NO: 96771 - DNA, 528 bp, Zea mays
cgcgtgacttgcctagctgcagtacgtactgtctgtaccggtccggaattcccgggtcgacccacgcgtccgcccacgcgtccgcccacgcgtccgctcagcccggagctcgctatccaggtcctcgtccagggggacaagtccatgacggatgctctggagaaccaagtgaagagcaaggttactgtcaagggtcacctgcacacctacaggttctgtgacaacgtgtggaccttcatcttgacagacgcaagcttcaagaacgaggaggccacggagcaagtgggcaaggtgaagattgtggcatgtgattccaaattgctcggacaataagcctgtgtaccctcgaggtcaaaggaaggagcttttaagtgccgccgggccgggtctggcttcgcctcaactgtacaaggctaggctaacggccgaagccgggtctggcttggtcagctggacaacgctaggctatacggccgacgggatttcaattggcctcttccgaccggatggggaatctccttttttttc

SEQ ID NO: 96772 - DNA, 518 bp, Zea mays
  unsure (1)..(518): unsure at all n locations
aaggttnagcgtgccgttattatgcatcagcagtaatacgtattgctctaccggtcctgaattcccgggtcgacccacgcgtccggaatgttcctgttgttggaggccatgcgggtattactattctgccactcttctcgcaggcgactcctgcaagcaattcgttgtcccaagaagacattgaggccctcaccaagaggacacaagatggtgggacagaggtggttgaagcaaaggcgggaaaaggctctgcaacgttgtccatggcatatgctggtgctgtttttgcagatgcatgtttgaagggtctgaatggagttccagacattgtagagtgctcttttgtgcaatcaactgtgacagagttgccattctttgcctctaaggttcggctcggcaagaatggagtggaagaagtgcttggtctgggtgagctcaacgagttcgagaagaggggctggataacctcaaggcgaactcaagtcttncatcgacaagggtatcaagtttgcccacgg

SEQ ID NO: 96773 - DNA, 524 bp, Zea mays
tgatgagtgtcgtgagtactgactacacagatagcatcgactttcgttccggtcctgaattcccgggtcgacccacgcgtccggatagttcattgtgcatttttatttgaaactaaatttaaatactagatatgctggtatttgaggacggagggagtacattgcacccatgagattaccctctactgtctaacaactgaaggagcaagccccagccctagatacacgacacatacaaggtaaatgccaaaagccaagttgcctacacctaatactgcgtacagcccaagcctaccagcgacattacacaatcagtagcaaatcggtatgaagactggatatcgtggcatatgttgagcttaatatcaagagtcgtccagaactcgagatgctcagtaaatgccaggaatgactctgtatggtactttgttgcatgaaatcttgcagtacttgccgtactttgatgagcaccggtcatcatccctctttgctcggtcaaacaataatatagtcagaaagatcac

SEQ ID NO: 96774 - DNA, 523 bp, Zea mays
  unsure (1)..(523): unsure at all n locations
tggggnaacgtgccgtntagtctacttcagcatgtatactgcactgacttaccggtcctgaattcccgggtcgacccacgcgtccggagatccggagcagccgcagtcccaccgaccccgccgccggtcgccctccatctcgtcgccgctgcctctcgtttctcttttcaataatcaagatgagccgtggtggtagtgccggtggtggtcaaagctctctgggttatctctttggaagcggtgagccccccataccagcagtggcaccagctgcaagtgctccacctgttgagaaaccatctgctgcaaagactgatgcggccaagcaggttgctgctggggttaccagccataccaataactaccacagggctgatggtcagaacactggcaacttacttacggaccgtccttcaaccaaagtccacgctgctcctggcggtggctcttccctgggctacctgttcggtggcaactgatgcccgtgctggtgcgctcaccaaagttatccttccctgcctgg

SEQ ID NO: 96775 - DNA, 528 bp, Zea mays
cgcgtgcttgtcaccgtagatgatagcatgactcaccggtccggaattcccgggtcgacccacgcgtccgctagggttttgctgctctccgaccccgagctccgaaggccgcagcatcaggcgaggcccccgtcgcgtgtgaccgagatggcgctgccgaatcaggggaccgttgattaccccagcttcaagctcgtcatcgtcggcgatggtggaactggtaaaactacatttgtgaagaggcatctcactggagagtttgagaagaaatatgaaccaaccattggtgtggaagttcatccgttggatttcaccactaactgtggtaagatcaggttctactgctgggataccgcagggcaagagaagtttggtggcctcagggatggatactatatccatggccagtgtgcgatcatcatgtttgatgtaacctcaaggcttacttacaagaatgttcctacatggcatatggacctgtgcagggtctgtgaaaacattcccattgtcctctgccgtaataagggt

SEQ ID NO: 96776 - DNA, 525 bp, Zea mays
  unsure (1)..(525): unsure at all n locations
tagtgctaggcccagccctgacagncagctgctcggtcctgaattcccgggtcgacccacgcgtccgcccacgcgtccgcccacgcgtccgagacctttcaaacttggtaaacgaagctgctctgttggcgtgggcgattaaataaagaaatagtggaaaaggttgacttcatccgtgcggttgagcgatctatagcagggatagagaaaaagcatgcaaaattgaagggtaatgaaaaagctgttgttgcgcggcatgaagtaggtcatgcactcgtgggaactgctgtagcaaacctccttcctggacagccacgtgtggagaaattgagtatattgccaagatctggaggtgcattaggcttcacgtacacccctnccgtcacagaggatagatatttactctttgttgatgaactacgtggccgtttagtaacactactgggtgggagggcagcagaggaagttgttttagcatgactggtttcgactggtgcacttgatgacataagacgtgctactgac

SEQ ID NO: 96777 - DNA, 525 bp, Zea mays
agtctgaccatcgcactcatgtcattcatctaccggtccggaattcccgggtcgacccacgcgtccgcccacgcgtccgcccacgcgtccgagaacctctacatcatctccgtcaagggcatcaaggggcgcctcaatcgcctcccgtccgcctgcgttggcgacatggtcatggccaccgtcaagaaggggaagcccgacctcaggaagaaggtgatgcccgccgtcatcgtccgccagcgcaagccgtggcgccgcaaggacggggtctacatgtacttcgaagataatgctggagtgattgtgaatcccaagggtgagatgaaaggttccgctatcactggacctatcggcaaggagtgtgctgatctttggcctaggattgctagcgcagcaaacgctatcgtttgagagcttgttggaatatgttcagacttctatatgatcatcttattatcaggtgctaaaagggctattgggcttaatgggccctttatgtttgttcactcaattttggagtaaaca

SEQ ID NO: 96778 - DNA, 526 bp, Zea mays
atgacttggataatgaaatatagtagtgctccccggtccggaattcccgggtcgacccacgcgtccgcgaaaactattgagtttaaagacataattaaaattggacgtacacatacccaagatgccacgccattgactcttggccaagaattcagtggctacactacacaggtcaaatatggaattgaccgcattaattgtacattacctcggatgtaccagcttgctcaaggtggaactgcagttggaactggcttgaacaccaagaaaggatttgatgccaaaatagctgctgcagtggctgaggaaacaaacctaccctttgtgacagcagagaacaagtttgaagctttggcagcacatgacgcttttgttgagagcagtggtgccgtaaatacaatttctgcatctcttatgaagatagcaaacgacatacgtttgctaggaagtggtcctcggtgtggtcttggtgaactaatcctaccagaaaatgagcctgggagcagcattatgcctgggaaagtta

SEQ ID NO: 96779 - DNA, 527 bp, Zea mays
  unsure (1)..(527): unsure at all n locations
tcgtactgagcccagccttganagngagcctgccatcgtctctgaattcccgggtcgacccacgcgtccgcccacgcgtccgcccacgcgtccgcccacgcttccgcccacgcgtccgagaagatttgattgggttccccaaatccggtgactccattcctgttgttcttcacgtcgaccccgggaacctcccagaaggctctagcgaccccggcgctctgagtgctgtgctgccggcggcgagatccaggagctgcctgccatggtgaaggacagcgcctactacgacgtcctaggggtcagcgtcgacgcgtcctccgccgagatcaagaaggcgtattacatcaaggcgaagctggtgcatccggacaagaatcccgggaaccctgacgccgcactcaagttccaggaacttggataggcctatcaagtttctagtgatcctgggaaaaaggaggcttatgattagtattggaaggagggttttccctaagataacatggtggatcctgcttctgtctttgggt

SEQ ID NO: 96780 - DNA, 618 bp, Zea mays
  unsure (1)..(618): unsure at all n locations
ctgtctagtnccaaactgacgcagcgtctttgtcctgtattcccggtcgaccacgcgtccgctaaaaacctctgaaaagtcgagttctgattcttcngagccccgaaggactacttctgattcgggtgaacctagacgatctaacaggcgaattcaaccaacttcaaggttactagagggcttgcaaagttccctcgtaatctcgaaagttcctggcgagaaggttcctaggagcaattacaaaagtgcattctcaagagggagaactcaagcgcatgggttactgaatgctccatattgcttatatcttccttttggttgtatatcttttattttatctaacgtgtattcttatttatttgtcatatttttctatttgtgtttcatttttctttattatcttttattttattgtattttcttatatatatgttctttattttatactttatctttttattatcttttattttgtatcaaatatttattgttatatatcttcttttgttctaactcttttaaactaatattctttatgtatttccttatattactatttacatgtatcttatgtatatatatcatatatatcgtttctttatctctctaatactgttg

SEQ ID NO: 96781 - DNA, 517 bp, Zea mays
  unsure (1)..(517): unsure at all n locations
tgtgctgccatcgtatatatgtatgcatcaccggtcctgaattcccgggtcgacccacgcgtccgccactcttgtcctcgaccttgattctgacattttggctgcattctctgctgcatacgcagaacttgaatctgtactttctggattgaatgtgcttgttgagacttactttgctgatgttcctgctgagtcctacaagaccctaacatctctgagcagtgtgactgcctatggttttgatcttgtccgtggaacccaaactcttgggcttgtcacgagtgctggtttccctgctggaaagtacctctntgctggtgttgtggatggacgcaacatcttggctgatgatcttgctacatctctcagcactctccagtctcttgaggcttgtgttgggaaggacatgcttgtcgtatcaacttcctgctcgctcatgcacaccgctgtggatcttgtgaacgagactaagcttgacagcnagattaagtctnggcttgcatttgctgcccagaac

SEQ ID NO: 96782 - DNA, 511 bp, Zea mays
atggcttatcatcgccatataagcatcgtgcaccggtccgaattcccgggtcgacccacgcgtccgggtgagttcacgtctggcgcaactcgtgtgctaataactacagatgttcgggctcgaggactggacgttcagcatgtttcacttgtcataaattatgatctaccaaataatcgtgagctttacatccatcgcattggtcgctctggtcgtcttgggcgcaagggtgtggcgatcaatttcgtgcgcaaggatgacattcgtatactgagagatatagagcagtactacagcacacaaattgacgagatgccaatgaatgttgctgatcttatttgagcacctagaggatcaggcagggaacttcttgcagtggcttgacgccctttgcgccaagtgcgcttacgacttgagcaaataggcttcgaactgggtgtggagcagaaattatgtcgatatggcatggcattacctgtatatttaacttgctcaaatctgtaccatttgg

SEQ ID NO: 96783 - DNA, 525 bp, Zea mays
atgggtttgcgatgcggtatattatgcattcccgaacattatagtattgctctaccggtccggaattcccgggtcgacccacgcgtccggccagccgccagcacaaggcgatcgagagtggtgaccaccagtaaactgcaaagtgcaaacgaaacaccgtccacgagaaagcggaggagggagcaatggcggagccgagccagcagcagcagctgcggtcgttcgtggaggtgccggcgggctcccacttccccatccagaacctgcccttcggggtcttccgccggcggggggtgcaggcgcaggctccgcgccccgcggtggccatcggtgacttcgcgctcgacctcgccggcgtcgccgacgcggggctcttcgacgggcccgcgctctccggctccccgtgctgtcaccaggagacgctcaacatgttcttggggatgggccggccgtcgtggagggaggcgcgcgccacgctacagaaaatcctatcagccgacgagcccgtcttgcgtgacaacgaag

SEQ ID NO: 96784 - DNA, 526 bp, Zea mays
  unsure (1)..(526): unsure at all n locations
atggctagnccccgcactcgccgcaccgctgctatccggtccggaattcccgggtcgacccacgcgtccgcccacgcgtccgcccacgcgtccgcggactcttgggctgactggtactacatcagggcttgatgcattgcaaggaagatctacctaaggcaaggcatcggtgtgggtggctttcagaagatctacggtggccgccagaggaatggctcccgcccaccacacttctgcaagagcagtggtgctgttgcacgcaacatcctgcagcagctgcagattatgggcatcatcgatgtcgatcccaagggtggacgcctcatcaccaaccatggaaggcgtgatctggaccaagtggctggaagggtcgctgttgaagcgtgagcagtgtcatctctggtgtcaatggtgtcatgtttgatggttgacaaggcagctctctatttgctcttgtgggttaggattttcgagctcagatgaccttaatgtttattgcatctagctatagcgccacactattttt

SEQ ID NO: 96785 - DNA, 522 bp, Zea mays
  unsure (1)..(522): unsure at all n locations
gtgtgcttgacatagtttgtatagttaggcttctcggtccggtattcccgggtcgacccacgcgtccgcacactttctctccaaggctgtaccaaatgatgcatccaagctaattgagttccaagatgtcgtgcaaagtacaactgaattcgagaacaaacttaagagcatgatgtttcttttgcctgatagaaaggatggcaagctgacccaatttgttgatgatgttgaagttcattttgctgtacggaagagaagtgaaatcttggtgaaagcaaggaacattcttgtacaatatgattatgatagtcctctggaatctggtgaccaaagtgattctgttgttgatctactttttcagccagagaagtgttttacatctaaatcagcacttctagtgatgaaattgggtcatggagaccctaaagatgcatttttgtcatcagcaagaagttctaggagttctgccttgcttctatgggtgttntgctacttataaggctattgtgccgtgcaactata

SEQ ID NO: 96786 - DNA, 593 bp, Zea mays
  unsure (1)..(593): unsure at all n locations
ncgtactaggcccacgccaatgacacgcagcactncttncggtccgtgaattcctcgtggtcgactccacgtcgtctcgctttcatnntcctgttggagggggtccttactcaaacttcatgtatnncagaaaaactctttgcannttcggtgcgtgcgagcaagtattggtgccatctctgcaaccagggtaccctcagtggtcagaaaatctttgtctgagggctccannagatatgcttctgtgatattcggacatnncttaggaaatcgagttcctgcagaatatatgccctcggaaattcgcaaaactaccagtccatcaatgccttgcatnggagatacatctgtggcctcaagnagaggaaacgctcaacgatccccttcttccttttcggattagcccgttgataatccaacctcgaataatgtaaggcataccaaacatttcttcgaaagcctntttcaagtggtgccgagatgtgatgtggcgaaggattttcttggctcgaccctttcatttcgtcgatctcatactattcttattctacatgtttgccataggctcaaataaatgcgaattgaccttgtct

SEQ ID NO: 96787 - DNA, 519 bp, Zea mays
  unsure (1)..(519): unsure at all n locations
gatatgcctgtgcgntaagactacctcgcattagtagtatgtctctaccggtccggaattcccgggtcgacccacgcgtccggctaggttcttctgcagagccttaatatcactcttgaaagccagaagatgccagtgcacatgggtcagcataataaaaggatgagctgccccgccatggcacagctcctctccaataccctgtactacaagcgattcttcccatattacgccttcaatgagctcggtgggcttgacagctaggggaaaggatgcgttttcacctatgatgcagtaggttcctatgagagaaccggttacagtgctcagggaactggatctactttgatcatgccagtcctggacaatcaactaaaatcaccaagtcctctattactccctgtcagggatgctgtcacaccattgtcggagtcagaagccatcgatctagttaaggacgtgtttcgatctgcaactgacagagacatctacactggagacaagttggaaattgaagtc

SEQ ID NO: 96788 - DNA, 515 bp, Zea mays
agtattatagtgcgctagacttaccgcagtatacgtatgtacttaccggtcctgaattcccgggtcgacccacgcgtccgggtgggttggcttctccttcccctccggttctggttcgggttcgtgaggttctccggggttcggttccgtgggtgagcggatcgagatggccgcgtcggatgttgagtaccgatgcttcgtcctgcgcctcagctgggccacagacgaccactacctacacaacgccttcagcacctacggcgaggtcctcgaatgcaaaattatcctcgatcgggagacgcagaggtcccgcggcttcggcttcgtcaccttctccactgaggaggcgatgcggaacgccatcgatggcatgaacggcaaggagctggacggtcgcaacatcaccgtcaacgaggcccaatcccgcggcagccgtggacgctgcagctgctgctactgttgtggccgttgatgcggccgctaccgcagtggcaggcgccgtgatggctgcagct

SEQ ID NO: 96789 - DNA, 529 bp, Zea mays
  unsure (1)..(529): unsure at all n locations
cgtacttggcactagacactatatgtacgcctacctcggtccggaattcccgggtcgacccacgcgtccgcccacgcgtccgaagaactcgaattcttatctatactggaactcagagcataggggggaaagtcgatttatggatggaatcaaatacgcagtatttacagaaaagagtcttcgtttattgggaaagaatcaatatacttttaatgtcgaatcgggattcactaagacagaaataaagcattgggtcgaactcttctttggtgttaaggtagtagctgtgaatagccatcgactacccggaaagggtagaagaatgggacctattctgggacatacaatgcattacagacgtatgatcattacccttcaaccgggttattctattccacttctagatagagaaccgacctaaaggagaatacttaataatatggcgaaacatttatacaaaacacctatcccgagcacacgcaagggaaccgtatacaggcaagtgatatccaatccacgaaataaattn

SEQ ID NO: 96790 - DNA, 519 bp, Zea mays
  unsure (1)..(519): unsure at all n locations
tgtgtaggccccgccttggccagccgcggtctcggtccggaattcccgggtcgacccacgcgtccgcccacgcgtccggcgatgcccgtgctcaaggtccgcacccccatccagtgctacgccgactggaggcgcgccttccgcgaccacttcgccaccttcatgggcaacaccatcgtggagatccaggtcggcatgggccctgccggcgagctgcgctacccgtcctacccggagagcgacggcacctggtcgttccctggcatcggcgagttccagtgctacgacaggttcatgctgagtagcttgaangctgctgctgaggccgtgggcaagccggagtggggcaacgcgggtccggcgaatccgcagctccaaggacgggccggaggacacggcttctttccgccccaaggccggttgaagcaccgagtccgggaggttcttatgagcttgtacttggagatgcctctggagcactgtcagcgcattccgttctccgtgaacggcctggtcatg

SEQ ID NO: 96791 - DNA, 518 bp, Zea mays
  unsure (1)..(518): unsure at all n locations
aggagcgtgtagtntaagnttcccattccgctagnttcangtcttttgcatttcgggtcgacccacgcgtgcgtccacgcgtccggccatctactcttagaaggttcaattagagagacagaggataagatagggccacgagaaatcgatgctgatgactgcgatgtggagcctaaaagcgatgactagagcgatgaagatgatgatgacgacgacactgaagctctaatggcagagcttgagaggattaagaaagaaagagccgaggagaagcttagaaaggagcggcaacaagcagaagaggaggccaagatgaaggaggctgaactgatgcggggaaacccgttgattaatatcaacaatgctggctccttcaatgttaagagaaggtgggacgacgacgtggtattcaagaatcaagcacgaggagagaccaagacaccgaaacggttcatcaacgacaccatcaagagtgatttccaccgtaaatttttttagaagtacatgaagtgacgctt

SEQ ID NO: 96792 - DNA, 527 bp, Zea mays
cgtggtggccaccgactagggggagctacacggtccggaattcccgggtcgaccacgcgtccgcccacgcgtccgcccacgcgtccggaaacacatcttcatcgaagacgacgtacaccccttgggcaagcctccgacgcccaagccgaccccgccgacgtacactccaagccccaagcctcccacacacccgacgcccaagccgaccccaccgacgtacaccccttccccaaagccttcgacacccaagccgaccccaccgacgtacactcccacaccgaagccgccggccaccaagctcgccacctacactccgacgccgccggtgtctcacacccccagcccgccgccaccatactactagaaagcgatgcctaccataccacactgctgtcagtctcttgagcatttaagtggtcctgatcaatggaagggttgtgttctagccagccggcaaaaatgaactgctgatgggaatgatgatggatagaggccactgctaccctactacgtacccctcttttttg

SEQ ID NO: 96793 - DNA, 521 bp, Zea mays
  unsure (1)..(521): unsure at all n locations
cgggctgcatcgactattaagaaggctgcaccggtcctgaattcccgggtcgacccacgcgtccgagagcaccgtccatgacgttgtacttgttgtgtggctccactaggatccccagggtgcagcggctgctccaggacttcttcaacggcaaggagctgtgcaagaacatcaaccccgatgaggctgtcgcctatggtgctgctgtccaggctgccatcctgagcggtgagggcaatgagaaggtgcaggacctgcttctgctggacgtcacccctctgtccctgggtctggagactgctggaggagttatgacagtgctgatcccgaggaacaccaccatccncaccaagaaggagcaggtattctccacctactcggacaaccagcccggtgtcctgatccaggtctacgagggtgagaagacccggacacgcgacaacaacctgctgggcaagttcgagctctccggcatcccccctgcaccccgtggtgtgccacagatcaccgtgtgctttgac

SEQ ID NO: 96794 - DNA, 524 bp, Zea mays
  unsure (1)..(524): unsure at all n locations
atgtgtctgncccatcncgaaacgtactctactcaccggtctggaattcccgggtcgacccacgcgtccggaagtgtgttgagctcttctttgagatttctgagaacaaggaggactacaacaagtttgaggaggctttctccaagaacctcaagcttggcatccacgaggactcgcagaacaagaccaagatcgccgagcttctgagataccactccaccaagagtggtgatgagctgaccagcctcaaggactacgtgaccaggatgaatgagggacagaatgacatatactatatcactggtgagagcaagaaggcaacggagaactccctcatacttgagaagctgaagaagaggggctattatgttctgtacatggtagatgccattgactagtatgctggtgccaactcaaggagtttgatggcaagaagctttgtttttgcaccaaagatggtcatgagctttataagcctttagcctgtatgaatacaagattgactaatgagaactttttgtctg

SEQ ID NO: 96795 - DNA, 519 bp, Zea mays
tggatgtagtgcgttagttagttcccgccttagtagtagtgctctatccggtcctgaattcccgggtcgacccacgcgtccgcccacgcgtccgttctacgtgcacttcatgttaataatgagaaggcaaagatgttgctcaaacctgacaaaacaattgttactgaaccacatcatatatggccaactctgaatgatgaacagtggttgaaggttgaatgtgcactaagggacctcattctttccgattatgcaaagaaaaacaatgttaatacttctgcactcacacaatctgaaatgcgagatatcatccttggtgctgaaattgctccaccatcacagcagaggcaacagattgctgaaattgagaaacagtcaagagagacgactcagttaactgctgtaaccacatggacatcaaatgtgcatggagatgaactcattatcacaaccacaagtccatacgagcaacaagcattcgcatccaagactgattggcgtgtcagagccatctctgcc

SEQ ID NO: 96796 - DNA, 515 bp, Zea mays
tgttctgcccaccttcgagaggctcaccggtcctgattcccggtcgacccacgcgtcgcccacgcgtcgcggacgctgggtggccactcgctgatgcaaactgaaactgggttatggccccgggggaggaggtggcggtggtggtagcggtggacgcggtggttacggaggaccaggctatgggtccggatcagggtatggtgagggccgtggcagcggaagtgctgctggagggtatggacatggtggcggccgcggtggcggtggtggtgagggctcgatagctggtggctctgggtacgggtccgggcaatgatctggctaccgagctggcagcggtgcttgcgggggatattggagtggccgatgtcgttgatgatgaagttcatgttctttctcatccttgtattcaaagttcttagctttcattgtgcgacttttgatgtatactggttaatgtcccttttaatgtcactctttaccctattctatttttgggctatttttccattctt

SEQ ID NO: 96797 - DNA, 529 bp, Zea mays
  unsure (1)..(529): unsure at all n locations
agananataacctaaccccacatcgatcacctcccggtcctgaattcccgggtcgacccacgcgtccgcccacgcgtccgcgacagcagccgcatctgtgttttggacaagcccaacataccaaagcctgcaccagagacggagaggctagtcgttatgaggggcgactacagcaaaatggacacatattatgtcatgcccaatgggaagcgtgcaaggtgtgctggtgatgtggataagtttctggaggcaaatccggagtacaaagaccgcatatctgcttcggatttcagctttgcgccacccaaggttgttgaggagactgtttctcacaaccctgcctggcaagctgccaaggccaagaagcaggagaaggcagaagcacaaaagtgaatgatactcccaaccgtgcttgtgtcatgtttaggtgatagtccgctcaagatcatgccccatcctatctagtgtgtacttgtctatcttgactgaagtcgatgtttaggtctttttagctgaatttgcttttcag

SEQ ID NO: 96798 - DNA, 524 bp, Zea mays
  unsure (1)..(524): unsure at all n locations
atgtagagtcgtatagtcagctacacgcatactacgtattngctctaccggtcctgaattcccgggtcgacccacgcgtccgcggacgcgtgggcggacgcgtgggggggtttttgagttttgacaatcagaacaatagcctgcaccgtccaccctcacgcaactgcctcttcgcggcggcgcaaaacaccaacacgtcttctccggttgcgaggagggtataggatttcgccgcggcgagatgtcggcgtacgacgaggtggagatcgaggacatggagtggaacgcggagctgaaggcgtacacgtacccgtgcccctgcggcgacctcttccagatcacgctcgacgacctccgcatcggggaggagattgcgcgctgcccgtcgtgttctctcttcctcaccgtcgtttacaacgccgaggaccttgctgacgccaatgagccgacccacaagccgtncccgaggccagtcgccgtcgcctgatgtggcccgtgccccgcgagatggacgcatggaaatt

SEQ ID NO: 96799 - DNA, 571 bp, Zea mays
  unsure (1)..(571): unsure at all n locations
gagtgntnaatgcagggtctangtagtaacgtcgcggtcctgaattaccgggtcgacccacgcgtcctgctctcgcagcgtgcgcctgacccgcgtcatggccgctatctcacagcatgtgccatgttacgtggaaagatgagcaccaaggaggtggacgagcaaatgatcaatgtccagaacaagaactcgtcctacttcgtggagtggatccccaacaatgtgaagtccagtgtttgtgatatcccgccacgcggcctctccatggccttcaccttcattggcaattccacctgcatccaggagatgttccgccgtgtgagcgagcagttcactgctatgttcaagaggaaagctttcttgcattggtacactggtgagggcatggatgagatggagttcactgaagctgatagcatcatgtacgatctggggtctgagtaccagcagtaccaggatgccgctgcagatgaagaggaatacgaggactaggaggacgtccatgacgagtaatgtgatcttggaccctgctgcatactgttccggtttctggacctgggtttcatgtaag

SEQ ID NO: 96800 - DNA, 550 bp, Zea mays
  unsure (1)..(550): unsure at all n locations
ccgtgttttccagcntacatgagtaacgtctcggtccggaattaccgggtcgacccacgcgtccgcgcacccgcgcgccaacgcgctcttcaccaagaccgtcaccaagggcgactgtcttcgacttggggcgcggcctcgtccactttcagcagaacagggggcacggccccgccgccgtcgtcgccgccttcaacagccagctccagggcacgcaggccatcgccatgacgctcttcggcgccgtgccgcccgtgccctccgacatccttgccaaggccttccgcatcagcagcggcgaggtggaccacatcaaggccaacttcgcgcccaattagagatccaacgtctgcattccctggatttgctcaataataaatccccgcggtgtgcatttcgattggatcgtcttcggttggtttgcttcgagacattgctgaccgcgcttgtcactgctaatttgtgcggagcggaggagttgcttgtgctccgataaattagataaataatcaattctatcgtcgtcaaaaaaaaaggcaaagggcgtgcg

SEQ ID NO: 96801 - DNA, 567 bp, Zea mays
  unsure (1)..(567): unsure at all n locations
gagtgattcccgtagggccctcatagtatcgacgtaccggtccggaattcccgggtcgacccacgcgtccgcccacgcgtccggctgacccgcgtcatggccgctatctcacagcatctgccatgttccgtggaaagatgagcaccaaggaggtggacgagcaaatgatcaatgtccagaacaagaactcgtcctacttcgtggagtggatccccaacaatgtgaagtccagtgtttgtgatatcccgccacgcggcctctccatggcctccaccttcattggcaattccacctccatccaggagatgttccgccgtgtgagcgagcagttcactgctatgttcaggaggaaagctttcttgcattggtacactggtgagggcatggatgagatggagttcactgaagctgagagcaacatgaacgatctggtgtctgagtaccagcagtaccaggatgccactgcagatgaggaggaatacgaggacgaagaagaggtccatgacgagtaaggtgatcttggaccctgctgcatactgtaccgtntcttgaaccggctttttttta

SEQ ID NO: 96802 - DNA, 563 bp, Zea mays
  unsure (1)..(563): unsure at all n locations
tgtgtgtgacctggcctctcgtagtatcncccctcnggtcttgaattcccgggtcgacccacgcgtccgttttggtttgaacggtgcggttttatttcgactttgggaaatcgaaaacggagacagatgattatacagattgtttccgtggattacacacagatatggtacacgaaggcagagcacctcgtggcgtgggtaggagggtaccttcctgcttggctgcttgctttactgaacgaagcacgaacccgggccgaccggcggcctccgagcgtagtagttcgtgacaggagccgcggcgaccccacggtggttcagcaggcacctgaagcggtgtagccgtgacagcacggtcgtctcgacgtcctgggcggatatggcctncagctggctccacagacgctctgccgctgctgcggctcggggccagattgtctgcaggacgtctgacgtgtcggccgtctcgccccacatgcagaccttcccgncgagcaccagcttctgctgctctctgtcgcttgatcccggtagcgggttgccgctttaaaaaatctttcaag

SEQ ID NO: 96803 - DNA, 519 bp, Zea mays
  unsure (1)..(519): unsure at all n locations
cgagaggtngnttgttaacgtacatcgaagtatctttgcaaatccgctcncggtctggaattcccgggtcgacccacgcgtccgaaatattctatttatgatcaaacagtgtaccttaacgattatcataagaagatgttgaaggatcaatatgagggactgaagacaatcgagcagattacaatggactcagcttcggtcgagaccaatatgttcaagctctgcaaggtgaggtttgttcagtttggccaaaaaggcatcccctacctgaacacctacgacggtcgcgctatccgctacctcgacccgctcatcaaggccaacgacaccatcaagatcgatctgcagaccaacaagatcatggacttcatcaagtttgacgtcgacaacatggtcatggtgactggcgggaggaacaccaggcgtgtaggagtcatcaagaacagggagaagcacaagggcagctttgagaccatccacgtgctgcttggagctttttgctatgtctagttttctcct

SEQ ID NO: 96804 - DNA, 511 bp, Zea mays
  unsure (1)..(511): unsure at all n locations
tgacacggcagtatgncctaaaatacgactgattccagntatcatccggntttgaatccccgggccgacccacgcgtgcgaaatgttctatttatgatcaaactttgtaccttaacgattatcataagaagatggggaaggatcaatatgagggactcaagacaatcgagcagattacaatggactcagcttcggtcgacaccaatatgttcaagctctgcaaggtaaggtttattcagtttggccaaaaaggcatcccctacctgaacacctactacggtcgcgctatccgctacctcgacccgctcatcaaggtcaacgactccatcaagatcgatctgcataccatcaagatcatggacttcatcaagtttgacttccacaacatggtcatcgtgactggcgctatgaacaccaaacgtgtacgaatcatcaagaacattgagaaacacaagggcagctttgtgaccatccacgtgctgcttggagcttttagctatgactaattcct

SEQ ID NO: 96805 - DNA, 558 bp, Zea mays
  unsure (1)..(558): unsure at all n locations
cgcggttcctagctcgagtagagacgtctgcgctcctgaattcccgggtcgacccacgcgtccggcaaccgcttgcgtcagacgcacactgacggagagtgatcactgatttctggtcatggcaaccgtaactgaggaagttgctccggtcgtcaccgtctccgaggagccggcgccggaagcggcgaaggaggtggtggagaagccggaggaggggaagaagcccgacgaggagggtgacgagaggaagaaggccgaccccgccgccgagaaggagaagaaggcgaggaagccgcggagcatgaagcccaagtccgccgggctgcaccacccgccctatttcgagatgatcaaggaggcgatcctgtcgcaggacggcgggaaggtcggggcgagcccgtacgcgatcgccaagcacatgggggagaagcaccgggacgtgctcctcgccaattaccgcaaggtgctggcagtgcaactgcgcggattcggcgncaaggccggctcgtcaaagtcaaggctnctttaagctctccgtnctcctaggaaaggaacccc

SEQ ID NO: 96806 - DNA, 561 bp, Zea mays
  unsure (1)..(561): unsure at all n locations
cgcgtgtgcctaggctcgatgcagtangtctgtaccggtccggaattcccgggtcgacccacgcgtccgagtaccggaaattggcagacagctcacatgagaaaaatgaagctcggagggagttgcttgaagtgatggcccacaggtctcatgttgacagcagtgttgagctcattggaagccttctctttggctctgaggacggtccaagggttctgaaagccgtccgtgcagctggtgagcctctcgtcgatgattggagctgtctcaagtccacggttcgtacttttgaggcgcaatgtgggtcgttggcgcagtatgggatgaagcacatgcggtccttcgcaaacatctgcaacgctggcatccttcctgaagcagtgtcgaaggtcgctgctcaggcttgcaccagcattccttccaacccctggagttctatccacaaagggtttagcgcctaagaatcataaggtgaggcgaaatatttcagccgctccaccgcaacgaactgggttacattaccagtcctcaagggggtcctagttcttggaccataggtga

SEQ ID NO: 96807 - DNA, 551 bp, Zea mays
  unsure (1)..(551): unsure at all n locations
cgcgactagcctagtcncattaccgtactgtctgtaccggtccggaattcccgggtcgacccacgcgtccgcccacgcgtccgattccaaaaaccgtgatatgaagagaacagaatcttcggctcccatctgcaacatggaagatatagaagagggatttgaaggttacgaggatgaaaggtcactgcttatgtctcagaagagcttggagaaacgctttggccagtctccaatttttattgcatccacctttatgactcaaggtggcatacccccttcaacaaacccaggttccctgctaaaggaagctatacatgtcattagttgtggatatgaggataaaacagaatgggggaaagagatcggatggatatatggctctgttactgaagatattttaactggtttcaagatgcatgcaagaggttggatatccatctactgcatgccacttcggccttgcttcaagggttctgctccaattaatctttctgatcgtctcaaccaagtgttacgctgggctcttggttcagntgaaattctacctacca

SEQ ID NO: 96808 - DNA, 563 bp, Zea mays
  unsure (1)..(563): unsure at all n locations
atgctgttcctcagccccgcatgnagcatcaccgcaccggtccggaattcccgggtcgacccacgcgtccgcccacgcgtccgcccacgcgtccgcccacgcgtccgcccacgcgtccgcccacgcgtccgaggagaagctcgccggttcctataacatgttggggttaaactactacacctcacggttctccaaaaacatcgatatctcaccaaactactcacctgtgctcaacactgacgacgcctacgccagtcaagaagttaacgggcctgacgggaagcccattggtcctcctatgggaaatccatggatctacatgtaccctgagggcttgaaggatctccttatgatcatgaagaacaaatacggaaacccacctatctacatcacggagaacggaatcggggatgttgataccaaggagacacctctacccatggaggatgccttaaatgactacaaaaggctagattacatccagcgccacatcgctactcttaaggaatcaatagacttgggatcaaatgtgcaaggctacttcgcttggtctctgctggaca

SEQ ID NO: 96809 - DNA, 505 bp, Zea mays
gtaagtgcgtttgctcagtcctgaagatacgtattgctctaccggtccggaattcccgggtcgacccacgcgtccgcccacgcgtccgcggactcgtgggtttttttttttttttttttttttttttttttttttggtttttttggatgggatgacaaccatattgtttgaaagcttcagagttctgatacagattagtccagattcctgatcaactcaaaacacaagccacttcatatgcactgtgccaccttctgatacaaatcctgtggccaattccggctcatgttgcttgctacaaggtttgcgatctttgatttgacagcgcgcaaggtcccatcagtatctctaacattgtcaatgcaatttagagcaaccttcaggagatctggcacgcaagcttgaacatggggtgacaagttcctgaaaatgtcaacagtcacatttggagccttggggtccaaatgaaggaagggtagcctgatggtttccctcaaagcatctc

SEQ ID NO: 96810 - DNA, 549 bp, Zea mays
  unsure (1)..(549): unsure at all n locations
tgctgctgcctagcctgagtacgtactgctctaccggtccggaattcccgggtcgacccacgcgtccgcccacgcgtccgcccacgcgtccgcccacgcgtccgcccacgcgtccgtccacgcgtccggccacgcgtccgatgaagggaagccattgcctctaattcagaaagcttttattggtctgactgctggagcaattggtgcttgttttggtagtcctgctgatctggcactcattagaatgcaagccgactcgaccctgccagctgcacaacgacgcaactataagaatgctttccatgcactctaccgtatcagtgctgatgagggagtccttgcgctttggaagggtgcaggtccaactgtggtgagagctatggcactcaatatgggtatgcttgctttctatgaccagagtgtcgagctaattaggaacaaattggcgcanggagaaattctaactgtgttggagcaagcctgttctgaatcttcgcttaacatgcagtttgcccttggctatgtgaagacacagttcagaaagtgcca

SEQ ID NO: 96811 - DNA, 548 bp, Zea mays
  unsure (1)..(548): unsure at all n locations
cggtacttgcctagcttcangtaagtactgcctctaccggtccggaattcccgggtcgacccacgcgtccgggttaataggtacatggagttggctcaccgagttgacgaagctttggggttcatgtcaggtgctgggctccctttagatcaccctataatgacaacagcagaattttggacgtcacatgagtgtcttcttctaccttatgagcaagcgctcactcgtgaggattccaccacgggcctctattatgactgctctgcccacttcctatgggtcggagagcgcactcgccagcttgatggtgctcacgttgagttccttcgaggcattgccaaccctcttggtatcaaggttagtgacaagatggacccagcagaacttgtgcggttgattgatatattgaatcccgaaaacagggctgggagaataaccatcatcacaagaatgggacctgaaaacatgagggtgaaacttccacacctgatacgcgctgtcccgtgggccggtcagataggtacatgggttactgacccaatgcatgg

SEQ ID NO: 96812 - DNA, 508 bp, Zea mays
gtaagtgccgttgtaagaacggggagattactgtatcgctgtaccggtccggaattcccgggtcgacccacgcgtccgcaatgatctctgcccagtactaagtgtgcagcagctttacaaaatatgcactcagtactgggatgataaatataacacagagagtgtgtcagaagaggtccttgaggagatgcgaacattgatgaccaaggaatcaagcgatgaaactctggggaacacctttctactggatgatgaaattagcttgcccatatcacttgaggagatagcagattctatggatgccaaagaatttcagaatgttgccccaccacaagagcttactgcaattcctgcctttcaattcttgaagagctaagccctggaaggcctaggcctacgttgctgcacgggcatacgcaaatacatctagattcttccatcagatgttatagggtttcaattctccttgtgctgtgtaattattttgtccttgtaaattgggtttgtt

SEQ ID NO: 96813 - DNA, 555 bp, Zea mays
  unsure (1)..(555): unsure at all n locations
agcggttatcccagctcgacangcagatctaccggtccggaattcccgggtcgacccacgcgtccgcccacgcgtccggctatcaatgctcctgtacagggcagtgcagctgatgttgctatgtgtgcgaatgcttgagatagacaggaatactcgtcttaaggagcttggttggacgctactcttgcaggtgcatgatgaagtgatactggaagggccttcagagtctgcggagctggccaagtccatagttgttgagtgcatgtctaagcccttctatggcaccaatatcctgaaggtcgaccttgctgttgatgccaagtgtgcacagaattggtatgcggccaaatagacctgttaagtgtcccagaagggcgtcaattccttcggtgaaactcggcggattttgaactggtatctgctggctgctgctagtagcctagtgagctcatctgcacgtggatgccatgcactgattatntcggtgttgatctggacagtgaggcgtcagcactgagcagtgaatgcactgtacactatttccgatttcctata

SEQ ID NO: 96814 - DNA, 550 bp, Zea mays
  unsure (1)..(550): unsure at all n locations
agcggctaatgttaggcctcactgcactaacctgcccggtccggaattcccgggtcgacccacgcgtccgaatgccttgagaaactgagcactctgttaagttgcttgaagcttcctctaacatcctcaaagcgtaccattcgtgatttctgcattgaaagcgcgtccatagttttctgtactgtatctagctccacaaaagtaaccgctaacaaaaagctagagttgcttgtggttgatgaggctgcccagctgaaagaatgtgaaacactgatccctttgcgtctgtggaccttaaagcatgctgttctaattggagatgagtgccaattaccagcaacagtcaaaagcaagatgcattatttggaagaagcctcttcgaaaggttgagttcacttgggcacgaaaagcatctactcaatacgcaatacagaatgcatncatccattagtattttcccgaacactagctnttatgaaaggaaggatctcggatgcatctaatgtcatggaaaaagaacctcgaaggatgtatcttccaggttctatgt

SEQ ID NO: 96815 - DNA, 544 bp, Zea mays
  unsure (1)..(544): unsure at all n locations
gcgggtttgnccaggctcgacgcaganagctaccggtccggaattcccgggtcgacccacgcgtccgcgctgccgcacttctacccggacggggacttccagatcgcgtgcgaccacttcacgggcgaggggagcgacctgaacaacgcgcccaacggcgggttcgcgtacgtgcggtccagcgcggagacggccgagttctacaggttctggtacgcggcgcgggagcgccacccggggctgcacgaccaggacgtgctcaacgccatcaagcgcgacccctacgtgggcgagctcggcgtccggatcaggttcctcagcaccgagctcttcggcggcctctgcgagcccagccggaacctgagcagggtctgcaccatgcacgccaactgctgcatcggcctgcgccgcaagatcggcgacctcaacgccatgctccaggactggaggcggtacagggcgctgccgcgcgaggagaagcgcgaggtgtcctggaccgtgccgtgcaactgagtctttttcacacacaagaggaacgtgtgtt

SEQ ID NO: 96816 - DNA, 544 bp, Zea mays
gcggcttcctacgcagatgactgattgcatctaccggtccggaattcccgggtcgacccacgcgtccgccttctctccggtccgggaatcggaagctcagggcagaagtttagccatggggcagacgcatcttttgttgctcgcttgtttctgggtcctgtcaacatgctccttgctacttgatgcttcctccgatggactgttaagaatcaacctgaacaagaagagactggacaaggaagctttgactgctgctaaattggcgaagaaggagagccaccttcgaaggtctgtgggtgctgaccagtatctcagtgcctcaactgatgacatagtccctttggacaactacctggacacccagtactttggacagatcagcatcggcacgccaccacagaacttcacagtgatattcgacactggaagctccaacttgtgggttccctcatccaagtgctacttttcgatagcgtgctacttacaccataaatacaagtcaaccaagtcgaagacttacacaaagaaatggagaatctttgta

SEQ ID NO: 96817 - DNA, 557 bp, Zea mays
  unsure (1)..(557): unsure at all n locations
cacggcttggccagggcacctacngagnaggcancggtcctgaattcccgggtcgacccacgcgtccgcattgacgagcatggaaaatggatcggggggctctagctttgataggctgtcttcaagaagggaaagggaaattatcatacgaggagttctttcagtaacagcgatatctggggaggatctgcctgcgatggatatgaatggaaaatctgacccatatgtcatactttctctcaagaagacacagacaaagtacaagacaagggttgtgaccgaaagcttgaacccagtatggaatcaaacttttgattttgtcgttgaagatggtttacatgacatgcttatgttggaagtatatgatcatgacactttccgtagagattacatggggcggtgcatgctgaccttgacaaaagttttgctggaggaagagtacaaggaaagcttcaacctggagggagcgaagagcgtgaagctgaacttgcatctgaagtggtcggcacaggcaatcatgcgtgaatcgcgttgaagcgggcaacttaaaggctaag

SEQ ID NO: 96818 - DNA, 543 bp, Zea mays
cactggtatcctcagctcggtcgcatgcctccccggtccggaattcccgggtcgacccacgcgtccgcccacgcgtccgctccaagctcactggcacgcagtacgcgtcgtcactggacttgctccggctcttcgcctacggtaccctgaatgactacaagagtaattctggattccttccagcactgttgcctgaccaggtccgaaagctaaagcagctcagcgtgctaactctggcagagtcaactaagatactaccgtatgatcagctcatgcaagagttagacgtttcaaatgtaagagaactcgaagatttcctaatcaatgagtgcatgtattcgggtatcgttagaggcaaactggatcagctgagaaggtgctttgaggtacaatttgcagctggaagagatcttacacctgatcagctaaagaacatgatagagactttgtctgattggtggggacatcagatagactggtgcaatcaaattcaggagaaaatcaagtgggctgacccattgagtgaggtgaacaagaagcacc

SEQ ID NO: 96819 - DNA, 546 bp, Zea mays
  unsure (1)..(546): unsure at all n locations
cgcgactagccctagtcacattaccgtactcacgtaccggtccggaattcccgggtcgacccacgcgtccgcccacgcgtccgtgctttctatatctggtatcgtcgccagcatgggtagaggaaggattgagatcaagaggatcgagaacaacacgagccggcaggtcaccttctgcaagcgccgcaatgggctcctcaagaaggcgtacgagctctccgtcctctgcgacgctgaggtggccctcatcgtcttctctagccgtggtcgcctctacgagtatgccaacaacagtgtcaaggctactgttgagaggtacaagaaggcacacaccgttggctcttcctctgggcccccgctcctagagcacaatgcccagcaattctaccagcaagaatcagcaaaactgcgcaaccagatccagatgctgcaaaacactaacaggcacttggttggtgactccgtgggaaacctgtcactcaaggagctgaaacagcttgagagccgnctttgagaaagcatctctaagaatcaggccagaaaaag

SEQ ID NO: 96820 - DNA, 553 bp, Zea mays
  unsure (1)..(553): unsure at all n locations
agcggcttccatccgaagatgactgattcctctaccggtccggaattcccgggtcgacccacgcgtccgcggacgcgtgggcgaactggcgcctataaactgggtcgcctctggtttccaaaagacatgtggtgacttcagggttgggagatatcaggtgagcgaaacggtgaacatattttcacatagagtgaggtggactaaaggtccccgtggcatcatcaggatcgttccccagaaaggggacacgtgggccttgtaccgtaactggtcccccgactggaacgagctgacgcctgatgacgtgatatacaagtacgagatagtggaagtcgctgatgatttcactgaggagcgagggctgactgtcatcccgttgctgaaggttgccggattcaaagccgtcttccacagacacgtggatcccgaagaggtgaggaggataccaaaagaagagctgttccggttctcgcaccgggttccttctcgtctcctgacnggcgaagagggcagcaatgccccgaaaggctgccatgaactggacccttgttgc

SEQ ID NO: 96821 - DNA, 543 bp, Zea mays
  unsure (1)..(543): unsure at all n locations
cggtgctgancctagccacctacgcactgacgtaccggtcctgaattcccgggtcgacccacgcgtccggggttggcttctcctccccctccggttcgggttcgggttcgtgaggttctccggggttcggtttcgtgggtgagcggatcgagatggcggcgtcggatgttgagtaccgctgcttcgtcggcggcctcgcctgggccacggacgaccactccctccacaacgccttcagcacctacggcgaggtcctcgagtccaagattatcctcgatcgggagacgcagaggtcccgcggcttcggcttcgtcaccttctccacggaggaggcgatgcggaacgccatcgagggcatgaacggcaaggagctggacggccgcaacatcaccgtcaacgaggcccagtcccgcggcggctacggcggtggcgggcgccgtgatggcggcggcggctacggcggtggcggctgcggctacggtggcggcggtggctacggtggtggtggtggcggctactgcggtgggcaccctggcgtgggtc

SEQ ID NO: 96822 - DNA, 512 bp, Zea mays
  unsure (1)..(512): unsure at all n locations
aggtgcagtgcgtntggctgatcaccgcatgctacgtactgtccgtaccggtccggaattcccgggtcgacccacgcgtccgcccacgcgtccgggaggccaagcgcacatcgttctgctgcctgccgccgtcggtgggctgggacgtggcgcgcacggaggccgcacggttcctccgcgcgcgcgggcccttagacctgacggccccgcagctactgcggctggcctcgctgagccgggcagggcccatccggcttgggctcgacattggcggcggcacgggcacgctggcggcgcggctcaagaagctcgtcaacgccacggtgctgacgacaaccatgaatctgggcgctccctactcggaggcggcggcggcacgcggggtggtgccgctacacgtgccgctgcagcagcggttcccggtgggggatgggaccatggacgtggtgcgggcggggcacgccgtgaaccgttggatcccggaggtggcgctggagttcctgtggtacgat

SEQ ID NO: 96823 - DNA, 510 bp, Zea mays
  unsure (1)..(510): unsure at all n locations
agtgacggcgtntgtacgatcccgcagtatgacgcactgcctgtaccggtctcggaattcccgggtcgacccacgcgtccgcccacgcgtccgattcgcacacacccacgccgtcggatcctcctgccctccccacgtccagctctctccgccgaagaatcggcggcggcggcggcggcgagcgccttcccttgtcaaaatccacccggcggcagagcagagcctcgttgctgaggaggggagatggcaggcatgaccgatatgccgatgaggccggcgcggccgggcccgccgatgcagcaccggggccctccgccgatggcgcgcctccgccccgaaccaatcgaccgcgagaagacctgccctctgctgctcagggttttcacaagggttgctggtcaccaccaaaatgaagagttttctgtgagagggaaagaaccaaaggatgaagttcagatttacacatggaaggatgccactctccgtgagcttactgatnctgtgaaagag

SEQ ID NO: 96824 - DNA, 551 bp, Zea mays
  unsure (1)..(551): unsure at all n locations
agaggttatcctagttccgatangcatgatctaccggtccggaattccggtcgaccacgcgtncggactggtgttccgcctctctgggaccggttctgttggtgccaccatccgtgtctacatcgagcagtacgagagggactcctctaagaccggcagggattcacaggacgcccttgctccgctggttgatgttgcgctcaagctctccaagatgcaagagtacactggacgctctgcccccaccgtcatcacataaattttgaagtgttttagaatgagttgaggcgcttacacaaactttcattccggcctcttgttccatagtttttcttgcatgttacatctcaccgatgaataaaatgtatgtatcagacttgtctcgttaaaaaaaaaaagaaataaaaagggcggccgctctagaggatccaagcttacgtacgcgtgcatgcgacgtcatagctcttctatagtgtcaacctaaattcaatcactggcccgcggtttacaacgtcgtgacttgggaaaaccttgtcgttcccaactttatc

SEQ ID NO: 96825 - DNA, 540 bp, Zea mays
  unsure (1)..(540): unsure at all n locations
gcgtgttggcctagcncgatagacaagtgcttcggtccggaattcccgggtcgacccacgcgtccgagcgtcaagagcgtcaacatgggcaccgtcgccaccatccccggcaagtgcggcgtctccgggggattccccatcagcatgtccaccgactgcaacaagatcagctaagttacgacgaccaagctaataagcctaccgaacgtacacgtacgtcccgcgcgctgcacgagtgatgaagccagggaagaaataaaataaagctagctgtattgccaggagcagcatgcagtatcgatctatatatatactgtactgtagtactctattatatatgtatgtgtggcctgcagtgcgagttgcttcgatccacctacttgttcagacagttgaaaaaaaatctaaatccatatccattgcttgtgagtttgggtggactgttagatgttacttgacctatagatgtgcaaaataaagggcgggcctttaaaggatcacattttaagtaccggtgatggcaagtataaagttttttaa

SEQ ID NO: 96826 - DNA, 559 bp, Zea mays
  unsure (1)..(559): unsure at all n locations
tgcgacttgccctagctcgactagcgactgtctgtaccggtccggaattcccgggtcgacccacgcgtccgcaggagcacatcgaccttggtatcaagtacgatccttcaacaggcatctacggaatgggcttctacgtcgtgctggagcgtgcgggctaccgtgtggcacgccgcaggaggtgcaagtcccgcgtcgggattcagcacagggtgaccaaggaggactccatgaagtggttccaggtcaagtacgaaggcgtcatcctcaacaaggctcaggccaacacgttgtaaacctcacctgtgggcaaaacagctctctggtctcttctcctcctccgtgtcaacgcaagaccaccacccacctcgccaggcttttttgggtttaatttgtgttctcagccctgatgtttagtctgctagcactctgtgggtgctgttgtcgcaagatcaccaccatgtcaattatttccgtgcccttgtcgcaaaaaanaaaaagncnnnnanatacaaaaggaaaacctggtaaaaacacagtttgtacttaatattagaaa

SEQ ID NO: 96827 - DNA, 510 bp, Zea mays
  unsure (1)..(510): unsure at all n locations
cgtgcgtgtcgtntattcagaatatacgcagtntattgtatcgctctaccggtccggaattcccgggtcgacccacgcgtccgaatctctggaagacagctatcagcacaccaaatatcacaagcaaacaaagaaccagtgggcccgtgatgatcctgcatttgttgttattctgattcttttcctcgtgtttgcaacatcagcttactgtgcagcatatggagagagtgcctcacatgctgctctaacaatcacttcggttgtgtttctccatttcttgtttgctgggatagttttggccacactttgctggttccttacaaattcttacttgagagaggaacctaacagccatgttgttgagcaacgcgtggagtggctctatgcatttgacgttcattgtaactcgttctttcctgcgtttgtcatcctatatgtggtgcagtattttctgtcgcctctattggtcgcgcatggcttctttccagctttgntatctaatctactctt

SEQ ID NO: 96828 - DNA, 513 bp, Zea mays
  unsure (1)..(513): unsure at all n locations
aggatgagtgcgtntcgttcgagacccgcagattacagcatctgctctaccggtccggaattcccgggtcgacccacgcgtccggcagcagccacctctccggccactcggtagtgcctctggtgatggggcctctctgataatgaaatctgtgctggatagagcgaccgagctactggcggatccccattccgcagccaactacagcagatcagcacgttcgctttggcatgcgtcgtttgatgctttctttggactgctgacgaagtactgtgacagcaagtatgaaagtatcgtgcagaggtttgccatgcagggatccaactccatgggaggacctgaaaccaccaaagcagtcagcagggagatgcccgttgagctgttacgtgcgagtcttcctcatactaatgagcagcatcgtcagacactgctagattntgctcggaaatctacgcatctgcctggtttcagccctactgctaaccgtggacttgtcaattctgaatcagttcc

SEQ ID NO: 96829 - DNA, 513 bp, Zea mays
  unsure (1)..(513): unsure at all n locations
nagatgcggccgtatagacagtatacccgcatagtactgtattgctctaccggtctcggaattcccgggtcgacccacgcgtccgggttcagtaacggaggatattctgactgggtttaaaatgcatgcaaggggctggcaatgaatctactgcatgccaccacgaccttgtttcaagggttctgcaccaatcaatctttccgatcgtcttaatcaggtgctccgttgggctcttgggtcagtggaaattctgcttagtagacattgtcctatctggtatggttacaatggacgattgaagcttttggagaggctggcttacatcaacactattgtatatccaatcacatccattccgcttattgcctattgtgtgcttcccgctatctgcctccttaccaataaatttatcattcctgagattagcaattatgctgggatgttcttcattcttcttttcgcctccatttttgccactggtatattggagctcagatggagtggtgttggcat

SEQ ID NO: 96830 - DNA, 552 bp, Zea mays
  unsure (1)..(552): unsure at all n locations
cacgctcttgcctagcccgatangcagtagcatccgcnctgtaatacccgggtcgacccacgcgtccggaaactgccaagaacagctcctcagttgaaaagagctatgagctacctgatggccaagtggtgaccattggtgcagagagattcagatgccctgaggtcctcttccagccatccatgattggtatggaggctgccggaatccatgagacaacatacaattcaatcatgaagtgcgacgtggatatcaggaaggacctctacggcaacattgtgctcagtggaggttcgactatgttcccgggaatcgctgatcggatgagcaaggagatcacttcccttgcaccaagcagcatgaagatcaaggtcgttgcaccgtctgagaggaagtatagtgtctggataggagggtccatcctagcctcgctgagcacttttcaacagatgtggatatctaaggaggaatacgatgagtctggcccggcaatcgttcacaggaagtgcttctaggctttgcaagttcctcatcgttgcctaatcttaaaac

SEQ ID NO: 96831 - DNA, 543 bp, Zea mays
gcggtttgcatcgatactactgtgtatctgcttcggtccggaattcccgggtcgacccacgcgtccggcactcgacaccagcgtccaacgggatggcgagcctgaccatgccgccgatgccggcgtggccgcggcaggacgccatcgacctccacaaagcattcagagggttcggttgcgacagcacgacggtgaccaacatcctggcgcaccgcgacgcgacacagcgcgcgctgatccagcaggagtaccgggccgtgtttaaccaggacctggcccggcgcatcgcgtccgagctgagcggccaccacaagcgggcgatgctgctgtggatcctggacccggccacccgcgacgccaccatcctgaagcaggcgctcacgggcgacatcaccaacctgcgggcggccacggagatcgtctgctcccggacgccgtcgcagctgcagatcatgcgccagacgtaccgcgccaggttcggctgctacgtcgagcacgaacgtaccgaacgcacgttcggcgaacaacaacggcttctggtcg

SEQ ID NO: 96832 - DNA, 550 bp, Zea mays
  unsure (1)..(550): unsure at all n locations
cgcgactgcctcagtngactaccgactgatctaccggtccggaattcccgggtcgacccacgcgtccggacaccgcgtgcgaaccaagcagaccacaacaagaagaagcgtagtcgtcgccggaaggaaaggcgcggagcaagatgtcgtggcaggcgtacgtcgacgagcacctgatgtgcgagatcgaaggacagcatctcagcgccgccgccatcgtcggtcacgacggcagcgtttgggcgcagtccgagagcttccccgagttaaagcctgaggaggttgctggtatcataaaggactttgatgaacctggtactcttgcaccaactggtcttttcgttggaggtacaaagtacatggtgatccaaggtgaacctggagttgtcatccgaggaaagaagggcactgggggcattactatcaagaaaaccggcatgtccttgattattggtgtctacgacgagccaatgactccagggcaatgcaacatggtggtggagaggctcggcgattacctgattgagcagggcttctaaaaggtcgctat

SEQ ID NO: 96833 - DNA, 511 bp, Zea mays
  unsure (1)..(511): unsure at all n locations
tggagaggccgtntcgacagattcaccgccaagatagtactgctcgcaccggtccggaattcccgggtcgacccacgcgtccgcccacgcgtccgcccacgcgtccgcccacgcgtccgcccacgcgtccgtgggaaaatgtggccagatgcttctgatactgatgcttcctctcactataagcttccgttctcaagaactgtctacattgagaaaactgattttcgccttaaggactcaaaagactactatgggctggcccctggtaaatctgtcatgctaaggtatgcgttccccataaaatgcacagacgttatctatggtgatactcctgatgatattgttgaaattcgagcagaatatgatcctttgaagacttctaaacttaagggtgttctgcactgggttgctgagccagcacctggtgtcgaaccattgaaggtggaagtaagactattcgagaaattgttcatgtcagagaatcctgctgaattggaggattggcttggtg

SEQ ID NO: 96834 - DNA, 506 bp, Zea mays
tgaggtgcgtttgctcgatcacgccgatatagtattgctgtaccggtctcggaattcccgggtcgacccactcgtccgcccacgcgtccgaccagttttgccacaaagttcttcttctttctatatctggcatgcatatggaatagtttggtgttgttctcttaaatagtgatgcgctaccattgttgtgttgctgataacttgatttttgaaatgtcctgcattgaaacaggaaactggcattgccaacgtttgcagcactcccattgctaatggcatatgctggtggcacttccatcatcattccaaagcccttaactccttatgttggactaacggttttggagctaggtttattttacaagctattcatgctcttgttagcagtcttttgtacaaactcgataaatatacatgctggtctaaatggacttgaagttgggcagactattgttatatctgctgcggttttgatacataatgtaatgcgcatagcatcttctaca

SEQ ID NO: 96835 - DNA, 512 bp, Zea mays
  unsure (1)..(512): unsure at all n locations
agtgcctnntnaannctaaagttctgannggattgnnattntcntccggattagaatacccggtccgacccactcgtgccgcccgctcttccgaccagttttgccacaattttcttcttctttctatatctggcgtgcatggtgaatagtttggtgttgttctcttaaatagtgatgcgctaccattgttgagatgctgataacttgatttttgaaatgtactgcattgaaacatgaaactggctttgccaacgtttgcagcaatcccattgctaataacatatgctgatggcacttccatcataattccaaagcccttaactccttatgttggactaacggttttggagctatggttattttacaagctattcatgctctttgtagcaatcttttgtacaaactccatggatatacattctcacctaaatggactttaaagtcccgcaagactattgttataatatgttccgttattatacataatgttattctcattacatttttttctt

SEQ ID NO: 96836 - DNA, 523 bp, Zea mays
  unsure (1)..(523): unsure at all n locations
catggaaatcatnatcactgcccgtccggtcttgaattcccgggtcgacccacgcgtccgattgctcccatctcccaagacctcctcagaccctgtaagcgcagctgcggccatggacgccacgggcactggagctggagggaaggcgaagaagggagcggccggtcgcaaggccggcgggccgaggaagaagtcggtgacgaggtccgtgaaggccgggcttcagttccccgtcggccgcatcgggcgctacctcaagaagggccgttacgcgcagcgcgtctgcagcggtgcccctcgttacctcgcggccggtctggagtacctcgccgctgaggtcctggagctcgccggcaactctttcaaggacatcaagaagacgcgcattgttcctcgccacgtgctgttggcgatccgtaacgacttggatcttgtgaagctgctgacctgtgtgtcccttttccattgtagtgtgttttccaacatttacccctgtcttgttttcaaaaaattagcttttaat

SEQ ID NO: 96837 - DNA, 535 bp, Zea mays
  unsure (1)..(535): unsure at all n locations
tgtgccgctgactaactgccagctnagcgtacgcactgctcgtaccggtctggaattcccgggtcgacccacgcgtccgatcgaacaagattaagaaggggacaaaaggagatgtttctgtactgaatcctactcttatgatttcagttcctgcaattttggatcgtatcagagatgcagtgtttaagaaagttggtgagaaaggtggcctgacaaaaaagctgtttgattttgcatataagcggaatcttgcatcaattgaggggagttggtttggatcctgggcaccggagaggatgatatgggataccattatttataaaccaatacgggcaatgcttggaggacgtgtaagatttgttctttgtggtggtgcacctttatcaggtgacacacaaagattcatgaatatatgtctaggtgtcccagtgggtcaaggctatggtttgacttgaacctgtgctggagcagctttcactgaatgggatgacacaagtgttggtcgtgttggttcaccactttcttgctgctatgt

SEQ ID NO: 96838 - DNA, 540 bp, Zea mays
  unsure (1)..(540): unsure at all n locations
gaatcagcgctgactgatgnaaggttgacanncnatnngatgttccggtcttgaatacccgggccgacccacgcgtccgacctgtctgaagcaaacccaagcgctgacatggatgagatggtgaaggcaattgtgtccagggtgactgatgtgatgccaaaagctgcatcttttacttcttcccagatggcaacctcaagcaatggattcgactcctcggttatgtctacagcagcgacaaccggaagctctggaagcaccgtgactgaccttggggttgtaggcagaggcgtcaaacgagctagcatcaagccgatctctgctgaacctgctgctaatacctgcacttgattcaccatctcaacaaggtgacagcagcatcaactctgaggttgttcctgcaacgcagactggagacgagtcagtatctaagtaaattacaatttcattagccctactgtaatgttaacttgctggaacatattaactgctatgtaaacccttaagaaaggactgtttgggccctatactcaatgtgtg

SEQ ID NO: 96839 - DNA, 538 bp, Zea mays
  unsure (1)..(538): unsure at all n locations
atggctgactgacgnccttgcctcccagtacgnacagcctgtaccggttcggaattcccgggtcgacccacgcgtccgccttccctccacccgtgccgtcgcctcgtttatccgatctgccacctcctcccgtgtcgcgacgttccttcccaactccgcagcgtagcctctccgcggcgcgatccagatccaggtttttcagcatgggcctggtgaaggaaggcatcgacatggaggagggaacccttgagatcggcatggagtacaggactgtatctggtgttgctgggcctctggtcatattggataaagtaaagggcccaaagtaccaagaaattgtaaacatccgacttggagatggcaccaatcgccgtggtcaagtcctggaagttgatggcgaaaaagctgttgtgcaggtctttgaaggaacttctggaatagacaacaaatacacaaccgtgcagtttacaggcgaggttttgaaaactcctgtcttacttgatattcttgggcgcatttttaattgggtctgtgaaac

SEQ ID NO: 96840 - DNA, 530 bp, Zea mays
  unsure (1)..(530): unsure at all n locations
gaagtgtactgtgnccgaatgcgcgcatcgacgtactggtctggaattcccgggtcgacccacgcgtccgcccacgcgtccgaaaagggtcaaaagtctctctcactggagacttctattggaatgtggcagttgctatttgctgaaaggaactggcctcttctggatcattggtgtcagtttttacaggtcagacacaataaagccatatctagagacacatggtcccagctgctggaatttgtgaagacgaccgatccacagttatccaactacgacgacgaaggtgcctggccctacctcatagacgaatttgtggaatatctgactgagaacggactcgtccagcgtaaaagatgaacaacggggagatgcatctccaaacaatggttgggctgtacaaacatgatttatctcggtcagctcgacgcccaaggcctgatattggcactcctgctcaattcattcaccaaactggtggcatatcattgaatttgcttattaacgctgggaaacattaattggctggg

SEQ ID NO: 96841 - DNA, 508 bp, Zea mays
  unsure (1)..(508): unsure at all n locations
tgtgcntctntctggcccagcctgacgcagcaacgtctcggtccggaattcccgggtcgacccacgcgtccggatacactggttatgcaaatgctacttttgatccacagcggagcacctcttatctgacaaagatgataattttgcatgactacccacttcacattgctcaacagtcatcctttattaattttattgagagtctgcagcctcgtttcagagttgtagatgtggagacaatggaaggagaggtgtatgctgttttccagaaagcaaaaggaaacctgttgcaagcattcagcactatgccaggaaggatcagcctcactataggactctggacaaccagtcagactcttggctatgtttctcttgctgggcagtttattgactccgattggaaagtgcaccgaagaatgctcaacttcatgatggtgtcttctccccattcagagaatgcacttagtgaagctattagctcaagcctttctgagtggaatatgaagga

SEQ ID NO: 96842 - DNA, 507 bp, Zea mays
  unsure (1)..(507): unsure at all n locations
cgtgctatgcccgactccgangatcacagttcgaattcccggtcgacccacgcgtcgttacatgaagccatagaaccaaaagtgtcactcggatatcaaatcgagcaatatctgaaggatgaaaatcaatggcagctttctgatttggactgccaagctctgggtgctggcaagagccatatacaacgcggttatgggcacattcgggtatgtggctcccggtatgccaatacaggtctgttaaatgagaagagcgatgtctacagtcttggggtgctactactggaagcagcgactgctagggatccagttgactatggtcggcctgctaatgaggttcatcttgtggagtggctgaaaatgatggttggcactagaagaagccgtgaggttggtgatccttgcattgtatttataccatctatttattgcttttaatagtgcttctctattggctcttctatttgtttaccttttttcttatataaattgtccacttttggtttt

SEQ ID NO: 96843 - DNA, 532 bp, Zea mays
  unsure (1)..(532): unsure at all n locations
ggccgaatgactcatgaggggagtatataggatcgctctaccggtccggaattcccgggtcgacccacgcgtccgcttattgcaagtctctgcaagaacctgctagagaggaacaagctggtatcgtcgccagcatgggtagaggaaggattgagatcaagaggatcgagaacaacacgagccggcaggtcaccttctgcaagcgccgcaatgggctcctcaagaaggcgtacgagctctccgtcctctgcgacgctgaggtggccctcatcgtcttctctagccgtggtcgcctctacgagtatgccaacaacagtgtcaaggctactgttgagaggtacaagaaggcacacaccgttggctcttcctctgggcccccgctcctagagcacaatgcccagcaattctaccagcaagaatcagcaaaactgcgcaaccagatccagatgctgcaaaacactaacaggcacttggttggtgactccgtgggaaacctgtcactcaaggagctgaagcagcttgagagccgncc

SEQ ID NO: 96844 - DNA, 501 bp, Zea mays
  unsure (1)..(501): unsure at all n locations
gtttgtnttgtgccagcctgagacgatcgcgtaccgttcgattcccggtcgacccacgcgtccggtcccacaacgtctcctggcggagatttcagcatccaggttttgcagaagcgctggaggtttgggacctgcagtatcccccttgattccactgcagggtcgtccaatttgaccctgacaggaggttgctttcatttgccaccttcagacactggtttagcatcatgaaggtgaatgggagtggcataacttcaatagtctgacccagctcctgagcacctgtcatagttttacctctcacttcattgacaccctgaagcttcaggctggagtatctttgcagtcagaggcaattgtcaaaggagtgccctatggaactgaaggctctaacagttttgtgcaatggcttacctgagacgacgcccggacgataacaactttcattaatccaggttcagttttctattatctgttacatatccttttattagtgccctt

SEQ ID NO: 96845 - DNA, 537 bp, Zea mays
  unsure (1)..(537): unsure at all n locations
agtattgctgactagatgncccgatttcnncnacngacagtacaggtccggaattcccgggtcgacccacgcgtccgcaatcactgttcaatgcttagtctagtcctgtattgtgagaacccacataattcgtgagagatggagatctatgacggattgaaagcatgacgatctagaacaacactagccggccagtcaacttctataagcaccgcaatgggctcctcaagaatgcgtacgaactcttcgtcctctgcgactcttaagttgccctcatcatcttctctagccgtggtcgcctctacgagtattccaacaacagtgtcaaggctactgttgagaggtacaagaaggcacacaccgttggctcttcctctgggcccccgctcctagagcacaatgcccagcaattctaccagcaagaattatcaaaactgcgcaaccagatccagatgctgcaaaacactaacaggcacttgggtggtgacttctttggaaaacctttactcaagaactttaacatcttgaaagcccctt

SEQ ID NO: 96846 - DNA, 538 bp, Zea mays
  unsure (1)..(538): unsure at all n locations
ngaatgtgtntcgctatgagggaggagataaggatacgcatgctaccggtccggaattcccgggtcgacccacgcgtccggaagtacaaggcagaggacgaggaggtcaagaagaaggtggatgccaagaacgcgctcgagaattatgcctacaacatgaggaacaccatcaaggatgacaagatcgcctccaagctcccggctgaggacaagaagaagatcgaagatgccgttgacggcgccatcagctggctggacagcaaccagctggctgaagtggaggagttcgaagacaagatgaaggagcttgaggggatctgcaaccccatcatcgcgaagatgtaccaaggcgagggcgcgggcatgggcgctgctgctggcatggatgaagatgccccgtctggtgggagcggtgctggtcccaagatcgaagaagtggattaaattggttagtgttcgaggtttggtttggtgaagtgtcaaatgcctgaactctgaaggttggttgtgagataagtgatcttaccaagtggtcgcc

SEQ ID NO: 96847 - DNA, 541 bp, Zea mays
  unsure (1)..(541): unsure at all n locations
gtagtgctcgcttgaatgccccagtccncacgcatngactgtacaggtctcggaattcccgggtcgacccacgcgtccgcggacgcgtgggctgggcgatgcgcaggctgagttcaaggctcttcgcttgtcggaccgcgcgcgcgagaaggccgtacaggatcttaccgaagaattggcaaaggtggatgggaagctgaagctcacagagtctctccttgaaagcaaaaaccttgaagcaaagaaaatcaacgtctaaaaaaaagcagcgcttgccgcacagtttgcagctgaggcaacactacgaaaggttcatgcggcacataaggatgatgacatgcctactattgaggccatacttgcaccactggaagctgatctgaaactggtccgtcaagagattgcaaaattacaagatgacaacagggcattggatcgtcttacaaagtctcaggtagcagctctgcttgaagcggaatagactgttcacattgcacttgccaaaagctttcatggtggttgaactgctaaaaaaacaccc

SEQ ID NO: 96848 - DNA, 504 bp, Zea mays
tggcggcatgacttgccatcgacaatctatagtagtgctccaccggtccggaattcccgggtcgacccacgcgtccgccacaaaatgcacgggaggacccagggcgccgccgtcggcgacatgacccagcgccttgtgctcgccctctcgctcatcgcatcagcgaccgccgtgcccgctgtcatccgcacggtcccggacgaccccaccgcgggctcctctggcgcggcagacgccgcggacgcgctcttctgtgacagctggaggctgtcggtggagacggccaacgcgggcccctggagcgccgtgccctcgcgctgtggggctttcgtgcgggactacatggagggacctcgctacgcgtctgactccgccgtcgccgacgccgacgccctagccttcgccttcgaagccctggccgccgccgagtggggcggctcggcgagcgcgaggcctgcgtgggtgttcgacgtcgacgagacgctgctctctaacgcgccgtac

SEQ ID NO: 96849 - DNA, 509 bp, Zea mays
  unsure (1)..(509): unsure at all n locations
gcgcggtcntggcgtggaaaagtcgagncngatnatatcgtancggtccggaattcccgggtcgacccacgcgtccggaacagggccatgttcatcatcatgagcatagccatggaagttctattactgtcacaacacatgaccaccaccactcaggcactggacaacaccatgacgctgaggagccactgatcaagcacgaggccgactgtgagggcacccaatctgctgctaagaagcctcgacgcaatataaacgtacacagcgcttaccttcatgtgcttggggactccatccagagcatcggggtgatgatcggcggggctatcatctggtacaagcccgagtggaaaatcatcgatctgatctgcaccctcatcttctcggtggtcgtgctgttcaccacgatcaggatgctgcgcaacatcctcgaggtcctgatggagagcacgccccgtgagatcgacgccaccaggctggagagggggctctgcgagatggaaggcgtg

SEQ ID NO: 96850 - DNA, 502 bp, Zea mays
tggcgttttgctgcccacgactgcgacgcaccgcctgtaccggtctcggaattcccgggtcgacccacgcgtccgcgcaccccaatctaatcgacacctcgccgtgatgggccgcaagttcttcgtcggtggcagctggaaatgcaatggaaccacagatcaggtcgagaagattgtcaaaaccctgaatgaaggacaggttcccccttcagatgttgtggaggtcgttgtcagccctccttatgtcttccttcctgtggtcaagagccagctgcgccaagagttccatgttgcggctcagaactgctgggttaagaagggaggtgctttcaccggtgaagtcagtgctgagatgctcgtcaaccttggtgttccctgggtcattcttggacactctgaaaggagagctctgctgggagaatcaaatgaatttgttggagacaaggttgcgtatgccctgtctcagggactaaaggtcattgcatgtgttggtgagacactt

SEQ ID NO: 96851 - DNA, 509 bp, Zea mays
  unsure (1)..(509): unsure at all n locations
atgcggttttgnctgccactcgatatataaaagaagctgctctaccggtctcggaattcccgggtcgacccacgcgtccgcggacgcgtgggcaaggccacacacacactcacaccactagtaggctagcctagccttgtagtcgtcgaggaggagcaagaagggcgcgcacgcaagcaggcaagcaagaagagagccgatcgaccgagagctagcacgcgatggcgaggtcttccaagatgatggtggcggcagctctgctggccttggccctggccgtgtcgaccgccgaggcgaggaacatcaagaccacgacgacggagaagaaggacgacgcggtggtgcagccgcagaccttcccgcccttcgaccgcctcggcggcggcgcgtccccggcgttcggcggcctccccggcggcagcattcccgggttcagcatgcccggcagcggcagcagcctacccgggttcagcttgcccggcagcggcagcatgcccctcttcggcggc

SEQ ID NO: 96852 - DNA, 527 bp, Zea mays
  unsure (1)..(527): unsure at all n locations
aggcttgctagttttccgatcncgcactncgagctgtctcggaattcccggtgtcgactcaaccatctcgtgaggcccacgcgtccggcatgccgattttttgttcagacgcctgtgccaactatggagggtttacctgcaacgctagcgaggctatggttaaggctaaggccaggttaatgatgcgcgatattatttgctgcatactgatgcaccagcttcaatcctatgaagatattccaccgaaggcttctgaagtacaccacggatgcttcatttgttaagcatattgaacagtctggagaaatagttgattcgatggtaatgtaggatatgcacacatttcatccactgggctttggctttattacatactctgaccctgctattgttgataaagtgatatatgacaatcattgttatcaatggatagcatgtttaaatttagagatccatacctaaaatgtttggtgcaatttatctttaatgatttcaagacttaaaagatatttgttggtggctttcta

SEQ ID NO: 96853 - DNA, 528 bp, Zea mays
gtgtccgattactcccgtcacgccgagtcgcactgccgtaccggtctcggaattcccgggtcgacccacgcgtccgcccacgcgtccggtgctggtacaaacttgtatgaattgaaactagatctgaatgacaaagtaaacgttgaggctagcaaaataagtgtgggggtcaggtccatattctgtatcgtagaaaaagctgaagccaaatggtggaagaaactcgttcgagatgatcaaagggcacctgactttgtgaaagttgattgggacaaatgggttgatgaagatgatgatggtgctgatatcaacatggatgggatggacttctcgaatttcggtggcatgggtggtatgggcggcatgggtggcatgggtgatatggctggtatgggtggtcttggtggcatgggtggtatgggtggtcttggtggcatgggcggtatgggaatggatgatttcgaagatgagagtgattatgaataagaagtgtttaaaccctaaactgcagacaatgcttgtgatgct

SEQ ID NO: 96854 - DNA, 528 bp, Zea mays
cgggttgcttgtccatgcagggggaacatcgcatgtaccggtccggtattcccgggtcgacccacgcgtccgcggacgcgtgggcggacgcgtgggcggacgcgtgggtccggacgcgtgggccaactccgaagcccctaccggcaaccctagcgaggcgatggggaaggcggaggcgaggtcaagggggcgcggcggcggcggcggcggcggaggcgccagcggcaatccggggaagatcttcgtcggagggctcccgcgggacaccacggatgctacatttgtgaggcattttggacagtatggagaaatagttgattcggtgataatgaaggataggcacacatctcagccacggggttttggcttcattacatactctgaccctgctgttgttgataaagtgatagaggacaatcatgttatcaatggaaagcaagttgaaattaagagaaccataccaaaaggttcggggcaatctagctctaaggatttcaagactaaaaagatatttgttggtgggcttcc

SEQ ID NO: 96855 - DNA, 508 bp, Zea mays
  unsure (1)..(508): unsure at all n locations
tgtggntttntngtcgccatcgacatactaagtagcgctcgtaccggtctcggaattcccgggtcgacccacgcgtccgcggacgcgtgggtccaaacaatccatatggcaaaacaaagctcgttgttgaggatatttgccgggatatctaccgttcagatcctgaatggaagatcattttacttaggtacttcaatccagttggtgctcatcctagtggatatcttggcgaggacccacgagaatttccaaccatcttatgccctatggtcaacaagttgcggttggtaggaagcccagttctgacagttttaggaaatgactatgcaccaggaaacggacactggggtccgagatcacatccatgtggtgaaccttgttgacggacatatcgttgtattgcaaaatcttttagagaactctcgcatagggtgtgaagcgcacacccttgaacccgaaagaggcacatgtgctctggatagtgataacgcatttgaaagggcttcta

SEQ ID NO: 96856 - DNA, 531 bp, Zea mays
  unsure (1)..(531): unsure at all n locations
aaggcctgactgatgcctgcaccgccnagtangnacggancgtaccggttcggaattcccggctcgacccacgcgtccgatagcaatgaccgtgaccgtgttgttgaagccagagatgagctgcacaggatgctgaaggaggatgagctacgtgatgctgtgctgcttgttttcgccaacaagcaagatcttcctaatgccatgaatgctgctgagatcactgacaagcttggattacactccctgcgccagcgacactggtacatccagagcacttgtgccacaactggcgagggtctgtacgagggcctggactggctgtccagcaacattgcgagcaaggcttgaatatcaaatgcgaactgactaggagctccggatgtatcatggaaacttaggacagaatcgcctcttcaacctgttaggtgtcttctaccggcacaatatattttttgcttggaatatgtaatgatgttacggttcaacgtttattctaccctactatactgntggatgttctttgngcctgtt

SEQ ID NO: 96857 - DNA, 613 bp, Zea mays
  unsure (1)..(613): unsure at all n locations
agtataaggcctgactagatccatccgtaaatganatcatttgcatcgtactcggtctcggaattcctcggagtcgactccactgcgtctcgtcccacgtcgtctcggtatcgagngtgcgtcctttacaaatatcaacatcctgaggagtctctagcatcggcctgcgcaatgttgcggtcctttgggactcgaaggggtcggaagaaaggatgtgaatggcatgattcctgcttagcgactaaagtattacgagtatatctctctttcnggggaacctgatatcaagggatttgcaaggttaagtcatcaaccaccgaccgccgccaacctcaagcaagcttcctctgcacaaatgactcctgccattaatccagtcacacttattctcaaccaagcatcaatcatcgtcaaaatttgtccttccgctgggtggtgccagctttaccaagacactcagtcttccagggcagttcaaatatgtggcttcaaaaggccagactttttcagagtaactcttcctctataccaaccaggggaattgcttcacggggcgtgttctaacagcacccttcagcaggaaaatgctcctcggggcgtctttatcaaaaaa

SEQ ID NO: 96858 - DNA, 534 bp, Zea mays
  unsure (1)..(534): unsure at all n locations
nggtgtgcctgncttgatgccctgcnaagttatgtagtgctctaccggttcggaattcccgggtcgacccacgcgtccgaactgtcgtgacaacgtatggacatatacctagttgtttaagatgaccctagaactcatgcagtttgatgccatgtttgatccttatgttaaatgtcggtctccaccaaagatacttgtcatcttgaatcctcgatctggacatggtagatctagcaaagtttttcatggaaaagtggaacccatatttaaggtatgtctagctgagtagaagcatgcatcttatctcaagattggatctgtgttgtcgcttctactaggaactttggtatgatctagtcatgcttcccaagatcatatttagtccggtgtttcatacaacctaagatgtttataaatgagttgtagacaattttataagctttccaccttcacaaggtactatccttttttcctggtcatattctggattcctgtattttcctggtgtgtgcaagaaatatagcanaaatagtt

SEQ ID NO: 96859 - DNA, 530 bp, Zea mays
  unsure (1)..(530): unsure at all n locations
gtttaggccgctgatccggtcgccatgcatgnactgactggtccggaattcccgagtcgacccacgcgtccgaggaggaggaccagtagcggctggccgcgtccagtagcggcatgccactcagtgcttgcaaccgtggctaggggattgaagaagcacttgaagaggctcaatgcgcccaagcattggatgctcgacaagcttggcggagcttttggtcccaagacatattctggacctaacaagtgcagggagtgccttcctatgatcctcatcatcaggaacaggctcaagtatgctctgaactacctagaggtcatttctatcctgatgcaaccccatgtactcagctgatggcaaggtcaggactgacaagacctaccctgctgaggccatggatgtcattttcattcctgagaccttggagcactacagggtgctttatgacaccaagggccgattgcgtatcacccaattaaggataaagaatcccatttaaactcttcacgttagggtccttcaatataacc

SEQ ID NO: 96860 - DNA, 504 bp, Zea mays
  unsure (1)..(504): unsure at all n locations
ggcgcttgcttgaggttagggngcattgcactantctaccggntctgaattcccgggtcgacccacgcgtccgcatcagagccatgccgttcaagagcaagttcttagctgccctggccgtgccgagacatgcgcagctcctagaaccggcgtattcctgtgaagtattgttgtctggccacgcctagtttctatgtcgattcctattaggcggctcttcatggctggtgctcactgctgcgcccgtctgttaaccagatccaggactatgggtatttctaggaccggactgtcatggttggatctttccatcggggagaatctaaagctttattcgcatgctgccaaaaaacaaaaaaagggccggccccttataggatccaaacttacgtacgcgtgcatggcgagtcttaagtcttctataggggtaacctgattcaattcagtggcccgctttttccaacgtttggactggaaaaccggggtgtaacccacttattcgtt

SEQ ID NO: 96861 - DNA, 496 bp, Zea mays
  unsure (1)..(496): unsure at all n locations
tcgggttnctgggcccgacctgncgagcaacgtctcggccggaattcccgggtcgacccacgcgtccgcttaatctccgcttccgccaccagagcgccacccttggctgcgccatgactttctccatctacctgcccccgtccccggcgtccaaccttcccgtgctgtactggctctcgggtctcacctgcaccgacgagaatttcatcataaagtccggcgcccagcgcgccgacgctgcccacggcatcgccctcgtggcacctgacacctccccacgtgggtaaatattgaaggagagtcagacagctatgattttggtgtgggtgccgggttttatatgaatgccacaaatgaaaagtggaaaaactggcgcatgtatgactacattgtgaagggaccttccaaaagttttaagggataactttgaacaactaaacccgtaacaggcttaaattttggggcccctaatggaagggcttggccccctgccatt

SEQ ID NO: 96862 - DNA, 508 bp, Zea mays
  unsure (1)..(508): unsure at all n locations
gtgcggtttctgtgccccagcctccancgcagtaccgcctgtaccggtccggaattcccgggtcgacccacgcgtccgcccacgcgtccggcccaagtacctgatgagcatgtgaatgagtttaaatcaatcgagaagtttaagatattcaacactaacaacttgtgggtgaaccttaaagctgtcaagagactagtagaggctgaggcacttaagatggaaattattccaaaccccaaggaagttgatggtgtgaaagtccttcaacttgaaactgcagctggtgcagctattcgtttctttgacaaagcgattggaattaatgttccccgctcaagatttctcccggtgaaggctacatctgatttattgcttgtgcagtctgatctttacaccttggttgatggctttgtcatccgcaatccatccagagcgaatccagctaacccttcgattgagcttggacctgagttcaagaaagtttgccaattccttgctcggttcaagt

SEQ ID NO: 96863 - DNA, 529 bp, Zea mays
gagggcctgctaggcaagagagaaaatcattgtactgctctaccggtccggaattcccgggtcgacccacgcgtccggcgaaaaatacgcaagcgcgaagagttctagcagccacagaagaggtaccgatcctgggacgtccacagataggaccagaacttgaggcgattgtgcgattctctcgtacaccgaaaggtgaagcacgagctcatgtacatgtggatagacctgctatccaagtgcgacgcgtcgctagagatgaagattgcaacctgactcaacatgaagacaaacatgtgatgcttgtgctgaataataatgaaaacacgcatgcatgtcatcgtcaggaacaagagaaataatacaagaccagcacgcatggtcatactctatattatagatggtcaaaaagcacgaagaccgtgagccctgcacgaagcccgatttttgggcccggtccgagcacggcacggtagaatacgcggacaggctggaacaggaaactatgcaccgacggctagccctgcac

SEQ ID NO: 96864 - DNA, 533 bp, Zea mays
  unsure (1)..(533): unsure at all n locations
tggcccgctgatacttttcgttcacctacgnactgntcgtaccggtctggaattcccggctcgacccacgcgtccggcttgggatcttgcatattctattggcagttgtgtgttcagcagtggttctgaccccaggggacaggatgagcgaagaaggctgtacttgtatagtgcattattcaatcccctccgaagtatgttctacttggacaaaagatctaagaaggctcctgtttctagctttattatcaaggactcgctaaagttgaaaaccagcgatgctgaaacggttgtcaacctacatgctgctagcgaaaagtttgctgaactgattcctctcctcgagtcaagcgctgacttgcatgctctcaaagagatgctggaagatgagtaccttgagataccaggagacaccgtgaagcgtgtttttgcagggcttatactccgagatataaaggagttttggcgggttgcgctgcttctatccattctcttttaccgagaaactgaaaccgctgttggcaccctcaacg

SEQ ID NO: 96865 - DNA, 541 bp, Zea mays
  unsure (1)..(541): unsure at all n locations
gttacaatgtgccgactgctgccgttacgnngatgcatgnacgtatcggtccggaattcccgggtcgacccacgcgtccggctgaaaaacaaactcaccaacaaagtgacctgttactgggagcaagcaaccgagggcgagagccatggcgaagcctcgcagcggcggcggcggcggcctcctggacttagaggggcactacgccttttacggcgcctaccacagcaaccccgtcaacgtgggcatccacgagctcttcgtgtggcccatcttcctcaccgcgctcatgctcctccacctcaccgccccctccacgcacgccgtcggcatcagcgccgcggtctacgcggcctactactttcttctcgaccgccgcgcgggcgcgctcgccgtcctgctctgctacctctgctgggccgccagcggcgccctctctgcccgcctcggtttctctgttggatggaaaggtgtattggtggcccaattgttctggtgggttatgcaattcattgggcatggggtttttgagaagccagcgccc

SEQ ID NO: 96866 - DNA, 499 bp, Zea mays
  unsure (1)..(499): unsure at all n locations
gtgggntactgtggccttacttgncgtgcgactgtccggccggaattcccgggtcgacccacgcgtccgctctacgacatcaacaccgaggagtccagcatcggcctgcgcaatgtgcggtcctttggaaccgaaggtcggaagaaagacggagtgcagattcctgctagcgacaaagtttacgagtatatcctcttccggggaactgatatcaaggatttgcaagttaagtcatcaccaccacagccgccaccaccacaagcagcttccctgcacaatgatcctgccataatacagtcacattattctcaacctgcatcaacgtcatcaagtttgccttcagctgggggtgcagttttaccagactttagctcccaggcagttcaatatgggcttcagaggccaacctttcagagtaaccttgctctctaccaaccagggaatactccgtggggctcttcagtggcacctccagcaggaaatgctccatggggctctt

SEQ ID NO: 96867 - DNA, 511 bp, Zea mays
  unsure (1)..(511): unsure at all n locations
tggccagtntctactgcctacgaaancattacggnaccgctcgtaccggtccggaattcccgggtcgacccacgcgtccgcccacgcgtccgcccacgcgtccggatctgaggttccagtcctccgccgtcgcggcgctgcaggaggccgccgaggcgtacctggtggggctcttcgaggacaccaacctttgcgccatccacgccaagcgcgtcactatcatgcccaaggacatccagctcgcgcggcgcatcaggggcgagagggcttgagcgcccgtcgtgctgctcgtcgttgtagtgttactagaagtagatggtggctttcgtttcgtggcttcgttatcctgtaggagtaatgttctagatgtcttggcttcagtgcaatggactgtgattgctcatttctgaaatttatcaatggacttgttcttgcaaaaaaaaaaaaaaaaaaaaaaagggcggccgctctagaggatccaagcttacgtacgcgtgcatgcgacgtcatn

SEQ ID NO: 96868 - DNA, 502 bp, Zea mays
  unsure (1)..(502): unsure at all n locations
gcggntgnctgaggccatgcccagnncgtgcgnctgtctcggtccggaattcccgggtcgacccacgcgtccgcgagaggtttgagaaggaggctgctgaaatgaataagcggtccttcaagtacgcgtgggtgctcgacaagctcaaggctgagcgtgagagaggtatcaccattgatattgctctgtggaagtttgagaccaccaagtactactgcacggtcattgatgcccctggacaccgtgacttcatcaagaacatgatcactggtacctcccaggctgactgtgctgtccttatcattgactccaccactggtggttttgaggctggtatctccaaggatggccagacccgtgaacatgctctccttgcgttcacccttggagtgaagcagatgatttgctgctgcaacaagatggatgcaaccactcccaaatactccaaggcacgttatgaagagattgtgaaggaagtctcatcctacctcaagaaagttgg

SEQ ID NO: 96869 - DNA, 508 bp, Zea mays
gggcccggtttctgcatcagacatcactacggaccgctcgtaccggtctcggaattcccgggtcgacccacgcgtccgctcactctcagctggtcgctcactcttgcagctccacccttcactcagtcttaggctcttagctctaggctctagctagccgcgccactccttcgtgtagccatcagccttctcatcgccaccaatggccactgccgaggtccagaccccgaccgtcgtggcggccgaggaagcgcccgtggtggagaccccgccgccggccgtcgtgcccgaggagtctgcccccgccgaggccgaggctgaggctgaggctgaggctgctgctcctgctgctcccgaggagcttccggcggccgagcagcaggcagccgccgagccggaggccgctgctcctgctggtgccgaggagcccgccgcggccgaaccggccgccgaggcggaggctgctgctcctgctggtcccgaggagactcccgcggccgagcaggag

SEQ ID NO: 96870 - DNA, 505 bp, Zea mays
  unsure (1)..(505): unsure at all n locations
ggttaggcttcacgtaggaacgtctcggtctcggaattcccgggtcgacccacgcgtccgcgtctccgcggcgtcgcagtcgcaggccggcccgggcactcctcccacccttataccagggcgggtcccctccgacccccgcgctgctgtttctggtaacctgcctttcttcgaccgtgtcctctatccggactcgttcccgcttgagaccccgccctctaaggaggaggacgcggcagcgcgacagactgatgaggcggtggcaccggctgtccccttgagggaggagacggagacagagagggaggcgtggcgactgctgcggagggcggtcgtcagctactgcggcgagcccgtggggacggtggcagcggagaaccccgagtgcatggagatgctcaactacgaccaggtcttcatcagggacttcgtgccctncgtgctcgcctttctcatgcgcggtgagaccgagatcgttccgaaccttcttctttacacccttcat

SEQ ID NO: 96871 - DNA, 518 bp, Zea mays
  unsure (1)..(518): unsure at all n locations
cggctcgtttatctgtttccaggttgncgaccaacgtcgcgcctcggaattcccgggtcgacccacgcgtccgcccacgcgtacgcccacgcgtccgcccactctttcgggcagagcaacgactagctgccaggggtgctagcaagagtgcaacaatggccaccgctctgtccttcaaggccttggcactggccgcgctcctctccgtggtcagcgtcacctctggcgctctcgccgagcaacaggtcaagcgcaacgccaccaccgactagcaggacatatccttgttgtcctacagcagtggctggctgccggccaaggccacctggtacggcgcccccaccggcgccggccctgtcgacaacagtagtgcataccggttcaagggcaccaaccagtacccgttctagtccatgacgtgctgtggctactagcccatctgtaacgtccgccaagcttgctgctgatgctacgagattacatggcctgaaaagcaacctctctgtctggtacagcct

SEQ ID NO: 96872 - DNA, 523 bp, Zea mays
  unsure (1)..(523): unsure at all n locations
gtccggnttgactgaccgtttagccttcaccatcgnancgactntaccggtccggaattcccgggtcgacccacgcgtccgggtctcttgaattgtttttacaagatttaattgaccgtacttatgaaattactcttgaaagtggagcaaagacactgaattccttccacctgaagcaatgtgtgaagaggtacagttcttttgatttcctaactgaagttgtcagcaaggtacctgatcttggtggcgctgattcctgtggagatgaaagaggattacctagaagaagaaagtcaaatggctgtgacccagagaatgatgaatcaagatctagtaaaatggccataagaaatgcatacatcagccccagaggacgtgggaggggtcgaggcataggacgaggtctgccaccaaccaagagaaaggaggttggttatgtacaatttgaagatgagagcagcatgtttgctgaacatggtgagcccttgccaggagaggatacagttcaagagatcaatggcaa

SEQ ID NO: 96873 - DNA, 517 bp, Zea mays
  unsure (1)..(517): unsure at all n locations
tgtgccgtgtttctggcctccgcctagngtagcatcgacgtaccggtccggaattcccgggtcgacccacgcgtccgactcccacaccgaagccgccggccaccaagccgcccacctacactccgacgccgccggtgtctcacacccccagcccgccgccaccatactactagaaagcgatgcctaccataccacactgctgtcagtctctggagcatttaggtggtctggatcaatggaagggttgtgtcctagccagccggcaaagatgagctgctgatggtaatgatgatgataagaggccactgctaccctactacgtaccctcctctttgtgtgctgccatccgtccccgttagacgatcgaggagagaataacgcagagctctctgctcccggcctgtcttctgccgtcccggccgtttaatttactagtgtgttcgtcctatatgtttagcagcagcaggtgtattgtgcgggtatgtaatgggattgcaactatattgggtgtaaaacc

SEQ ID NO: 96874 - DNA, 513 bp, Zea mays
  unsure (1)..(513): unsure at all n locations
tggggtttgtctgtnccccgactgcgccgcactgctgtactcgttcggattcccggtcgacccacgcgtccgtcgacccacgcgtccgctctgcaaggtgatttccgttcagtttggccagaagggcatcgggtacctgaacacctacgacggccgtaccatccgctaccccgacccgctcatcaaggccaacgacaccatcaagatcgatctggagaccaacaagatcatggacttgatcaagtttgacgtcggcaacgtggtcatggtgaccggcgggaggaacaccgggcgtgtaggagtgatcaagaacagggagaagcacaagggcggcttcgataccatccacgtctaggactccatgggccaccaattcgccacccgcatgggcaacgtgttcaccatctgcaagggcaacaagccttgggtgagcctgaccaaaggcctcggttttaagctcagcatcatctatgagcagtatatgcgcgactttgcttgccaagcttcttgctt

SEQ ID NO: 96875 - DNA, 501 bp, Zea mays
  unsure (1)..(501): unsure at all n locations
ggcgctgctgaggcccgacgtgcgcaccgactgtaccggtccggaattcccgggtcgacccacgcgtccgcccacgcgtccgcccacgcgtccgcccactcgtccgcccacgcgtccgcggacgcgtgggcttccaccccggcagggaggacaagcctcagccgccacctgagggccgtcttcctgatgccaccaagggttctgaccacctgaggcaagtctttggcaagcagatgggtttgagtgatcaggacattgttgccctctctggtggccacaccttgggaaggtgccacaaagagcggtctggttttgagggggcctggactacgaaccctttggtctttgacaactcttacttcaaggaacttctgagtggcgacaaggagggtcttcttcagctcccaagtgacaaagccctgctgagcgaccctgtcttccgccctcttgtggagaaatatgctgcagatgagaaagcattctttgatgactacaaagagn

SEQ ID NO: 96876 - DNA, 514 bp, Zea mays
  unsure (1)..(514): unsure at all n locations
cgtgcgctttctgttttttccattttnngcgtagcgtcgtcctcctcgaataccgggtcgacccacgcgtccgattgcacggtggagttccccgactcgttttttccagagcagtgcaaggctctcgagacagtacttccaccaaggccttcatccaagctgacagacatggagatagatgaatgcgaggagacgactatgcatgatgtgaacaacatcgaggaagagatgcgcatgaagcaagctcacgctgcccaagaggcgtacgaggaggacgacgagatgccgggcggagcccagagagtgcagtgcgcgcaacagtaagcagactatcatcaaggcaattgtgaggggtggtgcccttaaagcatgggagtgatctctgtgtttgctgtcgtcgagctgtgaaaaatgaagctgaatcgacctctcatgcggcgaatgtatcccttttttgctgcaacataaaaaatgctacccaggcatagctgtgtaccctttaaactactgtttt

SEQ ID NO: 96877 - DNA, 519 bp, Zea mays
  unsure (1)..(519): unsure at all n locations
tgtcctgtattgctttggcctgaactggnctcagnattcgactgtaccggtccggaattcccgggtcgacccacgcgtccgattggaaggggaatgcaactcgacttaaaacctgtaatacacaatctgagcatctaatagtgaactctgatgggcctgaagaagtaaaggcaaacaaagagatcattttcacctatgatgttaactttgaggaaagcagtatccagtggtcatcccgctgggacacctacctccgcacgcctgacgatcattggttttccatcgtgaattctctgaccacggtcctcttcctgtctgtgatggttgccatgatcatgctccgaactctgtaccgcgatatttccaagtacaaccagctagaggaccaggaggaggcccaagaagagtctggatggaagcttctccatggcgatgtgttcaagccttctgccaatgccgacctgctgtgcgtgtacgtgggcacaggtgtacagttctttgggatgctgctggtcaccn

SEQ ID NO: 96878 - DNA, 517 bp, Zea mays
  unsure (1)..(517): unsure at all n locations
tggccatttttgcttgcctcccgttatgtantgcactgctctaccggtccggaattcccgggtcgacccacgcgtccgatttcacggtggagttccccgactcgctggcaccagagcagtgcaaggctctcgagacaggacttccaccaaggccttcatccaagctgacagacatggagatagatgaatgcgaggagacgactatgcatgatgtgaacaacatcgaggaagagatgcgcaggaagcaagctcacgctgcccaggaggcgtacgaggaggacgacgagatgccgggcggagcccagagagtgcagtgcgcgcaacagtaagcagactatcatcaaggcaattgggaggggtggtgcccttaaagcatgggagtgatctctggttttgctgtcgccgagctgggaaataggaagctgaatcgacctcgcaagcggggaatgtatccttttttgctgcaacataaaaaatgctacccaagcatagctgggtaccttttaacttctgtttg

SEQ ID NO: 96879 - DNA, 513 bp, Zea mays
  unsure (1)..(513): unsure at all n locations
ggggcttgctggccaaggcacttgtagntgacatgcaccggtctggaattcccggctcgacccacgcgtccgaccacgcgtccgcggcttttccgccgcagtttctccatggctgccgagggttccgccgagggcgtctattactctccacccccctgcacctacatgtcctcgaccccgcggcaacatctgccggacgagctgtaccgccccatcatgaatgtcgggcgcccaagcatcccgttatcccccgtcctggagcaatggaatcaagaaggccataccgccaagaagttcgtcatgcacgccatcgtcaagaagctcgtcggcctccgccgcttcgcccacgcactcgagctgtcgttctggatgaccgaccgcatgcacctccacctttcggtcggtgacgtcgcgtaccggctggacctaatcagcaaggtgcacggccttgagaaagccgtcgagtactacggcatggtaccgaagcagctgaagaagccgcagtgctacggn

SEQ ID NO: 96880 - DNA, 518 bp, Zea mays
  unsure (1)..(518): unsure at all n locations
gtgcggtgtgtgtgtnnccccngactcgncggacggttcaggtccggtattcccgggtcgacccacgcgtccgcggacgcgtgggcagctttgaccgccgcctcttttcccctccgctactgctcctccccaggggagtccctcgcaggagcggcggcggcggccgcggcggcgaggtcgcaccccacatcggcgagcggcggcggcacctccggaggcaaaggctagatgttcgggcgcgctcctgacaagagcgacaacaccggagtctacgagatcctctcgttgccccagtacgcgttccaggacgatctcaaggaggactaccgcaaggctgatatgatgaaccacctcgacaagggcggtgacctcgataagttcaaggtgctagcactagcctctgaacgacttgagtgattctagataacgtgggacttatgaccaggtttgaggaaagtcccgtaggttaggaacttccccttgatgacacccccttgatgcatatgatattttctttg

SEQ ID NO: 96881 - DNA, 513 bp, Zea mays
  unsure (1)..(513): unsure at all n locations
tgcgtgtgtgtggccaagcctancgagcaacgtctcggtccggaattcccgggtcgacccacgcgtccgcccaagatcaaggaggccatcaccgccaagttcaccgagtacctccgccgcgccgaggagatccgggcggtcctcgatgagggcggcgcagggcctggggccaacggtggcgacgcagctgtcgccacgcgccccaagaccaagggcaaggacggggacggaggcaacggaggggatgactccgagcagtccaagctgagggcggggctcaactccgccatcatcaccgagaagcccaacattaagtggaacgacgttgccggcctcgagagcgccaagcaggcactgcaggaggccgttatattgcccgtcaagttcccgcagttcttcacgggcaagcggaggccttggagggcgtttcttttgtatggccccccaggaacaggaaagtcttatttggcaaaagctgttgcaaccgaggctgattcaacgtttttcagtata

SEQ ID NO: 96882 - DNA, 512 bp, Zea mays
gggctcttgtggcatcgactatcgatgcatcaactgtccggtccggaattcccgggtcgacccacgcgtccgagctcctcctgccgcactaccgtgacaccatgaacatcaactccaacgcgcgccagatgctcgtcaacgccggcggcatcttcgagaccaccgtcttcccgcgccagtacgcgttcgagatgtcctccgtcatctacaaggactggaacttcacagagcaggctctccctgacgacctaatcaagagaggcatggcggtcgcagacccgtcgagcccgtacaaggtacggctgctggtggaggactacccgtacgcgtcggacgggctggccatctggcacgccatcgagcagtgggtgacggagtacctcgccgtctactaccccaacgacggcgtgctgcgggcggacgtggagctgcaggcgtggtggaaggaggcgcgcgaggtcgggcacgccgaccttaaagacgcgccctggtggcccaagatgcagacggtg

SEQ ID NO: 96883 - DNA, 507 bp, Zea mays
  unsure (1)..(507): unsure at all n locations
ttgggtctgtcttggccaagccttcaggccgcaccaacgtaccggtctcggaattcccgggtcgacccacgcgtccggcggatccgtcctgcaaatctcctctcatacttctccaccggatccctgtaagattccgggagatgtcggacgaggagcaccagttcgagtccaaggccgacgccggcgcctccaagacctacccgcagcaggccggcaccatccgcaagaacgggtacatcgtcatcaagggacgtccctgcaaggttgttgaggtgtccacttccaagactgggaagcatgggcatgccaagtgccactttgttggcattgacgttttcactggaaagaagcttgaggatattgttccttcttctcacaactgtgatgttccccatgttgatcgcactgagtatcagctgattgacatcactgaagatggatttgtgagccttttgactgacagtggcaacactaaggatgacctcaggcttccgactgatgaagctn

SEQ ID NO: 96884 - DNA, 507 bp, Zea mays
  unsure (1)..(507): unsure at all n locations
tggcgntgtctgttttccccnaccctttcgnagcaacgtcgcggcccggaattcccgggtcgacccacgcgtccgcccacgcgtccgcccacgcgtccgggcggtcggtcgcaaggcaggcggccccaggaagaagggggtgacgcggtccgtcaaggccgggctgcagttccccgtcggccggatcgggcgctacctcaagaagggccggtacgcgcagcgcgtgggcactggcgcccccgtgtacctcgccgccgttctggagtacctcgccgtcgaggttctggagttggcagggaacgcggcgaaagacaacaagaagacgcgcatcatcccgcgccacgtgctcctggcgatccgcaacgacgaggagctcgggaagctgctggccggcgtcaccatcgcgcacggtggcgttctccccaacattcactccgtgctcctgcccaagaaggcggctgataaggccgccagcggcggcagcaaggagcccaagtcccccaagag

SEQ ID NO: 96885 - DNA, 504 bp, Zea mays
  unsure (1)..(504): unsure at all n locations
gtgggactagacttgccatcgactatttantgcaccgctctaccggtccggaattcccgggtcgacccacgcgtccgatcttgaccagttcttacctaacgtgactagggcccatggctctttttgcttggtaatgtcactagggtatagtttctttagctcggcgctgcacatcatgtgagtagtaccttccaccatgcgcatttactctgctgtctatctgctgctggtttccttgtgcagttaaaccggtaaagggtgatgccctgctgttcttcagcctccatcctgatgcaacgacagactctgacagcttgcacggtagctgccccgtaatcgaaggccagaagtggtccgcaactaaatggatccatgtgaggtcatttgacctccctgtgaagcagccgggttcctctgacggatgcgaagacgacaatatcctctgcccccagtgggcagctgtgggtgagtgtgccaagaaccctaactacatggtggggaccn

SEQ ID NO: 96886 - DNA, 519 bp, Zea mays
  unsure (1)..(519): unsure at all n locations
gttattgctgagttttccaaatttcgacgcancatctaccgcctctgaattcccgggtcgacccacgcgtccgagacgagcaaggccaggcatgaaggaatttcaattagaaagtatcttccttcaccatgtgtatatgtatggaggttgccgacattgctcttatacatgtatatttgctactggatataatatttctattttacattattctcatacttcttttttataataccttactattaatgatttatacatttctctaatgtatattgttgcttattatcatttttatctatattatatctcattctcaatatctttttaatttttaatttattctttttttatcttttctatatattattttttccttatatttctattctcttttattattttcatttttacttctatattatataatttttctctatatattatcttacttatttatttttattatttttcttttcttactcttattttattttattttaattattactcttttttctt

SEQ ID NO: 96887 - DNA, 516 bp, Zea mays
  unsure (1)..(516): unsure at all n locations
tggcntattattggctacgcctagcgatgcantancgctaccggtttcggaattcccgggtcgacccacgcgtccgccaggtttctgattttggacttgcaaggttagcggctgattccaatacacatgttaccacacgtgtcatggggacatttgggtatttggctccagagtatgcattgtcaggaaagttaacagcaaagtctgatgtatattcttttggggttgttcttttggagctgatcacaggaagaaaacctgttgatgcttctcagccattgggagatgaaagtctggttgaatgggtgagttcatcacttcattttatataataagtgaccttactgcatgtcactaatgttaggttctaaattatgcgtaacttttctgttttttaaccataaccagtaaccatagtcatgagattgagatccactaataaatgacatgattatttcgtgatacaccaatggatgtgtctagacttcttcaagcttcaactgttgatttcctgtn

SEQ ID NO: 96888 - DNA, 500 bp, Zea mays
gtgccgtttgctgccatgactatctatgtaccgctctaccggtccggaattcccgggtcgacccacgcgtccggcagcatacagtcacaggttgccaagatcgaggatgacatgaaggttcgagcatcggaatataataatgtaaggagccagcttagtgcgatcaacaggaagcaaagtgggagcttagcggttcgtgatctttccaatctggtaaaaccggaggatatgatcacctcggaacatctcgtgacacttcttgcaattgttcccaagtactcccaaaaagactggttgtcaagctatgagaaaattgacacattcgtggtacctaggtcatctaaaaagctctatgaagacaatgaatatgctctctacactgtaacactgtttgctaaggttgttgacaattttaaggtccgtgctcgcgagaagggttttcaggtccgtgattttgagtacagtcctgaagcacaggaaagtcggaagcaggagatggt

SEQ ID NO: 96889 - DNA, 510 bp, Zea mays
  unsure (1)..(510): unsure at all n locations
tgggtttgctgatgccccacctcncgagcaacgtctcggccggaattcccgggtcgacccacgcgtccgcccacgcgtccgcccacgcgtccgcccacgcgttcgcccacgcgtccgcggacgcgtgggctgggatacagcgatgagcgccgtgttcagccagtaccaggagatcgacatctacaacatctacgcgcccagatgcaacctccctccgtcgtcagctgcacttgcacttgctgttgacaaggcagtcgtagccaacagacaggaacatttcaggcgaaggatcaggatgttctccggatatgacccgtgctactcttcgaacgcggaaaagtacttcaacgatgcaggtgtgcagacggcattccatgcgaatgccagtggagctcggaaatgggaagtttgcagtgattcaattttgaggtcatacaatttctcggtgctttctgtcttaccaatctactctaagctcatcaaagcaagactgagagtgtggctctacag

SEQ ID NO: 96890 - DNA, 505 bp, Zea mays
ggcgattgctgaagccaggttcacacgcactgacgtaccggtccggaattcccgggtcgacccacgcgtccgcgcagatccgtcgtccggtgagtggaagccgcacgaacccatggcctccggcgagcttgcctgcacctacgccgctctcatcctcagcgacgatggcatcgccattcaccgcccagaaaatcgccacaaccgtaaaggcggccaacataaaggccaagtccaactggccggcctttttggccaagttcctgaaaaaccccaacgtcaaggacctaatcctttccgtggaacctggtgccgaacctgttcaagtggttgttgccgaacctgctgggggggctccggttgttgttgccccggtttgtaagggaaaaaaggagaaggccaaggggaattttattaaccacgtggctctaagccgtttcaacggaggacaccccttaaccaagctcttgcccatatacaatgtgccttgaaaacactatctgtgttt

SEQ ID NO: 96891 - DNA, 520 bp, Zea mays
  unsure (1)..(520): unsure at all n locations
gtgtgntatctcttggctcagcttngattgcacttactgcccggtccggaattcccgggtcgacccacgcgtccgcccacgcgtccgcccacgcgtccggaaccaaacatggagcgacaaacgatcgagcagaagggtggctttgtatcaaacctaccgggtgatgtgccacgtgttgatgggcagctggcagttgcaagggcatttggagaccggagcttgaagaagcacctcagctctgatccatatgtggtcgagcaaactatcgatgaaaatactgagtttttaattctagcaagtgatggcttgtggaaggtgatgtccaaccaggaggctgtcgacgagatcaaggattgcaaggacgcgcatgcagctgccaagcacctgacggagcaggccgtgaaccggaagagcaaagacgacatttcagttatcgtagtcaagttcatgtgctagcacattgtcaggttaaatggtctcccgattgtataccgtgttaaattatcttttaagtcttgtg

SEQ ID NO: 96892 - DNA, 520 bp, Zea mays
  unsure (1)..(520): unsure at all n locations
tatatatttatcgctgtcttttccgaaatttgcagcnacgttctggtcttgaattaaccggccgaccgacgcgtccgcccacgcgtcctcccactcgttcggaacctaatttggatcgacaaacgatcgaacacaaggggggatttgtatcaaacctaccgacttatgttccacatctagattgtcacctacctaatgcaaggtcatttcaacacctgagcttgaataatcacctcatctgtgatctatattttgtccaccccactattaatgaccatactaaatcttcaattctatcaagtgatctctactacaaagtcatttacatccaaaacttttactataaggtcaatgcttacatgtacacagaagcaactttttatcatccaacttaacaagccctgatcagcgagaccttacaccacctctctattatataaatataactcatatgataactcattttctgattactacaaattatctctagctttacactctcctatattccttaatactt

SEQ ID NO: 96893 - DNA, 525 bp, Zea mays
  unsure (1)..(525): unsure at all n locations
gtcgcgtctagtctcggccccagccttgngacgcagacgncgcggtccggaattcccgggtcgacccacgcgtccgctcaatgtcaattggtacgttgactttggataagatacaggagcttaatgctgagaaacgagaattagtggatgatgttgaggaattggagaatatgtcaccaaaatcactatggttgaaagatcttgatgcttttgagaaagaactggatgtgcttgatcaaaatggatctagcataggaactgcaaagtgaaaagaggataaatgctggctcaagaaaaacctcttatatagggcggacgatctagagggtccaagcttacatacgcgtgcatgctacatgatatctcttctatagcgtctcctagattgaattccctggccgtatgtttacatcgtcgtgactgggaatacccatgcgtcacacaccttaatcgcctcgcaacacagttctgtttcgtatgctggcgagatagctaaaaggctctggaccgatcgatctttccatt

SEQ ID NO: 96894 - DNA, 519 bp, Zea mays
tacgcgtctctgagcatgcttggagagaagtattcctctaccggtccggaattcccgggtcgacccacgcgtccggaaacagtggaatgcctgagtgcaaactcggcttgaatgatagggttcttttggaggctgaaggcagagcaactaaaggaaaagcgatagaccttgatgatatcaaatttcatcagtgtgtacgtttagctagattcgagaatgatagaactatatcgttcatacctcctgatggatcttttgatctaatgacatacaggcttagcactcaggtaaaacctcttatctgggtcgaagcacagattgagaaacattctagaagccgtatagaactcatggtgaaggcaaggagtcagttcaaggaaagaagcacagcaacaaatgttgaaattgaagtgcctgttccttcagatgccacaaacccaaatataagaacttcaatgggttctgctgcatatgctcctgagagagatgcaatggtctggaaagtaaaatcattccctg

SEQ ID NO: 96895 - DNA, 508 bp, Zea mays
  unsure (1)..(508): unsure at all n locations
gtgcggtntgnctagcatctgttaccatcgcagtacctgcnccggtccggaattcccgggtcgacccacgcgtccgcatcagagccatcccgttcaagagcaggtcttaagctgccgtggccgtgccgagacatgccagtccgaagaacgggcgtcttcctgtgatgtcttcttgtctgcccacgcctagtttctctgtcgattcctattcgtcgtctcttcagggctggtgctcactgctgcgccgttctgttaaccgaaacaagaactctgtgtattcctgtaccgagctgtgcatgtttttttctttccatcgtggagaatttaagttattatccgtttgctgcaaaaaaaaaaaaaaagggcggccgctctagaggatccaagcttacgtacgcgtgcatgcgacgtcatagctcttctatagtgtcacctaaattcaattcactggccgtcgttttacaacgtcgtgactgggaaaaccctggcgttacccaacttaatcgcc

SEQ ID NO: 96896 - DNA, 504 bp, Zea mays
  unsure (1)..(504): unsure at all n locations
gtgctgnttgactcgccctccagcttacatagtatcgctccaccggtccggaattcccgggtcgacccacgcgtccgagcacgagctctcgtatcaggtctctcgccccgcgcgccgccggcggcttgcttcgccgctgcccgtgcgccaccgtcctccccgtcgcggcatcatctcgactcgaggcgatgcagatcggaggtggatttggttgagcagcttgcgaggcatttctctaggcctctgaccaaggaacaaatggaggcaattatggagctggcaactcaggggaaggaaaaggaagggatcaagaagaagggcagcaaggtgacacctctcaaggctcctatcatggaggctgctgaaatgctctgagttcaattatgagatgtgtgggtagttctagtgcatcatgttatgtccccggtgtacttgcctatgagtcgcccaggatcttttgttggctgctttgtgtagcaggttgttgtctgggcagtggtgttt

SEQ ID NO: 96897 - DNA, 510 bp, Zea mays
  unsure (1)..(510): unsure at all n locations
agtgccngtntngncttggcccagcnctcacgacgtaactgcccggtccggaattcccgggtcgacccacgcgtccgatcgatggacgcgtcaatgaggacaagctcgtcacctgaggagatcgacaggtctggtgagctctcggtgtccgtcagcaatgcgagcgaccaggagagggagtgggtcgaagaagacgagccaggcgtatatatcacaatccgggctttacctggtgggatcagagagcttcgccgcgttcggttcagccgggagaagttcagcgagatgcatgccaggctgtggtgggaagagaaccgagcgaggatacacgaacaatacctctgagaagagacgcccgacaccatcagcagcacgagcacatgaatagagctggcactaacacattcacatgcatttccagcttcatacgatgttttgctaacctaaaaggtccggtttccggtattttacatttcgttcagtctcacgtgtggtggtggtggggtggga

SEQ ID NO: 96898 - DNA, 514 bp, Zea mays
  unsure (1)..(514): unsure at all n locations
ttgggttgctgtggnnccctacccgnccgagtaaggcttcggtcttgaattaccgggtcgacccacgcgtccgcccacgcgtccggtcaccggtgggcctgagatccccttccaccccggcagggaggacaagcctgagccgccacctgagggccgtcttcctgatgccaccaagggttctgaccacctgaggcaagtctttggcaagcagatgggtttgagtgatcaggacattgttgccctctctggtggccacaccttgggaaggtgccacaaagagcggtctggttttgagggggcctggactacgaaccctttggtctttgacaactcttacttcaaggaacttctgagtggcgacaaggagggtcttcttcagctcccaagtgacaaagccctgctgagcgaccctgtcttccgccctcttgtggagaaatatgctgcagatgagaaggcattctttgatgactacaaagaggcccacctcaagctctccgaactggggtatgctgat

SEQ ID NO: 96899 - DNA, 517 bp, Zea mays
  unsure (1)..(517): unsure at all n locations
ttgcggtattgctcggatccgaccattatagtagtcgctctaccggtccggaattcccgggtcgacccacgcgtccgcccacgcgtccgccggcctccgtctcccgccccgtcctacacggagaaggacgtgctctcgtcgatgctgagacggctcggtgagctggagggcagggtgcaggtgctcgagacgaagccgtccgagatgccgtttgagaaggaggagctgctcaacgcagccgtccgccgcgtggacgcgctggaagccgagctgatctccacgaagaaggccctttacgatgctctgatgcgacaggatgagctgctcgcgtacattgacaggcaggagctgatcaagttccgtaaaaagaagttctgcttctaagatctgaccatggagcagctggtcatgtccggagccgttcgtgtatattgttggatcgcggctagtacggtgaatgatgtaatgtgtccatctgtacaagtgtgtaactgaacggtgtaagtatagtaggaan

SEQ ID NO: 96900 - DNA, 523 bp, Zea mays
tgggggtgtgtgtgccatccgaatcatagtagcattgactctaccgttccggaattcccgggtccgcgtccagtgtgtacgctccccctcagtcctagcggtagcgttcgcgcgggagacgtagatggcggcttcggcggcggcagcgagaacaccggtggcgccgacagaggggacggtgatcgcgatccacaggctggaggagtggagcatccatatcgaggaggccaacagcgccaacaagctggtggtgattgacttcactgcaacatggtgtgctccgtgccgcgccatggctccaatttttgctgatatgtgcaagaagtccccaaatgttggtttcctgaaagttgatgtccatgaaatgaagaccattgctgagcaattcagcgtataggccatgccaacatttctgtgcatgaggcaaggcgacgtccatgacagggtctgtggcgcaccacatgaagagctagcacggaagcttgaactacacatggactggtagatcagtgatgctcctatg

SEQ ID NO: 96901 - DNA, 518 bp, Zea mays
  unsure (1)..(518): unsure at all n locations
tgtgcgnttgactcgccatccgatctaggtagttctcgctctaccggtccggaattcccgggtcgacccacgcgtccgggacttcaacaactacaagtttcgtgtgcctgtgtccggcgccatcatcctagacgacacttatgagaggtgcttgcttgttaaaggatggaaggctggggccagctggagctttcctcgtggaaagaggaataaagatgaggaagaccacacatgtgctgttagagaagttctagaggaaactgggtgtgatgtttctagactattaaatctggatgattacattgaagtttcaattggacaacaaagggttcggctctacatcataacaggggttaaaagagacactgtgtttgcacctcaaaccaagaaggaaattagtgaaatttcatggcacagaattgatgacctcttaccagctagtgatgatgcagtatctcgtgcagtgaatggaatgaagctgtacatggttgcgccatttttgacgggtcttaaggctn

SEQ ID NO: 96902 - DNA, 498 bp, Zea mays
  unsure (1)..(498): unsure at all n locations
gtgcgtnttgcttgcatcgaatattactgactgctcgtaccggtccggaattcccgggtcgacccacgcgtccgggacgcgtgggcggacgcgtgggctttcatggtgctaccatgtgctggactggcactactggttcatccttcagcatctcataacattgagaaccggatctcctgggcgttctgtggttatttggaagctgtttcagtgctgccacaattacgcttgatgcagaatactaagatagttgaaccgtttacagctcactatgtatctgcattgggggttgcaaggtttcttagctgcgcccactgggttctacaggttttggatacgcgtgtgcgtctgctgacagctcttggctatggactgtggccgtctatggctgctgtttcagaaatcgtgcagacattcatccttgcagatttctgctactactatgtgaagagcctggttggtgggcagctggtgctacggcattcctcaggggtggtg

SEQ ID NO: 96903 - DNA, 505 bp, Zea mays
  unsure (1)..(505): unsure at all n locations
cgtaggggctcgtngtcccttgtacgcatgctcgtacgcctgccgtaccggtccggaattcccgggtcgacccacgcgtccgcttacatcgaccgcctaagagtcgcgctgtaagaagtaacaacctcttctctccgccatctgctcggcagccgcgaaacagcaactatgcgtgagtgcatctccatccacgttggccaggctggtgtccagatcggcaatgcctgctgggagctctactgcctggaacacggcattcagcccgatggccagatgccaagtgacaagactattgggggaggagacgactccttcaacaccttcttcagtgagacaggggctggcaagcatgtgcccagggcagtgtttgtagacctggaacccacagtcattgatgaggttcgcactggcacctaccgccagctcttccaccctgagcagctcatcacaggcaaagaagatgctgccaataactatgcccggngtcactacaccattggcaggg

SEQ ID NO: 96904 - DNA, 506 bp, Zea mays
  unsure (1)..(506): unsure at all n locations
ggggaggggtcgcgttanntattaccgtagtctcatacgcttgcacgtaccggtccggaattcccgggtcgacccacgcgtccgcgacgccacatgccaccgcgacttcattaagaacatgatcacaggcacattccatgcggactgcgccgtgctgattgtggccgcatgagtgggtgagttcgaggcaggcatcttcaagaatgggcagacccgggagcacgcgctgctggcctacacgctgggcgtgaagcagctcatcgtgggggtgaacaagatggacttcacggagcccggctacagcgagaagcgctatgatgaaattgtcaaggaggtcagcgcctacattaagaagatcggattccaccccggcactgtgccctttgtggccatctnaaggtggcaccgggaaccacctggctggagcccttaacccaacatgccctggttcaagggctggaaagtggagaggaaggaagggaacgccagtggcgtgttccttcttn

SEQ ID NO: 96905 - DNA, 501 bp, Zea mays
  unsure (1)..(501): unsure at all n locations
gagtgctgtgtcttcgcttgcagctcgtacgcctgcacgtaccggtccggaattcccgggtcgacccacgcgtccgccaggctctcctccaacagggaggccggggggccatggaggggcgagggctacagtgtctgggttaatcagaggctccacagagcggctggccgtttggggggccagtgaagttaagagccagcccacctactggggacgggggcctggggcccaagtcgagtctcttggggaggacgtgcagggtgcctgcccggaggagggtggggcccctgagacagcttgcctgcctgcagatgcggctggggcggggcaacagggaaggcctgcggaggccaggctgtcggcctaccggcctnccaggagctgctcagatcccatcgtcatccgggcacgtggggacttttaactctggtgacagtttcagctacctttgggtcagggactgaaactggagagggtgggggggtgggttcttttatgaan

SEQ ID NO: 96906 - DNA, 503 bp, Zea mays
  unsure (1)..(503): unsure at all n locations
nagaggggctcgtgtcantattacgtactctcgtacgctctgcacgtaccggtccggaattcccgggtcgacccacgcgtccgcttgaatacaagaaaatggaaactgaacagccagaggaaacctttcccaacactgaaaccaatggcgaatttggtaaacgccctgctgaagatatggaagaggaacaagcttttaaaagatctagaaacactgatgagatggttgaattacgcattctgcttcagagcaagaatgctggggcagtgattggaaaaggaggcaagaatattaaggctctccgtacagactacaatgccagtgtttcagtcccagacagcagtggccccgagcgcatattgagtatcagtgctgatattgaaacgattggagaaattctgaagaaaatcatccctaccttggaagaaggcctgcagttgccatcacccactcaaccagncatgtttccgtcgatctgatgctgtggaatgctaaaataacaa

SEQ ID NO: 96907 - DNA, 509 bp, Zea mays
  unsure (1)..(509): unsure at all n locations
gagagggctgntgtcgnaggctggatgctgtacgcactgccgtaccggtccggaattcccgggtcgacccacgcgtccgcgacagatagccgtaacttctgtgctgtgccagccgcatccctgagacaagatggtggaaggtcggagtgaacggattcggccgcatcgggcgcctggtcaccagggctgcttttaattctggcaaagtggacatcgtcgccatcaatgaccccttcattgaccttcactacatggtctacatgttccagtatgattccacccacggcaagttcaacggcacagtcaaggcatagaacgggaagctcgtcatcaatggaaaggccatcaccatcttccaggagcgagatcctgccaacattaagtggggtgatgctggtgctgagtatgtggtggagtccactgggggcttcactaccatggagaaaggctgggctcacttgaagggtggcgccaagagggtcatcatctctgcaccttctgccgatgcc

SEQ ID NO: 96908 - DNA, 503 bp, Zea mays
  unsure (1)..(503): unsure at all n locations
agaggggcgtgtgtcaatcgtccgcaagctcgtacgcctgccgtaccggtccggaattcccgggtcgacccacgcgtccgctccgctcccgcgagtaacttggctccgggggctccgctcgcctgcccgtacgccgcccgccactcaggaccgcgccgtcggcctctgcctcgagcagaccccttccgacggccctcgctgcgcaggctgggacgcctctcccccctccgcccccgccgcggaaagttaagtttgaagaggggggaagagagagaaacatggacatgaagaggaggatccacctggagctgaggaaccggaccccggcagctgttcgagaacttgttctggacaactgcaaatcaaatgatgggaaaattgagggcttaacagctgaatntgtgaacttagagttcctcaatttaataaatgtaggcttggattcaggttccaatctttccaaactacctaaattggaaaagcttgagctcaatgataataag

SEQ ID NO: 96909 - DNA, 505 bp, Zea mays
  unsure (1)..(505): unsure at all n locations
agtgggtgctctagtaccttgactgcaggtctgtctgcagtaccggtccggtaattcccgggtcgatccacgcgtnccgaacgaagcgcccgcagtacatcgagttctggaagcccttcaagtaccagggcctgaccattggggtcaagaaggagatgccccggagcacgctggactccttcatgcagcccttccagagcacgctgtggctgctggtggggctgtccgtgcacgtggtggccgtgatgctgtacctgctggaccgcttcagccccttcggccggttcaaagtgaacagcgaggacgaggaggaggatgcgctgactctgtcttcggctatgtggatctcctggggcgtcctgctgaattcaggcatcgagggaagcgcccccagaagcttttcggcgcgcatactgtgcatggtgtgggcagggttcgacatgatcattgtggccttttacaccggcaaccttgcaagctttcttgtgctggaccggtcacaaaa

SEQ ID NO: 96910 - DNA, 513 bp, Zea mays
  unsure (1)..(513): unsure at all n locations
ggatcctntattagctgggctactattcatgatancctagaaacctcaattaccggtcgaccacgcgtccgggcggcctgaaatctggtggtaatgcttatgtgattggagatccagcaagacctggacagaagtggcacgtggtctacgccactgagtacccagagcaaccaatggttaaccttgaaatgtgcatgactggtctggacaagaagatagcttctgtctttttcaagactaatgctgatgggaacacaacatgtgccaaggaaatgacaaagctctctggcatctctgaaatcatccccgagatggagatctgcgattttgactttgaaccctgtggctactccatgaatgcgatccatggctctgcattctccacaatccatgtgacgcccgaggacggtttcagctatgccagttatgaggttatgggcttggatgccactgctctgncttatggtgaccttgtcaaagaggttctttcgtgctttggccccttcgagtttt

SEQ ID NO: 96911 - DNA, 518 bp, Zea mays
  unsure (1)..(518): unsure at all n locations
agggagcgcannnnnttaggtgggccagctcttaaagaatatcacgtattgctcaccggtccggaattcccgggtcgacctacgcgtccgcggacgcgtgggcggacgcgtgggcaagcaactgcaaagcagcaagctctacggttcttctggactgaacgtgtgactagataacaacaagcgtgaaccatggcggacgagtacggccgcagcggctacggcaggtccggcgccggcgacgactacgacagcggctacaacagcaagtccggcactgatgactacggccgtggcgaaggtggctacaacaagtcgggcggcgatgacgactacggccgcagcggcggcgatgggtacggcaggtccggcggcgacgactacggccgtggcaccggcggcggtggctacaacaagtccggcggcggaaacgactacggccgnaacggcggcgacgactacgggcgtggcacggcggcngcgggtacaacaagttcngagacgacggttacgacagcggn

SEQ ID NO: 96912 - DNA, 528 bp, Zea mays
  unsure (1)..(528): unsure at all n locations
tgagcgtgctgactatgaaatatagtatccctctccggtctcggattcccgggtcgacccacgcgtccgcccacgcgtccgcccacgcgtccgcccacgcgtccgcttccattcgaacccctctccatgtccttcaacgagataaattactatgttgacatgcctgcagagatgaagagtcaaggagtaaccgcggataagcttcagctgctgtcagggatatctggggcttttcgacctggtgttctcactgctcttatgggtgtgagtgggtctggaaagactactctcatggacgttttatctggaaggaagactggaggatatattgaaggagaaatttatatatctggttaccctaagaaccaagaaacatttgccagaatatcaggttactgtgaacaaaatgacatccactctccacagatcactataagggagtccctactctnttctgctntcatgcgccttcctaaggaggtcactgaccaagaaaagaagatattcgtggatgaagttatggaactg

SEQ ID NO: 96913 - DNA, 515 bp, Zea mays
  unsure (1)..(515): unsure at all n locations
agtatgccggtatttagtggngtggtctccaagccgctcgcatttctcgaattcccgggtcgacccacgcgtccggactagttctagctacaagcgggcgcagtctatgccgtctaccccgacgacgccggtgacgcggtcgtggtcgtcgtcgtcgacgactccgcgcggcgccggcaacgtgtggcgcaacgtcttccacccggggtgctatcttttcaccaagggcatgggcgccaacctcttcgaccggccgcagctccatcttctttaccgtctacgactggctctacagctactagaccaggagcaaccaccgttagatcgttcgagatggatggacagtgaataggccatgtttgctggtccttgtggttatctaaaacgcacgcatgctctattatagctagtcatcactatttatatacttgtgtttgtgtattgttgtttttgttcttctggtgtcttcttcgtttaattggactttatgtataggagtgagtgattttttttta

SEQ ID NO: 96914 - DNA, 505 bp, Zea mays
  unsure (1)..(505): unsure at all n locations
agcttgcgcngnnntgagcggctctagctctcaccgactcagctcgcaagtccggaattcccgggtcgacccacgcgtccgcccacgcgtccgcccctacctctccagcatctcccgtctccgtcgtctcgtctccgctcctgacctcgcgagccatgggcaagatcaagatcggaatcaacggtttcggaaggatcggcaggctcgtggccagtgtcgccctgcagagcgaggatgtcgagctcgtcgccgtcaacgaccccttcatcaccacggattacatgacctacatgttcaagtacgacaccgtgcacggccaatggaagcacagcgacatcaccctcaaggactccaagacgcttctcttcggcgagaagccggtcaccgtctntggcatcaggaaccccgaggagatcccgtggggtgaggctggtgctgagtatgtcgtggagtccaccggtgtcttcactgacaaggacaaggctgctgcacatctgaagggtgg

SEQ ID NO: 96915 - DNA, 506 bp, Zea mays
  unsure (1)..(506): unsure at all n locations
gggtgcgccgtnttgagggggacgatactacagcatcttacagtagtgctgctaccggtccggaattcccgggtcgacccacgcgtccgcggacgcgtgggctcgggcgagctctccagcgcccgcttcagcgagaaggagctgatcagggccatcgaccgcgaggccgtgttcacgtacgcggaggacgcggccagcgccagcctgccgctgatgcagaagctgcgcgccgtgctggtggaccacgccctcagcagcggcgacgcggagcgggagccctccgtgttctccaagatcaccaggttcgaggaggagctccgcgcggtgctgccccaggaggtggaggccgcccgcgtggcggtcgccgagggcaccgnccccgtggcgaaccggatcgcggacagccggtcgttcccgctgtaccgcttcgtgcgcgaggagctcggctgcgtgttcctgaccggcgagaggctcaagtcccccggcgaggagtgcaacaaggtgtt

SEQ ID NO: 96916 - DNA, 527 bp, Zea mays
tgtacgtgctgatcctttttcctaatgttcttcatgttggaataacttgcggacgcactcgtccgtcgacgcgtccgtaagcatataaataagtggaggagaagaaacttactaggattcccctggtaacttggagcgaaccgggagcagcccagcttgagaatcgggcggcctagccgtccgaattgtagtctggagaggcgtcctcagcgacagaccgaccccaagttctctggaaagggactcctgtgagggtgagagccccatgctgcccggaccctgtcgcaccacgaggcgccatcaacgagtctctttgtatggtaatgcatgccaaatcgctcggtatactacgtccaatgctaaatacaagcgagataccgatagctaacaagtaccgttaaaaatataaattatgggcgtcctctctagatgatccatgcattactactcttgcatgctacttcatatctcttcgatagtttcaccttaatttaattcactgttcttcaatttacaaacttcgtttg

SEQ ID NO: 96917 - DNA, 529 bp, Zea mays
cgggccattgtgaaccatgccctacgatacctctaccggttcggaattcccggtcgacctacgcgtccgcccacgcgtccgcgacttgtttcattgattcttgaagagatcgagcttcttttgcaccacaaggtcgaggatgtcttgcaactgcggatcaagctgcggctgcggctcaagctgcaagtgcggcaagaagtaccctgacctggaggagacgagcaccgccgcgcaggccaccgtcgtcctcggcgtggccccggagaagaaggccgcgcccgagttcgtcgaggccgcggcggagtccggcgaggccgcccacggctgcagctgcggtggcaactgcaagtgcgacccctgcaactgctgatcacatcgatcgacgaccatggatatgattattatctatctagcttgtggtggtggttgaacaataataagcgaagccgagctggctgccatacataggtattgtgtggtgtgtgtgagagagagagaaacagagttcttcagtttgctatctctctct

SEQ ID NO: 96918 - DNA, 532 bp, Zea mays
  unsure (1)..(532): unsure at all n locations
cgaggccattggtganccatcncactcgnattcgtctcaggttcggaattcccggctcgacccacgcgtccgcggcttttaagtgcggctatgatcttttacacatttggatgaagcaacaaattcgtccagactcttggtagagtctagaagaccacgactgatcctcaaaggtaatgaatggaaaaaatagcatgtcgtaataaaatcaatttctttttttttttttaataaaaaaaattctgattttctgggtctagtgaataaatggatagagcctggctctaattctggtaaaaaaaaaaaaaaagggcggccgctctagaggatccaagcttacgtacgcgtgcatgcgacgtcatagctcttctatagtgtcacctaaattcaattcactggccgtcgttttacaacgtcgtgactgggaaaaccctggcgttacccaacttaatcgccttgcagcacatccccctttcgccagctggcgtaatagcgaataagcccgtaccgatcgcccttcccaacagttgcg

SEQ ID NO: 96919 - DNA, 530 bp, Zea mays
ggagtctcgtattggaggggaagagactcaaagcattatacgtattgctctaccggtctggaattcccgggtcgacccacgcgtccgcttgaccagcaaattaaagagatcaaagaggtcattgagcttccaatcaaacatccggaagtatttgagagccttggaattgcccaaccaaagggtgtcctcctttatggacctccaggcacaggaaagacattgctggcacgtgcggttgctcatcacactgactgcaccttcatcagggtgtctggttctgaattggttcagaagtatattggtgaaggttcccggatggttcgggaactctttgttatggccagggaacatgcgccatccattatatttatggatgaaattgactctatcggatctgctagaatggagtctggaactggcaacggtgatagtgaagtgcagcgtaccatgcttgaaactctaaaccagcttgatggttttgaaccttaaaccaaatttaaggtttgatgggcaacaaacagattaacttt

SEQ ID NO: 96920 - DNA, 510 bp, Zea mays
  unsure (1)..(510): unsure at all n locations
agtnttagggcggtntttaggttgttcagcctatgacagtaagcgtccccggtcccgaattcccgggtcgacccacgcgtccgtgcaatagtcaagaatattgtttttgagtcgcggaagcagaggggataaaaatcttagtcatgtttggactttaactttgttttatgttggaaagtacttgaaagacttttcctgtggtaattctaggcgtaagttgctgtgctggttggggtttactggtgaaccagagtttttctatcccactatgaatttgttacctcaaaaaaaaaaaaaaaaaaaaaaaaaaaaaagggcggccgttctaaaggatccaagcttacgtacgcgtgcatgcaacgtcatagctcttctatagtgtcacctaaattcaattcactggccgtcgttttacaacgtcgtgactgggaaaaccctggcgttacccaacttaatcgccttgcagcacatccccctttcgccagctggcgtaatagcgaagaggcccgc

SEQ ID NO: 96921 - DNA, 540 bp, Zea mays
  unsure (1)..(540): unsure at all n locations
agtttatgccggtatatntagatggnttcggtcatgtccacctggcatcgcagtatcgaattccctggtcgacccacgcgtgcgcccacgcgtccgcggatgcgtgggcggacgtttgggtactagctgcccgatgggcaggtcgtcactatcgtcgcttttaggttcatatgcccataggtgcttttgcagccgtcgctgatcgggatggaagctcccggcatccacgagaccacctacaactcgatcatgaaatgtgacgttgatatcatgaaggacctgtacgggaacatcgtcctcagtggagggacgaccatgttccctggcatcgctgacaggattagcaaggagattactgccctctcaccgagcatctttaagatcaatgtcgtggctccttcttagagaaatttcagagtttggattggtggcttgatcctttcttccctactacgttccatcatatttcgattttcaatggttaactctattaattttgcccttgttattttctcatcaatattcttttttttttacttt

SEQ ID NO: 96922 - DNA, 536 bp, Zea mays
cgtggcctgtgcttgaccatgcacttatagtatctcttctaccggtccggaattcccgggtcgacccacgcgtccgcccacgcgtccgccaaaagtaccttaccggattcccggagatgaagaagcgacttggggggacttatacaatgttatgtatcgagaaaggacactttttttaggtcaagagattcgttgcgagatcacaaatcatattacaggtctgatggtatatctcagtatagaagatggaaatagcgatatttttttgtttataaactcccctggcgggtggctaatctcaggaatggcgatttttgatacgatgcaaacggtgacacctgatatatatacaatatgcctcggaatagccgcgtccatggcctccttcattctgcttggaggagaacccaccaagcgtatagcattccctcacgctaggattatgcttcaccaacctgctagtgcttattatcgggcaaggacaccagaatttttactagaagtggaagagttacacaaagttcgcgaaatgatca

SEQ ID NO: 96923 - DNA, 493 bp, Zea mays
  unsure (1)..(493): unsure at all n locations
gtgcgcctgggctaccgcatatcaagtattgnctgcaccggtcctgaattcccgggtcgacccacgcgtccgcgaggacggtttcagctatgccagttatgaggttatgggcttggatgccactgctctgtctgatggtgaccttgtcaagagggtccttcggtgctttggcccctcggagttttccgttgccgtgaccatcttcggcgggcgtggccatgccgggacatggggaaaggcacttggtgcagaggtctatgactgcaacaacatggtggagcaggagctgcctggaggcgggctcctcgtgtaccagagcttctgtgctgctgaagacgctgttgctacctcgcccaaatctgttttccactgctttgacggcgagaacgtggagagtgctcctcctcctatgaagaaggactacaaactggctaatcttctatgctgggaggaggaagcggatgccatggaggagaaggcgggagtgcttgat

SEQ ID NO: 96924 - DNA, 499 bp, Zea mays
gtgcggcatgaaactacagcaagtatatagtattgcctctaccggtccggaattcccgggtcgacccacgcgtccgctttcaggtgagactttcatattcttcaacatgcagatcaaaggaaacaagagggagatcatgcagcttggtgtaccgttatttcaacctaccacagaggatgctaattgtcacacagaaccaatcccccttgtcctgcaggctgtcattgaccaccttgttctttggcgtttaataccagaaagcaggaaaccaaatagtgtcgtcatcaacttcttcgatgaggatgaacattcgcagccctacttcaagcctccccatcttgacaaccccatttgcactcttctgctgtctgaaaccacgatggcatttggcaggtcacttgtcactgacagcaacggtaactacaaaggacctctcacactttcactaaagcaagggtccttactagtgatgcgtgggaacagtgccgacatggcgcga

SEQ ID NO: 96925 - DNA, 540 bp, Zea mays
  unsure (1)..(540): unsure at all n locations
agtggacggantncctgaagctcagtnccctcgnanntctgctcacggtctcggattcccgggtcgacccacgcgtccgggagtgtgcagagctccaatcatacagcacttcgcagagtcgatagcggggtcgagcagcatcagaagtttcggcaaggaagaccagttcgtgtcgactaacagccgtctaacagatgcctactcccggcccaagttctacaacgccggagcgagggagtggctttgctttcgcctggacttgctgccctctcttgcgttcgccttctctctgatctttctgatcaacctaccgaccggtctcatcgatccaggttgtctggagcatgtgcactttggagaacaagatcatatcagtagagagaatcctacagtacatgggcgttcctgcagagcccccgcttgtcatgccagaaaacaagttggctcagagctggccatcgaatggagaaatccagcttcagaatctccatgtgaaatatgcgccgcagctgcccttcgttctgaagggccttacggtca

SEQ ID NO: 96926 - DNA, 523 bp, Zea mays
  unsure (1)..(523): unsure at all n locations
gaggcttggtgtctcctaggaccgacgncnctacgataccgctccggaattcccgggtcgacccacgcgtccgcccacgcgtccgcgcgaagatcaagagcactccagaggccgagaaatacttcgcagcaacgaaagatgctcttggcgatgttctcgccaagctaggctagacgcaagggctaataatggccatgtaatttcggacttgtgtttgttcatatggacccggcaaggcaatgtaccattttctgttgatattgtatcaggaagcacttaactacaaaaaaaaaaaaaaagggcggccgctctagaggatccaagcttacgtacgcgtgcatgcgacgtcatagctcttctatagtgtcacctaaattcaattcactggccgtcgttttacaacgtcgtgactgggaaaaccctggcgttacccaacttaattcgcttgcagcacaatccccttttggcaagctggcggtaataagcgaaatagggccccgaaacccgattcggctccttttcc

SEQ ID NO: 96927 - DNA, 576 bp, Zea mays
  unsure (1)..(576): unsure at all n locations
agcgaacaggtacctctactgcactgacctaccggtcctgaaatcacgggtcgacccacgcgtccgcggacgcgtgggcggacgcgtgggcggacgcgtgtgtcgtgaacctggtgggcgacccttacctgggggcataagaccccggggtagccttcaagacggccatcatggactggatgacgccgcattcagccaagcccatctaccacgccgtgattaccgtcgtcgggaggccctacgccaccgaccgcgccgcggggaggctcccccattactgcatgaggagccaacaacatcaacggtggactatatggactagaggaaccctacactgacggggccaatgccgccaaagaccgtatcgagtactacattaaggatttgggtaggcaggtaagtaggtacagttacctacatgcatgctggagccttaaaccaagcagttgatgttcgcacaaagaactgagagatgtattcnacagtgcttgtcacaacctgaagattcccgacgaaattatatatatattgatcaggcaataaaggataaatttcgaggttctatgcattgtttag

SEQ ID NO: 96928 - DNA, 524 bp, Zea mays
  unsure (1)..(524): unsure at all n locations
tgaggtgtgcgtgttgnccgggggactgacgacngatcgataccgctccggaattcccgggtcgacccacgcgtccgcggacgcgtgggcggactcgtgggcggactcttgggctgacgcgtgggcgccaccatacgtgctagaagagcgatgcctaccataccacactgatgtcagtctctggagcatttaagtggtctggatcaatggaatgtgtgtgtactaggcagccggcaaagatgagctgctgatggtaatgatgatgataagaggtcactggtaccctactacgtaccctggtctttgtgagctggcatccgtgcccgatagacgatcgaggagagaatgacgcacagctctctgctaccggactgtcttctgccgtaccagccgtgtaacttactagtgtgagaggcctatatggtcagcagcagcaggcagagttgtgcaggaatggtaatggtatttgaaacgtgtttcagggttgaaaaaaccattggataaaaatgttggggcaaaacaat

SEQ ID NO: 96929 - DNA, 529 bp, Zea mays
agagcgatgactgttatcaagtatatcgatgaccgtacggaccgctcttgaatacccgggctgacccacgcgtccggaagctacaatcctaaaaccatctgcttcatccttcagctagccccaagtttagtcggccgatcgagcactgaagtagtaatggcctgcgccaacagctggaccctcgagatcgcgtcgccggtggccccgcagcgcctgttccgcgccgccgtgatggactggcacaccctggcgcccaaggtcgccttccacgtcgtcgccagcgcgcagcccgtggagggcgactgcggcgttggcagcgtcaggcagttcaacttcaccttagtcatgccgttcatcttcatgaatgaacgtctcaagttccttgacgcggacaattgctagtgcaagaacacgctcattgatggcaggctgcattctgtgtcatcattcaaactggcgacgttgtaccaataaaggtggaaccccgagggtccatttgtctgtaatattttgtctaaaagttctaatt

SEQ ID NO: 96930 - DNA, 515 bp, Zea mays
cgaggttcactctctccgatgtacgtcgccgatacgtactgccgtaccggttcggaattcccgggtcgacccacgcgtccgcccacgcgtccgcccacgcgtccgcccacgcgtccggttcttctgtgaagtcggtgatgggtacattcaagacgacttcaacctttgtggcctcagcagccaagttccttattatgattatgctcttgatctcattttagatattgaatcatctcatggtgatatgttcactgaggaacaaaatgagctcgtagaatcagctgcagagatgctttatgggctgatccatgcacgatacattctgaccagtaaagggctggctgcaatgctggagaagtataggaactatgacttcgggcggtgcccgcgtgtttactgctgtggtcaaccatgcctgccggttggacaatcagatattcatcgatctagtaccgtgaaaatatactgccccaaggtgtggaataccattttaacttacccaacgggtccaagat

SEQ ID NO: 96931 - DNA, 515 bp, Zea mays
  unsure (1)..(515): unsure at all n locations
cgagcgagtcgtgtgcctgaagcctgccactcatagtactgccgtaccggtccggaattcccgggtcgacccacgcgtccgcccacgcgtccggcaccatcgacgggcagggagccctggtgtggagcaagaaccagtgcgagcattcttacaattgcaagatcctcccgaatagcttggtgctggattttgtgacgaacgtccagatccgcggcatcacgctgctcaacagcaagttcttccacctcaacatcttcgagtgcaagaacgtgctgatcgacaaagtgacggtcaaggcccccggcgacagccccaacacggacggcatccacatcggcgactccagcaacgtgaccatcagcagcaccaccatcggcgtcggcgacgactgcatctncatcggccccgggagcaagatgatccgcatccatggcgtcaagtgcgggccaggccacggcatcagcgtcngcaagcctgggggcgcttacagggaccgagaaaggacgttggaaaaa

SEQ ID NO: 96932 - DNA, 568 bp, Zea mays
  unsure (1)..(568): unsure at all n locations
acgtgggatgggttcatagcactgcacgtaccggtccggaattcccgggtcgacccacgcgtccgcggacgcgtgggatcttactcttattattgaacctggaagatccttgattgctaatacttgctgcgttcgtcaatagagtaactggtgttaaatctaatggtacaaagaatttcattgttgttgatggcagcatggcagaactcatcagacctagcctgtatggagcatatcagcatatcgaattggtctctccccccactcctggtgctgaagtagcgaccttcgatattgttgggccagtttgtgagtctgcagatttccttggaaaagatagggaacttccaacacctgatgagggagctggactggttgttcatgatgcangggcctactgcatgagcatggtttcacctacaacctgaagtgaggccgccaaagactgggttgaaaaggatggttcaattggtagatctagcttanaagaacctcgtgactacttaaggttctttgatgggcttccggctaaaaagttaattgtgaactgctagggccaaatgttcct

SEQ ID NO: 96933 - DNA, 683 bp, Zea mays
  unsure (1)..(683): unsure at all n locations
tgatgttttgagtgttgccagcngcactaccgncntgtactgtaccggctccgggaattcctcggggtcgactccacgtcgnntccgtgcatcacggtagggcggatctggcntnctgacaccagtctnntcgtcttcttttacgacgaccgtnncaagagccggcgcggaaggggtggtgtcatcaggtnttctcgcgacccgtcctgggacaactgctgcgactnctcggcttacccacgttatcgacgccntngagtccgtacaagggactcnttgccatggcttgctngctgcaaggaatctcngnntcgctgggtggccccnaacggcaagggacantggcccgccngaagggtcatnnncgtcggcngtagggaaaggctnggcggcntgccgggtggttcccggcttcggccctgggactcaaggtgctcangtgtggttggaagggtgctccggccggtgctcttgttgccgggccaaaggaccccgtgggaagggaggcatngctgctgggtgaatcgaggggcattcgaagtatcgaatcccctcagggctgaacaaataaaagtttcggaccggtcggnccattcaaacccttggcccggcgggaaccaaaaaagcggttntgcaagggggtaaagggcccccccaaccaaggttccccaagggggagggtt

SEQ ID NO: 96934 - DNA, 572 bp, Zea mays
  unsure (1)..(572): unsure at all n locations
agcgtgcattgacatctgattgacgaccggtcctgaattgccgggtcgacccacgcgtccgtgagaatctgctacatagggcatttagtgtgttccttttcaactcaaaatatgagctgctacttgagcaaatgtccgcgacaaaggttacctttcctttagttgggaccaatacctgctgcagtcaccctctgtaccgtgagtctgagcttatccaggagaactaccttggtgtgagaaatgcagcacagaggaagctactggatgagctgggcatcccagcagaagatgccccagttgaccaattcacccctctgggccgaatgctttacaaggcaccatctgatgggaaatgtggggagcatgagctcgactacctgctgttcatcgtccggaacgtgaaggtgcagacgaaccccgatgaagtcgctgatgtgaagtacgtaaaccgctaggaggtcaagtgacctttatcggaatggttacgctggcgaggatggggtgaagaactgtccctgtgtcaggctggtggtggacaagtttcttaatgggctgggngagccatttcaaaa

SEQ ID NO: 96935 - DNA, 517 bp, Zea mays
  unsure (1)..(517): unsure at all n locations
agagcgntgacgtgtnnccggggcacgtacgacncgtcgtaccgctccggaattcccgggtcgacccacgcgtccgcccacgcgtccgcccacgcgtccggctttagcgatggtcctgttcatggctggcgccgcggtgctcgccggggctgccggcgccggcgcgcagcagggcgtgtggagcatcatcacccggcccatgttccagagcatgctgagccaccgcggcgacagcgggtgccagggcgccttctacacctacgacgccttcatcgaggccgccagcaagttccccggcttcggcaccaccggcgacgagcagacgcgcaggcgggagctcgccgncttcttcggccagacgtcccacgaaaccaccggtggatgggcgactgctccggatggaccgtttgcctggggatactgccgggtgaagggacagatacagacggacccactctactatggacgaggacccatacagcttaacctcattaagttccaacttacagggttcggg

SEQ ID NO: 96936 - DNA, 534 bp, Zea mays
  unsure (1)..(534): unsure at all n locations
cgagagaccagtgtctaataaagaccaacgtcgtctcnacctgtccgttccggtccggaattcccgggtcgacccacgcgtccgggatattgctattgtgctcatcagtcagtatattgccaacatgataaggtttcgggtggagagctacaacaagcccgtccctgctattctggagatcccatccaaggaccatccatatgatccagcgcacgactcggtgctctctcgagtgaaatatctgttctctgcagaatcggtggcgtctgataggcgatgaaggcatccttgcgtagcagtacccttcgatgcatctaatttgttatggtattgaaaagaagatggcacgtaccattgggtgcgagcgagccagcatgaacaataatgagcttgcaaacaataattggttgaacctaaccaacaccctttttttcataaatggttccaaatgatattttggtgccttggggttagattgggttatttagggggaattaaaaatgccgcatttggtttttgacccaaaaaaaaaaa

SEQ ID NO: 96937 - DNA, 532 bp, Zea mays
  unsure (1)..(532): unsure at all n locations
gagggccggtgtgtccgaataactacgtcttctcgacctgcccgtaccggtctcggaattcccgggtcgacccacgcgtccgcaccgacatgaactactacccggtgtccaagtaccacttcgacctcagcggcacggcggggggcaggctggccaagcccggcctcaacgacaagctccgccactcgggcatcatcgacatcgagttcaccagggtgccgtgcgagttccctggcctcaagatcgggttccacgtggaggagtactcgagccccgtctacttcgcggtgctggtggagtacgaggactgcgacggcgacgtggtgcatgtggacctgatggagtccaagacggcgcgcgggccgacgacggagcgctgggcgccgatgcgcgagtcctgaggctccgaatggcgcatggacaccatccaccgcatgcaggccgcccttcttcattccgattccgaaacgaggcccggctaagacgctttgttcggccagggaaaccggttatttcccgggtcaaactgggn

SEQ ID NO: 96938 - DNA, 522 bp, Zea mays
  unsure (1)..(522): unsure at all n locations
ngagaggccggtgatgcctgcnctcagtctctcatagtacctgcctgtaccggttcggaattcccgggtcgacccacgcgtccggcgcctctacatttcttctctctctgctcctccgcctccgcctgatccatccaagacagggatcgccatgtcggactcggaggagcaccacttcgaatcgaaggccgacgctggggcgtccaagacctacccgcagcaggctggcaccgtccgtaagaacggcttcatcgtcatcaagaaccgtccctgcaaggttgtggaggtttctacctccaagactggtaagcatggccacgccaaatgccactttgtcgccatagacatattcaatgggaaaaagcttgaagatattgttccttcatcacacaactgtgacattccgcatgtgaaccgtactgagtatcagctgattgatatttctgaggatggatttgtgagccttcttacttcagatggcaacactaaggaatgatcttaagacttcccaacttgatgaan

SEQ ID NO: 96939 - DNA, 524 bp, Zea mays
  unsure (1)..(524): unsure at all n locations
agagcggctccgcgttttcattttgcctttgtactanacnacctgtcgtaccggtccggaattcccgggtcgacccacgcgtccgaccagacgtccgaccactcgtatctaatattgattgaatacttttaataaagcagtaccgatccattattggtatgtttatgtcatatagtaaacggatcaaagggatatactgtggcattagagaatattcatcttgacaagaaattatctatatgtaaagatatctctgacaacggctatagctcatttcggtagagcaactaatttacacgtgcgccaatgctttttaacggaactttttatgcaatgaacataattgaccttgaagcataatcaatgtcttacttcatggattcgaaagagtcgaacaacagttacctgacaatgacaaacagctgttttagatctattcaagtgccaaatatggagcttactcatatataacttccattgatttcgccttctttgattaaacgttaaattttcccagcccgatg

SEQ ID NO: 96940 - DNA, 532 bp, Zea mays
  unsure (1)..(532): unsure at all n locations
gctcggntcagtagttgccaggggacctaagnacngtcgaaccgctccggaattcccgggtcgacccacgcgtccgggaaaggtgctatccagtttttcatgaaagaatatgacaaagcgctggaaacttatcaaggtggcctaaagcatgacccgaaaaaccaggagttacttgatggtgtaaggaggtgtgttgaacagatcaacaaggcgagcagaggcgaactcagtgaggaggaactgaaagagagacagaacaaagccatgcaagaccctgagatccagaacatcctgactgatccgatcatgcagcaggttttgacggatctgcaggagaaccctcgggctgcgcaggcgcacctcaagaaccccggagtgatgcagaagatccagaagctcgtcagcgcaaggatagttcagatgaagtagacgggggcttggaatgttccgggttcagatcttgggacctgtgcctggaaatgcttgtgaaacttgaatcaattggttttcgcatattttgggaaaactgaan

SEQ ID NO: 96941 - DNA, 521 bp, Zea mays
  unsure (1)..(521): unsure at all n locations
gaggtatctgtttctccgacaaactgattcatagnactactcttccgatctggaatacgcggatcgacccacgcgtacgtccactcgtccgatttattatatcacaaacattgatgctatcataatgatttaggttactgtgactcttgacgtatttgttgttacttttatggcaaccaatgaggcatctacttatgacagactggagtatttttgttagctcaaaaagactggtttctggtgacacatttattttcttgagtgtgacatcattacatgttaaagttgtcttgtacgttacatttatttcctggctttactaaatttttggatcaaccttctaactgttcttcatctaattgatgtgagaacaaatagctgctgttcggagtaaggaagctcatgagaccactatataacatgccatcttccgttattttgaatctcatcatgcaattttgtttaactaaaaaagttctaattttctcaaaaattgcttaaacttggcattaaattcttcg

SEQ ID NO: 96942 - DNA, 524 bp, Zea mays
  unsure (1)..(524): unsure at all n locations
cgagcgtctcggtgtctcaagtgtactgatgtattntgaaccgtcgctcgaatnttccggtcgacgacgcgtccggtaaaggtgctatccagtttttcatgaattattatgtcaaagcgctggaaacttatcaaggtggcctgaagcatgacccgaaaaaccaggagttacttgatggtgtaaggaggtgtgttgaacagatcaacaaggcgagcataggctaactcagtgaggaggaactgaaagagagacagaacatagccatgcaagaccctgagatccagaacatactgactgatccgatcatgcatcaagttttgactgatctgcatgagaacccttgggctgtgcaggcgcaccttaataaccccgtagtgatgcattatatccagatactcttcatctcaaggattagttatatgaattatactgttgctggaattttcctgatttatattttggtaccttgtgctgtaaatgcttgtgaaacttgaattattggtttttacaatttttgtaaaact

SEQ ID NO: 96943 - DNA, 577 bp, Zea mays
gcgtggctggtgcgactcgatgcacctaccggtccggaattcccgggtcgacccacgcgtccgcccacgcgtccggttggcttctcctccccctccggttcgggttcgggttcgtgaggttctccggggttcggtttcgtgggtgagcggatcgagatggcggcgtcggatgttgagtaccgctgcttcgtcggcggcctcgcctgggccacggacgaccactccctccacaacgccttcagcacctacggcgaggtcctcgagtccaagatcatcctcgatcgggagacgcagaggtcccgcggcttcggcttcggcaccttctccacggaggaggcgatgcggaacgccatcgagggcatgaacggcaaggagctggacggccgcaacatcaccgtcaacgaggcccagtcccgcggcgggcgtggaggcggctgccgctggtggtacggggggtgcccttggatgctgcggctacagccgttgccggcggccgtgattgccggcggcgctactgtggtggcgtgcggtacggtggtgctgtagcgtgtactgtggtgtggccgccggtacagtg

SEQ ID NO: 96944 - DNA, 537 bp, Zea mays
ggaggatcggtgtctccgttgtacctagaccgatacgaccgccgtaccggtctcggaattcccgggtcgacccacgcgtccggattcaaggtactggaacaaccctgaagattttagcccagagaggtttcagaataacaatgtcgactacaaagggaccgattttgagttcacccccttcggtgctggtcgtcgacgctgccctgcaatcatgtttgccacttctactctagagattgcattggcaaaccttctctaccacttcgactgggctcttccggatggagtgagcccaaagatggtggaaatgtctgagcaatacgggatgggtgtcaccaaaaagttagacctgcatttgagagccatcccatatgtatactctactatggcataggtatggggggtggttaaagctacctgcaccttaacttgaggtccttttgatgaaaaaaaaaaacttttttcttatatctttatgattttctatttttctctgacttataataataaaaaaagagggcgggccccgtttttata

SEQ ID NO: 96945 - DNA, 525 bp, Zea mays
  unsure (1)..(525): unsure at all n locations
cgagcgntgngtgtacccagcngcactacgaanngtccgtaccggtccggaattcccgggtcgacccacgcgtccgcccacgcgtccgcccacgcgtccgcccacgcgtccgacgagctcccagacccgtgcatctgcaagcacacgcacggccgaggcatatgggagttgaccaaagatgacgcgaccttcgacgccctagtcaacgacgggttggcttccgacagccagctcatcgtcgacgttgccatcaagcagagcgcagaggtcttccaggggataagctcgctcgtcgacgtcggtgggggcatcggtgcggcggcccaagccatctcaaaggcgttcccgcacgtcaagtgtagcgtgctggaccttgcccacgtcgttgcgaaggctccaactcacacggacgtgcaatttatcgctggcgacatngttgagagcattccaccagcagacgccgtactggtgaaagtcgggctttgcatttaattggggacccattgaccgacctgccgtggaaaa

SEQ ID NO: 96946 - DNA, 541 bp, Zea mays
  unsure (1)..(541): unsure at all n locations
agacggatnatntnatttcggtggtaactacgatctntgtacctgccgtaccggtctcggaattcccgggtcgacccacgcgtccgcccacgcgtccggcgaccgccgccgcttccctactcacccttggccggcgacgacgagcgcgcaccacggcaggatgacgacgctgaggaacctcaagatcaagacgtcgacgtgcaagaggatcgtgaaggagctgcgctcgtacgagaaggaggtggagaaggaggcggccaagaccgccgacatgaaggagaagggcgctgatccctacgacctcaaacagcaggagaatgttttggctgagtcaaggatgatggtcccagactgccacaaacgacttgaaactgcactggctgacttgaaagcaacactggctgaactgaaggagtcaaatgagcaaggtgccgagattgtagaagctgagagttcaatcgcagaaagttgaaccaatttggcaaagccatgccgaaggaattaaaactataaataaaaaccttttttggtgtttggcttg

SEQ ID NO: 96947 - DNA, 583 bp, Zea mays
  unsure (1)..(583): unsure at all n locations
tcgtgggaattacctcatcgaactgcacgtaccggtccgtgaattcccgggtcgacccacgcgtccgttcttgagcaagcaggcgtcggtgttcttctgtcgaacctcggccttaacgcttcttcggcatgaatcctcattagcgccctgacgaccttactgatgctcccaagcatcggcattgcgatgaggctcatggatatgtccggaaggaggtttctcctcctcgcaacgatcccagtcctaatagtcgcgctactcgtcctggtggtgtccaacatcgtggacgtgggggacgtggcgcacgcggcgctctccacggccagcgtcatagtctacttctgcttcttcgtcatggtgttcgggcccgtccccaacatcctctgcgcagagatcttncccaccacggtccgcgggtgtctgcatcgncatctgcgccctggccttttgggccggcgacataatcgtgacgtacacgcgttccgtagtgcctgaacgtcgtcgggcttcggcggcttgttcgggataatacgccggcgtgtgcgtcctaagccttgagttctggttcgatatggggccccag

SEQ ID NO: 96948 - DNA, 583 bp, Zea mays
agcgcgggcattcacgcatcgatgacctaccggtccggaattcccgggtcgacccacgcgtccggcgcttccaacggtagctaactccaaggcaagcatccttggtccattgttggcctcgctcatcgatcagctgtgtctcagcaggaggcgttgcggccatggcggcttcgaagcccatcttgtatagcgcgtggatcagctcctgctccttccgagtccggatcgccctcaacctcaaaggtgtggattatgagtacagggctgtgacaaggaacgatctagattacgaaaagatcaatccaatcaagtatgttccagcattggttgatggggattttgttgtttctgactccctggcaatcatattgtatcttgaagataaatatcctcacaccctttttttgcctcaagatctctaaaaggaagctattaaatctgcagattgcacatataggttggtccagcatttcaaacctttcaatggtatgctggaattgggctgcttgatgggacctttaggcttttacccgaagccttcagattggttcggaattcacccgacaggggatttaaagccatc

SEQ ID NO: 96949 - DNA, 515 bp, Zea mays
  unsure (1)..(515): unsure at all n locations
aatgagcaacgtaggacngcagnacnggtccggaattcccgggtcggcccacgcgtccgaagccatgtggaggagggctttagcgatggtcctgttcatggctggcnccgcgctgctcaccagggctggcggcgccggcncncancanggcatgtggagcatcatcacccggcccatgttccagagcatgctgagccaccgcggcgacagcgggtgccagggcgccttctacacctacgaccccttattcggcagacgtcccacgaaaccaccggtggatgggcgactgcttccgattggacccgttgcttgggaaactggccggttaagggacaaaaacagaccggaccaaccttctattgaccaagacccattccgcttacttaaaaggtccactaccggctctcccggcaaactctgaacctgaaccttgggggcgaaaccgacctgggggcgagagaccccgtggtatccctcaagaccggcatttggtctggatgacccgcaatccccca

SEQ ID NO: 96950 - DNA, 536 bp, Zea mays
  unsure (1)..(536): unsure at all n locations
nggggcccccnctaacgcagttagcaagcaccgcggtaccggtccggaattcccgggtgcggcccacgcgtccgcccacgcgtncgcggacgcgtgggctcgcggcgaccacccgattcgaaccgtgcggagagaccgaagaagcgggagagatggctcgtaccaagcagactgctcgcaagtccacgggagggaaggctcccaggaagcagcttgccaccaaggctgcccgtaagtctgcccccaccactggtggagtgaagaagcctcaccagtacggccttgaaactgttgccttccgtgagatccgcaggtttaaataaagcacttagctgctgttcaggaacttgcctttcaaaggttgagaaggaaaattgaccggactttaaaacttattttcggtttcagaaccattccgggctttccctccaagaggctggttgagcataccctggtggcctgtttgaggacaccaacctgtgcgcccttcattcttagcgtgtgaccatcattgcccaagacatttaaattgcaan

SEQ ID NO: 96951 - DNA, 533 bp, Zea mays
  unsure (1)..(533): unsure at all n locations
agggcgccccncttacgcaatttctanctgactgcggtaccgtccggaatcccgcggcggcccacgcgtccgcccacgcgtccgaaggaccaagggatcaccgtggttgctggtgttgaagctagagggttcatttttggtgctggtatggctttatccattggcgcaaaatttgtgcctttgaggaagccgaagaagttgccaggcgaggtgatctccgaagagtattctttggaatatgcaactgacaagatagaaatgcatgtcggacctgtacaggccaacaaccggccttttgtattcaatgatctaattgttaccggtgaaacattttttccactttcaaaacctaattaaactttttgaaccaaaatgttttaaagttctcttgtcatttaaattgccaaaatcaaagggctatacaaactttggacacgcccaattttttccttttggaaacacacacctctaccgaacttttgacttttttaaaaatttttgcccccccaaactcaaattcccctgtttccatt

SEQ ID NO: 96952 - DNA, 538 bp, Zea mays
  unsure (1)..(538): unsure at all n locations
aggggcccccnnnnnaagccagctaccancgcgacctgcggtaccggtccggaattcccgggtgcggcccacgcgtccggcaagagcgacagagagagagagagagaccgacgcgccggcagatcccaagttcagcgganagggggaagaggngcgaccgaagcggcgatgggtttcatcatggacttcgcggagaatctgatcctccgtctgatggaggacccggacaagcgcgaccaggttcggcgggagcatgtctacaagatgaaggagcggtgcgagcgcactaaggcggcgtggagcctccctctgcgcccctacggcttctggaccttcgaccgcttcaactcgcagctctcctgggatccccaaatcaaccaggccgccggccgtcgggacccctacgacgaccttattggccgccactctggctcgccggcgtctttctgaacaccccgttcgatcttttgccacaaagtctacttgggcattaattaaaaactctttcccctcaaactgtgtgtggggtcattccctt

SEQ ID NO: 96953 - DNA, 524 bp, Zea mays
  unsure (1)..(524): unsure at all n locations
atggcccccnnnttaactagtagcanagtaccgcnnnnnnnnncggaannccgggggggccagcgtccggcaanaccacanananagagagtgttacctacgcgcctgcagatcccaaattcggtggattattaaaaggagggcgaccgaantcttctatngntttcatcatggacttcgcggagaatctgatcctccgtctgatggaagacccggacaagcgcgaccatgttctgcgggagcatgtctacaagatgaaggagcggtgcgagcgcactaaggcggcgtggagccttcctctgcgcccctacggcttcttgaccttcgaccgcttcaactcgcagctcttcttggatccccagaacaaccaggccgcctgccttccggacccctactaccaccttattcccccccacttttgctccccgccgtctttcttaacacccctttcaatcttttccaaaaagtctatctttgcattaataaaaaactttttccctcaaactaatgttggttcatccctn

SEQ ID NO: 96954 - DNA, 526 bp, Zea mays
  unsure (1)..(526): unsure at all n locations
tgcctgnnnnaacatcgtntacgtagtgacatcncnnncggaancccgggcggccgagcatacgcccacgcgtcctaaactaaacaacacctatttctctaaagatcacaatgatnagagcccgtgctgttttagccgtgctggccacctacttcttcnctgtgcccactcacgccgagcagtgctggtctcaatccagccgctcgctgtgccccaactgccttttcttcagccaattctggtagtgcatcagcacctcctactactgcggcaactggtgccaaaaccagtgcaactgcagcttctgcatcacccctaacccttctaacaaccgcggcatttctttcattattccctaatctctcttcaaccaaattcttttttactctaactactctgttttccctctctaacggttttaaaacctacactggctttaatatatggatcaataccatttcctgcttatttgaacaaccgtttcccctctcattaaaaacactaaattttgtcatttttttttcaa

SEQ ID NO: 96955 - DNA, 533 bp, Zea mays
  unsure (1)..(533): unsure at all n locations
aggccnntnnnncccccagctcaccagcagcaccgcggtaccggtccggaattcccggggcggccctttctctaagaaggattggtatgacatcaaggcaccgtcggtgttcagtgtgcgcaacatcggggggactctcgtatcggggacacagggtaccaggattgcttctgagggtctgaagcacagagtctttgaggtttgcctagctgatcttcagggcgacgaggatcaagcttacaggaaaatcaggctccgtgctgaagatgtgcagggcaggaatgtgctcacaaacttttggggcatgaattttaccactgataaactcagatccctagtgaagaagtggcagacattaatcgaagcccatgttgatgtcaagacaaccgacaactacatgttgcgtttgttctgcatcggcttcaccaagaggcgcccaaaccaagtcaagagaacctgctatgctcaggcattccagatccgtcaaatccgccgtaaagatggttgagattatgatcaaacaggcttctaca

SEQ ID NO: 96956 - DNA, 531 bp, Zea mays
  unsure (1)..(531): unsure at all n locations
atgggcnnnnnncccccagcttgcgacgcatcgctcgtaccggtccggaattcccggggcgagccacgcgtccgcccacgcgtccgcggacgcgtgggctaccctcgtcgtcgtctcactcaccccgccgtcacgcctccctcgccaaatgaggtcccgcccttttccgacattcacaggggggacaggaaatcagcggccatggcctcgattccggcgacgaccttcgccgtcatcttatccgtcctcttctgtgccgcggctggcaccgccgtcgacaacgacctccccgactacgtcatccagggccgcgtctactgcgacacctgccgcgccgggttcgtgaccaatgtcaccgagtacatcgcgggcgccaaggtgaggctggagtgcaagcacttcggcaccggcaagctcgagcgctccatcgacggggtgaccgacgcgaacggcacgtacacgatcgagctcaaggacagccacgaggaggacatctgcgaggtggtcttggtggagagcccgcgcaaggac

SEQ ID NO: 96957 - DNA, 513 bp, Zea mays
  unsure (1)..(513): unsure at all n locations
nacggctaaaagcgtgtgcngncncgnnnnggaanancngggtcgggccgcgcgtacggcttgctgttcatctgtccaaaactgctaatatagcttctgaaaatggatgacatgctgggcacttgctcactggggtcttgattttnattttgaaaagttctgttcaatctccttgtcaaatttgaatgtgtatgcgtgcttggtctgtggaaaatatttccaaagaaagaggttgaaatctcatgcatatacgcacagccttgaaacaggccatccaaacaacaccattgatcggtgtatagtccctgaacctctcagggaacccaacaaagtaacaaattttgttgcagtactacaattggagttcttttggcaacatattttgttctattcacttgagttgcaatcaaacaaagggcaccattccattttgtaatcacaattgctttcttgagttattgaataaccaaacccttgcccaccccttcaaatctaagatcccagcccaaaaat

SEQ ID NO: 96958 - DNA, 533 bp, Zea mays
  unsure (1)..(533): unsure at all n locations
nnngggacgcggtgncttaaggttggccccnangnacgncncnnnnnntaaacccagggccagccgcgcgtacgccaccaccaccgcctgaccgccccgacgcttctcccctctggcgctatggcccaaactggtgtgctcaaggttggcgtgtgctgtgaggactgtgttggagctgtcaagcgggtcctgggcaagatggaaggcgttgagtcctacgacgtagacatcatggaacagaaggtcaccgtgaaaggcaatgtgacacctgacgccgtcctgcaaactgtttccaagactggcaagaagacttcgttctgggaggctgaagccgtgacaagtgaatcctccacaccttccggtgccaccgcctgacaagttccatgatcacgaagttccccgcaaagccgcaaaaaaaaaaaatgtgaatttatttaactttgatctcttacaaaaaatttcaaaccttttactctggctgtcattttcaaaagctattttcggtccctgaaattctctaaaattttggaaan

SEQ ID NO: 96959 - DNA, 556 bp, Zea mays
gtatgcgctggtttctcgatgacgacagtcatggcttcatctactgaatcccgggtcgacccacgcgtacgggacggaattcggtcctgcggatattcaagggccttctgtggcgcatccgacaccgctcgaggtgcggtgctattacagacggtggaccctactttcagctgaaccgattccagggttggcgttccgttaagcataaaagttatctcttctcgaggcactatacttcgttttctgatttcctaacgtcaccttatatctacaatttctcgctcgttattatattaacccattactcttgtcgttgaccttcgcgatcattcttattttctttataacacctataaatcttttcattctttcctttatcaagtgctccatcttaaaattctctttaaaaactctctcttgctgttatcttgattttaatttttttactttcttgcatatctcttctaaatcggttgttttatttttcttttacatctattatttttctcttctgtttctttgtgtactttaatttattatactcgccactatatat

SEQ ID NO: 96960 - DNA, 557 bp, Zea mays
  unsure (1)..(557): unsure at all n locations
cgatgtcttatctgtccctgagtcagccctacatcgcactgacgtaccggtccggaattcccgggtcgacccacgcgtccgcccacgcgtccggtcaccactcccaagccagtaccgagtcctacgagcagtcgcacgcaagtgtcaagagacgaaacggtcgacatggctcgcacgcaatctgccgtagcggtcgccgtggtggccgcggtgctgctgctggcagcggcggcgacgacctcggaggccgccatcacctgcgggcaggtgagctccgccatcgcgccctgcctctcctacgcccgcggcacggggtccggcccctccgcgtcctgctgtagcggcgtcaggaacctcaagagcgccgccagcaccgccgccgacaggcgcgccgcctgcaactgcctcaagaacgccgccaggggcgtcagcggcctcaacgccggcaacgccgtcagcatcccctccaagtgcggcgtcagcatcccctacaccatcagcaccttcaccgactgctccagggtgaactaaaacctagaccacgcgcgacgacggcn

SEQ ID NO: 96961 - DNA, 535 bp, Zea mays
gtccgctgctgccctggccaaatacgtcgcacgactaccggtccggaattcccgggtcgacccacgcgtccgagcgaatccatccccatcctcatgattataaataaataataattttacacgccctcctctctggggatttctcgcggagcggccctccacctttatcgccgccgcctccgccgccgttgctgtgttccgtctcttcgccgatggcttcggccaagttcggtgctgcccagcaggtggagaaccgaggcgcgctgtccaaaaggtcacgtaacgacgtgtctgtaagggagggggactggaattgtcctcagtgtggtaatgtcaacttcagttttagaaatgtttgcaaccgtggagcctgtggtgcaccccgtccatcaccgagtccaagtccaagattgatgccaggacctcctgcttctggatatgaccggtcacctctattttacggaggatgtggtggcgccccaccttcaattccgcttggaactggtacctatggtgctccatatccaccccttgg

SEQ ID NO: 96962 - DNA, 540 bp, Zea mays
  unsure (1)..(540): unsure at all n locations
gggaggttctctcactgatccgatagcatctctactctactaacttccgggtcgacccacgcgtncgagagcatcgtggccagcggcctcgcccggcggtggctcgtgccagggtcctaagccattcgggtgccggaacccctggcagtggtcggcgacttctaacggcaccgggaccatccccgacaaggagatcctcaagatcgtcaaggagaacttcgacttcaggcccgggatgatcaccatcaaccttgacctcaagaagggcggcaacaggttcatcaagaccgccgcatacggtcactttggccgtgacgacgccgactttacctgggaagtggtcaagcccctaaagaaggcattcgcttaagaatgatttgtaaggtcactggacatgatgttcattttcgtcttgctctgctgatacctgcaaagattgctgcttgttgttgcccctggatgtgtgtttgaacaatgactgtctgctctggtccttgaagaccaattatagtgaccgatggttaaaaaaggttcggcaat

SEQ ID NO: 96963 - DNA, 526 bp, Zea mays
cctgggctaaattcgctgcactgcaccgtccggtccggaattcccgggtcgacccacgcgtccgcccacgcgtccgagcgatggtcctgttcatggctggcgccgcgctgctcgccggggctgtcggcgccggcgcgcagcagggcgtgtggagcatcatcacccggcccatgttccagagcatgctgagccaccgcggcgacagcgggtgccagggcgccttctacacctacgacgccttcatcgaggccgccagcaagttccccggcttcggcaccaccggcgacgagcagacgcgcacgcgggagctcgtcgccttcttcgggcagacgtcccacgaaaccaccggtggatgggcgactgctgcggatggaccgtttgactggggatactgacggctgaaggaacagaaacagacggacctaccctactatggacgaggacccatacagctaactgatgaggacaactacaggctcgccgggcaagcgctgaacctgaacctggtgggcgacccggacctggg

SEQ ID NO: 96964 - DNA, 543 bp, Zea mays
  unsure (1)..(543): unsure at all n locations
tggatgcctgcttgcctccgtaacggatcctantgtacgactaccggtcctgaattcccgggtcgacccacgcgtcacgacaaacagcctagctctaataagctcgagtattgcttgctcttcacaagaaacaaagcagggcaccaacaatggccgtcgcctactcgtcctcggtccttctgctgctcctggccgtcgacttggctggcatgagcgccaacgccgacaccttcaccatcaccaacaactgcgggttcaccgtgtggcccgcggccaccccggtgggcgggggcacgcagctgaacccgggcgggacgtggaccgtcaacgtgcccgccggcaccagcttcgggcgcgtgtggggccgcaccggctgcttctttaacggcaacagccggagctgccagacaggcgactgctgtcgtgcgcctgcctgcacgctgtctgggcaggccacgatgacgctggccgaagtcaccatcggctgcagccaggacttctacgacatcttggtcatcgaatggtacaaccttgccatggtct

SEQ ID NO: 96965 - DNA, 535 bp, Zea mays
  unsure (1)..(535): unsure at all n locations
gaggctnntngtctacggaagatgcaggcacgcactttccggtcctgaattcccgggtcgacccacgcgtccgcagacgcgtgggccgagtgcgaaccaagcataccatatcaagaagaagcgtagtcgtcgtcggaagtaaatgcgcgaagcaagatgtcgtgtcacgcgtacgtcgacgagcacttgatgtgcgagatcgaaggacagcatctcagcgccgtcgacatcgtcggtcactacagcagcgtttgggctcagtccgagagcttccccgagttaaagcctgaggaggttgctggtatcataaaggactttgatgaacctggtactcttgcaccaactggtcttttcgttggaggtacaaagtacatggtgatccaaggtgaacctggagttgtcatccgaggaaagaatggcactgggggcattactatcaagaaaaccggcatgtccttgattattggtgtctacgacgagccaatgactccaaggcaatgcatcatggtggtggacaggctctgcaattaccttg

SEQ ID NO: 96966 - DNA, 538 bp, Zea mays
  unsure (1)..(538): unsure at all n locations
gggcagctaacttgcnccatcggctcatcgaatgacctaccggtccggaattcccgggtcgacccacgcgtccgcccacgcgtccggcctagctctatagctcgagtattgcttgctctccacaagaaacaaagcagagcaccaacaatggccgccgcctcctcgtcctcggtcctcctgctgctcctggccgccgccttggctggcatgagcgccaacgccgccaccttcaccatcaccaacaactgcgggttcaccgtgtggcccgcggccaccccggtgggcgggggcacgcagctgatacccggcgggacgtggaccgtcaacgtgccggccggcaccaagctcggccgcgtgtggggccgtaccggcttgctcttcaacggcaacagcgggagctgccagacgggcgactgcngcngcncgctggcctgcacgctgtctgggcaagcgncgctgacgctggccgaagtcaccatcggcggcagccaggacttttacgacatttcgtcattgatggctacaccctggccatggn

SEQ ID NO: 96967 - DNA, 530 bp, Zea mays
  unsure (1)..(530): unsure at all n locations
agatgctgccgacttcagcccacgtangcactatctgtccggaattcccgggtcgacccacgcgtccgtccacgcgtccgcggacgctttacgacctgttgttccacactagatttctgctctcctttagcggaggttatgacacctgcggtatctcttaacacatgtgccgccccagcctaactctccaactgacaatgactactgtccagatcggcatcacctggccgcaccttagatccaacatgaggcgctgcgtctcgtattccgacccacacaatatgtaaaatatccttaaactgatggatctttgactagcacctggaaagctccacttatactacagctttcaggtgatcagacagcgtctgactaaagaacacctccacaggcgtttgctttctcaacgattgcgacaatcccagtatacttgtcctatgcttcgctagatatttgtccagcataatgagaatcaccgactgctattcatgcgctaaaatcattacctcacacgactatgtctacttaag

SEQ ID NO: 96968 - DNA, 541 bp, Zea mays
  unsure (1)..(541): unsure at all n locations
gaggtagaggcgttggtagtcgcttacctgccangtacgcacttaacggtcctgaattcccgggtcgacccacgcgtccgcccacgcgtccggcgccgtctggcccagaaccgtttagctgctaggaaaagccgtctaagagggaaggcatacgttgagcaacttgagaatagcaggctgaaacttagccagttggagcaggagctccagcgtgctcgccaacagggcatcttcattcctactccgggagacgaccagcagccaaactctactagtgaaaaaggtgctttggcgtttgacaaggactacgctggatgggaagacgagcacaggaagcagataagcgagctgagggccgcgctcaacgcacacgccggtgacgacgagctccggcgcatcgtggacggcgtcatggcgcatcaccacgaagcgttcaggctcaagtgcgtggcagccagtgcggacgccttccacgtgctgtcggggatgttgaagacccccgtggagaggtgctttatgtggctgggcggatttcgaccgt

SEQ ID NO: 96969 - DNA, 546 bp, Zea mays
  unsure (1)..(546): unsure at all n locations
cgcgctgattgaccctagcncgatangcatgtgctattgctccggaattcccgggtcgacccacgcgtncgcgcgatgcagctggcgtcgtcgtccatcctgcccatgacgctgaagaacgccatcgagctgggcctgctggaagtgctgcagaaggaggccggcggcggcaaggcggcgctggcgcccgaggaggtggtggcgcggatgcccgcggcgcccggcgaccccgtcgccgcggcggccatggtggaccgcatgctccgnctgctcgccttctacgacgtcgtccggtgccagatggaggaccgggacggccggtacgagcgccgctacttcggcgcgcccgtctgcaagtggctcacccccaacgaggacggcgtgtccatgggccgcctcgcgctcatgaaccaggacaaggttctcatggagagctggtactacctcaaggacgcngtgctggacggcggaatnccgttcaacaaggcgtacgggatgacngcgttcgagtaccacggtacggacgcgcgctttaaccgcgtgttg

SEQ ID NO: 96970 - DNA, 544 bp, Zea mays
  unsure (1)..(544): unsure at all n locations
ggctgctgacgtgcnccagcttcgacacngcactgcacctaccggtccggaattcccgggtcgacccacgcgtccgcccacgcgtccgctactactcatcactcgccaacgtgcagagatcagggaagcggcactccgtccactgactgaccgctcatggcgaaggtccacctctacgtcgccgcggcctgcgccgtcgtcctcgcgctcgccaccccggccctcgccggtgaccccgacatgctgcaggacgtctgcccggctgactacgcctccccggtgaagctgaacgggttcgcgtgcaaggcgaacttttcggcggacgacttcttcttcgacgggctgaggaacccgggcaacaccaacaacccggcgggctccgtggtgacggcggccaacgtggagaagttcccgggcgtgaacacgctgggcgtctncatggcgcgcatcgactacgcgccgggcggccagaacccgtcgcacacgcacccgcgcgccaccgagatcatcttcgtcctcgacggcacgctcgaggtcggcttca

SEQ ID NO: 96971 - DNA, 550 bp, Zea mays
  unsure (1)..(550): unsure at all n locations
agacgcggntgagtgaacctaaacggagatgcacgcacttacccgtccggaattcccgggatcgaatcaatcaagacagccccgtgctagctcacccgccggggctcgccacgatgagaggcctcctcgcgtgcgccggcctcgcccgccgcgccgccggctcctccgcgcccgcgcgcgtccgccacctggcgggcgccgcggaggcggcggaggccgagctcaagaggacggcgctctacgacttccacgtcgcccacggcggcaagatggtgccgttcgccggctggagcatgcccatccagtacagggactccatcatggactccaccgtcaactgccgcgccaacggcagcctcttcgacgtcgcccacatgtgcggcctcagcctcaagggccgcggggccatccccttcctcgagtccctcgtcgtcgccgacgtcgccgcgctcagggacggcaccggcaccctcaccgtcttcaccaacgagcagggcggcgccatcgacgactncgtcatcgccaaggtcaccgaccaccacatctaccn

SEQ ID NO: 96972 - DNA, 554 bp, Zea mays
  unsure (1)..(554): unsure at all n locations
tgagtgtgccaganatgacnacttgcccagctngagtacggcactgcacttaccggtccggaattcccgggtcgacccacgcgtccggaaaaactagaccaggttagtgagatgtcaagtaggttgacttcggatactagaatctatgcagaaaaggcgaaagatctcaatcgccaggcattgattcgtaaatatgcccccgttgctattgtgattgggatagtggtgatgctcttctgggtgaagaacaagatatggtgactggtgccatcttgcgatttcacagttatcatgctggaaccagctgagttgtcttgtcttccctcgtgcaaccatatgtttgatcgtggtcccaaaaagaaaagaaaagatggctcgatggtttatcccgcatctgccgattcaagcgactactntagctatcaaaagcaaaaccacggtagtagagatagccttggaactgcacatttctattaactggacatgtataaatagttctcgtgagcgcacaccatgtaatccgtcaaattcatccatgtggtgtgacatttttt

SEQ ID NO: 96973 - DNA, 538 bp, Zea mays
  unsure (1)..(538): unsure at all n locations
agaagtatggcgtgcgcatgaaaagaatagtattgtatcactcgtccggaattcccgggtcgacccacgcgtccgcagcagccaattcgctcgagttcagatcgagcgcgcgccaagcaagtcttccggccggccgcgaagagcgcaatcaagcaagacaagatggtgaagctcgccttcggaagcgtcggcgactccttcagcgccacctccatcaaggcctacgtggccgagttcatcgccaccctcctcttcgtcttcgccggcgtcggttccgccatcgcctacgggcaactgacgaatggcggcgcgctggacccggcgggcctggtggcgatcgcgatcgcgcacgcgctggcgctgttcgtgggcgtgtccgtcgcggcgaacatctcgggcggccacctgaacccggccgtgacgttcgggctggccgtgggcggccacatcaccatcctgacgggcgtcttctactgggtggcccagctgctgggcgccaccgtggcgtgccttgctctcgggttcgtcacccacggcn

SEQ ID NO: 96974 - DNA, 542 bp, Zea mays
  unsure (1)..(542): unsure at all n locations
tgttggatggtctcgatacaatgcccaccngtanngcatttcgttccttaattcccgtatcgggccgagcgacaccagcagccacacctcccgcatgacaccactgaccgcttgtcttccaggagaccgggagcttctgcaagaactttacgccacgtggcaagtcttcagacacgggtgaactgacacagggcccccagcaagctatcatctgcgttttctggtactcatgataagtgtgcatcttgccataaaacagtgtacccgctggagaagttaactctggaaggcgagtcctaccacaagagctgcttcaagtgctcgcacgggggctgcatcctcaccaccttctcctacgccgcgctcaacggcgttctgtactgcaagatccacttctcgcatctgttcatggataatgggagctacatccacatgatgaataagagcccgtcccaatatacacttccggacatggccgtcgactagcaaccgccggaaccggcgccaccgcaagactgttaaagagaagacaacctttatga

SEQ ID NO: 96975 - DNA, 586 bp, Zea mays
  unsure (1)..(586): unsure at all n locations
agatactcttnttttacaattggctctagccgcgagtacngcactgcactgctactcggtccgtgtaattcccgggttcgactccacgtccgtctcgtgcttaatttcanntgtgaatccttccatgcccggatgtgcatgccctggaaacctatnnggttgctccgtgatgggccgaattggttttatntgannttttgggattggttggtcgtaatatttctccaagaaccttgggccagctatggagggtcttcttggcttttcttttgcaactgaggattatgatgnnctatggcctctgcccttctctgaaatgggtgctacagggaatgatataaatactaacgaatttgcaaaggacctgcgaaagatattctcatcgatacaggacttggatactgaaatcatagtggcaacagcaaggacccctgatgctacagcagtatctgctaatgttgtccttgatgagaggcagatgaatgctctatttcttgatctggtcaaggtgagcgagtcttacgggctgaagtttcctcgggagtttgctcttctcatgaagcagctgctgtattttgatcgctac

SEQ ID NO: 96976 - DNA, 545 bp, Zea mays
agctgtccgactgactccgtactccgctggcactcacctaccggtccggaattcccgggtcgacccacgcgtccgccagcagtcaccactcccaagccagtaccgagtcctacgagcagtcgcacgcaagtgtcaagagacgaaacggtcgacatggctcgcacgcaatctgccgtagcggtcgccgtggtggccgcggtgctgctgctggcagcggcggcgacgacctcggaggccgccatcacctgcgggcaggtgagctccgccatcgcgccctgcctctcctacgcccgcggcacggggtccggcccctccgcgtcctgctgtagcggcgtcaggaacctcaagagcgccgtcagcaccgtcgtcgacaggcgcgccgtctgcaactgcctcaagaacgccgtcaggggcgtcagcggcctcaacgccggcaacgccgtcagcatcctcttcaagtgcggcgtcagcatcccctacaccatcagcaccttcaccgactgctccagggtgaactaaaacctagaccacgcgcgacgacggct

SEQ ID NO: 96977 - DNA, 509 bp, Zea mays
  unsure (1)..(509): unsure at all n locations
atgagccactggctgacctacgtctatctcatggcttaccgtccggaattccggtcgacccacgcgtccgagagatcgtcgtccgcgctccgccgccgtcggagtcgcaggacacggcggggttcggtggcggcgcgccgtcgccgtcgaggtggcccaaggcggaggtgcacgcgctgatccagctgcgcacggagctggagacgcggtaccaggactccgggcccaagtgcccgctgtgggaggacatctcgtcggggatgcggcggctcgggtacaaccggagcgccaagcgctgcaaggagaagtgggagaacatcaacaagtacttcaagaaggtgaaggagagcaacaagaagcgccccgaggactccaagacctgcccctactaccaccagctcgacgcgctgtaccgcagcaaggcgctcgcgtcgtcgtcgtccgggcccggtgcagctccggcgctgctgccgccgncgcagcgcccggatcagcatgctgctgctgcc

SEQ ID NO: 96978 - DNA, 521 bp, Zea mays
  unsure (1)..(521): unsure at all n locations
tggatgcctttccngtgacgctggaatcgtagtccctacgcatgacttaccggttcggaattcccgggtcgacccacgcgtccgatttgcattaaaaaaaccgatcaaaaaaggacgagcgaagtaagtaatcgaaaaactttgttctttgttcgtcctatctataagaggagagcatatgaaaaatgtaacccattcttttgtttttttagctcactggccattcgctgggagtttcgggcttaataccgatattttagcaacaaatctaataaatctaactgtagtggttggtgtattgattgtttttggaaagggagtgtgtgcgagttgtctatttcaagaatagattggatctatccggctgcactttagaatatttttagtatttcatttgataaataagaaaaggtgcacgatctcgacgaattacttctgaataacttcagaaatcatatggaagaaccatagcatttcgcgattcattggtaaattcactttgaatctctattagaccaata

SEQ ID NO: 96979 - DNA, 513 bp, Zea mays
  unsure (1)..(513): unsure at all n locations
ggagcgggcctcttcgcatgatagatacgtaccgccgccttaccggtccggaattcccgggtcgacccacgcgtccggcagctgccacagagacatcagagagcggtcctccttgtgagtctgagctgaagaggaggaggaggaggaggagaagcagcagcgcagccggaggagggagagcgaagatgcgccgcgtcgcgctgttgctcgtcgccgccgtgtgcgcgctggcggcgccggctgccgcggtcgtcactgacggtcttctcccgaacggcaacttcgaggatggcccgcccaagtcggcgctggtgaacggcacggtggtgtcgggcgcccacgccatcccgcggtgggagacgtccggcttcgtggagtacatcgagtcggggcacaagcagggggacatgctgctggtggtgccgcagggcgcgcacgcggtgcggctgggcaacgaggcgtcgatccggcagcgcctggccgtggcgcgcggcgcctactacgccatcacgn

SEQ ID NO: 96980 - DNA, 514 bp, Zea mays
  unsure (1)..(514): unsure at all n locations
gaaggtggctcnntcngctgctcagtccactacgcacgacgtaccggtccggaattcccgggtcgacccacgcgtccgcccacgcgtccgcggacgcgtgggttctacgagaggatatagagaggaagaacagctcggccgagaccatgaagagcagcccacacctggtgctgatcctgtgcctccaggccgctctggtcatgggcgtcttcgccgctttggctaaagaaaatgccctggttgagagcaaggccatcgacatcaacccggggcagctcaagtgctgcaccaactgcaacttctccttctcggggctctacacctgcgacgacgtcaaaaaggactgcgaccccgtctgcaagaagtgcgtcgtcgccgtgcacgcctcctactcgggcaacaacaagttcaggtgcaccgacaccttcctcggcatgtgcggccccaagtgctagatcagagaggaagaacgcgcgctgctgctagctgctatagcttcgttcttccgccgccg

SEQ ID NO: 96981 - DNA, 520 bp, Zea mays
  unsure (1)..(520): unsure at all n locations
tgtatgtgtggtgcctntgcgaactgaacttagccctacgcacgacttaccggtccggaattcccgggtcgacccacgcgtccgcccacgcgtccggaagatggctggcgctgtacgcaccggagggaagggcagcatgcgcaggaagaagaaggcagttgacaagaccacgaccacagatgacaagcggcttcagagcaccttgaaaaggatcggggggaacaccattcctggtatcgaggaggtcaacatcttcaaggacgatgttgttatccagtttcagaaccctaaagtgcaagcatccattcctgcaaatacatgggtggttagtggagtaccccagacaaaaagtctgcaagaccttctgccatcaattatcaaccaactgggccctgataacctggacaaccttaagaagctggctgagattttccagaggcaggtacctggtgctgaagcagctgcacaggatgatgacgacgtccctgagcttgtccaaagagagacatttgaggaggct

SEQ ID NO: 96982 - DNA, 520 bp, Zea mays
tggttgactgaaattgcattgtatagtatctgctctaccggtccggaattcccgggtcgacccactcgtccgcacaaacgccggcgcaaactctcgcccgagcccgacagatcttcaattccccattccgccgaccgatcgaccttcacgccagtctcggtctcttccgaaggcgtcgcgcgcggttgtttgagaggagaggaggaagatgagggagtgcatctccgtccacatcgggcaggccggcatccaagtcggcaacgcgtgctgggaactttactgcctcgagcacggcatccagcctgatggccaagtgcctggagataagaccgcgggacatcacgatgatgccttcagcaccttcttcagccagactggtgctgggaagcacgttccccgtgcaatcttcgttgatctagaacccactgtgatcgatgaggtgcgcactggcacgtaccgtcagctcttccaccctgagcagctcatcagtggcaaggaggatgccgctaacaatttcgcc

SEQ ID NO: 96983 - DNA, 515 bp, Zea mays
  unsure (1)..(515): unsure at all n locations
gatggccttgggtgcctctggagctgacagcatggcgatacncgtctcggaattcccgggtcgacccacgcgtccgcgtcctcgcgctcagtgtcatttgcagttcccggcagcagccatggcgtcggtgcagctggctgggccgcgggtggtggcggctgcgaaaccggctgcgttgggcgggctcctcctgacgccgtcccttgcggtgccaaaggggcggagaaccagggggctcgtggtgagggccgccacggtcgtgtcacctaagtatacatccataaaaccattgggagacagagtacttgtgaagatcaagacctctgaggctaaatctgatggagggattttacttccagtatcagttcagacaagaccacaaggaggggaaattgttgcggttggagaagggagaagttttggaagtaaccgcattgagatcagtgttccggttggtgcacaagttgtctactcgaaatatgcaggcacaggattgaaattcaatgacgccgact

SEQ ID NO: 96984 - DNA, 520 bp, Zea mays
  unsure (1)..(520): unsure at all n locations
ngatttagggtatccnttgaggctgggacgaatcccgacgcatgtcgtaccggtctcggaattcccgggtcgacccacgcgtccgcccacgcgtccgaaaaagaaaaggcaaaggcaaaggaatcccaatcaggcaagcaaaagggagaaccagctgctgcggagtgcggagatgtcgtcgcagctgatcgaggagcaccggtcgggcgcggaggtgcacgtcgggcacgagctgtgcgagcgcaagtcgcgcgagttcatggtggagctgggcctccccgacgggctcctcccgctgcccagcctggacgaggtgggctacaaccggtcgacggggttcgtgtggctgcggcaggccgccggcctgacccacaccttcgggtccatcggcaagcaggtgtggtacgacagggaagtgacggcgttcgtggagccggggcggatgcacggcctcgccggggtgaagagcaaggagctcctcatctgggtcaccatctccgagatcgtcctcagccccttg

SEQ ID NO: 96985 - DNA, 520 bp, Zea mays
tgagtccgtttgaggtgaagccggccgtcgcacagcatgcacttacccgtccggaattcccgggtcgacccacgcgtccgcagaatcgctgcgtcttcgttggcaacataccatacgatgcgacagaggagcagctcgtgtagatttgcgaagaggttggcccagtcgtatccttcaggttggtgattgacaaagagactggcaagccaaaaggttatggcttttgcgagtacaaggacgaggaaactgctctaagtgcacggcggaaccttcagggttacgagatcaatggtcgtcagttacgggttgattttgctgaaaatgggaggaacactgacagaaatagagaaaaggtcgacgatcctcaaatttttactgtagaagagcctttcctaccacctttggagttctctgttaatctgagaagttgtattgtcttcgttctgtgaatgataatagttgcgccttcttcaaccaaaaaaaaaaataagtaattaatagaaaaaagggcggccgctct

SEQ ID NO: 96986 - DNA, 515 bp, Zea mays
  unsure (1)..(515): unsure at all n locations
cgttagggtgtcctttgggctggccagcgtcgcacgacatctcgtccggaattcccgggtcgacccacgcgtccggagcgacccacgtccacacgacacgaaccaccaccaccaaccagcagccgcaccacgcagccagcgcaaagcgatggcgtcgctcaccatgatggcgtccttcgccgccgtggcggtggccgcgccctcgcgccgcggcaccttcgccgtggtcaggtccgccaaggtcgaccgctgccaggagcccgccacgctagcagcaaccgaggccaggcccgccgccgacggacgccgcgccgtcatgctcgcggctgctgcggcggccgtggcagccatcggcggcgccggcgccgccatggcgggccccaagaacgggacccccgaggcgaagaagaagtacgcggccatctgcgtcaccatgcccaccgtcaaggtctgccacaactgagcacgcccgcgttgcatgcagctgccgggccggggggtggtatataattaan

SEQ ID NO: 96987 - DNA, 514 bp, Zea mays
  unsure (1)..(514): unsure at all n locations
tggagcctatgcgtggggactgaatcgatactatagcatgtcgtaccggtccggaattcccgggtcgacccacgcgtccgcggacgcgtggcggacgcgtgggttactggactgatgatgggcttggatattatgagtggcttcagcttgcggaggacctgggtgctgccccaatctgggtattcaacaatggaataagccacaatgatgaagttgatactgtagctattgccccttttgtaaaggatgtattggacagtctggaatttgcaagggggagtgcagattcaacatggggctctgttagggctgcaatggggcaccctgaacctttcctggtcaaacatgtcgcaattggaaatgaagattgcgggaaaaagttctaccgtggtaattacctcaaattctacaatgctataagagaggcctatccagacattcagatgatttcaaactgtgatggttcatctagaccacttgaccatcctgcggatntgtatgatttccatgtcta

SEQ ID NO: 96988 - DNA, 515 bp, Zea mays
  unsure (1)..(515): unsure at all n locations
agttagcncnttccttacgctgcatcgagccctacgcatgacttaccggtttggaattcccgggtcgacccacgcgtccgacttctacgagaacggcctcacgggcacggatgacgaggcgttcgagcagtcttgcaccgatatctacacggggaagagcctgcagaagccgtggtacctggtgctgggaaaccatgactacaggggtgacgcgctcgcgcagctgagcccggtcctgcggaagatcgacagccggttcatctgcatgaaatccttcgtcgtcaacgcagaaatcgtggagttcttcttcgttgacaccaccacgtttcaactcaagtactggactcaccctaaggatgatcactacgactggagaggggtggcgcctcgggaaaaatacataaacaatctgctcaaggatttggacggngccatcaagagatcgactgcggcgtggaaggttgccgtgggccaccataccatgaggagtgtcagtgatcatggtgacaccaagg

SEQ ID NO: 96989 - DNA, 523 bp, Zea mays
  unsure (1)..(523): unsure at all n locations
ggaaggtccgtctgagactgcntacgtnagttggagcatactcgtccggaattcccgggtcgacccacgcgtccggtgccggacccgcagaggatgatccgcgcctacgcacagtcggtggcgacactcaacctggtccgggcgttcgccaccggagggtacgctgccatgcagcgcgtcactcagtggaacctcgatttcatggatcacaacgagcaaggtgataggtaccgtgaattggcccatagggtggatgatgctcttgggttcatgactgcatcggggcttacagtcgaccacccgataatgacgactactgacttctggacctcgcacgagtgccttctcttaccctacgagcaggctcttacccgtgaggattccaccagtggccttttctatgattgttcggcccacatgttgtgggttggtgagcgcactcgacaactcgatggagctcatgttgaattcctccgtggtgttgccaaccctctgggcataaaggtgagcgacaaaatgaacg

SEQ ID NO: 96990 - DNA, 524 bp, Zea mays
  unsure (1)..(524): unsure at all n locations
tgaagtcgncnnattgaagctgcttacgtngtccactgcatttcgtccggaattcccgggtcgacccacgcgttcgcccacgcgtccgcccacgcgtccgctccagcactgaacacttgattgattcagtaggtaggtagctagctgaatcacaatggatcctaccaagttccgtccgtccagtagccacgacacgacggtgacgacgacgaacgcgggcgctcctgtgtggaacgacaacgaggcgctgactgtggggcctcgcggtcccatcctgctggaggactaccacctgatcgagaaggtggcgcacttcgcgcgcgagcgcatcccggagcgcgtggtgcacgcgcgcggggccttcgccaagggcttcttcgagtgcacccacgacgtgacgtcgctgacgtgcgccgacttcctgcgcgcgcccggcgtgcggacgcccgtgatcgtgcgcttctcgacggtgatccacgagcggtggtccccggagacgatccgcgacccgcgcgggttcgtcc

SEQ ID NO: 96991 - DNA, 511 bp, Zea mays
  unsure (1)..(511): unsure at all n locations
ggttgcttggtgaggcagctcggacacnatgccctaccggtccggaattcccgggtcgacccacgcgtccggcgcagtactatcaactcattcgcctaggcttcgaggggtacagaaacatcatgcagaactgccaggagaacgccgcgatactgcgggagggcatcgcggcgacgggccgcttcgacgtcctgtccaaggacgccggggtgccgctggtggccttctcgctcagggacagcagccggttcagcgtgttcgacgtctccgagaacctgcggcggttcggctggatcgtgccggcgtacacgatgccggccgacgcggagcacgtggcggtgctccgagtcgtcgtcagggaggacttcagccgcagcctcgccgaacggctggtctcggacgtccgcaagatcctgcgcgagctggacgcgcgcgcgacccacgccgtgagggtcgccaccgtcaccgtcgagcagtcgggcgacggcgtcgtggccaagaaaagcgtgct

SEQ ID NO: 96992 - DNA, 522 bp, Zea mays
  unsure (1)..(522): unsure at all n locations
tgagtgggcnctcgagctgataagactctaattgcatacccgtccggaattcccgggtcgacccacgcgtccgatggtcgtttcattctgtctccgcttagaaaaggtcaagcggatactgtcggtattgccgtgcgaagagctttacttggagaaatagaaggaacatgtatcacacgcgccaaatttgggaacgtgccacatgaatattccacaatagtaggtattgaagaatccatacaagaaattttactaaatttgaaagaaattgtattgagaagtaatctctatggagttagagacgcatcaatttgcgtcaaaggtcctagatacataaccgctcaagatataatcttaccgccttccgtagaaatcgttgatacgacacaacctatagctaacttgagagaacccgttgatttctgtattgagttacagatcaagagagatcgcgcatatcatacggaactcagaaagaactctcaagatggaaagtatcctatagatgctngattcatgcct

SEQ ID NO: 96993 - DNA, 512 bp, Zea mays
agagcctctcgtgaggatgaacgcatcgcaagtatgtcttactgtcctgattcccgggtcgacccacgcgtccgcaagttttgaaaactgaactgtaagatggcatcagcagagctttcccgtgaggaaagtgtggacatggcgaagctcggcgagcaggcagagaggtacgaggaaatggttgagttcatggagaaggtagcgaaaactgttgactcggaggagctcactgtggaggagcgcaacctcctgtctgttgcatacaagaacgtcattggagcccgccgtgcctcatggcgcatcatctcctccatcgagcagaaggaggagggtcgaggcaatgaggaccgtgtaacactcatcaaggactaccgtggcaagattgaaactgagctcaccaagatctgtgatggcatcctcaagcttctcgaatctcaccttgtgccgtcttccaccgctcccgagtccaaggtcttctatctcaagatgaagggtgactactacagatacct

SEQ ID NO: 96994 - DNA, 507 bp, Zea mays
  unsure (1)..(507): unsure at all n locations
aggctagccgttggtgaagtcagctagctagncngtctaccgcctcggattcccggtcgacgcacgcgtccgaaaggattccatcgtgttgctgagagtcttgatgatctcattcttgacataccatctgcggagtctgaatttcagttgttggtatcaaaagccatttctgagggatggttagattcttcgtatgtgaactcaggtgtcaacggaagcgttgaagacgatgaacatgagaagctggctaggtacaagagggaggctgtatccataatacacgaatactttctctctgatgatacaacagaggtcatccgtagtgtcaaagagcttggttatccggaatacaatccgatcttcgtcaagaagctcataacaattgctatggaccgcaagaacagggagaaagaaatggcatcggttcttcttccttcattaaacatggagctgttctcgtctgaagacattgccaaaggattcgtaatgctccctgaatcttcagaa

SEQ ID NO: 96995 - DNA, 538 bp, Zea mays
  unsure (1)..(538): unsure at all n locations
tggaagtgtgctcagccctgagacgcctacncccttcgtatgccgntaccggtctcggaattcccgggtcgacgcacgcgtccgcaaggattggagagagaagcgggatgagttcaagaagaaggttaggcaatgtgtccgcaggtctcaggaaatgctgtgaaggaggaacatgggggagttgaatgagtctgcaatcggtgtgctgcaattcacaaccaattatctcatgccatcattcttttgctttcccctgtatattttttcaaccggtgtcactcgtatagtggtgttgggtctctttagacaaactcgggacggttgcttatcctaaaaattcgattgtactgcgtggcatgaaatgatcgattcgaagaatattttgaacatgctgccacctaatcaaaaaatttcatgtttaaaaaaaaaaaaaaaaaaaaaaaaaaaaaaaaaaataaaaaaaaaaaaaaaaaaaaaaaaaaaaaatattatattattaaataaaaaaaaaggggcggccgttttaaaggatccaagt

SEQ ID NO: 96996 - DNA, 512 bp, Zea mays
  unsure (1)..(512): unsure at all n locations
agttggagctgggcgtgtggctgatgtacgatagctnaggatgtcgtaccggtccggaattcccgggtcgacgcacgcgtccgcccacgcgtccggtcaaaccaaccgcgatccgcgaatccgcgggagaggaggggaggggggcgggggcatggagttcctgcagggccagaggctggagaccacgctggccgtcgcgggcgccgtcgttgccgtcgcagccggctccgcctacctcttcctccgcagtaggaagcccaggggatgcctagaccccgagaacttcaaggagtttaaacttgttgagaagaggcagctgagtcataatgttgccaagttcaagtttgcgctcccaacacctacttctgtattgggtcttccaatcggacagcatataagctgcagaagacaggatgcttctggccaggaagtgatcaagccttatacttcaactactttggactctgatgttggaacttttgagcttggtattaagatgtattcccacagga

SEQ ID NO: 96997 - DNA, 528 bp, Zea mays
  unsure (1)..(528): unsure at all n locations
agagcttgctgaagcagcnccatcgactcatcgcatgccgtaccggtctcggaattcccgggtcgacgcacgcgtccggtcgctgccgcggcggccgtcggcgccggcggctacgtattccacgagcgggacgaggggaagaaggaccacagggacgccgaggaggccagcggcgagaagaagcaccaccacctcttcggctgaccgtagtaccggccggcgcgcgaccgagctagctagctccggcgcacacaaccacacacctgtttaattctgtactgcatgcgtgtgtaatttgatggttcacaataatgagtccctctccggaccttggtagctgcttgcttgtggtgagtgagagtgtgagactgagggagaagaggtggtgggcgtggggctacgtcgagagaggcgtgttcctgtaatcctgtactcgcttcgttttctctgcatgcgtctataattgtgttcaataataagtgagagcggtgtgatgtgtggctccaaacaataatataaaacaaaaag

SEQ ID NO: 96998 - DNA, 533 bp, Zea mays
ggttgatggtgagcctagtccgtacgtagctctcgctatgccgtaccggttcggaattcccgggtcgacgcacgcgtccgggcaagcaccaatcagccagcagtccagcacaatatcatgaacaagcgtgaggtcgccgcggcggtggctgcgctcctggcgctgctagccgcatcatcgacggccggcgccgtgacgttcgacgcgacgaacacggcgtccgatacccccggcgggcagcggttcgaccaggccgtcggcctcgactacgccaagcaggtcctggccgacgcgtccacgttcatctggaacaccttcgaccagcccagccccgccgaccgcaagcccgtcgacgcggtgaccctcgtcgtcgaggacatcggcggcgtggccttcacgagcgccaacgggatccacctcagcgcgcagtacgtcggcggctactccggcgacgtcaagaccgaagtcaccggcgtgctgtaccacgagacaacgcacgtgtggcagtgggacgggcagggccaggcgaacgg

SEQ ID NO: 96999 - DNA, 513 bp, Zea mays
  unsure (1)..(513): unsure at all n locations
agttagtaggcgtgcctgaagtacgattacgtagncntagcgtaccggcttcgaattcccgggtcgacgcacgcgtgcgcccacgcgtccgtccacgcgtccgtggtttccaaagccaagtgtgtgtactagcaaccagctagctcgggcggcagcaggcagccatcatgtcggaggagaagcaccaccacttcttcaaccaccacaagaaggacgaggagcagcccgccggcgagtacgggtactccgagaccgaggtggtcaccgtcaccggcgagggcgagtacgagaggtacaagaaggaggagaaggagcacaagcacaagcagcacctcggcgaggccggcgccatcgccgtcggcgccttcgcactctacgagaagcacgaggcgaagaatgaccccgagcacgcgcacaggcacaagatcatggaggaagtcgctgccgcggcggccgtcggcgcctgcggctacgtattccacgagcaccacgagaagatgatggaccacaagg

SEQ ID NO: 97000 - DNA, 496 bp, Zea mays
  unsure (1)..(496): unsure at all n locations
gactgangtctagctgagcttagtcatgtcgtaccggtctcggattcccgggtcgacgcactcgtccgcccactcgtccgcccactcgtccgcgcactcgttcgcggactcgtgggcggaggcgtgggctgacgcgctgggggactcgaggcaactccacgcttgatgggtgaacggctgtggtggaggacatgcgtcgtcagctgctgacctatggacgaagaattactaccccagagctttttgcaagaatagatgctgttgatgcaaacactgtgaagcgtgttgcaaaccgattcatctatgatcaggatgctactattgctgctatgggaccgatccaaggacttgcagactactactggttcagacgcctgacctacatgctccgttactaaaatcaatctgtcgatgtaccatgtttactgtgtgcaaggacaaatattaaatttgcctatttcgtagtatggatattaaaggctgataactgcacaag

SEQ ID NO: 97001 - DNA, 517 bp, Zea mays
  unsure (1)..(517): unsure at all n locations
gtatatgagcctgtgactgaataagtaagacgtacgncntacgtaccgtcttcggaattcccgggtcgaccgacgcgtgcggtgagagagaggatgggtggcagcggcatggctgctctgctgctggccctggtggtggtggccgtgagcctggccgtggagatccaggccgacgcctggtacggttactgctgctggtacaccccgactcctactccggtcaccccgaccccgaagccctagaagccccccaccaatgggcctaatccggacaagccgtccaatgagcacaagccgtccaaggagcactgtcccaagccggataatccgtccaaggagcacaagcctacgccgtccacgtacaccccgagccccaaacccactccgtcgacgtacacttccaccccgacgccccccaagccgacgccaaccacatacacttccggccctactgcccacaaacccacaccaaaacccattcccaattcttcgaagttcaacccgtactctaaacctt

SEQ ID NO: 97002 - DNA, 495 bp, Zea mays
gactgaggcctcaggtctgtcgtaccggcccggaattcccgggtcgaccgcacgcgtccggaaggccacagcggcacagcgccagcggcaacagtcaccagaccaccactaccagtctagcacccggctgacctgagcgaccccttcgcttccactccactgaagcgggccaaaagaaggaaagaaggcgggcaagcgacaggaaggaggagaagccatggcgagcgacggcgacgggaagggccgggtcgcgacggcgccgggggcaggagggtacggctacggctacggctacgccggcttcgagggggaggaggaccggaagtggtggccgtggctggtgcccaccgtgatcgtcgcatgcatcgccgtcttcgtcgtcgagatgtacgagaacaactgccccaagaaccggagccagctcggcggcgactgcgtcgccggcttccttcgtcgggtcttcttccaaccgcttcgcgagaacccgctgctcgg

SEQ ID NO: 97003 - DNA, 567 bp, Zea mays
  unsure (1)..(567): unsure at all n locations
gcttataggagtggcctgtaaactgatgtctaatngaacttagtcattgtcgtntctggtttcggaatttcccgggttcgactgcacgtcgtctcgctgtacgtcgtgggatgttgtgaggaattcgttaattcaatgagtgtgtacgggaggagactgtatgtcaggcgacaaatcagaaacgtgaaagcaaggtgttgagatattaatagcatggtagttaagagatctatacaattagatcttatctacatcctccggagtatcgtaaaccaaggtatatctgatatgcttggtcagcattctcgagtaatctcctcagctcggtggttccagcctgaagatagcaggtagctgcagtagcttgcggaatcttctactggtacatggacaactgtttggactgatggacttaccagtcttgatcgttacaaaggacgatgctatcacatctagcccgttcctggggacccagatcaatatatctgttatgtagcttatccattagacctatttgaagatggttctgttactaacatgtttacttccatcggaggtaacgtattt

SEQ ID NO: 97004 - DNA, 499 bp, Zea mays
  unsure (1)..(499): unsure at all n locations
gaactgatggactgatgtcactagcgacgtccgtaccggtccggaattgccgggtcgacgcacgcgtccgcccacgcgtccgattacatgtggggcaactcctgcaatggaaatactgagtttgtgtggggctgatccaggaaatgcatttcttgtgccatcaccttactacccgggttgggatagggacataaaatggcgaactggtgttgagttgatacctgttccttgtcgtagtactgataactttaatgtcagtgtcactgctcttgaaatagcttacaaacaggcaaaaaagcgaggaataagagttcgtggggttctcatatctaacccttcgaacccaacgggaggcattgtgccaaaagaaatactgcatgaccttctacagtttgctgcagagaagaacatacacttaatttctgatgaaatatttgctggttcaacatatggaagtgacaaagttgtcaacgtggganaatgttgtggatgaactaaa

SEQ ID NO: 97005 - DNA, 528 bp, Zea mays
  unsure (1)..(528): unsure at all n locations
tggggtgctcatgctacnngcatgaggtcttgcactgtctgtccggttcggaattcccggtcgacgcacgcgtccggaagtattccaactccaacatcgaaattcatactttcaatcagagccagtagcctctcggtgttaccgaggacttcttgccacttcccagcaaagggaaatctgggaaggatggctggtatcctcctggtcatggtgatgtgtttccctctttgaataacagcggaaaacttgacatcttattggctcagggcaaggagtatgtctttgttgcaaactcagacaacttgggtgctatagtcgacatcaagatcctaaaccatctgatcaataaccagaacgagtactgcatggaggttactccaaagacgctggctgacgttaagggtggcactctcatctcttacgaaggaagagttcagcttttggagattgcccaagtatccgatgagcatgtgaatgaatttaaatcaatcgagaagtttaagatattcaacactaacaacttgtggg

SEQ ID NO: 97006 - DNA, 532 bp, Zea mays
  unsure (1)..(532): unsure at all n locations
gtggttgctctttcctgaatgcctgcangtctntagtactgccgtaccggtccggaattcccgactcgacgcacgcgtcctgctggcttgtgctccgcctttccttcctacactggttcattaggtctctgcggggttctggttgcagaccttagcgcatcgagatggcggactcgcatgttgcgtaccgctgctttgtcggctgtctaggctcggccacggaccaccactcactgcacaacgccttcagcacctaccgcgaggtcatccattcctcgatcatactcgatcgcaagacgcacaggtccctcagcttcagctatcactccttctgaactcgacatgcgattctgcacactcatctaaggcatcaacctgccgtgactgcacggtcgcaacatcatcgaccatatgcctattcctgacgcgcccgatcaggctatttttcggttttcaccgtgctttacgatcaggctaaccatactcaagtggcgttcacattgaacgcttttgcttttcggctttaacttct

SEQ ID NO: 97007 - DNA, 502 bp, Zea mays
  unsure (1)..(502): unsure at all n locations
gactggaaattccatntagcttagtcatgtacgtaccggtccggaattcccgggtcgacgcacgcgtccgggcatgtgtctggttggaagagacgctaaagaaatttgaccgcatactggttggcatatggcactcccaggactttctgaatggtgtgtgcactaacatcatccatatgcagaacaagaagctaaagttatatactgggaattatgaccaatacattcagacacgctccgagcttgaagaaaatcagatgaagcagttcaagtgggaacaagagcagattgcatcaatgaaagagtacattgcacggtttggccatgggtctgcaaagcttgcacgtcaagctcagagcaaggagaaaactctggccaaaatggaacgttgtgggctcaccgagaaagttggtagggacaaaatactggtccttccgcttacaaatgttggcaaactttcaaccacagtgctttcattttgttgaaggcacctttgggtacc

SEQ ID NO: 97008 - DNA, 499 bp, Zea mays
  unsure (1)..(499): unsure at all n locations
aactgaangtctagctgagcttagtcactgtctgtaccggtctcggaattcccgggtcgacgcacgcgtccggtcgggcgttcgtaccactacggttcgggttcgggttcgtgaggttctccggggttcggggtcgtgggtgagcggatcgagatggcggcgtcggatgttgagtaccgctgcttcgtcggcggcctcgcctgggccacggacgaccactccctgcacaacgccttcagcacctacggcgaagtcctcgagtccaagatcatcctcgatcgggagacgcagaggtcccgcggcttcggcttcgtcaccttctccacggaggacgcgatgcggaacgccatcgagggcatgaacggcaaggagctggacggccgcaacatcaccgtcaacgaagcccagtcccgcggtggcccgtgaagccgctgccggtgcaggtacggttgttgcccttgaagccggggttcaggagtgggcgtgccccctatggtgc

SEQ ID NO: 97009 - DNA, 532 bp, Zea mays
  unsure (1)..(532): unsure at all n locations
gagggtgctcttgctacnccactganctcatcgctactgtcgtaccggttcggaattcccgggtcgacccacgcgtccgcacagagacatcagagagcggtcctccttgtgagtctgagctgaagaggaggaggaggaggaggagaagcagcggcgcagccggaggagggagagcgaagatgcgccgcgtcgcgctgttgctcgtcgccgccgtgtgcgcgctggcggcgccggctgccgcggtcgtcactgacggtcttctcccgaacggcaacttcgaagatggcccgcccaagtcggcgctggtgaacggcacggtggtgtcgggcgcccacgccatcccgcggtgggagacgtccggcttcgtggagtacatcgagtcggggcacaagcagggggacatgctgctggtggtgccgcaaggcgcgcacgcggtgcggctgggcaacgaggcgtcgatccggcagcgcctggacgtggcgcgcggcgcctactacgccatcacgttcagcgctgtcgcgacgtgcgcgcc

SEQ ID NO: 97010 - DNA, 515 bp, Zea mays
  unsure (1)..(515): unsure at all n locations
ggcttgagcctntgactgaagtactgtaacancgtatgtntagcgtaccgctccggaattcccgggtcgaccgacgcgtgcggtaaaaatggagagcttgatgaggcccaaggaattgtaaatcagatggtggataggggtggtttgcgtgacaccacaacgttcaacactctcattgttgctctgtgctcacagaatcgacttgaggaagcattggaccttgcacgtgagctaactgtgaagggactttctccagatgtctatactttcaatattttgataaatgccctttgcaaggtaggagatcctcatcttggcattcgattgtttgaggagatgaagagcagtggatgcgctcctgatgaagttacatacaacattttgattgatcatctttgctcaatggggaagcttgtaaatgctttggatttattgaaggagatggaatccaatggttgccctcggagtacagtgacatataacacaataattgatgcattatgcaagcaaatgag

SEQ ID NO: 97011 - DNA, 497 bp, Zea mays
  unsure (1)..(497): unsure at all n locations
ggcttgaaaactgcagnntcatcgtcatgtccgtaccggtccggaattcccgggtcgacgcacgcgtccgcacgtcttcagcaaggcagagttccatgtgcttatcctcggagttcataaggctggcaggacgaccttgctagaaaagttgaagtcgatctacttgaagggagaagggcttccgcatgatcgtattgttccaacagttggccttaatattgggcgtattgaagatgcaaatgtaaagcttgttttctgggatctgggaggccagcctggcctacgaacaatatgggagaaatattatgaggaagcccatgctgtaatatatgttatcgactctgcttctgcatcatcatttgaagatgctaaatctgctctcgagaaagttctccgtcatgaagatctgcatggagcgccaatacttatatttgcaaacaagcaggattcaccagcagctgtcacggaagaagaattggctagacatcttgatctta

SEQ ID NO: 97012 - DNA, 499 bp, Zea mays
tctgaatacgtcattcgtcggacgtcgtaccggtttcggaattgccgggtcgacgcacgcgtgcggacgtccatcgagcacaaggcttccaatgtagcacagtcccaatccggagaaggcgcccggggagcacaagccgacgccggccacgtacaccccgagccccaaacccacgccgccgacttacactccaagccccaagcctcccacacaccctacgcccaagccgaccccaccgacgtacaccccttccccaaagcctgcgacgcccaagccgaccccaccgacgtacaccccttccccaaagcctgcgacacccaagcctccgacacctaagccgaccccgcctacgtacactccaagccctaagccaccggctaccaagccttccacgcccaagccgaccccgacaacgtacacccctttgacaaagcctacgacacccaattcgaaccctgctgcgtacaccccttttttcaaacctccgacggccaattcg

SEQ ID NO: 97013 - DNA, 546 bp, Zea mays
  unsure (1)..(546): unsure at all n locations
tgtgtacctattcgctgaatccatcgattcatgnatntcctagtactgtcgctccgattcgcaattcccggctcgacgccacgcgtccggccgcccaaggagcacatttctaccattgtagcactgtcccaagcctctgagtccgtccgtggagctcaagccgactccgggcacgtacactcctagccccaaactcactcctccgacttacactccaagcctcaagcctactacacactcgacgctcaaacctacctctccgacattcaccctttccccatatcctattactcctaaacctaccccaccgacttacactcattcatcaaagccttctactcctaatcctcctacacctaaacctaccttgactacttacactccaagctataatctaacgtttaccaagactttctcgcactatactaccacgtcaacttactaccattctccaataacttctacatcctaacttacctcttctacgttcaactatttattccatctcttcttgctttattcattccccacgatttctctttaatt

SEQ ID NO: 97014 - DNA, 532 bp, Zea mays
  unsure (1)..(532): unsure at all n locations
agcacgggtnatcactgagacactaaggcntgtcgtaccggtccggaattcccgggtcgacccacgcgtccgctcgcccgcatctgcgacggcatcctcgccctgctcgactcccacctcgtcccatccgcgggcggcgccgagtccaaggtcttctacctcaagatgaagggtgactaccacaggtaccttgctgagttcaagtctggtgcagagaggaaggatgctgcggagagcaccatgaatgcctacaaagctgctcaggacattgctcttgcagatctggctccaacccaccccatcaggcttggccttgctctcaacttctcagtgttctactacgagatcctgaactcccctgatcgcgcctgcaaccttgcaaaacaggccttcgatgaggcgatctctgagctagacagcctgggagaggagtcctacaaggacagcactctgatcatgcagcttctgcgcgacaacttgaccctatggacttccgacaccaacgaggatggcggcgacgagatcaaggatg

SEQ ID NO: 97015 - DNA, 531 bp, Zea mays
  unsure (1)..(531): unsure at all n locations
aggaggtctgtaattgtatacgantgtacttctctaccgctccggaattcccgggtcgacccacgcgtccgcccacgcgtccgctctaatcacactttcgacactgatcggtactctagtgtccgactcgtgacaattttagcgagaacgagcgagcgagcgagggagaggatgggttccacaggaccggcgagcgggttcgcggcgccggagcgggacatcgacgatctgccgcggaacgacgccaactacacggcgctcacgccgctctggttcctcgagcgcgcggcgctggcgcatccgggcagggcctccgtcgtgcacggccccgtgcgctacacctgggctgacacctatcgccgctgccgccgcctcgcatccgccctcgcgcgcctatccgtcggccacggaagcacggttgctgtgatagctcctaatgtcccggctgtctatgaagctcacttcggtgtcccaatgtcaggagctgntgtgaactgcgtcaatattcggctaaacgccgagacaatagcc

SEQ ID NO: 97016 - DNA, 530 bp, Zea mays
  unsure (1)..(530): unsure at all n locations
gtttgctaccatgatncactaagctcattcnannnncncttccggttcggaattcccgggtcgacccacgcgtccgaaaaggtgggctcgtccgagtctgccctgctcgtcaagctgggtatccgcccggtctcggatggcctccaggtcaccagtgtctacgaggatgggtccgtgttcagccctgaggtgctcgacctttccgaggaggacctgattgagaagtttgccactggtgtctccatggttgcctccctgtcactggcgatctcatacccgacccttgctgctgtgccccacatgttcatcaatgggtacaagaatgtgcttgctgttgctgtcgagacagactactcatacccacatgctgacaagatcaaggagtacctcaaggacccaagcaagtttgctgttgcccgcccggttgctgctggtgactctggcgctgcagctgctcccaaggaagaagagaaggctgcggagcctgaagaggagtcggacgaggaaatgggcttcagcctcttcgacgg

SEQ ID NO: 97017 - DNA, 531 bp, Zea mays
  unsure (1)..(531): unsure at all n locations
ggttggcgttgcatgatataggatgcgtcggcactgctcgtaccggtccggaattcccgggtcgacccacgcgtccgcggacgcgtgggcgcgcaggaggtgccgacgacgaggatcgcggtggcgatgaccgggtgcggcggggcggtgctggagggcgtgctcacgttcctgctggtgtacacggtgcacgtggtcggcgagcgcgagcctcggtcgcgcggcggcgacggcaagcgggagttcgcggccacggcgctgggcgcgctggcggttgggctcacgcagggcgcgttcgtgctggccgcgggcgcgctgacgggcgcgtccatgaacccggcccgctcgttcggcccggccgtcgtcagcggccacttcaagaaccaggccgtgtactgggccggcccgatggtcggcgccgccgtcgccgcgctggtgtaccagatcatggcgtgcccgagcgtgacggggaacgtggaggcggtggtcgtttgacaagctagtgtgcaactgtgctgtgcatncattcgn

SEQ ID NO: 97018 - DNA, 530 bp, Zea mays
  unsure (1)..(530): unsure at all n locations
ngttagcgtntgaatgagtatagaccatgatgcattgctctaccggtccggaattcccgggtcgacccacgcgtccgcccacgcgtccgcccacgcgtccgcggacgcgtgggggcttccatagcgctgaagcgaggcgtgccgcattgggttgttcgagagctcctagtgttgccctactacatgatggagggcgatctccccacgcccgcgaacgctagggttgttgccgtggtcaccggcggcaacaaggggatcgggctggaggtgtgccggcagctggcctgcagcggcgtcaccgtcgtcttgacagccagggacgacgcgaggggcgcggcggccgtggagaacctcagaggcctggggctctccgatgtcctcttccaccgactggacgttaccgacgctccgagcatcgctcgactcgctggtttcctcgagacccgtttcgggaagctagacatcctggtaaataatgccgcgattggcggngttgagtatgttcatgaccaagattgtggctcagtaac

SEQ ID NO: 97019 - DNA, 550 bp, Zea mays
  unsure (1)..(550): unsure at all n locations
gtggtgnttgtgnccagttacgacngcatgactactcgctcctgaattcccgggtcgggcacgcctacgcttccgcctacgcgttgtctgactcgtgggctttcgcgtggtcggacgcgtgggccgacgctggtgccgtagaagaagccggtagcgcacgggaagtgtgcggtctacagctggaggtccaagaaggctttgcagctccccgagtacccgaacgcggatgagctggacgctgtgctgaagaccatcgagacgttcccgccggtggtgttcgtcggagaggctcgccgtctcgaggagcgcatggccgaggccggcatgggccgcgccttcgtcctccaaggtggcgactgctccgagagtttcaaggagttccacgccaacaacatgcgtgacaccttgcgcgtgcttctgcagatggtcgtctagctcatgttctgtggccatatgcccttcgtaaagttgggaggatagcttgcaggttgacaatcaaagttgagccctttcatgataacgaccggtttaaatttccaacctccattgc

SEQ ID NO: 97020 - DNA, 550 bp, Zea mays
  unsure (1)..(550): unsure at all n locations
ttgtggttggccctcactgtnaagtaccgncntgcacttaccggtccggaattcccgggtcgacccacgcgtccggtcttctctcgaccagggctacgtgtccatcgggtgcgagccgtgcaccaggcctgtggtgccggggcagcacgagcgggaaggccggtggtggtgggaggacgccaaggccaaggagtgcggcctccacaagggcaacatcgacaaggacggccaggcggcggcggctgcggcggcccccaggactgccaacggcaacggctcggcgggcgccccggacatcttcgagagccccgccgtcgtgtccctcacccgcgccggggtcgagaacctgctgcgcctggagagcctcgccgagccgtggctcgtggtgctgtacgcgccctggtgcccgttctgccaggccatggaggcctcctacgtggagctggccgagaggctggcggngtccggcggcgtgaatgtggcccggttccgcgccgacggcgagcagaagccgttcgcgcaggccgagctgcaactgcagagctttccc

SEQ ID NO: 97021 - DNA, 531 bp, Zea mays
  unsure (1)..(531): unsure at all n locations
gcgggtgtagtccagcncactacagtcnatgcaaactgctccggaattcccgggtcgacccacgcgtccgggcggttcatgatggaccagttggtcttttacgaatcaagagcagcagccgctgaccccgacagggacatgagactggacatcgacaacatgagctacgaggacctgttggctttgggagaatctatgggcaatgtcaacacaggcttggccgatgagaaaatttcgaagtgcgtgaaagaagtggtctgctgcagttccgaccagacgcaaaccgatcaagatgaccaggatgacggaagctgcgtcatctgcctggagggttacagagacaaggatatgctggggatactgaaatgcaggcacgacttccacgccggctgcatcaagaagtggctgcagacgaagaactcgtgcccggtgtgcaaagccgncgncgnctaggacgacaccagaggagcgagcaactattttgtgctcctnctcgatccattcattttttaagctcaggtcggattatan

SEQ ID NO: 97022 - DNA, 551 bp, Zea mays
agcgagtgggccaactctgaacagtaccgcactgacttaccggtcctgaattcccgggtcgagcgacgcgtccggccagtctgtggacatgaatgccattgcggtcctgtttgatggccgcaggcttcgcggcgaggagacccctgatgagctggagatggaggacggtgacgagatcgacgccatgcttcaccagaccggaggcagcgttcctagcaccacctaaaagcctcgttttgctctccgtcctgcgtagtagtaaacaaaagggaaaaagtctttttaaggaacttgtgatgctctggctccttgtgccattgctgagggacatccttagcctttgtttagtagtatggtttggtactttgttctgtcatcactcgtttatctatccctaatacatgccgtcatgattgtactcccaatgacgcgcagatcatttgctttgatttgtctgctcgaacctcgaagtcgtctatgcttttcagattattttgggcaaaaaaaaaaaaacagggcggccgctctagaggatccaagcttacgtacgc

SEQ ID NO: 97023 - DNA, 523 bp, Zea mays
  unsure (1)..(523): unsure at all n locations
tgacgcgtgacccacggatcatgcacatgcaactcnctgcgttaacgattcgcgcacgcgtccgnggacgcgtgggcgaggctcagaggcagggcaggatctcgttctacctcacttccaacggcgagggggcgatcaacatagcctctgctgctgctctcagcattgatgacattgtgctgcctcagtacagggaacctggtgttcttctatggcgtggcttcactctgcaggagtttgcaaaccagtgctttgggaacaagctggactatggtaaagggaggcagatgcccattcactatgggtcgaaccgtctgaactatttcacagtctcgtcacctatcgcaacacagctccctcatgctgttggagctgcctactctctgaagatggacaagaaggacgcgtgtgccatcacatactttggggacggtgggacaagtgaaggagacttccatgcagcgctcaacttcgcgggtgctatggaggcgccggtgatcttcttctgccgcaacaatggctg

SEQ ID NO: 97024 - DNA, 524 bp, Zea mays
  unsure (1)..(524): unsure at all n locations
ggtcgcnttncatgagtaagatgtcatagcactgctgtaccggtccggaattcccgggtcgacccacgcgtccggcttctacgagaggatatagagaggaagaacagctcgtccgagaccatgaagagcagccgacacctggtgctgatcctgtgcctccaggccgctctggtcatgggcgtcttcgccgctttggctaaagaaaatgccctggttgagagcaaggccatcgacatcaacccggggcagctcaagtgctgcaccaactgcaacttctccttctcggggctctacacctgcgacgacgtcaaaaaggactgcgaccccgtctgcaagaagtgcgtcgtcgccgtgcacgccttctactcgggcaaacacaagttcaggtgcaccgacacctttctcggcatgtgncggccccaatgctagatcagagaggaagaacgcgcgctgctgctaactgctatagcttcgttcttccgcggcggccgtgcatggtcacgtactgggggtgtgctactaca

SEQ ID NO: 97025 - DNA, 531 bp, Zea mays
gcggccttcaatgatcatcactcgtcatcgcacctgccgtaccggtccggaatccccgggtcgacccacgcgtccgaatccccgtgctgagagctgagtgctgccttggttgctccgtactggactcgaggcctcgtcgcagcagaagcatcccgtcccctccgcttctccttgctctgctctggtaacacacagacaaaaaaaaaaaatagcatcatgtcggaggtgaaggactccaatgtgcctgctgcacttgatggaaatcctcaacctatggaccaaactgaagacaattctatgccctcagcacagcaacaggaagaagcaatcaagaagaagtttggaggactaatgcccaaaaagcccccactcatctcaaaggatcatgagcgggcctactttgattctgctgactgggctctagggaagcaaggtgttgccaaacccaaaggaccgctggaggcacttaggcccaagcttcagccaacacgccaacaacagcaacaacgtgcaaggcgccctatttacact

SEQ ID NO: 97026 - DNA, 551 bp, Zea mays
  unsure (1)..(551): unsure at all n locations
agctgtngtgcgccaacgttgacacgcatcgactgacctaccggtccggaattcccgggtcgagccacgcgtccgcgcaaggttgcttgtatcggtgcatggcatccggctagggtctcgtataccgttgcgggtgcgggtcagaatgggtaccggcaccgcactgagatgaacaagaaggtctacaagatcggcaaggctggacaagagacccacgatgcctccacagagtttgacaggaccgagaaggacatcactcccatgggtggcttcccccactatggtatcgtgaagggtgactacctgatgatcaagggatgctgtgtgggtccaaagaagagggtggtgaccctccgtcagtccctactgaagcagacttcccggctggcgctggacgagatcaaagcttaagttcattcccccttatgccaaattttggaacggccgtttcaaaataaccgtgaaaaaccgaagttccttggtaagctcaagcctaaaggtctgcagtgcaacgaaaagtccatttgggaaaatcaataaactgtgaaacc

SEQ ID NO: 97027 - DNA, 530 bp, Zea mays
  unsure (1)..(530): unsure at all n locations
tgagagtggtggatagtaatagattgtacttctcataccgctccggaattcccgggtcgacccacgcgtccgcccacgcgtccgggacgcaggggggcatttccgggaacctcgccgcgggcggggctggagagccgcggagcttttgatttaaccggccggttggtcagccagccagccagccagccactcagtactgcacactgccatcgctctcctacggtactgctgcctaccgcgcgtctcgtcccttcgctgccgctctatctatctcggccggagccatgggcggcggtggcgcggcgctgctgctgctggtgatgtgggcgggcgtggcgtcggcggccgtgtacgaggtgggcggcacgattgggtggaccgtcatgggcaaccccgactacgccgnctgggccagctccaagcagatcgtcatcggcgacactgttgtgttcacgtataacaagcagttccacaacgtgctggcggtgagcaaggcggactacaagaactgcatcgncaccaagccgacg

SEQ ID NO: 97028 - DNA, 537 bp, Zea mays
gcgtatcggtgctgtccccagcttacgactgctacgtgcataccgctccggaattcccgggtcgacccacgcgtccgcccacgcgtccgcccacgcgtccgcgagggacaccctgacaagctctgtgaccaggtctgagatgccgttcttgacgcttgccttgctgaggaccctgacagcaaggttgcttgtgagacctgcaccaagaccaacatggtcatggtctttggtgagatcaccaccaaggccaatgttgactacgagaagattgtcagggagacctgccgcaacattggttttgtgtcaaacgatgttgggcttgacgccgaccactgcaaggtgctcgtgaacattgagcagcagtcccctgatattgctcagggtgtgcatggccacttcaccaagcgccccgaggagattggagctggtgaccagggacacatgttcgggtatgcgaccgatgagacccctgagttgatgcccctcagccatgtccttgccaccaagctaagtgctcgtctcaccgaggtccgcagg

SEQ ID NO: 97029 - DNA, 530 bp, Zea mays
  unsure (1)..(530): unsure at all n locations
tgagagcgtntgaatgagctcagttgcctcacgactgtctgtaccggtccggaattcccgggtcgacccacgcgtccggatatttggtgccatctcactattggtgttgtctattattcccctattcaatggtttttgcttaggaatacctatggtcagcatgctcctttatgtctggagccgagagaatccaaatgctcagataaatatatacggcctcgtccaattgaggtccttttatcttccatgggctatgctcttattggatgtgatatttgggtcatcattaatgcctggacttctgggtatcatggttggacatctctactacttctttgcagtgttgcaccctcttgccaccgggaagaactacctcaagactcctaaatgggtacataagattgttgctcgattcaggataggcatgcaagcaaactcacccgtccggccaccagccaatggcaacagcgggtctggtgtgtttagaggaagaagctataggctcaatcaatagattcactgattcatgg

SEQ ID NO: 97030 - DNA, 533 bp, Zea mays
  unsure (1)..(533): unsure at all n locations
gcggagcgtgctagtcccagcnaaagattgtcgtngtcatactgctccggaattcccgggtcgacccacgcgtccgcccacgcgtccgcccacgcgtccgcccacgcgtccgaagatgattcccactaagcccatggtggttgagaccttctctcagtatcctcctctgggtcgttttgctgtccgtgacatgaggcagacggttgctgttggagtcatcaagagcgtggagaagaaggacccaactggtgccaaggtgaccaaggctgcagtaaagaagaaatgatgcgtcctctcatgtgccctcgtttattttgtacttgtgcccgtatacttcgatctgttaaaatctattggttgtgtgccctgtgtctgttgtttgggtatctatactgttattttgagacatgttgacttgcatggtcatctggattgggttcgcatttctgagtcaaaaaaaaaaaaaaagggcggccgctctagaggatccaagcttacgtacgcgtgcatgcgacgtcatagctcttctatag

SEQ ID NO: 97031 - DNA, 554 bp, Zea mays
  unsure (1)..(554): unsure at all n locations
gtggggtntgcctgaacggacatggcatcgcctgcacgtaccggtccggaattcccgggtcgacccacgcgtccggcagtcaccactcccaagccagtaccgagtcctacgagcagtcgcacgcaagtgtcaggagacgaaacggtcgacatggctcgcacgcaatctgccgtagcggtcgccgtggtggccgcggtgctgctgctggcagcggcggcgacgacctcggaggccgccatcacctgcgggcaggtgagctccgccatcgcgccctgcctctcctacgcccgcggcacggggtccggcccctccgcgtcctgctgtagcggcgtcaggaaccttaagagcgccggcagcaccggcgtcgacaggcgcgccggctgcaactgcctcaagaacgccgncaggggcgtcagcggccttaacgccggcaacgccggcagcatccccttcaagtgcggcgtcagcaatccctacaccataagaacttcaacgactggttcaaggtgaacctaaacccttaccacgcgccgagaccggccgcttatccatcc

SEQ ID NO: 97032 - DNA, 552 bp, Zea mays
  unsure (1)..(552): unsure at all n locations
tcgtggctagtnncctaagtctcgagtaccgacagacctaccggtccggaattcccgggtcgacccacgcgtccggccacgcgtccgcgcctgcttcttcccccagaccaaagacacgaatcagccatggcgctggcctgcgccacgtcccggcccgtcctcggtcgccccgccggcaccgcgcggccccacctcgccgtttcctcatcctcccccgcctcctcgatccgcttcccccgcggcgccgacggcggcgccagcagagcggccgtctctctccgcgcccccacgcctccagtctgtgaccccaaaagccttcttttcatgtttggaatggagctggactacagcgacgccctcattggtggcggcttcttgttccagaatccaaacgcaccaaaaacctgtgggtgcggcaaatctttcgcgactggaaaggagaccgaggccgcggcaaccacttgcaccaccttgagttgagaattatggttagctaaacgtgatgtgccatgtggattaccttggtcatgttaaaaccttggggttccaccc

SEQ ID NO: 97033 - DNA, 535 bp, Zea mays
  unsure (1)..(535): unsure at all n locations
gttatgcggtttccctgcnctaagcattgacttcgcaacatcgtccggaattcccgggtcgacccacgcgtccgggcgaggccgtgtggttcaaggccggctcccagatcttcagcgagggcgggctggactagctcgggaacccgagcctcatccacgcgcagagcatccttgccatctgggcctgccaggtcgtgctcatgggcgccgtcgagggctaccgcatcgccggcggcccgctcggcgaggtcgtcgacccgctctaccccggcggcagcttcgacccgctcggcctcgccgacgaccccgaggccttcgccgagctcaaggtcaaggagctcaagaacggccgcctcgccatgttctccatgttcggattcttcgtccaggccatcgtcaccgggaagggcccgctcgagaacctcgctgaccacattgccgaccccgtcaacaacaacgcttgggcctacgccaccaacttcgtccccggcaagtgagggaggcgccgacggtgacctttatgtgtcccgatgcc

SEQ ID NO: 97034 - DNA, 547 bp, Zea mays
  unsure (1)..(547): unsure at all n locations
gcgtgctagtncctgcatgttccagtaccgncagtcacgtaccggtccggaattcccgggtcgacccacgcgtccgcccacgcgtccgcccacgcgtccgcccacgcgtccggtattctctacctacccacctgggtcggtttcgggtacaggtacgcttttgttgaaggtcgttcgagcttttcctgggagtatggcatgggttacatacttcagcgccgtagcgcctggtatgagcctcgtggagaagcaatggctagtccacggggctcatacttcagcgctgcagcgcttggtactcggacctcggctcgaggcattttctctaccccttcttaccctgaaaaagcagggtcaccttgtgtccttaaacctataaccatctttcggctaacctagcctcctccgtccttccgtaccaacaaggggtagtccaggaatattgacctgttgtccatcgactacgcttttcggcctgatctaaggccctgattaacctttcctggacgaaccttgcgaaggaaaccttggtttttggggcattgat

SEQ ID NO: 97035 - DNA, 529 bp, Zea mays
  unsure (1)..(529): unsure at all n locations
tgtagtggtgtccttcaatagatgctcgtcgaaccgctccggaattcccgggtcgacccacgcgtccgctttcccctacctctccagcatctcccgtctccgtcgtctcgtctccgctcctcacctgggcagccatgggcaagatcaagatcggaatcaacggtttcggaaggatcggcaggctcgtggccagggtcgccctgcagagcgaggatgtcgagctcgtcgccgtcaacgaccccttcatcaccacggattacatgacctacatgttcaagtacgacaccgtgcacggccaatggaagcacagcgacatcaccctcaaggactccaagacgcttctcttcggcgagaagccggtcaccgtctttggcatcaggaaccccgaggagatcccgtggggtgaggctggtgctgagtatgtcgtggagtccaccggtgtcttcactgacaaggacaaggcttgtgcacatctgaaaggtggtgccaagaaggtgntatctcttgccccagcaaagatgcacccatg

SEQ ID NO: 97036 - DNA, 535 bp, Zea mays
  unsure (1)..(535): unsure at all n locations
aggagcgtgctagtcccagcncattacagcacagtcgataccgctctggaattcccgggtcgacccacgcgtccgcgctggcacgccctactcactcgcgtctctcgagctccaggagagggacatcacgacgaggccngagtgggagcggctctaccagtacgagattccagtgttggccaaggtgctccccgacgggaccgaggaagtacttcccagattatcgccacgtctaagtgttgagctcgtacaaaagaaaatttattttgcgtttgatcagtagggagaccgttctgggggaaacggtaattttattttattaattaatagctccagctgtaagattgccagttgttatattttcatgattttgacacatgaatttcaatttgcttgacttatgtttgcaaggaattactttaggtttgttcattgctctgatgaaatataaattatatggagtgacatccaaaaaaaataaaaangattatgccaataatgttgttatctaattcccaagcaaagaaggccccag

SEQ ID NO: 97037 - DNA, 535 bp, Zea mays
cgagcggcttcgccaggctataagatgtacatcgcataccgctccggaattcccgggtcgacccacgcgtccggcaagtctcgctacgtagcagtgcaataaaaaaaagcagccgcaatggcgagcagcaccggggccctctcctccacggccttcgccggcaaggccgtgaacgtgccgtcgtcgtccgccttcggcgaggcccgcgtgacgatgcgcaagacggcggcgaaggccaagccggcggcggcgtccgggagcccgtggtacggccccgaccgcgtgctgtacctgggcccactgtccggcgagccgccgagctacctgacgggcgagttcccgggcgactacggctgggacaccgcggggctgtcggcggacccggagacgttcgccaagaaccgggagctggaagtgatccactcccgctgggccatgctgggcgcgctcggctgcgtcttcccggagcttctcggccgcaacggcgtcaagttcggcgaggccgtgtggttcaagggccggctcccagatctta

SEQ ID NO: 97038 - DNA, 531 bp, Zea mays
  unsure (1)..(531): unsure at all n locations
agagcgcgtntgaatgagaccgactcactaccgacctgccgtaccggtccggaattcccgggtcgacccacgcgtccgcggacgcgtgggcggacgcgtgggtgagaatgtcactgtaacaccccaccttggagctaggactgtcgaggctcaggaaggcgtcgctatcgagattgcggaagccgtggttggtgcgctgagaggggagctcgcagcaaccgctgtgaatgcgcccatggtcccagctgagatcctgtcagagctggctccatatgtttctctggccgagaagctcgggaggctggcggtgcagctcgtggccggcgagagcggcatcaagggcgtgaaggtggtgtacaccacagcgcgtggccccgacgacctggacactcggctcctccgcgcgatggtgaccaagggcctggtggagccggtgtccagcacgttcgtgaacctggtgaacgcggactacacggtcaagcagcgcggccttcgnctcacggaggagcgcgtggcgcacgacagccccgc

SEQ ID NO: 97039 - DNA, 535 bp, Zea mays
  unsure (1)..(535): unsure at all n locations
gggaggggnnnncctgagctcagctcaggatcgcactgcctgtaccggtctcggaattcccgggtcgacccacgcgtccgcccacgcgtccgcccacgcgtccgcccacgcgtccgcccacgcgtccgcttcttcggcggggacgccgtcgggctcgtggacatcgcgctcgggagcttcgtggtgtggatcagggtggtggacgaggcggccggcgtaaagcttctggacgaggccaagttcccggccttgacggcgtgggcggagcgcttcttggcggtggacgccgtgaaggaggtgatgccggacgccggaaggctgttggagcactacaaggggtttctggctaaacggtctccacctgctggttactgaacgctgtaactgtaagcctgtaacagcaagctcagtgttcgtgtacttttccgtgcgttaacgtgtactagagttcaggaaaggctttgattctgtccagagtccagacgaataaacgaatggtttttattaaaaaaaaaaaaaagggcggccgctctat

SEQ ID NO: 97040 - DNA, 523 bp, Zea mays
  unsure (1)..(523): unsure at all n locations
natggcgngtgaaagggacctanngcacgccatgtcgtaccggtccggaattcggcgggtcgacccacgcgtccggccgcgcccagcctcggcgtcatcttttccttctcgctgctcctcaacagcggacgggcggtactgtcgggcgtggccgccagggccagctggcactggctggtggcgtacatcaacctcggctgctactacctcgttggcatccccgtcgggtacatcatcgacttcccgctgcgcggcggggtgcaggggatgtggggcggcatgctcacgggcgtcggcctgcagaccctcatcctggtcgccatcacgctgcgcaccaactgggacaaggaggccagcgaggcccattccaggatacagaaatggggtggatcggcggcggacaaaagttcacatgcatgactagtctgaatgacgcgcgccaccatgagaatacaatacaacagatgccatgcgagcagaatggcatgctgcggtgcgtaagcctaaatgaccttgcaggttg

SEQ ID NO: 97041 - DNA, 522 bp, Zea mays
  unsure (1)..(522): unsure at all n locations
ntgcnccntngngactgaaacgatttgcacngcgtactggtccggaattcccggggcgaccgacgcgtccgggaagttgctgcacttaaccgctactttggcggcctgaaatctggtggtaatgcttgtgtggttggagatccagcaagacctggacagaantggcacgtcttctacgccactgagtacccagagcaaccaatggttaaccttgaaatgtgcatgactggtctggacaagaagaaagcttctgtctttttcaagactaatgctgatgggaacacaacatgtgccaaggaaatgacaaagctctctggcatctctgaaatcatccccgagatggagatctgcgattttgactttgaaccctgtggctactccatgaatgcgatccatggctctgcattctccacaatccatgtgacgcccgaggacggtttcagctatgccagttatgaggttatgggcttggatgccactgctcttgcttatggtgacctggcaaagagggttctttcgtgc

SEQ ID NO: 97042 - DNA, 522 bp, Zea mays
  unsure (1)..(522): unsure at all n locations
agcttcgnnnaacagtgatctaagctangncannncnnttnnnnnnannnnccgnnggggnggaaacacaggcaaccacacatacnnaaacatgcttttttttttacgctacattaactccattctccccgagggggttcaccttggggacgggatgccattattaatacaacctcacctgtactgaattccttcctccggattttcaatggccacctggggcgcaccagacacctctcgatttacggtgctcttcctgccgcttgaccctacctccagctgaaccaattccagggttggcgggcctttaaccataaaagataactcttcccgaagccccctccggcgtctccggacttcctaacatctccgtctgccgtcacgtcccatctctggaaatcttaaccccattcccttttctttgacgcgcgttatcccgctatcattcgggttttccccctcccttaagatctgtttaaccaatttccaattcccgttcacaaggaaacttttttctctttt

SEQ ID NO: 97043 - DNA, 522 bp, Zea mays
  unsure (1)..(522): unsure at all n locations
ngaggccnnnnnaatcgatgatgtggattatgtgattgctcgtaccggtccggaattcccgggtcgacccacgcgtccgcccacgcgtccggaacatactgaggccacagggaagggaacttgatctgctgatcgtgatactgcctgacaacaatggttctctttatggggatctcaaaaggatctgtgagactgaactcggattggtctcccagtgttgtctgactaaacatgtttttaagatgagcaagcagtaccttgcaaatgttgcactcaaaataaatgttaaagttgggggaaggaatactgtacttttagatgctttgtcaaagagaatcccccttgtcagtgacagaccgaccataatatttggtgctgatgttacccatccacatcctggagaagattccagtccttccattgcagccggtgttgcttcgcaagactggcccgaggtcacgaaatacgctggactagtgagtgcgcaaagccatcgccaggaagctgatacaggaccttttc

SEQ ID NO: 97044 - DNA, 515 bp, Zea mays
  unsure (1)..(515): unsure at all n locations
atgcggtgnnncatttagcgtgtactgccngcgnacngnnncgaanncgngggcgagacacgcgtcncctcaatcaaatcgagcgcgcgccaatcaagtcttccagcctnccccnaatggcgcgatcaaacaagacaggagggtgaaactcgccttctgaagcgtctgcgactccttcagcgccacctccatcaaggcctacgtggccgagttcatcgccaccctcctcttcatcttcgccggcgtcggttccgccatcgcctacaggcaactgacgaatggcggcgcgctggacccggcgggcctggtggcgatcgcgatcacccacgcgctggcgctgttcgtgggcgtgtccatcgcggcgaacatctcgggcggacacctgaacccggccgtgaccttcgggctggccgtgggcgggcacatcaccatcctgaccggcgtcttatactgggtggcccaacttcttagaccccacgaggccggccctgttcttgggatttacacccaccgca

SEQ ID NO: 97045 - DNA, 518 bp, Zea mays
  unsure (1)..(518): unsure at all n locations
cggggnnnncttacttagttcttattggactgctcgtaccggnccggaattcccggggcgagccacgcgtccgcggacgcctgggtagggttttgctgctctccgaccccgagctccgaaagccgcagcggaggcgcggcccccctcgcgtgtgaccgaaatggcgctgccgaatcaggggaccgttgattaccccagcttcaagctcgtcatcgtcggcgatggtggaactggtaaaactacatttgtgaagaggcatctcactggagagtttgagaagaaatatgaaccaaccattggtgtggaagttcatccgttggatttcaccactaactgtggtaagatcaggttctactgctgggataccgcagggcaagagaagtttggtggcctcagggatggatactatatccatggccagtgtgcgatcatcatgtttgatgtaaccctcaaggcttacttacaagaatgttcctacgtggcatagggacctgtgcaaggtctggtgaaaccatccc

SEQ ID NO: 97046 - DNA, 503 bp, Zea mays
  unsure (1)..(503): unsure at all n locations
agggcnttttnccccagctcccgnacgcactctnnnnngaaanncgggcgacgcaggctccggggccgaantccttcctttgccgccgataccaaatccaatctcggttcacgggggggcacaaagcagcccggattcccggcccaatccgcgctctcttttccgtcgtttaagtcatggcaggaatggcacctgagggttctcagttcgatgctaagccctatgattctaagatgcaggagctgctgagcaccggtgagactgaggagttcttcacttcatatgatgaagtttttgagagttttgatgatatgggcctccaagagaatcttctgagaggcatttatgcttatggttttgagaagccatctgcaattcagcagagaggaattgttcccttctgcaagggtcttgatgtcattcagcaagcacaatctggtacaggaaagacaacaaccttctggtctgggatcttgccacaactgaactattgcccggttgaa

SEQ ID NO: 97047 - DNA, 522 bp, Zea mays
  unsure (1)..(522): unsure at all n locations
nnttatgttgtttttcccccagctcgccgcangctannccgnnccggatncccngnngggaccacgcctacgcccacgccttccgtttaggttccggtttggccgccacgccaaagcttcttcaaaaaagggtggggaaaccttaaacttctcttaaccgcccctttgggttccccgcccccgtgccccccactacctggaccgctcgctggtcggcgactaccagttcgacccgttcggtctcgggaagcccgtggagtacctgcagttccagttggactcgcttgaccaaaacctgtccaataatgaggccggcggcatcatcggcacccggttcgagtcctcctaagtcaactccaccccgttgcagccctacagcgaagtgttcggcctccagcggttccctgagtgctagctcatccacggccgcttggccatgctcgctcaccttatgcgcgctctccgtcgagtggctcaccaggcgtaacctgccangactccgccaaggtgaagcttgttgac

SEQ ID NO: 97048 - DNA, 506 bp, Zea mays
  unsure (1)..(506): unsure at all n locations
ngtgttgnnnnncccttttctaagctggtctancnnnnnaannnnnnnggggcgcgcgtacgcgccgnacatccctcccttcccttctaatccaactccgatctnanttcaccgcacggacatagcagccccggctcccggcccaatccgcgctctcctctccgtcgcttcagtcatggcatgaatggcacctgacggttctcagttcgatgctaagcactatgattctaagatgcaagagctgctgagcaccggtgagactgaagagttcttcacttcatatgatgaagtttttgagagttttgatgatatgggcctccaagagaatcttctgagacgcatttatgcttatggttttgagaagccatctgcaattcagcagagaggaattgttcccttctgcaagggtcttgatgtcattcaccatgcacaatctggtacaggaaagacaacaaccttctgatctgggatccttccacaacttgaccattgcccgggttaattcc

SEQ ID NO: 97049 - DNA, 519 bp, Zea mays
  unsure (1)..(519): unsure at all n locations
ntggccgggnccccgaaagtccgnangncatactctccgnattcccgctgcgaccacgcgtccgaccccaagacatctntccccttcgccttctaatccgagactcctatctcnnnctcacgtctgggcacataacaaccccgactcccctcccnatcctctctctccttttcctcgtttcactcatcccacaaatcccacctacacggttctcacttcaaagctcagcactattattataaaatacaggagctgcttatcacccgagatactcaacacctactcacttcatatcatgaaacatacgaaagttttgatcatacattcctccaagacaatcttctgacacgcattcatgcttatccttttgacacaccatcttcactacagctacagatgaattactcccttctacaaggttctcgacaacatatcacaagcacaatctggtacactaaacacagctaccatctacttttgcatcttccaacaaacttgactaattccactgtttcaaan

SEQ ID NO: 97050 - DNA, 519 bp, Zea mays
gggccttggcctggggcggttgcacagcatgccgtaccggtccggaattcccggggggagccacgcgtccgggaggagagccacctcatgggcctgaggaagcggctgtccagcttctccggggggaggcagcccatctccgccgcgtcggccgccgagtgggcgttccgccgctccaagtcggcgccctccctcggcgccgccttcgccgcggggggcggctccctgaggcagtggtggcagtggggcgtcggctggctcctgtccaagaagcccgggttcgcgggcgacctcgagatgaacgaggaggaggtcgccgcgctgggccgccagagcaggggcacctgggcccacatcctgttcaagatgcggtccggcgtccgccgcctcgtcgcgtccgcgcactcgctccccaccacgcacaagcagcagtccctgccgtcgtcgtcggccgcggcggcgcacagcgttcaatgcaaggccggggcgtcgttcggctacacccagggggagaacttt

SEQ ID NO: 97051 - DNA, 520 bp, Zea mays
  unsure (1)..(520): unsure at all n locations
nnaagcccccccttgcccagctccangccacgctcgtaccggtccggaattcccggggcgagccacgcgtccgggcgctcggtgttgataccgtgccagtacttgttggaccagtctcgtacctgttgctgtcaaagcctgccaagggtgtggagaanggattccctcttctttcccttcttagcagcatcctcccagtctacaaggaggtcattgctgagttgaaggcagctggggcttcatggattcagtttgatgagcccactcttgtcctcgaccttgattctgacaaattggctgcattctctgctgcatatgcagaacttgaatctgtactttctggattgaatgtgcttgttgagacttactttgctgatgttcctgctgagtcctacaagaccctaacatccctgagcagtgtgactgcttatggttttgatcttgtcccgggaacccaaaactcctgggcttgtcacgaatgcttggttccctgcttgaaagtacttctttgctggggtgg

SEQ ID NO: 97052 - DNA, 521 bp, Zea mays
  unsure (1)..(521): unsure at all n locations
cggcccnnaactgaccgaattcacngcanancggtccngaatncaanngcgaccgcacgcgctcccatacaagcactctctattaataccgttccaatacttgttggaccaatctcntacctggggcggtcaaaacctaccaagggtgtggaaaaagcattccctcttctttcccttcttagcagcatcctcccagtctacaaggaggtcattgctgagttgaaggcaccttgtgcttcatggattcagtttgatgagcccactcttgtcctcgaccttgattcttacaaattggctgcattctctgctgcatatgcacaacttgaatctgtactttctggattgaatgtgcttgttgagacttactttgctgatgttcctgctgagtcctacaaaaccctaacatccctgaacacngtgactgcttattggttttaatcttttcccgtggaacccaaaactcttgggcttgtcacgaatgcttgttttcctgcttgaaaaaaccccttttgttggggttt

SEQ ID NO: 97053 - DNA, 527 bp, Zea mays
  unsure (1)..(527): unsure at all n locations
naaatgccnnnnccccgggccagttcgcancgncacgncggtaccggtccggaattcccggcgggagccacgcgtccgcggacacctggccggacacgtgggccttgctagctgaggacggtacancngcgcagagttgcgacgtacgacgacgacgacncangcgccacacatggcatcccagctctccgccgccgtgccccggttccacggcctccggggctacgccgcgcccaggtccgcggtggcggcgctgccgtccgtgagggtgggcaggaagaggtcgtcgtcgcagggcatccgctgcgactacatcggctccgccaccaacctgatcatggtgacgacgacgacgctgatgctgttcgcggggcggttcgggctggcgccgtcggcgaaccgcaaggcgacggcggngctgaagctggaggcgcgcgactccggcctgcagacgggtgacccccgccggttcaccctcgccgacacgctgggcttcngcgccgtcggcccaatccttggggtggctt

SEQ ID NO: 97054 - DNA, 532 bp, Zea mays
  unsure (1)..(532): unsure at all n locations
nnaaggcgnnnnncccggggccagtttgcanngncantgctcnncnnggtcncggaaacgcggcgcgagccacgcgtccgcggacccctggncggacgcgtgggcctcgctagctgaggacggtacancngcgcantggttgcgacgtacgacgacgacgacncangcgccacacatggcatcccagctctccgccgccgtgccccggttccacggcctccggggctacgccgcgcccaggtccgcggtggcggcgctgccgtccgtgagggtgggcaggaagaggtcgtcgtcgcagggcatccgctgcgactacatcggctccgccaccaacctgatcatggtgacgacgacgacgctgatgctgttcgcggggcggttcgggctggcgccgtctgcgaaccgcaaagcgacggcggtgctgaaactggaggcgcgcgacttcggcctgcagactggtgacccccgccggtttacccttcgcgacacgcttggcttgcggggcggtcggcaaaatccttcgcggtcggat

SEQ ID NO: 97055 - DNA, 524 bp, Zea mays
  unsure (1)..(524): unsure at all n locations
aagtggtgnnccccccagctttcgcacggcntgctgtacnggnncgaattcggggggcgagccacgcgtgcgnaaacacctcaatgtctagcagtaccatagccctctcctccacaaccttcgggggcggggcactgaacatgccgtggtctctattccactaaacccgcctgacgatgcacatgaccgcggctaaggcaaacccagccgcgagcttcggcagaccgtgatacaggcctgaccgcgttctctacctgggccctctgtgcggcgcacccacaagctaactgactggcgagtctcccggtcgactacggctgagacaccgcgcggctattngcgcacccggagactttcgacaagaaccgtgagctggaggtcatgcactcccactgtgccatgcttcgcgcgtaaggatgcgtgttccctgagctgcttcccccgcacatgntcaagttctgcgacgtcgttggttcaaagccttgtctcattatttaaacgagggtgggctggattacctcgca

SEQ ID NO: 97056 - DNA, 504 bp, Zea mays
  unsure (1)..(504): unsure at all n locations
tgggcggtgntccgacacgaagctgacgcgnancggaccgaatncccggggcggggacggtccgggctgcatactgaagtggtgtgaatagagatggtggcacgcagggggtggtgtctgccctgggggggggccttaacctggccgtggagatccaggccgacgccgggtacggttacggtggcgggtacaccccgacgccgacgccggtcaccccgaccccgaagcccgagaagccccccaccaaggggccgaagccggacaagctcgccaaggagcacaagccgtccaaggagcacgggcccaagccggagaagcctgccaaggagcacaagtcgacgccggccacgttcacgccgagctccaaacccacgcccgcgacgtacacttccaccccgacgccccccaaggctacggcacccacatacacttcagccctacgcccgaatacccacacaaaaacccagtcccactcctatgaagtacaccccgaccctcgggcct

SEQ ID NO: 97057 - DNA, 522 bp, Zea mays
  unsure (1)..(522): unsure at all n locations
atgcccggagtgttactagactcagagcaagtattgcattgctcgtaccggttcggaattcccgggtcgacccacgcgtccgcccacgcgtccgcccacgcgtccgctttccggttcgttcccctacgcccgttggtctctggtcgcgcaacatcagagcacaagcgaggaacccagtccagtcccgggaatggagtgcgtattgggcgtggttggccgcgacttcgcgctggtggcggccgacacttccgccgtgcagagtattctcgtccacaagaccgacgaggacaaggtgatggtgctcgactcgcaaaagctgatgggcgcttcaggggagcctggtgatcgggtgcaatttacggagtttatacagaagaacctccacctgtaccagttccggaacaccatcccgctctcaaccgccgccgncgccaacttcacacgcggcgaactcgccacagcccttcgcaagaatccatatatggtcaatattattctgggtggctatgatanggatgttgg

SEQ ID NO: 97058 - DNA, 521 bp, Zea mays
aggggccggtgtgggtatggggcttggggacataagtgaacggctcggaattcccgggtcgacccacgcgtccggcgaccaccaagcagagcaagccagtgaggtctctcagagcgtagccagccagctacaatggcggtggacgcgctagccaactatgtccaggtctacgtcatgctcccgctggatgtcatcactgtcgacaacacgttcgagaaggaggacgagacgagggcgcagctgaagaagctgacggaggcgggcgccgacggggtcatgatcgacgtctggtgggggctggtggaagggaaggagccgggagtctacgactggagcgcctacaggcaggtgttcaagctggtgcaggaggccgggctgaagctgcaggccatcatgtcgtgccaccagtgcggcggcaacgtcggcgacgtcgtcaacatcccgatcccgcagtgggtgcgggacgtcggcaaaagcaaccccgacatcttctacaccaacccgagtgggctgacgaacat

SEQ ID NO: 97059 - DNA, 515 bp, Zea mays
  unsure (1)..(515): unsure at all n locations
gtggatgaggtatatgtattggggtatatggaatgctctaccggttcggaattcccgggtcgacccacgcgtccgcccacgcgtccgcaacttcgaggatggcccgcccaagtcggcgctggtgaacggcacgggggtgtcgggcgcccacgccatcccgcggtgggagacgtccggcttcgtggagtacatcgagtcggggcacaagcagggggacatgctgctggtggtgccgcagggcgcgcacgcggtgcggctgggcaacgaggcgtcgatccggcagcgcctggccgtggcgcgcggcgcctactacgccatcacgttcagcgcggcgcggacgtgcgcgcaggcggagcggctgaacgtgtcggtgagccccgagtggggcgtgctcccgatgcagaccatctacggcagcaacggctgggactcgtacgcctgggcctttcaagcgaagatggacgcggtgacgctgctcatncacaacccgggcgttgaggaggacccggcctgcn

SEQ ID NO: 97060 - DNA, 572 bp, Zea mays
  unsure (1)..(572): unsure at all n locations
atatatgaatgtgatatatgagtataatgtataatgctgttattgacatgggggagagacagtatgcctcccggaatttccgggtcgacccacgcgtccgattttagccgccgccgctgctcatctcacatccctcgagaagacgcctgctcctcgccgggcgatgcgatggccgtcttctccgacctccacaccgccgacggcctcaagtccctcgaggctcacctcgccggcaaaacctatgtgtctggtgactccattactaaggatgacattaaggtcttcgccgcggtgccgtcgaagcctggcgctgagtttcctaatgccgcccgctggtacgagaccgtctctgcggctgtagcctcaagattccctggtaaggctgttggtgtaaatctgcctgcgggatcagctcctgcggcagctgctcctgcggatgaggctgaggatgatgatgaccttgatctttttggtgatgaaactgaggaggacaagaaggcagctgatgagcgtgccgncgctgccaaggcctcttctaaaaagaaagaaagtggtaaatccttcgtccttat

SEQ ID NO: 97061 - DNA, 555 bp, Zea mays
  unsure (1)..(555): unsure at all n locations
aatataattgatatgtaagattcgcgaaatatgaaatctcacgcntgtgatgcagtgncgttccggnttgcgtaacgacccacgcgtacgctcgtagtaggcaaagttgctaattgaacatgcctttcgaacacatctgctcctcgacgggcgatgcgatagccgaattctgcgacgtccacaccgccgacagccgcaagaccctcgaggctcacctcatcggcaaaacctatgtgtctggtgactccattactaatgatgacattaatgtcttcgccgtggagccgtcgaagcctgacgctgagtttcctaatgccgcccgctggtacgagaccgactctgcggctgcagcctcaagagtccctggtaaggctgntggtgtaaatctgcctgctggatcagctcctgcggcatctgctcctgcggatgaggctgacgatgatgatgaccatgatctttttggtgacgaaactgatgaggacacgaaggcatctgatgagcgtgccgccgttggcaacgcctcttctaaaaagacagaaagtggtaattccttcc

SEQ ID NO: 97062 - DNA, 563 bp, Zea mays
  unsure (1)..(563): unsure at all n locations
aatattgtattgtatggagatgagnatgcgtatgtgcctcgtatggggttgtaattgtatacctctccggaattcccgggtcgacccacgcgtccgcccacgcgtccggccagggatcgccatgtcggactcggaggagcaccacttcgaatcgagggccggcgccggagcgtccaagacctacccgcagcaggctggcaccgtccgtaagaacggcttcatcgtcatcaagaaccgcccctgcaaggttgtggaggtttctacctcaaagactggtaagcatggccatgccaaatgccactttgttgccatagacatattcaacgggaaaaagctcgaagatattgttccttcgtcacacaactgtgatattccgcatgtgaaccgtactgagtaccagctgattgatatatcagaggatggatttgtgagccttcttacttcagatggcaacactaaggatgatcttagactcccaactgatgagactcttgtggcccagatcaaggaagggttcgaaagcggcaaggatcttgttgtgactgtccagtctgctatggggg

SEQ ID NO: 97063 - DNA, 516 bp, Zea mays
  unsure (1)..(516): unsure at all n locations
cgcccggggggtggtctgatctacaggtactctatgnanaactccaccggntcggaattcccgggtcgacccacgcgtccgagctcccacgctcaccgacgccacagcttgtgcgcgcgcaatggcactcgtgtccgcctgctcgtcctccaccaccgccgtcgcggcgctccccaggaatgggcagcagcgggcgtcgtcgtcgttgttctcctcctcctcctcttcctccttcctcgtcggcaagacgctgctgaggcaggccgaggcagcccggccgtcgttcgccgtgcgcgccgcggcggattccgacaggccgatctggttccccggcagcacccctccgccgtggctcgacggcagccttcccggcgacttcggctttgatccctggggcctcggatctgacccggagagcctgcggtggaacgtgcaggcggagctggtgcactgccggtgggcgatgctcggcgcggcgggtatcttcatcccggagttcctgaccaagatcggcgt

SEQ ID NO: 97064 - DNA, 525 bp, Zea mays
  unsure (1)..(525): unsure at all n locations
tgcccgggggagtggccagcnctacagctagcctccgaactaccgctccggnttggaatgtcccggctcgacccacgcgtccgctgagagtgtgtgtgagagagaggatgggtggcagcggcagggctgctctggggctggggctggtggtggtggccgtgagcctggccgtggagatccaggccgacgccgggtacggttacggcggcgggtacaccccgacgccgacgccggccagcccgaccccgaagcccgagaagccccacaccaaggggccgaagccggacaagccgcccacggagcacacgccgtccaaggagcacgggcccaatccgcagaagccgtcccaggagcacacgccgacgccgaccacgtacacccagagcctcatactcacgccggcgacgtacagctcaactgctgacgacctgataagccgacgctaagccacatacactcactgactatacgcgtcacaaccccacacgaaagccgactgccactcctgcgacgtacacccctacc

SEQ ID NO: 97065 - DNA, 517 bp, Zea mays
  unsure (1)..(517): unsure at all n locations
attatcgctagatgtggattcggggggatatagaatcgctctaccggttcggcattcccgggtcgacccacgcgtccggcggtagcggcgagtccttcattgtcggagtcggaagaggagcaatccgaggcccactcgttgcctagatgcgcctggccctttgccttcttgtaatgcttcttcttttccctcttgttttccttttcctggtcactatcattatcaggccagttagcgataaaatgaccaatcttaccgcacttgaagcatgagcgcttccccttcgtcttggtcttgcttggctgccccttgtgaccctttagcaccgtcttgaagcgtttgatgatgagagccatctcttcttcattaagtccgaccgcctcaatttgtgccaccttgctaggtagcgcctccttgcttcttgttgctttgagagcaaaaggttgtggttcgttgatcggtccattcaaggcgtcgtccacgtaccttgcctccttgatcatcattcgcccgctgn

SEQ ID NO: 97066 - DNA, 565 bp, Zea mays
  unsure (1)..(565): unsure at all n locations
aataggatagggaatgtaggatgtctgcagtagtccctagctaagaantaattatcagtcacgnccggaattcccgggtcgacccacgcgtccggtccctcgtgctgtttttgttgaccttgaaccaactgtcatcgatgaggtgaggactgggacctagcgccagctcttccaccctgagcagcttatcagtggcaaggaggatgcagccaacaacttcgcccgtggtcactacaccattggcaaggagattgttgacctgtgccttgatcgcatcaggaagcttgccgacaactgcactggtctccagggcttcctcgtcttcaacgctgttggtggaggaacaggctctggccttggttccctcctcctggagcgtctgtctgttgactacggcaagaagtctaagcttggtttcactgtgtacccatccccccaagtttcgacctcagtggttgagccatacaacagtgtcctgtccacccactcccttctcgagcacactgatgtggctatcctgctggacaacgaagccatctatgacatctgncgnccgtcctttgaa

SEQ ID NO: 97067 - DNA, 562 bp, Zea mays
  unsure (1)..(562): unsure at all n locations
aatatgataggtaatgataggaatncgaattagaatgtgaaggagaggagattgtatacctctccggaattcccgggtcgacccacgcgtccgcacaaccaggatagttatctttggaagatctttaggaggtgctgttggagcagttcttgcgaaaaacaatcctgacaaggtggccgctctaatactggaaaatacatttacatccatactggatatggctggtattatgcttcccttcttaagatggttcataggtgggagctcttctagaggtccaaaacttctgaactgtgttcttcgctctccatggaatacacttgatatcattggagaggtcaaacaacccattctcttcctttctggattacaagacgaactagttcctcctccacacatgaagatgctatatgacaaagcttctgatcataatagcaattgcagatttgttgattttcctagtggtatgcatatgaatacctggatgtctggaggggaccgctactggaggacaatccaactgttcttggatcaatatgctcctggagtacaaaatcgtgat

SEQ ID NO: 97068 - DNA, 519 bp, Zea mays
attatcgattgatgatacgtatggagggagtaatgaacggcttggaatacccgggtcgacccacgcgtccgcccacgcgtccggagctgctgatggtaatgatgatgataagaggccactgctaccctacgacgtaccgtcctctttgtgtgctgccatccgtccccgttagacgatcgaggagagaataacgcagagctctctgctcccggcctgtcttctgccgtcccggccgtttaatttactagtgtgttcgtcctatatgtttagcagcagcaggtgtattgtgcgggtatgtaatggtattgcaactatattgggtgtaaaaccataataaatgtgggcaaatatgcaaggaaaaaaaaaataaaaaaaaaaaaaaaaaaaaaaaaaagggcggccgctctagaggatccaagcttacgtacgcgtgcatgcgacgtcatagctcttctatagtgtcacctaaaatcaattcactggccgtcggtttacaacgtcgtgactgggaaaaccctg

SEQ ID NO: 97069 - DNA, 510 bp, Zea mays
  unsure (1)..(510): unsure at all n locations
attatgnnaaattcttccctccactgtgtttcatgtcgatcctatacctgccgaccacccgtacgatagacttcggagcttctgatggcaattatgatcattagatgccactgatactatacggcttacgtgaatctttatatgctgacttgcgtccaccttagacgatcgatgatagaataacgcatacctctatgctgccggctctgcttctgccgtcctggacagttaatttactcatgtgtaatctctatatgtcaatcatcagcatgactattgagctgatatgtcatggtattacaactatatagtcattaaaaccataatcaatgaccccaactatgcagagtaaattcactttgacattcatagcactgtgcataaatcaccttgcgttataaaggatccaagactcacgtaaacgcttcatgctaaatcaaacactctcaatactgttacctaaactaatttcaatggccgttgtttaacaaccctctaactttgaaaaac

SEQ ID NO: 97070 - DNA, 520 bp, Zea mays
  unsure (1)..(520): unsure at all n locations
atttggggnaaattgtaataacatactgttttcaagaaaaatgttactcccggtctggaattcccggctcgacccacgcgtccgcccacgcgtccgaatttaaggaggttgtgctaactcccacacatttggccatagttatgggatatgctgctggtggtgagctatttgaaaggatctgtaatgctggaagatttagtgaggatgaggcgagatttttcttccaacaactgatttcaggagttagttattgccactcaatgcaaatatgccatagagatttgaaactagaaaacactctcctggatgatagtatagcacctcggctaaagatatgtgattttggttactccaagtcctctgtgttgcactctcaaccaaaatcaactgtcgggacaccagcttacattgctcctgaggtccttgctagaaaggaatatgatggaaaggtcgccgatgtttggtcatgtggagttactctgtatgtgatgcttgttggtgcctatccctttgaggaccc

SEQ ID NO: 97071 - DNA, 559 bp, Zea mays
aatgtttattttatgtataatagatcgattatatgtttggggggaaagaagtttaaccgctctggaattcccgggtcgacccacgcgtccgcggacgcgtggggcagccaagtaaaccgtgggaatgttttttttgttgttgtcttgtgtgcgatggcaacacccaggtcgtgaaggcaatcgagaacgcgatccccgtgcggcggcgcgggtgcggcgggagctgtggtgcgggctgacgtacctggtgatccagacggccgggttcatgcggctcaccttctgggagctgtcgtgggacgtgatggagcccatctgtttctacgtcacgtccatgtacttcatggccggctacgccttcttgctccgcaccaagaaggagccgtcgttcgaaggcttcttcgagagccggttcgcggccaagcagaagcgcgtgatgcgcgcccggcgcttcgacctccgcaggtacgaggagctccggagagcctgcggcgtggcggcggcgccgacgacgctccaggcccggaccccctgcgcgggcgcgggcgcggcgcgggag

SEQ ID NO: 97072 - DNA, 515 bp, Zea mays
  unsure (1)..(515): unsure at all n locations
atcacccacttgggcaggangctaaagngccagacctgncttacttcctggtcgacccacgcgtccgaccacacgttcggttaaaaagctcgtaattggaccttgttccggaccagacgctccgccgcacctcggtaacctatcgcatccagccttctatcaactatgctctcctgcacttaactgaccgcatcgtgccttcgtcgccgttacttcgaacaaattacagtgctcaaagcaatccatcgctctacatacattaccatgccataacaccataggattccgactctattgtggcggccttctcaatcatcttcacgattattagcaacagtcaccttcattcatcaccaatccccaggactgacactcttagacttacgaaagacgaatctctgtgaaagcactatttcaacacacctatcattaatcatgaatacctctacaacaacgatcgctctataccatcccatcttacattcgttaccgaagcacatcacacatgttctatg

SEQ ID NO: 97073 - DNA, 520 bp, Zea mays
  unsure (1)..(520): unsure at all n locations
aggtggggnntagggtnactcgacaccgctcactacgatcgctctaccggtctcggaattcccgggtcgacccacgcgtccgcacgatgttctccaccgcaaaccctgatgtggtatacaaggggaagctccatgcccaggggcgcgtcgccgtcaagcgcttgaaccgctctgcctggcccgacccgcgccagttcctggaagaagctagatcagttggcctgctccgaagcaaaaggttggcaaatttgcttggctgttgctgcgaaggtgatgaaaggttgcttgttgcagaatacatgcccaatgatacgctcgcgaaacatcttttccactgggagtcacaatcaatgaaatggaccatgagattaagggttgttctctgtcttgctgaggctttagaatattgcaccaacaggggccgtgctctctaccatgatctcaatgcctatagagctctgtttgatgatgattgtaaccctagactntcctgttttggcctcatgaagaacagtcgtgn

SEQ ID NO: 97074 - DNA, 565 bp, Zea mays
  unsure (1)..(565): unsure at all n locations
aatgtgtatttgtatgtagtacaaggacaatagaatctagtttagcacgtaangtgcaatcncgtccggaattcccgggtcgacccacgcgtccgcccacgcgtccgcccacgcgtccggccgcagtcccaccgaccccgccgccggtcgccctgggtctgggcgccgctgcctctcgtttctcttttcaataatcaagatgagccgtggtggtagtgccggtggtggtcaaagttctctgggttatctctttggaagcggtgagccccccaaaccagcagtggcaccagctgcaagtgctccacctgttgagaaaccatctgctgcaaagactgatgcggccaatcaggttgctgctggggttaccagccaaaccaataactaccacagggctgatggtcagaacactggcaacttccttacggaccgtccttcaaccaaggtccacgctgctcctggcggtggctcttccctgggctacctgttcggtggcaactgatgcccgtgctggtgcgctcaccaaagttatcctnccctgcctgctgcgtgctatgtctgaatcgtg

SEQ ID NO: 97075 - DNA, 566 bp, Zea mays
  unsure (1)..(566): unsure at all n locations
aatattgatatatcatatataacganaactgacgtaagctgcaccgcnctgcatcgcatagctgttctcaattcccgattcgacccacgcgtacgcgggacctagagattaacctatttgtcagatccatttataaacggacactatccacacatggtgcgggatctcatcaaggagagcctgcccatcttcactcctgagcagtctatactggtgaagggctcgacagactacatcgctatcaacgagtacacatccagctacatgaaggggcagaagctggtccaactagcgcccagtagctactctgccgattggcaggttcaatatgtgtttgcacgcaatgtcaaaccgattgcaccacaggcaaattctaagtggctctacatcgccccgacggggatgtacgggtgcgtgaactacctcaaggagaagtatgcgaatccaacgatctacataacggataacggaatggaccatcctggaaacttgacccgagaccagtacctgcgcgacgccaccaaggtgcggctctacaggaactacatccgccacctgaataggcc

SEQ ID NO: 97076 - DNA, 530 bp, Zea mays
  unsure (1)..(530): unsure at all n locations
cggagcnnagtgcttgactagaggcatgagtaccnatagaactgccgntccggttcggaattcccgggtcgacccacgcgtccgcctacgcgtacgtgcacgcctaccaaaacaaggtgacggtcacaggactacggggacaccgccaaagtcatagcagccgggtcgactacaagacaggcaagcgggtggagccctggccctacgtgccctacgagatggtgcagcacccctacgcgccgggcgcctacgacaagaaggcccccgccggctacgtccgcaacgtcgtctccgaccccaccgtcgcgccgctcgccagggcctactccaccgaggtccgctacaccgccgccttcagcgacgagaaccccaacgcctgctccgtcatgtagacgtagacccacccacacaccgaccgacccatgctattagttactagtagtatagtaggtgcttgcttgagagagttgctcttggaggaggttttgctcttcctgattctctttttcttttttttcgttctccgagtt

SEQ ID NO: 97077 - DNA, 525 bp, Zea mays
  unsure (1)..(525): unsure at all n locations
aggatgctagagctggtcacgcataacaagaaagctcctacggtctggaatacccgggccgacccacgcgtccgcgagccccaaacccacgccgccgacgtacactcccaccccgacgccccccaagccgacgcgacccacatacactcccgcccgtacgccccacaaacccacaccaaaacccactcccactcctccgacgtacaccccgacccccaagcctccgacacctaagccgaccccgccgacgtacactccaagccccaaacctccgacgcccaagccgaccccaccgacgtacaccccttcccccaagcctccgacacctaagccgaccccgcctacgtacactccaagccctaagccaccggctaccaagcctcccacgcccaagccgaccccgtcaacgtacaccccttcgccaaagcctncgacacccaagccgaccccgccgacgtacaccccttctnccaagcctncgacgcccaagccgaccccgtcgacgtacactncaagccccaagcc

SEQ ID NO: 97078 - DNA, 566 bp, Zea mays
  unsure (1)..(566): unsure at all n locations
tagagtatatgtgtatgtaggatgtgaaagaggtgtgtgctagcttcagtctgtcattgcatacngcnccggaattcccgggtcgacccacgcgtccggcttgatgaatctgtgtctgctgcaattactgagaatgatattgttgctgctgctgtgtggtctgggaacagaaattttgaaggacgtgtgcatcctttaaccagagcaaattaccttgcttcccctcctttagttgtggcttatgcattggctggcacagttaatattgattttgagaaagaacctattggcatctcgaaagatggaaaagaggtttacttccgggatgtttggccatccacagaagagatagccgaggttgtcaagtcaagtgtgctccctgacatgttcaagagcacatatgagtcaatcaccaaaggaaatcctatgtggaatgagctgccagtctcaacaagcactctctacccctgggatccatcatctacatacatccatgagccaccttacttcaaggatatgaaaatgagtcctcctggcccgcggcctgtgaaagatgcatattgcct

SEQ ID NO: 97079 - DNA, 567 bp, Zea mays
  unsure (1)..(567): unsure at all n locations
atgattatatgtttatagatgatattnaattatgtattttgtggaggaggggagatagtatccctccttgaattcccgggtcgacccacgcgtccgctcatcaccaccttgtatgcagtttccctagcaacagtgatagtcctcctcctttggttggacaagcccgcagtcgtggggaaagccactgccgttcccggcgacgagaagccacggcgacgactgccgcctgggccatggacccttccggtcatcggcagcatccaccacgtggtgcgcggcctaggacaccgcaccatgatggagctgtcccgtcggcacggccccctcatgttcctccgccttggcgaggtcccgacgctggtggtgtccagcgccgaggcagcggagctggtgatgaagacccacgacctcgccttctgctcccgcccgaccaccagcgtcaccatcgacatcgtcggctgcaagggcaaggggctcggcttcgccccctacggcgaccggtggcgtcagatgaagaagatcaccgtcgtggagcttctcagcgccacgcaggtcaagcgcatcgaa

SEQ ID NO: 97080 - DNA, 523 bp, Zea mays
  unsure (1)..(523): unsure at all n locations
tgtatgcnnnagtctgtatgggacatataagcatccctctaccggtccggaattcccgggtcgacccacgcgtccgcccacgcgtccgcccacgcgtccgggaggagggctttagcgatggtcctgttcatggctggcgccgcgctgctcgccggggctgccggcgccggcgcgcagcagggcgtgtggagcatcatcacccggcccatgttccagagcatgctgagccaccgcggcgacagcgggtgccagggcgccttctacacctacgacgccttcatcgaggccgccagcaagttccccggcttcggcaccaccggcgacgagcagacgcgcaggcgggagctcgccgccttcttcggccagacgtcccacgaaaccaccggtggatgggcgactgctccggatggaccgtttgcctggggatactgccgggtgaaggaacagaaacagacggacccaccctactatggacgaggacccatacagctaactcataagtacaactacaggctcgccgggc

SEQ ID NO: 97081 - DNA, 517 bp, Zea mays
tggctgggagtgtgaatagcactacagtattcatgcaccggtccggaattcccgggtcgacccacgcgtccgcggacgcgtgggctgtccggcgacctaggtctctcggcttgtccgcagcccgccggtcagtaatggcgcatgatgatccggttgtttctgctcagtggctgcacgagcacctaggaatgcctgatgttaaggttttggatgcttcctggtacatgccggtagagaacagggatccatggaaagaatatcaggtggcacacatacccggtgcgctattcttcgacttagatggcatagttgatcggacaactgatttaccacacatgctgccatcagaagaggcttttgcagcagcaatttctgagctggatataaaaaaccaggataaagttattgtctatgatggaaagggattcttcagtgcgcctcgtgtttgggggatgtttagagcgtttgggcacaagacagtctgggtactagacggcggtttgcctcagtggcaagc

SEQ ID NO: 97082 - DNA, 527 bp, Zea mays
atgccaggggaggctgagctagatctctagcataatataggactgctcgtaccggtctcggaattcccgggtcgacccacgcgtccgcagcatcccggcggggctggtgcaggggcagttccggtcgctggtcctgtcggacaaccggctgacgggcccgatcccgcgcgacgacgcgcgcgacgagatcaacaccgtggacctctcccacaacaagctgacgggcgacccctcccacctgttcgccgccggccggcccatcggcaaggtggacctgtcgtggaactacctcgacttcgacctgagccagctggtgttcccgccggagatgacgtacctggacctgtcccacaacctcatccggggcaccgtgccgctgtcgctggagcggctgtccacgctgcagaagctggacctgagctacaaccgcctgtgcgggccgctccccaagggacacggcgtcatcaagcacgggtgcaagccgtacgcgcacaaccagtgccgcaaagggaccccgctcgcgggcc

SEQ ID NO: 97083 - DNA, 469 bp, Zea mays
  unsure (1)..(469): unsure at all n locations
ggtnnnaacgtaagacgtctgtccgtcgagtcaggcgcgcgcgcgcgtcgtgggagaagtgatcactanggcagctgatttagcgagcttctcttgcaagggcgaggtacacttctgaccccagaagtcctcaaggaaatgcagctggagcaggagagaatagaagctgagaaaaagcgggtaaaagaagacgctcaacaacttgctcgagtttttgaaaccattggcgctttcaaactccctcgcaaaggtggaaaaggaaaacagatctttgggagtgtcacggcacaggatgttgttgacataataaagtcacaacttaatagggatgtcgacaagaagctggtgacggttccagaaatccgtgaaatcggagagtatgttgcagagatcaagcttcacccanacgtgataacgcgagttaagcttgatggctatgcaaaatggacctaacagtacagaacctcgg

SEQ ID NO: 97084 - DNA, 521 bp, Zea mays
  unsure (1)..(521): unsure at all n locations
actgtcgtgnncccccccagctccccgacgnactgctcgtacggaatccccgggtcgacccacgcgtacgcggacgcgtncgnccagccgtcgtctgctgcggactccgcctccagtttggtctgtggcttgcaagttgctcttgcggtagttcccccaactgtcaccatgcagaacgaggagggtaagactgtggacctctatgttcccaggaagtgctcggccacaaacaggatcatcactgccaaggaccatgcctctgtccagatcaacattggccacttggatgcgaatggcctgtatgatggtcacttcacaacatttgctctctctgggtttgtccgtgctcagggcgatgcagacagctccttggacaggctgtggcagaagaagaaggctgatatcaagcagtagattttacatctagtttaccaagaattggacactgccttagctatgttttgaattcatgtcactatatgcaattgtggggattcaacttgtaccctaaatctggagaa

SEQ ID NO: 97085 - DNA, 511 bp, Zea mays
  unsure (1)..(511): unsure at all n locations
atcattcggaagnnttgcccctagatatctannccntnnnnnnanaanncgcnngncaagacaaaacggacanccacncnttcnnncataaattcttttttcatacaatcaataatncnatcccgtctcttttataacttgctctggctcccctacacttattacttccttaataactcaacatatgtactctttacctgcttatgcattcatagcacaaaactttactactcaaactgctttatatactcatcaccaatacattgcagggttcatcattacaattcctattgctcatggaactatttttttcattatcgattacaatcccgaacataatgaaaataatctaattgcaacaatgttaaaccataacgaaactatcatatctcatttaagtttggctaacctctttctaatattccataccttttacctttatattcataaccacggtatacttgcttttgtacttcacaaaacaaaactttatttaacctttttttccccn

SEQ ID NO: 97086 - DNA, 516 bp, Zea mays
  unsure (1)..(516): unsure at all n locations
atggtgctgnaaaagaacgtagagcacgctctaccggttcggaattcccgggtgcgacccacgcgtccgggggaagcaaggatatcccgcaaggatgagattatgaaggccattgngaagaagctagaccgctacaagaacccatggttagagttgaaaattcagtacggccaaaataaagggaagttctataacgaggaatgtgaccgctttatgctttgcatggtgcacaaacttggatatggaaactgggatgaactgaaagctgccttccgtatgtctcccttgtttcgatttgattggtttgtgaagtccagaactacccaagagttggctaggcggtgtgatacccttatccgactggttgagaaagaaaatcaagaatatgatgagcaagagaggcaagcaaggaaggagaaaaggcttgctaagaacatgactccaacaaagcgagctgcactaaaagattcagagggtgagaatacttcaccgagttcattcaagagaccaacgggg

SEQ ID NO: 97087 - DNA, 507 bp, Zea mays
  unsure (1)..(507): unsure at all n locations
aatgcctngccccccagctcnagcacgcagtcctgnncggattccgggtcgccgacgcgtccgcgctagcgtgtgcgtggcgaccagatgtggcggaggcgagtgggcgccctccttctggcgagtccacgaacttcttcctgggcctcctcgtcctgccagagccgccgccaccatcttctccccagcgaggaacctcttgctctcaaccgtcttgccaggctcttcacgtcccaggctggaagtgatggtggcgatacccagaagccctttattgcttttgtcttaggtggtcctgggagtggcaaaggaacacagtgcactaagattgcttcggattttggatttgcccatctgagcgctggtgatattctccgacatgaaatagcatctggcagcgagaaaggggagttgatcctagaaatcataaaagaagggaggattgttccgtctgagataactgtggaactcatcagaaagcgatggaaatggaccatgctctaaagg

SEQ ID NO: 97088 - DNA, 515 bp, Zea mays
  unsure (1)..(515): unsure at all n locations
naggggtgancccggaactgcagnacgctcgaccggttcggaattcccgggtcgacccacgcgtccgcggacgcgtggggtcgccgccgctgccctgctagccctggtcctggccgcgtcgaccgcggaggcgaggaacatcaagacgacgacgacgacgacggagaagaaggacgatgcggtggtgcagccgcagaccttcccgcccttcgaccgcctcggcggcggcgcgtccccggcgtccggtggcctccccggcacctcgtcgggcggcagcagcattccagcgttcagcatgccgggcagcggcagcagcctccccggcgggtcgttcttgcccggcagcagcggcagcatcggcagcatgcccctcttcagcggcggctccccggccttcagcggcttcggcggcatgcccgggtcccccgccgccggctccgtctncgtcgtncccgtgcacggcagcaagcccttgaaattcgtccgctcgccgagccccgaaaggtctgccggcc

SEQ ID NO: 97089 - DNA, 518 bp, Zea mays
  unsure (1)..(518): unsure at all n locations
aagcnttgnncccccagctccagcacagcactgctcgtaccggtccggaattcccgggtcgacccacgcgtccgattggtggacctcacggcgatgctggcctcactggccgcaagatcatcattggcacgtacggtggctggggagcccatggtggtggcgctttctccggcaaggacccaaccaaggttgaccgcagcggagcctatgtcgcaaggcaggctgccaagagcatcgtcgccagcggccttgctcgccgcgccatcgtccaggtgtcttacgccatcggcgtgcccgagcctctctccgtgttcgtcgacacgtacggcaccggcgcgatccccgacaaggagatcctcaagattgtcaaggagaacttcgatttcaggcctggcatgatcatcatcaaccttgacctcaagaaaggcggcaacgggcgctacctcaagacggcggcctacggccacttttgaagggacgaccctgacttcaccttggaaggtggtagaggccataaa

SEQ ID NO: 97090 - DNA, 513 bp, Zea mays
  unsure (1)..(513): unsure at all n locations
aatgtgctgcccnccagctcnagcacgctctaccggtccggaattcccgggtgcgacccacgcgtncgcgcacgcgtncgcacgaaagtacacttaatctatgcaaatgtcacgtatgangatatgcttgtganagaagaacttgacggcatggccaaaaactatcccgatcgtttcaagatctactatgtcttgaatcagcctcctgaagtctgggacggtggcgtcgggttcgtgtcgaaggaacgatccagactcattgcccagcgcctgccgccgacattcaggtattgcgatgtggacctcctccatgaacaaagccatggccgcgcacctggacggccttggctacacgaaggagatgcagtttcagttctaagcgttgcattctctctaccagtaccagaataaacggcggtggaacaaagttctaagctccaaacagacgctcttttgtacccaccaaatttgtatcggtgtcgggacattgtaccagccggtattttgtgttgg

SEQ ID NO: 97091 - DNA, 521 bp, Zea mays
  unsure (1)..(521): unsure at all n locations
nagcnttgntttgttggatggtgggtgatggtagngctcgtaccggtccggaattcccgggtcgacccacgcgtccgcgcgatgcanctggcgtcgtcgtccatcctgcccatgacgctgaaaaacgcgatcgggctgggcctgctggaggtgctgcanaaggaggccggcggcggcaaggcggcgctggcgcccgaggaggtggtggcgcggatgcccgcggcgcccggcgaccccgccgccgcggcggccatggtggaccgcatgctccgcctgctcgcctcctacgacgtcgtccggtgccagatggaggaccgggacggccggtacgagcgccgctactccgccgcgcccgtctgcaagtggctcacccccaacgaggacggcgtgtccatggccgccctcgcgctcatgaaccaggacaaggtcctcatggagagctggtactacctcaaggacgcggtgcttgacggcggcatnccggtcaacaaggcgtaccggatgacacgggttagataccc

SEQ ID NO: 97092 - DNA, 519 bp, Zea mays
  unsure (1)..(519): unsure at all n locations
nggatgtgggtgnccccccagctcncagcacgctcgtaccggtccggaattcccggggcgacccacgcgtccgcgcacactggcatccacccgtcaccccacgcattcgatccgaggtggtgccatacagagcgagcgagaacctcgcgacgacgaangccngcggcgaggtcgagactgagcctaccgggccacttgccgtgctcaagggcttcaaggacctgcctcccgggatgccgtccgtgctcctcgtgactgccatcacctggctctcgtggttcccgttcatcctctacgacaccgactggatgggccgggagatctaccacggcgaccccaaggggagcaacgcccagatctcggcgttcaacgaacgtgtccgagtccgcgcgttcgggctgctactcaactcggttattctagggttcagctcgttcctgatcgagcccatgtgccggaaggtcnggcccaaggtggtgtcggtgaccagcaaattcattgcctctgttccctatgtag

SEQ ID NO: 97093 - DNA, 521 bp, Zea mays
  unsure (1)..(521): unsure at all n locations
nncgatctattgntnnnnaagccccnagagagtncntnctgnntnngaaaanccnccgcgacccacgcatccacgcacacttncatctactcctcccccttctctattcaaccaannaaaaaccaacagggcggtttaaaacaaacgtacgccgacaaaccaacaaccaaatcaatactaaacctaccattccactttcctttctcanattcttcaaatacctacctccacctattccttccaatctcctcttaactgccatcacctctctctcttgattcccattcatcctctaccacacctactttattttctctttagatctaccactactaccccaattttaccaacgcccatatctcgtctttcaactaaactattccaatccccactttcatacttctactcaactcccttattctatcattcaactctcttccttattaaacccattttcctcaaattttctaacctattttcctcttttataaaaccaaattcatccccttttatctctaaat

SEQ ID NO: 97094 - DNA, 513 bp, Zea mays
  unsure (1)..(513): unsure at all n locations
nagatggntnnccaggccatcnaggacgcactgctcgtccggtccggaattcccgggtcgacccacgcgtccgcggacgcgtgggcgcctcgcgccggagcacccgctgccggcaggctacgaggactcgttccgcgcgctggagtgggtggcggcctccggcggggacccctggctgtcgcgccatggcgacctgcgccgcgtcttcctggccggcgacagcgccggcggcaacatcgtccacaacgtcgccatgatggccgccgcgtcggggccgcgggtcgagggcgccgtcctcctgcacgccgggttcgggggcaaggagcccgtccacggcgaggcgccggcgtctgtggcgctgatggagaggctctggggcgtcgtgtgccccggggcgacggacggcgtggacgacccgcgggtgaatcccttggccgccgcggcgcccgccaggcccagcctgcgggacatgccgtgcgagagggtgctcttgtgccgggccggactgacctc

SEQ ID NO: 97095 - DNA, 511 bp, Zea mays
  unsure (1)..(511): unsure at all n locations
naagtgtcntgtgcccccacgtcccaccgcatnctgttcggaatnccaagggcgaccgacgcgtccgccgacacgtacgcccacgcgtacgcctacgcgtccgcgccaaggaggtgccgtacagggcgagcganaacctcccgacgacgaacgccnnctgcaaggtcgagactgagcctaccgggccacttgccgtgctcaagggcttcaaggacctgcctcccgggatgccgtccgtgctcctcgtgactgccatcacctggctctcgtggttcccgttcatcctctacgacaccgactggatgggccgggagatctaccacggcgaccccaaggggagcaacgcccagatctcggcgttcaacgaaggtgtccgagtcggcgcgttcgggctgctactcaactcggttattctagggttcagctcgttcctgatcgagcccatgtgcccgaaagttcgcctagggtggtgtgggtgaccaaccactttaatggtgtgttcgccatggcg

SEQ ID NO: 97096 - DNA, 611 bp, Zea mays
  unsure (1)..(611): unsure at all n locations
ggcggtnnnnnnnccagggactangncngcacancnnanggtnngaatcccgggtcgacccacgcgtccgagagtgcgaagagcagtacaaaagattccattctcggttcttggagtggccgcgatcgactccggaaagagagagagaanacaagcaatggcgacagcagggaaggtgatcaagtgcagagccgccgtggcgtgggaagccggcaaaccgctgtccatcgaggaagtggaagtagcgccgccgcaggccatggaggttgcgtaccaaaaatcctgttacaccggcgctcttgccaacacccgaacgtgtatctttctggggaaggcccaaagggtgcaaaaaccccccggtaggtcttcccgaaggaatcctttaggggaccaccccaaacccggggtgatccaatctcttttgaaaaacaccctatggcgaaaacgtgcccttggtatcctcaacattggatagtctaaaattctcaataaaggttttgtattctcgaggtgtttctaaaatgtgctcaggggatcccctggaagggggacactccccttttaaaggatctttatagaggatgtgacaataattttgtcttctccttcct

SEQ ID NO: 97097 - DNA, 516 bp, Zea mays
  unsure (1)..(516): unsure at all n locations
agtgccnnnnttccaaaggttgngngangtcncgcngnannggnncggaattccgggggcgacccacgcgtccgcccacccctccgggcataaattcctttatgatacaatcaataattcnattcagttggattaagccttgctctggcttccttacgggttattacttccttagtagctcaacatatgtactctttacctgcttatgcattcatagcacaagactttactactcaagctgctttatatactcatcaccaatacattgcagggttcatcatgacaggggcttttgctcatggagctatttttttcattagggattacaatccggaacagaatgaagataatgtattggcaagaatgttagaccataaggaagctatcatatctcatttaagttgggctagcctcttcctaggattccataccttgggcctttatgttcataacgacgttatgcttgcttttggtactccagaaaaacaaatcttgattgaaccctttattgcccca

SEQ ID NO: 97098 - DNA, 536 bp, Zea mays
  unsure (1)..(536): unsure at all n locations
gggagaccnntncnctnnnnaactggggaaaagttttcanngcnacagncggtacnngaattcggagggtcccggccgcgcgtccgagttccctgactcgctggcaccagagcagtgcaaagctctcgagacagtacttccaccaagggcttcatccaagctgacagacatggagatagatgaatgcgaggagacgactatgcatgatgtgaacaacatcgaggaagagatgcgcaggaagcaagctcacgctgcccaggaggcgtacgaggaggacgacgagatgccgggcggagcccagagagtgcagtgcgcgcaacagtaagcagactatcatcaaggcaattgggaggggtggtgcccttaaagcgtgggagtgatctctggttttgctgtcgccgagctgggaaataagaagctgaatcgacctcttaagcggggaatgtatccttttttgctgcaacataaaaaatgctacccaggcataactgggtaccttttaaccttttggttggggaattggtataaatggaggt

SEQ ID NO: 97099 - DNA, 524 bp, Zea mays
gtaaaggtgtcatagaatgaagtatgctctaccggtctcggaattcccgggtcgacccacgcgtccggccggcaaagatgagctgctgatggtaatgatgatgataagaggccactgctaccctacgacggaccctcctctttgtgtgctgccatccgtccccgttagacgatcgaggagagaataacgcagagctctctgctcccggcctgtcttctgccgtcccggccgtttaatttactagtgtgttcgtcctatatgtttagcagcagcaggtgtattgtgcgggtatgtaatggtattgcaactatattgggtgtaaaaccataataaatgtgggcaaatatgcaaggaaaaaaaaaaaaaaaaaaaaaaaaaaaacaaaaaaaaaaaaaaaaaaaagaagttacaaaaaaaaaaaaaaaaaaagggagaaagctataaagtaactcggccaccgtcagcgttctatcaacttcaatgaccgtctatagacacacttaaatataattaaaggccggcat

SEQ ID NO: 97100 - DNA, 517 bp, Zea mays
taggtgcctcgaaagctattatgcatgctctaccggttcggaattcccgggtcgacccacgcgtccgcaagcaactgcaaagcagcaagctctactcttcttctgtactgaacgtgtgactggatgacaacaagcgtgaaccatggcggacgagtacggccgcagcggctacggcaggtccggcgccggcgacgactacgacagcggctacaacagcaagtccggcactgatgactacggccgtggcgaaggtggctacaacaagtcgggcggcgatgacgactacagccgcagcggcggcgatgggtacggcaggtccggcggcgacgactacggccgtggcaccggcggcggtggctacaacaagtccggcggcggagacgactacggccgcagcggcggcgacgactacggccgtggcaccggcggcggcgggtacaacaagtccggagacgacggctacgacagcgggtacaacagatcgggcaccaccaacgacgacgaatacgggcgtggc

SEQ ID NO: 97101 - DNA, 520 bp, Zea mays
atgttctttggggggggaggacggaatgctgtaccggttcggaattcccgggtcgacccacgcgtccgcccacgcgtccgcccacgcgtccggcaagtctcgctacgtagcagtgcaataaaagaaagcagccgcaatggcgagcagcaccatggccctctcctccacggccttcgccggcaaggccgtgaacgtgccgtcgtcgtccgccttcggcgaggcccgcgtgacgatgcgcaagacggcggcgaaggccaagccggcggcggcgtccgggagcccgtggtacggccccgaccgcgtgctgtacctgggcccactgtccggcgagccgccgagctacctgacgggcgagttcccgggcgactacggctgggacaccgcggtgctgtcggcggacccggagacgttcgccaagaaccgggagctggaggtgatccactcccgctgggccatgctgggcgcgctcggctgcgtcttcccggagcttctcgcccgcaacggcgtcaagttcggcgag

SEQ ID NO: 97102 - DNA, 534 bp, Zea mays
  unsure (1)..(534): unsure at all n locations
cactgggtatgcctagcccgtacagcaccgctctaccggttcggaattcccgggtcgacccacgcgtccgcccacgcgtccggacccacgcgtccgcggacgcgtgggttttgattttagccgccgccgctggtcatctcacatccctcgagaagacgcctgctcctcgccgatcgatacgatggccgtcttctccgacctccacaccgccgacggcctcaagtccctcgaggctcacctcgccggcaaaacctatgtgtctggtgactccattactaaggatgacattaaggtcttcgccgcggtgccgtcgaagcctggcgctgagtttcctaatgccgcccgctggtacgagaccgtctctgcggctgtagcctcaagattccctggtaaggctgttggtgtaaatctgcctgcgggatcagcttctgcggcagctgctcctgcggatgaggctgangatgatgatgaccttgatctttttggtgatgaaactgatgaagacaagaatgcaactggttaacgtggcggccc

SEQ ID NO: 97103 - DNA, 523 bp, Zea mays
  unsure (1)..(523): unsure at all n locations
taggctgatagtggggaatgaagtacgctctaccggttcggaattcccgggtcgacccacgcgtccgaacagctcgtccgagaccatgaagagcagcccacacctggtgctgatcctgtgcctcgaggccgctctggtcatgggcgtcttcgccgctttggctaaagaaaatgccctggttgagagcaaggccatcgacatcaacccggggcagctcaagtgctgcaccaactgcaacttctccttctcggggctctacacctgcgacgacgtcaaaaaggactgcgaccccgtctgcaagaagtgcgtcgtcgccgtgcacgcctcctactcgggcaacaacaagttcaggtgcaccgacaccttcctcggcatgtgcggccccaagtgctagatcagagaggaagaacgcgcgctgctgctagctgctatagcttcgttcttccgccgncggccggtgcatggttcacgtactgtgtgttgtgctactacgatacgtacttgcttcttgggtggtgggttc

SEQ ID NO: 97104 - DNA, 516 bp, Zea mays
  unsure (1)..(516): unsure at all n locations
tatgtgtgataaagtataagatagcagactcggtccggaattcccgggtcgacccacgcgtccggaggcagtaagcagcatgggcattggcaggagatggcagttggcgtgcaaatggaccgagaggagaggcgaacatgggcaaaaggaacgtggcttccagcgtatttacttgcatgaggagggcgtacaaggcaacaggggttctatattgtcattaccaggcggggatgttcctcctggtggtgagttcatccaggctgcagctcttgtgagccaaccagctctttactctaacgaactgctggagcaacgtgctgcttgtcctgcgatgatgcattcatctgaagcaggtactaaaggtccaaaatgggcccaactatttgagccttgggtgaagcatgcaacttgttgtggcatangaatacagatcctgcaacagtttgctggcatcaacggcgttctctactacacttctcanattcttgagcaagcangcgtncgtgttcttctgtc

SEQ ID NO: 97105 - DNA, 518 bp, Zea mays
  unsure (1)..(518): unsure at all n locations
gtgttgntcatgattagtnatatattgcatagctctaccggttcggaattcccgggtcgacccacgcgtccggaggaactcatcatgaatccactaattggtggtggtttcggtattggtggttgaatgggcctaaggcttggtttcaatgggcccggaattggtcaagggactggtgcaagacaagctggaaaaaggattggcagaccacccgaagcagaaagtaaaataagaagtactttattgcttagactaacttttatagaaactctaacaatttatggactcggtgtggcactagcgcttttatatgcgaacccttttgtgtaatcctaaaaaaaaaaaaaactaaaaaaaaaaaaaaaagggcggccgctctataggatccaagcttacatacgcgtgcatacgacgtcatagatcttctatagtgccacctaaattcaattcactggccgccgttttacacaacttgactgggaaacccctgtgtacccacttaatagcttgtagacaaa

SEQ ID NO: 97106 - DNA, 517 bp, Zea mays
atgttgtccatcgacatgtcgcatgctcgtaccggttcggaattcccgggtcgacccacgcgtccggaggaactgatcacgaattcactaattgttgctgcttccggtattgctacttgggggagcgtagggctagattatattgggcccgtagctgatcaaggtactgctgcaggacaagctgtaaaatgtattcgatagacacccagaagcagaaggtaaaataagaggtactttattgcttactctatcttttatggaagctataacaatttatggactgattgtggcactagcgcttttatttgcaaaccctcttggttaatcctagtgatcaaacaaccacaatatgaaccacttagggcggccgctctaaaggatccaagcttacctactcgtgcatgctactgcatacctatgctattgtgccacctaaatccatttcactggccgatgttataaaactttaagacttgaataaccctgtcgttcctcaacttatgtcgcttgcatacaa

SEQ ID NO: 97107 - DNA, 522 bp, Zea mays
tagtctgatgggggggagagggatgctctaccggttcggaattcccgggtcgacccacgcgtccgggcgagcgaggccttggacgcccacgacaacttcggcatcgagatagctatgcgggaggtcagggacttgttcgaggggatccagtccatgacctactgctgcggtaacttcggtgatgacaagggtgccagggccattgtcaaagccttcccacacataaaatgcactgtgctggcccctcccaagatcattgccaccaaaccggccgatggagcgaagataaactatgtcgaaggtgacatgttcagtttcattccacctgctcaaactgtcgtgctaaagcttgtgctgcaccacctgaccgatgaggagtgcgtcaagctcctggctcaatgccggaaggcgattcctccacggaaggacggcgggaaagttataatcggtgatattatgattgaccactctgggcttatgcttgaaactcaacttctgatggacctcggcatggagaccatc

SEQ ID NO: 97108 - DNA, 520 bp, Zea mays
tatggtgtgtttatgaatgtagtatgctctaccggttcggaattcccgggtcgacccacgcgtccgcgaaagaagtcgcctaattctttcgatcgaattaggcgccttcttcgtcccacgctccggctgtatttgtaatctgaagcttacaggaacatttgagtggatcatggacggattggtaggcctcttgaaagtccgggtggtgaggggcatcaaccttgcctaccgcgacgcaagaggcagcgatccgtatgtcgtcctacgacttggcaagaagaaacttaagacgagcgtgaagaagagatctgtgaaccccatctggcacgaggagctaactctgaccgtcacagatcccagcctagctctgaagctggaggtgttcgacaaggacacgttcagcagggacgacccgatgggggacgcggagatcgacgtggcgccgctggtggaggcggcgaacgcgagcccggaggcgagcctgaggaacggcgccatcatcctgtcggtgcggccgacc

SEQ ID NO: 97109 - DNA, 526 bp, Zea mays
agtcaaggtgtgactaagaacattgtaggcatctactggtccggaattcccgggtcgacccacgcgtccgcacacacacacacagacaagtggttaccaaagccaagtgtgtgtactagcaaccagctagctcgggcggcagcaggcagccatcatgtcggaggagaagcaccaccacttcttcaaccaccacaagaaggacgaggagcagcccgccggcgagtacgggtactccgagaccgaggtggtcaccgccaccggcgagggcgagtacgagaggtacaagaaggaggagaaggagcacaagcacaagcagcacctcggcgaggccggcgccatcgccgccggcgccttcgcactctacgagaagcacgaggcgaagaaggaccccgagcacgcgcacaggcacaagatcacggaggaggtcgctgccgcggcggccggcggcgccggcggctacgtattccacgagcaccacgagaagaagaaggaccacaatgactccgaggaggccagcggcgagaaa

SEQ ID NO: 97110 - DNA, 513 bp, Zea mays
  unsure (1)..(513): unsure at all n locations
atttgtcacgcaagtcaagaagnatcgctctactcgttcgaattcccgggtcgacccacgcgtccgcccacgcgtccgtttacacgtaagacctattgctcatgccatttgggatcctcagttggggcaacccgctgtggaagcctttactcgaggaggtgctgccggtccagtgaatatcgcttattctggggtttatcagtggtggtatacaattggattgcgcaccaatgaagatctttatactggagctctttttctattatttctttctacgctatccttaatagggggttggttacatctacaacccatatggaagccaagcctttcgtggttcaaaaacgcctaatctcgtctgaatcatcatttgtcaggacttttcggagtaagttctctggctcggacaggacatttatttcatgttgctattcccggatccagggtggagttcgtccgatggaatcatttcttagatgtataccggatgctcaggagtttgttcctttaaga

SEQ ID NO: 97111 - DNA, 525 bp, Zea mays
  unsure (1)..(525): unsure at all n locations
tatgttataaatagctttgtggatagnacgctctaccggtctcggaattcccgggtcgacccacgcgtccgcggacgcgtgggcgaacaaaagcgcatcgatctcgctgtcgtcactcctcgtcacccaggcacgaacagaggcaccacccagcatggccctgcaggcggcgctcctctcatccaccctctcatccgtccccaagaagtgcagcctcgccgtcgcggcgaaggacacggcattccttagcgtatcccagaaggtcagtgatcagctgcatctgcatgctgcactcgcagtcacaatgcgcttgaattgaacgtgtcactcactctgtcgtgagcatgccatgcgtgcagaaggtgcaggcggcgtcgctgtcggtgagagtcacttcgccatctaccggcccacggcaaggacgccgacgttcacggcggacggatacgagatgagcgtcggcgtcaaccacctgggccacttcctcctggcgcgcctgctcctggacgacatgcanaagtccgn

SEQ ID NO: 97112 - DNA, 527 bp, Zea mays
  unsure (1)..(527): unsure at all n locations
gtgaaagggtgttggcggggatgagagatgctgtaccggtccggaattcccgggtcgacccacgcgtccgcccacgcgtccggcccgccgcacccggaggacttttgctacatcacagacaacacctagaccaaagaggagctcctcaagatggagagcgatatactcaagcttctcaagttcgagttgggcaatcctaccattaagaccttcctgaggcggttcacaagatctgcccatgaagacaagaagcgctccatcttgttaatggaattcttggggagctacctggctgagttgagtctactggattatggctgtctccgattcttgccatcagtagttgctgcttcagttatgttcgttgctaggctgaccattgatccaaatgccaatccttggaacatgaagctgcagaagacgacaggctacaaagtttctgaactcaaggattgcatcgtagccatacgtgacttgcagctcaacaggaaatttncatcattaacggccattccagacaggtccaa

SEQ ID NO: 97113 - DNA, 519 bp, Zea mays
agttgtcatgactgcatgatgcatgctctaccggttcggaattcccgggtcgacccacgcgtccgcccacgcgtccgcccacgcgtccgcggacgcgtgggaatgatgatgataagagggcacggctaccctactacgtaccctcctctttgtgtgctgccatccgtccccgttagacgatcgaggagagaataacgcagagctctctgctcccggcctgtcttctgccgtcccggccgtttaatttactagtgtgttcgtcctatatgtttagcagcagcaggtgtattgtgcgggtatgtaatggtattgcaactatattgggtgtaaaaccataataaatgtgggcaaatatgcaaggaaaaaaggcttctacttctaaaaaaaaaaaggcataaaaaagcacaacgcccaagactctatgctcaaacaaaaaagggcggccgctctacaggatccaagcttacgtacgcgtgcatgcgacgtcatagctcttctatagtgtcacctaaattcaac

SEQ ID NO: 97114 - DNA, 525 bp, Zea mays
gtaatggctcatatgaatatggatagcaacgctcgtaccggttcggaattcccgggtcgacccacgcgtccgggagcagcagacctgggccttcaccttcggtatcctaggtaacataatctcgctgatggggttcctttcgccgctgccgacgttctaccgcgtgtaccgcaagaagtcgacggaggggttccagtcgaccccgtacgtggtgacgctgttcagctgcatgctgtggatcttctacgcgctgctcaagtccggcgccgagctgctggtgaccatcaacggcgtcgggtgcgtgatcgaggcggcgtacctggccgcgtacctggtgtacgcgcccaaggccgccagggcgctcacggccaagatgctgctggggctcaacgtcggcgtctttggactcgccgcgctcgccaccatggtggtctccagcgccggcctccgcgtgcgcgtgctcggatggatctgcgtcagcgtcgcgctcagcgtattcgccgcgccgctcagcatcatgcggca

SEQ ID NO: 97115 - DNA, 527 bp, Zea mays
aaggctgatagtggggaatgagagtatcgctcgtaccggttcggaattcccgggtcgacccacgcgtccggacgacttgtttcattgattcttgaagagatcgagcttcttttgcaccacaaggtcgaggatgtcttgcaactgcggatcaagctgcggctgcggctcaagctgcaagtgcggcaagaagtaccctgacctggaggagacgagcaccgccgcgcaggccaccgtcgtcctcggcgtggccccggagaagaaggccgcgcccgagttcgtcgaggccgcggcggagtccggcgaggccgcccacggctgcagctgcggtggcaactgcaagtgcgacccctgcaactgctgatcacatcgatcgacgaccatggatatgattattatctatctagcttgtggtggtggttgaacaataataagcgaggccgagctggctgccatacataggtattgggtggtgtgtgtgaaagagaaaggaacaggagtcttcaatttggctactctctttgcgaggg

SEQ ID NO: 97116 - DNA, 533 bp, Zea mays
ttttaattgttgttggtggggaatgggagaatgctgtaccggtccggaattcccgggtcgacccacgcgtccgcccacgcgtccggcaaagcgccgccgtcgccccatccggcatggctccgaagaaggatgaggccccgcccccgtcgtcgaagcccgccaagtccggcggtggcaagcagaagaagaagaagtggagcaagggaaagctaaaggagaaggtgaacaacgcggtgctgttcgaccaggctacctacgacaagctgctctctgaggtgcccaagtacaagcagatcaccccctccatcctatccgagcgcctcaggatcaatggctccctggctcggagggctatcaaggacctgatggcgcgtggcctcatccggttggtctcggttcactcaagccagcagatctacaccagggcaacaaatacctaaggatgggattcccttgtttgccctctctgtaggagctcgtcttctttagaacaggtgccatctctgtcaagagtttgctaatgctatggtaga

SEQ ID NO: 97117 - DNA, 519 bp, Zea mays
  unsure (1)..(519): unsure at all n locations
atgtgtgnccggactccngnaggcttctcggactcgaattcccggtcgaccgacgcgtccgaaggctcgtcctcctacgcttccggcgtgtcgtaccaggacggagactatctttctgaggagggtttataaccatccactgattacatccaaagctcaagatgctaggagggctatgatctatgttcatgccacattgatgatagtgcactatgcttacatcatcattatgtccaccaacattaaccacaggtccatggacggagcctgtgactctcagatcaccatgtgctcgtaccagccgtaccacctgtcaactaggcaacctgcccgaggcctgatccaaggcttccagatgtcatattggttcgaacaccagcagatgctgcactacttattccaccgccctgagagcgtacagtgcgttcagaatgtgaacaagatcgccgataagttctgggacctggactctagtgatgacctttatcaggaccttctgtgccatctactaaattacct

SEQ ID NO: 97118 - DNA, 522 bp, Zea mays
gtaatatgttgctatgatgtggagatagtatgctctaccggtccggaattcccgggtcgacccacgcgtccgcccacgcgtccgggcgctggagctgctggggctgagggacaacggcgcggaggacgcggggccgccgtcatcctcctcctcatcttcgtcgtcgtcctcccctgaccatcaggagatcgacgtgagtctcatcatcactgactactgcatgcccggcatgacaggatacgatctgctcaagcgagtgacggggtcctcatcgctcaaggacattccggtggtgatcatgtcgtctgagaacgtgcctgcccggatcagcaggtgcttgcacgatggcgcggaggagttcttgctgcagcccgtgaagccggccgacatgaagaagctcacgtcacacctgctgaagcggaagcagcccaagcagaagaacaagcctcaggcgcatgcggtggagtctcctgagcagcagctggacccgcatccgcagccggtgcacgagccggaggaagc

SEQ ID NO: 97119 - DNA, 522 bp, Zea mays
gaaatttctatgtggtgatggatggcatgctctaccggtccggaattcccgggtcgacccacgcgtccgaacatcttctcgaagaggggcatgaaggggaagtccgtcagtggcatgaattacgacgcttgcctgtcaattatgtccctggtcatactgactccatttgctatagctatggaaggccctcaaatgtgggctgctggttggcaaaaggctcttgcagaagttggacccaatgttgtctggtggattgctgcacagagcgtgttctaccacttatataaccaggtgtcctacatgtctctcgatcagatttctccattgacattcagcattggcaatacaatgaagcgtatatcagtgattgtttcatcaatcattatcttccacactcctgtccgcgctgtcaatgcactgggagctgccattgccatccttggcacattcctgtactctcaggcaaaggtgtgaggcgggccatgatgacgaacgtctgcagaatcagtagcaagcactaaa

SEQ ID NO: 97120 - DNA, 527 bp, Zea mays
tatttgatggggaggatgaggagatcctcgtccggttcggaattcccgggtcgacccacgcgtccggtcgtcgctgcggacacccgcctctctgtaggatacagtatcctcacgcgtgatcacgccaagatctgcgacctggctgacaaatgtgtactggcatcttctggctttcaaggtgatattaaggctctgcagaagaacctagctgccagagaattgctgtaccaacaccagcataataaaaggatgagctgccccgccatggcacagctcctctccaataccctgtactacaagcgattcttcccatattacgccttcaatgtgctcggtgggcttgacagcgaggggaaaggatgcgttttcacctatgatgcagtaggttcctatgagagaaccggttacagtgctcagggaacgggatctactttgatcatgccagtcctggacaatcaactaaaatcaccaagtcctctattactcccttgtcaggatgctggcacaccattggccgaatcagaagc

SEQ ID NO: 97121 - DNA, 528 bp, Zea mays
  unsure (1)..(528): unsure at all n locations
tatggntgtatatgcaatgatagtatagcatcactcggctcggaattcccgggtcgacccacgcgtccgaaccctctccctcctgtactcaggacgacacatacaggggcgatgacgctgggtaactggggggccggatcgaacgtcggcgtttcttgaaacttcaggctattagaagagcttgagcgtggagagaagggcattggtgatgggacagggaactatggaatggatgatgctgatgacatctacatgccggcatggactggtaccatcattgggccctgacaatactgtacatgagggtcgcatctaacagctgaaagttgtttcgtgacaaagactattccgagaaaccacccatctgtcagattccactcaaggaatcaacatgacatgcgttaatcacgagacatgaatggttgatccaacgaagtttggttcgctaacgaactggcaatgggactacacgatggagaacaatctaacccagctcaagaagagatggcttgctcgcagaatcgaaag

SEQ ID NO: 97122 - DNA, 517 bp, Zea mays
atgtggatatgaatgaagtatgctgtaccggtccggaattcccgggtcgacccacgcgtccgcggacgcgtgggcggacgcgtgggcagaagctacctaaacttccagccgtctcctccgcgcgcgaaaaccctagcagctccgtagtccctctcctctggaggtattcgcagtcgaccgtgtcctcggagcacgatgaaggttgttgctgcctacctgcttgctgtcctcgctgggaatgccagcccctccgctgaggatttgactggcattctggagtcagttggctgtgaagttgacaatgaaaggatggaactgctgctgtcccaactgagcggtaaggacatcaccgagctcattgccgcgggcagagagaagtttgcttcagtcccatgtggcggcggcggtgtggctgttgcggcaggtgcacctgctgctggcggagctgctcctgcagctgaggcaaaaaaaaaaaaatagggcggccgctctagaggatccaagcttacgtacgcgt

SEQ ID NO: 97123 - DNA, 517 bp, Zea mays
agttgtcatacgaatatagaagctgcgctctactcggaattcccgggtcgacccacgcgtccgcccacgcgtgcgcccacgcgtccgctgaggcgaaccaagctggagaatatcaacctgaggagcgcccacaatctgagactgattacatccgtgctcaagaggctatgagggtcatgatctatgttcatgcccgaatgatgatagtggacgatgaatacatgatgattgggttcggcaagatcaaccataggttcatggacggagccacagactctgagatcgccatgggcgcgtaccacccgtaccagctggcgactatgcagcctgaccgaggccagatgcatagattccggatgtctgtgtggtccgacacactgggatgctgtacgactgtttccaacgccccgagagcgtagagtgcgtgcacaatgtgaacacatagctgataaagtctgtgacctgtactctagtgatgacctcggacaggatctagagggccacctacttagctaac

SEQ ID NO: 97124 - DNA, 532 bp, Zea mays
  unsure (1)..(532): unsure at all n locations
agtgctgtagttgggagatggaagtatcgctctaccggttcggaattcccgggtcgacccacgcgtccgcggacgcgtgggcggacgcgtgggaaaaaaatcccccattttcttcgaggcgaggagagcgtgaaagacagggcaccggcagcgacgatgtcggggcgcggcaagggcggcaaaggtctgggcaagggcggagcaaagcgccaccgtaaggtgctccgtgacaacatccagggcatcaccaagcccgcgatccgtaggctggctcggaggggcggcgtgaagcgcatttcggggcttatctacgaggagacccgcggcgtcctcaagatcttcctcgagaacgtcatccgcgacgccgtcacctacaccgagcacgcacgccgcaagactgttaccgccatggacgtcgtctacgcgctcaagcgccagggccgaaccctctacggcttcggaggctaggctggatgcctcttctncttgcttggcgggatgcctggtttgtggtaggggtaattcggtaggn

SEQ ID NO: 97125 - DNA, 522 bp, Zea mays
atggtgtattagtaggaagtaagcacgctctaccggttcggaattcccgggtcgacccacgcgtccggagagacatggcgccccaccaccagcagcgggcgctgctcctgttcccactcgggttggtcctcctcctccttgccccgcccctcgccggcgcgtggggaaaggagggccacatcatggtctgcaagatcgccgagaagtacctgtcggagaaggcggcggcggcggtgaaggcgttgctgccggagtcggcgggcggggagctgtcggcggtgtgcccgtgggcggaccaggtgcgctggcactaccactgggccagcccgctccactacgccaacaccccccaagtctgcaacttcaagttttctcgggactgccacaattctcgtggccagcaagggatgtgcgtcgtcggggctatcaacaactacacggaccagctctacagctacggccagaagacttcgtataacctgacggagagcctgatgttcctggcacacttcgtcggcgacg

SEQ ID NO: 97126 - DNA, 525 bp, Zea mays
  unsure (1)..(525): unsure at all n locations
nggaaatgtgtattggcgtggagatagcatcgctctaccggttcggaattcccgggtcgacccacgcgtccgcccacgcgtccggcttacttcgcagcaaatgctgctgctcaggcctcgaggaaatgctgaccccgtgtgaccaatgaagaagtccagaaggctgctgctgctctcaagggctctgaccaccgccgtgggaccaacgttagtgctagattggatgcccagcagaagaagcttaacctccccatccttcccaccactacaatcggttcgttcccacaaaccgttgagctcaggagggtccgccgtgagtacaaggcaaaaaagatctctgaggaggaatacgtcactgccatcaaggaggaaatcaacaaggtcgttaagcttcaagaagagcttgacattgatgtgcttgtgcatggcgagcctgagagaaacgatatggttgagtacttcggtgagcagctctccggttntgcgttcactgccaatggctgggtgcagtcttatgggtcaagg

SEQ ID NO: 97127 - DNA, 525 bp, Zea mays
ttggctggtaagtgggggatgtattgcacgctctaccggttcggaattcccgggtcgacccacgcgtccgcaacgtccaaaatccagaccgctggtaggagtatctcgtagacattgaacaacggctgcatggcgagcgcctgcgccacctccatccccctcgtctcggcgccctctgcatgcccgtccaagaagaccaccgtcgccaggttccggcgccgcacggcgacgtgcagggccagcagcggcggtggcggtggccggtgcggcgaaaatgatggcctcctttggctgccccggcgggacgtgatgctcaacggcctgtccagtgtcgccgccgggctcgcctggtacccgggcgtcgcgtccggcgcggatgcggtgtgcaccagggccgacaaggtgaacgagaagaccgtgcagtgcacggacccggccgggcagcttccgtgccctctggtgtcgccgactgaccccgtggacttcaaggactccatgggcaaccagctgtacgaccccaacagg

SEQ ID NO: 97128 - DNA, 524 bp, Zea mays
tatgtctgctgaggagaagagggtatgctcgtaccggttcggaattcccgggtcgacccacgcgtccgcagtaaatttgatagttgaagacaagttccatcgtgctactcctggtggtactgggggtgtgaagaccataggaaattatgcttcggtgttgatggcacagaaaattgcaaaggaaaagggttattctgatgtcctctacttggacgctgttcacaagaagtaccttgaagaagtttcttcatgcaatgtttttgttgtcaaggacaatgttatttctaccccagcaataaaaggaacaatattacctggtatcacaaggaaaagtataattgacgttgctttgagtaaaggcttccaggttgaggagcggcttgtttcagtggatgaactgcttgatgctgatgaggtattctgcacaggaactgctgttgtggtgtctcctgttgggagcattacatatcaagggaaaagagtggaattacggcaacaaaggtgttgcctttggttcccaaaaa

SEQ ID NO: 97129 - DNA, 523 bp, Zea mays
tatgggtgatggggggaatgggagaatcgctctaccggttcggaattcccgggtcgacccacgcgtccgctcgcgtcaccggagctctccagaaccgaaccccaactgcccaagggcgagcgatccgaacccctcggcggcttcgtcaacgacgccgagaacactttgaggaatggctgaagaggatgtccagccccttgtgtgtgacaatggcactggaatggtcaaggcgggtttcgctggtgacgacgcaccgagagctgtctttcctagcattgtaggcaggccacgccacactggtgtgatggtgggcatgggccaaaaggatgcatatgtgggcgatgaagctcagtccaaaagaggtattctgacactgaagtacccaattgagcacggcattgtcggcaactgggatgacatggagaagatctggcaccacaccttctacaatgagcttcgtgtggcacctgaggagcaccctatacttgtgaacgaagcttcttttgaccccaagggaaccagg

SEQ ID NO: 97130 - DNA, 531 bp, Zea mays
  unsure (1)..(531): unsure at all n locations
ngggaatatggtgaaattatgaatgatagtatgcatctaccggtccggaattcccgggtcgacccacgcgtccgcccacgcgtccgcccacgcgtccgcggacgcgtgggcgcagaaccagaaaacccacggcgtgctgcttgattagaaaaaggagatccacggcctgtgagtaactacgccatgttacgaatcacagcctgacttcctctagatgaaagcataggtagtgacgacctattgttttcttctcagcggacccaatgagtaactacgccatgttacgaataaaagcgagggaaaatcggatgagcaacttttgcagctatatgaaatgcactttggaaaatcaggtcttgaggacgaaaaacacgataaaatggacttgcctacttttgcaccgaagaaactcataagtaatccaatttccgaggacacgaacggaagtaagctgtttttggtattcgtatcggaattagccagaagaagaaaccattttcactgcccttcattctttggcctgcctgcctc

SEQ ID NO: 97131 - DNA, 526 bp, Zea mays
  unsure (1)..(526): unsure at all n locations
taggcgtgtcccatcgaacatagntcgcatcaccgtactcggaattcccgggtcgaccgacgcgtccgcccgcgcgtccgcccacgcgtccgcggacgcgtgtgcgcataaccagaaaacccactgggctgggcttgattagaaaaaggagagccacggcctgtgagtaactacgccatgttacgaatcacagcctgacttcctctagatgaaagcataggtagtgacgacctattgttttcttctcagcggacccaatgagtaactacgccatgttacgaataaaagcgagggaaaatcggatgagcaacttttgcagctatatgaaatgcactttggaaaatcacgtcttgaggacgaaaaacacgataaaatggacttgcctacttttgcaccgaataaactcataagtaatccaatttccgaggacacgaacggaagtaagctgattttggtattcgtatcggaattagccagaagaagaaaccattttcactgcccttcattctttggcctgactgcctta

SEQ ID NO: 97132 - DNA, 521 bp, Zea mays
  unsure (1)..(521): unsure at all n locations
agggnttaaacgtacgacagtaagnacgactgtaccgttcggaattcccgacccacgcgtccgaaggcacgtacgtcgacacctactcagatgcatatgcccacaccaagacgtaccactaggtcgggcttaattagaagtcggacagccacacccagcaagtctctaaatcatactacgaatcacatcctgacttcctctacatgaaagcatacgtagtgaccacctattgttttcttctcagcggacccaatgagtaactacaccatgttacgaataaaagcgagggaaaatcggatgagcaacttttgcagctatatgaaatgcactttgaaaaatcacgtcttgaggacgaaaaacacgataaaatggacttgcctacttttgcaccgaataaactcataagtaatccaatttccgaggacacgaacggaagtaagctgattttggtattcgtatcggaattagccagaagaagaaaccatgttcactgcccttcattctctggcctgactgcctta

SEQ ID NO: 97133 - DNA, 518 bp, Zea mays
  unsure (1)..(518): unsure at all n locations
tggggnnaaatgacgtagagtacgcatacttctcggtcgattcccgggtcgacccacgcgtccgagaaatagtaaatttgaattgagacacatattctatgacagattttaacttaccctctggtttcgtacctttagtaggcttagtatttccggcaattgcaatgacttccttatttctttatgtgcagaaaaataagattgtctagaaacgacggggccaaattttctcaatgtatttccaggatcataatacagatatttttttgcgtaagtactataatatgatagggtatgtagctctttctacacacaaatgaaaaacgtctatggatgcagatataagctacgagcataaatgcatgcatatgcgtagccgactatagcgagtttttctttttttaagtggatccactaattttttttgaatagaaagtcaatgtatctaaccaattatttcacaggagtactagctactgaacgctattgcagaatctaatactgcacagttcaaatat

SEQ ID NO: 97134 - DNA, 496 bp, Zea mays
  unsure (1)..(496): unsure at all n locations
agcnntgctcataagaagatcgtatgctcaccggtccggaattcccggtcgacccacgcgtccgcttggttgctccatttttttgttaccagaagatatattggaggtgaaccagaagatgaggctgactctgacagcaagcattatgtactggtatttgaaaaggccaacatcacaatcattggactctgaaaacgggagttcatgtgaaacaacctccatcacaacttcagatgattctgcatctgaatcatcgattgatgacaatacaactagataaaagagcagggtcatgaaaataattgatatgacctgtcattttgaaaacttgggattgattgtttgctgtaattttaagggcaaatacattcaagaccgaggcaagggaaatggttaagggctttgggtgtttttttgaggtttaatagtgtgattgggtgaaagatgtttgacatcctgtaaatatatctataactagtgacaataagttgtccaa

SEQ ID NO: 97135 - DNA, 507 bp, Zea mays
  unsure (1)..(507): unsure at all n locations
atcctctcatgtttcccaattcgantgcantncatatcgnttcgaattccctaatggaccgacgcgttccatcattctgtactaccctcttagtttaatcatttaaataatcgcatgataataaacttgcnaggattcccctattggcggggagccaacccctatcagcccagcttgataatcttgcgtcctcaccgccccaattgtattctctagatgcgtcctcagctacttactcagcccaagttctctgtaaagagactcctgttaaatttagatccccgtccgtcccttaccctgtctcaccacgatgcgccgtcaacgagtcatgttgtttgcgaatgcattccaaatcattctttaaactccgtccaatgcttaatacatgctataaacctatatctaacaaatactccctagtgaaacattaaaaggacttttaaaatagaatcaaatattgccttaaaattcccccaatggatacttattttttcttgcaactctctc

SEQ ID NO: 97136 - DNA, 502 bp, Zea mays
  unsure (1)..(502): unsure at all n locations
tgggtnttatgatgcaggggatcattgtactgctcgtaccggtccggaattcccgggtcgacccacgcgtccgcttttgctcgctctcggcgacagctgggcgaccatcgtcgccgccgcccttctgtaggtgcccaggtcttcgtcggtccctttgccgcctcttcgccgccgatgagcaccagccaggaagaaaagaagttgaaccatggggaagagaaagtcagctgctaagccacctcctaaggaagcggatggacaagcttgacactgtcttttcctgtccattctgcaaccacgggagtagtgttgagtgccgaattgacatgaagaatctgattggcgaagcatcttgtagaatctgtcaggaaaacttcagcacaactgttaatgcactcactgagcctattgatattgaatggattgacgagtgtgagtgtgtcaacactgttgaaggcgacgatgatgcgtgagcttgccccatgcgatgaaactgttacct

SEQ ID NO: 97137 - DNA, 523 bp, Zea mays
  unsure (1)..(523): unsure at all n locations
cgtgctcgtcgnagtagacggnnnnttccaggggntcnncagctacgtcagttacactatcggatctgccgtacggaccgccgcgtccccgcattcagcgcaccgcatgtgtgacggatgggtgacgctgaggaagatcgggctcgcgttcgggaagctcttcaggcgggtcggcgccacgaaggagatgcggatcctcatggtcggcctcgacgccgccggtaaaaccaccatcctctacaagctcaagctcggcgagatcgtcaccaccatccccaccatcggtttcaatgttgaaactgttgactacaagaacattagcttcactgtctgggatgtctggggtcatgacaagatcagacctctttggaggcattacttccagaacacccagggtcttatttttgttgtggacagcaatgaccgtgaccgtgttgttgaaaccagagatgagctccacaggatgctgaacgaagatgagctacgtgatgctgtgctgcttcgttttgccaacaagcaagag

SEQ ID NO: 97138 - DNA, 514 bp, Zea mays
  unsure (1)..(514): unsure at all n locations
tagcggtggtgaccccagttcacatcgctcgncatgacgtaccggtccggaattcccgggtcgacccacgcgtccgcccacgcgtccgcccacgcgtacgtttgtagcctccatgctgatgtttgcgacgggcgctgggattctcatggcactcttcttgaacactgctggcggcgcctgggataatgcaaagaagtacattgagactggcgctcttggtggcaagggcagcgagtcccacaaggctgcggttactggcgacacggttggagacccattcaaagacactgctggaccgtcgctgcatgttcttatcaagatgctcgccacaatcacgctggtcatggctccgatattcttgtgattaaccagaccactcatcaagcttgctattaaccctgcggagatgtacctatgcgaccaggtagatgaggtgtgtgtgtgtgtgcgttacctgcatgtgatgatgtaacggtccaatcggtttgtgtcacgacatgctgtacccagagaa

SEQ ID NO: 97139 - DNA, 506 bp, Zea mays
  unsure (1)..(506): unsure at all n locations
atagtccnnctccaatgtgggtggaagtatatgctctaccggtccggaattcccgggtcgacccacgcgtccgcgcattcagcgcagcgcaggtgtgaaggaagggggacgcggaggaagatggggctcgcgttcgggaagctcttcagccggctcttcgccaagaaggagatgcggatcctcatggtcggcctcgacgccgccggtaaaaccaccatcctctacaagctcaagctcggcgagatcgtcaccaccatccccaccatcggtttcaatgttgaaactgttgagtacaagaacattagcttcactgtctgggatgtcgggggtcaggacaagatcagacctctttggaggcattacttccagaacacccagggtcttatttttgttgtggacagcaatgaccgtgaccgtgttgttgaagccagagatgagctccacaggatgctgaacgaggatgagctacgtgatgctgtgctgcttggttttgccaacaagcaaga

SEQ ID NO: 97140 - DNA, 506 bp, Zea mays
  unsure (1)..(506): unsure at all n locations
nagggccaatgagacttactgatcggtcgnctgacgtaccggtccggaattcccgggtcgacccacgcgtccggttggcttctcctccccctgcggttcgggttcgggttcgtgaggttctccggagggcgggttaccgggtgagcggatcgagatggctgcgtccgatgttgagtaccgctgcttcgtcggcggcctcgcctgggccacggacgaccactccctccacaacgccttcagcacctacggcgaggtcctcgagtccaagatcatcctcgatcgggagacgcagaggtcccgcggcttcggcttcgtcaccttctccacagaggacgcgatgcagaacgccatcgagggcatgaacggcaaggagctggacggccgcaacatcaccgtctactaggcccaatcccgcggcggccgttgaggctgcggcggatgccggtacggtactggccgtggatgcggcagctactgctgcggctggcgcctagatgctgcggcgg

SEQ ID NO: 97141 - DNA, 500 bp, Zea mays
  unsure (1)..(500): unsure at all n locations
taaggcnntgntttgggggaggttatgtgatgctctaccggtccggaattcccgggtcgacccacgcgtccgggagaagggccacttgggagtgtgtattggggacaagtttgggatggttctcagatcgctgtcaagaggttgaagagtgcaaagaatggcacagaagcagaatttgcttcagaagtcgagatattgggaagaataagacacaaaaacctcctgagttttcgtggatattgtgcggatggacccgaacggattctggtgtatgactttatggcaaactcaagtctctatgcacatcttcatggaccacattctgctgagtgtctccttgactggcggaggagaatatctattgccatcaacactgctcgggctctcttgtaccttcaccactatgcaacacctaagataatccatggaagcatcaagaccaccaatgtgttactggattcagacttccaggcacatgttggcgatttcggtctgataag

SEQ ID NO: 97142 - DNA, 507 bp, Zea mays
  unsure (1)..(507): unsure at all n locations
aggttcnttacaactcaggagcataagcacgacgtaccggtctcggaattcccgggtcgacccacgcgtccgcccacgcgtccgcatgtttgggcttattacatgaaacgacaacaatattagaaagcttagcaagcacgttagggccaggatgaccaagacgttggtgccatagggacgcaggagcagcaacagcagcaagagcgtagtgtgtagtggctggaggagcacgcgcagtaggaagactgatggtgtacagtgacccagagttgttgcacctaaggattgtgttcctggaattgagatccttcacagaaaggccaaacaggtcaaattccatggaacaattattatcagtcgtaaactgacgaacagaaagaagattcttaatgatatcaggtgtaacaagaacattgctaagataaaactggccagaaagcaccatatctnctactgaggtgaccggcagaccggacccgttaccaacaacgattgatgagggtaata

SEQ ID NO: 97143 - DNA, 496 bp, Zea mays
  unsure (1)..(496): unsure at all n locations
atgtggtgtgcatccgataagntcgcctctacnggttcggaattcccgggtcgacccacgcgtccgcccacgcgtccgcccacgcgtccgccctccagaacttcaggtggttttgatctctgcagctcgtcctcatgagatcttggagatgactagtaagttcatgaccgaaccggttaggatccttgtgaagcgtgatgagctgaccctggagggcatcaaacaattctttgttgctgttgagaaagaggagtggaagtttgatacactttgtgatctttatgatacactcaccatcacccaagctgttattttctgcaatactaagagaaaggtggattggctcactgaaaaaatgcgtacaaataacttcaccgtatcagctatgcacggtgacatgccccaacaagaaagggatgccattatgggtgagttcaggtctggcgcaactcgtgtgctaataactacagatgtttgggctcgaggactggacgtt

SEQ ID NO: 97144 - DNA, 500 bp, Zea mays
aggtcttgtggatgtgggaggatgtatgctctaccggtccggaattcccgggtcgacccacgcgtccggtcaccgtcatcatcatgaacaagtggatcttccagaaactggatttcaagttccctcgcaccgtgtcctgcgtccacttcatctgctcttccattggagcttacattgcaatccatgtcctcaaggcgaaacccctgattcaagttgaaccggaggaccgctggaaaaggatatttccaatgtccttcgtcttctgcataaacattgtgctgggaaatgtcagcttgcgctacatcccagtctccttcatgcagacaatcaaatctttcactcctgcaaccacagttattctgcagtggctagtctggagcaagcatttcgagtggcgcatatgggcttcgctggtccctatagttggcggaatactcctgacttcggtgacagagcttagcttcaacattttcggtttctgtgctgccatggttggctgc

SEQ ID NO: 97145 - DNA, 501 bp, Zea mays
  unsure (1)..(501): unsure at all n locations
tatgggctgggctcacgaatgttgtatggctctaccggtccggaattcccgggtcgacccacgcgtccgacgaaacggtcgacatggctcgcacgcaatctgccgtagcggtcgccgtggtggccggggtgctgctgctggcagcggcggcgacgacctcggaggccgccatcacctgcgggcaggtgagctccgccatcgcgccctgcctctcctacgcccgcggcacggggtccggcccctccgcgtcctgctgtagcggcgtcaggaacctcaagagcgccgccagcaccgccgccgacaggcgcgccgcctgcaactgcctcaagaacgccgccaggggcgtcagcggcctcaacgccggcaacgccgncagcatcccctccaagtgcggcgtcagcatcccctacaccatcagcaccttcaccgactgctccagggtgaactaaaacctagaccacgcgcgacgacngnccgctgatcgaacgaccaaccatttcc

SEQ ID NO: 97146 - DNA, 504 bp, Zea mays
  unsure (1)..(504): unsure at all n locations
taaggctntgctcatgatagcaagtacggcactgccgtaccggtccggaattcccgggtcgacccacgcgtccgccctctccgccttgactcactcacttgaccactcttcttcctcctcatcaatccggtcgccagcacttgttcggaagaaaaagaaggtagaacacgctaacaagacaacaaggatcatggggcgcgggcgcggccacctcctgctgccggcagcagccgcctgcctgtgggcgctgtcgtgcgcgctgctgctgcacgcgtcccctcacggcgccggcgccggcggcctgctgagggtcgggctcagcaggcgccgcggcgggctcgaccagcgcgcgctggcggcggccaaggccgcgaggcagcaggaggcaagccgtctcggagcctccggcggcggcgacgtccctctcgtcgactacctcaacacccagtactatggggtcgtcggcatcggcacaccgncgcagaacttcaccgtcatcttcga

SEQ ID NO: 97147 - DNA, 504 bp, Zea mays
  unsure (1)..(504): unsure at all n locations
ggaggcctntnctatgtgggggattatgcacgctcgtaccggtccggaattcccgggtcgacccacgcgtccgctggcgttcgacaagatggggagctacggcaacaacggcggcggtaataccaacgacgacagcaacggcgtggaggtgaagagctacttcaacaagtccgccgggagggcggcgagcaacaacaacaacaacagcagccacgccggcggcggcaacaagaagggcggcgccggggagtacggcaggaagaagcacgccaagagcgagggcgcggcggcggcggcggccacggacaagcagcggttcaagacgctgccggcgtcggaggcgctgccgcggggccaggccatcggcgggtacatcttcgtctgcaacaacgacaccatggacgagaacctcaggagggagctgttcgggctgccgtccaggtacagggactctgtgcgtgctatnccgccgggacttgccctcttcctctacaactactncac

SEQ ID NO: 97148 - DNA, 502 bp, Zea mays
ggctgtgagtatggggggaggatgatggaatgctctaccggtccggaattcccgggtcgacccacgcgtccgcacgcccccgctcctctcgtctctatcttcgcctcttccatcgcaggattcagcggccatgggcggcggcaacgcccagaagtccaagatggcgcgcgagaggaacgccgagaagaacaagggcggcaaaggcagccagctggaggccaacaagaaggccatgaacatccagtgcaagatctgcatgcagaccttcatctgcaccacctccgaggccaagtgcaaagaacatgcggaggcgaggcatcccaagaacgacctctaccagtgcttcccccacctcaagaactagtaagcagcagaagcatatgctctgctcagctaaaaagacaagtactacatatatatatatatccgctgtgtgtcaataaatgggttctaggctgctgctgatgcggctgcttcgttcgtgttgccccgtctgattatt

SEQ ID NO: 97149 - DNA, 495 bp, Zea mays
  unsure (1)..(495): unsure at all n locations
cgttgctgtgccccagctcnnccacgaacgtactgttcgnattcccggtcgacccacgcgtccggcttgcttgattgctccaggtacctccattcgcagtcggccgtgtcctcggagccgcggtagatggcggatcaggagaccgtagctgtggttgaggcacctaccccggttcttggggaaccgatggacctgatgactgccctgcagctcgtcatgaagaagtcaggtgctcatgatggccttgtgaagggtcttcgtgaggctgccaaagccatcgagaagcatgccgctcagctctgcgtgcttgccgaggactgctactagcctgattatgtcaagctggtgtaggctctttgcgctgaacacaatgtccatttgtttactgtgtctagttccaatactttcgtagatgtgtttgtgctttttatgatcgatttttttgtcttttctaggattgttttttgcttatcttatttttgtattattttcttt

SEQ ID NO: 97150 - DNA, 496 bp, Zea mays
  unsure (1)..(496): unsure at all n locations
ctgtagtggcatccgaatgacgtacggctctaccggtccggaattcccgggtcgacccacgcgtccggcagaccacaacaagaagaagcgtagtcgtcgccggaaggaaaggcgcggagcaagatgtcggggcaggcgtacgtcgaggagcacctgatgtgcgagatcgaaggacagcatctcagcgccgccgccatcgtcggtcacgacggcagcgtttgggcgcagtccgagagcttccccgagttaaagcctgaggaggttgctggtatcataaaggactttgatgaacctggtactcttgcaccaactggtcttttcgttggaggtacaaagtacatggtgatccaaggtgaacctggagttgtcatccgaggaaagaaaggcactgggggcattactatcaagaaaaccggcatgtccttgattatnggtgtctacgacgagccaatgactccagggcaatgcaacatggtgtggaaaagctcggcgattc

SEQ ID NO: 97151 - DNA, 500 bp, Zea mays
  unsure (1)..(500): unsure at all n locations
gctgtgctgtgnnccagctcncgcacgacgtactgttcggaattcccgggtggacccacgcgtccgcgggcgcgtggcgaaatttccatttataagaccttctcgattgtgcccaatatttgatgtcgggtaattcctacggcctggggggaaaaaagggcattaacttattatagagattgagcgatttgactatttttttttttaaccgtacctatatctcattcttacaaaacttacacagggttcagcctagagagaacagctgttatcataggagactctgactagcctaaggctatgggaactactggtcttttctgtggaggatcctagttcgttgtgatccaaggtgtacctgtagttgatatactaagaaagataggcgctgcgggcattactatcgataagaccgccatgtacttgatatttggtgtctaccactagccattgtattcaaggcaaatgcttcatggtggatgtataggctcagccaattt

SEQ ID NO: 97152 - DNA, 502 bp, Zea mays
  unsure (1)..(502): unsure at all n locations
gtatgcnntgctctcgttggggattattggcacgctcgtaccggtccggaattcccgggtcgacccacgcgtccgcggacgcgtgggcggacgcgtgggcggacgcgtgggtggaaaataaactgagtgaatggcgagttttcgtattcctgcagtacaggtacagccacaacggctcgggaattccatggctctattggattggatggaaaaattccttttcatctaagtggaaggatcctgtatttttttactaggaattctgctccctcgaaaagtttttctttggggaaaaccaaaataaaaagagaatggaagaattcttcttattccataagaaaataaaggaaccctagaattccatttgcataaggtacattacgccatacaatctaaatataaaaggggtatggggcaattaatgactttgaaaacgcgaaatagctgatgagggaagttgctgttgagaaataggaaagtggaatgaaatccagtcttagtc

SEQ ID NO: 97153 - DNA, 503 bp, Zea mays
  unsure (1)..(503): unsure at all n locations
gtggtnttnntatagtggggcgattattgtatcgctctaccggtccggaattcccgggtcgacccacgcgtccgcctttctggagcagctagggttccgtcctcgatccgatccgccgagtgcacaccggctgtccccactccgatcgaatcgatggccgccgagggcgagaagaagatgataaccctcaaaagctccgatggcgaggagttcgaggtggaagaggcggtggcgatggagtcgcagaccatccgccacatgatcgaggatgactgcgccgacaacggcatccctcttcctaacgttaactccaagatcctatccaaggtaatcgagtactgcaacaagcacgtacatgccgccgccgccgccgacgccgcctcgaaggccggttccgacgacgtgggtgccgnctacgccaacagcaccgtcgcctccggtgaggacctcaagaactgtgatgcggacttcgtcaaggtcgaccaggccacgcttttcgacct

SEQ ID NO: 97154 - DNA, 503 bp, Zea mays
  unsure (1)..(503): unsure at all n locations
ataggctnttgggnnnccaaatttcgcacgncgtatcgtcctcggttcggaataacccggctggacccacgcgtgcgccgttctggagcagctagggttccgtcctcgatccgatccgccgagtgcacacgaccgttccccactccgatcgggtcgatggccgccgacggcgagaagaacatgataaccctcaaaagctccgatggcgaggagttcgaggtggaagaggccgtggcgatggagtcgcagaccatccgccacatgatcgaggatgactgcgccgacaacggcatccctcttcctaacgttaactccaagatcctatccaaggtaatcgagtactgcaacaagcacgtacatgccgacgacgccgacgacgccgcctctaacgccggttccgacgacatgggtgccgcctccgtcaacagcaccgtcgtcttcggtgaggacctcaagaactgtgatgcggacttcgtcaaagtcaccagtccaccttttcgacg

SEQ ID NO: 97155 - DNA, 507 bp, Zea mays
  unsure (1)..(507): unsure at all n locations
gtgctnttntgactaacagtatagtcagcatgctctaccggtctcggaattcccgggtcgacccacgcgtccgcggacgcgtgggcaaagacaggttgcgtgagtatgagctcaatcttccaagttcaagacgagggacttgatgttggaagggtgtattttgtgatcctcgagatgtcccctgttacatatattgattcgagtgctgttcaagctcttaaagacttgcaccaagaatacaaagcacgccatattcagattgccatagctaacccgaaccggcaagtgtaccttctgttgtcaagatcgggcatcattgacttggtaggagctgggtggtgctttgtgcgagtgcatgacgccgtgcaagtgtgcctacagcacgtgcagaattcatcttcaaatgcgttgaagctacccgtgcaggcatcaggcgtgttgaccgattctgtttcgactcctaaaccagagcagcagcatcaaaagcagcacggcctcttcaaggac

SEQ ID NO: 97156 - DNA, 502 bp, Zea mays
tatgttgtggattgttggtagggggagagaattctcggtccggaattcccgggtcgacccacgcgtccgagcgcacgcagcttctagaatctagaaggcaggagttggtcttcttggacaatgaagtgagtgttcaatgaggccatcattgaggagagggatcagggaatacaagagattcaacaccaaatcactgaagtaaatgaaatcttcaaagatcttgctgtgctagtccatgatcaaggagcaatgatagatgacattgattcccatatagagaatgctgttgtagcgacttcgcaggctaaaggtcagctttcaaaagctgccaagactcagaagtcgaactcttcgctgatatgcttgttattggttatcttcggcgtggtcctgctcatagtgataatagtacttgcagcataaaagcttggaaggcagctgaggttccgatgatcgagcttattgcgatgaattccttattattattttttttgctgtgcag

SEQ ID NO: 97157 - DNA, 502 bp, Zea mays
  unsure (1)..(502): unsure at all n locations
aatgtntctgtatgggggaacaatatgtgacgctctaccggtccggaattcccgggtcgacccacgcgtccgcggacgcgtgggctttagcgatggtcctgttcatggctggcgccgcgctgctcggcggggctgccggcgccggcgcgcagcagggcgtgtggagcatcatcacccggcccatgttccagagcatgctgagccaccgcggcgacagcgggtgccagggcgccttctacacctacgacgccttcatcgaggccgccagcaagttccccggcttcggcaccaccggcgacgagcagacgcgcaggcgggagctcgccgccttcttcggccagacgtcccacgaaaccaccggtggatgggcgactgctccggatggaccgtttgcctggggatactgccgggtgaaggaacagaaacagacggacccaccctactatggacgaggacccatacagctaactcataagtacaactacaggctcgccgggcaagc

SEQ ID NO: 97158 - DNA, 503 bp, Zea mays
gtaagcgctgaatgtgggggatgtaagtacgctctaccggtccggaattcccgggtcgacccacgcgttcttcgcgagatcgccgccccgggtgggctctagatcccgatggcctcgcgccgccgcaccgtgctcaaggtcatcatcctcggcgacagcggggttgggaagacgtctttgatgaaccaatatgtgaacaagaagttcagcaaccagtacaaggctacgattggggcggatttcctcaccaaggaggtgcagttcgaggacaggctcttcactctgcaaatatgggacactgctggtcaggaaaggtttcagagtcttggcgttgcattctaccggggagcagattgttgtgtcctagtctatgatgttaattctatgaaatcgtttgataatcttcacaactggcgtgaagagtttctaattcaggcgagcccatcagatcctgacaatttcccttttgttctgttgggtaacaaagttgatgtagatggtgg

SEQ ID NO: 97159 - DNA, 508 bp, Zea mays
  unsure (1)..(508): unsure at all n locations
tggagggcnntgacataagctaggagctcgctccatcgcttngnntcggaattcccgggtggacccacgcgtccgcccacgcgtccgaaaaaatggtgcgagaactcgaaagtgacccccatcttttctcatgcgtgctgtcgaaaggcaatttgaaggtcaaagaaatacaccactttactcaagatgatctaatgacagaagatgttttcattctggactgtcacacgagcatatttgtttgggttggtcagcaggtggatgttaaaggcaggttacaagctatggatgctggggagaaatttattgtgcttgattttcttatggaaaaccttgcccgtgaaacaccagttttcaccgttatggaggggaatgagcctccctttttcactagattcttcacctgggactccgcaaaatcactgatgcatggcaattcataccagaggaagctcgccattgtaaaaggtggaggtgctccagcattggataaaccgaaaagacgaan

SEQ ID NO: 97160 - DNA, 500 bp, Zea mays
  unsure (1)..(500): unsure at all n locations
atatgtgctggttattttttctcggggagtattctcgatcggaattcccggctcgacccacgcgtccgcccacgcgtccgtggattcattcctcgcactctttgtgaagacagtgatcctttggatgtactggttataatgcaggagcctgttatcccaggctgtttcctacgtgcgaaggctatcggccttatgccgatgattgatcagggagaggcagatgacaagatcattgcagtgtgcgctgatgatcccgagtacaggcattacaatgatatcaaggagctcccacctcaccgcttggctgaaatcaggcgcttcttcgaggactacaagaagaatgagaacaaggaggttgctgtgaacgactntctaccagcgagcgccgcttatgaagccatacagcactctatggatctgtatgctacatacatcngtgagggcctgangaggtaagattctgatggctaagaagngtgggaggatgttgacaaaaactt

SEQ ID NO: 97161 - DNA, 499 bp, Zea mays
  unsure (1)..(499): unsure at all n locations
cggnctgagtgtgggaggatggaagtatcctctactcggtccggaattcccgggtcgacccacgcgtccgcccacgcgtccgaatggattctagccactacaagggtgatcacacgtttgtcccagtcgctcggaagggatactggcagttcaacatgggtgatgtcctggttgatggaaagtccactgggttttgtgccggtggctgtgcagccatcgcagattctggaacttccttgcttgctggccccacagccataattactgaaatcaatgaaaagattggtgctgctggtgtagtcagccaagagtgcaagactgttgtttctcaatatggacagcagatcctagatcttttgctagctgagacacaaccagcgaagatctgttctcaggttggtctgtgcacttttgatggcacccatggtgtcagcgctggaattcggagcgtagtggatgatgaagctgggaaatcaaatggtggtctcaagagtgatcc

SEQ ID NO: 97162 - DNA, 512 bp, Zea mays
  unsure (1)..(512): unsure at all n locations
cgagaggctnctcatgccggcaagtcncaganagtacgaccataccggatcggaattaccgagcggacccacgcgtccacctggacgtatatcggaatagcccctactttctcacatgcttatgcaccctccaggtagaggctatcccatatcaggacagacaagaagaccgctacaataagagtcctcaacttcttgaatacaacccagtatacaagaaaactccactgcttgtccataatggaaaacccttatgtcagtccatgcttattgttgaatacattgatgacatttggtcacataattcattacttcctgctgatccctactagagaactctggcaaagttttaggttaaatatgctgatgatgacatgttttctgcaagtattgcattcttccttaacaataatgaataagagcgagaaaagagcatacagaagatatggcagcatctcaaggttgttgagaatcaacgatttggtgatcaacaaaaattttttcggggaaaa

SEQ ID NO: 97163 - DNA, 514 bp, Zea mays
  unsure (1)..(514): unsure at all n locations
tgtgaggggnccncnnattgaaaggctaggctngtcacatcncnctnnnttnnnnnnnccggnccgacccacgcgtccgcccacgcgtccgaagcgcactctagcaatggcttctgaggttgtccgccctagcgacgcggagctactaaaggcacaagccgacatatggcggctcagcctctcctacctcacgcccctgtcactgaggtgcgccgtggagcttggcatccccacggcgatctaccgccatggcggggctgcctcagccgctgagctggtcacggcgctgtctctcccctccactaagctgccgttcctccgccgcctgctgcggctcctcgccgcgtcgggcgtgttcaccgtcgacaagcagagcacggaggaggagcggtaccgcatcagccccgtgtcctacctcctggtggacggcatccctcacgaggaccacatgaaccacaccgctctggtgctcacctgcacctcgacgcgctacatcgaggcggngatagggctg

SEQ ID NO: 97164 - DNA, 539 bp, Zea mays
  unsure (1)..(539): unsure at all n locations
gagtgagctagtgttccctgggactacngcantagcaaccgctccggaattcccgggtcgacccacgcgtccgccctaatttaagccctacactgaaaaatggttttggtcctcatatgtgtgatgatgacaacgattgtggcaatgcagactatgttgatgatcttgatgacatttcccaagaagatacctgtggcaattatgatcctggcaatggaattgcagaagatagatctgaggtcaatggatctactcaaataaagcctccaaaatttcaaaagggtgtattacgtacaaactgtatagattgtttggatcgcacaaatgttgctcaatatgcctatggcctagctgctctaggataccagttacatgcacttggttctgtagaatctccagaagttcatttagactcccctttgtctcgacatttgatgcatttttatgaacggatgggtgacacacttgctttacagtatggtggttctgctgctcacaataagatattctcttgcaaaagagggcacttgaagttcgcn

SEQ ID NO: 97165 - DNA, 537 bp, Zea mays
  unsure (1)..(537): unsure at all n locations
gtgtgcgtagtgaagctacngactanagcnatgcaactgctccggaattcccgggtcgacccacgcgtccgcccacgcgtccgcggacgcgtgggtgcttctacgagaggatatagagaggaagaacagctcgtccgagaccatgaagagcagcccacacctggtgctgatcctgtgcctccaggccgctctggtcatgggcgtcttcgccgctttggctaaagaaaatgccctggttgagagcaaggccatcgacatcaacccggggcagctcaagtgctgcaccaactgcaacttctccttctcggggctctacacctgcgacgacgtcaaaaaggactgcgaccccgtctgcaagaagtgcgtcgtcgccgtgcacgcctcctactcgggcaacaacaagttcatgtgcaccgacaccttcctcggcatgtgcggccccaagtgctagatcagagaggaagaacgcgcgcttgtgctagctgctatagcttcgatcttccggcgtcggccggtgcatggttcacgtactgtgtt

SEQ ID NO: 97166 - DNA, 544 bp, Zea mays
  unsure (1)..(544): unsure at all n locations
aggctcgctgaacctagctcagactttcatagcaccgccgtaccggtccggaattcccgggtcgacccacgcgtccggcttctacgagaggatatagagaggaagaacagctcgtccgagaccatgaagagcagcccacacctggtgctgatcctgtgcctccaggccgctctggtcatgggcgtcttcgccgctttggctaaagaaaatgccctggttgagagcaaggccatcgacatcaacccggggcagctcaagtgctgcaccaactgcaacttctccttctcggggctctacacctgcgacgacgtcaaaaaggactgcgaccccgtctgcaagaagtgcgtcgtcgccgtgcacgcctcctactcgggcaacaacaagttcaggtgcaccgacaccttcctcggcatgtgcggccccaagtgctagatcagagaggaagaacgcgcgctgctgctagctgctatagcttcgttcttccgncgncggccggtgcatggttcacgtactgtgtgttgtgctactacgatacgtactggct

SEQ ID NO: 97167 - DNA, 539 bp, Zea mays
  unsure (1)..(539): unsure at all n locations
gagcgccgtctggctccggncctttagcatagtatgacgtaccggtcttgaattcccgggtcgaccacgcgtccggcttctacgagaggatatagagaggaagaacagctcgtccgagaccatgaagagcggcccgcacctggtgctgatcctgtgcctccaggccgctctggtcatgggcgtcttcgccgctttggctaaagaaaatgccctggttgagagcaaggccatcgacatcaacccggggcagctcaagtgctgcaccaactgcaacttctccttctcggggctctacacctgcgacgacgtcaaaaaggactgcgaccccgtctgcaagaagtgcgtcgtcgccgtgcacgcctcctactcgggcaacaacaagttcaggtgcaccgacaccttcctcggcatgtgcggtcccaagtgctagatcagagaggaagaactcgcgctgctgctagctgctatagcttcgatctttcggcgtcggtcgtgcatggttcacaaactgtgtgttgtgctactaccattcgtacacg

SEQ ID NO: 97168 - DNA, 543 bp, Zea mays
  unsure (1)..(543): unsure at all n locations
tgtgtgcggatgagtgaaggcagcngacgtcagcangtgcgataccgctccggaattcccgggtcgacccacgcgtccgctctctcgtctcccaacgacgcgattggcgattccatttctaccccgagacctccagccgtgcgcccgtgaaccctcagccttctccgtcccgcctcggcactcgacggccgccggcacacaccgcgcagtctcgagacaggaaccggaggaacgaggatggaggatgactcgccgctgacgaagacgatgaagggtgcggtgacaggactcgccgcggggaccatctggggcaccgtcgtcgccacctggtacgacgtgccccgtgtggagcgccacgtcgcgctccctggccttatccggacgctcaagatgtgcggcacctacggggccaccttcgccaccatcgggggcctctacatcggcgtcgagcagctcgtgcagagccagcgcaagaagcgcgacttcgtcaacggggccgtcggcgcgttcgttgccggagcctttgtctgggctacagaggaa

SEQ ID NO: 97169 - DNA, 542 bp, Zea mays
  unsure (1)..(542): unsure at all n locations
gcggttgctgatccatgaacatgattgcactgctctaccggtccggaattcccgggtcgacccacgcgtccgggaattaatctgctgtgtggaaaggagttccctccttaagaaactggccactctgaaggagttggatcctgcagataagcttgctgcagcagatgttgatcgatcaatgcaattaagcatcacgggtttggaaacattctgccttagcaataaggtccagtggccgttatctcttgtaatttcaaggaaggctttgacaaaataccaattgatctttcgcctattgttccactgcaagcatgttagtcgccagctgtgtgcagcatggcaaatacaacaagcattccggtctgtcaagattctagggacaccaattctgcggtcatcaattctttgtcgtagcatgctcaagtttgtaaatagccttttgcattatctaacatttgaggttcttgaaccaaattggcatctgatgcatgaccgncttcaaacagcaaggagcatagatgagggtattcagatccatgatt

SEQ ID NO: 97170 - DNA, 544 bp, Zea mays
  unsure (1)..(544): unsure at all n locations
cgatggccgtctgtccctgggacggctncaatagtacctgacgtaccggtccggaattcccgggtcgacccacgcgtccgcagaccatggacccctgcaactcctccgtcggcaccatcgcctacatgagccccgagcggatcaacaccgacctcaacgacggcagctacgacggctacgccggcgacatctggagcttcggcctcagcatcctcgagttctacttgggcaggttccccttcggggagaacctcggcaggcagggcgactgggccgcgctcatgtgcgccatctgctacaacgacccgcccgagccaccgaccaccggctcgcgcgagttcagggggttcatcgcctgctgcctgcagaagaacccggccaagcgcctcacggccgcgcagctgctgcagcaccccttcgtcgccggcccgcacccgcagcccctcgctgctcctnccccgtcataaccacaccaccatttcggcgggttgggagttgggaccaaagtacggatctcggctcagtttggccttcctaccttggg

SEQ ID NO: 97171 - DNA, 538 bp, Zea mays
atgatgcgttgactgaagccaaaaccctacgcacgtacgtaccgctccggaattcccgggtcgacccacgcgtccggccacgcgtacgataacacattggtgtcagtctctggagcatttaagtggtctggatcaatggaagggttgagtcctagccagccggcaaaagatgagctgctgatggtaatgatgatgataagaggccactgctaccctactacgtaccctcctctttgtgtgctgccatccgtccccgttagacgatcgaggagagaataacgcagagctctctgctcccggcctgtcttctgccgtcccggccgtttaatttactagtgtgttcgtcctatatgtttagcagcagcaggtgtattgtgcgggtatgtaatggtattgcaactatattgggtgtaaaaccataataaatgtgggcaaatatgcaaggaaagaatcgctcactggtaaggccttatatgccttgtaattgagagattcccgcactgttcctttaaatttagaaaagggccgccgctcttat

SEQ ID NO: 97172 - DNA, 540 bp, Zea mays
  unsure (1)..(540): unsure at all n locations
cggcganctgcgccctcccctgaatttcagtgctctaccggtccggaattcccgggtcgacccacgcgtccgcccacgcgtccggcgttgccaagccgtcggcgtccaacgatatcctgtctctgaacctcagctacgcgtgctcccaggtgagctgcggcgtgatccagaagggcgggccgtgctactacccggacaacctggtgtcgcgcgccgccgtcgccatgaacctctactatgccgccaatggcaggcacccttggaactgctacttcaacaactcggcgctcgtggtgcagtccgatcccagctatggatcctgcacctactactgatgtctgtctgatgctctgctgtgctgtgttgtgtctagagatgacaatggggatatccctagttgcgtcctagtagaagtgtctcttgttccatccagttgatatgcatgataacatttggagatgcgtgcatgtgatttttgtattcgaggataaggtgtgatcgccaatgaacanagtgatgcagggcagcatcattcattaa

SEQ ID NO: 97173 - DNA, 535 bp, Zea mays
  unsure (1)..(535): unsure at all n locations
gatcgctgcgtgttnccagtaacanagcatggcaatacgtcttgaattcccgggtcgacccacgcgtccgcccacgcgtccggcgttgccaagccgtcgtgtttacaacgatatcctgtctctgaacctcaggtacgggtgctcccaggtgagcggcggcgtgatccacaatggcgggccgtgctactacccggacaacctggtgtcgcgcgccgtcgtcgccatgaacctctactatgccgccaatggcaggcacccttggaactgctacttcaacaactcggcgctcgtggtgcagtccgatcccagctatggatcctgcacctactactgatgtctgtctgatgctctgctgtgctgtgttgtgtctagagatgacaatggggatatccctagctgcgttctattataagtgtctcttgttccatccagttgatatgcatgataacatttagtagatccgtgcattggaattttgtattccaggattaagtgtgatctcaaatgaccaattgatccaaggaactatattccg

SEQ ID NO: 97174 - DNA, 541 bp, Zea mays
tgagtgccgtctgtcgatcgctcagcagatgacgtactgacgtaccggtccggaattcccgggtcgacccacgcgtccgcactcccaagccagtaccgagtcctacgagcagtcgcacgcaagtgtcaagagacgaaacggtcgacatggctcgcacgcaatctgccgtagcggtcgccgtggtggccgcggtgctgctgctggcagcggcggcgacgacctcggaggccgccatcacctgcgggcaggtgagctccgccatcgcgccctgcctctcctacgcccgcggcacggggtccggcccctccgcgtcctgctgtagcggcgtcaggaacctcaagagcgccgccagcaccgccgccgacaggcgcgccgtctgcaactgcctcaagaacgccgccaggggcgtcagcggcctcaacgccggcaacgccgtcagcatccccttcaagtgcggcgtcagcatcccctacaccatcagcaccttcaccgactgctccagggtgaactaaaacctagaccacgcgcgacgactggcggt

SEQ ID NO: 97175 - DNA, 544 bp, Zea mays
  unsure (1)..(544): unsure at all n locations
agctgctgacttgtgccatgcctgactnagcttcgcactancggtccggaattcccgggtcgacccacgcgtccggtaatcggagttgttccatatgttggtctcaacttcgctgtatatgagtccctcaaagactggctgctccagacaaattcatttggccttgcaaatgacaacgagctgcacgtagttacaaggcttgggtgtggagctgtggcgggaaccattggccagactgttgcatacccgcttgatgtcatcaggagaagaatgcagatggttggctggagccatgctgactctattgttactgggcaaagcaaagaagcactccagtacaatggcatgatcgatgcattcaggaagactgttcgtcatgaaggagttggtgctctgtacaagggtcttgtgccgaactcagtcaaggtggtgccctcaattgccattgcatttgtgacttacgaggttgtgaatgatgtgctacgagtagagatgaggatattagactgacgatgggtcgtttcaacttgctatctttgttggc

SEQ ID NO: 97176 - DNA, 539 bp, Zea mays
  unsure (1)..(539): unsure at all n locations
tggtagagtcagtgtggccagggcaggtacgctcgtactaaccgcgccggaattcccgggtcgacccacgcgtccgaagcaagccatgtggaggagggctttagcgatggtcctgttcatggctggcgccgcgctgctcgccggggctgccggcgccggcgcgcagcagggcgtgtggagcatcatcacccggcccatgttccagagcatgctgagccaccgcggcgacagcgggtgccagggcgccttctacacctacgacgccttcatcgaggccgccagcaagttccccggcttcggcaccaccggcgacgagcagacgcgcaggcgggagctcgccgccttcttcggccagacgtcccacgaaaccaccggtggatgggcgactgctccggatggaccgtttgcctggggatactgccgggtgaaggaacagaaacagacggacccaccctactatggacgaggacccatacagctaactcataagtacaactacaggctcgccgggcaagcgctgaacctgaacctggtgggcn

SEQ ID NO: 97177 - DNA, 547 bp, Zea mays
agatgcgctgcgtgatgcccgaatctatagaccgtgcatctgcctgaattcccgggccgaccgacgcgtccgaagcaagccatgtggaggagggctttagcgatggtcctgttcatggctggcgccgcgctgggcgccggggctgccggcgccggcgcgcagcatggcgtgtggagcatcatcacccggcccatgttccagagcatgctgagccaccgcggcgacagcgggtgccagggcgccttctacacctacgacgccttcatcgatgccgccagtaagttccccggcttcggcaccaccggcgacgagcagacgcgcaggcggtagctctccggcttctatggccagacgtcccacgaaaccaccggtggatgggcgactgctccggatggaccgtttgcctggggatactgccgggtgaaggaacagattcagaccgacccaccctactttggacgatggcccaatacagttaactcatatgttctacttacagggctttcctggcaatcgctgtaccttgtacctggggggctaatcccct

SEQ ID NO: 97178 - DNA, 536 bp, Zea mays
  unsure (1)..(536): unsure at all n locations
tgatgcgcgntgtccatgatcagaaccatgatgcactgctctaccggtccggaattcccgggtcgacccacgcgtccgcccacgcgtccgcccacgcgtccgcttccattctcatttgagaatgcgaatacaaggagggattttgtgtttgggaaagtccgaagaaaaaaggatttggaatctaccttttcttttgctttttcccttataaaaataactcaatcaaaatccaattatctactctacaagaatgaaatgcttgttatgcctaatatacttagtttaacctgtatctgttttaattctgttctttgtccgactagctttttcttcgccaaattacccgaagcttatgccattttcaacccaatcgtggatgttatgcctgtcatacctgtactcttttttctattagcgtttgtttggcaagctgctgtaagttttcgatgaaatctttactattctgcctgccaaattgaatgatgtattcattccaaaaaaaataacaaagggcggccgctctagaggatccaagc

SEQ ID NO: 97179 - DNA, 545 bp, Zea mays
  unsure (1)..(545): unsure at all n locations
gatgccgctcgccccgtttcgttncagctacgnatgatctntccggtctggaattcccgggccgacccacgcgtccgcccacgcgtccgcccacgcgtccgattccattctcatttgagaatgccaatacaaggaagggtttcgtgtttgggaaagtccgaagaaaaaaggatttggaatctaccttttcttttgctttttcccttataaaaataactcaatcaaaatccaattatctactctacaagaatgaaatgcttgttatgcctaatatacttagtttaacctgtatctgttttaattctgatctttgtccgactagctttttcttcgccaaattacccgaagcttatgccattttcaacccaatcgtggatgttatgcctgtcatacctgtactcttttttctattaacgtttggttggcaagctgctgtaagttttctatgaaatctctactattctgcctgccaaacttgaatgatgcattcattcccaaattacaaataaatgggattccgttctaaaagatccaagcttaccctt

SEQ ID NO: 97180 - DNA, 548 bp, Zea mays
  unsure (1)..(548): unsure at all n locations
gtagcgtgtgtgtgaagaaggggaccttagnanngtcgattgtcgttccggtacggaattcgggggtcgacccacgcgtccgttcacgcgtccggccacgcgtacgtccacgcgtccggcagaaccttgaagttaaagggatagggtgatgagagaaaggctgcattggctgcccagtttgcagcagaagcaactttgcggagagtacatgcagcccagaaagatgatgacatgccaccaattgaagccattcttgcaccacttgaagctgagctaaagctttctcgccaggagattgcaaatctccaggatgacaacagagctttggatcgtctaacaaaacaaaaggaggcagctctgctagaagcagagaggactgtgcaaattgctatggcaaaagctgctatggttgacgatttgcataacaagaaccaagagttgatcaagcaaattgagatctgccatgaagaaaataaaatcttagataagctgcatcgccaaaagattgcagaagtgaaaagcttagccaaactgtgagggagttggag

SEQ ID NO: 97181 - DNA, 548 bp, Zea mays
  unsure (1)..(548): unsure at all n locations
cgattcgtgcgtatgngccgcttttccgggcagttagcactgatcnttccggtcctgaattcgcgggtcgaccgacgcgtccgcccacgcgttcgtccacgcgtccgtccacgcttccggcagaaccttgaagttaaagggatagaggatgagagaaaggctgcattggctgcccagtttgcagcagaagcaactttgcggagagtacatgcagcccagaaagatgatgacatgccaccaattgaagccattcttgcaccacttgaagctgagctaaagctttctcgccaggagattgcaaatctccaggatgacaacagagctttggatcgtctaacaaaacaaaaggaggcagctctgctagaagcagagaggactgtgcaaattgctatggcaaaagctgctatggttgacgatttgcaaaacatgaaccaagagttgatcaagcaaattgagatctgccatgaagaaaataaaatcttagataagctgcatcgccaaaagattgcagaagttgaaaagctttaccaaactgtgagggagttgag

SEQ ID NO: 97182 - DNA, 543 bp, Zea mays
  unsure (1)..(543): unsure at all n locations
aaggtgctgtccccttacgtcgtgcatcgtagtgacgtaccggtccggaattcccgggccgacccacgcgtccggcagttactgagagtgtgtgtgagagagaggatgggtggcagcggcagggctgctgtgctgctggccctggtggtggtggccgtgagcctggccgtggagatccaggccgacgccgggtacggttacggcggcgggtacaccccgacgccgacgccggccaccccgaccccgaagcccgagaagccccccaccaaggggccgaagccggacaagccgcccaaggagcacaagccgcccaaggagcacgggcccaagccggagaagccgcccaaggagcacaagtccgacgccgccacgtacaccccgagccccaaacccacgccgtcgacgtacactcccaccccgacgccccccaagccgacgccacccacatacacttcccgccctacgccccacaaacccacaccaaaacccactcccactccttcgacgtacacctcgacccccaagccttcgacacctaagccn

SEQ ID NO: 97183 - DNA, 546 bp, Zea mays
  unsure (1)..(546): unsure at all n locations
agtatggatgccngagtatcccaccntactgatgtacngtacgtactcgctcctgaattcccgggtcgacccacgcgtccggcaagatgtgtctgaggaagctgtcgctgctttggataaaatagaagacgccctcgggaaggtcaacgagggtccattctcccttggtcagttcagtctggtggacattgcgtatgtaccattcatcgagaggtttcagatattctatttcaaccttaagaacttttatatttccaaaggcctaacccacccttaaaaattcaatggaggaattgaccataatggatccttccccccagactaaccaggacccacagtttttactggaccaaccaaaaaaccgtctgggaatggctaaaactttgcggccaagattgatttttgacagaattcccggcttagttatacacacttttgttaagttatttgtgccctggaatattgaaccctccttatatggttttaaatatagattgggccctatatacggggttgctctttttaaaaacaatctattggcctgtg

SEQ ID NO: 97184 - DNA, 543 bp, Zea mays
  unsure (1)..(543): unsure at all n locations
cgagacggntgactgactccagtngacctacgncngtgcgaccgctccggaattcccgggtcgacccacgcgtccggcgttcgtgaggttctccggggttcggtttcgtgggtgagcggatcgagatggcggcatcggatgttgagtaccgctgcttccacggcggactgcactgaaccacagacgaccactccctacacaacgccttcagcacctacggcgaagtcctcgagttcaagatcatcctcgatcgggagacgcagaagctccacggctactgcttcaccaccttctccacggaggacgcgatgcagaacgccatcaagggcatgaacagcgaggaactggacagacgcaacatcaccgtcaactaggcccagtcccgatgaagccgcggatgcagacgcagctgcaggtactgctgtagccgatgaggccgcagctacagaggtggcagtcgccgctatggccgatgccactacggtggtggctgatgctacgggtgtagactccagcgattacctggctgatgctgctgcttcc

SEQ ID NO: 97185 - DNA, 545 bp, Zea mays
tgtgagagcgcgtatgcaatgatgccaccgctcatgcgactgacgtaccggtccggaattcccgggtcgacccacgcgtccgaaaaaatcattggcttatcaaattctctatcgagccgtgaaaaagattcaacaaaagacagagacaaatccactattggttttacgtcaagcaatacgtagagtaactcccaatataggagtaaaaacaagacgtaataaaaaaggatcgacgcggaaagttccgattgaaataggatctaaacaaggaagagcacttgccattcgttggttattagaagcatcccaaaagcgtccgggtcgaaatatggctttcaaattaagttccgaattagtagatgctgccaaagggagtgggggtgccatacgcaaaaaggaagcgactcatagaatggcagaggcaaatagagctcttgcacattttcgttaatccatgaacagaatctaggtatgtagacacatggatccatacatctcgatcggaaaagaatcaatagaaggagaatcggacgatatctgtttcg

SEQ ID NO: 97186 - DNA, 543 bp, Zea mays
  unsure (1)..(543): unsure at all n locations
ngtgagtgcgcgtatgtcctgattctaactctcgatggactgacgtaccggtccggaattcccgggtcgacccacgcgtccgctcactctccgctggtcgctcactcttgcagctccacccttcactcagtcttagtctcttattagctctaggctctagctagccgcgccactccttcgtgtagccatcagccttctcatcgccaccaatggccactgccgaggtccagaccccgaccgtcgtggcggccgaggaagcgcccgtggtggagaccccgccgccggccgtcgtgcccgaggagtctgcccccgccgaggccgaggccgaggccgaggctgctgctcctgctgatcccgaggagcttcccgcggccgagcagcaggcagccgccgaggcggaggccgcggctcctgctggtgccgaggagcccgtcgcggccgaaccggccgccgaggcggaggctgctgctcctgctggtcccgaggagactcctgcggtcgagcaggaggcagccgccgaggaggaggctgctgctgctcctc

SEQ ID NO: 97187 - DNA, 532 bp, Zea mays
  unsure (1)..(532): unsure at all n locations
nggagggtcgtatgcatgataaagatgtcatgcaaccgctccggaattcccgggtcgacccacgcgtccgcggacgcgtgggctagctctatagctcgagtattgcttgctctccacaagaaacaaagcagagcaccaacaatggccgccgcctcctcgtcctcggtcctcctgctgctcctggccgccgccttggctggcatgagcgccaacgccgccaccttcaccatcaccaacaactgcgggttcaccgtgtggcccgcggccaccccggtgggcgggggcacgcagctgaacccgggcgggacgtggaccgtcaacgtgccggccggcaccagctccggccgcgtgtggggccgcaccggctgctccttcaacggcaacagcgggagctgccagacgggcgactgcggcggcgcgctggcctgcacgctgtctgggcagccgncgctgacgctggccgagttcaccatcggcggcagccaggacttctacgacatctcggtcatcgatggctacaacctcgccatgg

SEQ ID NO: 97188 - DNA, 540 bp, Zea mays
  unsure (1)..(540): unsure at all n locations
gagcgggccgtntcctccgtttgccaaaagttcantgcatgaccgctccactatcncggacgacccacggctggcgcgacccgttggctaactctatagctcgagtattgcttgctctccacaagaaacaaagcagagcaccgacaatttcctacgcctgctcggcctcggtcctcctgctgctcctggccgccgccttggctggcatgagcgccaacgccgtcaccttcaccatcaccaacaactgcgggttcaccgtgtggcccgcggccaccccggttggcgggggcacgcagctgaacccgggcgggacatggaccgtcaacgtgccggccggcaccagctcctgccgcgtgtggggccgcaccggctgcttcttcaacggcaacaacgggagctgccagacaggcgactgctgcggcgcgcttgcctgcacactgtctgggcagaacgacgctgacgcctgtccagttcaccatcagcgggagccaggacttctaccacaatcttgacatccatggctacaaccaccccatggcg

SEQ ID NO: 97189 - DNA, 539 bp, Zea mays
  unsure (1)..(539): unsure at all n locations
gagtcggccgtgtcacagacagtcggatgacgantcnactgccccatccaatatccaagtcgacgcacgggtcactcgacgcgtgagctagctgtataagtcgagtatagcttgatctacacaagagacaaagcagggcacggacaatgtccctcgcctcctcgtcctccgtcgctgctcctgctcctggccgccgacttcgctatcatgagcgccaacacgaccaccttcaccatcaccaacaactgctggttcaccgcgtggtccgcggccaccccgttgggcgccggcactcagctgaacccgggcgcaacgtgtaccgagaacacgccctacgtcaccagctactgccccgtgtagtgccgcaccggcatgctccttaacagccacaactcgagctgccacactagcgactgcggctgcgcgctggtctccacactgtttgggcagacgtcgctgactctggtccagttcttcaaatgcggcagtcaggacttctactacatctccgacatcgatggctacaacctcgtcatgcn

SEQ ID NO: 97190 - DNA, 541 bp, Zea mays
  unsure (1)..(541): unsure at all n locations
tgtgagggccgtntncctgaaccatcngctcatcggactgacgtaccggtccggaattcccgggtcgacccacgcgtccgcggacgcgtgggttgaagtttttttgcatttcaataagccatttccttttgaagaagcagcatctccagagcatgtcatagttgctgagtctatttgcaagattttgaggacgttttatcgtgttattgaagtcatttctgcctctagttctccgacagcaaacatgtacttcaatgagatatggaaagtgagaacagtcttgcaagaagaagcatcaagtgagcatgcagaaatcactgcgatggtcgcagagatgcaggaaacattcaatgagtactggcaacattcatacttatggttatgcatacctgttatcctagaccctagattcaagttcggtttcattgagttccgtctgaaacgagcttttggattaaaatcagcaagctacttatctggcatacgtgaaacactccaggaactcttcaatgaatactgcagtccagtggatcagccgaan

SEQ ID NO: 97191 - DNA, 539 bp, Zea mays
  unsure (1)..(539): unsure at all n locations
agtgagggtgagtgtcgctgaggacgatgngcngtgcgtaccgctccggaattcccgggcggacgcgtgggccaccatcgatctgcaagtctcgctacgtagcagtgcaataaaaaaaagcagccgcaatggcgagcagcaccatggccctctcctccacggccttcgccggcaaggccgtgaacgtgccgtcgtcgtccgccttcggcgaggcccgcgtgacgatgcgcaagacggcggcgaaggccaagccggcggcggcgtccgggagcccgtggtacggccccgaccgcgtgctgtacctgggcccactgtccggcgagccgccgagctacctgacgggcgagttcccgggcgactacggctgggacaccgcggggctgtcggcggacccggagacgttcgccaagaaccgngagcntgaggtgatcccactccgctgggccatgnctggcgcgctcggctgcgtctttcccgagcttctcgtccgcaacggcgtcaaagtccggcaagcccgntgggttcaaggaccgcttccc

SEQ ID NO: 97192 - DNA, 533 bp, Zea mays
cggttcactgtggcatgatatagagggtactccctaccgctccggaattcccgggtcgacccacgcgtccgcttaaccctcgttcctctagccgtctcgcgcagccacagcctccatttctcctccgacggcggtgcggctagctcaaccatggcggactccaaggccacctcggcggtcaccctccgcactcgcaagttcatgaccaaccgcctgctggcccgcaaacaatttgtgcttgaggttatccaccccggccgcgccaacgtctccaaggcggagttgaaggagaggcttgccaagatgtacgaggtgaaggaccccaacaccatcttcgtcttcaagttccgcacccacttcggtggaggcaagtccactggcttcggcctcatctacgataacctcgagtctgccaagaagttcgagcccaaataccgcctcatcaggaatggtcttgctactaaggttgagaagtcccgcaagcaaatgaaagagcggaagaacaaggccaagaagatccgtggtgtcaaaaa

SEQ ID NO: 97193 - DNA, 534 bp, Zea mays
  unsure (1)..(534): unsure at all n locations
agtgtcggctntnttcactgataagaggattacgcatngcctaccggtccggaattcccgggtcgacccacgcgtccgctcttcaacaagctcaaggcgctcaacgcggagcgcagccgcctgtcgcagagcttcgagtacaactacggcgacttcatccccgtgctccgccccttcctccgcggctacctcaaccgctgccacgacctcaagacgcgccgcatgaaggtcttcgaggacaacttcgtacaggagcgcaagaaggtgatggctcagactggtgagatccggtgcgccatggatcacatcctcgaggccgagaggaagggcgagatcaaccacgacaacgtcctctacatcgtcgagaacatcaacgtcgcagcgatcgagacgacgctgtggtcgatcgagtggggcatcgccgagctggtgaaccacccggccatccagcacaagctccgggaggagctcgcctcggtgctgggcgccggcgtgcctgtgacggagccggacctcgagcgcctnccctacctt

SEQ ID NO: 97194 - DNA, 551 bp, Zea mays
  unsure (1)..(551): unsure at all n locations
tagctgtgtgagtgtcccatgaggataagatgctcataggactngatgtaccggtccggaattcccgggtcgacccacgcgtccgcccacgcgtccggctttagcgatggtcctgttcatggctggcgccgcgctgctcgccggggctgccggcgccggcgcgcagcagggcgtgtggagcatcatcacccggcccatgttccagagcatgctgagccaccgcggcgacagcgggtgccagggcgccttctacacctacgacgccttcatcgaggccgccagcaagttccccggcttcggcaccaccggcgacgagcagacgcgcaggcgggagctcgccgccttcttcggccagacgtcccacgaaaccaccggtggatgggcgactgctccggatggaccgtttgcctggggatactgccgggtgaaggaacagaaacagacggacccaccctactatggacgaggacccatacagctaactcataagtacaactacaggctcngccggcaagcgctgaacctgaacctggtgggcgaccccgacctgn

SEQ ID NO: 97195 - DNA, 534 bp, Zea mays
  unsure (1)..(534): unsure at all n locations
tgaaagcgtgctgttgccttcacctgttccgatanagcaaccgctccggaattcccgggtcgacccacgcgtacgcccacgcgtccggcaggtggtacctttgatgtgtccctcctcaccattgaggaaggaatctgggagggcaaggccacagctggtgacacccatcttggtggtcgaggactctgacaacaggatggtcaaccacttcgtccaggagttcaagatgaagaacaagagggatatcactggcaaccccagggctctccggaggctgatgaccgattgtgagacggcgaagaggactctgtctttgactggccagaccatgattgagattgactcgctgtatgaggtcatggacttatactgcaccattacccgtgccaggtttgatgagctcaacatggacctgttcaagaagtgcatggagcctgctgataagtgactgtaggatgcccaaatggacaggagcaaccgacatgaacgtgaactgatgggggatncactagatccccaaggtggaataactgc

SEQ ID NO: 97196 - DNA, 540 bp, Zea mays
  unsure (1)..(540): unsure at all n locations
agantagtgccgantgnaaactcactaagacagactanagcactgcctctaccggtccggaattcccgggtcgacccacgcgtccgggaaaatgtgtacatggcgaagctcgtcgagcaggcggagaggtacgaggagatggttgaggtcatggataaggtagccaagactgttgactcggaggagctcactgtggaggagcgaaacctcctgtctgttgcatacaagaacgtcattggagcccgtcgtgcctcatggcgcatcatctgctccatcgagcagaatgaggagggccgaggcaatgaggaccgagttacactcatcaaggattatcgtggcaagattgagactgagctgaccaagatctgtgatggcatcctcaagctgcttgagacccatcttgtgccgtcttgcactgcccccgagtccaatgtcttctatctcaagatgaagggtgattactacagatacctcgctgagttcaagactggagctgagagaaaggacccctgctataacacgatggtggcataccaagct

SEQ ID NO: 97197 - DNA, 573 bp, Zea mays
  unsure (1)..(573): unsure at all n locations
agatgtgagtgccggtttgngactgagacacgaaccattacagtactgcacgtanctcggtccggaanttcctcgggtcgatcccacgccgtctcgggtcggaggatcccaggccgccacgaaaatgccacttcggtggtattctaccgcgtcgttctgaaccgagaaggacgacggtcatgtctcttgagggagatgcatgaggctcgggtacccccgctctacaacatcaagggctttccttgcctgtcatcgagtcctttggtttctccagccaactgagggccgcaacctctggtcaggcgttcccccagtgtgtctttgaccattgggacatgatgggctcagatcctttggaggccggctcccaggctgctcagctggtgctggatatccgcaagaggaagggtctcaaggaacagatgacccctctttctgagtttgaggacaagctctaaaatttttggctgttggtgatactgtttcatctgccggtttaatcatcaattcgtctactgtaatagcagcgacttcaatattttattttggtttagttgtcaaatgcaccttgtt

SEQ ID NO: 97198 - DNA, 532 bp, Zea mays
gttagtgcgtatgcgactcactcgctagataccgcatgacgtaccggtccggaattcccgggtcgacccacgcgtccgattgaaataagcatgtttgaggtctgcaaaatatacagtcgtgtaaaacagcaaacacgtggcatccacaaaatatgcctcagcacacaacaattttgcaggactaagggtctatttggttcgcggctaactgcgccaaactttgcctaagtttagttgtttgaattgaataactaaccttagaaagaaaagttaggcaaagtgttgcaagttatgcatcgaaccaaacaggccctaaatgttttgaaactgtatatatgaagcctgttgatggccacttctaggtagctgggatgatgaatgcattttcaagcacattctgtttggtggtgctgccaatgatgcgttcggctcggccgttctgggagaagtgtacgggcacgagcgacgcaactggatgccatgggtgaggaatgagtgagtggctgtggccaacctcgcaaccttaatacac

SEQ ID NO: 97199 - DNA, 541 bp, Zea mays
  unsure (1)..(541): unsure at all n locations
gtgagagctcgntgcctgaagccagcngctcatagtactgcacgtaccggtccggaattcccgggtcgacccacgcgtccgcccacgcgtccggcaacagctaagcctctcccacaagacagcaacatggctgaggaggaggccaagaaggtggaggtggaggtcaccaaggagcccgaggcggcggcgaaggaggacgtagccgatgacaaggccgtcatccccgcgaccgacccgtcgccgccgccgtcgccggccgacgactccaaggccctggccatcgtcgagaaagttgcagatgaacctgctcccgagaagcctgcccctgcgaagcaagggggctccaatgacagggatctcgctcttgcaagggtggaaacagagaagaggaactctttgatcaaagcttgagaagagaatgagaagacaaaagctgagaacaaggctgctaagaaagtatccgctattctttcatgggaaaacacaaagaaagcaaacatagaagctgaactgaagaagattgaggaacaactggaaaaga

SEQ ID NO: 97200 - DNA, 535 bp, Zea mays
gagagagccgtataatgaggccttacctaccgactgacgtaccggtccggaattcccgggtcgacccacgcgtccgcccacgcgtccgcccacgcgtccgaaaaaataaaaaaaaaaaaaaaaaaaaaaaaaaaaaaagggcattgatcattacatggaatcctattaagatattatatgaaagtcgaatttcttccattctcatttgagaatgcgaatacaaggaggtattttgtgttcgggaaagtccgaagaaaaaaggatttggaatctaccttttcttttgctttttcccttataaaaataactcaatcaaaatccaattatctactctacaagaatgaaatgcttgttatgcctaatatacttagtttaacctgtatctgttttaattctgttctttgtccgactagctttttcttcgccaaattacccgaagcttatgccattttcaacccaatcgtggatgttatgcctgtcatacctgtactcttttttctattagcgtttgtttggcaagctgctgtaagttttt

SEQ ID NO: 97201 - DNA, 533 bp, Zea mays
  unsure (1)..(533): unsure at all n locations
ggcgtcggntgngtgtgctagtctactacggcatgtgcgtaccggtccggaattcccgggtcgacccacgcgtccggtaccacaccactccgcgctagctgaggacggtacagcggcacagaggtgcgacgtacgacgacgacgacgcaggcgccacacatggcatcccagctctccgccgccgtgccccggttccacggcctccggggctacgccgcgcccaggtccgcggtggcggcgctgccgtccgtgagggtgggcaggaagaggtcgtcgtcgcagggcatccgctgcgactacatcggctccgccaccaacctgatcatggtgacgacgacgacgctgatgctgttcgcggggcggttcgggctggcgccgtcggcgaaccgcaaggcgacggcggggctgaagctggaggcgcgcgactncgggctgcagacgggtgaccccggcgggtcaccctcgncgacacgcttggctgcgggggcgtcggcacaatctcgcggtcggatcgtgctcggcttcaagacacc

SEQ ID NO: 97202 - DNA, 537 bp, Zea mays
  unsure (1)..(537): unsure at all n locations
tgtacggtgctntaaatcggagaaggcgaggagtatctataccgcgtccggaattcccgggtcgacccacgcgtccgcccacgcgtccgcccacgcgtccgatacagctagatagcctctgcatgcctacgtacagcatggccaaggccgagctgctcctcgccctcgtggcttcgctcgtcgtgctgccattctcctccctcgccgtgtaccaggacttctgcatcgccgacctatccgccgccgccacgccgggcggctacccgtgcaaccccccgaaggacgtgaccgccgacgacttccactatggcggcctcgccacccccggcacggcgctgaaacccttcaagatctccctgggctcggccgtcgtcaccacgttccccggcctgaacgggctgggcatctctgccgcgcggatggtgatggtcccgggcggcgtcgcgccgctgcacttccacccgggaggcaccgagctcatcttcgtcatcgagggcagcgtcgtctgcggcttcatcagcgccacgctcaacgggg

SEQ ID NO: 97203 - DNA, 545 bp, Zea mays
  unsure (1)..(545): unsure at all n locations
ggtgcggccnnttgtttgtgaatgggggttgaattgactgcctgtaccggtccggaattcccgggtcgacccacgcgtccgcccacgcgtccgcccacgcgtccgcccacgcgtccggcagaaccttgaagttaaaaagatggatgatgagagaaaggctgcattggctgcccagtttgcagcagaagcaactttgcggagagtacatgcagcccagaaagatgatgacatgccaccaattgaagccattcttgcaccacttgaagctgagctaaagctttctcgccaggagattgcaaatctccaggatgacaacagagctttggatcgtctaacaaaacaaaaggaggcagctctgctagaagcagagaggactgtgcaaattgctatggcaaaagctgctatggttgacgatttgcaaaacaggaaccaagagttgatcaagcaaattgagatctgccatgaagaanataaaatcttagataagctgcatcgccaaaagattgcagaagttgaaaagcttagccaaactgtgagggagtngg

SEQ ID NO: 97204 - DNA, 538 bp, Zea mays
  unsure (1)..(538): unsure at all n locations
agagcgagtnntnatccatgaaaatagatgctcatggactgacctaccggtccggaattcccgggtcgacccacgcgtccggacgaagacaaacttcagcaagacaagagactaggtgtggcaaaactagcagtaaacactcttgaatctgagattacccaagacgccactctgaagctgctacattcactggatccaattaaaaataaggacaccaaggataggggcacattacatcttaaggtaaagtaccacccctttacaaaggaagagcagctggaagccctagagatggaaaaacaagccatagaggagaggaagcgtctgaaggaggctgggataattggtagcacaatggatgctgttggttctggtgttggatttgtgggtactggcattggcgctggcctcggtttcgttggttcaggaattggtgctggcgcaggccttgttacctctggtattggtgctgtcagcagtggccttggtaaagccgggaagttcatgggcaggactgtgacagggcctttcagcatgt

SEQ ID NO: 97205 - DNA, 538 bp, Zea mays
  unsure (1)..(538): unsure at all n locations
gtagagcgatgagtgtagcctgggccgtacgcatttcgtaccggtccggaattcccgggtcgacccacgcgtccgcccacgcgtccgcggcgcttctcttcttgctccttgtaacgtgtggctcgtgcgcgagaccggcgagctttaacgcctccgactttaccgccgaccccaactgggaggctgcccgggccacctggtacggtgcgcccaccggcgccggccctgatgacgacggtggtgcctgtggattcaagaacgtgaacctgccgccgttctcggcgatgacatcgtgcggcaacgagcccctcttcaaggacggcaagggctgcggctcctgctaccagatacgatgccagaaccacccagcctgctccggcaacccggagacggtgatcatcaccgacatgaactactaccccgtggccaagtaccacttcgacctcagcgggacggcgttcggcgccctggcccaaccccggcgtaaccgaacagctcncgcacgccggcattatcgacatccaattcaaagaggtgc

SEQ ID NO: 97206 - DNA, 535 bp, Zea mays
  unsure (1)..(535): unsure at all n locations
gtagtgcngttcccatgcacgtgagagaggtgattgtattcctctccggaattcccgggtcgacccacgcgtccgcttttgcacaacagcaagtctcctatttgggccatgtcatcaatgctcaaggtgtagctacagatccagttaaaattcaagctattgccgagtggccagtgccaaactgtctcaaggatttacgcagttttttgggccttgccggctactacaggaagtttattaggcattttggggtcatttgccagcccttgaccgctttactgaagaagggcagtctgtttgtttggacaaatgatcatggtattgcatttgacactttaaaaaaggctttggtgacagctcctgttcttgcattacctgatttcactgctgcttttatcgtggaaactgatgctagtgctgacggtgtgggtgcagtcctcatgcaaaaaggtcatcctctcgccttgcttagtaaggccctgggtcccaagtctaagggattgtcaacatactaaaaatagtacttaacaatgat

SEQ ID NO: 97207 - DNA, 539 bp, Zea mays
  unsure (1)..(539): unsure at all n locations
tggatgggtgngtgagcactgaatatagatcgnacttcgcactgnacncttcggtccggaattcccgggtcgacccacgcgtccgcaaagggttccagcggaggtggagatggttttgaagtcacaaagtttgggcatggtcgtgttgcacttattggatttcccagtgttggaaagtcaactcttttaacgatgttgactgggacacattctgaagctgcatcatatgagttcacaacgcttacttgcattcctggaattgttcattacaatgattccaaaatccagcttcttgatctttctggtatcattgaaagagcttcttgaaggcaagggccgtgtatgcaagttaatgctggtgcaaagcattaaatcctgtcctgatgttctggatccttaaagagtgaggacatcgtcaatattattagaggacctgaagcttgtggacctcgtcttaacaaaaggccttcccagatatacttcaagagggaagagaccggtgggatttcttttcaatacaacggttcctttgacttaat

SEQ ID NO: 97208 - DNA, 541 bp, Zea mays
agttggccgtatgcatgagacggatgtcatagcactgacgtaccggtccggaattcccgggtcgacccacgcgtccgaatccccgtgctgagagctgagtgctgccttggttgctccgtactggactcgattgctcatcgcagcagaagcatcccgtcccctccgcttctccttgctctgctctggtaacacacagacaaaaaaaaaaaatagcatcatgtcggaggtgaaggactccaatgtgcctgctgcacttgatggaaatcctcaacctatggaccaaactgaagacaattctatgccctcagcacagcaacaggaagaagcaatcaagaagaagtttggaggactaatgcccaaaaagcccccactcatctcaaaggatcatgagcgggcctactttgattctgctgactgggctctagggaagcaaggtgttgccaaacccaaaggaccgctggaggcacttaggcccaagcttcagccaacacgccaacaacagcaacaacgtgcaaggcgccctatttacacttcgtcagaa

SEQ ID NO: 97209 - DNA, 527 bp, Zea mays
  unsure (1)..(527): unsure at all n locations
cgccggnctgttatgcatggggggaggaagtagtgcgtcccggaattcccgggtcgacccacgcgtccggctgggaagcacgtgccccgtgctgcttttgttgaccttgaacccactgtcatcgatgaggggagaactggcacctaccgccagctcttccaccctgagcagctcatcagtgggaaggaggatgcagccaacaactttgcccgtggtcactacaccattggcaaggagattgttgacctgtgccttgatcgcatcaggaagcttgccgacaactgcactggtctccagggcttcctcgtcttcaacgctgttggtggaggaacgggctctggccttggttccctcctcctagagcgcctgtctgttgactacggcaagaaatccaagcttgggttcactgtgtacccttccccccaagtttctacttcggtagttgagccatacaacagtgtactgtccacccaactccttcttgagcacactgatgtggctataccgctggacaatgatggcaattc

SEQ ID NO: 97210 - DNA, 527 bp, Zea mays
  unsure (1)..(527): unsure at all n locations
aggggnccggagtgctgcatcggggtacgaggggtagtttgtaccggcccggaattcccgggtcgacccacgcgtccggaaaatattggtgctaaattggtccgccaagctgcttctaaaacaaatgacttggctggtgatgggacaaccacttcggttgtccttgctcaagggatgattactgagggtgtaaaggttgtagctgctggtgctaatccagtgcagatcacccgtggtattgagaaaacagccaaagcactagtcagtgaactccaaaagatgtccaaggaggttgaggacagtgagcttgctgatgttgctgcagttagtgcgggaaataactatgaaattgggaatatgatagctgaggctatgaaaaaggttgggcggcagggagtggtcacacttgaagaaagaaagagtgctgaaaataacctctattctgttgagggaatgcagtttgaccgtggctatatttctccctactttgtgactgacagtgaaaaaatgacagtcgagtatgagaa

SEQ ID NO: 97211 - DNA, 531 bp, Zea mays
agggtgaggtgcttgtttctgcatcggattgtaagtctctacccgtccggaattcccgggtcgacccacgcgtccgctgccatccgtccccgttagacgatcgaggagagaataacgcagagctctctgctcccgggctgtcttctgccgtcccggccgtttaatttactagtgtgttcgtcctatatgtttagcagcagcaggtgtattgtgcgggtatgtaatggtattgcaactatattgggtgtaaaaccataataaatgtgggcaaatatgcaaggaaaaaaaaaaaaaaaataaaaaaaaaaaaaaaaaagggcggccgctctagaggatccaagcttacgtacgcgtgcatgcgacgtcatagctcttctatagtgtcacctaaattcaattcactggccgtcgttttacaacgtcgtgactgggaaaaccctggcgttacccaacttaatcgccttgaagcaaatccccctttcgcagttgccgtatttccgaaaaggcccgaccgatggccttttcaaacat

SEQ ID NO: 97212 - DNA, 531 bp, Zea mays
  unsure (1)..(531): unsure at all n locations
tgatgtatgcgctangactaacagcgggtatatagtatcgctctaccggtccggaattcccgggtcgacccacgcgtccgcgcattctcgcgtcggcttgcttttaactgaatccagcccaccgcttctcgcacgtcgccatggacgcggtcgattctgtggtggatcccctccgcgacttcgccaaggacagcgtccgcctcgtcaagcgctgccacaagcctgaccgcaaggagttcaccaaggtggcagcgcggacggcgatagggttcgtcgtcatgggcttcgtcggcttcttcgtcaagctcatcttcattcccatcaacaacattatcgtcggttccggctaggctcagggcgcgactagcatgggagtagtgcgatacttttgagagcaagggatagcgaggatcttggtctttggaatagtattgttaatgacattttttttccggtggngtttctggaataaatcgttgaacgacatggcttcaggatgtctggatgtggatcctgagttaaccttgattc

SEQ ID NO: 97213 - DNA, 536 bp, Zea mays
  unsure (1)..(536): unsure at all n locations
tgtctggaggtgcttagtgtacgtntccgancgtacctgcatatctgctccggaattcccgggtcgacccacgcgtccgcttctcctccccctccggttcgggttcgggttcgtgaggttctccggggttcggtttcgggggtgagcggatcgagatggcggcgtcggatgttgagtaccgctgcttcgtcggcggcctcgcctgggccacggacgaccactcccttcacaacgccttcagcacctacggcgaggtcctcgagtccaagatcatcctcgatcgggagacgcagaggtcccgcggcttcggcttcgtcaccttctccacggaggaagcgatgcggaacgccatcgagggcatgaacggcaaggagctggacagtcgcaacatcaccgtcaacgaggcccagtcccgcggcggccgtggaagctgcggctgcagcaggtactgtggtggcccgggaagcagcggctacagcggtggccggccgccgtgatggcngctgcagctaccgccgttgcggcggcttcagtgg

SEQ ID NO: 97214 - DNA, 527 bp, Zea mays
cgtatgaggcgactagttaaagcacggcgcggtatggtacaccgctccggaattcccgggtcgacccacgcgtccgttatgtcaccacaaacagaaactaaagcaagtgttggatttaaagctggtgttaaggattagaaattgacttactacaccccggagtacgaaaccaaggatactgatatcttggcagcattccgagtaactcctcagctcggggttccgcctgaagaagcaggagctgcagtagctgcggaatcttctactggtacatggacaactgtttggactgatggacttaccagtcttgatcgttacaaaggacgatgctatcacatcgagcccgttcctggggacccagatcaatatatctgttatgtagcttatccattagacctatttgaagagggttctgttactaacatggttacttccattgggggtaacgtatttggttcaaagccttaccgctttaagttggaggaacttcgaattccccctgtttattaaaaacttttaaggggccc

SEQ ID NO: 97215 - DNA, 524 bp, Zea mays
  unsure (1)..(524): unsure at all n locations
atgatgaactgctatgnttgaactgntngtanagttcaaatctctacttcccctcgacccacgcgtacgttatgtcaccacatacagaaactaaaccaattcctgtatttaaacctgctgtcaatgattagaaacggactatactacaccccggagtacgaaaccaaggatactgatatcttcacagcattcccattaactactcatatccaaactcctcctgaagaatcatgagctgcagtagactgccaatcttctactagcacatgtacaactgtatgcactgatacacttaccagacttgatcgatacaaacgaccatgctatcacatcgagcccgtttctagggacccatatcaatatatctgttatgtagcttattcattatacctatttgaaaacacctctcttactaacaattttactttcattgtaggtaacgtatttcgcatcaaagccttacacactctaaatttccatgatccaccaatttccacctcttattcaaaaactttcaagacccg

SEQ ID NO: 97216 - DNA, 531 bp, Zea mays
  unsure (1)..(531): unsure at all n locations
tgatatgcggnaggntgttctcgcaacggggggnagttttcatccggcccggaattcccgggtcgacccacgcgtccgcccacgcgtccggcagtcccctgatattgctcagggtgtgcacggccacttcaccaagcgcgcccgaggagattggagctggtgaccaggggcacatgtttgggtatgcgactgacgagacccctgagctgatgcccctcagccatgtccttgccaccaagcttggtgctcgtctcacagaggttcgcaagaatggaacctgcccctggctcaggcccgatgggaagacccaggtgacagtggagtaccgcaacgagggtggcgccatggttcccatccgtgtgcacacagtcctcatctctacccagcacgacgagacagtcaccaacgacgagattgctgctgacctgaaagagcacgtcatcaagccagtcatccccgaacagtaccttgacgagaagacaatcttncaccttaacccgtcttgccgcttcgtcatcggcggacctcacc

SEQ ID NO: 97217 - DNA, 528 bp, Zea mays
  unsure (1)..(528): unsure at all n locations
atggttgcnnnttgtatgtattgcatggggggaatgtagcatccgctccggaattcccgggtcgacccactcgtccggacaaatgttgtgaacatggttgacatagcttaagctcttgccaggccagcttcctactcgaccaagtactttggatgtgagcttggtgcacagtccaaatttgatgagaagacagggatttccttggttaatggggctcatgatactgcaaagctggctggtctccttgaggtattcatcaagaagtatgtccaatgttatgggtgtgggaatcctgtgactgagattctcatctcaaagacccagatgatatcatcgaaatgtgcagcctgtgtgttcgtctcagatgttgatatgagggtcaagctctcaaacttcatcctgaaatactcaccagatcatatgaagggcgggaaattcatgaaggccatgttgagagctgtttaagaacgcctgattgaaagttacgcttgtgatgaagagcagaataaactggaaaaggatgctatg

SEQ ID NO: 97218 - DNA, 531 bp, Zea mays
cgaccgagcgctgagttcagttcacagactatgcgtatctaccacctgaatttccgggtcgacccacgcgttcgaccaggcgtccgcccactcgtccgggaggtttgctttcgcgatggtcctgttcatggctggggccgggctgatcgccagggctgacggcgccgtcgctcagcatggcatgtggagcatgatcacccggcccatgttccacagcatgctgagccaccgcggcgacagcgggtgccagggcgccttctacacctacgacgccttcatcgaggccgtcagcaagttccccggcttcggcaccaccggcgactagcagacgcgcatgcgggagctcgccgtcttcttcggccagacgttccacgataccaccggtggatgggcgactgctactgatggaccgtttgactggggatactgacaggtgaaagtaccataacagactgacccactctactatggacgaagacccatacaggttacctattagtacaacttccggcttgcccgggcaagcgctat

SEQ ID NO: 97219 - DNA, 530 bp, Zea mays
ggtccggtgctgtgtactgcatcgatagtagactggctctgctccggaattcccgggtcgacccacgcgtccgcccacgcgtccggtttgacatggcaaatgactaaacgaagaggtgatcaggaagtccacagagtaactgaggagagacctggctggtgtagcgaccctcacctgccaccatgtgcagcgtttgttgaaattatggcaactgtattctcaagggatgcatggcgctgtgtatggcatatgattcagaacgacttggtccatggatggggccttgattttgctcttaggaaatgtgtggagccagcccatgagaaaattggagtggttgactcccagtggattgttcatcaagtcatcccttcgcttggtaaccagggcaaggcagagaatggaaaagcaccatgggaaggggtagagcacgctgtcgtaaagaaggggggatgttccaaacaaggttgactgatgcctaaaaaggcttattacttgaagcccggattcacacaaccaaattcatcggc

SEQ ID NO: 97220 - DNA, 529 bp, Zea mays
  unsure (1)..(529): unsure at all n locations
agggaatggggnaagtgnttcgggatcggggggcagatggtatcgccccggaattcccgggtcgacccacgcgtccgcccacgcgtccgcccacgcgttcgcaccagcctaaattgcatggaggacttgtgatcaaacacaatgcgcaatcaacgatatgctacaaatgctgtgacagcatttatttttcgagaaattgctgagagacaccagctacctatacaggattttgttgttcgcaatgacatggcttgtggttcaacaattggcccaatacttgctagtggtgttggtattcgcactgttgatattggagcaccccaattatcaatgcacagcatcagagaaatgtgtgccgctgacgatattagctactcatatgagcatttcaaggcatattttgaagaatttactgaattggatggcaaggtcaaagtggattactaaagcatatagcacaataggttagctttgttacaagctgtactttatacaaattcgataagcaagtggagaacaaatttgggag

SEQ ID NO: 97221 - DNA, 523 bp, Zea mays
  unsure (1)..(523): unsure at all n locations
agggttgcnnnagttgtgtctatgtatcccgacaagatgttcctgtccggaattcccgggtcgacccactcgtccgatacaaagtcaacaccaatgattaaatagaatttatggctacacaaaccgttgaagatagttctagggctaagccaaaacggactgtcgcacgtagtttattgaaacccttgaattcggaatatgggaaagttgctccgggttgggggactactccttttatgggggtcgcaatggctttattcgcgatattcctatctataattttagaaatttataattcttctgttttactggacggaattttatcgaattaggtttctactaactaaaactatgacttcatagtttttccatctcaaaaaaagcctttctactttaagctccacatttctagacattctggtagttcgaccgtggatttttctgatgtggtatctctggaatattagtgtgtgacttggcagaaatgattctattgattatacttagaaggagcactgttttt

SEQ ID NO: 97222 - DNA, 524 bp, Zea mays
  unsure (1)..(524): unsure at all n locations
cgcgcctgccntggaccgcatcgaacgtatagtacacccgtccggaattcccgggtcgacccacgcgtccgctgatgttgcagtcctcctggacaacgaggctatctatgacatatgcaggaggtcccttgacatcgaaaggccaacctacaccaacttgaacaggctgatctcacagatcatatcatctctaaccacctccctgaggtttgatggtgctatcaatgtggatgtcaccgagttccagaccaaccttgttccatacccacgtatacatttcatgctttcctcatatgcccctgtaatctctgctgagaaggcttaccatgagcagctctctgttcctgaaatcaccaatgccgtctttgagccctcaagcatgatggccaagtgtgacccaaggcatgggaagtacatggcttgctgcttgatgtaccgnggtgatgttgttcccaggatgtcaatgctgaatcggatccctcaggaaccagagaactgtcagtttgtgacggttgccccaccga

SEQ ID NO: 97223 - DNA, 535 bp, Zea mays
cgagcaggtgctgtgtacgtatcgggaagtatgctactctgctccggaattcccgggtcgacccacgcgtccgcttttttatttaatagtctctgactatcattaaataaagggtagagcaattcttttttcgagagagtctagagaaagtgagacaaagtgaagcgaaagagttttctttgtataagaattaggtctatatcatatctaaatagaagggaaatcaaaaagaagggaagtggggattacattggatgaatccttaaggaagacatatcacaaaagaaataaaggctaaagtaagcgctccttgcctttggtttgagcaaaacagattcttgtttcaccgaggaaaagagagaagttctggataaattgacaatgtcaacttgaattgactaattcagttccgcctattccacattaatgggagtacatttatgtttctgctttacgaatatgatatttttttggacaattctaataataggcaggcctaattctaattttgtaattttggaattcaggactttta

SEQ ID NO: 97224 - DNA, 535 bp, Zea mays
  unsure (1)..(535): unsure at all n locations
cgatgagggtctgngactgaccagcactatgacgtactgccgtaccggtccggaattcccgggtcgacccacgcgtccgccaagatctgcgacctggctgacaaatgtgtactggcatcttctggctttcaaggggatagtaaggctctgcagaagaacctagctgccagagaattgctgtaccaacaccagcataataaaaggatgagctgccccgccatggcacagctcctctccaataccctgtactacaagcgattcttcccatattacgccttcaatgtgctcggtgggcttgacagcgaggggaaaggatgcgttttcacctatgatgcagtaggttcctatgagagaaccggttacagtgctcagggaacgggatctactttgatcatgccagtcctggacaatcaactaaaataaccaagtcctctattactccctgtcagggatgctgtcacaccatggtcggagtcagaggccatcgatctagttaaggacgtggtccgttcttgcaccggagaagagacatctc

SEQ ID NO: 97225 - DNA, 540 bp, Zea mays
  unsure (1)..(540): unsure at all n locations
agatactagctgctgatcgtgntagttccctaagnagtgactatccgctctggaattcccggcccgacccactcgtacgccaagatctgctacctgactgacaaatgtgtactggcatcttctgcctttcaaggggatagtaatgctctgcagaagaacctagctgccagagaattgctgtaccaacaccagcataataaaaggatgagctgcccctccatggcacagctactctccaataccctgtactacaagcgattcttcccatattacgccttcaatgtgctcggtgggcttgacagctaggggaaaggatgcgttttcacctatgatgcagtaggttcctatgagagaaccggttacagtgctcatggaacggaatctactttgatcatccccgtcctggacattcaactaaaataaccaggttctcttataactccctgtcaagggattcttgcacaccattgttccgaatcaaaaagcccattgaccctactttatgggcctgttaacatatttgaacctgagaaaagacat

SEQ ID NO: 97226 - DNA, 530 bp, Zea mays
  unsure (1)..(530): unsure at all n locations
tgcttgctgtcctcttgttctnttcaagctacnagtanctccntgcacactccggccgacccactcgtccactttgacatccaatactctctgactatcatttaatatttggtataccaattcttttttctgtagagtgtacacttagtaagacaacgtgaaccaaacacaccttctttctataccaattatccctatatcacatctaaatatcactcaaatcatcaataatgcaaatgcctattacattcaattaatccttaaggaaaacatatcacacacgatataaccgcttaccttaacgctccttgcctatccactgaacaacacacactcttgtttcaccctggtataccgagaactcctggatcacttgaccatgtccacttcaatacactaattcaataccacctattccacatctaatgcgagtacatttatccttcctgctttacgaaacataaaatctttcgaccatttctaataagtatccagcccttattccctattccagtattcacggatccccc

SEQ ID NO: 97227 - DNA, 531 bp, Zea mays
  unsure (1)..(531): unsure at all n locations
agcgggcctgcgttgtgcctgaaacgctcgagtcgcactgacgtactcggtccggaattcccgggtcgacccacgcgtccgcccacgcgtccgggaggtggtacctttgatgtctccctcctcaccattgaggaaggaatctttgaggtcaaggccacagctggtgacacccatcttggtggtgaggactttgacaacaggatggtcaaccacttcgtccaggagttcaagaggaagaacaagaaggatatcactggcaaccccagggctctccggaggctgaggaccgcttgtgagagggcgaagaggactctgtcttccactgcccagaccacgattgagattgactcgctgtatgagggcatcgacttctactccaccatcacccgtgccaggtttgaggagctcaacatggacctgttcaggaagtgcatggaccctgttgagaattgcctgagggatgccagaatgaccagaacaacggtcatgacttggacttggtggtggcttcacttagattcccaaggggcn

SEQ ID NO: 97228 - DNA, 528 bp, Zea mays
agggcacgggatggtgaacgcgagacgaggggtagttttcatccggcccggaattcccgggtcgacccacgcgtccgctcaatttaaagtgagtaaacagaattccatactcgatctcatagatccctatagaattctgtggaaagccgtattcgatgaaagtcgtatgtacggcttggagggagatctttcctatctttcgagatccaccctacaatatggggccaaaaagccaaaaaaataagtgattcgtttttagcccttataaaaagaaaacggattcttgaacctctttcacgctcatgtcacgtcgaggtactgcagaaaaaagaaccgcaaaatccgatccaatttttcgtaatcgattagttaacatggtggttaaccgtattatgaaagacggaaaaaaatcattggcttatcaaattctctatcgagccgtgaaaaagattcaacaaaagacagaaacaaatccactattggttttacgtcaagcaatacgtagagtaactcccaatataagagtaa

SEQ ID NO: 97229 - DNA, 524 bp, Zea mays
  unsure (1)..(524): unsure at all n locations
aggggatgggnnggtggattcagaataggggggtagttggtatcgtcccggaattcccgggtcgacccactcgttcgcccactcgtccgcggactcgtgggtctgcccaaggaccgacgggtttaggtaaatatctggtgcgttccccaacgggagaggttatttttggaggggaaactatgcgtttttgggaccttcgtgctccgtggttagaacctctaaggggccccaacggtttggacttgagtaggttgaaaaaagacatccaaccttggcaagaacgacgttcagcagaatatatgacccatgctcctttaggctctttaaattccgtgggtggcgtagctaccgagatcaatgctgttaattatgtctcccctagaagttggttagcgacctcccattttgttctaggattcttcttttttgtgggccatttgtggcatgcatgaagagcccgagctgctgcagcaggctttgaaaagggaattgatcgcgatttggaacctgttctttacatgacc

SEQ ID NO: 97230 - DNA, 538 bp, Zea mays
  unsure (1)..(538): unsure at all n locations
tgatcatgcgctgtgttcatntnngcangnagtaacgagtctcgnatccgcttctgaattcgcgggtcgacccacgcgtacgccgcatgtgaaccgtactgagtatcagctgattgatatttctgaggatggattggggagccttcttacttcagatggcaacactaaggatgatcttagactcccaactgatgagactcttgtggcccagattaaggaagggttcgaaagcgggaaggatcttgttgtgactgtccagtctgcgatgggggaggagcagatctgcgcgttgaaggatgttggccccaagtaacttccttggctttggagacggaaccctactgtatctcaacttaaatcggaaaagaagtgtatcaccaaaggattgctaccgagacattcacctggcttgagctggcttttgctatagcgtgcaangggttgctgggtgtcgtacctacctgacttatcattatctgtgggtacaatttggacccttgattttctatgctttcatggctctttactttttagaata

SEQ ID NO: 97231 - DNA, 486 bp, Zea mays
  unsure (1)..(486): unsure at all n locations
aggtcgtcntcattcgattttagcctagataatcttccccctgaataccgtccgaccgcacctagctcgattaaccgtctgatatcacttttgatatttctaggatggatggtatgctctttcttaatgggacggctaagatgatcttaactcccaactgatagactctttggcccaataagaagggttctaaagcggaagatcttgtgtgactgtccagtctcatggaggagacagatcttcccttgaagatgttgccccaagtaacttccttgactttggaactaaccctactgttctaacttaaatctaaaataactgatcaccaaaggattgctacctatacattcacctggcttgatcttgcttttcctatacctctccaagatttgcttgctttctttacctccctacttaacattatttttggtttccttcttgacccttaatattctattctttcaatgtcctctactttcttaaact

SEQ ID NO: 97232 - DNA, 531 bp, Zea mays
cggtgccggtgagtgatccaggagactaagactgtcgtaccggcccggaattcccgggtcgacccacgcgtccgcccacgcgtccgcggacgcgtgggtcaaggccggctcccagatcttcagcgagggcgggcgggactacctcggcaaccccagcctgatccacgcgcagagcatcctcgccatctgggcctgccaggtcgtgctcatgggtgccgtcgagggctaccgcattgccggcgggccgctcggcgaggtcgtcgacccgctgtaccctggcggcagcttcgaccccctcggcctggccgacgaccccgaggccttcgccgagctcaaggtgaaggagctcaagaacggccgcctcgccatgttttccatgttcggcttcttcgtccaggccatcgtcaccggcaagggcccgctcgagaacctcgctgaccacatcgctgacccagtcaacaacaacgcatgggcctacgccaccaacttcgtccccagcaactaagctcaacggctatgctatgcaacttt

SEQ ID NO: 97233 - DNA, 533 bp, Zea mays
  unsure (1)..(533): unsure at all n locations
agtagccaggntgttcgtattgatcttgaatgactcagaacggctctcgcgagttccggagtcgacgcatcgcgtcaggctgtcctgcttaacctggcattgataaattatgggctagcctttctgagaaaacggggatgaaaccaatgcaaactccctttttcatgagaaaggaaactatggcaaaatgtgcccagttggcccagtttgatgaggagctttacaaagttacaggtgatggtgaagacaaatatctcatagctacatcagagcagcctttatgtgcttatcacttaggtgatagaatataccctgctgaacttccaatcaaatatgctgggtactccacatgcttccggaaggaagctggttcgcatggaagggacacagctggtatcttcagagtccaccagtttgaaaaaatcgaacaattctgcattacaagcccaaatgacaatgattcttgggagatgcatgaagagatgctaaaaaactcagaagattactataaggagaatgggctaccataccaa

SEQ ID NO: 97234 - DNA, 525 bp, Zea mays
  unsure (1)..(525): unsure at all n locations
gaagacaggtggtctgactgtgtacgctctcatcgatnaacgctccggncttgaattcccgggtcgacccacgcgtccggcttgctgcaggatggcactcctgcttggcttgctgctgctagtagtagcttcgcccgcgatcgctgatgacgactccggtatctactaccagctggctcttatgtggccaggagcatactgcgagcagaccagcgctgggtgctgcaagccgaccaccggcgtctcgccggcgcgcgacttctacataacgggcttcaccgtgcttaacgcgaccaccgacgctgcagtgacgggatgcagcaacaaagttccttacgaccctaacctgattaccggcatccaaggcctgaatcagtactggagcaacatcaggtgccccagcaacaacgggcagagcagctggaagaacgcctggaagaaggctcgcgcctgctccggctcagcgagaaagactacttcgagactggcctctccttccgagccggatccacccactcgttcgcc

SEQ ID NO: 97235 - DNA, 532 bp, Zea mays
agggctgcatggactagtaccgcagacggggggaatatagtattgctctaccggtccggaattcccgggtcgacccacgcgtccggcaactgcaaagcagcaagctctactcttcttctgtactgaacgtgtgactagagaacaacaagcgtgaaccatggcggacgagtacggccgcagcggctacggcaggtccggcgccggcgacgactacgacagcggctacaacagcaagtccggcactgatgactacggccgtggcgaaggtggctacaacaagtcgggcggcgatgacgactacggccgcagcggcggcgatgggtacggcaggtccggcggcgacgactacggccgtggcaccggcggcggtggctacaacaagtccggcggcggagacgactacggccgcagcggcggcgacgactacggccgtggcaccggcggcggcgggtacaacaagtccggagacgacggctacgacagcgggtacaacagatcgggcaccaccaacgacgacgaatacggtcgtggc

SEQ ID NO: 97236 - DNA, 522 bp, Zea mays
atgggcccgtgggtatacagaacggggggagatagtattgctctaccggtccggaattcccgggtcgacccacgcgtccgcccacgcgtccgcccacgcgtccggaaaaagtttcgagaaagctgtaacgcactatgtgtacaaacctaagagatccacattgaaactctatgatttcatgtgtggttctcttaggtttctacacatagtgtctcacaactttctccaaacattctaaattttttatcacagactctacatatgatatcatgacatgtggacaagtttcatgattttctaagtttgtttgtgttttataaattttttaaacagttgtatggcaagttcacggccatgttgagtgagcatggtgctcgaagtttccggtccgctcctgaaatcggtcgtaacttgtgctatgtagcatggatatcatttttgcattcacggttttccaagtttcgagtgacctgcaattcaaatctgaattttccgaagaaattcaaataaacaaactaaatt

SEQ ID NO: 97237 - DNA, 534 bp, Zea mays
  unsure (1)..(534): unsure at all n locations
agtagccagagggtgtgtacgagacccgcagatgactcagcgctcgctcggaattctccgggtcgacccacgcgtccgggtcgacatggctcgcacgcaatctgccgtagcggtcgccgtggtggccgcggtgctgctgctggcagcggcggcgacgacctcggaggccgccatcacctgcgggcaggtgagctccgccatcgcgccctgcctctcctacgcccgcggcacggggtccggcccctccgcgtcctgctgtaccggcgtcaggaacctcaaaagcgccgccagcaccgccgccaacaggcgcgccgcctgcaactgcctaaagaaacgccccaggggcgttagcggnctaaaacgccggaacgccgacggcatcccttccaagtgcggcgtcagcatcccctacaccatcagcacctacacggactgctccagggtgaactaaaacctacaccacgcgcgacaaccgccgcctgatcgattcgaccaaccattccggcggcgccgccgcccggatcattgatcggc

SEQ ID NO: 97238 - DNA, 531 bp, Zea mays
  unsure (1)..(531): unsure at all n locations
tggtggcagtgagatcgatgaggaccgactctcattcgannnccgctccggncttgaattcccgggtcgacccacgcgtccgcccacgcgtccggagtcctacgagcagtcgcacgcaagtgtcaagagacgaaacggtcgagatggctcgcacgcaatctgccgtagcggtcgccgtggtggccgcggtgctgctgctggcagcggcggcgacgacctcggaggccggcatcacctgcgggcaggtgagctccgccatcgcgccctgcctctcctacgcccgcggcacggggtccggcccctccgcgtcctgctgtagcggcgtcaggaacctcaagagcgccgccagcaccgccgtcgacaggcgcgccgcctgcaactgcctcaagaacgccgccaggggcgtcagcggcctcaacgccggcaacgccgncagcatcccctccaagtgcggcgtcagcatcccctacaccatcagcaccttcaccgactgctccagggtgaactaaaacctagaccacgcgcgacgac

SEQ ID NO: 97239 - DNA, 529 bp, Zea mays
  unsure (1)..(529): unsure at all n locations
tgggagcnaagggtaggacgaatacggcgggaatatcgtactgctctaccggtccggaattcccgggtcgacccacgcgtccgcccacgcgtccgcccacgcgtccgaggcactttcatctgtggcctctgcgttcgagatcgatctgagctggcaccgtcccacttcgccatggcggaagaccggagccccaagcccatccactgcaaagcggcggtgtgcagagccgccggcgagccactcaccatcgaggagatcgtcgtcgacccgccgaaagcgtacgagatccgcatccgggtcgtctgcacctcactatgccacaccgatatcaccttctggaaagctaaggaggcaccggagtatccaagaatactagggcatgaggcgtacggcgtagcggagagcgaggaggagcacgtggagggcttcgaggcgggggacaccgcggtgccgacgttcctggggcagtgcgagcgctgcgactactgcgcgtatgagcacagcaacgtgtgcgacgcggtgccggtcc

SEQ ID NO: 97240 - DNA, 539 bp, Zea mays
  unsure (1)..(539): unsure at all n locations
ataattgcgtgtgtatgncctttgccngccgagccgtgcagcacctccttaatttctcgggtcgacccacgcgtccggcacacagctcgcacctaaagcagcgatctcttgatttttacaatccaacctaacgaccaggtcccgtaccattttcaaatatcactagagctaactaccttgacatatctatcttacaactcctaatttctaaaagatccataagacagactttcactgcttctattcccacttcaaatcaaaatcaaacgaacttttaccctcaagttccacactatatttctcttcctcttgatctcattttaccacaccttctttatcttttaacaaatgtcccactacattcaaacttcccacctgacaatgtcttccttcactatctaacctactaaaccaagctttttatccaaaaaaaagtacacttcctcaatttcaatccacttaattattaaatttcgttaatattaatataattcactttctccctaattcttacacttatcctacactctctaaatatt

SEQ ID NO: 97241 - DNA, 532 bp, Zea mays
  unsure (1)..(532): unsure at all n locations
agggatgccagagtgggtgaccgattaccgatgcactagcactgccgtaccggtccggaattcccgggtcgacccacgcgtccgaagcaagccatgtggaggagggctttagcgatggtcctgttcatggctggcgccgcgctgctcgccggggctgccggcgccggcgcgcagcagggcgtgtggagcatcatcacccggcccatgttccagagcatgctgagccaccgcggcgacagcgggtgccagggcgccttctacacctacgacgccttcatcgaggccgccagcaagttccccggcttcggcaccaccggcgacgagcagacgcgcatgcgggagctcgccgnctcttcggccagacgtcccacgaaaccacccgtggatgggcgactgctccggatggaccgtttgcctggggatactgccgggtgaaggaaccagaacagacggacccaccctactatggacgaggacccatacagttactcataagtacaactaccagccttgcgggccagcgctgaactga

SEQ ID NO: 97242 - DNA, 530 bp, Zea mays
  unsure (1)..(530): unsure at all n locations
atgggtgcnanatggtgtttcggatacgggggagggaagagaatgcttgtaccggtccggaattcccgggtcgacccacgcgtccgctcggtggtcgacgactctgggatggacgccgtccagaagcgcctcatgttcgaagacgagtgcattttggtggacgagcaggacaatgttgttggccatgagtcaaagtacaactgccatttgatggaaaagattgattctgagaatctgctacatagggcatttagtgtgttccttttcaactcaaaatatgagctgctacttcagcaaaggtccgcgacaaaggttacctttcctttagtttggaccaatacctgctgcagtcaccctctgtaccgtgagtctgagcttatccaggagaactaccttggtgtgagaaatgcagcacagaggaagctactggatgagctgggcatcccagcagaagatgccccagttgaccaattcacccctctgggccgaatgctttacaaggcaccatctgatgggaaatggggggagca

SEQ ID NO: 97243 - DNA, 538 bp, Zea mays
  unsure (1)..(538): unsure at all n locations
aganatggtaggtgtaatcgaacaggaagagtacgtgaactgcctccggaattcccgggtcgacccacgcgtccgcccacgcgtccgggaggtgagccaccggaagcggagacgtgagtagtcgaccaaccccgtgggtccggcgactccggctgcggcgcggcgtgctagatcgctaccgaccatggtggtggaggagatcgccgagggggtgaaaaacctcaccgttaccggagatgcggcggcttcaggcggagaggggcagaggaggggcggcggcggcagcagcaaccgcatccaggtgtccaacaccaagaagcccctcttcttctacgtcaacctcgccaagaagtatatgcaacagcacgacgatgtagagctatccgctcttgggatggccatagcaacagttgtgaccgtggcagaaattctgaagaacaatggatttgccggtgaaaagaaaattaagacctctactggtgaaataaacgacgaatcaagagggcgtccattccaaaaagccaagattgagatnatc

SEQ ID NO: 97244 - DNA, 527 bp, Zea mays
  unsure (1)..(527): unsure at all n locations
tggatgcnnggaggtgaacggcaacagcgggatatagtactgctctaccggtccggaattcccgggtcgacccacgcgtccgcccacgcgttcgcggacgcgtgggcaagcacaagcgctctctagcaatggctcgtgagggggtccgccctagcgacgcccagctactaaaggcacaagccgacatatggcggctcagcctctcctacctcacgcccctgtcactgaggtgcgccgtggagcttggcatccccacggcgatctaccgccatggcggggctgcctcagccgctgagctggtcacggcgctgtctctcccctacactaagctgccgttcctccgccgtctgctgctgctcctcgccgcgtcgggcgtgttcaccgtcgacaagcagagcacggacgaggagcggtaccgcatcagccacgtgtcctacctactggtggacggcatccctcacgaggaccacatgaaccacaccgatctggtgctcacctgcacctcgacgcgctacatcgaggcggng

SEQ ID NO: 97245 - DNA, 531 bp, Zea mays
gtggaatggaatgtttgttggaggtgggggaacggattcgttccggaattcccgggtcgacccacgcgtccgctgctccctctccgcttctctccactatcctaccaggcaccactcgcatcgtgtgctcagtgagatccccgtcccgcatttcctaaggccaggttagttggcattgaagacgatgactgcttctgcagctgctggtgtgcagatggtggctgcacgcccttgcatttcggcctcgccaggaattcttaccgcacgggtagcagtttctaggactgattgcatgctcagtaccactgctacattccccaaaatcagctgctcctggcctctaaggtttaagcgcaatgatgttgttgtaagagcaatatcggaagagtgtggcccgcaagggcttcccattgatctcagaggtaaaagggcattcattgctggagttgctgatgataatggctatggatggggcaatgcgaaggcacttgctgcggctggtgctgaaattcttgtgggtacatgggtgcc

SEQ ID NO: 97246 - DNA, 531 bp, Zea mays
  unsure (1)..(531): unsure at all n locations
ttcaagttatgatgtttcggaggaggagatcgtcctggaattcccgggtcgacccacgcgtccgcccacgcgtccgcccacgcgtccgggaggagggctttagcgatggtcctgttcatggctggcgccgggctgctcggcggggcttgccgggcccggcgcgcagcaaggcgtgtggagcatcatcacccgggccatgttccagagcatgctgagccaccgcggcgacagcgggtgccagggcgccttctacacctacgacgccttcatcgaggccgncagcaagttccccggcttcggcaccaccggcgacgagcagacgcgcangcgggagctcgccgncttcttcggccagacgtcccacgaaaccaccggtggatgggcgactgctccggatggaccggttgcctggggatactgccgggtgaaggaaccagaacagacggacccaccctactatggacgaggacccatacagctaacctataagtacaactacaggctcgccgggcaaaccccttaacctgaccc

SEQ ID NO: 97247 - DNA, 535 bp, Zea mays
  unsure (1)..(535): unsure at all n locations
atttagcntaatgttgttggatatgttggctgagaggcgtgtatgtccggtctggaattcccgggtcgacccacgcgtccggggaaagaagggtggcaagaaaaagaccgtcgaccctttctctaagaaggattggtatgagatcaaggcaccgtcggtgttcagtgtgcgcaacatcgggaagactctcgtatccaggacacagggtaccaggattgcttctgagggtctgaagcacagagtctttgaggtttgcctagctgatcttcagggtgacgaggatcaagcttacaggaaaatcaggctccgtgctgaagatgtgcagggcaggaatgtgctcacaaacttttggggtatgaattttaccactgataaattgagatccctagtgaagaagtggcagacattaatcgaagcccatgttgatgtcaagacaaccgacaactacatgttgcgtttgttctgcatcggcttcaccaagaggcgcccaaaccaggtcaagaggacctgctatgctcaggcatcccagattcgc

SEQ ID NO: 97248 - DNA, 529 bp, Zea mays
  unsure (1)..(529): unsure at all n locations
aggaatgcnnaaatgggtgtagtgaatgttcttctcaggaggagtttgttccggtctggaattcccgggtcgacccacgcgtccggaatcgccttgtgtctcaggtgatctcatctctgactgcttccctgaggttcgatggtgcgctcaatgtggatgtgaacgagttccagaccaacctggttccttacccgaggatccacttcatgctctcctcctacgcaccggtgatctcttctgcgaaggccttccacgagcagctgtctgtggcggagatcaccagcagcgcgttcgagccggcttccatgatggtcaagtgcgacccacggcacggcaagtacatggcttgctgcctgatgtaccgcggcgacgtggtgcccaaggacgtgaacgccgcggtggccaccatcaagacgaagcgcaccatccagttcgtggactggtgcccgacggggttcaagtgcggcatcaactaccatgcgccaacagtggtgccgggtgccgacctcgccaaggtgcatcgtgccgt

SEQ ID NO: 97249 - DNA, 538 bp, Zea mays
  unsure (1)..(538): unsure at all n locations
cggaggaggtataaacgcatctcgaagtatagttgaacagctccggaattcccgggtcgacccacgcgtccgcggacgcgtgggaccgcggcgacagcgggtgccagggctttctacacctacgacgccttcgtcnagggcgccagcaagttccccggcttcggcaccaccggcgacgagcagacgcgcaggcgggagctcgccgccttcttcggccagacgtcccacgaaaccaccggtggatgggcgactgctccggatggaccgtttgcctggggatactgccgggtgaaggaacagaaacagacggacccaccctactatggacgaggacccatacagctaactcataagtacaactacaggctcgccgggcaagcgctgaacctgaacctggtgggcgacccggacctggtggcgagagaccccgtggtagccttcaagacgggcatctggttctggatgacgccgcaattcgcccaagccctcgtgccacgccgtgatgaccggcgactggagggccttcgccaccgaccgc

SEQ ID NO: 97250 - DNA, 576 bp, Zea mays
  unsure (1)..(576): unsure at all n locations
tgatgccattaggctatggcatcnacacgacgattacacnatctgctgccggaattctccgggtccgactccacgccgtcncgagccagggcatggttttggcgaagccaaaagcccactgagcacatggaatgaggatgcgtgccgcggtccggcatcgggcgatctgcgcccgagcgtgctgtgagtggtgcctgcatcctgctcactgctaactggtnngggcgtctgcgccgggcgcccgtgtaccataggtaggcgaacctggaacgcctggggccgtgccgtcgccgtccaaagcccgacgtctacnaagcgctgggccaaatccatccacttcgcgctcggcgactccatctggttcctgtacccgccgagccaggactcggtgctgcagctagcgccggcggccttcgcgtcctgcgacctgtcgcgccccgtggccaggctcgccgacggcaactccttattcaacctcaccgcgcccggccgcgcctactacgccagcggcgcgcccggccactgccgcaggggccagaagctttgggtcgacgtgcccttgcccaacggcacctn

SEQ ID NO: 97251 - DNA, 544 bp, Zea mays
  unsure (1)..(544): unsure at all n locations
tggatgcaggtgtntcaacgtagcacagcacgcctacgcancggctgccggaatttccgggtcgacccacgcgtccgcccacgcgtncgcccacgcgtncgcccacgcgtncgcgtcggttcacttctccaggtaaggaaagggttcgtactcatggcgccgccgcagccaaagtcgggcctcttcgttggcatcaacaagggtcatgtcgtcaccaagcgcgagctgcctccccgcccgtgccaccgcaaggggaaatcaacgaagagggtgtctatggtcaggggcctgatcagagaggttgctgggtttgctccttatgagaagcgtatcactgagcttctgaaggttggcaaggacaagcgtgccctgaagcttgctaagagaaagcttggaactcacaagagggcaaagaagaagagagaggagatggccggcgttctcaggaagataaggtcggctggtacgcacacttgacagaagaaatagagagcctttcaagttcatggagcctgcccgagattatgttccagtgtctgatttt

SEQ ID NO: 97252 - DNA, 540 bp, Zea mays
  unsure (1)..(540): unsure at all n locations
atgtgaggtgctctcaactaggactgacgtacatcgaccgccgtaccggtccggaattcccggatcgacccacgccggaagaaagaagaacctgtaaaggcattatcagatatgtggaaggattttgattcccgagttcgtcgatataaagttcttcctcctctttgtgctgagttacgcaacatggttatgcagccaatgattttgcctatggttctaacaatagcagaatctcaggataaaggggattttgaacttgcaacactgcctgcgcttgttccagtgtttacttcagcatcaggtgaaactctacttttgcttgtgaagcatgcagatctcatcattaacaaggccacacaggaacatttgatatcacatattcttccaatgctggttcgggcttatgatgacaatgatccccggttacaggaagaaattctgcgttcaacagtatcactgnttcgtcaacttggcaccaagctagtcaaaccagctggggcttctcgggtacatggattaccttttaggaccccagttgcc

SEQ ID NO: 97253 - DNA, 523 bp, Zea mays
tggtgcaggagggtataccagaacgcggggcatatgtactgctccaccggtccggaattcccgggtcgacccacgcgtccggcgattcctagggcctgagatcttcttcaacccagagatatataacaacgacttcaccaggcctttgcaagttgttattgacaagtgcatccaatcatctccaatcgacacaaggagggctctttataagaatattgtcctgtctggaggctcgactatgttcaaagatttccacaggaggttacagcgggacctaaagaagatagtggatgcacgggtccgtgcatctaatagccggcttattagtggggatgctaaggcccagcctatagaagtgaacgtggtcagtcatccaatccagagatatgcggtatggtttggtggctctgtgcttgcttcaactgccgaattctacgaggcttgccacacaaaggcagagtacgaggagtacggtgccagcatctgccgaacgaatcctgtcttcaaagggatgtactgactc

SEQ ID NO: 97254 - DNA, 539 bp, Zea mays
  unsure (1)..(539): unsure at all n locations
nagcnncntnnctgtcggtagtnaccctacgcacttacctaccggtccggaattcccgggtcgacccacgcgtccgatcatcttctccgatccatcaacaatcgccgagagcgatcgagagataaataaagatgaagaaagtggcatcattgtcagccgttctcttcgtgctagccctgacgctagtttgtgccccgctgatagcagaggcaaagaagaagagagtcgccgccgccgccgccgaggagaagaaggtgcaggacaacttctgctcgacgctgtgcgaaggcaggaaggggatggacctggtggtgtgcaaggagtcctgcgacctctcacagcgctccaacctggtgctgtacggccggatccagtgcaagggcaagtgcaccgagcagaagggcatcaccgcgccgcagatgaaggtgtgccaagaggcgtgcgacatgtactacntggtcaaagcngctgaggtcaccaaggcctgcaacancacctgcgccaaagagaagcaggctctgcttaacgagaacttgagn

SEQ ID NO: 97255 - DNA, 532 bp, Zea mays
  unsure (1)..(532): unsure at all n locations
agcttctaactgtcgctggttagtnctcggatgtatgcactgtccgaattcccgggtcgacccacgcgtccgccaagcccgacggagacggcgacggcgcggcgagcaggcggcgggcgggctgaagcgactggtgggcgagaccaaggacgcgcacggcgtgaagcaggtgtacgtgtggcacgccatggccgggtactggggcggcgtgacgtcgacngccgggacggccattgaacgctacgagccggcgctggcctaccccgtgcaatccccgggcgtgacgggcaaccagccggacatcggcatggactcgctgtccgtccttggggcttggcctggtgcacccggtccgggtgcgggacttctacggggagcttcacgcgtaccctggctcctgcggcgtttacggcctttaaggtggacgttccgaacatattcgagacgcttgtctctggccaaggcgggcgttttagaggaatccaacttacctacccgtgcatccgacgtcataacttttctttggggcacc

SEQ ID NO: 97256 - DNA, 538 bp, Zea mays
  unsure (1)..(538): unsure at all n locations
agcagatgagtgcctctgtagtcgatagctactgcantnacttaccggtccggaattcccgggtcgacccacgcgtccgcccacgcgtccgcggacgcgtgggctgacgcgtgggcgcgtagccaaggtcaccggggggggggccaacaagctgtgcgggatctaagttgtgcgcacctccatcgcgcgcgtgctgaccgtcatctcgcagaagcagaagtcggcgctgcgtgagagcgtacaagaagaagaagctgctcccgctcgacctgcgtcccaagaagacccgcgccatccgcacgcgcctcaccaagcaccagctctccttgaagaccgatagggaaaagaagcgtgagaagtatttccccatgatgaagtacgttatcaaggcctatatcagtgaaagaacatttatcctgtcaagttttgctcaaaagctacttgaatttgatacaaacctatctccatccaagtactatgtagatgatcaactgcatgattaacaacgagtacttttggctaaaaaataaaaaaaagg

SEQ ID NO: 97257 - DNA, 540 bp, Zea mays
  unsure (1)..(540): unsure at all n locations
tgaggccggtgtgaggatcgataaggaagcttgacggactgcacgtaccggtccggaattcccgggtcgacccacgcgtccgccggagaattcctcccttgccccgccgtcgcatcctcttcgaagttcgaatcgaatcgcgccgcgatcacccacctcatggcggacaaggagcctgtcgtggagcggccagaggcgggtgaggaggaggacgcctcagccgccgccgccgcgggggaggaggaggacacgggcgcccaggtggctcccatcgtgcggcttgaggaggtagccgtcaccaccggcgaggaggacgaggacgtcctgctcgacatgaaggcgaagctgtaccgattcgacaaagacggtaaccaatggaaggaacggggcacgggcgctgtcaagcttctcaagcacaagcagaccggcaaggtccgcctagtcatgcgccaggctaaaacgcttaagatctgcgcgaaccacctcgtggccttcaccacgaagatgcangagcatgncggcagcgacaagtcgtgtgtn

SEQ ID NO: 97258 - DNA, 537 bp, Zea mays
  unsure (1)..(537): unsure at all n locations
agcggtctgacgtgagcctagctcgacgatcgcaatgacttacccgtccggaattcccgggtcgacccacgcgtccgagttgcgtgatgtcaaggtgcaaaacatcgagacaggcaaggttcattctgtactccatatagaatatcctgattggcccgaccatggagtggcaactaatacagatgctgtacgggaaatctggaaacgactgcatcacattccaacggaacatcctatagttatccattgcagtgcaggaatcggaaggactggtacttacatcacaatccatactacaattgagcgaattcttcttggagataaaagctcttacgatcttgccaaaactgtaaagaattttagatcccaacgacctgngatggtccaaacagaggaacaatacaagttctgctacagggcaattgctgacgagctgaaagacctgctaaattcagatcattgaggtgggtcacatgagacggacagcaacgctgntagcatttattacgttnttttagacatttctatgtgaaagaa

SEQ ID NO: 97259 - DNA, 535 bp, Zea mays
  unsure (1)..(535): unsure at all n locations
agcgtctgggtgcgaatgatctagatcgcatgacttaccggtccggaattcccgggtcgacccacgcgtccgcctgacaagaagtctgataacaagatgccaatgactcctagacgaaaatcaccagtggaccagaaggtgccacctaaagatgatagccagaaagctgctaggaagagcaccccaagtgctccctcagatgacgctgacaaagcagctaagaagcatattcctactgtaaagagaacatctggggtcttaggaaactcgaatgttataaatctagtgaagattcctcccaaccgcaaaaaactaacagatattagcacttcatggacatcactccctccatcacttgccaaactaggaaaggagcttcttaagtacagggaatcggcacaaatagctgctgctgaagccatgcaagaagcttccgctgcagagagcttgctcagatgtttgagctcgtacgcggaggtgagctccacggcggatgagcacaacccgcagccagccgtagagaagttcttcaccn

SEQ ID NO: 97260 - DNA, 535 bp, Zea mays
  unsure (1)..(535): unsure at all n locations
tgaggtctgngtgtgcaatcnngaggatgcactgacttaccggtccggaattcccgggtcgacccacgcgtccgcccacgcgtccgcccacgcgtccgatgaagtgcttaagatatctgttcctcgaaattatggagctggaaaacttgaagtgtatgaccatgatatgttctcagccgatgatatcatgggtgaagcagagatagatctccagccaatgatcacagccgccatggcctttggagatacttcacgtcttggtgacatgcaaattgggaggtggttcatgaccaaagacaacgccctgatgaaagatagcacggtgaatgttgtggcaggtaaggtaaaacaggaggtgcacttaaagctacagaacgtagaatcaggtgagttggagttggagctagaatgggttccgatcctctagactaatgataactcccctgatctttgtctaaaaatctatactcaagatgcatcgatgtttccaagctgtccacttgatggtcttggacatttttgctggatggtttga

SEQ ID NO: 97261 - DNA, 534 bp, Zea mays
  unsure (1)..(534): unsure at all n locations
gtgccgctgaggcttttncgttgccctaccgcactgacgtaccggtccggaattcccgggtcgacccacgcgtccgcctcgctcaggggagcggaggagacgcctggcctcgtccacctcacgcacatgacggacctgcagtcggtctaccacctgcggatcggcttcgcctccgtggcgtccagaccgtctgccaccagcgccatgtggtggtacatgtgggtgctgtggcccgtggcgtggctgtccatggcgctcgcgtgggcctacgggtcctccgcgttcgtcgtcgagaggatcaaactcgggaagctgaggatgcaaacgtgggcagtgccaagatacaacttccagtacggcctgagctgggagagagaatcgatcaacggcctcatcgaaagggcgatactagatgctgatgcgagaggtgtcaaggtgctcagcctaggactgctaaaccaggcgaaacagctgaacggcggctgctagctgttcatgcacaggtatccgaagctcaaaattcgcctcgtcgan

SEQ ID NO: 97262 - DNA, 538 bp, Zea mays
gagtgccttactgaggctggtacgttacctcaccgcactgacgtaccggtccggaattcccgggtcgacccacgcgtccgcaacaacccggagctcaggaaccggtgcggagcagggatcgtgccgtacgaactgctcaagcccttctccaagccgggagtcaccgggaggggcatccccaacagcatctccatttgacccgtccgtcctctccatccaatgggggtttgccttattgcgtgcacgctagctagctgcttggaaataaaaataattaaaataaaaggtctcgtctgtactattgtattgtaccatggatcatatcgtacatgttgtgtcaatgcaaagaggcacgtttgagttaccattaaaaaaaaaaaaaaaagggcggccgctctagaggatccaagcttacgtacgcgtgcatgcgacgtcatagctcttctatagtgtcacctaaattcaattcactggccgtcgttttacaacgtcgtgactgggaaaaccctggcgttacccaacttaatcgccttgcagt

SEQ ID NO: 97263 - DNA, 536 bp, Zea mays
  unsure (1)..(536): unsure at all n locations
agagtccttctgacgactgttcgtnatcgactgcactgacgtaccggtcctgaattcccgggtcgacccacgcgtccgggcattgtaagtggcagagtggccttgctgccacgatccactgagatccagccccgcgtcggacggattcgtctgcaaaggattcagcacgccgcccgttgggaagggagcttcgaggcggcccgccgcggtgcgtccgccgggcgggctgagccaatggcacgggcccttggggcgcgaacgccctaactctagatcgcgagcggccgctctagaggatccaagcttacgtacgcgtgcatgcgacgtcatagctcttctatagtgtcacctaaattcaattcactggccgtcgttttacaacgtcgtgactgggaaaaccctggcgttacccaacttaatcgccttgcagcacatccctctttcgacagctggcgtaatagcgaacaggcccgcaccgatcgcccttcccaacagttgcgcagcctgaatggccaatggtacgcgccctttagccg

SEQ ID NO: 97264 - DNA, 536 bp, Zea mays
  unsure (1)..(536): unsure at all n locations
agcgttgagtgagcccagtcngcgactcgatgcacgtaccggtccggaattcccgggtcgagccacgcgtccgggagagggagggtttcctcaaagagaacctgaacccaaacccaagcagagaacactagcgtggcctcaccagggcgggcgtccatcccagcagccatggcgatggcgtacaagatggcgacggaggggatgaacgtgaaggaggagtgccagcgctggttcatggagatgaagtggaagaaggtgcaccgcttcgtggtgtacaagatcgacgagcggtcgcgcgccgtgctggtggacaaggtgggcggccccggggaagggtacaacgagctcgtggccgcgctgcccggcgacgactgccgctacgccgtcttcgacttcgacttcgtcactgttgacaactgccagaagagcaagatcttcttcatcgcctggtcaccggcggcgtcgaggatcagggccaagatcctgtacgcgacatcgaagcaaggcctgcagcggctgctggaccgngtccacta

SEQ ID NO: 97265 - DNA, 520 bp, Zea mays
tgtccggttgagactgcgactgtgcaatagcattgtcgttctcggtccggaattcccgggtcgacccacgcgtccgcccactcgtccgcccacgcgtccgtcgcattccacccgcccccttttcgcgtgaagtcgcgtgcgccgcggatcctgccgtcacgaatggaggcgtggccggacgatttccgctgccccatcacgctggaggtcatgactgacccggtcatcctcccctccggccacaccttcgagcgccgcatcatccagagctggctcgacggggggcacctcacctgccccgtcaccaacctcccgctgccgccctccccgccgctcatccccaaccacgcgctgcgccgcctcatagccgtcgtctcgccttccgcggcggcgtctctcgtccctgctgagggaggggctcacgcgaggcaagaagcggtgtcggcggctgctgctgcagctgtgccagcccggcccgcgttgtccgtgccggcgcttgtgaggctggccaagtccggct

SEQ ID NO: 97266 - DNA, 536 bp, Zea mays
  unsure (1)..(536): unsure at all n locations
tggcgtctgagtgcggcagtcagcggctcgcatgcacgtaccggtccggaattcccgggtcgacccacgcgtccgcctaaaggtgctgttcccgggcctgctggccaacgtggccagcggcggctagaagctccaggagcggctggtggccgaggtccgcggcgccgtggccgacgccggcggcaaggtcaccctcgcggcggtggagaggatggagctggccaagtcggtggtgtgggagtcgctgcgcctggacccgcccgtcaagttccagtacgggcacgccaagaaggacctgctggtggagagccacgacgcggtgttccacgtgaggaagggcgagatgctgatcggctaccatccgtgcgccaccaaggacccacgcgtgttcggcgacaccgtcggtgacttcgagcccgaccgctttctcggcaggagggcaccaagctgctgcagtacgtgtactggtccaacggccgtgagaccgagaaccccatcgttgacaacaagcagtgccccgtgaagactttgcggtn

SEQ ID NO: 97267 - DNA, 533 bp, Zea mays
  unsure (1)..(533): unsure at all n locations
tgtgccgctgtggaattgaagtnatcgatcgtactgacgtaccggtccggaattcccgggtcgacccacgcgtccgggagatatcacgggagctttatgagttttgcctggaccagagctatgcagatcgtaagctgatcgcaaagtggagaaagccaggatacgagcgcctttgctgcctccggtgcatacagacacgtgaccacaactttgcaacgacttgtgtctgccgagtccccaagcatctgagggaggagcaagtgatagaatgtgtccattgcggctgcaggggttgtgccagcggtgactaatcttgtcagttgtcatcatgttgttgggctcacgactcatcatcaccatcctaaccacattaaggcttttcggttagctctcaatccatgtggattgagtaggattggatgagtttgaatcccaaacaagtcaaactttttaagaatttttttcaatctcatccaatccatgtgtattgggaataaccgaacaaggccttagatgtctcgtgagcatggatn

SEQ ID NO: 97268 - DNA, 532 bp, Zea mays
  unsure (1)..(532): unsure at all n locations
gtcctgngtgatgctaacctgccacgtcaagacctaccggtccggaattcccgggtcgagccacgcgtccggaccacaacacgaagaagcgtactcgtcgccggaaggaaaggcgcggagcaagatgtcgtgggaggcgtacgtcgacgagcacgtgatgtgcgagatcgaaggacagcatctcagcgccgtcgccatcgtcggtcacgacggcagcgtttgggcgcagtccgagagcttccccgagttaaagcctgacgaggttgctggtatcataaaggactttgatgaacctggtactcttgcaccaactggtcttttcgttggaggtacaaagtacatggtgatccaaggtgaacctggagttgtcatccgaggaaagaagggcactgcgggcattactatcaagaaaaccggcatgtccttgattattggtgtctacgacgagccaatgacttcaaggcaatgcaacgatgtggtggagaggctcggcgattacctgatcgagcanggcttttaaaggtcgtcatgn

SEQ ID NO: 97269 - DNA, 527 bp, Zea mays
  unsure (1)..(527): unsure at all n locations
ggtaggtgtggctgaagaagattaccgacttacatagcattgtcgtaccggtccggaattcccgggtcgacccacgcgtccgatcctgttcaaggtcgacgacctcttcatccgctccttcaagcgctacgccgacctgccggacccgagctccaggcccatgacgctgcacgccacgctgtgggacggcagctactgggccaccgagaagggcagggtcggcatcgactggtccgacgcgcccttcgtcgtctcctaccgcagctactacgccagcgcctgcgtcagcggcggcgcgtcccgggcagccggcagcggcgggtggatgaacaggcagcttgacagcgccgagtggggcaccgtcaggtgggcggagcgcaacttcatgcgctacaactactgccaggatgggtggaggttcccgcaaggcctccccgccgagtgcgcccgccactgatatgcgtccgccggttaattcttcgtcgatccagcttggcgtcgtttgttctttgttttgttgggtattn

SEQ ID NO: 97270 - DNA, 524 bp, Zea mays
  unsure (1)..(524): unsure at all n locations
gagtcccgatgaaacctcgtacgtnaggctaagccactgacgtaccggtccggaattcccgggtcgacccacgcgtccgatcctgctcaaggtcgacgaccttttaatacgctacttcaagcgctacgcctacgtgccggaccggagctacaggcccatgacgctggacgccacgctgtgggacggaaggtactgcgcacaccgagaagggcatggtaggcatcatactggtccgacgcgcccttcgtcgtctcctaccgcagctactacgccagcgcctgcgttagcggcggagcgtgccgtgcagccggcagcggcggctggatgaacaggcagcttgacagtgccgagtggggcaccgtcaggtgggcggagcgcaacttcatgcgctacaactactgccaggatgggtggaggttaccgcaagggctgcccgcccagtgagcacgacactgatatgcgttagtcggctaactagttcgagatccagattgtcggagccagttctttgacgtggtggcgat

SEQ ID NO: 97271 - DNA, 537 bp, Zea mays
  unsure (1)..(537): unsure at all n locations
tgcggctgnctgcggacttgcagctacgctacgtactgcacgtaccggtccggaattcccgggtcgacccacgcgtccgcccacgcgtccgcccacgcgtccggtcacgtcaccgttcgaggagctgcacggggcgactctgttccacgagagcatggggagcctcgacgcagatttccacgacatggcgagcgaggccttggacgcccacgacaacttcggcatctagatagctatgcgggagttcagggacttgttcgaggggatccagaccatgacctactgctgcggtaacttcggtgatgacaagggtgccagggccattgtcaaagccttctcacacataaaatgcactgtgctggcccctcccaagatcattgccaccaaaccggtcgatggagcgaagactaactatgtcgaaggtgacatgttcagtttcattccacctgctcaaactgtcgtgctaaagctagtgctgcaccacctgacctatgaggagtgcgtcaagctcctggcttaatgccggaaggcgattcc

SEQ ID NO: 97272 - DNA, 551 bp, Zea mays
gtatttcttaatctgagtccaggtacgactgacgtaccggtccggaattcccgggtcgacccacgcgtccgcttaattgaccgtgtagacattacgaactggattcgcaacatagagcagcacgcatctgataaggtcaacaagatcttggtgggcaacaaggtcgatatggatgcgaagcgggtggtctccacagctcaaggtcagaagctcgcagatgaatacgggatcaagtttttcgagacgagtgcgaaaacgaaccgaaatgtggagcaggtattcttcgccatggcaagggacgtgaagcaaaggctcaccgagaccgttgccgctgcggctgatcccccgaccattcagattagcaggccagaccccgaccaggctgacgcaaccttctcgcggcggtggccgtcgttctgctgtaaccaccgatctggccacttgccgggcgaaattcaagcagcgtgaaatcttgatgcgcctgactggacctgttagggtacttgatttgtcccctggtgtaactttaattcccgtgttaaagcaaaccc

SEQ ID NO: 97273 - DNA, 589 bp, Zea mays
  unsure (1)..(589): unsure at all n locations
tcgtgcagttgagatcnatcgactgtcctaccggtcctgaattcccgggtcgacccgcgcgtccggcggcagcttcgacccgctcggcctcgccgacgaccccgaggccttcgccgagctcaaggtcgaggagctcaagaacggccggctcgccatgttctccatgttcggattcttcgtccaggccatcgtcaccgggaagggcccgctcgagaacctcgctgaccacattgccgaccccgtcaacaacaacgcttgggcctacgccaccaacttcgtccccggcaagtgatggaggcgccgccggtgacctttaagtgtccggatgcatgtgagcgcacgctggttttcggcttgtaccatgatgtaaactattgttcaatcgacaaggaataattgcgttcattgtcattatgtttgcaaaaaaaagataaaaaagggcgggccgtttagagggacccaagcttatcgtacgcgtgccatgcgacgtcttagccttttctataggggtcccctaaatccaatttgatggcccgtcatttaacaacgtctgggctggggaaacccctgcggttaccaacttaattgg

SEQ ID NO: 97274 - DNA, 521 bp, Zea mays
tctgagtccactgcaatgacatacccgtccggaattcccgggtcgacgcgacgcgtccgctcgtctcggcgccctctgcatgcccgtccaagaagaccaccgtcgccaggttccggcgcggcacggcgacgtgcagggccagcagcggcggtggcggtggccggggcggcgaaaatgatggcctcctttggctgccccggcgggacgtgatgctcaacggcctgtccagtgtcgccgccgggctcgcctggtacccgggcgtcgcgtccggcgcggatgcggtgtgcaccagggccgacaaggtgaacgagaagaccgtgcagtgcacggacccggccgggcagctttcgtgccctctggtgtcgtcgacggaccccgtggactttaagccggaaagcaaggtgacgcgcattcggcagccggtgcatcttctgagcccggagtaccaggagaagtacagggaggcccgtgcgaagatgaaggcgctaccgggagagaacccgctgagctttgggggccca

SEQ ID NO: 97275 - DNA, 523 bp, Zea mays
tccgatacgagtgcagtagcactgccgtaccggtccggaattcccgggtcgacgcacgcgtccggcaaggcagtgaacgtgccgtcgtctctcttcggcgaggcccgcgtgacgatgcgcaaggcggcggcgaaggcaaagccggcggcgagctccggcagcccgtggtacggccccgaccgcgtgctctacctgggcccgctgtccggcgcgcccccgagctacctgacgggcgagttcccgggcgactacggctgggacaccgcggggctgtcggcggacccggagacgttcgccaagaaccgggagctggaggtcatccactcccgctgggccatgctgggcgcgttgggctgcgtgttcccggagctgctcgcccgcaacggcgtcaagttcggcgaggccgtgtggttcaaggccgggtcgcagatcttcagcgagggtgggctggactacctcggcaacccgagcctgatccacgcgcagagcatcctcggcatcttgggcctgccagggtcgtgct

SEQ ID NO: 97276 - DNA, 572 bp, Zea mays
  unsure (1)..(572): unsure at all n locations
ncgtgacattgacgatcgatacgaacgatcgtaccggtcctgaattacttggtcgaccgacgcgtccgagtggttggtgtattgattttttttggaaagggagtgtgtgcgagttgtctatttcaagagtggattggatctatccggctgcactttagaatatttttagtattttttttgataaataagaaaaggtgcacgatctcgacgaattacttctgaataacttcagaaatcatatggaagaaccatagcatttcgcgattcattggtaaatttactttgattctctatagaccaataatgtgagaccattaacactgttaaagctaaactgcttgaagtccggtcaaaaaggggtactctttctacaacttcattagtattagtctcgaaatgctttaaatgggaaatagctagtgtagaattatctgatatagaacactcatttcgataaaatagttttaactattatctggaaggcactcaagcttttttcaaatccaattgacaaccttgtttataaaaatgagatttttttgatttatgaaaaagataaaaaaggctgcctt

SEQ ID NO: 97277 - DNA, 544 bp, Zea mays
  unsure (1)..(544): unsure at all n locations
agccgtgtgtaactgactgagtacatatgtactgccgtaccggtccggaattcccgggtcgacgcacgcgtccgattaggaggtgccaccacaacgctagggttcacgatggagtgggctatgtcagagctaaggaagaaatcagagacgatgagaaagacacaagaggacattcgttgcgtgctaggtgggtcacgacgaggtgtcatcacgaacactgacctcgttggcctcacctacctaccaatggttatcaaggaggttcttcggctgcatcctccaaaccctatggtggtcccacgtgagtcgagagaggattgccaagttatgggctaccacattcccaaaggcaccaaggtgctcgtgaacgcatttgcgatctccagggattcaaggtactgtaacaaccctgaagattttagcccacaaaggtttcagaataacaatgtggactacaaaaggaccgattttgaagtcaccccctttagtgctggtcgtagactctgcccttaaaacatgtttgccaattttactctagagaatn

SEQ ID NO: 97278 - DNA, 578 bp, Zea mays
  unsure (1)..(578): unsure at all n locations
atgtgacgttgacgatcgatcgtacgntcgtaccggtcctgaattcccgggtcgacccgcgcgtccgcctgtttctcaagctccttggctctagcttcagcttcctcacatctttcttcagcaagtgggagcttttctagaacactttcattctcctcttgtagcatatcaagctcatcgtgaagtgtagatgcctctcttttcagtcctgattctcttgagctatgaagcgctgcatcaaatcttttcggtcgagtgcgatccgctggaggctccacagccaccggtggaataggggacggtgttcgcagcgacttgttggttttgattggcgtgaccactgttgtggtgggtcgtgatgcaacagctggtctgcctgccgatgatgagcgggccgtaagatgtggcttctcaatatttcgacctaccgcatggaaaggaagattgttggtagcgttcaaattggggacactccggtgcttgcggtgcccactcttccaattctgaacctccaagaatccggtgtcggatagcattgtcgtttttttgttgcctggagcctcgtttaaagatccaan

SEQ ID NO: 97279 - DNA, 541 bp, Zea mays
  unsure (1)..(541): unsure at all n locations
ggccgctggcgttgtctgaatctgttggactgacgtaccggtccggaattcccgggtcgacgcacgcgtccgcggacgcgtgggctggtgctccctgtacctgcctttaatgtgattaatggagggtcacatgctggaaacaagcttgccatgcaggagttcatgatcctcccaactggtgcctcctcgttcaaggaggccatgaagatgggagttgaggtgtaccacaacctgaagagcataatcaagaagaagtacggtcaggatgcgacaaatgttggggatgaaggtggttttgcacctaacattcaggaaaacatagaaggccttgaactattgaaggcagccatagaaaaggctggctacactggaaaggtggtcattggaatggatgttgctgcttctgagttcttcggtgagaaagacaagacttatgatcttaatttcaaggaggagaacaacgatggctcaaacaaaattcaggcgacaggctgaaagacctgtacaagttccttgtttctgaagaccctatcgagtcaan

SEQ ID NO: 97280 - DNA, 537 bp, Zea mays
tggtcgtatgtgtttgactgagtctcataggactgacgtaccggtccggaattcccgggtcgacgcacgcgtccggcgacgcgttggccgtccactccaaggccacctacgactagcagtgcgcggacgggacgggcaacacggggctgatggtgatcgacttctcggcgtcctggtgcgggccctgcctcttcatcgagccggccttcaaggagctggcctgccgcttcaccgatgccatgttcatcaaggtcgacgttcactagctctcggaggtcgcatggacatggaaggtagaggcgatgccaacgttcgtgctggtcaaggatgggaaggaggtaggccgcgtgattggggctaagaaggacgagcttgagaggaagatcaggatgttcggcacgtcatttttctcgtcctaacttatcagtgcatacactcccacttaatttggttgctcgacttcagtggttctcctgggacggggtagctgaaatggttcccttccttggaaactgtataatcataaatggagtttcc

SEQ ID NO: 97281 - DNA, 534 bp, Zea mays
  unsure (1)..(534): unsure at all n locations
aggatgntggtttactgactcgatgcgatgacgtaccggtccggaattcccgggtcgacgcacgcgtccgcatcgatctgcaagtctcgctacgtagcagtgcaataaaaaaaagcagccgcaatggcgggcagcaccatggccctctcctccacggccttcgccggcaaggccgtgaacgtgccgtcgtcgtccgccttcggcgaggcccgcgtgacgatgcgcaagacggcggcgaaggccaagccggcggcggcgtccgggagcccgtggtacggccccgaccgcgtgctggaccttgggcccactgtccggcgagccggcgagctacctgacgggccgagttccgggcgactacggtgggacaacccggggttgccgccggcccggagactttggccagaaaccggaagctggaggggaacccatcccggttggccatgtggggcccctctcgctgggttttcccggctttttcccccaaacgggtcaaattcggaaaggcccttggttaaggccggtttccaaaattcg

SEQ ID NO: 97282 - DNA, 542 bp, Zea mays
ggggccgtttgtcactgatccgagtgcgatagtactgccgtaccggtccggaattcccgggtcgacggcacgcgtccggtcgaagcgaggtaggggaggttcggctgggaacaagttccgcatgtcactggggctacgggtggcggccacggtgaactgcgcggacaacacgggcgccaagaacctctacatcatctccgtcaagggcatcaagggccgcctcaaccgcctcccgtccgcctgtgtcggcgacatggtcatggccaccgtaaagaagggaaagcccgacctcaggaagaaagtgatgcccgccgtcatcgtccgccagcgcaagccgtggcgtcgcaaggacggtgtctacatgtacttcgaagataatgctggagtgattgtgaatcccaagggtgagatgaaaggttctgcaatcactggacctatcggcaaggagtgtgctgacctttggcctaggatcgccagtgcagcaaatgccatcgtttgagagcttgttgaatgtgtttagacttgagtatgatcatctcaat

SEQ ID NO: 97283 - DNA, 541 bp, Zea mays
agccgtgtgcttgggaccgagtacagttgaaccgccgtaccggttcggaattcccgggtcgacgccacgcgtccgcccacgcgtccgcccacgcgtccgagacagctagatagcctctgcatgcctacgtacaggatggccaaggccgagctgctcctcgccctcgtggcttcgctcgtcgtgctgccattctcctccctcgccgtgtaccaggacttctgcatcgccgacctatccgtcgccgccacgccgggcggctacccgtgcaaccccccgaaggacgtgaccgccgacgacttccactatggcggcctcgccacccccggcacggcgctgaaacccttcaagatctccctgggctcggccgtcgtcaccacgttccccggcctgaacgggctgggcatctctgccgcgcggatggtgatggtcccgggcggcttcgcgccgttgcactctcacccggtaggcacccaacttatcttcgccattcgaggccaacgtcgctgcggtcttattaacctcacgcttaacagggtgtact

SEQ ID NO: 97284 - DNA, 541 bp, Zea mays
tgcctgtgtgtctcctgacccagtacaataggaccgccgtaccggtccggaattcccgggtcgacgccacgcgtccgggcgccggcgtgcttgtgatctcaacccaagtcgtgcctccgctccggtcaccggtgggtccacgcatccatgtcgaggaggaagaccagggagcccaaggaggagaacgtcacccttggacccactgtccgtgaaggagagtatgtctttggtgtcactcacatctttgcatccttcaatgacaccttcattcatatcactgatttgtctgggagggaaactctggttcggatcaccggtggcatgaaggtgaaggctgaccgtgatgagtcgtcaccttacgctgctatgcttgctgctcaagacgtcgcacagcgctgcaaggagcttggcattactgcactgcacattaaacttcgtgcccaccgatgcaacaggaccaagaccccagaacctggtgcccatctggccttaaggcgcctgcttgtttcggatgaaaaattgacgcattgaggaccttccc

SEQ ID NO: 97285 - DNA, 579 bp, Zea mays
  unsure (1)..(579): unsure at all n locations
cgtgtcgaagaattcgtcgactttctaccgtcctatatatatggtcgacccgcgcgtccgcgaagctcaatcaattcactcaaacctcttcctcaaatcttcgattagattctcgttgggaaggggacttgaaccgaacctgaccatgtcgctgatccgccatagcaacgtgttcgatcccttctccttcgacctctgggacccctttgagggctttccctgcggctccggcagcagcagcagtctcttcccctcgttcccgcggaccagctcggtgtccgtgtgcttggcttgcactcggatcggctggaatgagactccagaggcgcacgtgttcaaggcagacttaccgtggcttgatgatggaggatgtgaagggtgttgtctgggtccggttgtttccttcatatcggtgtggagcgcatcattgagcaggaaggtggtttctgacaccttgttagtatgtgtagcgtatcantgggatgattctggcgcaggttctgtactttacaatagtacctggancgagtttgtcggtggtttgtgggtgtaatgtgctgttgtccagtaatttgtgct

SEQ ID NO: 97286 - DNA, 576 bp, Zea mays
gcagaacgactgaaagtcatcgtactgacgtaccggtcctgaattcccgggtcgagccgcgcgtacggtgatgtcaggaggcaatcaaatgatttcgcagggcgtaatgaaccatttgtatgatgtgatgtgtgaatttagtttctgccttccccctgattatgcgttgatgataagagctcttggttctctagaagggactgcaaaagcactggatcctgagtttaaagttattgatagtgcatatccttttgtaattgggagactccttgcataccccagccctgatatgaggaaaatattgcgggagcttcttatatgtgacgatggatccatcagatggaatcgactggaaaggctgattgcaagtatatctgaacagtcatcagaatcttcaagcgcattaagagcttgactcagtgagaacgccaatggaaagcctgaagggagaacaattgattatccttctgtgaatgcaggtacagaaaacccgaaccctgtcagaaccctgggctatttgtgattctacttccgctaacatttagctggccttgttttccttcaggctgtgccctc

SEQ ID NO: 97287 - DNA, 544 bp, Zea mays
aggccgtgtgtctccgtattcgtatacaatggcagtctcggtccggaattcccgggtcgacgcacgcgtccgggcgcagagaatccccaagcaaacaaacagggtagagggagaggagaggagaggagaggagagggtgggtctgggacaccatggctccgatgaagctgtacggggcggtgatgtcgtggaacgtgacgaggtgcgcaacggcgctggaggaggctggctccgactacgagatcgtgcccatcaacttcgccaccgccgagcacaagagccccgagcacctcgtccgcaacccgtttggtcaggttccagctctgcatgatggtgacttgtacctcttcgaatcacgagcaatctgcaagtacgctgctcgcaaaaacaagccatagctgttgagggaaagaaaacctcatgaggctgcaatggttgatgtttggatcgaagtggatgcttaccagtacaccggttgactgaatcccattctttttcaaggtcctaataagtcctattcctgggggaaccaccacccataaag

SEQ ID NO: 97288 - DNA, 540 bp, Zea mays
  unsure (1)..(540): unsure at all n locations
ggggtnctatacatgagatcaatncgatggacgtgccggtccggaattcccgggtcgacgcacgcgtccgcggacgcgtgggtaattctttcactgctgaaaagaaatggaggaattctaaggatacaggccctgctgatttatatgcaaagtttatgagcgcgctgtacaacttgcttgatggttcctctgacaacaccaaatttgaggatgactgccgagctattattgggactcaatcatatgtcctctttactttagataaactgatttataaagttgtgaagcagcttcaagctatagcaacagatgaaatggacaataagcttctgcaactatatttatatgaaaaatcaagatctcctgggaggttctttgacctagtttatcattgaaaatgccgggttctactccatgatgagagcatataccgatttgaaatgtgctcgaattcgacaagggttgctattcaactgatggaatatggtcaacaaaaggccgaagtgactgcaggtttaaatggacccatnttttcttctn

SEQ ID NO: 97289 - DNA, 580 bp, Zea mays
  unsure (1)..(580): unsure at all n locations
tatttgtaaggctagcngtntcgtacttactatcctaccggtcctgaatataactggtcgacccgggcgtccgcaccaaacgatctttcaaattggtgtagtggaaataacggaattggaacttgtttgatcgagtggcggatactcaatcaaactcataattgtctcaatggattcttttccttcttttttttttttttctgaatattcagttaagaccattcaaaggctccttttcgccatgcataaactaaaccaacaactaggataagcacaaaaatgaaagcttctataaaaacggatacacccaatacgtcgaaactcattgcccaagggtagagaaagactgttttcacatcaaaaacaacttatactatctcatacatgtaatagcgtattcagaattgtaaccaatccctctctatgggttctatacccgaatcattacttgagaacttttttggtcctttactaacctggcattaagatctgaaatccaaaatacacaattagatataggttgcttttataataatttaccaaaaatattattttctgaaacataaatctgaatgtcctt

SEQ ID NO: 97290 - DNA, 525 bp, Zea mays
  unsure (1)..(525): unsure at all n locations
tggattattactgcagggatcgatcgactgtcgtaccggtccggaattcccgggtcgacccacgcgtccgcttcaaacgtaccattaaggatgaaggtttctcttccttgtggaggggtaacactgctaatgttattcgttacttccctactcaggctttgaactttgcatttaaggactacttcaagaggttgttcaacttcaagaaggatagggatggctattggaagtggtttgctggcaacctggcctctggtggtgctgctggtgcttcctctttgttttttgtgtactccctggactacgcgagaacaaggttggctaatgacgcgaaggctgccaagggaggaggtgaaaggcagttcaatgggcttgtcgatgtctaccgcaagacactcaagtctgatggtattgctgggctttaccgtggatttaacatcttctgtgttggaatcatttgttatcgtggtctgtactttgagctctatgattncatcaagccaagttgtcttactggcaaccttc

SEQ ID NO: 97291 - DNA, 537 bp, Zea mays
  unsure (1)..(537): unsure at all n locations
tgtgantntcgatgagtctaattgnacntgacgtaccggtccggaattcccgggtcgacccacgcgtccgagggcatctaatcatgcaggtagtaacatgacttctgacaaccagtctcatcaagcctcccaatcagttggtgctgcaggttctcatgatggtggtaatgtccaaggacaagatccggaacgatctacccctgaaggtggcacaaataccagccatgatcaaggtcaacagagttctacaggtgctgagggctcacaagttccgcttagacgtaatagcggacatgggtgggtaacttctgcagcaagtgcatttgatgctgcaaaagacataatggaagctcttagaagcaaacatactaatctagccaatgagcttgagcttttactgtcagaaattggatcacggtttgttactctgcctgaggaaagacttctagctgtggttaatgctctgcttcatcgctgctacaaatatccaactgcaaccacttgcgagggtccacagtctctcaagaaagaactctt

SEQ ID NO: 97292 - DNA, 528 bp, Zea mays
  unsure (1)..(528): unsure at all n locations
tgagtaattgtcgctgattacgatcgcatgntcgtaccggtccggaattcccgggtcgacccacgcgtccgcccacgcgtccgtccacgcgttcggtaatttcccccaccttttgctcctgccaaatactaatgtttcaaataccctgccaaatactaacatcatatccatggctgtgcaaattgtaggttttgatggggttgagatccatggggctcatggctacctgcttgagcaatttatgaaagataaagtgaatgaccgaacagacgaatatggtggatcccttgagaaccgctgccgatttgctttggaagttgttgaagctgttgttaatgagataggggcggacagagttggaattaggctatcgccattcgcagaatattcagagtctggagactctaatccaaaagaattggggctttacatgatgaatgccctcaataagtatggtattctttactgtcacatggtggaaccaagaatgaagactgttggagaaaaaactgaatgccctcatagcct

SEQ ID NO: 97293 - DNA, 528 bp, Zea mays
  unsure (1)..(528): unsure at all n locations
agcggttntnatnaaacctacnntcgatcagtatgctcccggtccggaattcccgggtcgacccacgcgtccgcccacgcgtccgtccacgcgttcggtaatttcccccaccttttgctcctgccaaatactaaggggtcaaataccctgccaaatactaacatcatatccatggctgtgcaaattgtacgttttgatggggttgagatccatggggctcatggctacctgcttgagcaatttatgaaagataaagcgaatgaccgaacagacgaatatggtggatcccttgagaaccgctgccgatttgctttggaagttgttgaagctgttgttaatgacataggggcggacagagttggaattaggctatcgccattcgcagaatattcagagtctggagactctaatccaaaagaattggtgctttacatgatgaatgccctcaataagtatggtattctttactgtcacatgggggaaccaagaatgaagactcgtggagaaaaaactgaatgcccttatagc

SEQ ID NO: 97294 - DNA, 529 bp, Zea mays
  unsure (1)..(529): unsure at all n locations
gcgantgggctggcagcatcgctcgactgtcgtaccggtccggaattcccgggtcgacccacgcgtccgccggctctccgccttcctcttccagtccccgcgcgcgagatcgccgccccgtgtgggcccgagatcccgatggcctcgcgccgccgcaccctgctcaaggtcatcatcctcggcgatagtggggttgggaagacttccttgatgaaccaatatgtgaacaagaagttcagcaatcagtacaaggctacgatcggcgcggatttcctcaccaaggaggtgcagttcgaggacaggctcttcactctgcaaatatgggacactgctggccaggaaaggtttcagagtctcggcgttgcattctaccggggagcagattgttgtgtcctagtctatgatgttaattctatgaaatcatttgacaacctgaacaactggcgagaagagtttctaattcaggctagcccatcagatcctgataatttcccttttgttctggtgggtaacaaagttgatgtagatg

SEQ ID NO: 97295 - DNA, 533 bp, Zea mays
  unsure (1)..(533): unsure at all n locations
tggtanctatccttgcngctcatcgnatctgacgtaccggtccggaattcccgggtcgacccacgcgtccgcccacgcgtccgtcatgattccatccatattggatcaattctcgataccattttgcaatgaaattagaggaatgttatggtaaaacttcgtttaaaacgatgtggtagaaagcaacgtgcgacttgaaggacatgatcgattgtggatttgcctatccatcattttccatagtaatgaaaatgctcttggctcgacatagtctgttctattcgtcccgaaccgaattttcgctgggttgtttgtaagtaaagtaaatagtacacgatggagctcgagaggacagaatttctttttgatcaagggaaagaatctagggttagtgaaaactaataaattaggccaactttgtcagtctatccttaatatagaaatcaaaaggttaaaataagaaaaagtctaatttttggaagattggaaaaacttttttgatgaaaagtctatcttgatcaattgttcatatn

SEQ ID NO: 97296 - DNA, 533 bp, Zea mays
  unsure (1)..(533): unsure at all n locations
atggatnacttatggctgcttatcgatcgacgtatcggtccggaattcccgggtcgacccacgcgtccgcccacgcgtccgtcatgatttcatccatattggatcaattattgataccattttgcaacggaatgtgaggaatgttatggttaaacttccttatatacgatgtggtacaaagcaacgtgcgacttgtatgacatgatcgattgtggatttgcctatccatcattttacatagtaatgaaaatgctcttggcttgacatactatgttctattcgtactgaaccgaattttcgctgggttgtatgtgagtaaagtagatagtacacgatggacctcgataggacataatttctttttgatctagggaaagaatctatggttagtgaaaactaatatattaggccaactttgtaagtctattcttaatatataaatcaaaaggttaaaataacaaaatgattaatattggaagattgtacaaacttttttgatgaataagtcttctttatcaaatgtttataatttn

SEQ ID NO: 97297 - DNA, 522 bp, Zea mays
  unsure (1)..(522): unsure at all n locations
cgggatgactgtatgttaaatgtcgatgcactgtctgcccggtccggaattcccgggtcgacccacgcgtccgcccacgcgtccgcacttgagtaggtaagaaattctggaacctctttcacttgcagcctatgcgtgatcagaagggtgatgttcaatacttcattggggttcaattggatggaactgagcgtgttcgagaggctgctgcaaaagatggtgccatactggtttgtttctaccttaatggcgactagcatatatgtgctattgtgcttgctatcacaagtacctagaaaaatgagaataaaatgccagataactttgtcatggctgctatattataaatgcaagccatccatagtgtagtgattgcaatgtttattaacatgtagtaccatctagtattctagtgtttattaacgatttatatctcttaagccctggtgattaacattggcttaatttgtgttttagtttgcataaggtgatttttgcaactaattttgcgtaccttacttn

SEQ ID NO: 97298 - DNA, 564 bp, Zea mays
  unsure (1)..(564): unsure at all n locations
gcgtnctngtctcgtgccgtcatacattgnacgtaccggtccggaattcccgggtcgacccacgcgtccgcccacgcgtccgagttgctgcacttaacctttactttggcggcctgaaatctggtgtgagggctggtgttatttgagatccagcaagacctggtcagaagtggcacgtcttttacgccactgattacccatagcaaccaatggtttatctataaatgtgcatgactggactttacatgaactatgctatctgtcttttataatgactaatgcttgatttggaacataactttttgtcaatgtattgataaaaacttttttgctatttcagaaatcatcatctaagatggttatcttctattttgacttattatcccttgttgtatactctatgtattgtgattctaatgctcatctttttttcaacattctattgttactgctctttgaccgttttcttcttatgctcatctcattaagttcacgtgtctttattatccctaaagtctttttattaaatgtgactctcttacatgtagtgtacttttggttttt

SEQ ID NO: 97299 - DNA, 522 bp, Zea mays
  unsure (1)..(522): unsure at all n locations
aggatgtctgtctcccgatgtctntgtactgtcgtcccggtccggaattcccgggtcgacccacgcgtccgcccacgcgttcggccacgcgtacgcggactcgtgggctcgcgcggcgaccacccgattcggggcgtgcggagagaccgaagaagcgggagagatggctcgtaccaagcagactgctggcaagtccacgggagggaaggctcccaggaagcagcttgccaccaaggctgaccgtaagtctgcccccaccactggtggagtgaagaagcctcaccgttaccgtcctggaactgttgccctccgtgagatccgcaagtatcagaagagcactgagctgctgatcaggaagctgcccttccagaggctcggcagggaaattgcacaggactttcaaaactgatttgcgtttccagagccatgcggtgcttggccttcaagaggctgctgaggcataccttgttggtctgtttgaagacaccaaactgtgctgcattcatgctaaagtgggaacat

SEQ ID NO: 97300 - DNA, 535 bp, Zea mays
  unsure (1)..(535): unsure at all n locations
ggggattgtttaagattgacgatcgatcgtatctgtcgtaccggactggaattcccgggtcgacccacgcgtccgcaggttttaatctttctgggttttttgaggataagtatggtctcagggaagagagagttagtaccagacagcctgtaacaacagtatttacaaagctgaaggagcttgccaaacgcctaaagttgagggtcaagaagaaagaaaatgggaccttgaaattggcagctccgaaggaaggaaagaagggtatgcttgagcttgatgcatagatttttgaggttgctccttctttgctcttagttgagttgaaaaaaaccaatggggacacgctggagtatcaaaagctagtgaaagaggagataaggccggcactgaaggatattgtttgggtttggcaagatgatcaacaccagtgctcacaatcaccagagtctctattatcaccaccggagacacaagatgaattgcgattatcattggctcagcttgagggtcaagacttctagaaagcccaatgtcn

SEQ ID NO: 97301 - DNA, 538 bp, Zea mays
  unsure (1)..(538): unsure at all n locations
tgcgtatcnatttccgaccggaagatcgtatgtactgnccgtaccggtccggaattcccgggtcgacccacgcgtccgcccacgcgtccgcggcgcgtgggtctggacaaaaaatgctgctaatgaagctgctcggataagcatcgggaagcagtggaaggaatttctggattacaaggactccattggattcattgttcatgacgatgcaaagaagatggacaagggactgaagaaccgttacacggtttgatcccaaagagtagtagcatgtagggtggttctatccgattccgtagcaccttgcagagtgtgttgaaggttctctatttgctgaggagttgcttaagcataatctaacatgatgtcgaatgtattcctgtatgttccatatgtcagtcacctaggtgttgtttttgtctcagcgctgtgtgctatatatatatatatatatatatatatattggataaaaaaatatgtttttcctcttaagttttaaattaaaaaatagggttgacgttttagatgatccaagtt

SEQ ID NO: 97302 - DNA, 531 bp, Zea mays
  unsure (1)..(531): unsure at all n locations
cggactgatcctagctcttcatcgcactgacgtaccggtccggaattcccgggtcgacccacgcgtccgacttcatagagcaaggttaattcttgagcatgcagataggatgggctgcaaaaggtacctgactccaaaagacatagttgatggtttacccaatctaaatcttgccttcgtggctcatattttccaaaaaagaaatgggttgtccaaacaaatgaaacaagtttcctttgtggatggactctctgatgatgctcaagtttccagggaagaaaggtcattccggctgtggattaacagccttggaatttcaacttacatcaacaatgtgtttgaagaccttagaaatggatgggttctccttgaggtgattgacaagattgctccaggctcagttaattggaagatggcaaatcgcccaccaatcaaattaccattcaggaaagttgaaaactgcaatcaagttttgaagattggaaaagaactaaaattttctttggtgaatattgctgganatgatattgg

SEQ ID NO: 97303 - DNA, 532 bp, Zea mays
  unsure (1)..(532): unsure at all n locations
aggtatngtgacagtaggcctacgtatgtactgtcgtacttgtcttgaattcccgggtcgacccacgcgtccgcccacgcgtccgccgaccgcgccgcggggtggctccccggatacggcctgaccacgggcagcatcaacggtggtctagagtgcggcgaggaccgctccaccgacggcgccaaagccgccaaggaccgggtcggctactacaagaggtactgcggtatgctcggagtggggtacggggacaacatggcatgcgggagccagaagccttacggaggatgatgacactagtagctgatctatggttgctgcaatgcaagccttcacgtgtgtttgcctctctacctaaagaataaatcaagctagcagcaaacctaccttcggcgtgtgtctacttgcttatcatagtgtgtgtccgtgtatgagagatgatgtactgtcacgaactcacgtgtgtatgagagaggattcatggtaagactatcacttactagaataaaaaatataatattatttatagggg

SEQ ID NO: 97304 - DNA, 528 bp, Zea mays
  unsure (1)..(528): unsure at all n locations
tggatgagtngatgcctaggctatcgatcgtactgcacgtaccggtccggaattcccgggtcgacccacgcgtccgcggacgcgtgggtttttgaaacaggaaagcaataaacagcaaaaaaaaaagaattgatatcgcatattttacagttaccttgcagttctcgtactctgcagtcattttctcactgtctgttacaaagtacggagagatgtaaccacggtcaaattgcattccctccacaacatagagaaagttctcagaactcttcccctcttcaagggtgacaacgcccttccgaccgaccttgctcatggcctctgctatcatgttaccaatttcatagttgttgccagcactaactgcagcaacatctgcaagctcactatcttcaacctccttagacaacttccttagttcttcaactagtgctttagctgttttctcaataccacgagtaatctgaacaggattagcaccagctgccacgacctggacaagacagtttttagctgaaaacacaatcn

SEQ ID NO: 97305 - DNA, 533 bp, Zea mays
gcgttctgtctccgactgcgatcgatcgactgtcgtaccggtccggaattcccgggtcgacccacgcgtccggcaggatggcactcctccttggcttgctgctgctagtagtagcttcgcccgcgatcgctggtgacgactccggtatctactaccagctggctcttatgtggccaggagcatactgcgagcagaccagcgctgggtgctgcaagccgaccaccggcgtctcgccggcgcgcgacttctacataacgggcttcaccgtccttaacgcgaccaccgacgctgcagtgactggatgcagcaacaaagttccttacgaccctaacctgattaccggcatccaaggcctgaatcagtactggagcaacatcaggtgccccagcaacaacgggcagagcagctggaagaacgcctggaagaaggccggcgcctgctccggcctcagcgagaaagactacttcgagactgccctctccttccgtagccggatcaacccactcggtcgtctcaaagccaaaagttttgag

SEQ ID NO: 97306 - DNA, 535 bp, Zea mays
  unsure (1)..(535): unsure at all n locations
tgtgattgtgtatgtctgcgtntcgatgtactgtccgtaccggtccggaattcccgggtcgacccacgcgtccgcaatacttgtgagctttcctcctggcacaatcgaaccaagtatggctggcctcgctgtaggatatggacttaatttaaatgctcgcatgtcaagatggatattgagcttctgtaaattagagaacaggataatctctgttgagcgcatttatcaatattgcaggcttcctagtgaagcaccattgattattgagaactgccgtccaccatcatcatggcctcagaatggaaacattgaactgattgatctcaaggtccgctacaaggacgatctaccattagttcttcatggtgtaagttgtatgtttcctggcgggaaaaagattgggattgtatggcgtactggaagcggtaaatctactcttattcaggcccttttccgtctaattgagcccactggagggaagattataattgacaacattgacatctttgcaatgggcctttatgatctgcgggct

SEQ ID NO: 97307 - DNA, 528 bp, Zea mays
  unsure (1)..(528): unsure at all n locations
agccttcgtgatccattttatcaatnactgtatcttccggtccggaattcccgggtcgacccacgcgtccgaaaaagcatacaaaaacaacatacaaaaaaactaacaataaaagaaaaaatagataaaaaagagtggaaataaaaaaaaaagagaagggaaatggcaaaggataattcgattcttcgacctcaacacgggcgccaagatcccttcagtcggcttgggaacttggcattctgatcctgtccttgttgctgaagccgtcgcggctggccatcaaggttggttaccgccacattgattgtgctcaaatctatggcaatgagaaggagattggctctttgttgaagaatctgtttgaggagggtgtagtgtagcgcgaggatttgtggattacatctaaactctggaatactgatcatgcttcataagatgtaccactggcactggaccggacctttgaagattttcaactggattatgtacaatcgtattttattccatttccctgctccgattaataat

SEQ ID NO: 97308 - DNA, 539 bp, Zea mays
agcgactgtttcgtgcggcgtctgcatgtacgtaccggaccggacctgaattcccgggtcgacccacgcgtccgagccatgtggaggagggctttagcgatggtcctgttcatggctggcgccgcgctggggggcggggctgccggcgccggcgcgcagcatggcgtgtggagcatcatcacccggcccatgttccagagcatgctgagccaccgcggtgacagcgggtgccagggcgccttctacacctacgacgcctttatcgaggccgccagcaagttccccggcttcggcaccaccggtgacgagcagacgcgcatgcggtagctcgccgtctttcttcagtcagacgttccacgaaaccaccggtggatggtcgactgctcctgatggaccgtttgcctggggatactgccgtgttgaaggatcctatccagactgtcccaccctactttggactaagacccatactagtaactcataagatcaactacaggcttgcctggcaagcgctgatccttaacctggtggctaacccg

SEQ ID NO: 97309 - DNA, 523 bp, Zea mays
tggatgactgttttcctaaatatccagtagtaattcaccggtcttgaattcccgggtcgacccacgcgtccgtcccattcttgcaccggggtcattggactattattactgaaccagtgcgaggtaggctctggtgtaaacctccaatttatgacataaatgctcctgacttgtacattccattaatggcatttggtacctatgttgttcttgctggcatctcattgtgtctttgtggaaagcttagtcctgaagctttgaactggttatttatcaagggattggttggttggtttatgcaaacagcactgcttaaagttactttactttcattaggcaatgggtaagcacctctattggacattatagcttacgcctgtttcacttttcctggcttgtgtttggctgtttctggaagaataatatgtgattacttctactactttctgatgctgtggaccctcttatggatggcagtgtactttgcttaaaacaatgtatatgagtccttttttcataaatt

SEQ ID NO: 97310 - DNA, 527 bp, Zea mays
  unsure (1)..(527): unsure at all n locations
tgcgattgngtgacgctgcngactcatagcaatngcannncctaccggtccggaattcccgggtcgacccacgcgtccgcccacgcgtccgcgctgttctctactacttcgatcacagcgttgcgtctcagcttgctcagcagaaagagttcaacttgaggaagcctccatccttccactacgatttgcttctcttaggtttcctgacgttaatgtgtggccttattggtatccctccatcaaatggtgtcattccacaatcacccatgcatacgaagagtttggctactctcaagcaccagatccttcgtaaccggctagtagccaccgcacggaagggcatgagccagaatgcaagcctgagccactgtatggcagcatgcangatgcttatcagcagatgcagacaccactggtttatcagcaacagtctgtcagaagaggcttaaatgagctcaaggactcaacagtccagctagcttcgagtatgggtaacattgatgcacaagtgatgagacagtctttgn

SEQ ID NO: 97311 - DNA, 495 bp, Zea mays
  unsure (1)..(495): unsure at all n locations
tatgctnnctnacctcgtgaagagatagtactcactcaccggtccggaattcccgggtcgacccacgcgtccgcggacgcgtggggccttctctgactccggaagcaatggattttgtcaagcgattgctgtgcaaggatccgcgtagaaggattactgcagctcaagctttaagtcatccatggatcagaaattataatgacattaagctgccgttggacattcttatattccgacttatcaaagcttatattcggctctcatctttacggaaagctgctctgagggctctgtcaaagaccttaaccgtaaacaaacttttttaccccgaaatcacagtttttttttgggaaccccacaggattggtggctcaatacttgtaaaaaatataagggcgttttaaagagagcttcttgttcaataaaggaaatcccaggttaaaaaaatcttggttctttaaacccctttagttcccaagaattggatttccagaa

SEQ ID NO: 97312 - DNA, 522 bp, Zea mays
  unsure (1)..(522): unsure at all n locations
gagcgttanctgccgctgagtctgatctcatcgactgcacctaccggaattcccgggtcgacccacgcgtccgcccacgcgtccggttggcttctcctccccctccggttcgggttcgggttcgtgaggttctccggggttcggtttcgtgggtgagcggatcgagatggcggcgtcggatgttgagtaccgctgcttcgtcggcggcctcgcctgggccacggacgaccactccctccacaacgccttcagcacctacggcgaggtcctcgagtccaagatcatcctcgatcgggagacgcagaggtcccgcggcttcggcttcgtcaccttctccacggaggaagcgatgcggaacgccatcgagggcatgaacggcaaggagctggacggncgcaacatcaccgtcaacgaggccccagtnnccgcgcggcccgtgagggcggcggcggcggcggtaccgttggtggccgtgatgccgctgctacnngcgtgccgggcgcgtgatggcggngagggctt

SEQ ID NO: 97313 - DNA, 523 bp, Zea mays
ggtgagctcgctgacgactgcttacgttactcatagtactgccccgtccgaattcccgggtcgacccacgcgtccggtcacttctccacgaacaaaagcgcatcgatctcgctgtcgtcactcctcgtcacccagccacgaacagaggcaccacccagcatggccctgcaggcggcgctactcccatacaccctctcatccgtccccaagaagtgcagcctcgccgtcgcggcgaatgacacggcattccttagcgtatcctacaagaaggtgcacgcggcgtcactgtccgtgaaaacgcggtggcgactaccgcgcctgtggccacgccggggtccagcacggcggtcaacgatgggaagaagaccgtgcggcatgccgtggtggtgatcactggcgcgtcaacggggttggcactggcggacgtcaaagcgcttgctgagaccggaaagtggaacttggcgaatgcctgtcgcgaacttctaagggctgccatgctggcaaaggcacccgcattgcagac

SEQ ID NO: 97314 - DNA, 523 bp, Zea mays
gcggttgattgattgcagggactttctgtactgctcgtaccggtccggaattcccgggtcgacccacgcgtccgagcgtacgcgcctagcgaccagcacagattcgttccacgcctacctcctgccctcgcccgtgctctcagatctcgcgcgcgccccgcaaagggtaactttgagccatgggcacagttgtggatgctccagcagttgtggctgaagaggtcactgaaaacatgttgggtggtaagaaagttacagttgtatttgttctaggtggtcctggaagtggaaaaggcacacagtgtgccaacattgtggaacactttggattcacccatcttagtgctggagatcttttgcgtgcagagattaaatctggctctgagaatggaaccatgattgaaaacatgataaaggatggaaagattgttccatcagaggtgactataaagctgttgcaagaggcaatgataaaaaatgaaaatgacaaattcctgatcgacggattttcaaggaatgaggt

SEQ ID NO: 97315 - DNA, 520 bp, Zea mays
  unsure (1)..(520): unsure at all n locations
ngaatggtcngnnnaccgctggaccgaaatggatggcactgtcggtccggaattcccgggtcgacccacgcgtccggactgatgtcgataggcctgtcataactccagctggaccatctggtccatcttctcctcagtctgaagctggggagtccaatgtgtttcgccaggaaaaagatgctgcagtagatggggcaccatctgacactgatggagcagtggctgagacccgagaggaagaaacgacagagaatgttggtgaagcgacatttagctatgaccgcttgatatctaaatctaccgatccagtccgtgggatagattacaaacgcagagaggcatacttatcagatagtgagttccaaagtgtttttggcatgaccaaggatgcattctaccgacagccaaatttggaagcaagaactacagaagcgaaaagcagatctcttctaaagaagacacgcctttgctcaagcgcctggctacaaatgcgaccctctcgtcgtggattggcgtaccc

SEQ ID NO: 97316 - DNA, 494 bp, Zea mays
  unsure (1)..(494): unsure at all n locations
aggctnctgcccctcaccgacaaagacgtaatcactcaccggtccggaattcccgggtcgacccacgcgttcgcgcccaagccgaccccaccgacgtacacccctttccccaagccttcgacacctaaaccgaccccggctacctacacttcaagccctaagacaacggcttccaaaacctttcaaaccccaaaccgaccccgccaacgtaaaccccttggccaaaaccttcaaaacccaaaccaaccccgcggagttaaaaccttttttccaaactttctaaccccaaacggaccccccagagtttacttctaagcccaaaacttctacaaacaccaaagccaaaaacggaccccaccaagttcaacccttttcccaaagctttcaaagccccaatccgaccccaccgacttaaacccctttcccaaaggctttgaaaacccaaaaccgtacccaacgaatttcaatttcaaaaccaaaacccccgggccaca

SEQ ID NO: 97317 - DNA, 512 bp, Zea mays
  unsure (1)..(512): unsure at all n locations
gggaggccttttgccgcatgatgggggattgaatgccgaccggtccggaattcccgggtcgacccacgcgtccgcggacccgtggccggcaccctggccaacaggttcctcgggaaggacggcccgcagctgttccgccgacgtctctggtccaacgggcccgagacggcgtcgcccacgctgcaggacaagcagtgcgccggcaaggccttcgtcgtgctcatcgcgcgccttctcgtcgccgagctctttctncgctacgactncttcgacgtncaggtcggcgcctccgggctggggtcgtcggtcaccatcacctcgctcaagaaagccaccttctgangtatgagctctgatcgaccgtncgtcaaaagtgctagaggcggncacgtgcaccaccggatccctntagaactttntttttcttagtgctatgctacttgtcgatcgtcaggtattacaatgtatattcctaaggggtggttggttggcccttgctaaatttagcccct

SEQ ID NO: 97318 - DNA, 524 bp, Zea mays
  unsure (1)..(524): unsure at all n locations
acgctgagtgtatccattcntacataatgactctcgtaccggtccggaattcccgggtcgacccacgcgtccgcccacgcgtccggaaagaaagcccttttcctttttaacaaaattctttctatttctaccgggtcaaggtattcatcattctagtacaactattgcagtagaatgacaacagactcgtgtatagggaactagattagcttagctacctatctaatttattgtagaaattccgggatccgcgattggacatggaaaatagaaaaactttttcttggttaaaggaacagatgattcgatcgatttctgtatcgatcatgatatacgtaataactcgcacatctatttcaaacgcatatcccatttttgcgcagcagggttatgaaaacccgcgggaagcaactggacgaattgtatgtgccaattgccatttaactaataagcctgtggatattgaagttccccaagcagtgctttctgatactgtattgaagcaattcttcgaattccttatg

SEQ ID NO: 97319 - DNA, 530 bp, Zea mays
  unsure (1)..(530): unsure at all n locations
gcgaattgtcttgtaacatcnatcatactgtattctcgtaccggtccggaattcccgggtcgacccacgcgtccgcccacgcgtccgcccacgcgtccgcttctctccactatcctaccaggcaccactcgcatggggtgctcagtcagatccccgtcccgcatttcctaaggccaggttagttggcattgaagacgatgactgcttctgcagctgctggtgtgcagatggtggctgcacgcccttgcatttcggcctcgccaggaattcttaccgcacgggtagcagtttctaggactgattgcatgctcagtaccactgctacattccccaaaatcagctgctcctggcctctaaggtttaagcgcaatgatgttgttgtaagagcaatatcggaagagtgtggcccgccagggcttcccattgatctcagaggtaaaagggcattcattgctggagttgctgatgataattggctatggatgggccatttgcttaatgcactttcctgctgcttggtgcttgaaatg

SEQ ID NO: 97320 - DNA, 511 bp, Zea mays
  unsure (1)..(511): unsure at all n locations
cgagtgcgctgaggcatccacgattcgctacgacttaccggtccggaattcccgggtcgacccacgcgtccgcccacgcgtccgtcgagtctcgtccacccgtcgtcctcctagctactgtactcgccagtcgccatgggcaagattaagatcggaatcaacggcttcggaaggatcggcaggctcgtggccagggtcgccctccagagcgaggatgtcgagctcgtggccgtcaacgaccccttcatcaccacggactacatgacctacatgttcaagtacgacaccgtccacggncactggaagcacagcgacatcacactcaaggactccaagacccttcttttcggtgacaagccggtcaccgtctttggcatcatgaaactctgaggaaatctcgtggggttaggcttgctgctgagtatgtcgtgcagttcaccggcgcctttacttgactggaccagggtgtttgacctatgaagggttgtgccaagaagggttgtaactcttc

SEQ ID NO: 97321 - DNA, 505 bp, Zea mays
  unsure (1)..(505): unsure at all n locations
aggcctnctcgcccatgataggagatagtacgcactnctcgtccggaattcccgggtcgacccacgcgtccgcccacgcgtccgcccaggcccgcgtcacggcgcaccctgtgaagctggccgccctctccaccgcccaccaatccgtcaccaaggccatcgacaaggccggcggcatgctcctgctgacgtcgctgctcggaccgtttacgtcccacgccgtggggaccgatgcggtcgccattcttgtcagcggtgtgacgcttgacgctgacacgaaggccgcgctcatgcagccggcgaaggtgtcgctcgtggtcgacatgctcaacgagggcgcggcggacaccatgatcaactgtgtccgcctcatgcgcatcctcatggattacaagcggttaacggccggtaacagtggcgagccttaagctctttgctggtgttataccccttattctggacaagccgtatccaaacggggtggtcgctgggctcgagcttaatc

SEQ ID NO: 97322 - DNA, 523 bp, Zea mays
aggatattgtttccctagttctagtacgactcgacgtaccggtccggaattcccgggtcgacccacgcgtccgcccacgcgtccgcgctgggccaccagctttgaccgccgcctcccttcccctccgctactgctcctcctcaccccactcccccgcaggagcggcggcggcggcggcgaggtcgtaccccacatcggcgagcggcggcggcaccgccggaggcaaaggcaagatgttcgggcgcgcgccgaagaagagcgacaacaccaagtactacgagatcctcggggtgcccaagtcggcgtcccaggacgatctcaagaaggcctaccgcaaggctgctatcaagaaccaccccgacaagggcggtgaccccgagaagttcaaggagctcgcacaagcctatgaggttgtgagtgatccagagaaacgtgagatttatgatcaggatggtgaagatgcccttaacgaaggaatgggcggtggaggatcccatgttgatccatttgacatctgcttatc

SEQ ID NO: 97323 - DNA, 505 bp, Zea mays
  unsure (1)..(505): unsure at all n locations
tagtgccngcntanccactgaccgcaaatgatcgcacgacttaccggtccggaattcccgggtcgacccacgcgtccgggaagaacagctcgtccgagaccatgaagagcagcccacacctggtgctgatcctgtgcctgcaggccgctctggtcatgggcgtcttcgccgctttggctaaagaaaatgccctggttgagagcaaggccatcgacatcaacccggggcagctcaagtgctgcaccaactgcaacttctccttctcggggctctacacctgcgacgacgtcaaaaaggactgcgaccccgtctgcaagaagtgcgtcgtcgccgtgcacgcctnctactcgggcaacaacaagttcaggtgcaccgacaccttncttcgcatgtgcccgcccaagtgctagatcagagaggaaagacgcgcgctgctgctagctgctatagcttcgttctttccgcgncgggcggtgcatggttcacgtaccgngtgttggctact

SEQ ID NO: 97324 - DNA, 492 bp, Zea mays
  unsure (1)..(492): unsure at all n locations
aggctggtnccgctgccagtcaggtacgcactgactaccggtccggaattcccgggtcgacccacgcgtccggcccaagctaatgcagcatggatttagtgatgccattgcaaaagtaggtttgacaaaggttgtcagtgacctattcttggttggactgttctaccatctgtataaccagattgctacaaacaccttggagcgagtggctcctctgacacatgctgtcggcaatgtgttgaaacgtgttttcgtcatcggtttctcaatcattgtttttggcaacaaaattagcacacaaactggaattggcacgtgcattgccatagctggtgttgctatgtactcttacattaaggctaagattgaagaggagaaaaggaaaaggagcgcatgactgctgtgaaatatataatcaggaccttcctggacacaacatcttcgacaatcacgacctacttctataccctgtttggtttcaatctgagtcag

SEQ ID NO: 97325 - DNA, 512 bp, Zea mays
  unsure (1)..(512): unsure at all n locations
ctcggtttacgtataccancgnacgatcgtatccggtcttgaattcccgggtcgagccacgcgttcgcccacgcgttcgcttttgtttcacacgagatttctgttctcgttgagctcatcttatgacaggggctttatcttttaacagatgtgccgctctagccaaactcctcacctgacaatgtctttcgtccggatcggcccggtgaggcctgtccttggaaccaaaaggaggggctgtgccccggtatcgacccacggaattatgttaaataacgttaaaagtattggtatttcacttcgcgccccgaggcttccacttattccaacactttttaagtcatttttacaaaattcaggacttatagtctaacttcaaccatggtcttccttttctccgttaatttctgtctaagcccgattcccttttgcttgatggttaccctctgattagtacctcagggtacagtgtgcaaatttcgcttaattcctttcaaggcgcccttcactaa

SEQ ID NO: 97326 - DNA, 500 bp, Zea mays
  unsure (1)..(500): unsure at all n locations
taagatgctgatctactagtnattatcttatccttcttgaattcccggttcgacccacgcgtccacccacgcgttcgcttttgttccacacgagatttctgaccacgtataactcatcttatgacgggtgctttttctagtaacagatgtgccgctttaacctaactcctaaacttacattttctttttctctattccccctaacttagtctttaaattttatccaaatttattaacttttaccctattattacccatctttattctttaaattactttttaaatattccttatttaattttttcttatattctgtttattttcctttaatctttttattacattatacaaaatatcttttaaatatctaattaaaacaatgtcttaaataatcacttatatttcctcctaataccgtttccttatttttctgttatccttcttttaatccccccagatctattcaaaatttccctaatttcttttatcccctaaatttt

SEQ ID NO: 97327 - DNA, 502 bp, Zea mays
  unsure (1)..(502): unsure at all n locations
agcgnactgacgccatccgaacatcgtaatgttactgcacgtaccggtcttgaattcccgggtcgacccacgcgtccgggccctcaccaagaggacacaagatggtgggacagaggtggttgaagcaaaggcgggtaaaggctctgcaacgttgttcatggcatatgctggtgctgtttttgcagatgcatgtttgaagggtctgaatggagttacagacatttgatagtgctcttttgtgcaatcaactgtgatagattcgccatacattagatccaaagttcagcttggcatgcatggaatcgaggaagtgcttggtccgggtgagttcaacaagttcgagacgaaaggtgtggaaaacctcaaggtcgagctcaagtcttccatcgacaagggtatcaagtttgctcacgggaactatgcaccttgcccgtcttctaacaattgatgcttctttggatttttgtttgacttccctatctttcttgcccccgtatggttg

SEQ ID NO: 97328 - DNA, 502 bp, Zea mays
  unsure (1)..(502): unsure at all n locations
cgctnactgaagccagcncagtatngngatgcactgctctaccggtccggaattcccgggtcgacccacgcgtccgcccaagccgaccccaccgacgtacactcccacaccgaagccgccggccaccaagccggccacgtacactccgacgccgccggtgtctcacacccccagcccgccgccaccatactactagaaagcgatgcctaccataccacactgctgtcagtctctggagcatttaggtggtctggatcaatggaagggttgtgtcctagccagccggcaaagatgagctgctgatggtaatgatgatgataagaggccactgctaccctactacgtaccctnctctttgtgtgctgccatccgtccccgttagacgatcgaggagagaataacgcatagctctctgctcccggcctgtcttctgccgtcccggccgtttaattactagtgnngtcgtcctatatgtttagcaacatcaggtgtattgtgcggg

SEQ ID NO: 97329 - DNA, 524 bp, Zea mays
  unsure (1)..(524): unsure at all n locations
gcgtatgactcgttcctaatnactgatagtactcacgtaccggtccggaattcccgggtcgacccacgcgtccggacaatgtgcatgaagttcgctgaactagagagaagccttggtgaaattgatcgttcgcgtgccatctatgtgcatgcatccaactatgctgatccaaataatcctgacttttggaagaagtggaatgactttgagattcagcacggtaacgaagacacattcagggagatgcttcgtatcaaacggacagtggctgctagccgtagtcagacacatttcatactaccggagtacttgatgcagaaggatcagaggttaaacctggacgaagcagttgacactctgaaacgtgctggcgtccctgaggacgagatggcagccttggaaaggcaactggctcccggaccatccactgcaccagtagcaacaccaagcactgccccagcctctgctaacaggacgatgaacttcgtcagtgctggagtagaggcgcaagccgagagcagcat

SEQ ID NO: 97330 - DNA, 529 bp, Zea mays
  unsure (1)..(529): unsure at all n locations
gcggtnacgtgaatagaatctggaaagtagtatggtatacactctccggaattcccgggtcgacccacgcgttcgcggacgcgtgggctgggaagaccctattggctagggctatcgccagtaacatgaatgccgacttcttgaaaattgcttcaagagctataattgacagatactttggacaaagtgctcgcttgattatagaaaatgtttggctatgcacgtgatcacctaccatgcatcatgttcatggatgaaattgatgccattggtcggcgaagattcagtgagggaactagtgctgatcgtgagatgccacggacattgatggaactccttgaataattagacggttgtgatgaactctgaaaggcctagatgatcatgggcacgaatagacctgatgtactggaccctgcgcttctgcgtactgtacgtttagacaggtagattgaaattgcgctacccaacgtgcaatcnagaactggaagttctcaaaacttctgcagctggtgatgcgcaacatggg

SEQ ID NO: 97331 - DNA, 523 bp, Zea mays
  unsure (1)..(523): unsure at all n locations
tgtcgtactgaaaagacaggaaggaatgtctcaccggtccggaattcccgggtcgacccacgcgtccgggaggaagaaaaaccggcctcacctactgcggctccagaaccagaaccggaacaagtgcctgagccagaacccgagccagtgaaagaggaagcaccagaagctgaaccggatttgctgggtctgaacgaaccgaaccctgctgcaactgcgatagaagagcagaatgctttggcgctagctattgttccgatagatgatgctccgaaagctgctcccacttttggaaatggagtcactggctgggaactggcccttgtgacagcaccaagttcaaatgagaccgccgttgccccaagcaagaaactggccggtggtctggacttgctgaccctcgacagnctgtacgacgaggcgaaccggatagcgagccaaccagcaagcttccacccctgggaggcgacccccgacgtgccttgcccgatgatgaccatggcgccngtgatgcacgaccccc

SEQ ID NO: 97332 - DNA, 527 bp, Zea mays
  unsure (1)..(527): unsure at all n locations
nggagtgcgcntgagtccgtatggggaggataatagtatctgctctaccggtccggaattcccgggtcgacccacgcgtccgcggacgcgtgggtgctgtacagaacaaggagaacgagttagtccagagcagtcgtaatgagtacctcaagctgaaagcgagggtggataatttacagaggactcagaggaatttgcttggtgaagatctggggtcacttggtgtcaaagagcttgagcagcttgagaagcaacttgattcatccttaaggcacataagatccacaaggacacaacatatgcttgatcagctcactgatcttcagaggagggagcanatgctgtgtgaagcatataagtgccttagaagaaagctggaggagaccagaaccatgtgcatggccaagtgtggaacaccgtgccaactacttcgctccaaaggcactttcttaacaagatgccccattacatggtggccatgtgttggtctttcaatcccttgaaagttgaacaaaagccaaccttgc

SEQ ID NO: 97333 - DNA, 531 bp, Zea mays
  unsure (1)..(531): unsure at all n locations
tgagtgcgctgagctcagcccagcaggtgattgcactgacgtaccggtccggaattcccgggtcgacccacgcgtccgcccacgcgtgcgcccacgcgtccgcccacgcgtccggttctttttcgcggcccccgcttcggcgcgggaggttcggggggtccaccgtggcgtgcttcctgctccgcttctcgacgggcgggcaggccacgggcaccttcgggctgacgggcgtgtcggtgtgggaggcgctggtgctggagatcgtgatgaccttcgggctggtgtacacggtgtacgccacggcggtggacccgaagaagggcagcctgtgcaccatcgccctcattgccatcggcttcatcgttgggggccatcatccctgttgggcggcgcccttcgacggagcgtccatgaaccccgccgtgtnccttcggccccgccctcgtcaagctggaatggggcttccaaggggtggactggggtcggccccctaatcngccgacgaccttgccgcggtatcttacagctggt

SEQ ID NO: 97334 - DNA, 539 bp, Zea mays
  unsure (1)..(539): unsure at all n locations
cggatgantgaggctgaaaacgtnnacctangtacgttcgggtccggaattcccgggtcgaccgacgcgtccgcacgcccccgctcctctcgtctctatcttcgcctcttccatcgcaggattcagcggccatgggcggcggcaacgcccagaagtccaagatggcgcgcgagaggaacgccgagaagaacaagggcggcaaaggcagccagctggaggccaacaagaaggccatgaacatccagtgcaagatctgcatgcagaccttcatctgcaccacctccgaggccaagtgcaaagaacatgcggaggcgaggcatcccaagaacgacctctaccagtgcttcccccacctcaagaactagtaagcagcagaagcatatgctctgctcagctaaaagacaagtactacatatatatatatatacgctgtgtgtcaattaatgggttctaggctgctgctgatgcggctgcttcggtcgtgttgccccgtctgattatgtacttgaaacccttggttgtaaccctgctgggccaat

SEQ ID NO: 97335 - DNA, 521 bp, Zea mays
gtcgtgctgttcgcggatggagggaagtttcaccggtccggaattcccgggtcgacccacgcgtccgcaaagaattccctcccctagccgccgccgtcgctcgtctccctgaaagggtgccgggaccgaggatttggccgagttctaggtagagaatcggttttacttgtctcagcccggggtctgctgcgtctggtggtggtgaaggggagaaattcgtgagatctgttccggatcaggcgtgcgagctcgggaatcaggggtttcacacatagcttcgtcgatttgaatttgatgtactaatggagtctaagggtggcaaaaagtctagcagtagtcgttctatgatgtatgaagcttcccttggctacagcattgaggacgttcgacctgccggaggcgtgaagaaggtccaatctgctgcttaactcaactgcgcgaagaagccattctgatatcccttttggcttcctcattctaagtagttaggatttcttttctgacactttgattctgaccaa

SEQ ID NO: 97336 - DNA, 528 bp, Zea mays
  unsure (1)..(528): unsure at all n locations
agaagctgctgtttcagccttgatggagatagtatcgctctaccggtccggaattcccgggtcgacccacgcgtccggcctccctctcctctgccgccgtcaccgccccttccttcgccgcaccagcgccaggccgcgcgcgtggtcagaaggaggtccttcaccgtgcgcgcctctctccgcaaggccaccggcaccgacgccgtggcaatggctgccagcgccctgcttgccggcggtgccatggcccaggaggtgctgctgggcgcaggcgacggcgggctcgtcttcgagcccagccagttcaccgtcaaggccggcgacaccatcacattcaagaacaacgccggcttcccgcacaacgtcgtcttcgacgaagacgatgtgccgagcggcgttgacgccaccaagatctcgcaagaggaagaacctaacgggccaggccaagactactncggtaccttatcgtgccgggaacctacgggttctaccgggaacgcgattaatgaacccgaatggtcggaaaag

SEQ ID NO: 97337 - DNA, 527 bp, Zea mays
  unsure (1)..(527): unsure at all n locations
agctcgctagtgaacttntgacncttacagtactgttcggtccggaattcccgggtcgacccacgcgtccgaagatatggagtcgacaggaaagattttgatggagcggtatgaggtggggaggctactggggaaaggcacatttggcaaggtgcactacgcaaagaatcttgagtccaacgagagtgttgccattaagatgatggacaaggacaaagtgctcaaggccgggctttcggagcagataaggcgggagatcacaacgatgcggttggtggctcataagaacattgttgagcttcatgaggtcatggcgacgcggaacaacatctactttgtcatggagtatgtgaaaggcggagagctctttgacaagattggcaagagtggcaagctcacagaggccgctgcacacaagtacttccagcagctcattggtgcggtggattactgccacagccgaggtgtgtatcaccgggacttgaagcctgagaaccttctgttggatgagattgagatcttcaggg

SEQ ID NO: 97338 - DNA, 523 bp, Zea mays
cgaattgctgagttcaagcacatcgagtcgtacttcttcctgaattcccgggtcgacccacgcgtacgcccacgcctacaccttagagaagtgcgcatttaccatataaaaggctcacacgatctgtgggataggataccatcattcatgataactgcaccgatctcacggatcttcaagacatcgacgcatcatccaaatgttctgccctatcaactctcatatagaatatcaataacctaccatcgaagtcacggacgtcgatgactcatgtcttagctacggatacgacgcctgataaacaacttccacatccaacgcattcaggctgcccgcatatcacccaaccctgatacgggaacactagtgcagcttgataacattatcccttctctttattgtccgatacttgacatgacacaatctacatcaattaacgagtcatcctacgaaggcgaaccccatttactcaaatcctgtcattctaattgctataacctgcaatgaaaacgttactatcttc

SEQ ID NO: 97339 - DNA, 525 bp, Zea mays
  unsure (1)..(525): unsure at all n locations
agagtgggntgtttcgaatgggggggggacagtattgctgtaccggtccggaattcccgggtcgacccacgcgtccgctgaaaccttggtgaagccgagacgagcaatcatccaagcagctagtgcttagcatctatggcgacctccgttcgtggtttcagtagcgccctcagggatgtgccgggcagctacggccttccgctggtgggcgccgtccgcgaccgcctcgacttctactacttccagggccaggacaagtacttcgagtcccgcgtcgagcgctacggctccaccgtggtgcgcatgaacgtcccgccgggccccttcatggcgcgcgacccgcgggtggtggcggtcctggacgccaagagctntcncgtcctcttcgacttggacaaggtggagaagagggacctgttcacggggcacctacatgccctccacctcccttaccgccggccaccgggtctgcgcttacctcgacccttccgaggccaaccaggccaaggtgaaccagttgttctc

SEQ ID NO: 97340 - DNA, 535 bp, Zea mays
  unsure (1)..(535): unsure at all n locations
cgagcctgnctgtttcacgcacgagattgtatgcctcgtccggtccggaattcccgggtcgacccacgcgtccgggagaaccgagagcagagagacatggcgccccaccaccagcagcgggcgctgctcctgttgccactcgtcttcctcctcctcctccttgccccgcccctcgccggcgcgtggggaaaggagggccacatcatggtctgcaagatcgccgagaagtacctgtcggagaaggcggcggcggcggtgaaggcgttgctgccggagtcggcgggcggggagctgtcggcggtgtgcccgtgggcggaccaggtgcgctggcactaccactgggccagcccgctccactacgccaacaccccccaagtctgcaacttcaagttttctcgggactgccacaattctcgtggccagcaagggatgtgcgtcgtcggggctatcaacaactacacggaccagctctacagctacgggcagaagacttcgtataacctgaccgagagcctgatgttcctggcacacttcg

SEQ ID NO: 97341 - DNA, 521 bp, Zea mays
  unsure (1)..(521): unsure at all n locations
agtcggtnctgtgtattgacatactactgatctncggtccggaattcccgggtcgacccacgcgtccgtgagaatctgctacatagggcatttagtgtgttccttttcaactcaaaatatgagctgctacttcagcaaaggtccgcgacaaaggttacctttcctttagtttggaccaatacctgctgcagtcaccctctgtaccgtgagtctgagcttatccaggagaactaccttggtgtgagaaatgcagcacagaggaagctactggatgagctgggcatcccagcagaagatgccccagttgaccaattcacccctctgggccgaatgctttacaaggcaccatctgatgggaaatggggggagcatgagctcgactacctgctgttcatcgtccgggacgtgaaggtgcagccgaacccagatgaagtcgctgatgtgaagtacgtgaaccgcgaggagctcaaggagctcatncggaatgctgacgcntgcgagggatgggtgaagatctcccc

SEQ ID NO: 97342 - DNA, 532 bp, Zea mays
tgtccgctgcgtggacaagaaagggggggagaagatgacctcgcgtccggaattcccgggtcgacccacgcgtccgcggacgcgtgggccgccgcctgaaaccccagccgatcgacggtggcggagatgtcgttgtgctcggtgaatatcggcgaggaggtgtggctcacatgcctctcccacgccctcactaccgagaccgaggaggtcatggggctcctcctcggcgacgtcgagctttccagcaaggtcgccacagccctggtatggggggcgtcgccgcagatgaggtgcgagcggaagaaggaccgcgtcgaggtcaaccccgagcttctcgccgccgcatccgcgcaagccgagaaaatgacggccaccatcaagaggactacgaaggtgatcgggatggtccactcggaaccacatattaaccgtctaacggtccatggagaaggtcgtacccaatcaatggttcaagtgctggatacaggctttgggggccttatattttcctggtttaagcaaaatgctcaaa

SEQ ID NO: 97343 - DNA, 528 bp, Zea mays
agataagtgctgaaaaagcaggggcagtattcgtgctaccggtccggaattcccgggtcgacccacgcgtccgcccacgcgtccggcggaggggcgtcgtgtcctccccccgctcccggctccagcgccacatgcggctgccgaggatcagctgcagcgccaccgatgaggccagcggcgccgtggtcggccgtcaccgtggagaagatgctgacggtgacggcctcggtgcaggcggcgccggccatcggtcagatgtacttccagcgcgccctcgacgacgccggcgacttcttcggcaagacgctgctgatggaactcgtcagctccgaggtcgacgcaaagacgggtctggagaagccgcgggtgacggcgttcgctcacaagacgctgcgggagggccactacgagggggagttcaaggtgccggcgtcgttcgggcccgtgggcgctgtgctgctggagaacgagcaccacaaggagatcttcatcagggagatcaagctcgtcacgggcagcgacagcagc

SEQ ID NO: 97344 - DNA, 523 bp, Zea mays
  unsure (1)..(523): unsure at all n locations
tgtaagggctgataagaagggaggggatggtatgctgtaccggtccggaattcccgggtcgacccacgcgtccggccgagcccaaccgcacaagcgcgcgaggcaggagagagagagaggcggggagcaaaacagtggaggggaaagaggaggacgtgcgcctgggcgccaacaagttctcggagcgccagcccatcgggacggcggcgcagggcgccgctgacgacaaggactacaaggagcccccgccggcgccgctgttcgagcccggggagctcaagtcctggtccttctaccgcgcgggcatcgccgagttcgtcgccaccttcctcttcctctacatcaccatcctcaccgtcatgggcgtctccaagtncacccttcaagtgcgcaaccgtctgcatccagggcatcgcctggtccttcggaggaatgatcttcgcgctcgtttactgtaccgccggcatttccggaggacacatcaacccagctgtgactttgggctgtccttaaccaggaggtt

SEQ ID NO: 97345 - DNA, 526 bp, Zea mays
  unsure (1)..(526): unsure at all n locations
tgaagcgtactgtgttcctgcaccatagagtagtactttcgtcttgaattcccgggtcgacccacgcgtccgcgcattagcgcggccagagagagatgcgggtttgagttgggatacctcggaggcggcgacggcagggtcgcagtggtcagtagccgggtcggccggtggccgcagattctcaccagcagcgccatacctcgccgtcgcccggcgctccagcccagggcaggagaggaggccactctgactgtcactctgagcttcgcgtcacctgagtactgacggacgacatgggagaagttgaggacatgtacacccaagacgggaccgtggacatgaaagggaatcccgccgtgaagaagggcaccggcaactggcgcgcctgcccctacatcctcgcgaacgagtgctgcgagaggctggcttactatggcatgagcaccaacctggtgaactacatgaagacccgacttggccaggtgaactccgttgtctncaacaacgtcaccaactggcaagggac

SEQ ID NO: 97346 - DNA, 530 bp, Zea mays
  unsure (1)..(530): unsure at all n locations
tgtnaagtgggnttntttcgaacgcggagaaagaagggaatgctgtaccggtccggaattcccgggtcgacccacgcgtccgacatggaggattatgaggtcatggtcccattccaggctctccaagctcttggctgccatgtcgatgccgtttgccccgacaagggagctggggagacgtgcccgacagccattcatgatttcgaaggtgaccagacctacagcgagaagcctggccacgattttactctgacagcgtcgtttggaagtgtggatgcttcgagctacgacgcgcttgtggttcctggcggacgggctccagagtacctggctctgaacgataaggtcatcagcttggtgaaagccttcgcggaaagcggaaagccaatcgcgtcgatcttgcactgccagcaaaatttatcccgttgccgaatccctaagggggaaaagtggaccggattcccaagcctgaagcttgacctggtgcttcgttgccggaccctgcttgaacctggaccgaatcaaccgtt

SEQ ID NO: 97347 - DNA, 527 bp, Zea mays
cgtcggtgttgatgcacccgacacatagtatcgtatctactggtccggaattcccgggtcgacccacgcgtccgcgcattagcgcggccagagagagatgcgggtgggagttgggatacctcggaggcggcgacgactggatcgcagtggtcagtagccgggtcggccggtggccgcagattctcaccagcagcgccatccctcgccgtcgcccggcgctccagcccagggcaggagaggaggccactctgactgtcactctgagcttcgcgtcacctgagtactgacggacgacatgggagaagttgaggacatgtacacccaagacgggaccgtggacatgaaagggaatcccgccgtgaagaagggcaccggcaactggcgcgcctgcccctacatcctcgcgaacgagtgctgcgagaggctggcttactatggcatgagcaccaacctggtgaactacatgaagacccgacttgccaggtgaactccgttgccttcaacaacgtcaccaacttgcaaaggac

SEQ ID NO: 97348 - DNA, 532 bp, Zea mays
  unsure (1)..(532): unsure at all n locations
cgcggntgnctgtgtccattcgagtacgtacgaccttccggtccggaattcccgggtcgacccacgcgtccggggaaagaagggtggcaagaaaaagaccgtcgaccctttctctaagaaggattggtatgacgatcaaggcaccgtcggtgttcagtgtgcgcaacatcgggaagactctcgtatccaggacacagggtaccaggattgcttctgagggtctgaagcacagagtctttgaggtttgcctagctgatcttcagggtgacgaggatcaagcttacaggaaaatcaggctccgtgctgaagatgtgcagggcaggaatgtgctcacaaacttttggggtatgaattttaccactgataaattgagatccctagtgaagaagtggcagacattaatcgaagcccatgttgatgtcaagacaaccgacaactacatgttgcgtttgttctgcatcggcttcaccaagaggcgcccaaaccaggtcaagaggacctgctatgctcaggcatnncagattcgtcagat

SEQ ID NO: 97349 - DNA, 526 bp, Zea mays
  unsure (1)..(526): unsure at all n locations
atcggtgctngtttacccagccacanagtattgcatcttctggtccggaattcccgggtcgacccacgcgtccgcttggcgcatggatgggtactggcgaagtatgccctcgcaggatgccgtcattgggcgatcagttggtgcgaagtcctgccttcgccttggatctgcggggtcggaacccggccgcgtttgtgcgtgaagtggaggccgaggcctcaaggattgtagggcgatacgtgccgaagaagaaaaccttgcggagttgggatattcgcggttctaatgttcgtttgaaccgtgttttcgagttgaaccgtctgccatatggcggttacccgggagacgacgatgctggtgttgtcgaccgccggggaaaagggcggctgctgcggtcgacgagggcccttcgcggggagttgtgccggccgcgaccactaaaaagaggaaactaggtactgcagttgangggttgggggtctccgaccgttttgctgtcgatttgttgggaacttgcgcggccccn

SEQ ID NO: 97350 - DNA, 528 bp, Zea mays
  unsure (1)..(528): unsure at all n locations
cccgctnnctatctaagacaagcatatgtactgcatcctccggtccggaattcccgggtcgacccacgcgtccgcccacgcgtccgtccacgcgtccgacctcctcacggccgacggcgtcacctaccataagacatgcttcaagtgcagccactgcaaagggatcctctcgatgtgcagctactcttccatggacggtgtgctgtactgcaagacccacttcgagcagctcttcaaggagaccgggagcttctccaagaacttcacgccaggtggcaagtcttcagacaagggtgaactgacaagggcccccagcaagctatcatctgcgttttctggtactcaggataagtgtgcagcttgccagaaaacagtgtacccgctggagaagttaactctggaaggcgagtcctaccacaagagctgcttcaagtgctcgcacggnggctgcatcctcaccaccttctnctacgccgcgctcaacggcgttctgtactgcaagatccacttcgcgcagctggtcatgga

SEQ ID NO: 97351 - DNA, 533 bp, Zea mays
tgcccggtagtgtccacgcacagatcgtactagtcacttccgttccggtctcggaattccggggtcgacccacgcgtccgcccacgcgtccgagcaaaacagagctccagaaactgaccgattggtttcacaccggagtgggcgggatggcggggacgagcggccacagcgaacgagcagacgagcctctgaaggaggcgctgttggctgcccgcaacggtagcggcagcgacggcgactgcgagaaggacctggaggagatccggagcgtggggtcgttcctgcggcacgcggtggaggagaaccggaagctctggtaccttgcgggccccgccatcatcacgtccatcacgcagtactcgctcggcggcatcacccaggtcttcgcctgccatctcaccacgctcgagctcgacgccatgttcaacgagaacaacgtcatcggcggcctctgccttcggcatcatgcttgggattgggcactgcgcttgaagacccctgtgcggacaagcgtactgctccgagcaagttgt

SEQ ID NO: 97352 - DNA, 525 bp, Zea mays
  unsure (1)..(525): unsure at all n locations
agatgcgantaacgctggtcagtcccgctacgncgtatcgttccggaattcccggttcgacccaagcgtcccgtaatgttatggtaaaacttcgtttaaaacgatgtggtagaaagcaacgtgcgacttgagaggacgtgatcgattgtggattgcctatccatcattntccatagtaatgaaaatgctcttggctcgacatagtctgttctattcgtcccgaaccgaattttcgctgggttgtttgtaagtaaagtaaatattacacgatggagctcgagaggacagaatttctttttgatcatgggaaggaatctagggttagtgaaaacctaataaatagggcaacctttgcagcctatccctaattatggaaatcaaagggttaaattaggaaaaagtttaattttgtaagattggaaaactttttttgatgaaaagtctatctgattcaattgttcatatttgattcctatagaaaagtgaatgccttatcgaaggaaatttgaaaaaagaaaggttttt

SEQ ID NO: 97353 - DNA, 513 bp, Zea mays
  unsure (1)..(513): unsure at all n locations
agaaggcgatttgagatgagacgacatgcatcctcaactgcttcggaattcccgggtcgacccacgcgtccgcccacgcgtccgcttaatccagtgcatctttgagccgccgccgccgtgaggagctccggccatccgtcgtcatccgtcaaatcagttgatacgaagacattagaggatataatcggcccttcaacttcaatgaagtctcatacacatccagtgaagcctcgctttcaagtcagcaatcggcctaaatgcaatttgctaaataaaagttctattgattctgagcaaactatccaatcttctatagcctccaagataacaactttgattgacccgcggcaccggtatgaccacaaccttcactgctactacgactgctggctccactccgaaagcaagcagcctttctcctactggccgcacttgaagaaatcttatatcagtttgaggaaaaactccaagctgaaagagaggaagctgctaggaagcangaagaagtgcagc

SEQ ID NO: 97354 - DNA, 517 bp, Zea mays
  unsure (1)..(517): unsure at all n locations
ggcctattggctgacgcccagcccacctacggactgccgtaccggtccggaattcccgggtcgacccacgcgtccgcccacgcgtccgggtggnggagaaaggtgatacactgaaggtgcgagctggattctaccgcaacttcctccttcccaagggcaaggctacacttctgaccccagaagtcctcaaggaaatgcagctggagcaggagagaatagaagctgagaaaaagcgggtaaaagaagacgctcaacaacttgctcgagtttttgaaaccattggcgctttcaaactccctcgcaaaggtggaaaaggaaaacagatctttgggagtgtcacggcacaggatgttgttgacataataaagtcacaacttaatagggatgtcgacaagaagctggtgacggttccagaaatccgtgaaatcggagagtatgttgcagagatcaagcttcacccagacgtgatagcgcgagtaaggcttgatgtctatgcgaaatgagctcagcaagtacc

SEQ ID NO: 97355 - DNA, 517 bp, Zea mays
  unsure (1)..(517): unsure at all n locations
tgtaatgcttcactgagatagaggagggaggatattgctctaccggtctcggaattcccgggtcgacccacgcgtccggattttagcttctatgatcgttctgctccaatttatacgcaacctagatatttgcctgcttcaaaggttcttgatgctgatgtgacagacagtgttattggagaagggtgtgttattaaacattgcacaatcaatcattccgtagttggactccgttcctgcatttctgaaggtgcagttatagaggactctttgctaatgggtgcagactattacgagactgagaatgataagaatgtcctttctgagactggtggcattcccattggtattgggaaaaattcacatatcagaaaagcaatcattgacaaaaatgctcgcattggagaaaatgtgaagataatcaattttgataatgtccaagaagcagtaagggagacagaaggatattttatcaaaagtggaattgtcacggtgattaaagatgctntaattccta

SEQ ID NO: 97356 - DNA, 522 bp, Zea mays
  unsure (1)..(522): unsure at all n locations
agtatagagcctgtgcgtgccacatgcaaccgtagntccctcgatcatcaatcctcattaccgactggaggcacgcgtcatgcctccgtccactcgttcgcacaacatttcgcgttgggggccgtacccagctactcggtgactggaatatatgatgccttggagtttaagaatggaggatctgattatcttggcacgggtgtccttaaggctgtcagcaatgtaaataacattattgcaccatcaattgttgaaaaggaccccactgatcaggttgagattgacaacttcatggaccatcagcttgatggaacctccaatgattagggctggtgcaaacagaatcttgtagcatatgccatccttgccgtttcacttgctgtgtgcaaagcttgagctatggtgaagaatattcctctttaccagcacatctcatatcttgctgggaacaaaactctggtgcttcctgtacctgcctttaatgtcattaatggaatgtcacatgctgtacacaagcttgtg

SEQ ID NO: 97357 - DNA, 517 bp, Zea mays
  unsure (1)..(517): unsure at all n locations
gggtagagagtgcctatccatgaatacgaactgattgnatcgctctaccggttcggaattcccgggtcgacccacgcgtccgcccacgcgtccggacggcagctacgcgaggggggccgtacccagcggcgcatccactggaatatatgaggccttggagttgagggatggaggatctgattatcttggcaagggtgttcttaaggctgtcagcaatgtaaataacattattggaccagcaattgttggaaaggaccccactgagcaggttgagattgacaacttcatggtccaacagcttgatggaacctccaatgagtggggctggtgcaaacagaagcttggagcaaatgccatccttgcggtttcacttgctgtgtgcaaagctggagctatggtgaagaagattcctctttaccagcacatcgcaaatcttgctgggaacaaaactctggtgctccctgtacctgcctttaatgtgattaatggagggtcacatgctggaaacaagcttgcc

SEQ ID NO: 97358 - DNA, 498 bp, Zea mays
  unsure (1)..(498): unsure at all n locations
aatgagaatgagccctangctatgccgtaccggtccggaattcccgggtcgacccacgcgtccgggcggtgaccccgagaagttcaaggagctcgcacaagcctatgaggttttgagtgatccagagaaacgtgagatttatgatcagtatggtgaagatgcccttaaggaaggaatgggcggtggaggatcccatgttgatccatttgacatcttctcatcattttttggaccctcttttggaggaggtggtggaagcagcaggggaagaaggcaaaggaggggagaagatgtagtccacccacttaaagtttctctggaagatctttacaatggcacctcaaagaagctctctctttcgcgcaatgtcatctgctccaagtgcaagggcaagggctcgaagtctggtgcctcaatgaggtgccctggttgccagggctcaggcatgaaagtcactattcgtcagctgggcccttccatgatacagcagatgcagca

SEQ ID NO: 97359 - DNA, 507 bp, Zea mays
gaaagggtgcctgaccataaaagaagctggctataccgccggaattccgggtcgacccacgcgtccgcccacgcgtccgcccacgcgtccgtgccgctgcacgagctgcccacccacgccacccgcggctactacctgggcatgttcctcgggggcgcctaccaggaggccctcggcgggctgcacaacctcttcggcgggccgagcgtggtgcgcgtgtcccagtgcgacgggccccactgcttcgccgtgacgcgcgccgccgcgggcccgtcctgcgccgacgtgctccgcgcgatgcagcacgagcccgaggtgatgtacgaggtgctgaagcagaggaccgacggcgccacggccgccgccctcgcccgggccttcggcgcaatgccgtacctggtgttcgaccccgaggccgccgtgatgtccggcggcgagagcagcgactcggagcggtcggccgccggcgccgccgaggaggaagacgatgaggagtgggagttcatt

SEQ ID NO: 97360 - DNA, 516 bp, Zea mays
tgatagttaggttccgtgtagccgtcacccgtccctcagcatacccgtccggaattcccgggtcgacccacgcgtccgcccacgcgtccgcccacgcgtccggggttggcttctcctccccctccggttcgggttcgggttcgtgaggttctccggggttcggtttcgtgggtgagcggatcgagatggcggcgtcagatgttgagtaccgctgcttcgtcggcggcctcgcctgggccacggacgaccactccctccacaacgccttcagcacctacggcgaggtcctcgagtccaagatcatcctcgatcgggagacgcagaggtcccgcggcttcggcttcgtcaccttctccacggaggaggcgatgcggaacgccatcgagggcatgaacggctaggagctggacggacgcaacatcaccgtcaacgaggcccagtcccgcggcggccgtggaggcagcggctgcagcgggtacggtggtggccgtggaagcagcggctacagcagtggct

SEQ ID NO: 97361 - DNA, 512 bp, Zea mays
  unsure (1)..(512): unsure at all n locations
agtgagcgtcgttgagcctcccgaacacnagtccatacctgttcggaattcccgggtcgacccacgcgtccggcaatctgcacaggataatgcacaagacggaactagtccatccactacgtgtttgaggaaaagagagttcatccactacggttctggaagaccctgttgagaacaccctgcacggtgccgcccatgcctgctcccacggcttcagcgaggtatgcggcctcttggaaggttttctgaagatcaagagcatcctttattctgcggttcacaaacgtccaagtatcacggaactctggagaattgtctgtcaacatatacacctctgaggttgagtagataccaccaagcactgtacgtttcacataccaatcaatatctgacccagaatctccagcagcatgccatatctcatccaccaggatagctcgctgcttcaagcttgttgagacgtttgctggttgagactgaatactcagtgcctagttctagatcgcgagcgg

SEQ ID NO: 97362 - DNA, 515 bp, Zea mays
  unsure (1)..(515): unsure at all n locations
gtatagagccttgactgcgcctgagactaagtcntgcgtaccgcgttcggaattcccgggtcgacccacgcgtccgccgggtggacgctgtacgtgcaggtgatggagccggacacggaggagcagtacgactgcgacccgctggacgacaccaagacgtggccggaggacctgctgccgctccgccccgtggggaggctggtgctggaccggaacgtggacaacttcttcaacgagaacgagcagctggcgttcggcccggggctggtggtgccagggatctactactcggacgacaagatgctgcagtgccgggtgttcgcctacgccgacacgcagcgctacaggctggggcccaactacctgatgctgcccgtcaacgcgccgcgctgcgcgcaccacaacaaccactacgacggcgccatgaacttcatgcaccgcgacgaggaggtggactactacccgtccaggcacgcgccgctgcggcaggcggncgccgccacgccactggcgcn

SEQ ID NO: 97363 - DNA, 517 bp, Zea mays
  unsure (1)..(517): unsure at all n locations
agtntagcggtcncgtgaatgttgggggggaggaatgtaagtacccgtccggaattcccgggtcgacccacgcgtccgcccacgcgtccgcccacgcgtccggaccagcccacggtcagtagccatcggccactaccagcctcgggcgctggctgtggcctgtgggctgggcggggcccctttaaatgccggccatacgcgcggcctaaagcctccagagccacgctgcttcccggccgaagcctccgtccgcgcccacggtttccattccatcccccaggcttgcgccgactcgccacttgcaccgccggccggtttcgccgaacgcctcgcgcccacccgcgcgcggagacctgcatataagccggccgcgtgtcgtccggcgctcccgggacaggcgatccgttcgtcatccgctgcaaaccaccaggcaccagctccgcgcgcagaggccggaggactacgaccgacgagggcgacgaacaccaaggctccgaagtccgaggaggcaggaagc

SEQ ID NO: 97364 - DNA, 514 bp, Zea mays
  unsure (1)..(514): unsure at all n locations
tgttagtgcgtgcctgtggactcattacgatcctacgctacgccgtccgaattcccgggtcgacccacgcgtacgccaagccagtaccgagtcctacgagcagtcgcacgcaagtgtcaagagacgaaacggtcgacatggctcgcacgcaatctgccgtagcggtcgccgtggtggccgcggtgctgctgctggcagcggcggcgacgacctcggaggccgccatcacctgcgggcaggtgagctccgccatcgcgccctgcctctcctacgcccgcggcacggggtccggcccctccgcgtcctgctgtagcggcgtcaggaacctcaagagcgccgncagcaccgncgncgacaggcgcgccgnctgcaactgcctcaagaacgccggcaggggcgtcagcggccttcacgccggcaacgccgncagcatccccttcagtgcggcgtcagcattccctacaacatcaggcacttcaccgactgctccaaggtgaactaaaacctagaccac

SEQ ID NO: 97365 - DNA, 512 bp, Zea mays
gccgtttcctgtctctgagtgacgtagatcgtcgcgtatcgcgtccggaattcccgggtcgacccacgcgtccgcccacgcgtccgggacaccatggctccgatgaagctgtacggggcggtgatgtcgtggaacgtgacgaggtgcgcaacggcgctggaggaggctggctccgactacgagatcgtgcccatcaacttcgccaccgccgagcacaagagccccgagcacctcgtccgcaacccgtttggtcaggttccagctctgcaggatggtgacttgtacctcttcgaatcacgagcaatctgcaagtacgctgctcgcaaaaacaagccagagctgttgagggaaggaaacctcgaggaggcagcaatggtggatgtttggatcgaggtggaagctaaccagtacaccgctgcactgaatcccatcctctttcaggtcctcatcagtcctatgcttgggggaaccaccgaccagaaagttgtggatgagaaccttgaaaagctaag

SEQ ID NO: 97366 - DNA, 511 bp, Zea mays
ggaaggggtcctgagaatgaatagaaagtaagtgctaccggtccggaattcccgggtcgacccacgcgtccggactcgaccgccgccgtcccagttcgcttcgcgtcacccagagctcgtcggcctccgtccccgcgagaagcgagagcatggacacccaggtgaagcttgctgttgtggtgaaggtgatgggcaggaccggctccaggggtcaggtgacccaggtcagagtgaagttcttggatgaccagaaccgtctcatcatgaggaacgtcaagggccctgttcgtgagggtgacatcctcaccctgctcgagtctgagagggaggccaggaggctgcgctgaagccctggtggccttggatgtaattctgttaattttgttctatgtttgtcgaacttgccgtgtgaccttcacaacatctgctttgagatttactcagcctggattgcagttttattttatgttcctgctggaaagtgacttgccgagacatagttatcattggg

SEQ ID NO: 97367 - DNA, 533 bp, Zea mays
  unsure (1)..(533): unsure at all n locations
agtaaatntagtnnttggagccgtgtcctgtgcactgagtatagaatcttacgcgactgctgtaccggtccggaattcccgggtcgacccacgcgtccgcggacgcgtgggcggacgcgtgggctcagattgggaaaggttcaagaggagatgttacgtatattgcctacacttgttgtgaacaaccggcaatatcgagggaagcttgagaggaaagctgtcctcaaagctatttgtgctggttttgaggaaactacagaaccaaatgtttgcctgagtgatgatatagagacaaatgagtgtctgaatgacaacgggggctgctggcaagacaaatctgctaatgtaacagcctgtaaggacaccttccgtggtagagtgtgtgaatgccccactttcaatggcgtacaatttaaaggcgatggctacagcaattgtgaacctgctggaccaggaaaatgcttgattaaccatggaagatgttggcatgaaactcgcaacggaaaaacattctctgcttgccaggaatctgg

SEQ ID NO: 97368 - DNA, 514 bp, Zea mays
  unsure (1)..(514): unsure at all n locations
gtttgtgaggttgnttgaagattgaaatcaagcatggcgaacncgtccggaattcccgggtcgacccacgcgtccgaaaatttccatctatgtgacaagtgtcatgcagaggagcagaatacagcacagaaggacaggcgtccggccaccacaaaacagaagcatgcattcgaaagaatggaggtacaacctcttccagagactgatgatggagatccgacaatggaaagtaagtattttgacagcaggatcgatttcttgaagcactgccaagacaatcaattccagtttgataccattcggcgggcaaagcactctacaatgatgattctgtattacctacacaattcaacctgctctgcttgccatcgtgccgtggaccaatgcttggtgtggccgtgcctagagtgcctaggctgcaccttttgtggtcaatgctataaacaaaatggtcaaggcttgcatattcatgaattaaggcataatgacactagagaaacttcacagaagcaca

SEQ ID NO: 97369 - DNA, 520 bp, Zea mays
  unsure (1)..(520): unsure at all n locations
cgtatagaggcctgtgtgtgtctctgaggactcagtctatngcgacgccgtcggaattcccggttcgacgccacgcgtccggcgtccgcatcccggcgtcgttcgccgacctgcccagcctccggtcgctggacctggggcacaggcagctgacgggcagcatcccggcggggctggtgcaggggcagttccggtcgctggtcctgtcgtacaaccagctgacgggcccgatcccgcgcgacgacgcgcgcgacgagatcaacaccgtggacctctcccacaacaagctgacgggcgacccctcccacctgttcgccgtcggccggcccatcggcaaggtggacctgtcgtggaactacctcgacttcgacctgagccagctggtgttcccgccggagatgacgtacctggacctgtcccacaacctcattccgggcaccgtgccgctgtcgctggagcggctgttcaagctgcataaactggacctgagctacaaccgtctgtgccggccgcttcccaa

SEQ ID NO: 97370 - DNA, 528 bp, Zea mays
  unsure (1)..(528): unsure at all n locations
tgattagaggccgtgtcgctgtctactgaggactgnataccgtngctaatgccgtaccggttcggaattccaggcacgagccacgcgtccggacctccactacaagggaagtaagtgccacagaatcatccccagcttcatgctccaaggaggtgacttcactctcggggacgggaggggtggtgaatctatctacggcttgaagtttgcggatgagaacttcaagatcaagcacactggtccaggccttctgtccatggccaatgccgggagagatacaaacggatcccagtttttcatcaccacagtgacaacaagttggttggacgggaagcatgtggtgtttggcaaggtgttgtctggaatggatgttgtgtacaaggtcgaagctgaaggccggcagagtggagagccgaagagcaaggttgtgatagcagatagcggcgagctgccgatgtgacggcgagctgaactgatgttccatcccgaagcatgatgataagaagttgctggttggacgtctgtctn

SEQ ID NO: 97371 - DNA, 503 bp, Zea mays
  unsure (1)..(503): unsure at all n locations
ctccgagtgacgtagagcgtngcgatgccgtaccggttcggaattcccggctcgcgccacgcgtccggccctccactacaagggaagtaagttccacagaatcatccccagcttcatggtccaaggaggtgacttcactctcggcgaccggaggggtggtgaatctatctaccgcttgaagtttgcggatgagaacttcaagatcaagcacactgctccaggcctcctgtccatgtacaatgccgtgagagatacacacggatcgcagtccgtcatgaccacagtgtcaccctttccgatggacccgacggatgttgcggacttcctgacgtcgtcggctggcgatacgttccggatcgtgaaatcttaaacccatttccattgcagatgcctcgcgtgatctcgctatctcgccggttttccccctgccttatgatcggcttacccatgtgcagttgccgtcacatggaaactttctcctcttcgggctttaaaggtctcat

SEQ ID NO: 97372 - DNA, 504 bp, Zea mays
ctctgtatgcgatagttattcggacggcttcggaattcccgggtcgacccacgcgtccgcccacgcgtccggtttgctggtccttagtggctatctaaaacacaagtatatatataggtgactgggatgagtactaccggacgtggacggaattcggtcctcctgatttttaagggccggctgcgtcgcatcttactccgttcgatgtgcggtgctctttcggtcgatggaccctaccttcggctgaaccgatttcaggggtggcgggccgttaagcataaaagataactcttttcgaggcccctcgtcggcgttttcggacttcctaacgtcgccgtatgccgtcacgtacttgctcgggaaatcttaacccgatttcctttcggttgacgctcgtgatcgcgctatttgccgtgttattcccctatctttatgatcggtttactcatttgcaagtgctcgtcatttgtaactttttttcttttagtctattaagttcttatg

SEQ ID NO: 97373 - DNA, 515 bp, Zea mays
  unsure (1)..(515): unsure at all n locations
cgataagaggcgtgcctgtggactgagctgangcatcagtatgcccgtccggtccggattcccgggtcgacccacgcgtccgagtgcatcgtggccagcggcctcgcccgccgctgcctcgtgcaggtgtcctacgccatgggcgtgccggagcccctgtcagtgttcgtcgactcctacggcaccgggaccatccccgacaaggagatcctcaagatcgtcaaggagaacttcgacttcaggcccgggatgatcaccatcaacctcgacctcaagaagggcggcaacaggttcatcaagaccgccgcatacggccactttggccgtgacgacgccgacttcacctgggaggtggtcaagcccctaaagaaggcatccgcttaagaatgtattgggaagttcactggacatgaggttcatcttcgtctggctctgctgatacctgcaaggattgctgctgctgctgcccctggatgtgtgtttgatcagtgactgtctgctctgctccatagaag

SEQ ID NO: 97374 - DNA, 500 bp, Zea mays
  unsure (1)..(500): unsure at all n locations
cgctgagaactaggcaatgcgactgncgtaccggtccggaattcccgggtcgacccacgcgtccgcccacgcgtccgcccacgcgttcgcccacgcgtccgcggacgcgtgggggcggggtggggcggcctcatgggcgccggccacgactactacgagcgcggcaacctggacatcttcagcggccggggcccctgcatgagccaggcgccctgcgccatgaacctcacctccgacggcaccggcgcgcaccacggctggtactgcaactacctcgaggccacggtcacggggccccacctcgggtgcgcgcagcagctcttcaccgtcgagcagtggctcgccaccgacgcgtcgccctaccgcctgtacgcggtcgtcgacaagtgcaagacgaagcggcaggagccgcgacgctcgccggccggcgaggccgaggccaccgtgaccgcgctctaggtacgaccagtagtaaatcatcgacagaggctagctcctgt

SEQ ID NO: 97375 - DNA, 514 bp, Zea mays
  unsure (1)..(514): unsure at all n locations
gaaaagagcggtgctgagcctacncgtacgtcatggcatacccgtccggaattcccgggtcgacccacgcgtccgcaagcacaagcgcactctagcaatggcttctgaggttgtccgccctagcgacgccgagctactaaaggcacaagccgacatatggcggctcagcctctcctacctcacgcccctgtcactgaggtgcgccgtggagcttggcatccccacggcgatctaccgccatggcggggctgcctcagccgctgagctggtcacggcgctgtctctcccctccactaagctgccggtccttcgccgcctgctgcggctcctcgccgcgtcgggcgtgttcaccgtcgacaagcagagcacggaggaggagcggtaccgcatcagccccgtgtcctacctcctggtggacggcatccctcacgaggaccacatgaaccacaccgctctggtgctcacctgcacctcgacgcgctacatcgaggcggtgatagggctggcggaatgg

SEQ ID NO: 97376 - DNA, 517 bp, Zea mays
agtatgagcggttcgtgtccactagcttagacctgcgtcatactcggtccggattcccgggtcgacctacgcgtccggaaccggaggaacgaggatggaggatgactcgccgctgacgaagacgatgaagggtgcggtgacaggactcgccgcggggaccatctggggcaccgtcgtcgccacctggtacgacgtgccccgtgtggagcgccacgtcgcgctccctggccttatccggacgctcaagatgtgcggcacctacggggccaccttcgccaccatcgggggcctctacatcggcgtcaagcagctcgtgcagagccagcgcaggaagcgcgacttcgtcaacggggccgtcggcgcgttcgttgccggagcctctgtctgcggttacagaggaaagagtattcagtcagccctaatcggaggctcctgtctggctttcacatgtgctgcgctggacattggcggcaatcgaccagagttgacaacggcaaagagttctatgcctacacac

SEQ ID NO: 97377 - DNA, 521 bp, Zea mays
  unsure (1)..(521): unsure at all n locations
ggattatggccgntcnctgacgcctagctacctacgctactggcgaaccgcttcggaattcccgggtcgacccacgcgtccgatcccttcgtaaacccttctctcttcttcccgcggcctgctcgttcgatctgtccagcagacttgaggttccgagcggccggaaaccagcggcaaacgtcggcatggcgctcgtattgcattctggggctggaaacaaaaatgccttcaaggcacttattgctgcagaatacagtggggtcaaggttgagttgaccaaggattttgagatgggtgtctccaacaagacccctgagtttctaaagatgaacccccttgggaaggttcctgttctggagactcctgatggccctgtttttgagagtaatgctattgcgcgctatgttgctcgcttgaaggatgacaaccctcttttcgggtcttcccgtattgaacaagcccacgttgagcagtggatggactttgctgcaacagaagttgatcctagtgttggatggtac

SEQ ID NO: 97378 - DNA, 517 bp, Zea mays
gttatagcgggcctgtggctgcgtatgctcctacgccatgtctgtaccggtctcggaattcccgggtcgacccacgcgtccggtcctgtccacccactccctcctcgagcacactgatgtggctatcctgctggacaacgaggccatctatgacatctgccgccgttcccttgacattgagcgcccaacctacaccaacctcaacaggcttgtgtcccaggtcatctcatccctgactgcctccctgaggttcgatggtgctcttaacgtggatgtgaatgagttccagaccaacttggtgccctacccgaggatccacttcatgctttcctcctatgctccagtcatctctgctgagaaggcctaccacgagcagctgtctgtggccgagatcaccaacagcgccttcgagccatcctccatgatggccaagtgcgatccccgccatggtaagtacatggcctgctgcctcatgtaccgtggtgatgtggtccccaaggatgtgaatgctgctgtg

SEQ ID NO: 97379 - DNA, 520 bp, Zea mays
  unsure (1)..(520): unsure at all n locations
gaatttaagccggtcgctgaacgccacttcgacagcatagccatatcggttcggaattcccgggtcgacccacgcgttcgcccacgcgtccgggcacacgaacaactacggcatagtcgcccactctgcgctggcttgggccgtgaacgatgagttctgcagagtgctccatcagcaaatggagttcttctccagcaacccaagcgccgacacactcaaccgtctccgtggagaactcagcgagatacacaccgtcatggtcgacaacatatagaaaattcttgacacaggctatcgcatctcgctccttgtcgacaagacattcaccatgcaagacagcgcctttcacttccgcaagcaatccaagaggctccgtagagctctttggatgaagaatgccaagcttctagttgtgttgacagttgtcataatagtgctgctctacttgatcatttctgctttctgaggaggccttttcttgtcatcatgcatatcatgagtcacacaccagatggctgtn

SEQ ID NO: 97380 - DNA, 533 bp, Zea mays
  unsure (1)..(533): unsure at all n locations
aggatttgtggccgtgtgcatagaaggnnccaaatccngcacagtcagtgtctgtacccgttcggaattcccgggtcgacccacgcgtccgcccacgcgtccgggttcatgaaaaactacggcagagtcgcccactctgcgctggcttagcgccggaacgatgagttctccagagtgctccatcagcaaatggagttcttctccagcaacccaagcgccgacacactcaaccgtctccgtggagaagtcagcgagatacacaccgtcatggtcgacaacatagagaaaattcttgacagaggcgatcgcatctcgctccttgtcgacaagacatccaccatgcaagacagcgcctttcacttccgcaagcaatccaagaggctccgtagagctctttggatgaagaatgccaagcttctagttgtgttgacagttgtcatagtagtgctgctctacttgatcatttctgctttctgtggaggcctttccttgtcatcatgcagatcatgagttacacaccagatggctttgcg

SEQ ID NO: 97381 - DNA, 525 bp, Zea mays
  unsure (1)..(525): unsure at all n locations
gctatcagattatgcgnnttcntntggcccgccccatgccccgagcatttcatatccattcccgctggagcacgcgtccgcgcacgcgtccgcgttcatgaaaaacttcggctgagtcgcccactctgcgctggcttgcgccgtgaacgatgagttctggagagtgctccatcagcaaatggagttcttctccagcaacccaagcgccgacacactcaaccgtctccgtggagaagtcagcgagatacacaccgtcatggtcgacaacatagagaaaattcttgacagacgcgatcgcatctcgctccttgacgacaagacatccaccatgcaagacagcgcctttcacttccgcaagcaatccaagaggctccgtagagctctttggatgaagaatgccaagcttctagttgtgttgacagttgtcatagtagtgctgctctacttgatcatttctgctttctgtggaggcctttccttgtcatcatgcagatcatgagtaacacaccatatggctttgcccct

SEQ ID NO: 97382 - DNA, 558 bp, Zea mays
  unsure (1)..(558): unsure at all n locations
gtgtatgcaggagcgatcgattntcgtcgcagtcctcaattcccgggtcgacccacgcgtccgcccacgcgtccgaaatcaggcatgtacactcacatattatggaatcaggttcacctgaagatgaggcaggatctgaggacaactttgtgcaaggggagaatgggacttctgtagcaaatgcttcgattgatcctgctcaatctttacatggcagcaatctttcaccaccaacagtactacagtttgggaagacaaggaagctatctgagagatctgaccctagaaatcggcaactcctgcaaaaacgacagttcttccattctcacaaggcgcaacccatgcaactggagcaagtgttctcggaccgtgatagtgaagatgaagttgatgatgatattgctgacttcgaggatagaagaatgcttgatgattntgttgatgttacgaaagatgaaaaacttattatgcatatgtggaattcatttgttcgaaaacaaagagtgttagctgatggtcatataccttgngcctgcgaggcattcttccaattgcatt

SEQ ID NO: 97383 - DNA, 517 bp, Zea mays
  unsure (1)..(517): unsure at all n locations
agggagtagcgttcctntcccatgatacgtagccctcggcattgctgtaccggtccggaattcccgggtcgacccacgcgtccgcggacgcgtgggttggaaatactctcgtgctcaagactgctgaacaaacccctctatcggctttgtatatctccaaattgttgcatgaggctggactacctgagggtgttgtgaatgtcgtttctggttttggccctactgctggtgctgctcttgctagtcacatggatgttgataagatcgcatttactggatctaccgatactggaaaaattattctcgagttggctgcaaagagcaaccttaagacagtgacactggagttaggaggcaagtcccctttcatcataatggacgatgctgatgttgaccatgctgttgagcttgcgcactttgccctgttctttaaccagggacaatgctgctgcgctggatctcgcacgtttgtacatgagcgtgtttatgatgagtttgtggagaaggccaaagctcg

SEQ ID NO: 97384 - DNA, 517 bp, Zea mays
agtaatgggccattaagccccatcgccaccgatcgcatgaccgtaccgcatcggaattaccagctagacgtacgcgtacgcgtacgcgtacgcgtgcaagcctctgcttcagctgaccactcacgccacccggggatgggtacctgtgcatgttcctcgtgggcgcctaccaagaagttcctcggtttgtctgcacaacctcttcggcgggccgagcgttgtgcgcgtgtcccagtgcgactggccccactgtttcgccgtgacgcccgtccccgcaggcccgtactgtgccgacatgcttctcgcgatgcatcactagcccgaggtgatgtacgaagtgctgaagcagatgaccgactgcgccacggtcgtcgtcctcgcccgggccttcagcgcaatgccgtacctggtgttcgaccccgatgccgtcatgatgttcagctgccagagcagcgacttggagcggactgtctccggcgccttcgatgacgaagaaccataagaatgtcagttcatc

SEQ ID NO: 97385 - DNA, 580 bp, Zea mays
  unsure (1)..(580): unsure at all n locations
tggggccanttagagctcgttgcatgcatcggcctaccttcctaagcagtctcgaattcccgggtcgacgccacgcgtccgcccacgcgtccggccaaccagaagagcttgcagttactgagagtgtgtgtgagagagaggatggggggcagcggcagggctgctctgctgctggccctggtggtggtggccgtgagcctggccgtggagatccaggccgacgccgggtacggttacggcggcgggtacaccccgacgccgacgccggccaccccgaccccgaagcccgagaagccccccaccaaggggccgaagccggacaagccagccaaggagcacaagccgcccaaggagcacgggcccaagccggagaagccgtccaaggagcacaagccgacgccgaccacgtacactccgagccccatactcacgccggcgacgtacactcccacccggaccctctcatgcctgccccaaccacatacacttccagccctacgccctattaacccacaccaaaacctattccaatttcttcaacgtactccctgacctctaagtcttcgacccctaagcggcn

SEQ ID NO: 97386 - DNA, 571 bp, Zea mays
  unsure (1)..(571): unsure at all n locations
ggcggccngtngagggcgtaagaaactaagaggacatgatggacgcctcaccggtccggaattcccgggtcgacccacgcgtccgccaagaagcaagaaaactagaaaaggctcctcccgaccgcaacgcccctcatctccgtcgaccccgacatccccgacccgatggcgcccaaggcggagaagaagccagcggagaagaagccggcggccgaggagaaggcggagaagacgaccgcagggaagaagcccaaggccgagaagcggctgcccgcgtccaagtcctccggcaaggagggcggcgagaagaaggggaagaagaaggccaagaagagcgtggagacctacaagatctacatcttcaaggtgctgaagcaggtgcaccccgacatcggcatatcctccaaggccatgtccatcatgaactccttcatcaacgacatctttgagaagctggccggcgaggccgncaagctggcgcggtacaacaagaagcccaccatcacgtcccgcgagatccagacctncgtgcgcctagtcctncccggagagctcgccaagcacgccgtct

SEQ ID NO: 97387 - DNA, 573 bp, Zea mays
  unsure (1)..(573): unsure at all n locations
tggnacatnntagggtcgtccatgcactctaagattctcgtagcagtcccgaattcccgggtcgacccacgcgtccgggacataaatgcagaaacgatacggtgcagaacaatacccaatgttcttgcaaatcttgagcaggctcaggaccgacagaacagaccatcagagagccctgttacaccatctaggcagctcttggctcctaatgtacatttctatgctggagagtgggatgaactcccaacaattctctcagttgtgcagccacctgcagcaccaacaaacctcagcttctctgaggatgattttatggatggctgcagtagccatgatggaagcagtgtagttggtcatgactactgccccaggagatctaggaagctttctggtagccgtgcatgggagagagctagtgagaccgaccaggcagatagtggctatgatgtgatcttgatttctgatgtcccctacgcagctaactctctgaagaagctctatgcgcttatttcaaagtgcctacgtcctccttatggagtcctgtacgtcgctttcaagaagaacttggttggt

SEQ ID NO: 97388 - DNA, 571 bp, Zea mays
  unsure (1)..(571): unsure at all n locations
ggctgtctcagatgttggctgatccatgcgcatctcagttacactacgcagtccgcaattcccgggtcgacccacgcgtccgcccacgcgtccgggtgggttggcttctcctccccctccggttcgggttcgggttcgtgaggttctccggggttcggtttcgtgggtgagcggatcgagatggcggcgtcggatgttgagtaccgctgcttcgtcggcggcctcgcctgggccacggacgaccactccctccacaacgccttcagcacctacggcgaggtcctcgagtccaagatcatcctcgatcgggagacgcagaggtcccgcggcttcggcttcgtcaccttctccacggaggaggcgatgcggaacgccatcgagggcatgaacggcaaggagctggacggccgcaacatcaccgtcaacgaggcccagtcccgcggcggccgtggaggcggcggcggcggcgggtacggtggtggccgtggaagctgcggctaccgctgtggcnggcgccgtgatggcngcngcggctaccgcngtggcngctgctaccgtggtggccgcngcc

SEQ ID NO: 97389 - DNA, 579 bp, Zea mays
  unsure (1)..(579): unsure at all n locations
agatgccngtggtgggtgtcatgatactcaaagaatcatggatgcactgcctctaccggtccggaattcccgggtcgacccacgcgtccgcccacgcgtccggctcgcttcgcaccacgcgctgcggcctgcggggcgagagatcgaggcctgagctagggtctggtggcggagatgtcgacgccggcgaggaagcgcctgatgcgggacttcaagcgccttcagcaggacccgcccgccggcatcagcggcgcgccgtacgacaacaatatcatgctctggaacgccgtcatattcgggccggatgacacgccgtgggatggaggcacgttcaagctgactctgcaatttacagaagattaccccaacaaacctccaactgttcggtttgtttcgaggatgtttcatccaaacatctatgcggatggaagcatctgtttggacatcctacaaaaccagtggagccctatatatgatgttgcggcaatattgacctctattcagtccctgctgtgtgacccaaacccaaattctcctgctaactctgaagcagccagaatgttcagcgagaacaagcgn

SEQ ID NO: 97390 - DNA, 576 bp, Zea mays
  unsure (1)..(576): unsure at all n locations
ggtggccgttgagggcgtcatgaactctaagaatctctcgcactgcactctaccggtccggaattcccgggtcgacccacgcgtccggcaagccatgtggaggagggctttagcgatggtcctgttcatggctggcgccgcgctgctcgccggggctgccggcgccggcgcgcagcagggcgtgtggagcatcatcacccggcccatgttccagagcatgctgagccaccgcggcgacagcgggtgccagggcgccttctacacctacgacgccttcatcgaggccgccagcaagttccccggcttcggcaccaccggcgacgagcagacgcgcaggcgggagctcgccgccttcttcggccagacgtcccacgaaaccaccggtggatgggcgactgctccggatggaccgtttgcctggggatactgccgggtgaaggaacagaaacagacggacccaccctactatggacgaggacccatacagctaactcataagtacaactacaggctcgccgggcaagcgctgaacctgaacctggtgggcgacccggacctggtggcgagagaccccgn

SEQ ID NO: 97391 - DNA, 562 bp, Zea mays
  unsure (1)..(562): unsure at all n locations
tgtgccgtaactgataccgcccagcngcacctacgcattgcatnaccggtcctgaattcccgggtcgagccacgcgtccggcaagccatgtggaggagggctttagcgatggtcctgttcatggctggcgccgcggtgctcgcgggggctgccggcgccggcgcgcagcagggcgtgtggagcatcatcacccggcccatgttccagagcatgctgagccaccgcggcgacagcgggtgccagggcgccttctacacctacgacgccttcatcgaggccgccagcaagttccccggcttcggcaccaccggcgacgagcagacgcgcaggcgggagctcgccgccttcttcggccagacgtcccacgaaaccaccggtggatgggcgactgctccggatggaccgtttgcctggggatactgccgggtgaaggaacagaaacagacggacccaccctactatggacgaggacccatacagctaactcataagtacaactacaggctcgccgggcaagcgctgaacctgaacctggtgggcgacccggacctggtggcgagag

SEQ ID NO: 97392 - DNA, 584 bp, Zea mays
  unsure (1)..(584): unsure at all n locations
tgatggccgttngatgcgtgtgatgataaccgccagcngcctcatcgcatgcacgtaccggtccggaattcccgggtcgacccacgcgtccgcccacgcgtccgagagtgtgtgtgagagagaggatgggtggcagcggcagggctgctctgctgcgggccctggtggtggtggccgtgagcctggccgtggagatccaggccgacgccgggtacggttacggcggcgggtacaccccgacgccgacgccggccaccccgaccccgaagcccgagaagccccccaccaaggggccgaagccggacaagccgcccaaggagcacaagccgcccaaggagcacgggcccaagccggagaagccgcccaaggagcacaagccgacgccgtccacgtacaccccgagccccaaacccacgccgtcgacgtacactgacaccccgacgccctccaagccgacgccacccacatacactaccgcccctacgccccacaaacccacaccaaaacccactatcactactacgacgtacaccccgacccccaagcctacgacacctaagccgaccacggcgacgtacacttcc

SEQ ID NO: 97393 - DNA, 572 bp, Zea mays
  unsure (1)..(572): unsure at all n locations
ggtggccngtagaggctcttcatgatactctacgatactcatcgcacgactaccggtccggaattcccgggtcgacccacgcgtccgcttaaccctcgttcctctagccgtctcgcgcagacacagcctacatttctccttcgactgctgtgcggctagctcaaccatggcggactccaaggccacctcagcggtcaccctccgcactcgcaagttcatgaccaaccgactgctggcccgcaaacaatttgtgcttgaggttatccaccccggccgcgccaacgtctccaaggcggagttgaaggagaggcttgccaagatgtacgacgtgaaggaccccaacaccatcttcgtcttcaagttccgcacccacttcggtggaagcaagtccactggcttcggcctcatctacgataaccctcgagtctgccaagaagttcgaggcccaaataccgnctcatcaggaatggtcttgctactaaggntgagaggtcccgcaagcaaatgaaagagcggaagaacagggccaagaagatccgtggtgtcaagaagaccaaggcttgtgacgccaa

SEQ ID NO: 97394 - DNA, 576 bp, Zea mays
  unsure (1)..(576): unsure at all n locations
agatgcctcntnngatggtcttgatgatactctaagatactcatcgaatgcctctaccggtccggaattcccgggtcgacccacgcgtccgcccacgcgtccgcccacgcgtccgcccacgcgtccgcccacgcgtccgcccacgcgtccgacccaatctcccctacaccagaaaaattcccagttctttggtccgcgtcagagaggcggcggcgatgtctgggcgcggcaagggcggcaagggtctgggcaagggcggcgcgaagcgccaccggaaggtgctccgcgacaacatccagggcatcaccaagccggcgatccggaggctggctaggaggggtggcgtgaagcgcatctcggggctcatctacgaggagacccgcggcgtgctcaagatctttctcgagaacgtcatccgcgacgccgtcacctacaccgagcacgcgcgccgcaagaccgtgaccgccatggacgtcgtctacgcgctcaagcgccagggacgcaccctctacggcttcggaggctaggctaggcgcctgttcatagtcggggactggttaggggacatgtctctgt

SEQ ID NO: 97395 - DNA, 512 bp, Zea mays
gggagagggtcgttcatgtgaggggggaaattgtatgctcgtaccggtccggaattcccgggtcgacccacgcgtccgggcggcggcgtacgaggtgctcgtagcaggcggggaggggctgttcctcaagaccaagcccccggccgccagatccgccgtcgaggcgctcccgtccgccgtcgtcgcggccggccaggaagtccagggggatgagtgcgctgtgtgcaaggacggggtcgcggtcggccagcgcgtcaagcggctgccgtgctcgcaccgctaccacgacggctgcatcgtgccctggctccaggtgcgcaactcgtgcccgctctgccgcttcgagctgcccaccgacgacccggagtacgagtcctggaaagccggccggaccgacgccgcgtgaaccggccaaccaggcagtggccgcatgctcttatggtatggttttattgatagtgttgtatgtatgggttgggtttgaatcgggtgctttggttataaggttgcta

SEQ ID NO: 97396 - DNA, 583 bp, Zea mays
  unsure (1)..(583): unsure at all n locations
aggtggccagntaatgagctcgtgccagcnactgccagcccacgtacgcaagcctcaccggtccggaattcccgggtcgacccacgcgtccgcccacgcgtccgcccacgcgtccgtacaccccgtcccccaagcctccgacacctagagccgacccggccgacgtacactccaagccccaaacctccgacgcccaagccgaccccaccgacgtacaccccttcccccaagcctccgacacctaagccgaccccgcctacgtacactccaagccctaagccaccggctaccaagcctcccacgcccaagccgaccccgccaacgtacaccccttcgccaaagcctccgacacccaagccgaccccgccgacgtacaccccttctcccaagccttcgacgcccaagccgaccccgccgacgtacactccaagccccaagccttccacacacccgacgcccaagccgaccccaccgacgtacacccctttcccaaagccttcgacgcccaaaccgaacccaccgacgtacacccctttcccaaaagctcgataaccaagacgggctccccgagtgttattttttc

SEQ ID NO: 97397 - DNA, 579 bp, Zea mays
  unsure (1)..(579): unsure at all n locations
tggagggccctgtgtaggagggcggtgatcgatactcgctcagtnagctcatagcagtccgtaattcccgggtcgacccacgcgtccgcccacgcgtccgcggacgcgtgggttctctggctggggagcaagcggctgcagggaactttgacacagcaatgaggttgcttagccgccagttgggtatcaagaactttgttccactaatgcccttgtttcttgatctgcacatgggcagtcatacatatttgcgtgggcttgctgccgctcctgttatatcagttgcagtagagaaaggttggaatgagtccgcaagtcctaatgtgaggggccctcctgcgcttgttttcagcttctcacggatggaagacagactcaaggctgcctacaaagccacaactgagggcaagttcccagaagcactgaggcagttccttagcatcttacataccattccagttatcgtggtggactcacggagagaagttgatgaggtgaaggagttaatcgagatagtgagggagtatgtccttggtctgaggatggaactcangaganaggaactganggatgatgtga

SEQ ID NO: 97398 - DNA, 578 bp, Zea mays
  unsure (1)..(578): unsure at all n locations
tgatgtctctgtagttggttnaatgattccccctagtnactcatcgcacgcactctaccggtccggaattcccgggtcgacccacgcgtccggcaagcttcgcgccaaatcggacaacaagatgtgcttcgattgcaacgccaagaacccgacgtgggcgtccgtcacctacggcgtcttcctctgcatcgactgctcggcggcgcaccgcagcctcggcgtccacgtctccttcgtcaggtcaacaaatttggattcatggactccagaacaactgaaaatgatggtctatggcggaaataaccgtgcgcaagctttctttaagcagcatggttggacagatggtggaaaaattgaagcaaagtatacttcaagagctgctgacttgtaccgacagttgcttgctaaagacgttgctaaaagctctacagaagatggaaacaatagttggccatcttccccagttgcagcatcccaggctccaaatcaagctgctgcatttccagatctcaagctgacagaggtgtcaaaagaaaatgtaagtgaaaagaaagattctgagaatgttcgttcgccta

SEQ ID NO: 97399 - DNA, 517 bp, Zea mays
  unsure (1)..(517): unsure at all n locations
gggtntagggtccnntgccatgatggggggttgatggactgctcgtaccggtccggaattcccgggtcgacccacgcgtccgcccacgcgtccggttcctgcggaggatcctgaccggcgggggcggcctggcggccctgagggcggcgcgcgccgtgaaggagacgacggggatcgtgggccttgaggtggtgcctaacgcgcgagaggttctggtagggctctacgagcgcacgctcaaagagatcaaggccgtccccgaagacgagggttaccgcaaggccgttgaatccttcaccggtcaccgcctccagatctgccaggaggaggaggactggaagcgcatcgaggaccgaatcggatgcgggcaggtcgaggagctcatcgaggaggccgaggacgagctcaagctcatcgctaaaatgattgaatgggatccatggggtgttcccgatgactacgaatgtgaggtgattgaagacgacaccccaattcctaagcatgttcctcagcaccc

SEQ ID NO: 97400 - DNA, 525 bp, Zea mays
  unsure (1)..(525): unsure at all n locations
ggattgagagttccgtgtggccccgcttccncgcccattacnattaccgtcccgaattcccatatcgacccaggcgtacgcaacctgaggaacgaggatggacgatgactcgcttctgacgaagacgatgaacggtgcggagagtggactcgccgcggggaccatctggtgcaccgtcgtcgccacctggtacgacgtgccccgtgtggagcgccacgtggcgctccctggccttatccggacgctcaagatgtgcagcacctactgggccaccttcgtcaccatccatggcctatacatcatcgtcgaacatctcgtgcagagccagcgcaagaagcgcgactttgtcaacggggccgtcagcgcgttcaatgccggagcctctgtctgcggctacagacgaaagagttttcactcatgcctcataagatgctcctgtctggctttaacatctgctgagctggacattggcggcaataccaccagagttgacaacggccaagattactatgcctacacaactga

SEQ ID NO: 97401 - DNA, 530 bp, Zea mays
  unsure (1)..(530): unsure at all n locations
atgctntgtnttccctcacgtttacttagtacgtcgtaccggtccggaattcccgggtcgacccacgcgtccgcccacgcgtccgcggacgcgtgggccgtcgtctctgtttgcgtttctgtcaagtgtgcatggaataatactgtaactgtgtttcctgccgggcaatgcactgtgatatgatgcccaacgaataaatgtcgcttttatttttaaaaaaaaaaaaaaaaagggcggccgctctagaggatccaagcttacgtacgcgtgcatgcgacgtcatagctcttctatagtgtcacctaaattcaattcactggccgtcgttttacaacgtcgtgactgggaaaaccctggcgttacccaacttaatcgccttgcagcacatccccctttcgccagctggcgtaatagcgaagaagcccgcaccgatcggcctttccaacagttgcgcagcctgaatggcgaatgggacgcgccctgtaacggcgcattaaacccggccggtgttgtggttacgcgcaacgtgn

SEQ ID NO: 97402 - DNA, 520 bp, Zea mays
  unsure (1)..(520): unsure at all n locations
ggccttggctgacccagctccaccgcatgacgtcccggtccggaattcccgggtcgacccacgcgtccgcccacgcgtccgcaagaagtcagtcacatctcacagctcagtgagatccagagccaaagggcggggcgtctccgactcccaatcccaagtccagccgccgccgccgtctcttgctcgctccaaaagccgttttccagagatctttttcagcgccagacgccagccgccgtctctcgcttgcctgcatttccgatcctgaggcagtcctcatctcattctcatgatctcatccaaccgggaggctgggaacgagatcacagctacagctacagctacctgagcaggatcctcctcagatcggcttcaaaaatcaaaaggggcgggggacaacaaggcangggatgagtgcaactgcaaccaaggtgaagagacgtgtgggcaagtacgagctcggccgaaccatatgcgaaggcacattcgccaaggtcaggttcgccaagaacaccgagac

SEQ ID NO: 97403 - DNA, 525 bp, Zea mays
  unsure (1)..(525): unsure at all n locations
gcgtnnctaagcactgatattatgtagtgctcgtccggtccggaattcccgggtcgacccacgcgtccgagttgccaaagtttcagtctttggctgctgctataccggattatgctcgtccaatagatgatgggctttatcgtgctattgacatatatctcaaggcgcacccacatctgccagaatcggacaaggaagagctctgccgggtgatggactgccagaagctgtccctggaggcctgcacacacgcggcgcagaacgagcgcctcccgctccgcgtcatcctgcaggtcctcttcttcgagcagctccagctgcggagctccatcgcggaatgcctcatgatctcagagcccctagacggcggcggcggtggcttctcgcggcagctcggcggcctgcctgtctcgggcgagcacctncgtggcgctggctggcccctggccgncaaggaagaccagacgcttcgggaaggcatggacagcatgaagcaacgcgtgtccgaacttgaaaaagagtccc

SEQ ID NO: 97404 - DNA, 529 bp, Zea mays
  unsure (1)..(529): unsure at all n locations
tgttgntnttgaagacgtacancgtagtgaacgtctcggtccggaattcccgggtcgacccacgcgtccgcccacgcgtccgctatcacagtaggaagctaggaggaaatcaaagcaacaaagttgccggccgagagaagcaaccatgagacctcaggcgtcgttactcgtcacactggctgttatcgtcgtcgtccctgcagctctgccactcagcaaagggacggaggaggaaggaggaggggaggcagtcgccgccgtggacgccgccggaacgagctcgtggccgtgctgcaacaagtgcggtttctgctacctgtctgacccgccgcagtgccaatgcctggacttctcgacggtcgggtgccacccagagtgcaagcggtgcatcaggtacaccgtcgacggtggcgtcgacatcccgcccgtgcacgcctaccgctgcgccgacatcctcttaacttctgcgagcgccgcttgagtactcccggggccgncgcaattgctagcaccaaatagacgggtgcat

SEQ ID NO: 97405 - DNA, 523 bp, Zea mays
  unsure (1)..(523): unsure at all n locations
tgcttgttggnccagcccactgcaggacgtcncggtccggaattcccgggtcgacgcacgcgtccggctttcgaatgtgttcatgatggctggggtgttgctgtgctggtgggtgtgccacatagggaggctgagttcaagacccacccgatgaacttcctgaacgaaaggaccctgaaggggaccttctttggcaactataagccacgcactgatctgccaaatgtggtggagctgtacatgaaaaaggagctggaggtggagaagttcatcacgcacagcgtcccgttcgccgagatcaacaaggcgttcgacctgatggccaatggggagggcatccgctgcatcatccgcatggagaactagatttcgctgtctagtttgtgatctggcctgggcttggggttaataaaagaggcaatgctagcctgccctttcgatgaggaggtacatacacgctggcgatggaccgcgcttgtgtgtcgcgttcaggttggcttttgccagcagtanggtaccttcc

SEQ ID NO: 97406 - DNA, 521 bp, Zea mays
atgccttgtttcctgcagttaataagtacgactgtaccggccggaatcccggtcgacccacgcgtccgcccacgcgttcgggaatttggagctcgtgttgccttcgaagtctatccgtgagatgtagatatatatttacatacatatatgtatgtgtgtgggtgccttgcgtggcttggcgtgatgatgtcataaataaagagggtgggtgtgcttgcggtattcatggatggccatggatctgagcacatgacgttggatgctttcttaaggctctcgtggatcttctatatttggaagaagctgtaaaataatatatcgccatctagtgttggcgttggcttgtatgtactttgtacctgctttattattttgtgcaatatcgagtaacctaatgtataaaaaaaaaaaatacacgacgtgatcgcataaaaaaaaaaagggcggccgctctaaaagatccaagcttacgtacgcgtgcatgcgacgtcatagctttctataacgtacctaaattaaat

SEQ ID NO: 97407 - DNA, 517 bp, Zea mays
  unsure (1)..(517): unsure at all n locations
tgccnctgnctgagccatcgattagttgcatgacgtaccggtccggaattcccgggtcgacccacgcgtccgaagcaagccatgtggaggagggctttagcgatggtcctgttcatggctggcgccgcgctgctcgccggggctgccggcgccggcgcgcagcagggcgtgtggagcatcatcacccggcccatgttccagagcatgctgagccaccgcggcgacagcgggtgccagggcgccttctacacctacgacgccttcatcgaggccgccagcaagttccccggcttcggcaccaccggcgacgagcagacgcgcaggcgggagctcgccgccttcttcggccagacgtcccacgaaaccaccggtggatgggcgactgctccggatggaccgtttgcctggggatactgccgggtgaaggaacagaaacagacggacccaccctactatggacgaggacccatacagctaactcataagtacaactacaggctcgnncggcaagcgctga

SEQ ID NO: 97408 - DNA, 516 bp, Zea mays
  unsure (1)..(516): unsure at all n locations
tgcatggctgacccagctaggagcatgacgtcncggtccggaattcccgggtcgacccacgcgtccggatttgtctaacaatgatctctgtggaactattcctgttgatgggcctttctcaaccttgcctctccgaagcttcgagaacaacagcaggctcaacggtccagagctacaaggattggttccttatgattttggatgttagatgccgatcaacaatgtaccaccttccccagttgaaagggggaaagccaagatagtattatcaatagaaacctagcttcaagaatgtcgtgactatatatatgtatgatattaagacgagatttgataagggtggcaaaaaaaaataagacacgccctgtaacagcgcattaaacgcagaagatgtagtggatacacgcagcgttgccgatacacttgccagagccctaacttccggtcctttacgttgcttacaaaaaataaagggccgcgtttttaagggttccccagtttagctcctcggtcagt

SEQ ID NO: 97409 - DNA, 529 bp, Zea mays
  unsure (1)..(529): unsure at all n locations
gttggtnnttatccctagctaggatcgcagtgacgtctcggttcggaattcccgggtcgacccacgcgtccgatttacagaggactcagaggaatttgcttggtgaagatctgggttcacttggtgtcaaagagcttgatcagcttgagaagcaaattgattcatccttaagtcacataagatccacaaggacacagcatatgcttgatcagctcactgatcttcagaggagggagcaaatgatgtgtgaagcaaataagtgccttagaagaaagctggaggagaccagcaaccaggtgcatggccaagtgtgggagcacggtgccaacttattactcggctacgagcggcactcctcgccacagcaagccccatcacatgttggcaatggattattctttcatcccctggaagctgcagcagagccaaccctgcagatcgggttcgctcccgagcatatgaataacttcatgccggcattgctaccctgaagatggatctttgaggcaaaaggaattaattaagatgc

SEQ ID NO: 97410 - DNA, 523 bp, Zea mays
  unsure (1)..(523): unsure at all n locations
agcnntnctcataaagaaattacgtactgctcgtccggtccggaattcccgggtcgacccacgcgtccggggaagcaaagttaaatatgagcttgacaagaaaactggactgattaaggttgatcgagtcctatactcatcagttgtataccctcacaattatggtttcgttccaaggactctttgtgaagacaatgacccattggatgtgttggtcctgatgcaggagcctgttattcctggttcgttcctgcgagcaagagcaatcggccttatgcccatgattgaccagggtgaaaaggatgacaagataatagcagtctgtgctgatgatcctgaatatcgtcactacaacgacatcagtgagctgtcttctcatcgcctgcaagagatcaagcggttctttgaagattattagaagaatgaagattaaggaggtgcttgccatgcaatcttgccttgcgacacagctcgagaggccattcaatacttcattgatctggatgcgcaatataatttgcaa

SEQ ID NO: 97411 - DNA, 522 bp, Zea mays
  unsure (1)..(522): unsure at all n locations
agcnnttntgactcatttattgagtacgacgtccggtccggaattcccgggtcgacccacgcgtccgcccacgcgtccgcccacgcgtccgattcatgattccatccatattggatcaattctcgataccattttgcaatgaaattagaggaatgttatggtaaaacttcgtttaaaacgatgtggtagaaagcaacgtgcgacttgaaggacatgatcgattgtggatttgcctatccatcattttccatagtaatgaaaatgctcttggctcgacatagtctgttctattcgtcccgaaccgaattttcgctgggttgtttgtaagtaaagtaaatagtacacgatggagctcgagaggacagaatttctttttgatcaaaggaaagaatctagggttagtgaaaactaataaattaagccaactttgtcagtctatccttaatatagaaatcaaaagggtaaaattagaaaaaggctaattttggaaagatggaaaaacttttttggtgaaaagttttt

SEQ ID NO: 97412 - DNA, 514 bp, Zea mays
  unsure (1)..(514): unsure at all n locations
ggcantcctggccatgactagctgcatgactgcccggtccggaattcccgggtcgacccacgcgtccgcagacaaatatgagttgccaaggctaagattgttgtgtgaatcttacttgtgcaagcatgtttctgtaaactccgtggcaactactctagcattggctgatcgataccatgctatcgagcttaaatctgtttgcctaaaatttgctgctgaaaacctttcggctgtgatccggaccgaggggttcgactatctcaaagacaactgcccatccctgcagtcagagatactgcggacagttgccgggtgtgaggaacaatgtagcagcggcgtgaaaagccagagcgtatgggcgcagctctctgacggcggcgacaccagcggtcgcagggtgaggccaagggtctgagacgcgatcctgcaagcactaacctttgtaatcaaactgtggtagtgtaaaatggatacagctatttgaattntaatctgggacgactcttgcaaattg

SEQ ID NO: 97413 - DNA, 516 bp, Zea mays
  unsure (1)..(516): unsure at all n locations
aggccntttgtgcatacgaaaatagtcgctcgcccggtccggaattcccgggtcgacccacgcgtccgcggacgcgtgggcggacgcgtggggcaaaggcgaggtcaggtcaccggtgtcagagcagatcacacgagccctcgacatccccctcccacgatttacgaggcggctggaaaccatgcactatattgccgagtatgagcatgaagaggcacacgacggcctgctgcttgagctcgctaggctcaactttgtccttgtgagagcgcttcacctcagggagctgaaggacctgtcactatggtggagggagctctacaacactgtgaagctcccgtacgctcgggaccgtatggtggagatctacttttggacctgtggtatgcttcatgaggaggagtactccctggcacggatgttcttcgccaagacgttcgggatggtgtcactgatggacgacactttcgatgtccatgctactctagacgagtgtcacaagctcaaaagagctat

SEQ ID NO: 97414 - DNA, 530 bp, Zea mays
  unsure (1)..(530): unsure at all n locations
gatgggtnctgttgcgctgacgatcgtatacgtctcggtccggaattcccgggtcgacccacgcgtccggcggcggctatggtggcgggcgccgtgacggcggttatggcggcggtggcggctacggggggcggcgcgagggtggtggcggcggctacggaggcagtggccgctaccgcggtcggcgcaagggttgtggcggcggctggagggactgatgtgtgggcccatcctggcttctggcgagttatcttatatatctatagtattgtgttaccgatcgcttctgtcaccgcgttagtgttcgatctacctttggattacgtgttggtacccctgttgttccctttggctgctcccgctatgaaacgagacgagagaataatgagcaaggatcttagtcgcagctatacttggccaatgataatgatatgttgtatcccaaggagaacaaaataaggctgtcggtatagaggatccaagcttacgtacgcgtgcattccgacgtgattacttaatctattaggtct

SEQ ID NO: 97415 - DNA, 524 bp, Zea mays
  unsure (1)..(524): unsure at all n locations
agtgtcctnttggtagnccccaccttcncgcagcnacgtcccggtccggaattcccgggtcgacccacgcgtccgcccacgcgtccggagatctcttgcctcacgacacgagcagcagaatttgtcgagggccggtggttgctgcgagaggtccgggccttcgtgggatcttgaaaattgaatgttctaatggagtccaagggtggcaagaagaagtctagcagtagtcgttcctccctgatgtacgaagctccccttggctacagcatcgaggatatccgccctgcaggcggcatcaagaagttctccgctgcttactcgaactgcgcgaggaagccatcctgatatctctgttgtcatccccatcctagtagcgtagaaaccacctgcattttcattttgatctccctaatccctccggctagctgctttccaatgaccaaaagatatcaaagaccactttccgtctttcttccgtggcctgtctgtcatctggctctgaaacgatggcagtccttcaagtn

SEQ ID NO: 97416 - DNA, 518 bp, Zea mays
tggccactcctgagcatcgactagttgcatgactgtccggtccggaattcccgggtcgacccacgcgtccgctcactctccgctggtcgctcactcttgcagctccacccttcactcagtcttagtctctgatgggctctaggctctagctagccgcgccactccttcgtgtagccatcagccttctcatcgccaccaatggccactgccgaggtccagaccccgaccgtcgtggcggccgaggaagcgcccgtggtggagaccccgccgccggccgtcgtgcccgaggagtctgcccccgccgaggccgaggccgaggccgaggctgctgctcctgctgatcccgaggagcttcccgcggccgagcagcaggcagccgccgaggcggaggccgcggctcctgctggtgccgaagagcccgtcgcggccgaaccggccgccgaggcggaggctgctgctcctgctggtcccgaggagactcctgcggtcgagcaggaggcagccgccgaggaggaagc

SEQ ID NO: 97417 - DNA, 527 bp, Zea mays
gtgcttttgacgatgacgtcgtcagtgacgtctcggtccggaattcccgggtcgacccacgcgtccgcggacgcgtgggccggcatcgccgcgctcatgaccgtgctggtggtcaacaaccgcaaggaggtcgacaacatacccaggagccgtgtcaagtgctacgccctcgcgcccgccaggtgtatgtcgctcaacctcgccgtcaagtacgctgacgtcatcaactccgtcgtgctccaggacgactttttgccaagaacaccgactccgctagagtacatttttggttctatcttctgcttgccctgcatgctatttctcatctgcttgagagatacatttaaacaagacaagagaaaatttatagatccaagaagattgtatgcacctgggcgaatgtatcatatcgttgagaggaaattttgcagatgtggaagaattccacctgaggttagaactgcaattccaagtgaaaggcgctttgagcatggttgtgtatcatgcagtaacacttctgaacatgg

SEQ ID NO: 97418 - DNA, 531 bp, Zea mays
  unsure (1)..(531): unsure at all n locations
gggcctgtggccaaagttgagatcgtcagtgacgtccggtccggaattcccgggtcgacccacgcgtccgggccatgttgccacaattgcagagctcaagcctggtgttctctcagtacatgaaggaaacgatgtgagcaagtactttgtgagcagtgggtttgctttcgtccatgcaaactccattgctgatattgtggctgttgaggctatccctgtggatcagatcgacccagcattggttcagaagggtctcgctgaattcactgccaagcttggtgcggcctctactgacctggagaaggctgaggcccagatcggagtcgatgttcacagtgccctcaatgctgcattgaccggttaattggtggcattttaaattgtcttgtatttttcatctacagttttagagtgagtttaagtttgcaaactcatgggcatgggatggacggaatgatcctaaataaattatactccatctaaaacatggacatatgtttcttgtntactggatcctgcatggattccttt

SEQ ID NO: 97419 - DNA, 533 bp, Zea mays
gggcctattgtccatgatgcagctcgtagcgacgccgtaccggtccggaattcccgggtcgacccacgcgtccgcccacgcgtccgggcaagcgctgaacctgaacctggtgggcgacccggacctggtggcgagagaccccgtggtagccttcaagacggccatctggttctggatgacgccgcagtcgcccaagccctcgtgccacgccgtgatgaccggcgactggaggccctccgccaccgaccgcgccgcggggaggctccccggatacggcctgaccacgaacatcatcaacggtggtctagagtgcggcgaggaccgctccaccgacggcgccaaagccgccaaggaccgggtcggctactacaagaggtactgcggtatgctcggagtggggtacggggacaacatggcatgcgggagccagaagccttacggaggatgatgacactagtagctgatctatggttgctgcaatgcaagccttcacgttgtgttgcctctctacctaaagaataaatcaagctagc

SEQ ID NO: 97420 - DNA, 525 bp, Zea mays
agtagctgactagttatagcatcttccgacataagagataccctctccggaattcccgggtcgacccacgcgtccgcaaggaccttcggcgcccgttcaggatccacatcttcccgagcgagttcttggttgaccggttcctcttcggaccacctccaaagctcttggtgtagcttggcactctcaccaatcaagttttcatgtctgatctcgacattcagatcccaactggcttcgatcccttcggttaaggccatgtctgggactctggtgccggaacacggtcaaaagacttcgtacacgtgcgcattcagcatcgtaatggtcgcaagagccttgccaccgttcaaggatttgaaaaagagttcagcttcagcaagatcctccaagatctccagaaaaagatctgctgcaatggttcagaggtgcacgacccacaacttggacaggtcattcagctccaaggtgatcaaaggaagaacgtcttcaatttcctcgttcaggccggcattgtgaagaaagagc

SEQ ID NO: 97421 - DNA, 523 bp, Zea mays
  unsure (1)..(523): unsure at all n locations
ggtactgttccaaacgatcacnacagtcgtatcggtcctgaattcccgggtcgacccacgcgtccgcccacgcgtccgcccacgcgtccgcccacgcgtccggagagaaccgaagggcctctgtcatctgggatcaagaggctggtcggtacgtgtcagttcctgcacagacaagaatgggaagtggagtcgatctgccagcaagaaacccacggttcttgacgaacccaagtggcgagccaagcagccatgtgaggagcgtggtgcctggcaatgcctcgtcctcagcaatgccatcagggcagccttcatagaggttgacatattctgggcagtcaatattcttcggtggccccatgctgagcacccctggcgtgggcgccaataggaatgaggcagactcaagagcacgctccgagggaagcagagatcctaatgccctgtgtgagaaaactaggactggctttgggttctttgccaatatttgctcctggggcgttccaaaggaacccaccctttgaca

SEQ ID NO: 97422 - DNA, 525 bp, Zea mays
  unsure (1)..(525): unsure at all n locations
ggttagcgggctgtaaacttgtacgtnacgtacngtactgtccgtaccggtccggaattcccgggtcgacccacgcgtccgagagtagtagtgatccgcaatgtcgacggaggaggctgttgtggctgaggtcccggtgaccgaggtgccagcggaggtcccggcggcccaggtggccgaggcgcccaaggcgaagaaggcgcccaaggagaagaaggcgcctaaggagaagaagctttccgcggcgaagaagccggcggcgcaccctccctacgctgagatgattgtagaggcgatcgctgccctcaaggagaggaaggggtcgagctcggtggccatcagcaagtacgtcgagggggagccatgccgcaaagctcccaacaactttccgaaagcagttactttgcaacttgaagaagctcgttgccgccggcaagctgacaaggttgaagaactccttcagcttgccggccaccgacgccaagcccaaggccgccaagcccaaggaacccaaggccgggccca

SEQ ID NO: 97423 - DNA, 527 bp, Zea mays
gatgagtgctactacgtgccgatacatagtatgactgttctggtctggaattcccgggtcgacccacgcgtccgagagtagtagtgatccgcaatgtctacggatgaggctgttgtggctgatgtcccggggggctatgttccagcggaggtcccggcggcccatgtggccgaggcgcccaaggcgaagaaggcgcccaaggagaagaaggcgcctaaggagaagaagctttccgcggcgaagaagccggcggcgcaccctccctacgctgagatgattgtagaggcgatcgctgccctcaatgagaggtaggggtcgagctcggtggccatcatcaagtacgtcgatgggaagcatggctgctagctccccaccaacttccgcaagcagctcactgtgcatctgatgaagctcgctggcgtcggcatgcttactatggtgaagaactccttcaagctgtctggcatcgacgctcaatccaatggccggtcatcccaatgacccaatggccttccctagctcaagtg

SEQ ID NO: 97424 - DNA, 529 bp, Zea mays
  unsure (1)..(529): unsure at all n locations
atggcagtgtggnnctngcnaccttcaacgtcaccgtcacgtactgtctgtaccggtccggaattcccgggtcgacccacgcgtccgtgctgatggtaatgatgatgataagaggccactgctaccctactacgtaccctcctctttgtgtgctgccatccgtccccgttagacgatcgaggagagaataacgcagagctctctgctcccggcctgtcttctgccgtcccggccgtttaatttactagtgtgttcgtcctatatgtttagcagcagcaggtgtattgtgcgggtatgtaatggtattgcaactatattgggtgtaaaaccataataaatgtgggcaaatatgcaaaanaaaaaaaaaagggcggccgctctagaggatccaagcttacgtacgcgtgcatgcgacgtcatagctcttctatagtgtcacctaaattcaattcactggcccgccgtttaccaccgtctgactgggaaaaccctggccttacccaacttaaatcgcttgcaacacattccc

SEQ ID NO: 97425 - DNA, 522 bp, Zea mays
  unsure (1)..(522): unsure at all n locations
gcatacgtnctagatagcgagagggcgaggagaagtttgtaccgctccggaattcccgggtcgacccacgcgtccgctcctccccctacggttcgggttcgggttcgtgaggttctccggagttcggtttcgtgggtgagcggatcgagatggcggcgtcagatgttgagtaccgatgcttcgtcggcggcctctcctgggccacggacgaccactccctccacaacgccttcagcacctacggcgaggtcctcgagtccaagatcatcctcgatcgggagacgcagaggtcccgcggcttcggcttcgtcaccttctgcacggaggaggcgatgcggaacgccatcgagggcatgaacggcaaggagctggacggtcggaacatcaccggtaacgaagcccagtcccgcggctgccgtcgaggctgcagcggcagcgggtacagtggtggacgtagaggccgcagctacggccgcagctggcgccgtgatggctggtgcggctacagcggttgctgcagct

SEQ ID NO: 97426 - DNA, 520 bp, Zea mays
agtaacgtgctgatatagcaaagatagtatgtgtactccctccggaattcccgggtcgacccacgcgtccgggcatcagctgagctgagctgagctggtccatggagagggattactcgtccacggacggcgggggcagcgagatgcccgggaagaaggcgaggaagccctacaccatcaccaagccccgcgagcggtggagcaccgaggagcacgcccgcttcgtcgacgcgctgctcatgttcggacgcgactggaagaagatcgaggagcatgtcggcaccaagacgacggtccagatacggagccacgcccagaaatacttcctcaaggtccagaagcttgggctggccgcaaggctgccgccgatgtacccgaggcgccacttcgccatgcagcagcagcagagctcggtggccgatggtagcagcgcggccgctctagaggatccaagcttacgtacgcgtgcatgcgacgtcataactcttctatagtggcacctaaattcaattcactggcc

SEQ ID NO: 97427 - DNA, 529 bp, Zea mays
  unsure (1)..(529): unsure at all n locations
ggtnttagaaactgtgctgattagcggaggggagggagaagtttatattcgctccggaattcccgggtcgacccacgcgtccgggtgggttggcttctcctcccccttcggttcgggttcgggttcgtgaggttctccggggttcggtttcgtgggtgagcggatcgagatggcggcgtcggatgttgagtaccgctgcttcgtcggcggcctcgcctgggccacggacgaccactccctccacaacgccttcagcacctacggcgaggtcctcgagtccaagatcatcctcgatcgggagacgcagaggtcccgcggcttcggcttcgtcaccttcttcacggaggaggcgatgcggaacgccatcgagggcatgaacggcaaggagctggacggccgcaacatcaccgtcaacgaggcccagtcccgcggcggccgtggaggcggcggccgcggcgggtaccgtggtggccgtggaggctgcggctacggcngtggctggcgccgtgatggcngcngctgctacggc

SEQ ID NO: 97428 - DNA, 520 bp, Zea mays
  unsure (1)..(520): unsure at all n locations
gtgtgttgtgctagcncgagtccgcactgccctgtctcggtccggaattcccgggtcgacccacgcgtccgcgacccacgcgtccgcccacgcgtccgggcagatcccactgataaagctgcacatagagaagaaagtctgtagcgagttcaacgattggctcgtccatattagaagaatggccaagcagattgggcaggcctccataagccaggcgtcgttggcttaccaaaagggcgaggagatgtgtgcacggcagagggaagccgaagcgcatagccatgctggaccagatgagcatctgtatgccttggacctggagaacacggaagaggaatcgacgctntattttgatctcacaccggtttatcgggcgcaccacatgcacacatgtcttgggatggaggacaagtttagagactattactacaagaacaggctgatgcaactcaacttgtacatgcagatcttcacttcgcagcccttcttggaggtccatcaacaccttccttgccaagta

SEQ ID NO: 97429 - DNA, 527 bp, Zea mays
  unsure (1)..(527): unsure at all n locations
cgctggctgtgtcagccngacgatgnacagacgtaccggtccggaattcccgggtcgacccacgcgtccgcggacgcgtgggaagaactgaagcttgcgacgtccaactactcacctgatatgttaattgggaagggtggaaccagccaggttttcaaggcacagcttgatggcggaacatttgctgccataaagattcttaaaccctcggttgatgcaatacacgagtttgttacggaggttgagaccgtaaccagcttgcagcatgagaacattgtagcactaaggggattcagcttcgagaactacaaccttgtgttggcatatgattacatgccccgagggagcttggacaaagctcttcatgggaagaatgatggcacagagtttcttgtctgggagaggagaattaagatagcaattgacatcgcaagagcactcaaatttctccatctcggcggtgtgacccagtctgtgatccatggagatgttaagtcttcaaatattctnctttcagaggattttgg

SEQ ID NO: 97430 - DNA, 523 bp, Zea mays
  unsure (1)..(523): unsure at all n locations
gcagggactgtctcctttacgtnaagcanagtactgtcgtaccggtccggaattcccgggtcgacccacgcgtccgcccacgcgtccgcccacgcgtccggtcgacctgatccgccacatgttcaagacccagtaggctagtagagagatagatttctgcctccctatcgtgggtcgtccccaatggcctttggtcgcagaccatctttgctgcttgtctatgctgagaataaatgtgaacggtgcccctggacgctggatccatgctggttttggacacgctgcctttttgtgtttaacttatctgctgccgtactgttacgaattcgcaagttttagttcttttgggctttgctaaagaataaacaatgaggtttcagtttacacacaagttttgggatggattacaagctcagagactatgacctcaatgacaatgctttttcacctaaacttggacatgcaaaaaaaaaaaggggcgccctttttagggtcccaagcttcccttccctggccttggaan

SEQ ID NO: 97431 - DNA, 524 bp, Zea mays
  unsure (1)..(524): unsure at all n locations
agcaggtactgtgcctgaactgtcnactacagncgcatctgtccggaattcccgggtcgacccacgcgtccgcggacgcgtgggcgagtctcgtccacccgtcgtcctcctagctcctctactcgccagtcgccatgggcaagattaagatcggaatcaacggcttcggaaggatcggcaggctcgtggccagggtcgccctccagagcgaggatgtcgagctcgtcgccgtcaacgaccccttcatcaccacggactacatgacctacatgttcaagtacgacaccgtccacggccactggaagcacagcgacatcacactcaaggactccaagacccttctcttcggtgacaagccggtcaccgtctttggcatcaggaaccctgaggaaatcccgtggggtgaggctggcgctgagtatgtcgtggagtccaccggcgtcttcactgacaaggacaaggctgctgcacatctcaagggtggtgccaaagaaggttgttatcttctgccccaaacaaagatg

SEQ ID NO: 97432 - DNA, 522 bp, Zea mays
  unsure (1)..(522): unsure at all n locations
gcggnttgccctgggtaggtacacctacgtactgtcctgtaccggtccggaattcccgggtcgacccacgcgtccgcccacgcgtccgcggacgcgtgggttgcaaacaagtatatgaagagggttgcctcagaacttgatgcattagaaggcactgagaaagagcccaatagagagtttttgcttctccagggtgtgaggttcgctttccgggttcatcagtttgctgggggttttgatgcagaaagcatgaaagcttttgaagagctaagaagcaagatgaccacacaggcatctgctccaccaatatctcaaggctgaagcataaattgagcacaggattcagcacacatctggtcttacttgctggagagtgatttttagttgtgtatattaagtgtacagactacagaagagagattcaaattccggtgttgtgtcaagcaagttgtatatgccaagataatacaagtcaggtttgttcatttgtataacagttttagctcaagcataacacttttc

SEQ ID NO: 97433 - DNA, 528 bp, Zea mays
  unsure (1)..(528): unsure at all n locations
ccggtgactaacttttcgtnacactacgtactgactgtaccggtccggaattcccgggtcgacccacgcgtccgtggttttcggcggaggtgcgggtggtggctttggaggaggcaagggtggtggttttggcggaggtgcaggtggtggcttcggaggtggcggaggttcgggtggtggcatcggtggtggactctagaggtggcgggagctcggcgcgcgcacgttgagtgcgtgcatgccatgaaattaaaaagcgatacatggagtgtgtggtacggtatggacattgctagagttacattacatcatcactagtatatataaggttgactcttatttgtaagcctaatgaaagtgaataattggatgcgttatgtaagcctactctactatatatatgcttgttttggaaaaaaaaaattaaaagggcggccgctctagaggatccaagcttacgtacgcgtgcatgcgacgtcatagctcttctatagtgtcacctaaattcaattcactggccggcggttn

SEQ ID NO: 97434 - DNA, 517 bp, Zea mays
  unsure (1)..(517): unsure at all n locations
gttagtgctgaacagtggagggtgggnaatttgtccccgtccggaattcccgggtcgacccacgcgtccgctacccccagtctcggaagagaactatccagaagcgcaagactccaaagccgtcgccttggtatccatcccttcctcgccacgggggtcgcctgagatcacataaacaatggtgaaggctgttgctgtgcttggtagcagcgatggtgtcaagggcaccatctttttcacccaagtgggagatggccctaccactgtcaccggaagtgtctctggcctcaagcctggcctccatgggtttcatgtgcatgcgcttggtgacaccaccaatggctgcatgtcaactggaccacactacaatcctgcgagcaaggaacatggagcaccagaagatgagaaccgccatgccggtgatcttggaaatgtgacagctggagcagatggtgttgcaaacattaatgttaccgacagccagatcccactgactgggccaaactcaatcattgcc

SEQ ID NO: 97435 - DNA, 536 bp, Zea mays
  unsure (1)..(536): unsure at all n locations
cggnggagcggcnctgctgccagtcaccgtacgtactgccgtaccggtccggaattcccgggtcgacccacgcgtccgcccacgcgtccgcccacgcgtccgcaaggtgctgaagcaggtgcacccggacatcggcagctcctccaaggccatgtccatcatgaactccttcatcaacgacatcttcgagaagctcgccggcgaggcggccaagctcgcccgctacaacaagaagcccaccatcacctcccgggagatccagacctccgtccgcctcgttctacccggcgagctcgccaagcacgccgtctcggagggcaccaaggccgtcaccaagttcacctcgtcctaagctcctttcgagtaggtccttaagcgccgtggcgccttttgactgtatggaatgtttgtcatctgaaaaagtgatctgagcagntgcatatataantcttgcatactattctaaaaaaaaaaaaaaaaaaaaaaaagggccggcggttttgaagattcaagcttaccgtcccctgccttccaac

SEQ ID NO: 97436 - DNA, 515 bp, Zea mays
  unsure (1)..(515): unsure at all n locations
ttggctgcgacttccggtgatcangnaggatcattccggcctggtaacggccccgcgacgcgtccgccacgcgtacgcccacgcgtccgcaaggttctgaagcaggtgcacccggacatcggcatgttctccaaggccatgtccatgatgaactccttcatcaacgacatcttcaagaagctcgccggcgaggcggtcaagctcgcccgctacaacaagaagcccaccatcaccttccgggagatccagacctccgtccgcctcgttctacccggcgagctcgccaagcacgccgtctcggaaggcaccaaagccgtcaccaagttcacctcgtcctaagctcctttcgagtatgtccttaagcgccgtggcgccttttgactgtatggaatggttggcatctgaaagttgatctgaacagtgcaatctataattctggcatactattcttaaaaatgaattaaccattaaaaaagggccgtcgctctagaggaatccaacttacgtacgcgtcn

SEQ ID NO: 97437 - DNA, 527 bp, Zea mays
  unsure (1)..(527): unsure at all n locations
gctttatagnttcaaatntagccatgncacatcactcctgnctggagtacccgggcggacccactcgtccgcccgcgcgtccgcccacgcgtcctctaggttctgaagcaggtgcaccccaacatgggcagctccttcaaggccatgtccatcatgaactccttcatcaacgacatcttctagaagctcgccggctaggcggccaaactcgcccgctacaacaagaatcccaccatcaccttcctgcagatccagacctccgttcacctcgttctaccctgctagctctccaagcactccttctcttaaggcaccaatgccgttaccaaatttacctcgtactaagctccttcaaattagttcctaagccccgtgtcgccttttgactgtattgaaatgtttgcaatctaaaattgatctgatcaatgcaattataatttttgctttcttattctaaatttacatatttatcataaaaggtcttccccttttaatgatccaacttacgtacccctttcttcctaacc

SEQ ID NO: 97438 - DNA, 519 bp, Zea mays
  unsure (1)..(519): unsure at all n locations
tgcacgctgctaggactagcatgcgacagtaggtgtgcacccgtccggaattcccgggtcgacccacgcgtccgcttccaaagtgttttgtttgttgtccgcctggcgcctgcccccataactactctgccacgaatccggggaggaatcaacctagcggtaagcggacatggcggcggcgaagatagcgccgtcgatgctctcgtcggactttgccaacctcgcttcggaggctgagcgcatggtccgcctaggcgccgactggctacatatggacatcatggatgggcacttcgttcctaacctgactattggggctccggtgatccagagcttgaggaaacataccaaagcatatttggactgccatcttatggtcacaaagccttcagattacgtagaaccatttggaaaggctggcgcttctggattcacattccatatagaagttgctagagacaactggcaagatctcatccaaagcattaaatcaaagggtatgccgnctggtgtatcatt

SEQ ID NO: 97439 - DNA, 519 bp, Zea mays
  unsure (1)..(519): unsure at all n locations
cgtactgtgtcgtncgatacgactgacttaccggtccggaattcccgggtcgacccacgcgtccgcccacgcgtccgctcgactctgccccagcttctgggggcgggggccccgtgccgtcctccaccgaccccggcgcgggtgtcgggggaggcggcgacgggctgggtatgcacgggcgcggccgaggtcgcgggagctaccgccaaacggtgtgccggcactggcttcgcggcctctgcatgaagggcgaggcctgcggattcctgcaccagttcgacaaggcccgcatgcccgtctgccgcttcttccgcgacttcggcgagtgccgcgagcccgactgcgcgtacaagcactcgtacgacgacgtcaaggagtgcaacatgtacaagatgggtttttggcccaatggtcctaattggcggtataagcatatcaaagctcctggngccaccgcttctggtgaggaagttcttcaaaagattttgcagatgcgctcttttaacagatacagtcagg

SEQ ID NO: 97440 - DNA, 524 bp, Zea mays
  unsure (1)..(524): unsure at all n locations
tgtggacggctaagtactttcgtncactacgactgacgtaccggtcttgaattcccgggtcgacccacgcgtccgcaagatcaagcgcctcccgcctccagcactcttaactcaggggacacgatcgccatggccggcacatcgaccgccgccgccgtgctgtgcccgccgtccgtggccgggctccgcctggcgccgtctcccggccgggcgcgcgtgtcgttccgcgcggcgccggcgccggcgcggcggtccgtggcggcgcgcgcggagctgagctcggcgctggtgatcagcctgagcacgggcgtgtcgctcttcctgggccgcttcgtcttcttcaacttccagcgggagaacgtggcgaagcaggtgcccgcgcagaacggcaagacgcacttcgacgccggcgacgagcgcgccaaggagttcgcggccctgctcaagtccaacgaccccgtgggcttcaacctcgtcgacgtcctcgcctggggctcgctcggccacatcgtcgcctactacat

SEQ ID NO: 97441 - DNA, 530 bp, Zea mays
  unsure (1)..(530): unsure at all n locations
gaagaccgtacttgtgnccgggggacatcgcacagactgtaccggtccggaattcccgggtcgacccacgcgtccgcggacgcgtgggcggacgcgtgggctgatggagagcttgccacggcaagagctgcagctggcgcaggaacaataatgacattgtcctcatggtctacttccagcgttgaagaggtcaactcagttgggccgggcatacgtttcttccagctctatgtctacaaggacaggaatatcgtacggcaactcgtgaaaagggctgagatggctggcttcaaggccattgcactcacggtagacactccaatacttggccgcagggaagctgacattaagaacaggttcgccttaccttcacatctggtgttgaaaaacttccaagcgctggatcttggcacgatggacaagacaaatgattccggccttgcttnctacgttgctggtcaagttgaccgcacccttttctggaaggacgtcaagtggctgcagacaattaccttgttgccgatcctatg

SEQ ID NO: 97442 - DNA, 536 bp, Zea mays
  unsure (1)..(536): unsure at all n locations
gcggggnnncctggcttcaaactgcactgcactgactgttccggaattcccgggtcgacccacgcgtccgcccacgcgtccggcttctacgagaggatatagagaggaagaacagctcgtccgagaccatgaagagcagcccacacctggtgctgatcctgtgcctccaggccgctctggtcatgggcgtcttcgccgctttggctaaagaaaatgccctggttgagagcaaggccatcgacatcaacccggggcagctcaagtgctgcaccaactgcaacttctccttctcggggctctacacctgcgacgacgtcaaaaaggactgcgaccccgtctgcaagaagtgcgtcgtcgccgtgcacgccttctactcgggcaacaacaagttcaggtgcaccgacatcttcctcggcatgtgcggccccaagtgctagatcagagagggagaacgcgcgctgctggtagctgctataacttcggtctttccgcgncgggccgtgcatgggtcacgtactgtgtggtgtgctactacn

SEQ ID NO: 97443 - DNA, 530 bp, Zea mays
  unsure (1)..(530): unsure at all n locations
cgcggggnncctgactgcaagctacgtagagccgcaccggnctggaattcccgggtcgacccacgcgtccggcgaatcacagacgcgtctatctcagcttgctgcgctgcactaccctgccctgccatcatatcgtacgtgagcccggccgagcgagagcgagggagaggcatggctgctccgaagctcgcgacgctggcgctggccgtgctcctggcggcgaccgtggtggctcccccggccgcggtgcgcgcggcgatgtcgtgttccaccgtgtacagcacgctgatgccgtgcctgccgttcgtccagatgggcggggccatgccgccccagccgtgctgcggcggcatccgcagcctgctgcagcaggccaacaacaccctcgaccgccgcaccatctgcggctgcctcaagaacgtcgncaacggcgccaacgggagcggcacctacatcagccgcgccgtcgtgctgccaaccaggtgcgggtcgccttgccgacaagatcaggacaacgttaactggcacan

SEQ ID NO: 97444 - DNA, 537 bp, Zea mays
tgattttatagaggtttggttgctagagtcgatttgtgacgtatcgtgcaccggtccggaattcccgggtcgacccacgcgtccgcacacgcgtacgggttctacgagaggatatttagaggaagaacagctcgaacgagaccatgaagagcatgcccacacctggtgctgatcctgtgcctccaggccgatctggtcatgggcgtcttcgccgctttggctaaagaaaatgccctgattgagagcaaggccatcgacatcaacccggggcagctcaagtgctgcaccaactgcaacttctgcttctcagggctctacacctgcgacgacgtcaaataggactgcgaccccgtctgcaagaagtgcgtcgtcgccgtgcacgcctcctactcgggcaacaacaagttcaggtgcaccgacatcttgctcggcatgtgcggacccaagtgctagatcagagaagaagaacgcgcgctgctgctagctgctatagcttagatctttcgacgtcggacggtgcatggttcacgtactgtg

SEQ ID NO: 97445 - DNA, 494 bp, Zea mays
cgccgactgcgacgtatgacgtaccggtccggaattcccgggtcgacccacgcgtccgcagacattgcaattgtatttgcacagcagcgagatctcgctcagaagagactctgaagagggaacgagctgcgcttcttcgtcctcgatcaactagcttctctgatcgcttccatatggagagagctgcgtcaagctgcgctagcctcctagcacaaaggaggtgctactccgtggccgcggtcgtggtgaagggatgcgggcggaaggccgtggagaaagtggccaagcgcatcatgggcaaggaggtgaacaccgcggctgcctccggggagaagacgccgtgggtgccggaccctgtcaccggctactaccgtccggcgggtggcgccaaggaagtggacgcggcggagcttcgcgccaggctgctcaccaagaggatcgccaactaaatcaatctagcagcagagcagtgcggctgagattatttagcgccc

SEQ ID NO: 97446 - DNA, 516 bp, Zea mays
  unsure (1)..(516): unsure at all n locations
aggctccgcgnttgcttgccttgacttggctgnactgactgtccggtccggaattcccgggtcgacccacgcgtccggtatctccaaggatggccagacccgtgaacatgctctccttgcgttcacccttggagtggagcagatgatttgctgctgcaacaagatggatgcaaccactccgaaatactccaaggcacgttatgatgagattgtgaaggaagtctcatcctacctcaagaaagttgggtacaaccctgataagattgccttcgttcccatttctggttttgagggcgacaacatgattgagaggtccaccaaccttgactggtacaaaggcccaaccctgcttgaggctcttgaccagatcaccgagcccaagaggccttcggacaagcccctgcgtctgcccctccaggatgtgtacaagattggtggtattggaactgtaccggttggtcgtgtggagactggtgtcatcaaacctggtatggtagtcaccttttggtcaactgg

SEQ ID NO: 97447 - DNA, 519 bp, Zea mays
  unsure (1)..(519): unsure at all n locations
ggggcctatgggtggnccagcccatttagtacgtcgtccggtccggattcccgggtcgacccacgcgtccgctcgcctctcgcgcatcctaccaggagggtgggagacccaggcagcggaggtgtgcgagggtcgcttcgcaccacgcgctgcggcctgcggtgcgagagatcgaggcctgagctagggtctggtggcggagatgtcgacgccggcgaggaagcgcctgatgcgggacttcaagcgccttcagcaggacccgcccgccggcatcagcggcgcgccgtacgacaacaatatcatgctctggaacgccgtcatattcgggccggatgacacgccgtgggatggaggcacgttcaagctgactctgcaatttatagaagattaccccaacaaacctccaactgttcggtttggttcgaggatgtttcatccaaacatctatgcggatggaagcatctgtttggacatcctacaaaaccagtggagccctatatatgatgttgcggcaatatt

SEQ ID NO: 97448 - DNA, 515 bp, Zea mays
  unsure (1)..(515): unsure at all n locations
ggccactnttgctggccccaccttccgacgcacgnctgtaccggtccggaattcccggtcgacccacgcgtccgatttcttttcgctgatgtcatctacatatgtcacttgttaaatgattttataatggaaatgtatggttgtgaatttgtcaatttatacttaggcccgtttgttttgttggaattgaattccattataataatcataatttagacaaactaattaagttaatatatttatatatttaatatattagtatattatcctgaatcatatgagagatatagttatacgctacacgtatgctatagagaagtaagtataagagtgtgctataagttgtatattagaaaagtagcatgtaaatttatagaaccaatttttatctctcaccctatgaatttgagatagacttatatataaactttgaaaagttatggaatgtcacattctaaaaaatagcctactccattagttagattccaattcttcgaaatgaagaaacaaacggg

SEQ ID NO: 97449 - DNA, 517 bp, Zea mays
aggccttgtgtgccaccgatcacacagcacgactgtaccggccggaattcccgggtcgacccacgcgtccgccacttcaaaggaaagccatattatgttgatatcattgacttgttcaacgaggttgagtggaagacagcttcagggcaaatgttggatcttatcactacccacgagggtgaaaaggatctaactaaatataacttgacagttcaccgccgcatcgttcagtacaagacagcttattattcattctaccttcctgttgcatgtgcattgctgctggctggtgagaacttggaaaactttgttgatgtaaagaacattctcgttgaaatgggaacatactttcaagttcaggatgactatctagattgttttggtgatcctgaattcattggcaagatcggaactgacattgaagactacaaatgttcctggctagttgtgcaagctcttgagcgtgctgctgagaaccaaaagagcattctgtttgaaaattacggaaagtctgatc

SEQ ID NO: 97450 - DNA, 507 bp, Zea mays
  unsure (1)..(507): unsure at all n locations
ggccttgatgatgcctcactctncgtacgactgtccggttcggaattcccgggtcgacccacgcgtccggcgacgccaagcggccaagacggagaggagaacaattggggacggggaaagtccagggggaagccacggccaccggcgcgatgaaaccgtcgctgtcgaagaagaagggcaagaagaagaagaagtcctcgctgccggccgccgcaccggcccctccgccggcggagggcgctgcggatacggaggcatgtcccccgctgcccggaaccataaccctagccgctgccaccgctgctgcggcggtggtttcggagacggagtccagcagcagcggcgaggcctcgacgtgtccatccgcctgcttcaccgcaagctcgtctgggaccgcgtcctcgcactccttctctgccttgtcctcgtcggcgtccacagcttcgtcgtcggccgccggcgaggagcggcgggacctcacctggctgctcgacgcattcgccagcg

SEQ ID NO: 97451 - DNA, 507 bp, Zea mays
  unsure (1)..(507): unsure at all n locations
tgacctatgagtgagccacgtcgagcgcacgacgtaccggtccggaattcccggtcgacccacgcgtccgcccacgcgtccgatttgacaaaaaaggatggtggcttgttaaagatggaagcttcaaagggcggaaggaaaggggtaatgggtatcgatgccgaagtatttgaggttagccccaacttccatcttgtggagataaagaagacgaatggcgacactctagagtatcaaaaggtcctgaaccaagaaatgaggcccgcactcaaggaaatagtgtgggcttggcaaggtgagcaatcaaagcaaaagcaggaacaacagtcgtgttaaaaacttatgagctagtgcaatgtttttagccaatttccaatctttcgtgtatttgtgtagtttttactctnttattatccatttttgttttcccgtgtaataccaacaaaaacttgtgtagttgtgttattttctgaggacaaatttgtttcaaagatgtgtttacgctgn

SEQ ID NO: 97452 - DNA, 516 bp, Zea mays
  unsure (1)..(516): unsure at all n locations
tgcctnttctgaatcacgacacatagtaccctctaccggtccggaattcccgggtcgacccacgcgtccgggcagccctgagcgggtgcagcagccacgcgtcgtccgcgtccatgctgccgacgccccgcagcgaggacgagatcctggagtcggccaacgtcagggccttcagcttcaacgagctgaggaccgccaccaggaacttcaggccggacagcgtgctgggcgagggcgggttcggttccgtcttcaagggctgggtcgacgagaagacgctcgccccggctaggcccggcacggggatggtcattgccgtcaagaagctcaaccaggatggataccagggccacaaggagtggctgactgaagtgaactaccttggaacgctgtcgcacccctaccttgtgaagctcgttggctactgcctcgaggacgaacagcgcctnctcgtctacgagttcatgccacgtgggagtctggagaaccatctgttcaggaggagctcctatttcc

SEQ ID NO: 97453 - DNA, 505 bp, Zea mays
  unsure (1)..(505): unsure at all n locations
aggcctttcctgccccctcacttggcgtacgacgtccggctcggattcccgggtcgacccacgcgttcggccgctgctccgggctgctgttctgcgcctccacaaggctttggcctctgtgttgtaagttgtaagcttcacctccagccatgggtaaagagaagtcccacatcaacattgtggttattggccatgtcgactctggcaagtcaaccaccactggccacctgatctacaagcttggaggcattgacaagcgtgtgattgagaggttcgagaaggaagccgctgaaatgaacaaacggtccttcaagtacgcctgggtgcttgacaagctcaaggctgagcgtgagagaggtatcaccattgatattgctctgtggaagtttgagaccaccaagtactactgcactgtcattgatgcccctggacatcgcgacttcatcaagaacatgatcatgggtacctnccaggctgactgtgctgtcctgatcattgactccac

SEQ ID NO: 97454 - DNA, 491 bp, Zea mays
  unsure (1)..(491): unsure at all n locations
tctgatcgatttgnactgagtacgcttcgattcccgggtcgaccgacgcgttcggacgctgctccgggctgctgatctgcgcctccacaaggctttggcctctgtgttgaaaggggtaagctttaccttcagccgtgggtaatgagaagtcccacatgaacattgtggttattggccatgtcgactctggcaagtcaaccaccactggccacctgatctacaagcttggaggcattgacaagcgtgtgattgagaggttcgagaaggaagccgctgaaatgaacaaacggtccttcaagttctcctgggtgcttgacaagctcaaggctaagcgtgagagaggtatcaccattgatattgctctgtggaagcttgaaaccaccaattattactgttctgtcattgaagcccctgtacatctccacctaattcaagacatgatcaattggttaccttctagctttctgtgctgtactggacattgacttttc

SEQ ID NO: 97455 - DNA, 513 bp, Zea mays
  unsure (1)..(513): unsure at all n locations
gagtggcctgtgcgtcgcttcggatccnctccgcacgacgntaccggttcggaattcccgggtcgacgcacgcgtccgcgcctcgggtcaaaccctaagcagggagttgatttatccgctgcagccatgagtaagttgcagtctgagtctgtcaaggatgccatctcccagattgttggggatgccaaggagaagaataggaagttcactgagactgtggaacttcagattggtctgaagaattatgatccacagaaggacaagcgtttcagtggctctgttaagttgccccatatccctcgtcccaagatgaaggtgtgcatgcttggtgatgcccagcatgttgaggaagccgagaagatgggacttgactacatggatgttgaggctctcaagaaaatgaacaagaacaagaagcttgttaagaggcttgccaagaagtaccatgctttcttggcatcagaggccatcatcaagcagattccccgtctccttggtcctggtctcaacaag

SEQ ID NO: 97456 - DNA, 506 bp, Zea mays
  unsure (1)..(506): unsure at all n locations
cggtccgtgatgacgtcagccngtcgcatgactgtaccggtccggaattcccgggtcgacccacgcgtccggcatcctcttcgaagttcgaatcgaatcgcgccgcgatcacccacctcatggcggacaaggagcctgtcgtggagcggccagaggcgggtgaggaggaggacgcctcagccgccgccgccgcgggggaggaggaggacacgggcgcccaggtggctcccatcgtgcggcttgaggaggtagccgtcaccaccggcgaggaggacgaggacgtcctgctcgacatgaaggcgaagctgtaccgattcgacaaagacggtaaccaatggaaggaacggggcacgggcgctgtcaagcttttcaagcacaagcagaccggcaaggtccgcctagtcatgcgccaagctaaaacgcttaagatctgcgcgaaccacctcgtggccttcaacacgaagattcaggagcatgcgggcagcgacaagtcgtgtgtttggcac

SEQ ID NO: 97457 - DNA, 518 bp, Zea mays
  unsure (1)..(518): unsure at all n locations
atggcctttggctggnccagttcccgacgcacgactgtaccggtccggaattcccgggtcgacccacgcgtccggggacccggggcggaagaagagagagaagacgtctctctcctctcggcgtccccgtgccggaacctctcgtctgctgcctgcctgcctgcctgcctgcaaaaaggagtttgtcatggcgtctaagcgcatcctcaaggagctgaaggacctgcagaaagacccccccacatcatgcagtgcaggtcctgctggtgaggacatgtttcattggcaagcaacaattatgggaccacctgacagtccctatgctggtggtgttttcttagtgaacattcatttcccgccagattaccccttcaaacctccaaaggtttctttcaagacaaaggtcttccatcctaatatcaacagcaatggaagtatatgccttgacattctcaaagagcagtggagccctgctttgacaatttctaaggtcctgctctccatctgctccctgctga

SEQ ID NO: 97458 - DNA, 520 bp, Zea mays
  unsure (1)..(520): unsure at all n locations
agggccctgtggctgccctagcnccctgccgaacgactgtaccggtccggaattcccgggtcgacccacgcgtccgagcaggagcacggcggcgaggctccgcgaccagatccctgcaagaagacgcggctctcgtcccctctctgcactatccacggtagccacggccacccgaggctgatcccagggctcccggatgaggtctctctgcagatcctcgcgaggatgccgcggatggggtacctcaaggccaagatggtctcgcggagctggaaggcggcggtgaccggcgcggagctgtaccggctgaggaaggagctcggcgtggccgaagagtggctgtacatactgacgaaggcggcggcaggtgggcagaagctggtctggcacgctctcgatccggttagcaaccaatggcagaggctgccgctcatgcctgggatcgagtgcaggagtggcggcgtgtacgggctgggcttgcgggacctggtgagcgccggcgtaggtatcttcgacgtca

SEQ ID NO: 97459 - DNA, 508 bp, Zea mays
  unsure (1)..(508): unsure at all n locations
cggccagtcgtgaggcccgactggncgcaccactgtccggccggaattccgggtcgacgcacgcgtccgcggacgcgtgggcggacgcgtgggcgcggagatcgaagagaagctgaggcctagcgccggacccgccgccgcatcagccatcagccatggcgctggccgctcgcctcgtctcacgctcccgtcagctacattcggttcaagcagcttttgcgaatggaggtgtcactcaagttcgctcctttgccaaggatgcagctccagctgaccgtcctcctgttagtggggatgatctcctgaagggcatattctttgaggtaaagaagaagtttgagacagctcttggcgtccttaaaaaggaaaagatcactattgatccagacgacccagcggcagtttctcaatatgcccaagtcatgaagactgtaagggaaaaagcggatcttctttctgattctcaaaggattaaatataccattgagacctttaccaggggcattcc

SEQ ID NO: 97460 - DNA, 519 bp, Zea mays
  unsure (1)..(519): unsure at all n locations
ggccccgttgctggcccagctccncacgcacgacgtaccggtctcggaattcccgggtcgacccacgcgtccgccggttccgcgtgcctttccccacctactctcgcggctctcgccagccagtctagggtgggggtcccggcgtgcttatccgcccccgccggccatgtcgaagcaaggagggaaggccaagccgctgaaggcgcccaaggccgacaagaaggagtacgacgagacggatcttgcatatctgcagaagaagaaagatgaggaaaaagcactgaaggagcttaaggccaaggcacagaagggcgcgattgggggctcgggtctgaagaaaagtggaaagaaatgagactggtcacccgtctccaatacctagaggatgataaggcagctgtctatctgtgttgcgcttcactaagtgtgattgtaacagtggtacctcttgtgttctgtgttccgcgatgttgcagttggttgcttgatcgaaaaaaaaaaaaaaaaaaggcggccgct

SEQ ID NO: 97461 - DNA, 516 bp, Zea mays
  unsure (1)..(516): unsure at all n locations
cgaccactctgtgtcccatccgctattcgctacgactctcccggttcggaattcccgggtcgacccacgcgtccgcggacgcgtgggcggacgcgtgggcaatcctccttattgttccacacaaacagaaacacgcagggtctctgttctgttcatcctcacactgattgagttcttgtggtctctcaaccagcatctgatacccaattcctcgcacaaacctgccacacgcaatgtccaagaccgagagcaggaagctgtcggacgactatgaggttgcggaggtcctcggccgaggcggattctcgatcgtgaggcggngagtgagcaagtcagaggggaaggcggcccaacaggtcgccataaagaccctgcgaaagctgggcccggccaccacgaccggcgggagcacgccgtcgcagcaaggctcaaataagggcggcggcctggttccgacgtggaagcaggtgtcgtccatcttcgacgcgctgctcaccaacgagatcctcgtgatgn

SEQ ID NO: 97462 - DNA, 510 bp, Zea mays
  unsure (1)..(510): unsure at all n locations
gagtgcctgtgcctgtacgtcatncccatcgcacgatctaccggtctcggaattcccgggtcgacccacgcgtccgggtcctgttcatggctggcgccgcgctgctcgccggggctgccggcgccggcgcgcagcggggcgtgtggagcatcatcacccggcccatgttccagagcatgctgagccaccgcggcgacagcgggtgccagggcgccttctacacctacgacgccttcatcgaggccgccagcaagttccccggcttcggcaccaccggcgacgagcagacgcgcaggcgggagctcgccgccttcttcggccagacgtcccacgaaaccaccggtggatgggcgactgctccggatggaccgtttgcctggggatactgccgggtgaaggaacagaaacagacggacccaccctactatggacgaggacccatacagctaactcataagtacaactacaggctcgccgggcaagcgctgaaactgaaacctgtgggcgacc

SEQ ID NO: 97463 - DNA, 520 bp, Zea mays
  unsure (1)..(520): unsure at all n locations
gtggcgcttggtgacctagcncagttagtacgtcgctaccggttcggaattcccgggtcgacccacgcgtccgggcttgcggtggatacctaggcacccagagacgaggaagggcgtagcaagcgacgaaatgcttcggtgagttgaaaataagcatagatccggagattcccaaataggtcaaccttttgaactgcctgctgaatccatgagcaggcaagagacaacctggcgaactgaaacatcttagtagccagaggaaaaaaaaaaaaaaaagggcggccgctctagaggatccaagcttacgtacgcgtgcatgcgacgtcatagctcttctatagtgtcacctaaattcaattcactggccgtcgttttacaacgtcgtgactgggaaaaccctggcgttacccaacttaatcgccttgcagcacattcccctttcgccagctggcgtaatagcgaataggcccgtaccgatcgcccttcccaacagttgcgcagtcttgatggcgaatgggag

SEQ ID NO: 97464 - DNA, 545 bp, Zea mays
  unsure (1)..(545): unsure at all n locations
nnnnttgtgcctgagccccccccacgtccnccncccagcgtcgtannggtccggaatagccggcgcgacccacgcgtccgtgcacttgtctgggacatcgatcgcgttgtcgtggagacgcagctcatcgcgcacgagaaggccgtgcacgacatcgcctggggggaggccggggtcttcgcctccgtatcggccgacggctccgtccgcgtcttcgaccttcgggacaaggagcactccaccatcgtctacgagagcccccgccccgacacgccgctactaaggctggcgtggaaccgctctgacctccgctatatggccgcgctgctcatggacagcagcgccgtcgtcgtgctcgacatacgtgcgcccggggtgccggtggccgagctgcaccggcaccgggcgtgcgccaacgcagtcgcgtgggcgccgcaagccactatgcacctctgttctgctggggacgacngggcaacattgatcttggaactgtcttagaacggcggcggttgttccccccgagggaatgatcctcttctatc

SEQ ID NO: 97465 - DNA, 544 bp, Zea mays
  unsure (1)..(544): unsure at all n locations
aggagaggggnnaattgtgtattgtatctatnannnntctcnnnatnnnnncaagagccgcgggtncggaggaagctgcaccacgaaccttgattatggttttttcgcgggcggctactgcgcgggataacggtgaaggactactggatcgtccgcaactcgcggggcccgaagtggggcgaggctggttacatccgtatggagaggaacgtcaacgccagcactgggaagtgcgggatcgcgatgatggcgtcctacccgacgaagaagggcgcgaaccctcccaggccgtctccaaccccgccaacaccgccggctgcccctgacaatgtctgcgacgagaacttctcgtgctccgcgggcagcacctgctgctgcgcgtttggcttcaggaacgtctgcttggtctggggcttgttgccttttcagggcgccaccttgctgtaagattaccccaacttgttgtccccgggctattcttttttttaaattcataaattttaatttttttttgttgcaataaaatacccttttgtgttttttn

SEQ ID NO: 97466 - DNA, 568 bp, Zea mays
  unsure (1)..(568): unsure at all n locations
nnnnaaggcgttttacgcgcccccactccncgcgnaggctcgtccggttcggatacccggcgcgcccacgcgtccggttcgtcgtgcggcaactgcgcgaccgccgacgcccgacggcaggtgcaccaggtgttcgtcgaccccttcgcgaggcctcngttccatccttcgccggaggcgaccgcccgtcaacaggacttgatctactactcactagcggtgtagaggcgaagagaagaacttgaccatgagcagcataggcacaggttacgatttgtctgtcacgactttctccccagatggtcgtgtcttccaggtcgagtatgccaccaaggccgtcgacaacagcgggactgttgttgggatcaagtgcanagatggcattgtcctgggtgtcgagaagcttggtaacctcaaagatgatgctgggaggatcaaaaccgaagatccattcggtgcaccggcacctctgcttnggttgtgctggttttatcaacaaatggcaagccaattgtttaagggcccaatcaaaaaccttcagttttaaaagggttaattgggacccacc

SEQ ID NO: 97467 - DNA, 536 bp, Zea mays
  unsure (1)..(536): unsure at all n locations
nggggnnaaagggtttgcgggggagggggtgcggtagacttctacggatacggaactccggcgcacgcagtacggccggggccaggaaaacaaagggggactacgtcttcaaggtggtgctgatcggcgactgggcggttggcaagtcgcagatcctcgcgcgcttcgcccgcaacgagttcaacctcgactccaaagccaccatcggcgtcgagttccagacccgcaccctcgtcatcgaccacaggagcgtcaaggcccagatctgggacaccgccggccaagagaggtacagagctgtgacaagtgcttattacagaggtgcactgggagctttgcttgtctatgacattaccagacgccagagcttcgatcatataccccgctggctagatgaactccgagcccatgccgacaaaaacaatgggataatgcttggtgggaacaaaagtgatctctangagcaccgagcggtgagcacttaagatcccaagagttttttccagaaagagacacctttttcttgagaacactct

SEQ ID NO: 97468 - DNA, 537 bp, Zea mays
  unsure (1)..(537): unsure at all n locations
nggggnaaaaaggagtcgggggggagcggggcgcggtaatactcatccggaattcccgggacgacccacgcgtccgctaagatgaaccatgtttgtgcaatagtggtgtgtttttgtttcctgctggttaaaagaaaaggaaaaaaaaaaaaaaaaaaaaaaaaaaaaaaaaaaaaaaaggggcggccgctctagaggatccaagcttacgtacgcgtgcatgcgacgtcatagctcttctatagtgtcacctaaattcaattcactggccgtcgttttacaacgtcgtgactgggaaaaccctggcgttacccaacttaatcgccttgcagcacatccccctttcgccagctggcgtaatagcgaagaggcccgcaccgatcgcccttcccaacagttgcgcaacctgaatggcgaatgggacgcgccctgtagcggcgcattaaaagcggcgggtgtggtggttacccgcaaagtgaccgctacacatggcaaagcctaaagccccgggcttttgcttttttcccttatttttgc

SEQ ID NO: 97469 - DNA, 560 bp, Zea mays
  unsure (1)..(560): unsure at all n locations
nnnnnaatcgantaatgctcctttgatttctgttgtagtgttcgtccggttcggaatacccggggcgacccacgcgtccgtgtccatctccctgctcctccgccttcttcttgatccagccaagccagggatcggcgtgtcggactcggaggagcaccacttcgaatcgaaggccgacgccggagcgtccaagacctacccgcagcaggctggcaccgtccgtaagaacggcttcatcgtcatcaagaaccgcccctgcaaggttgtggaggtttctacctcaaagactggtaagcatggccatgccaaatgccactttgttgccatagacatattcaacgggaaaaagctcgaagatattgttccttcgtcacacaactgtgatattccgcatgtgaaccgtactgagtaccagctgattgatatatcanaggatggatttgtgagccttcttacttcaaatggcnacactaaggatgatcttagactccccactgatgagaatcatttgggcccaatcaaagaaaggtggggaagtggggngggttttttttgactgc

SEQ ID NO: 97470 - DNA, 555 bp, Zea mays
  unsure (1)..(555): unsure at all n locations
nnnnaatgccaatatgnnnnnnnggaccccngnngnagactcgtaccggaacggaacacccggcgcgagccacgcgtccgcgcacgcgtccgcccacgcgtccgctgtaaaaggattggctctgagggttgggctggggggttccggccccgaacccgtcngctgctggcggaatgctcgagctgctcgcgcggcgagagcgggccgccgcgtgccggccgggggacggaccgggaacggccccctcgggggccttccccgggcgtcgaacaaccgactcagaactggtacggacaaggaagaaaatgatcctgagaaaatgctttcacgtggaacagaaattactctttatttgagagatgatgacaaatatgagtttgctgaccctaccaagattcaaggcttagttaagaactactcgcagtttgtctcattccccatatatacatggcaggaaaaatcaagaacacatgaggttgaagaggaggaaagatcaaaaaggtgaagagctacttaaaaaaaaaaaaaaaaaaaaggcgggccgctctttagaag

SEQ ID NO: 97471 - DNA, 497 bp, Zea mays
  unsure (1)..(497): unsure at all n locations
nnnaaacctanccccccagtccccccanctctcgnataccgcacacccaccgtcgccacctttctttacccctaccatacgctttgccccccacatacctccgggccctgttccattgtagccgagcctacacacaactaaactttgtgatcaccagagggtctcttaacacttgaaccctttcctcgaataggcgctcaacaaccctcgccaccgactaatggttctactgatggaactggatatacgaaactttatgcagaaccctcagctgcacgagttccaattccacaactttccgacttcttacctacgctgagcttctcatcgtgctgcacaacattatggcttacagactatattggcaaataatttaataaaaagctcatttagcaagatctatgccagaaaaacacccgaaaccacctgtcctcccatttcaatagcccaaaaccctacccacacatccgaaatttttttttgcccacaaaaacctt

SEQ ID NO: 97472 - DNA, 524 bp, Zea mays
ccccccaaccgtcgtaccggtccggaattcccgggtcgacccacgcgtccgcccacgcgtccgcccacgcgtccggtcttcatgctgctcatgtggtgctggtccgagaccttcgtcgtcagcttctactacctccgcggccacctccaccagacctggtccgtgccccgctacggcttccagtacttcctgccggcggcgaagaagggcatcaaccagcagatcgagctggccatcctgcgggccgacaggatgggcgtcagggtgctaagcttcgcggggttaaccagagaccaaggttttgaccgaggcgcggacccttgtcgtgaacacagcacccccgacctgcgcgcgagaggtggtgcacacggaaacacactgacagggggccgcgaaactctaaccagatacccagccaacgcgaggggaggggttgttttagacggggcgccccctaaaaatttggggggggcctcttggtcttctccttttggggggaaaaaaaacaaaagcttttgttgttc

SEQ ID NO: 97473 - DNA, 531 bp, Zea mays
  unsure (1)..(531): unsure at all n locations
aaaanaaatggtaccccccncgatcncccgcgccantctcgtaccggtccggaatgcccgcgtcgacccacgcgtccgttgactttcacagacccactatgactgcctacgcccatatagatagagaggggttggcctaaggataataaaacgtttgaggaaggttaccgcttacgatatacctatatatagatagtgtagtgttgtagtgtgttaagtagatcggtcccatataaagttgcaatgtatctgcaatgagttcatctactccggggtgttctccgcacttctcaagaaagaaatagttggaaattccccggatcgtctgcgcttggcttggtattcttatactgaatcgctgttggataaaagaaagcataaagtttttaagcctgcgttctcgttggcgaaaccactatgaggcaaccatgaaaagcggttctatgtttcgatcgaaccaacacagctttacgctttttttcaactctacccacactttggggttgcaattactattaactttatcgaaat

SEQ ID NO: 97474 - DNA, 543 bp, Zea mays
  unsure (1)..(543): unsure at all n locations
nacccgtggggaaatgtgaatcgggcattgcnacagcggtacngattcgaaancgggcggcgcccacgcgtccgcgtccacaaacacaaagtttgtggctgaccgatattgctcatcatcatttggctgttgcatttatttttctgagtgccggtcatatgtatcgaactaacttcggaattgggcacagtatcaaagatcttttagaagcacatactcctccggggggtcgattaggacgtgggcataaaggcctttatgatacaatcaataattcgattcattttcaattaggccttgctctagcttccttaggggttattacttccttagtagctcaacatatgtactctttacctgcttatgcattcatagcacaagactttactactcaagctgctttatatactcatcaccaatacattgcagggttcatcatgacaagggcttttgctcatggagctattttttttattatggggtacaatcccgaacaaacagaagataatgttttggtgcgaatgtttgtccatctcgaaggcg

SEQ ID NO: 97475 - DNA, 536 bp, Zea mays
  unsure (1)..(536): unsure at all n locations
nnnaaatggtancccccnnncaacnccccncgcgtcgtanggttcggaaacccgcggcgacccacgcgtccgctaagcccatggtagtggagaccttttctgaatatcctcctcttggtcgctttgctgtccgtgacatgaggcaaacggtggctgtcggagtcatcaagagtgtggagaagaaggatccaactggagccaaggtgaccaaggctgccgcaaagaagaaatgatgtgtctggctggttctgtgtttgcttgagggaaacctagtggaaacataaaatatctcgtcttgttcacgtcattgtctgaactatgctcgcaacgtttgcctggtcgatttagaatggttattttcgttaaaaaaaaannnnnnnnnnnnnnnnnnnnnnnaaaaaaaaaaaaagggcggccgctctaaaggatccaagcttacgtacgcgtgcatgcgacgnataagttttctatagggcacctaaattcaaataactgccgccggtttacaacgacgtgactgggaaaaaccctgtggt

SEQ ID NO: 97476 - DNA, 533 bp, Zea mays
  unsure (1)..(533): unsure at all n locations
nnggtgtggnnnaccaagcttcgaagcactggaataccggttcggaattcccgggtgcgacccacgcgtccggtgagtctgagctgaagaggaggaggaggaggaggagaagcagcagctcacccgggggagggagagcgaagatgcgccgcgtcacgctgttgctcgtcgccgccgtgtgcgcgctggcggcgccggctgccgcggtcgtcactgacggtcttctcccgaacggcaacttcgaggatggcccgtccaagtcggcgctggtgaacggcacggtggtgtcgggcgcccacgccatcccgcggtgggagacgtccggcttcgtggagtacatcgagtcggggcacaagcagggggacatgctgctggtgcgtgccgcaggcgcgcacaccgtgcgggtgggcaactaggcgtatatccaggagcttctggacctggagcgcggggcctactactccatcacgttcaacgcggcgcgggcaatgtgctcacgctgagatgtttaacacgttggtgaaaccccaatg

SEQ ID NO: 97477 - DNA, 617 bp, Zea mays
  unsure (1)..(617): unsure at all n locations
tatattgatttggacnagatgcgatatataactgatagactgagacatttcgacgatcatcccggatcggaattccctggtcgtcccacgcgtccggttcggtttcgtgggtgagcggatcgagatggcagcgtcggatgttgagtaccgcggcttcggcggctgcctcgcctgggccacggacgaccactccctccacaacgccttcagcacctactgcgaggtcctcgagtccaagatcatcctcgatcgggagacgcagaggtcccgcagcttcggcttcgtcaccttcttcacggaggatgcatttgtgaacgtcatctatggtatgaactgcaatggatctggactgtcgcaacatcaccgtcaacaaggcccaagcccgccgcggtcttataagcagttgccgctgtcaggtacagtggtagtctttgaagctgctgctacagatgtagcaggtaacgttatggttattgtaacttatatatttagcagcaggttacngtagttgccataattgatatcagctggtagtggtgttaattactanttttctatacattgagtgatgctataggatactcgacctgaactggtataacgtaaccggagggcct

SEQ ID NO: 97478 - DNA, 569 bp, Zea mays
  unsure (1)..(569): unsure at all n locations
ctatttgatatatatnataactgtgttgttgccccagtcgcancgtaggacgtctcggntcggaattcccgggtcgacccacgcgtccgcccacgcgtccgcccacgcgtccggttggcttctcctccccctccggttcgggttcgggttcgtgaggttctccggggttcggtttcgtgggtgagcggatcgagatggcggcgtcggatgttgagtaccgctgcttcgtcggcggcctctcctgggccacggacgaccactttcttcacaacgccttcagcacctacggcgaggtccttgatttcaagatcattctttatcgttagacgcataggtcccgcggcttcggcttcttcaccttctgcacggaggtagcgatgcggaacgccatcgaaggcatgaacggcaaggagctggactgtctgaacatcaccgtttacgaggccctgtcccgcggctttctttgatgctgattgttgttgttggtaccgttgttgcccttgaagccgtggattctggagttgctggccctcttattgctgatttgggtatcagttggtgccgattct

SEQ ID NO: 97479 - DNA, 619 bp, Zea mays
  unsure (1)..(619): unsure at all n locations
atatgatataatgtatatatnnagattaagtggtattgcctgcncaccttcgaccgtactaccggtcctgaattcccgggtcgacccacgcgtccgcttaattcatgagttgtatggagggacttatgtcaccacaaacagaaactaaagcaagtgttggatttaaagctggtgttaaggattataaattgacttactacaccccggagtacgaaaccaaggatactgatatcttggcagcattccgagtaactcctcagctcggggttccgcctgaagaagcaggagctgcagtagctgcggaatcttctactggttcatggacaactgtttggactgatggacttaccagtcttgatcgttacaaaggacgatgctatcacatcgagcccgttcctggggacccagatcaatatatctgttatgtagcttatccattagactctatttaaaaaggttctgttactaacatgttnactttcaattggggtaacgtatttggtttcaaaagccttactcgctctacgtttggaggatctacgaaattcccctgtttatttaaaaactttncaaggtccgtcttacggtattcaaattgaaagggataaattgtaccaat

SEQ ID NO: 97480 - DNA, 564 bp, Zea mays
  unsure (1)..(564): unsure at all n locations
gtatttatatatatnattatttagtgatccctgccattancgtatgcctgtaccggttcggaattcccgggtcgacccacgcgtccgatcaagcggttcttggtgaggaacattgttgagcaggctgctgtgagggacgtgcaggaggcttgtgtgcatgatggatatgttcttcccaaattgtacgcaaaggttcatcactgtgtctcatgcgcaatccatgcacacattgttcgtgtccgctctcgtgagaacaggatgaaccgtgagcccccgcagcgcttcaggcgccgggatgatggcccaaggccaggtcagggcccaccgcgcccaggtgctgctgccacagcagctcctcctgctgccgctcctcgtacctaagttcaggaatgcgattcatggcttagttctctcacctatgggataatggacttttcctgttttgaaaaccaatgtactgtacccccttcatgttaaatttttaggacaatttgtgggtcggtcttacttctggcattcaatcagagctgttaaaatatgtgctgacctaaataagggtgcatt

SEQ ID NO: 97481 - DNA, 596 bp, Zea mays
  unsure (1)..(596): unsure at all n locations
agcagtgatatggctgaaagcctaggtgctcatcgtantgtcgtaccggtcctgaattcccgggtcgacccacgcgtccgctcggctctcgcatcgatgaagaacgtagcaaaatgcgatacctggtgtgaattgcggaatcgcgcgaaccatcgagtttttgaacgcaagttgcgcccgaagccttctggcggagggcacgtctgcctgggcgtcacgccaaaagacactcctaacaccttcccgcggggcgagggacgtggcgtctggccccccgcgccgcacggcgaggttgtccgaatcatgggcttactgcgaaccgcgccgggcgcagcacgtggtgggcgacatcaagttgttgttctcggtgcagcgtttcgtctctcggtcggccatttcggcctaaggacccatctagcgaccgagcttgcccttgtaccgaatatccatgtcagtttggactacccgttgattttaagcatataattaatgcggtgatatgaaacttacgaggattatcttattaacgtntatcttacctggagctccctattttgagatcggtgcgtgcttacggtccgattggtatctggaaa

SEQ ID NO: 97482 - DNA, 639 bp, Zea mays
  unsure (1)..(639): unsure at all n locations
attattgattattttagatccgtcgatagatgaagtttcatntccctccgcatgagttaccggtccttaattcccgggtcgacccacgcgtccgctcgtattgaagtttgtcctgagcatgtcagctagtaaggacgtgcttgcccttgcgttactggaggtatacctatccagcattgatccagggaccacggtgactgtgaagtgacatggaaagccagtcttcatcagacgccggacggactacgacatctatctggccaacagtgtgtatgtggcatccttgcgccacccatagcatgattcatattattttgaagatttcctagtttgctgttggtatattggcttgtgcactcacctcggctgcatacatatatccatacgcctgagacttttattgtatgttcctgctgatgccatgattaccaatttcttcttatttctgtagggatccgtaaggatttttgtatatgtntaatatttttatnaaatcttagccttagatattgcctgatagcttaattgtgtcattncttntccaatattctatttttaagaatgatattatttgtttttgatttctaatataatgttatcattaccataaattttatatttaagtaaataatttcactt

SEQ ID NO: 97483 - DNA, 605 bp, Zea mays
tattggatgttttgagatatggatttatgatatcagctctcatcgtatgacttaccggtccggaattcccgggtcgacccacgcgtccgcccacgcgtccggtcaccactcccaagccagtaccgagtcctacgagcagtcgcacgcaagtgtcaagagacgaaacggtcgacatggctcgcacgcaatctgccgtagcggtcgccgtggtggccgcggtgctgctgctggcagcggcggcgacgacctcggaggccgccatcacctgcgggcaggtgagctccgccatcgcgccctgcctctgctacgcccgcggcacggggtccggcccctccgcgtcctgctgtagcggcgtcaggaacctcaagagcgccggcagcaaccgcgacgacaggcgctccggctggaactggcctaaggaacgccgtcaggggccttaagcggcttaacggcggcaacgtcggcaggattcccttcaagtgcggcgtcagcattccctacaacatatggacttcaacgactgcttcaaggtggactaaaactttgccaagcgcgatacgggctgcttgatcattgaccaacacttcggcgtggcggccggcgaa

SEQ ID NO: 97484 - DNA, 753 bp, Zea mays
  unsure (1)..(753): unsure at all n locations
tatatgtaattattatnntgatcaagccgtatcgactgttgnttgggtgctcatagtactgctcgtatccggtcctgaattcgccggagtcgactccacgtcgtctcgctccactgcgtcacgctccacgcctgtccgcaagggtgcctgaagcagtgtgcacctcggacatctggcatctgggtgcaaggtccatgtccatctatgaactctcttcatcaaccgacatcgttctgagaagtctcgccgtgcgaggtcggccatagctcgctccgcttacaacatagatagcccactcatcactctcctcgggtagatctcagacattctcggtccgcccttcgttgctaacccgtgctgagtcgttnctcaagctattcgccgttctctattatggtgcacncaatgtgcctgtctacccaatggttcactctttcgtccctaaagcgtccttttcagaagtgaggtcccttaaagcagccgtntggtagccatttatgacatggattggaaatgtgtctgtcgttctgtgaagtttgatcttgaggcattgcaagtattatgaattnttggccttacctatntgttaaaatttaattgtagtnatanaataaaaatgggctgggcctattttattatggaaccctaaggcttgaccttctctgtgtgattcggtttgtcttaagctgtgcttttaggaggtacccttaaatttcaattcacttggcccgtgggttgtcaaacttgcttgtt

SEQ ID NO: 97485 - DNA, 610 bp, Zea mays
  unsure (1)..(610): unsure at all n locations
atatgttgatgttagtgtcgaccggaggtgatcctgcnctcatgttcatcctcgcaccggcccggaattcccgggtcgacccacgcgtccggcagcgagtacatacatactaggcagccaggcagccatggcgcccaccgtgatgatggcctcgtcggccaccgccgtcgctccgttccaggggctcaagtccaccgccagcctccccgtcgcccgccgctcctccagaagcctcggcaacgtcagcaacggcggaaggatccggtgcatgcaggtgtggccggcctacggcaacaagaagttcgagacgctgtcgtacctggcggcgctagcgacggacgacctgctgaagcaggtggactacctgctgcgcaaccggtggataccctggctcgagttcagaaggtgcggcttttgtaccgngaggaactcaacttcccgtgcttctacaacggcggttcctgaccacttggaaacttgccatgttcggttgcaccaacccacccaggtgtcacagacctgcaggaagccatctaattcttaccggacgctttcaccgggtatttaggttgacaccatcaacagacccaatgcggtagttttatgtccg

SEQ ID NO: 97486 - DNA, 599 bp, Zea mays
  unsure (1)..(599): unsure at all n locations
agcatgcatatgtcttatggttaacttgctatcgcacgtcgtaccggtccggaattcccgggtcgacccacgcgtccgctcgacccggagaagaggctgtaccccggcggctcctacttcgacccgctcggccgggcttccgaccctgagaagaaggagcggctgcagctggcggagatcaagcacgcgcggctcgccatggtcgccttcctcggcttcgccgtgcaggccgtcgccaccggcaaggggccgctcaacaactgggccacccacctgagcgacccgctccacaccaccatcttctacacgttcttgagggttctcttaagcccgccattgctccgtcccgttcattgaccggccggaacgtgttcttggattaatgtacttcgatctttatgagcctggggatggatcaaccctgtgtgcgtggactcgttgttgtgataagttggatagatnggatggcttaatcgatcctttggtaatgaggatcttagttaataggaaaactaccgctgggacttggtgggttggaatgaatggacccaaccctgggagaatcaatgcattcacttggtgtccaaagaaaaaaaaaa

SEQ ID NO: 97487 - DNA, 624 bp, Zea mays
  unsure (1)..(624): unsure at all n locations
atatgatataatgtatatatcnatgaggaggccgtctcgatgatggnttgnnncgctacgcatgatcttccggacttgaattaccggatcgacccacgcgtccgcggacgcgtgtgatccgcacctctctccatcttcctgctcctccgcctccttcttgatccaggggagccagtgatcgccatgtcggactcggaggagcaccacttcgaatcgaatgccgacgccggagcgtccaagacctacccgtagcatgctggcaccgttctgaagaacggcttcatcgtcattaagaaccgtccctgcaaggttgttgatgttattacctttaagactggtgagcatggccatgccaaatgccactttgttgccatagacatattcaacgggaaaaagctcgaaaatattgttccttcgtcacacaactgtgatattccgtatgtgaacctgactgagtgccaacttgattgtgtatattaatngatgggtttgtgaagcttggtactttagatgggaacacttatgttgagcttagaactccaactatattgaagttttttgttctttttttagttnttgattttataaataatgaagtttattggtttataaaattttgattat

SEQ ID NO: 97488 - DNA, 565 bp, Zea mays
taatatatatatatattaggcgggtgttgcatcccgaactcgtagtgaacgtctcggttcggaattcccgggtcgacccacgcgtccgcccacgcgtccggtggctctacatcgccccgacggggatgtacgggtgcgtgaactacctcaaggagaagtatgggaatccaacgatctacataacggagaacggaatggaccagcctggaaacttgacccgagaccagtacctgcgctacgccacgagggtgcggttctacaggagctacatcggccagctgaagaaggccatagaccatggagcgaaacgggctggctacttcgtctggtctcttctcgacaacttcgagtggctggcagggtacttgttcaagttcggcattgtatacgtggacttcaacacgctcgaacggcacccgaaggcgtctgcctactgggtcatggacattgcttagaagcattgagatcttcagagccgagcctgaacacggaaagttccattttgttcaactttcgctatgtttgggatggcccaatggttcaaattccggtcaaggcctggtcg

SEQ ID NO: 97489 - DNA, 597 bp, Zea mays
ttatatattattgatatttagtattagtgtttccatggtacttctgtatgaacgtctcgattcggtattcccggctcgacccacgcgtccggcgccacttgccagctagagccatccttaatatcttgcagttactgagagtgtgcgtgggagagaggatgggtggcagcggcaggtctgttatgcttctgaaccttatggtggtggccgtgatcctggccgtagagatccatttctgatttgtatatctgttattttatgatattacatcccatcgctctcattagtcactattatgattttttattttttagttattttatttatcaatctattcctttctatcttaatcatttagcacttgctattttttttgtgatatttctcatatttatataatccattcctaagatctctttattttattatattttttttataaatattcataaaatcatcttatttttatttaaaaattatatattttaattttaatttatccgttaacttatttgtgttactattgtttgtataataatgttctattattttgtgtcatttaaaccattatgtcatgaatctattattaggtatatg

SEQ ID NO: 97490 - DNA, 522 bp, Zea mays
  unsure (1)..(522): unsure at all n locations
agaagcatttgctgatgtacgcatcagatngctgacgcactgccgtaccggtccggaattcccgggtcgacccacgcgtccgggaggaagaaaaaccggcctcacctcctgcggctccagaaccagaaccggaacaagtgcctgagccagaacccgagccagtgaaagaggaagcaccagaagctgaaccggatttgctgggtctgaacgaaccgaaccctgctgcaactgcgatagaagagcagaatgctttggcgctagctattgttccgatagatgatgctccgaaagctgctcccacttttggaaatggagtcactggctgggaactggcccttgtgacagcaccaagttcaaatgagaccgccgttgccccaagcaagaaactggccggtggtctggacttgctgacccttgacagcctgtacgacgaggcgaaccggagagcgagccagccagcaagctacaacccctgggaggcgacccccgacgcgcctgccccgatgatgaccatggcgccgg

SEQ ID NO: 97491 - DNA, 524 bp, Zea mays
  unsure (1)..(524): unsure at all n locations
tgagctgtgattccgtacggtgnacttcgacgtcgttccggtcttgaattcccgggtcgacccactcgttcgccactcgttcgggcaccaccaacgacgactaatacggccgtggcaccggctgcgggtagggcagcaagccctctggcgacgactcgtacgccggcggcggctgtggcgggtacggcaagcagtccggtggaggcgcggacgacgactgagagtacggctcctcccggtacgactcggagaagtacaggaaggaggagaaggagcacaagcacaaggagcacctcggcgagatgggctcccttgccgccggcgccttcgccctgtacgagaggcactaggcgaagaaggacccgtagcacgcgcagcggcacatgatcgaggagggcttggcggcggtggctgccctgggcagtggtggcttcgcgtttcacgagcaccacgacatgatggaggccaaagacgcgtcggaggacgcccggtaggaagatgagtccggccgtcgatggtaaggt

SEQ ID NO: 97492 - DNA, 532 bp, Zea mays
  unsure (1)..(532): unsure at all n locations
cgacggtgnctgatgccttaacctnnnactangnacagtcgtaccggtcctgaattcccgggtcgacccacgcgtacgcccacgcgtccgcccacgcgtccggtgcgacaagctcatcatggactccatcaacaggaggtacgtctacatggacgagtaccccgtcaccactgagctccagaaccgctgcgtaaacatgatagctcacctgttcaacgcgccgatcaaggaggacgagacagctattggggtcggaacagtgggatcctcggaagcgatcatgcttgcaggtctggcgttcaagaggaaatggcataacatgaggaaggagcaggggaaaccgtgtgacagacccaacatcgtcaccggtgccaacgttcaagtctgctgggagaagtttgcaaggtattttgaggtggagctgaaggaagttaagctgtcggaaaggtactacgtcatggaccccgtcaaagcttgtgagatggtggattgagacactatctgtgtcgccgcgatcttggggtcacctttg

SEQ ID NO: 97493 - DNA, 529 bp, Zea mays
  unsure (1)..(529): unsure at all n locations
aggagggctgactgacgcctggaatgggcccgcttcgacgtancggtccggaattcccgggtcgacccacgcgtccgcggacgcgtgggccggccaccgccaccctcgatcacgccgtccgtcgaggtaaggtcagggtggggagggtcagtgtgctcaacgatgcgctcaagtccatgtacaacgctgagaagattggcaagaggcaggtcatgatcaggccgtcatccaaggtcatcatcaagttcctgacggtcatgcagcgccatggctacattggagagttcgagtacgttgatgaccaccgatcgggcaagattgtggtcgaactcaacgggaggctgaacaagtgcggcgtcatcagccctcgctttgatattggcgtgaaagacatcgagggatggactgcaaggctgctcccgtccaggcagttcggatacatcgtcctcacgacttctgcaggcatcatggaccacgaggaggcccgccggaagagcgtcggaggcatggtctaggtttcttctattgn

SEQ ID NO: 97494 - DNA, 519 bp, Zea mays
  unsure (1)..(519): unsure at all n locations
gcgctggctgttggccaaaatcganagcactggccagtcccgtccggaattcccgggtcgacccacgcgtccgcccacgcgtccgcccacgcgtccgactactcatccgtcgccccacggaagtttcggcggcgccggcgtgctcgtgatctcaaccaaggcgtgtctccgctccggtcacccgtcactccacgcaaacatgtcgaggaggaagaccagggagccaaaggaggagaacgtcacccttggacccactgtccgtgaaggagagtatgtctttggtgttgctcacatctttgcatccttcaatgacactttcattcatatcaccgatttgtctgggagggaaactctggttcggatcaccggtggcatgaaagtgaaggctgaccgtgacgagtcgtcaccttacgctgctatgcttgctgctcaagacgtcgcacagcgctgcaaggagcttggcattactgcactgcacattaagcttcgtgccaccggaggcaacaagaccaagacccc

SEQ ID NO: 97495 - DNA, 527 bp, Zea mays
  unsure (1)..(527): unsure at all n locations
aggacgtccgctgagtcatttttacctaganatncgtttcgccttgaattcccgggtcgaccgcacgcgtacgcccacgcgtccgcccacgcgtccgactacttatctttcgccccacggaagtttcgtcagggccggcgtgctcttgatctcaaccaaggcgtgtctccgctccggtcacccgtcactccacgcaaacatgtataggatgaagaccatcgagccaaaggacgagaacgtcacccttggacccactgtccgtgaaggagactatgtctatggtgttgctcacatctttgcatccttcaatgacactttcattcatattacccatttgtctgtgatggaaactctgcttcggatcaaccttggcatgaaagtgaaagcttatctttacctagacttcaacttacgcttgctattcttgctgcttaatacattctacatctgctttaggaacttgtcattactcaactcacattaaactttattccaaccgaagcaacaagactaagtacttcgtcccc

SEQ ID NO: 97496 - DNA, 523 bp, Zea mays
  unsure (1)..(523): unsure at all n locations
agacgtcnttatgntttcaaatccgcttgnacnancgcttcgncttgaagaccgggccgacccacgcgtacgcacacgcgttcgaccacgcgtccgtccactcttccggcaaccggtccaacactttgacgcgcagcttcagcaatggctgcctccaccatggcgatctcctccactgcgatggccggcacccccatcaaggtgggttccttcggcgagggccgcatcaccatgcgcatgaccgtgtgcaagcccaaggtcgctgcgtccggcagcccctggtactgtccctaccgcgtcaagtacctgtgccccttctacggctagccccctagctacctgaccggcgagttccccggcgactactgctgggacaccgtcaggctgtccgcctaccccgagacattcgtcaagaacctgcagctgtaggtgatccactaccgctgggccatgcttggcgcgctcggctgcatcttccccgagctgctctcccggatcgtttcaaattcggccaaggcctctg

SEQ ID NO: 97497 - DNA, 530 bp, Zea mays
ggagtcctgcttgatgcctttattgctcgcgatcgcactgactgtactcggtctggaattcccgggtcgacccacgcgtccgcagtttcttgtgccgttgctgtagaaaccttgaagatatataaggaaaggaatattttaggacacgttaacaaaattgctccaaggttccaggagggaatcaaggccttctcaggaagcccaattgttggggagatacgcggtctgggactgatacttggaactgaatttgtcgacaacaaatctccaaatgatccatttccagctgaatggggtgttggttcgatatttggcgcggagtgcgagaagcgtgggatgctcatcagggtggctggggacagcatcatgctgtcacccccgctgatcatgacttccaaatgagtccaaaaaattataagcaaattcggcgatgctctgaatgccacggaggaacggattggagaactgaaatccatgaagaattagccgatgcttcttgttgaaacgacggttaggtatgtgattgcatg

SEQ ID NO: 97498 - DNA, 529 bp, Zea mays
  unsure (1)..(529): unsure at all n locations
tgacgcctgctgttgcttgaaccgcnnccgcatcgcgttacggtccggaattcccgggtcgacccacgcgtccgcccacgcgtccgcaccagacgtcggccgagtcctggggtaccggccgcgccgtgtctcgtgatccgccgcgtccccggcggcggcacccaccgcgccggccagggagcgttcggcaacatgtgccgcggcgggcgcatgttcgcgcccaccaagatctggcgcaagtggcaccgccgcgtcaacatcaacctccgccgcgtcgccgtcgcctccgcgctcgccgccaccgccgtcccggccctggtccaggcgcgtggccaccgcatcgagactgtccccgagatgccccttgtcatttccgacttcgcggagtccattgagaagaccttccaggcgctcaagatccttaagcagatcggcgcccacgccgacgccgagaaagccaaagacttcgtcggcattcggcccggcaagggttagatgcgcaaacggcggttcattaaccgaaggggcc

SEQ ID NO: 97499 - DNA, 523 bp, Zea mays
  unsure (1)..(523): unsure at all n locations
agctaaggcctgctgatgnaacccttgcttgcatcgacgtatcggtctcggaattcccgggtcgacccacgcgtacgagcagatgcacggcctgctcaagcaccaggactccccctacatcagagctattggattccgctacgtacgatacgttgcagaaccgaagacactttggacttggtatgaaccctatatcaaggatgacgaggagtttgcacctggatcaaatcgtaaagtgactacaatgggcgtttatgtgcgtgatctcctccttggtcagtactatttcgacagtctccttccacgagtgcctctcccaatcctccgacaggtcactagccaccttgagaagctaaagctttcaacaagcagtcaagaatgactggggattccaacaagcttgaatcaaatgataccgccagaaagccttcttncgtaaaggcttncttgtctgtctcctttggtcaacgcgcttcacaccgggcattcacaaaggattctttcccggttcgaaaaacgttcg

SEQ ID NO: 97500 - DNA, 528 bp, Zea mays
cgaggcctactgtcaactgttagtcgtgcatagtcacgccgtaccggtctcggaattcccgggtcgacccacgcgtccgcggacgcgtgggcggacgcgtggggccgttgccgcagccgctgcttttcgttcgtcttcgtcctacgcgagggcgaaacccacaaaccctctccctcccgtactccggcctacacatccaggggcgatgacgctgggtagctccggcgccggatcgagcgtcgtcgttccccgaaacttcaggctattagaggagctcgagcgtggagagaagggcattggtgatggaacagtgagctatggaatggatgatgccgatgacatctacatgcggtcatggactggtaccatcattggccctcacaatactgtacatgagggtcgcatctaccagctgaagttgttttgtgacaaggactatccggagaagccaccatctgtcagattccactcaagaatcaacatgacttgcgttaatcacgagacatgaatggttgatccaaagaaggg

SEQ ID NO: 97501 - DNA, 520 bp, Zea mays
  unsure (1)..(520): unsure at all n locations
cgagaggccgcttgccccttaccgccccgtcagtcgtatcggtccggaattcccgggtcgacccacgcgtccgcccacgcgtccgtacaggctcgccgggcaagcgctgaacctgaacctggtgggcgacccggaccgggtggcgagagaccccgtggtagccttcaagacggccatctggttctggatgacgccgcagtcgcccaagccctcgtgccacgccgtgatgaccggcgactggaggcccttcgacaccgaccgcgccgcggggaggctccccggatacggcctgaccacgaacatcatcaacggtggtctagagtgcggcgaggaccgctccaccgacggcgccaaagccgccaaagaccgggtcggctactacaagaagtactgcggtatgctcggagtggggtacggggacaacatggcatgcgggagccaaaagccttacggaggatgatgacactagtagctgatctatggttgctgcaatgcaagccttcacgtgtgtttgccttcn

SEQ ID NO: 97502 - DNA, 529 bp, Zea mays
  unsure (1)..(529): unsure at all n locations
tgtggctaatacttactttacgtgagtangnactgtcgtaccggtccggaattcccgggtcgacccacgcgtccgggtgggttggcttctcctccccctccggttcgggttcgggttcgtgaggttctccggggtgcggtttcgtgggtgagcggatcgagatggcggcgtcagatgttgagtaccgctgcttcgtcggcggcctcgcctgggccacggacgaccactccctccacaacgccttcagcacctactgcgaggtcctcgagtccaagatcatcctcgatcgggagacgcagaggtccctcggcttcggcttcgtcaccttctccactgatgaggctatgcggaacgccatctagggcatgaactgcatggagctggacggtcgtaacatcaccgtcaactaagcccattcccgctgcggccgtggaagcagctgccgcagcgggtactgtggtggccgtggatgctgcaggtaccgccgtagcggccgcatgatggcggcttctgctacggaggatgcggc

SEQ ID NO: 97503 - DNA, 529 bp, Zea mays
  unsure (1)..(529): unsure at all n locations
tttgctgactgatgnttgcattgtccagtacgnacggtacgtaccggtccggaattcccgggtcgacccactcgtccgctgacgcgtgggtgcgtctgtggtattcgtctattacaaggatggtgccactaatgggagattcctctatttgtctcatggtcttaaggagatcaagtgctaggcgtgcggcgaaattagttacccatgttgggtactatctatgtactattattatatccaaaactatagttgtcctggctgaattgaactcaaaagggtttgtttgagaaaaaattgtcccaagattggattgcttgttaaagctcaatattgttattgaagtgttaaaaaaaagtagtctatccctaaaataaaaatcaaaaagagggcggccgttctagaggatccaagcttacttacgcttgcatgcgacgtcataactcttctatagtgtcacctataatcaattcactggccgtcattttacaacgtcttgactgtgaaaacccctgcgttacccaactttatt

SEQ ID NO: 97504 - DNA, 523 bp, Zea mays
  unsure (1)..(523): unsure at all n locations
gcgggtgacgtgttaagtccgangtanggactatcgttccggaattcccgggccgggtcgacccacgcgtccgtcgtgacttcatcaagaacatgatcactggtacctcccaggctgactgtgctgtccttatcattgactccaccactggtggttttgaggctggtatctccaaggatggccagacccgtgaacatgctctccttgcgttcacccttggagtgaagcagatgatttgctgctgcaacaagatggatgctaccactccgaaatactccatagcacgttatgatgagaatgccaatgaagctttatcctacctctagcactgtttctactgcctctgttgagaataacttttgaagaaaatcaccggtcttggagccctacggtatgaattgaaaggttctacctttatgtactggtcctataggaataaataaactcgtagggcactttgctaatttgttataaacctcacttgtcttttaatttaaactgttcaatgctgtccttgtacacg

SEQ ID NO: 97505 - DNA, 499 bp, Zea mays
  unsure (1)..(499): unsure at all n locations
gcgtgagtgagttcagggatgcangtcatgactaccggtccggaattcccgggtcgacccacgcgtccgcccacgcgtccgggctttagcgatggtcctgttcatggctggcgccgcgctgctcgccggggctgccggcgccggcgcgcagcagggcgtgtggagcatcatcacccggcccatgttccagagcatgctgagccaccgcggcgacagcgggtgccagggcgccttctacacctacgacgccttcatcgaggccgccagcaagttccccggcttcggcaccaccggcgacgagcagacgcgcaagcgggagctcgccgtcttcttcggccagacgttccacgaaaccaccggtggatgggcgactgctccggatggaccgtttgcctggggatactgccgggtgaaggaacagaaacagacggacccaccctactatggacgaggacccatacaggtaactcataagtacaactacaggctcgccgggcaa

SEQ ID NO: 97506 - DNA, 526 bp, Zea mays
  unsure (1)..(526): unsure at all n locations
gcgggtgacgtgttccaatnnnnngtangnactaacttatctcggtcctgaattcccgggtcgacccacgcgtccgccgtgacttcatcaagaacatgatcactggtacctcccaggctgactgtgctgtccttatcagtgactccaccactggtggttttgaggctggtatctccaaggatggccagacccgtgaacatgctctccttgcgttcacccttggagtgaagcagatgatttgctgctgcaacaagatggatgctaccactccgaaatactccaacgcacgttatgatgataacgcgaatgaagctttatacttcctcaagcactttttgtactactttttcttaaataattttctagaaactaccagtcttttagccctacgtgtttaattgaaaggtttctcctttgttatacctgtcctttagaacctaacaaaatctttagggacctttactaatttattatatacccatcttgtctttaaactaatcctgttaaatgttatcctttctatact

SEQ ID NO: 97507 - DNA, 525 bp, Zea mays
  unsure (1)..(525): unsure at all n locations
tggcggtgnctgatgcctttcccgcaagtattagtatttccgttccggtccggaattccggggacgccctacgcgtccggcagaccctgccccggttcaactgccgtggccgtctcgtccccgtccagtccaggtttccgtcttcctctccgactccgccgccggcggaaccccaaccggcgaggatggggaacatcttcgtgaagaagcccaagattaccgaagtggacagggccatcctcaccctcaagacgcagcgccgcaagctcgcccagttccagcagcagcttgagaaggtaattgaagcagaaaaggaagctgcacggcagttggttcaacagaagaagagagacagagctttgattgcactgaagaagaagaaagctcaggaagagctgttgaaacatgttgacacatggcaaatgaatgttgaacaacagctctcagatattgaactagcaagtaaacaaaaggctgtatttgaaagcctgaaagctggaaacgctgcccttaagtctatacaan

SEQ ID NO: 97508 - DNA, 507 bp, Zea mays
  unsure (1)..(507): unsure at all n locations
gcggggttngngtttcaatcccattgcatgtacctaccggtccggaattcccgggtcgacccacgcgtccggtcggatctgagacgagacgagttaccatctcatcccaactccggaacgaacaagttaccatgtcatcccaactccgcctcgaccggatctcgtcggactcggatccgcccgaccaccccgcgccgccgcagatcaaagaagatggcagctgtcgacacattcctcttcacctcggagtctgtgaacgagggacaccctgacaagctctgtgaccaggtctcagatgccgttcttgacgcttgccttgctgaggaccctgacagcaaggttgcttgtgagacctgcaccaagaccaacatggtcatggtccttggtgagatcaccaccaaggccaatgttgactacgagaagattgtcagggagacctgccgcaacattgggtttgtgtcaaacgatgttgggcttgacgccgaccactgcaaggtgctcgtgaac

SEQ ID NO: 97509 - DNA, 354 bp, Zea mays
cgttgtgttagcgatagactcggtccggaattcccggtcgaccacgcgtcggggtgttgtggagtctgcagctggctactgaaggcggagccatggggaggggccgctggactgagcggtcaacaatcaacgcagcacttgaagcccgaacgcgtaaaagctacagcttcgcttgcaccaatccctatgctttaacgcgaagcttcatttgacggaccactacagacactgataggacaaaaacatttcagccaatctgtgtcgacaaagacgagtttcaacagcgatgatcctaactaaacaaggtgtattacgaggctaaagattgttgggaaactggtcacttgggtaaag

SEQ ID NO: 97510 - DNA, 506 bp, Zea mays
  unsure (1)..(506): unsure at all n locations
cgctgtctgagttttttatcccgatagnagatgagatctttccggtcctgaattaccgggtcgagcccactcgtccgccctgacttcatcaagaacatgatcactggtttttcccacgctgactgtgctgtccttatgagggactccaccactggtggttttgaggctggtatctccaaggatggccagacccttgaacatgctctccttgcgttcacccttggagtgaatcagatgatttgctgctgcaacaagatggatgcaaccactccgaaatactccaaggcacgttatgatgagactgtgaaggaagtctcatcctaccttatgaaatgcgagtacaacccctgataagattgccttcgttcccataacaggttttgagggcgacatcatgattgacagcgtcaccaaccttttactgtacaatagcccaacccttcttgaggctcttgaccatatcaccaacccaataatgctttcgacattcccattgatttgccctt

SEQ ID NO: 97511 - DNA, 502 bp, Zea mays
  unsure (1)..(502): unsure at all n locations
cgcggtgtgtcgttttcaggtnccatgcaggtatcgtccggtccggaattcccgggtcgacccacgcgtccggataagtctttgacatttcagcatagacaggagcaatgacacggcatggcccacaccatgaagcagatcgacaagctcgtgggcgcgaacaaacctgagctcgagaagaaagtgctagcagccgctgatgccagtacgtcctagtgacacaagtggaagtgggcaaacgatctgtgatggctttccggtgtatagtttccatggttcatttgtgtgcttgtcccatgtttgcctggggacgatgacgttttacaattttggcccccatcgcgcgcactcgtctgtttctctcatggaaggccgtgtgaacctgtgcctgtgtttgacaaatgaacggaactttatatggaccaatgcttaaaagtctttgcaacctaatttttaagggttggttgcatgaaaaaaaaataaaaaataggggcgggccgtg

SEQ ID NO: 97512 - DNA, 351 bp, Zea mays
tgtttgttacgatagtactcgtcggaattcccggtcgaccacgctcggcccattcgtagttcaacacccgccaacagtcttcgcgcggagagcgcaatcaacagacagaggaactgctggaagctagcatcttacccactcataagctatggcagttcatcgcaccctctttgcttgcgcgtcgtcgcatgctacgcactacaatggcggcctgaccgcgcctgtgcatcggacgcaccctgcctgtcgggctgtctcgggcaaatctggcggcactaaccggctacgtcggctgcctgtcgcaatacatctgacgcgttcaatgggggcaatgtggcccaagtggtcctt

SEQ ID NO: 97513 - DNA, 497 bp, Zea mays
  unsure (1)..(497): unsure at all n locations
gggtnctgaagctgatgctgagcttgcatctccttactcggtcctgtattcccgggtcgacccactcgtccggttatagatcgcgacagtcgtccgttgactctttttatcataaattagataaggtacacgaggttgactaattacttttgaataacttcacaaatcatatggaagaaccatagcatttcgcgattcatcggtaaatttactttgattctctatagacccataatgtgagcccctttatcacggtaaagcttaaatggtggaaatccgggcaaaaagggaacctctttttacaactcccttggtgtaaacttttaaatgctttaaacggaaaattcctttgttaaaattaatctctattcgaaaatcctaattcttaaaatagtttgaatcctttactaaaaaagcccgcatcccctttttccaatgccaaattattacctaattgttaaataaataaaaataggtggccccttttttggtacccg

SEQ ID NO: 97514 - DNA, 535 bp, Zea mays
  unsure (1)..(535): unsure at all n locations
tgtgatgcgcttgngcctttccgcacgtgatcgtatcgacgtatctcggtccggaattcccgggtcgacccacgcgttcgccttcggatgaaggatcccctttctttacctggaggacatccaactgaggctcatgaaaaactacggatagagtcgaccactgtgcgctggcttacgccatgaacgatgagttctgcagagtgctccatcagcatatgaagttcttctccagcaacccatgctcacgtctcactcaagacgtgtacgaagataaatgagcatagtatacacaccagacatcgtggacatcttcggagccaattntcagacagacgcgatcgcatgtcactacctgtcgaccggacatangactatgcatcgacagtagcctttgactcacgtaagcattgcaagaggctacgtctagctgtccgatggaagaatgcgcaagctctatatatgatccacgcttgacttcgcattgatgctatactagatcttttctatagtctgagcgagactaaattagtggccc

SEQ ID NO: 97515 - DNA, 519 bp, Zea mays
  unsure (1)..(519): unsure at all n locations
nagtccggactgagcctcccccgcaggtgacgtatcgacgtaccggtccggaattcccgggtcgacccacgcgtccgcccacgcgtccgatcaagggctgctgtgtgggtccaaagaagagggtggtgaccgtccggcagtccctcctgaagcagacttcccggctggcgctggaggagatcaagctcaagttcatcgacacatcgtccaaatttgggcacggtcgcttccagactaccgatgagaagcagaggttctttggcaagctcaaggcgtaaggtgctgcggtgcagcgaagtcccatttctcaaaatcatcaaactgagatactttggtttgtaaccttgctgtaccaagttttgtagccatggtccggtcgtctatggattgctccatgcttcagaactgcactgtctatgttttgcgctatctgggttgttaatggcccaaaaaaaaaattaaaatttttatatgttttcctacattaatattaaaaaaaaaagagggccggccgtctaa

SEQ ID NO: 97516 - DNA, 494 bp, Zea mays
  unsure (1)..(494): unsure at all n locations
tgacggtnctgtgtcagctgcgacgcatgatctctcggtccggaattcccgggtcgacccacgcgtccggccagcgccatggtcacgtcgactaccgccgacgccgtgctgtacccgacgtccgtggtcgggcttcgcctgaagccatttaccggggcgccccaagccgttccgcccgaaaacgggcgcggcggtccgtggcggagcgcgcggaactgagcccttcgctggtgatcagcctgagcacgggcgtgtcgatcttcctgggccgattaatattcttcaactttcaacgggagaacgtggcaaagcaagtgcccgagcagaacgggaagacgcacttcgactcccgtgactaacgcgccaaggagttcttgggcctgcttaagttcaactaccccgtgggctttaaccttgtcaaagttctagcctgaggactgtttagacaaattggcgcctactacattcttgtcaaccaaagcaacggatacaac

SEQ ID NO: 97517 - DNA, 522 bp, Zea mays
  unsure (1)..(522): unsure at all n locations
agagagtcgacttcagttgccctgacacgcatcgcantgacgttccggtcttgaattcccgggtcgacccactcgtccgcccctcccgagtacacattttgtgtgtctattggaagagccatccccggaatccggggttggttctggagggagtgtcatcatctcaccattgggaacagtgttggcgggtcccaactacgaaagtgaggcccttctcactgctgacctggaccttggagagattgttcgagccaagtttgattttgacgtggtgggccactactcgcgacctgaggtgctgagtttagtggtgaagagcgatccaaagcccgccgtctctttcatctcatccgctggtagggacgatgactatgtgcagacctaatgacaaacatatcttcggtctttagcttccttatactgcaatcgcatgcatctgtataattgtgggtttccggaacgttgcacgttccgttagaataataataaactggtatgtacaaaatacaatgatgggcggcg

SEQ ID NO: 97518 - DNA, 520 bp, Zea mays
  unsure (1)..(520): unsure at all n locations
agttcgtgctgangcatcnncggcacgcattgtactgacgtatctcggtccggaattcccgggtcgacccacgcgtccggtgatgaggtcatggtggacgtagaagaagctattgaaggacaacctgaagtcaatggagtttccaatcagttgatcaaaactctgaatatcactaaagatggctcaagcagaagcattgatgttctctctgattcaacagcacaagaatcatttttggaggcggtgaagcccagtggtcgtatcaatgcatgcttggccgtagggaaagatatgctctacttgtatggaggaatgatggaagtgaaagatagagaaattactcttgatgatctatattcacttaaccttagcaaacttgatgagtggaagtgtatcatatcggcctcagaatctgaatggttagaaatntctgaagaagaggaggatgatgatgatgagactgatgatgatgaaaatgaagagggggatgctagccagacagatgaagatgaagaagagt

SEQ ID NO: 97519 - DNA, 532 bp, Zea mays
  unsure (1)..(532): unsure at all n locations
tggttgagcgggtnntagtttcaggtntangcatgnactgacgtatctcggtcctgaattcccgggtcgacccacgcgtccgcccacgcgtccggttcttgcctcgttgggatttgatggcgtcggaggtggaggacgaggcggggactccgctgctcgccaacggtgcagccgacgtccgccggaggagggaccaggcgaaggcaattctgtccacgcaggccgtcaggatcgccaccaaggccgagcagcatgagcgcttcatctttaaggtcacacacttgctgggtgttcttggatttgggggattttgctatctcttgggtgccagaccacaggatgtgccatatgtgtactgcctgttctatgtcatatttgttccgctccgctggatttactaccgctacaagaaatggcattactaccttctggacttctgctactatgccaacacctttctccttgtaatgattctcttctacccagaggatgaaaaactttttatggtttgcctttcgtttgcaaaagggtc

SEQ ID NO: 97520 - DNA, 535 bp, Zea mays
  unsure (1)..(535): unsure at all n locations
agtagagacgtgtgagngctggcctnngtagcatgnacgtacttatccggtccggaattcccgggtcgacccacgcgtccgctctatcgtctgccaacgacgcgattggcgattccatttctaccccgagacctccaggcgggcgtccctgaaccctcagccttctacgtcccgcctcggcactcgacggtcgacggcacacaccgcgcagtctcgagacaggaaccggaggaacgaggatggaggatgactcgccgctgacgaatacgatgaacggtgcggtgacaggactcgccgagaagaccatctggggcaccgtcgtcgccacctggtacaacaggccccttgaggagcgccacgtagagctccttggcctaatccgaacgccaaaaatttgcggaacaaacggggccactttagaaacaatcggggtctctaacatgggggcaacaaattttgcccaaatcgggctaaaaacgcggaatttctttaaaggggccctctgggcggttgattgccgagacctctttattcc

SEQ ID NO: 97521 - DNA, 536 bp, Zea mays
  unsure (1)..(536): unsure at all n locations
agttgagcggttntnaatgtttatgccccanngtttgnactgtacgtaccggtccggaattcccgggtcgactcacgcgttcgcggacgcgtgggtcgccaccttctatggcggtagcgactcttcacgaacgatgggtggggcctgtgggtacggcaacctgtactcgacggtgtacggcacggacacggctgcgctgagcacggggctttttaaacaacggtgcttgttgcggccagggttaccgaatctcctgcacttaccaggcggaccctcggttttgaatccgcggaacgtcggtgaccataaccgccaccaacctgtgccctccaaactacgcgctgcccaacgacgacggcggttggtgcaacccgccgcggaagcacttcgacatggccgagccggcctggctaaagatcggcatctaccgcggcggcatcgtgcccgtcaactaccaaagggtgccgtgtgtgaagaaaggcggcgtgaggttcagcatcaacgggcgcgactacttagagctggtgctaatcttc

SEQ ID NO: 97522 - DNA, 528 bp, Zea mays
  unsure (1)..(528): unsure at all n locations
gtgcgagcgctgttgngnttcccccgcaccgngatcgcactgtacgttctcggtccggaattcccgggtcgacccacgcgtccgcccactcgtccgcccacgcgtccgttggtgatcgcccagtacaccgtccgtaccgtgcagaggaccgttcctgctgctgtgcctgctgttgtctttctctccggtggacagagcgaggaggaggccaccctgaatctcaatgccatgaacaagctcagcaccaagaagccatgggccctgtccttctccttcggccgtgccctccaggcgagcaccctcaaagcctgggctggcaaggtggagaacgtggagaaggctagagcggtcttcctcgccaggtgcaaggccaactccgaggctaccctcggcacctacaagggtgatgctgtcgccgacaccgaaagccttcacgtcaaagactacaagtactgagttgcttctctttgcgatcccgttgttttggaactcctgtctgcgagtagggtgctgaatgttgtttgcttg

SEQ ID NO: 97523 - DNA, 522 bp, Zea mays
aggtagtgtgctgagtcacgcatgggaagtagtcttatgagcgatccggtcctgaattcccgggtcgacccacgcgtccgcggacgcgtggggccgttggtaaggatgagcaaaggcccagttccgtttgccaacatcgggaagagagcaaaagatcttctgtacaaggactacaactttgaccaaaagttttctttgtcgacgtctagcggctctggtttgaatctcacagccactggtgtaaagatcaacgaagacttcattggtgatatacggacacaacataaaagcagtagaactactattgatgtcaccgttgatagtgattctaaagtgtcaaccacagtcactgttgatgaagcactaactggtttgaagacttcattcgccttcaaagttcccgatcacaagtctgggaagcttgatctgcaatatgcgcacaatcgtttttcattgaactcgaccattggtttgacatcagcacctttggttgaactggcttgcactgtcggcacaagtgaa

SEQ ID NO: 97524 - DNA, 564 bp, Zea mays
  unsure (1)..(564): unsure at all n locations
agatgatacttgtnnccggttagcacgcatctacaactcgctcctgaattcaccgggtcgacccacgcgtccggaggatatagagaggaagaacagctcgtccgttactcatgaagagcagcccacacctggtgctgagcctgtgcctccaggccgctctggtcatgggcgtcttcgccgctttggctaaagaaaatgccctggttgagagcaaggccatcgacatcaacccggggcagctcaagtgctgcaccaactgcaacttctccttctcggggctctacacctgcgacgacgtcaaaaaggactgcgaccccgtctgcaagaagtgcgtcgttggcctgcaagccttctaattcggccaccaccaggttaagtgcaccgacacctttcttggcatttgccggcccaagtgctagatcagagaggaagaacccgcgcttctgctagctgctatagcttcgttctttcgtcggcggccggtgcatggttcaagtacctgtgtgtgtgctactaccatacctactggccttttgggttgtggggtcttggtcttctctcgac

SEQ ID NO: 97525 - DNA, 568 bp, Zea mays
ttttatatattattttagtggttgttgccgtccgacatcgtagtacgtctgtaccggttcggaattcccgggtcgacccacgcgtccgcaaaaattatcaagactggttttgcagcaattcatctgatatactttttcactggtggtcctgatgaggtaaaatgttggcagatcagacgccagactaaagctcctcaagctgctggtgcaattcacactgattttgaaaggggtatcatatgcgctgaggtaatgaagtttgaagatctgaaagaactgggcagtgaatctgctgtaaaggctgctttaaaatacatgcaggaggggaaaacctatgtggtccaggactgggacatcatcttttttcaaattcaacgtgtctggtggcgggaagaagtgaagaatgtatgaagatggtagcatcacagtgttttacgtcttaccctcaatttctcattcaacagtgtttacaccttggcttctatttccacatttttgaagtcgcttgtcattacttttaaggttccggatttgaaaactttgtgcaaaaaggggttctacactgttg

SEQ ID NO: 97526 - DNA, 565 bp, Zea mays
  unsure (1)..(565): unsure at all n locations
tggggcgttgtccatgcattggagcgnatacgtacttactnactggtccggaattcccgggtcgacccacgcgtccgctggcgttcgacaagatggggagctacggcaacaacggcggcggtaataccaacaacaacagcgacggcgtggaggtgaagagctacttcaacaagtccgccgggagggcggcgagcaacaacaacaacaacagcagccacgccggcggcggcaacaagaagggcggcgccggggagtacggcaggaagaagcacgccaagagcgagggcgcggcggcggcggcggccacggacaagcagcggttcaagacgctgccggcgtcggaggcgctgccgcggggccaggccatcggcgggtacatcttcgtctgcaacaacgacaccatggacgagaacctcaggagggagctgttcgggctgccgtccaggtacagggactctgtgcngtgctatccgccgggactgcccctcttcctctacaactactccacgcaccagctccacggcatcttcgaggccgcgagcttcggcgggaccaacatcgaccc

SEQ ID NO: 97527 - DNA, 556 bp, Zea mays
gaggcgctgtcactgccagcccaggtcgcactgacctaccggtcctgaattcccgggtcgacccacgcgtccgcccacgcgtccgcccacgcgtccgatcgaggctgaactgagcaatatctgtgatggcatcttgaagctgcttgactcccacctagtgccttcttctactgctgctgaatcaaaggtcttctacctcaagatgaagggtgactatcacaggtatcttgcggaatttaagactggtgctgagaggaaggaatctgctgagagcacaatggtggcctataaggctgctcaggacattgctctggctgagctggcacctacccatccgataaggctgggacttgctcttaatttttcagtgttctattatgagattctgaacttcccagacaaaacctgcaaccttgcaaaacaagcctttgatgaagctatctttgaattagacaggcttggtgaagagtcatacaatgatagcactttgatcatgcaacttcttgaggattacttgaccctttggacattcgacctcaccgaggatggtgcttat

SEQ ID NO: 97528 - DNA, 565 bp, Zea mays
  unsure (1)..(565): unsure at all n locations
cgaaagggctgngccatcncatgcaggtgatagtacgcctgcaccggtcctgaattcccgggtcgacccacgcgtccgcccacgcgtccgcccacgcgtccgccagtacctagtcctacgagcagtcgcacgcaagtgtcaggagacgaaacggtcgacatggctcgcacgcaatctgccgtagcggtcgccgtggtggccgcggtgctgctgctggcagcggcggcgacgacctctgaggccgccatcacctgcgggcaggtgagctccgccatcgcgccctgcctctcctacgcccgcggcacggggtccggcccctgcgcgtactgctgtagcggcgttaggaacctcaagagcgccgtcagcaccgtcgacgacaggcgcgccgactgcaactgcctcaagaacgccgncaggggcgtcagcggcctcaacgccggcaacgccgtcagcatcccctccaagtgcggcgtcagcatcccctacaccatcagcaccttcaccgactgctccaaggtgaacttaaacctaaaccacgcgcgacgacggtcgtctgatccatcac

SEQ ID NO: 97529 - DNA, 559 bp, Zea mays
  unsure (1)..(559): unsure at all n locations
tttatataatataggatgctttctgacctgacnccctcagtacgcctgtccggctcggaattcccgggtcgacgccacgcgtccggattcaaggtactggaactaccctgaagattttagcccagagaggtttcagaatggcggggtcgactacaaagggaccggtttcgagatcacccccttcggtgctggtcgtcgacgctgccctgcaatcatgtttgccacttctactctagatattgcattggcaaaccttctctaccacttcgactgtgctcttccggatggaatgagcccatatatggttgataagtctgatcaatacgggatgggtgtcaccaaaaagttagaccatgatattattaccatcagatatgtatactgtactatggcatacgtattggttgtggttaaagcttcctgcacctttacttgaaggcctttgatgaaaatatagtatcttattcttgatttacccctgtaagcggtattttcattaataaaagggcccgccttttttaaggttcaatcttctgtctgcgtttatccagattatatt

SEQ ID NO: 97530 - DNA, 564 bp, Zea mays
  unsure (1)..(564): unsure at all n locations
cggccgtgcgtgtccctccgcgtacgtactcctcactcgctcctgaattcccgggtcgacccacgcgtccgcccacgcgtccgcccacgcgtccggctgcatttggagcttgtgcaagagcttcttccaatttggagagagaagagaccgatcaagtcattggtgacaggcaggccaattctgcttgcacttgaggatattgatggcagcccttcttttttagaaaaagccctgcgctttcttgagaaacatggaataaaggtggaaggaattttgaggcagtctgcagatgtggaagaagttgacaggaggttgcaagaatatgaacaaggaaagactgagttttcagcagatgaagacgctcatgttgtcggtgactgtgtaaagcatgttctccgagagctgccatcatcccccgtgcctgcttcttgctgtacagcattattggaagcgtttcgcctggagactaangatgctaggataaatgctatgcgttcagctatatctgagacatttnctgagcccaaatcgaggttgctgcagagaattttaaaaatgatgccn

SEQ ID NO: 97531 - DNA, 567 bp, Zea mays
  unsure (1)..(567): unsure at all n locations
gattgtgctagtccatgcataagaaagtaatgctgcactcgctcctgaattcccgggtcgacccacgcgtccgcccacgcgtccgcagaccgctggtaggagtatctcgtagacattgaacaacggctgcatggcgagcgcctgcgccacctccatccccctcgtctcggcgccctctgcatgcccgtccaagaagaccaccgtcgccaggttccggcgccgcacggcgacgtgcagggccagcagcggcggtggcggtggccggggcggcgaaaatgatggcctcctttggctgccccggcgggacgtgatgctcaacggcctgtccagtgtcgccgccgggctcgcctggtacccgggcgtcgcgtccggcgcggatgcggtgtgcacccaggccgacaggtgaacgagaagaccgtgcaatgcacggacccggcccggcaagtttccggcccttctggtgtccgncgactgacccccgtggacctcaaagcccgaaagccaaggtgacccccaattcggaacccgtgcatcttctgagcccggagtaccaagaagaagtccagg

SEQ ID NO: 97532 - DNA, 569 bp, Zea mays
  unsure (1)..(569): unsure at all n locations
agtgatgctcgctgcgnccttactcgtncgttaccgtcatgacgtactcggtcctgaattcccgggtcgacccacgcgtccgcaatccgaaatctcgagcgttcgcgcctgcgatcacagcaaagaggaggccacagcacgacagggccccagggttcctactctcgtggcatcggcagcactgaggggaagatgtcgtcggtgttcagcggcgatgagaccgtccccttcttcggtttccttggcgccgtcgtcgctctcgttttctcatgcatgggggcggcgtacgggactgccaagagtggcgtctgcgtggcgtccatgggtgtcatgctcccagagctcgtcatgaagtccatcgtgcccgtggtcatggctggcgtgctgggtatctactgcctcatcatcgccgtcatcatgagcactgtgatcaacctcaaggccaagccatactacctctttgacggctatgcctacctgtcgatcggcctttgcctgggtcttgctgggctttgtgcacgcattgtcaattgcatcgctggtgatgcttgtgtcagggctaacgcttg

SEQ ID NO: 97533 - DNA, 564 bp, Zea mays
  unsure (1)..(564): unsure at all n locations
ttatttatatatattntttggttctctaactttgactcacctcagtaccgcctgtcctgttcggaattcccgggtcgacccacgcgtccggccaggagggccataaaacaaaacacccttaggtttggtgagagtgaggccaatgtccgtgagatttttgacaaggctaggcagtctgctccatgtgtcctcttttttgatgagctcgactccattgctactcagagaggaagcagtgttggttacgccggtagtactgctgatagggtgttgaaccagctgcttactgagatggatggcatgaatgctaatatgacggtttttattatcggtgcaactaacagaccggacatcattgatccagccttgcttaggcctgttcgtattgatcagcttatctatattcctctttccgatgagcaatccaagcttcagatcttcaaagcctgtctcaggaaagctcctgtggtcaaagatgttgacttgaatgctcttggcaaatacacccaaggttttaacgggtccaattttaaataaatctttcaacgtccgttcgcatatttc

SEQ ID NO: 97534 - DNA, 568 bp, Zea mays
  unsure (1)..(568): unsure at all n locations
taattatatgattatntttatggcttgtctgacttcgactngcagatatgtacgtctgtaccggttcggaattcccgggtcgacccacgcgtccggaagttgcctcatcttatccgtgctgttcgcaatgctggattaattgtcacatggatggctgatcctatgcatggaaacaccatcaaggccccttgtggcctgaagactcgtccatttgactcaattctggctgaagtgcgcgcattcttcgatgtgcatgatcaagaatgaagtcacccaggaggcatccaccttgaaatgactggttcagaacgtgtcctgatgcattggtggatcatggactgtgaccttcgatgacctgagcgactgttactacatatacttgtgactaaagctgaacgccttccagtccctgtagttcgcctttatcattgcagaaaggctcatgaatatgatgatgctgtttgtgctaaacaatagtttgttttntgcaccactggctttctaagtagccctaacttgacatataatgtttagggataattccgctactttgaagatttcgcttttg

SEQ ID NO: 97535 - DNA, 566 bp, Zea mays
  unsure (1)..(566): unsure at all n locations
gtataatatatatagntagggctgtgactgccgtcagctccctacagtacgcctgtccggttcggaattcccgggtcgacgccacgcgtccgcggacgcgtgggcgcgggtcgcgggatcaaggagccagagagcgggacgcagcgagcggtccgccggagatcgagaccgtagctagggtttgaggcgccgggctgcggtggacgagatgtcgacgccggcgaggaagcggctgatgcgggacttcaggcgcctgcagcatgacccgcccgccgggatcagcggcgcgccgcacgacatcaacatcatgctctggaacgccgtcatattcgggccggatgatacgccgtgggacggtggcacgttcaaagttaccttgctagttacagaagattacccaaacaagccaccaatctgtcgatttgtctctaggatgtttcatccaaagttatatgctgaatgaagcatctgtgtggatattccacagaaccagtggaggcctatatatgatggttctggaaattttactcttattcaagccctggtgtgtgaatcaaacccaaatg

SEQ ID NO: 97536 - DNA, 566 bp, Zea mays
  unsure (1)..(566): unsure at all n locations
cgagtgtgctgangccttaccgcncgncatcgcantagcgcccgtattctcgggtcgacccacgcgtggggccacgcgttcggggacgccttggtgcgcaaccttatcttcaaccagaagcgccactgtcgcttgccaccgagcccttcgtcgttcctggccggcattgggcacctgcaccttttgaagaaaccggttcaccgaacgctgtctgctcttgcggcgcaacacgggcctgttcttctctttcgattcggcttccgccgcgttgtccacattgccgaccctgccgtcgccgcggagtgtttgagcacccacgacgttacctttgccaaccgcccgcggctttccttcgcccgctatctcttcaacgactacaccacgttgggctcgtcaagctaccggcccaactggcgcaacacttgccgcatatccaccgtcgacatcttttcctctcatagcgtgctctgctccgcggatgttcgcgcccgcgaaaaccgtaacatggcgcgccagctctttaaagcgcgcccccgtggccgacacctttcaggccgcgcgctttt

SEQ ID NO: 97537 - DNA, 560 bp, Zea mays
  unsure (1)..(560): unsure at all n locations
gccgtgctagtgcatcnaagtaagttanattacgcctcactcggtcctgaattcccgggtcgacccacgcgtccgctggcaagagcaacatccaattgaactatgtacttggaaaagagaaaaaacaaatgtcgggtttagtcatcggtgttggcagcatgaaaagcggggagcgtgcattgttgcatgttggttgggagctaggctatggcaaagaaggaagtttttcattcccaaatgtccctccaatggcagaccttgtttatgaagttgaactcattggatttgatgatgttaaagagggtaaatcccgaagtgacatgacagttgaagagaggattgcagctgcagacaggagaaagattgagggcaatgcatatttcaaagaaaagaagctggaggaggccatgcagcaatatgaaatggcgattgcatacatgggagatgatttcatgtttcaattatttggaaagtacagagacatggccttggctgtgaaaaatccatgccatctcaatatggctgcatgcctgatcaaacttaaggagattcgatgaacg

SEQ ID NO: 97538 - DNA, 565 bp, Zea mays
  unsure (1)..(565): unsure at all n locations
taatttatgatgtatntgtctgcagttgttgcccctggcccactgcagtactgcctgtccggttcggaattcccgggtcgacccacgcgtccgaggtgggttggcttctcctccccctccggttcgggttcgggttcgtgaggttctgcggggttcggtttcgtgggtgagcggatcgagatggcggcgtctgatgttgagtaccgctgcttcgtcggcggcctcgcctgggccacggacgaccactccctccacaacgccttcagcacctacggcgaggttctcgagtccaagatcatcctctatcgtgtgactcataggttccgcggcttcggcttcgtcaccttctccacggaggaggctatgcgtaactccatcganggcatgaacggcaaggagctggacggccgtaacatcaccgtcaacgaggcccagtcccgcggcggtcgttgaggcggttgctgcggcaggatctgttgtgtgcgtgatgctgctgctactgcgttgcaggctccgtgattgcggctgcgggttccgcggttgccggtgttaccgttgtggcggg

SEQ ID NO: 97539 - DNA, 565 bp, Zea mays
  unsure (1)..(565): unsure at all n locations
agttggtgctagtcccagtccagnacgtatgatgcactcgctcctgaattcccgggtcgacccacgcgtccgccgaagtcaagtccaccccgttgcagccctacatcgaggtgttcggcctccagcggttccgcgagtgcgagctcatccacggccgctgggccatgctcgccaccctcggcgccctctccgtcgagtggctcaccggcgtcacctggcaggacgccggcaaggtggagctggtggacgggtcctnctacctgggccagccgctgccgttctccatctcgacgctcatctggatcgaggtgctcgtgatcggctacatcgagttccagcgcaacgccgagctcgaccccgagaaaaggctgtaccccggcggcttctacttcgaaccgcttcggctggcngncgacccttaaaaggaaggaccgctgcaactggccgagatccagcacgcgccgcttggcattgtcggctctcctcggctttgccctgcacggccgccgcacctggcagggggcggntcaacaactggggcaaccaactgagcgaacccggtcac

SEQ ID NO: 97540 - DNA, 561 bp, Zea mays
tggagtgcggtgagcctggccagccgatcgaggtacgactcaccggtccggaattcccgggtcgacccacgcgtccgcggacgcgtccgacccacgcgtccgcccacgcgttcgcccacgcgtccgcccacgcgtccgcaaggctgtgctcttcgaccaggccacctacgataagctgctctccgaggtgcccaagtacaagcagatcaccccatccatcctatctgagcgcctcagggttaatggatccttggcacggagggccatcaaggatctgatggcaaaggggctcataaggatggtctttgttcattctagccagcagatatacaccagggcaaccaacacatgaggggtgttttgccgtctggggaccgtatctaatctaaacgacttgatggtgctattatatcaaggttaaattaatcggggctcgaacaatcttactggtgggttgaatggtgaaaatttttgagattattgtactattttaagatcatgtttttataacatttaagaccatggtgccatcccaaaaaaaaaaaaaagggcgggcggttc

SEQ ID NO: 97541 - DNA, 537 bp, Zea mays
  unsure (1)..(537): unsure at all n locations
tggaccggagtgctagcaatgataccctaagtaacgctctaccggtccggaattcccgggtcgacccacgcgtccgcggacgcgtgggctttttttttgacacgaggaactcatcatgaatccactaattgctgcggcttccgttattgctgctggattggccgtagggcttgcttctattgggcccggagttggtcaaggtactgctgcaggacaagctgtagaaggtattgcgagacagccagaagcagaaggtaaaataagaggtactttattgcttagtctagcttttatggaagctttaacaatttatggactggttgtggcactagcgcttttatttgcgaacccttttgtttaatcctaaaaaagaaaatgagtcctttagattagatacttttttctttntttagtacattggcatttgcttatgtaattctaagtatatcaatactttactttactcctatttattatattatttctttgttatattattccggaaattttgtatttatcgggacagacaataccctn

SEQ ID NO: 97542 - DNA, 491 bp, Zea mays
  unsure (1)..(491): unsure at all n locations
ggatggagtgtgtccagcctaagtacgtagactgcgtccnnntnncgnngncggacacgcgtcgccacgcgtcgacagcgcactctacattgcttctgagttgccgcgctacacgccactactaaaggccagccgactatggcggatcagcctctctacctacgcctgtactgagtgcgccgtgagcttgcatcccacggcgatctaccgctggcggggctgcctcagcgctgagctggcacggcgctgtctctcccctgcctaagctgccgttcctccgccgactgctgcggctcctcgccgcgtcgggcgtgtacaccgtcgacaagcagagcacggaggaggagcggtaccgcatcagccncgtgtcctacctgctggtggacggcatccctcacgaggaccacatgaaccacaccgatctggtgctcacctgcacctcgacgcgctacatcgangcggngatagtgctagccggagtggttcaagag

SEQ ID NO: 97543 - DNA, 539 bp, Zea mays
  unsure (1)..(539): unsure at all n locations
tgaatgcnntggcgtgaactgaantattgaacatcatggaaccgctcctgcaggctcgggtcgaccgcacgcgtccgcccacgcgtccggcgagaggaagggaggaggtgagccaccggaagcggagacgtgagtaggcgaccaaccccgtcggtccggcgactccggctgcggcgcggcgtgctagatcgctaccgaccatggtggtggaggagatcgccgagggggtgaaaaacctcaccgttaccggagatgcggcggcttcaggcggagaggggcagaggaggggcggcggcggcagcagcaaccgcatccaggtgtccaacaccaagaagcccctcttcttctacgtcaacctcgccaagaggtatatgcaacagcacgacgatgtagagctatccgctcttgggatggccatagcaacagttgtgaccgtggcaganattctgaagaacaatggatttgccgttgaaaagaaaattaggacctctactggtgaaataaacgacgaatcaagagggcgtccattccaaaaggcc

SEQ ID NO: 97544 - DNA, 539 bp, Zea mays
  unsure (1)..(539): unsure at all n locations
cgtattggggattgtgtccatgacttaagatatctttgctaccgcccggaattcccgggtcgacccacgcgtccggatcagcctttctaccccctgcgcctacgttgaacaggtacctttaggtacccacacaatgcctaaactaatttttgatattgataagagtgcttattataaagcaattcttgcaatttttttaagaattgatttttgcatttttaggtgtcaaaataaagaaaacccatcctagtggatccgtgtggtaaggaaaaatgggtaatctattccttaacaaaaaacaaaaaagggctgccgctctagaggatccaagcttacgtacgcgtgcatgcgacgttatagctcttctatagtgtcacctaaattcaattcactggccgtcgttttacaacgtcctgactgggaaaaccctggcgttacccaacttaatcgacttgcagcacattcccctttcgccagctggcgtcatagcgaaaaggcccgnaccgatcgcccttaccaacagttgcgcaaacttgatg

SEQ ID NO: 97545 - DNA, 540 bp, Zea mays
  unsure (1)..(540): unsure at all n locations
aggattgggaagactggtgtccagcnctctagaatacatagcaccggcgcggaattcccgggtcgacccacgcgtccggcaaccggtccaacactttcacgctcagcttcagcaatggctgcctccaccatggcgaggtcctccacggcgatggccggcacccccatcaaggtgggttccttcggcgagggccgcatcaccatgcgcaagaccgtgggcaagcccaaggtggcggcgtccggcagcccctggtacggccccgaccgcgtcaagtacctcggccccttctccggcgagcccccgagctacctcaccggcgagttccccggcgactactgctgggacaccgccgggctgtccgtcgaccccgagacattcgccaagaaccgcgagctggaggtgatccactcccgctgggccatgctcggcgcgctcggctgcgtcttccccgagctgctctcccgcaacggcgtcaagttcggcgaggccgtctggttcaaggccggctcccagatcttcagcgagggcgggctggactac

SEQ ID NO: 97546 - DNA, 540 bp, Zea mays
  unsure (1)..(540): unsure at all n locations
taactggattcggtttcactagncatatgatcagctcagnattgctcgtccggtccggaattcccgggtcgacccacgcgtccgcccacgcgtccgcccacgcgtccgatcttctccaaccgcggcaagctctacgagttctgcgagcggacagagcattaccaaaacacttgataggtatgaaaaaaacagttatggaggaccagatactgctgtacagaacaaggagaacgagttagtccagagcagtcgtaatgagtacctcaagctgaaagcgagggtggataatttacagaggactcagaggaatttgcttggtgaagatctggggtcacttggtgtcaaagagcttgagcagcttgagaagcaacttgattcatccttaaggcacataagatccacatggacacaacatatgcttgatcagctcactgatcttcagaggagggagcaaatgctgtgtgaagcaaataagttgcctagaagacatgctgaagagaccagcaaccagttgcatggcccagtgtgggagcactgtcc

SEQ ID NO: 97547 - DNA, 541 bp, Zea mays
  unsure (1)..(541): unsure at all n locations
tggctggnttttatatgcctttgcctagccacgtacgcactaatcactccggattggaattcccggctcgacccactcgtccgcccacgcgtccgcccactcgttttatcttttccaacctcggcaagctatactgcttattgatccgttttagcattaccaaaacacttgataggtatgaaaaaaacagatattgacgaccacatactactgcacagatcaaggagaactagttaatccacaccagtcttaatgaatactttaagctgaaatcaaagcttacaaaattacatacgactcatatgaatatgcttgatgaaaatctatattcactttctgtaaaataacttaagcaccttgagaagcagcataattcatccttaatgcacataatatccacatagtcacaacatatccttgatcagctaactgatcttcagacaacgcaacaaatgctaacttaagcacatatttgccttagtacaaatctcaataagaccacctactcattgcataacccattctgttagcacttttccct

SEQ ID NO: 97548 - DNA, 543 bp, Zea mays
  unsure (1)..(543): unsure at all n locations
atcactgcggtngatcgtgtccatgcnctcatgtcagctacgcaccgctccggaattcccgggtcgacccacgcgtccgcacacgccttcgtacccactgcgcctacgttgaacatgtacctttaggtacccacacaaggcctaggctaatttttgatattgataagagtgctcattataaagcaatacttgcgatttatttaagaattgaccaaagcatcattaggtgtcaaaataaagaaaacccatcctagtggatccgtatggtaaggaaaaatgcctaatctattcacttaacaaacatgaaaaatgggcagccgctctaaacgatccaagcttacgtactcgtgcatgctacgacatagctcttctatagagtcacctaaatccaattcactgtcccgacgttttacaacgtcttgactgggaaaaccctgacgttactcaacttaatcgtcttgaacacatctgcctgttcccgctagcgtaatcgctaacatgcccataccgatagccctttccaacagttgttcacccttaatg

SEQ ID NO: 97549 - DNA, 539 bp, Zea mays
  unsure (1)..(539): unsure at all n locations
nggaatggaatatgtgtgcatgaactataagatatcgtggtaccggcccggaattcccgggtcgacccacgcgtccgcccacgcgtccgcccacgcgtccgcccacgcgtccgcggacgcgtgggggcggggtggggcggcctgatgggcgccggccacgactactacgagcgcggcaacctggacatcttcagcggccggggcccctgcatgagccaggcgccctgcgccatgaacctcacctccgacggcaccggcgcgcaccacggctggtactgcaactacctcgaggccacggtcacggggccccacctcgggtgcgcgcagcagctcttcaccgtcgagcagtggctcgccaccgacgcgtcgccctaccgcctgtacgcggtcgtcgacaagtgcaagacgaagcggcaggagccgcgacgctcgccggccggcgaggccgatgccaccgtgaccgcgctctaggtacgaccagtagtaaatcatcgacagaggctagctcctgcctctgctgagtgtaattactgtatgtg

SEQ ID NO: 97550 - DNA, 537 bp, Zea mays
tgcccggaaattgtcatggacatacagctattatcgcactgctcgtaccggtctcggaattcccgggtcgacccacgcgtccggtcacatgaaggtccagacgcgagagacatgcgacacgatctcttaggaatggataaaggatatacgattgatcatgaagtagaatgtgggaaactaattactctcttcagtgctccggactacccacagtttcaggcttcagaggagcgatacaacaatcgtggagcatatattgtccttagtccacctgattttgctacccctgttttccatagcttcggagctgtaaagcctcgacctgcggcccatccgttctatgattttgaacaagtgatcgactcagatgaagaattggatttaatcgccatggacagcggcacgtcgagcctgtcatgacgactcgccatgtaccttttgcacttagggttgtatttattattatcgctccaattgttgccatggaagcgtggcatcaaggttttttgctgtcgttgttgtaagctaatgccaacg

SEQ ID NO: 97551 - DNA, 576 bp, Zea mays
  unsure (1)..(576): unsure at all n locations
aatattatatgattatgtataatcatnnagttatgtgancttagtgatggagacgtgtattagtactgcttctaccggtctggaattcccgggtcgacccacgcgtccgcgccgccgtccaaccctactaggggcaagaagcgcgccgccgccgccgaggaggaggagggggacaaccgcgacgcggaggcagcacccccggcggccaaggcgcccgtggtcggatggccaccggtgaggtcgtaccggaagagctgcttccagcaggcaaagcagcaggccgtcagcagcagcagcagcaaggcggccgacaaagaggatgctgcggcgccggcgcccagctgcacggcgtccgcagccgcctcaaacgccaccgccagcgccggggccggctcattcgtcaaggtgagcatggacggcgccccgtacctgcggaagctcgacctgaggatgtacaaggggtaccgggagctccgggaggccctggaggccatgttcgtctcctccggcagcgctaacgccaacaacaacctgtccgagttcgccgtcacctaccaggacaaggacggcgacctc

SEQ ID NO: 97552 - DNA, 538 bp, Zea mays
  unsure (1)..(538): unsure at all n locations
agcaccgggtctgtttcatagnttagaagagtattgcatctgctctaccggtccggaattcccgggtcgacccacgcgtccgcccacgcgtccgcccacgcgtccgcaccgataaagcctttgcgtacattggagaacacgggaagctaataaagaccctctccgtcgccttcgccgggaacagtgacatggccctccagtatgtattcgaggggtgcaccaagctgcagaagcttgaggtcagagatagccctttcagtgacaggggtttgctctcaggactggactacttgtacaacatgaggttcttgtggatgaactcgtgcaggctgacgatgaggggctgtagaggtgtagctcagcagatgcagaatctggtggtcgaagtaatcaaggaccactccgaagatgaaggggaggctgagaccgttgacaagctgtacttgtatcggtcactggcagggccaaggaatgatgctccgccgttcgtcaccctcttgtagtgctgctgccgccaccggangaccacagccctgct

SEQ ID NO: 97553 - DNA, 542 bp, Zea mays
  unsure (1)..(542): unsure at all n locations
tggaatgggttggctgtacatgctcattaagacatcatcgcatccgctccggaattcccgggtcgacccacgcgtccgcgccgccgtccaaccctactaggggcaagaagcgcgccgccgccgccgaggaggaggaggcagacagccgcgacgcggaggcagcacccccggcggccaaggcgcccgtggtcggatggccaccggtgaggtcgtaccggaagagctgcttccagcaggcaaagcagcaggccgtcagcagcagcagcagcaaggcggccgacaaagaggatgctgcggcgccggcgcccagctgcacggcgtccgcagccgcctcaaacgccaccgccagcgccggggccggctcattcgtcaaggtgagcatggacggcgccccgtacctgcggaagctcgacctgaggatgtacaaggngtaccgggagctccgggaggccctggaggccatgttcgtcttctttcgcagcgctaacgccaacaacaacctgtccgagttcgccgtcacctaccaggacaaggacggcgac

SEQ ID NO: 97554 - DNA, 539 bp, Zea mays
  unsure (1)..(539): unsure at all n locations
ggatgcanttagtgtgtaatgcacttgaagtatcgtcgtaccggcccggaattcccgggtcgacccacgcgtccgggaggagggctttagcgatggtcctgttcatggctggcgccgcgctgctcgccggggctgccggcgccggcgcgcagcagggcgtgtggagcatcatcacccggcccatgttccagagcatgctgagccaccgcggcgacagcgggtgccagggcgccttctacacctacgacgccttcatcgaggccgccagcaagttccccggcttcggcaccaccggcgacgagcagacgcgcaggcgggagctcgccgccttcttcggccagacgtcccacgaaaccaccggtggatgggcgactgctccggatggaccgtttgcctgnggatactgccgggtgaaggaacagaaacagacggacccaccctactatggacgaggacccatacagctaactcataagtacaactacaggctcgccgggcaagcgctgaaccttgaccctgtgggcgacccggacctggtg

SEQ ID NO: 97555 - DNA, 543 bp, Zea mays
  unsure (1)..(543): unsure at all n locations
cggcctcggttcgctgtcaatgancatagaagcatcatcgcaccgctccggaattcccgggtcgacccacgcgtccgagaggaagagacctaagtcattctccgcagtgcttggtacagatatgatattccttgtagcgctgtgagtactcgtcagtttgaggttcgtgtggtgatgcttgctaggtactagatgggtggtattgcttatgaatgcgatgttgtcgtgacagaactgcatttcattttgtattatggttgttcaagatgttatattaccatgaggtgaggtagcttgactgaaaaaaaaaaaaagaaaaaaaaaaaaaaaaaaaaaaaaacaacaaaaaaaaaaaacaaataataaataaaaaaaaaaaaggggcggccgttttagaggatccaagcttacgtacgcgtgcatgcaacgtcatagctcttttatagcgtcacctaaattcaattcactggccgtcgttttacaacgtcgtgactgggaaaaccttggcgttacccaacttaatcgccttgcagcacatcccct

SEQ ID NO: 97556 - DNA, 541 bp, Zea mays
  unsure (1)..(541): unsure at all n locations
ngatggcgttaggtgtccatgcctataagatatctttgcaccgccccggaattcccgggtcgacccacgcgtccgcccacgcgtccggacgaccaatggatcttctgggtgggcccactgattggcgccgccatggccgcggcctaccaccagtacgtgctgagggccagcgccaccaagctcgggtcctaccggagcaacgcctaagttccgcccggacgcgccaggagctgggcaccgttccgattctgttcctccacatgacgccctgttctgtttccgtgtggccaggactccgcttgcttcctgctgttttctacttcggaccaaagtgtgacatatctttgctttctgtatatgtatgtaggaatgcatcatgtaaggagaatttggaatacaattgtgtgagtttttatccgatcacaaaacanaacaaattctactattcaccaatccccatacatcttacttataaaaaccaaaaaaaagggcggccgctctataggatccaagcttacgtacgcgtgcatgcaacttttac

SEQ ID NO: 97557 - DNA, 535 bp, Zea mays
cgactgaaatggtgctcgctcagctcactcagcactgccgtaccggttcggaattcccggctcgacccacgcgtccgcacataaaaccagtgcaagcagaagcagttcaatggcgagcagcaccatgtcggtctgcgtcacagtcttcggcggcaaggcagtgaacgtgccgtcgtctctcttcggcgaggcccgcgtgacgatgcgcaagacggcggcgaaggcaaagccggcggcgagctccggcagcccgtggtacggccccgaccgcgtgctctacctgggcccgctgtccggcgcgccctcgagctacctgacaggcgagttcccgggcgactacggctgggacaccgcggggctgtcggcggacccggagacgttcgtcaagaaccggtagctggaggtcatacactcccgctgggccatgctggacgcgttgggctgcgtgttcccggagctgctcgcccgcaacggcgtcaagttcggcaaggccgtgtggttcaaggccgtgtcgcagatcttcagcgagggtggg

SEQ ID NO: 97558 - DNA, 538 bp, Zea mays
  unsure (1)..(538): unsure at all n locations
cgtaccgtatggttccagcnatacgacaggatagcatctgctcgtaccggttcggaattcccgggtcgacccacgcgtccgcccgcgcgtacgccattactagtaattggcaacaaaattgacaagcctgaagggttccggaaacaaaccttcacagaaataatgggcctaaagacgatcactgaccgagaagtggcatgcttcatgacatcatgcaagaactcgaccaacattgattctgtcattgactggctggtgaagaactcgaaaaagaagaattgaacttaaatctgtactagctattaaagcgcacgccaatctctctatttttgcatgtcgcatagcattggagctgtaaattatgcaagaggtattaatcagggatgttgtgttcataattttgttaacctggtttagcagtatgttggtggacagcgtctggtattgtgcacgcccgtgctctgaggctgcctcctgtgttccactcaattttagctgtgcgatttgttcaaaataaaattattgntactanaaataa

SEQ ID NO: 97559 - DNA, 576 bp, Zea mays
  unsure (1)..(576): unsure at all n locations
naataattatattagagaggatgtggtatgtatggcgcnnagggcggtgtttgttcaagatctttntgcattgctctaccggtccggaattcccgggtcgacccacgcgtccgcccggagtccctggcgcggctgcgcggcctcgactcggtggacctctccagcaaccagctgacgggcggcatcccggcgtcgttcgccgacctgcccagcctccggtcgctggacctcgggcacaaccagctgacgggcagcatcccggcggggctggtgcaggggcagttccggtcgctggtcctgtcgtacaaccagctgacgggcccgatcccgcgcgacgacgcgcgcgacgagatcaacaccgtggacctctcccacaacaagctgacgggcgacccctcccacctgttcgccgccggccggcccatcggcaaggtggacctgtcgtggaactacctcgacttcgacctgagccagctggtgttcccgccggagatgacgtacctggacctgtcccacaacctcatccggggcaccgtgccgctgtcgctggagcggcttgccacgctgcaaaagctg

SEQ ID NO: 97560 - DNA, 556 bp, Zea mays
  unsure (1)..(556): unsure at all n locations
aatattatttaaatatagtattntagatgttaatgtctctgaggatatgaccacactcccgnctggaattcccggctcgacccacgcgtccggtgccaaggaaatgacgaagctctctggtatctctgaaattatccctgagatggggatgggtgattttgacttcgaaccctgcggctactccatgaatgcaatccatggctctgcgttctccacgatccatgtgacgcctgaggatgggttcagctacgccagttatgaggttatgggcttggatgccactgccctgtcttacggtgaccttgtcaagagggtccttgggtgcttctgcccctctgaattttctgtcgccgtgaccatcttcggcgggcggcgccaagctgggacatggggaaaggaacttggtgcggaggcttatgactgcaacaacatggtcgaacatgagctgcctggaagtgggatcctcatctaccagagcttctgtgctgctgaaaacgccgttgctagctcgcccaaatccggtcttcgctgctttgatggcgagaatgcagcacct

SEQ ID NO: 97561 - DNA, 509 bp, Zea mays
agtagcgtctctgaaaggggggaaggcgggtaggtaattctcggtccggaattcccgggtcgacccacgcgtccgccaagatctgcgacctggctgacaaatgtgtactggcatcttctggctttcaaggtgagattaaggctctgcagaagaacctagctgccagagaattgctgtaccaacaccagcataataaaaggatgagctgccccgccatggcacagctcctctccaataccctgtactacaagcgattcttcccatattacgccttcaatgtgctcggtgggcttgacagcgaggggaaaggatgcgttttcacctatgatgcagtaggttcctatgagagaaccggttacagtgctcaaggaacgggatctactttgatcatgccagtcctggacaatcaactaaaatcaccaagtcctctattactccctgtcagggatgctgtcacaccattgtcggagtcagaggccatcgatctagttaaagacgtgttcgcatct

SEQ ID NO: 97562 - DNA, 510 bp, Zea mays
  unsure (1)..(510): unsure at all n locations
agagcggtngtgagttccctgtcaaagacagtatcacgctgatgactctccggtcgaccgcacgcgtccgccaagatctgcgacctgtctgacaaatgtgtactggcatcttctggctttcaaggtgaggttgaggctctgcagaagagcgtagctgccagagaattgctgtaccaacaccagcataataaaaggatgagctgccccgccatggcacagctcctctccaataccctgtactacaagcgattcttcccatattacgccttcaatgtgctcggtgggcttgacagcgaggggaaaggatgcgttttcacctatgatgcagtaggttcctatgagagaaccggttacagtgctcagggaacgggatctactttgatcatgccaatcctggacaatcaactaaaatcaccaagtcctctattactccctgtcagggatgctgtcacaccattgtcggagtcagaagccatcgatctaattaaggacgtgttcgcatctgcaact

SEQ ID NO: 97563 - DNA, 501 bp, Zea mays
aatgcttgatttatagcgaggggaagtattctgtaccggtctcggaattcccgggtcgacccactcgtccgcccactcgtccggccatgactctcagcctccgtcgcaagcagctcgatgttatcgtgcggatgctgcacctgaaccagcagcagttgccgaacggcggcgagggacagggagaggacgatgcgtacaagatcctggttatggatccgccctgtatctccatcctctcgcctgtgctcaagctcggcgaccttcgccaccaaggtgtcaccctcaccctcgccatcgatcgtccgcggcaggcggtgcccgatgcgccggccgtctacttcgtccggcccaccctcgggaacgtggaccgagtagcggccgacgccgccgcggggctctacgggtctttccacgtcaacttctccaccttcgttccgcgacccctgctggagcgcctcgcaaccggctgcgccggcggtccgtccgcgtgttctgtccgcg

SEQ ID NO: 97564 - DNA, 542 bp, Zea mays
  unsure (1)..(542): unsure at all n locations
cgcgcggatatcctcaggaattacctagnatcgttcgtatctctctagaacttccgggcggacgcacgcgtccgccgacgcgttcggacccacgcgtccgcttacgcgtgggttttgattttagccgccgccggggctcatctcacatgcgtcgagaagacgcctgctcctcgccgatcgatacgatggccgtcttctccgacctccacaccgtcgacggtctcaagtccctcgaggcgtcacctcgacagcaaaacctatgtgtctggtgactccattactaaggatgacatttaggtcttcgccgcggtgccgtctaagcctggcgctgagtttcctaatgccgcccgctggtacgagaccgtttctgcagctgtagcctcaagattccctgggaaggctggtggtggaaaatctgctgcgggaacagctcctgcggtagctgtgtctggcgatgatgcctgagatgatgatgaccttgatctttttggtgaagaaaacgaagaggaccagaaagccacttggtaacggttgccgcggtt

SEQ ID NO: 97565 - DNA, 513 bp, Zea mays
  unsure (1)..(513): unsure at all n locations
taacgttctnatacggaggaaggaggggtaggtaagttatcggtccggaattcccgggtcgacccacgcgtccggcggccatggcgctgacagccgcgtcgtcgaccggatcggcttctacaaacgatactgtgactcgcttggggtcagctacggcgaacactttgtactgcgccaaccagacgccccttcaacgggctaaattaaataagctagctacctaaccatgcatgcatgctttattattagagaacacatttagacctgatcgatatgatgatgggtatgtattactttactacacgcagatccagcaatcaagaatcaagcatattaacgcttactcaaaacaaaccaattataaagggcggccgctctagaggatccaagcttacgtacgcgtgcatgcgacgtcatagctcttctatagtgtcacctaaattcaattcactggccgtcgttttacaacgtcgtgactgggaaaaccctggcgttacccaactgaatcgcctc

SEQ ID NO: 97566 - DNA, 505 bp, Zea mays
  unsure (1)..(505): unsure at all n locations
gtgtnnttcttttgagggggaggtgggagggattgttgtaccggtctcggaattcccgggtcgacccacgcgtccgcggactcgtggggcgggctacatcgtcggcatgtccacgtgctacccgcgcccgggcgccgtcacggtgcgcgacggcgagccgctcaccgtcgtgtccaggtacagcagcgaccggcgccacacgggcgtcatgggcctcttctacatcctcgtggccgaccacgcccggcagctgccgccgcaggagggcctgtgcttcagcttcccggtcccatggtgcctaccgtcatggctgtcgagcaacctgtgagatcttttggtgttgaaagctggtgctatgttctaattagctgcttggttagggttcggttcggggctggtgatggtagggcaaattaagcaaggaaggccgcgtgggtccttgcgttactcatacagtagtagtaatgtaaaaatatagaagcagcggtcagtctactctgctgtg

SEQ ID NO: 97567 - DNA, 527 bp, Zea mays
  unsure (1)..(527): unsure at all n locations
cactggtggccacctgaactattgtagtgatctcccggttcggaattcccgggtggacccacgcgtccgcggacgcgtgggcggacgcgtggggcaggcagcgagtgcaaccgcgagagcgatcagggatgggctccttcttctggaccttagtgacgccccctccggccgccgacgacccgaactgcgccgtggtggccgcgcactccaaggccacctacgacgagcagtgggcggcccacaagagcagcagcaagctgatggtgatcgacttctcggcgtcctggtgcgggccctgccgcttcatcgagccggccttcaaggagctggcctcccgcttcaccgatgccatcttcatcaaggtcgacgtcgacgagctcgcggaggtcgcaaggacatggaaggtagaggcgatgccaacgttcgtgctggtcaaggatgggaaggaggtangccgtgtgattggggctaagaaggacgagcttgagaggaagatcangatgttccgcacgtcatctttctcggac

SEQ ID NO: 97568 - DNA, 536 bp, Zea mays
  unsure (1)..(536): unsure at all n locations
agatgtctgcccagctccncgtangnctnancnatcctcnctcgaatacccggctggacccacgcgtccgctgccgcccctacgctccacaaactcttttcaaaacccactcccactccttcgaggtaggatctttatccccaggcgttcgacacctaagcctaccccgtctacgttcactccaagcctcaaacctacgacgcccaagcctacctcacacgacgtacacttattcccacaagtcttctacacctaagccgacccatcctacgtacactccaaaccctaagccaccggctaccaagcctaccacgctcaaaccgaccccgtcaacgtacaccccttcctcaaacccttcgacactcaagccgacctacacgacgtacactctttatcacaagcctcctactgctaacctgaatccgcttacgtacactcgacttcacaagacttccatacattctactcccaattcgatccccaccgaccttaaactccttaaaccaatagtcttttactgccatattttactttcg

SEQ ID NO: 97569 - DNA, 529 bp, Zea mays
  unsure (1)..(529): unsure at all n locations
caggtgtgnccccgacctccgngncagagctaggactcgtaattcccgggtcgacccacgcgtccgcggacgcgtgcgaggacttcgacgccctctatatcgttcgcatcgacatagctatgacggaagaatacgtacttgttggttggtgcccagtccatgacctactgctgcgctaacttccctgatgacaagggtgccagggccattgtcaaagccttcccacacataaaatgcactgtgctggcccctcccaagatcattgccaccaaaccggccgatggagcgaagataaactatgtcgaaggtgacatgttcagtttcattccacctgctcaaactgtcgtgctaaagcttgtgctgcaccacctgaccgatgaagagtgcgtcaagctcctggctcaatgccggaaggcgattcctccacggaaggacagcgggaaagttataatcggggatattatgattgaccactctgggcttatgctggaaactcacctgctgatggacatcggcatgatgaccatan

SEQ ID NO: 97570 - DNA, 515 bp, Zea mays
  unsure (1)..(515): unsure at all n locations
nggagatgtnttncttagggggggggtgcgaaggtaagttattggtccggaattcccgggtcgacccacgcgtccggctcactggacttcgcaaatttgcagatgatgaaaagcttcatgctgagtgggcagcagccaagttatcttgcaagaagcgcctggccaaacatgtgttggatgtgacaggtgttacgattgatccaactagccttttcgatatacagattaagcgcatacatgagtacaagagacagctcctaaacatattgggagctgtttacagatacaaaaaattaaagggaatgagtgcagaagagaagcagaaggtcacaccgcgcactgtcatgataggagggaaagcgtttgcaacatacactaatgccaaaagaatagtgaaattggtgaatgatgttggtgctgttgtgaacaatgatcccgaagttaacaaatatctgaaggttgtctttatcccaaattacaatgtatcagtggctgaagtgcttattcctggtagc

SEQ ID NO: 97571 - DNA, 503 bp, Zea mays
tagtgctgattatcagcaccatggaaagtttcacaggtctcggaattcccgggtcgaccgacgcgtccggctcactggacttcgcacatttgcagatgtatgaaaagcttcatgctgagtgggcagcaggcaagttatcttgcaagaagcgcctggccaaacatgtgttggatgtgacaggtgttacgattgatccaactagccttttcgatatacagattaagcgcatacatgagtacaagagacagcttctaaacatattgggagcttgttacagatacaaaaaattaaagggaatgagtgcagaagagaagcagaaggtcacaccgagcactgtcatgataggagggaaagcgtttgcaacatacactaatgccaaaagaatagtgaaattggtgaatgatgttggtgctgttgtgaacaatgatcccgaagtttacaaatatctgaaagttgtctttatcccaaattacaatgtatcagtggctgaagtgcttattcct

SEQ ID NO: 97572 - DNA, 510 bp, Zea mays
gggaacgtgtctgtaaggacgggagaggggcggtaagtatcggtccggaattcccgggtcgacccacgcgtccgcccacgcgtccggccaattcgctcgagttcagatcgagcgcgcgccaagcaagtcttccggccggccgcgaagagcgcaatcaagcaagacaagatggtgaagctcgccttcggaagcgtcggcgactccttcagcgccacctccatcaaggcctacgtggccgagttcatcgccaccctcctcttcgtcttcgccggcgtcggttccgccatcgcctacgggcaactgacgaatggcggcgcgctggacccggcgggcctggtggcgatcgcgatcgcgcacgcgctggcgctgttcgtgggcgtgtccgtcgcggcgaacatctcgggcggccacctgaacccggccgtgacgttcgggctggccgtgggcggccacatcaccatcctgacgggcgtcttctactgggtggcccagctgctgtgcgccaccgtg

SEQ ID NO: 97573 - DNA, 501 bp, Zea mays
  unsure (1)..(501): unsure at all n locations
agtnctgtacggggggagaggggtgagagtttcggtccggaattcccgggtcgacccacgcgtccgtccacgcgttcgtccacgcgtccggacgaccagcctctcttccatgggagaactgccattcagctgtatgctgattacatgaagagcttcagggagaacatggcagacttcttggatgctggtgtcgttgtggacattgaggtgggacttggccctgctggcgagatgaggtacccatcgtatccccagagtcagggatgggtgttcccaggcgttggagaattcatatgctatgataagtacctgcaagcagacttcaaagcagcagcagaagaggctgggcatcctgagtgggatttgcctgatgatgctgggacgtacaatgacactcctgagaagacccagttctttgcggataacggaacataccagaccgacaaggggaagttcttcctcacatggtactcaaacagactgatcaagcacggtgataag

SEQ ID NO: 97574 - DNA, 496 bp, Zea mays
gatgattggtcatcgcaaaaggatagtagtccggtctcggaattcccgggtcgacccacgcgtccgaacacgcgtgcgtgcacacttccgtagtctacatcgctccatgatccaaaagctgctcgactggtacacctgatgcgggtgtgaatacaacgcgtcgtataccgagttctctcctaccgattttcaagggccgccttggcgcacagtacaccgctgcgatgtgcgatagctgttccagtcgatggaccctacctgcggctgaaccgactccagggttggcggaccgttaagcataaaagataactcttcccgaggccccagccagcgtatccatgatttctaacatcgtcagctgcattcacgtgccggctctggaaatctcaacgcgactccctttaagacgacgcgcgttatcgctctatgtgcacagtttacctacatcattaagatctgcttaactatgttcaaattccgatcacatcggaacttt

SEQ ID NO: 97575 - DNA, 500 bp, Zea mays
gactgttcttacggcgggagagggaggggtagttgttaccggtccggaattcccgggtcgacccacgcgtccggaagactcgtccatttgactccattctggctgaagtgcgtgccttcttcgatgtgcatgaccaagaaggaagccaccctgggggcgtccaccttgaaatgactgggcagaacgtgaccgagtgcatcggtggatcacggaccgtgaccttcgacgatctgagcgaccgctaccacacccactgcgacccaaggctgaatgcctcccagtccctggagctcgcctttatcatcgcagagaggctgaggaagaggaggatgcgatcggggctcaacagcagcctgccactgccgccactggctttctgagtagccggagccaaacacaaaggagggtaggaatagctgtggtgactcggaagagaaagagacagtcgacgccttggtttgttgatgcttagtgtggtgacctggtggtggtggtggtcg

SEQ ID NO: 97576 - DNA, 525 bp, Zea mays
  unsure (1)..(525): unsure at all n locations
tagtgttnnnccggaatcgccgcangcntatacctcgtcttaacggctggacgccacgcatgcgctctggggatcgatggcactagggcagttgttgccacccaaagaggattttacatgtgggaggagctatatcaaagcgactgacggatcccgaaattatgaaatatattgaaaaatctatgagcatgccangagttacaccagtatcctgagctgatgaagctgcgtgagaacgacatattccagatggtgtatttcccggtgataaatgaagcctgtcgagtccttgattagggtatcgccgtcaatgcttctgacctagacatcagttcaatctttggcatggggttcccaccttataggggaggtgtcatgcactgggcagattccatcggcgcaaaatacatacatggaaatttggactattggtctacgcggtttcgcggcttcttcaagccctgctattactcacttgaaaaactgcaaaagggatcctcttaatcctcaacagagaaagttaat

SEQ ID NO: 97577 - DNA, 502 bp, Zea mays
tgaaggctgaatgggggggggggatggtagtttcggtccggaattcccgggtcgacccacgcgtccgcgcgctggcaagacagactacagggccaggataaggctgattaaccaagacaaaaacaagtacaatacacccaaatacagatttgttgagcgatttaccaacatggacatcacagcacaaatcatctctgctagtatagcaagtgatatggatcttgcttctgcttactcgcatgagttgccacgatatggtcttgaagttggtctgaccaactatgcagctgcctactgcactggccttctgttggctcgccgtgtgctcaagacccgtggtttagataaggaatatgagggcaatgttgatgccactggtgatgatttctctgttgagccagctgatgagaggaggcctttgcgtgctctctaggatgttggccttattaggactacaactgggaaccgtgtcttggtgccctcaagggagctctggatggtg

SEQ ID NO: 97578 - DNA, 504 bp, Zea mays
  unsure (1)..(504): unsure at all n locations
ngatatggctgttcgggggggagggaaggtagtatcggtccggaattcccgggtcgacccacgcgtccggccgggcgttgatgttgaagaggtcgtccctggtcatgccgggcttactgggcactcctgcggggatgatgacgatgtcggagccctccagcgcctccccgagctggtcgtcccccatgaaccccttcaccagggcggtggagttgatgtgggagacgtcggccgcgacgccgggggtgccggcgatatcgtagagggagagggaggaaacgagcgggttgagcttcatgaggagcgagagcggctgcccgatgccacccgccgcgcccaggatggccaccttgcgctccggattggccgaggacgcgtagccgcggctgcggcggatgagctcggccgtggacttcagcagcgacagcctcatggcggcggctgggtcggggatcactcgctcgggcgtgtctcgctgtggattggtggggggagcggcagtag

SEQ ID NO: 97579 - DNA, 501 bp, Zea mays
ggaagtttcttaagcgggggggagtattctgtaccggtccggaattcccgggtcgacccacgcgtccggtcctctcctagtccacacggcagacgccgccgccgggggagaggagaggaggggaggggatcggctccaagggaacaggtgagatggcaatcctgtacgcgctggtggcgcgcggcacggtggtgctggcggagcacagcgcggcagccaccaacgcgggcgctatcgcgcgccaggtcctcgagcgccttcccgacggcggcgccgacagccacgtctcctacacgcaggaccgctacgtcttccacgccaagcgcaccgacggcatcaccgcgctctgcatggccgacgacgcctccagaagacggattcccttcgcatttttggaggatattcatggaaggtttgtcaagacatatggccgggctgcgctaaccgctcttgcatatgcaatgaatgatgaattctcaagggtcttgagccaacaaatgg

SEQ ID NO: 97580 - DNA, 501 bp, Zea mays
agttcgttacggaggaggggggggaagctgtaccggtccggaattcccgggtcgacccacgcgtccgcccacgcgtacgatccaaggccctggccatcgtcgagaaagttgcagatgaacctgctggcgagaagcctgcccctgcgaagcaagggggctccaatgaccgggatctcgctcttgcaagggtggaaacagagaacaggaactctttgatcaaagcttgggaagagaatgagaagacaaaagctgacaacaaggctgctaagaaagtatccgctattctttcatgggaaaacacaaagaaagcaaacatagaagctgaactgaagaagattgaggaacaactggaaaagaagaaggctgaatatgcagagaagatgaagaacaaggttgcaatgatacacaaggaagccgaagagaagcgagcgatggtggaggcaaaacgcggtgaagaagccctgaaggccgaagaaaaagctgccaagtaccgggccaccg

SEQ ID NO: 97581 - DNA, 527 bp, Zea mays
  unsure (1)..(527): unsure at all n locations
ngtaagtgtgacatagacaagtagtatgctgtaccggtctcgaattcccgggtcgacccacgcgtccgctagggtttttgattttagccgccgccgctgctcatctcacatccctcgagaagacgcgtgctcctcgccgatcgatacgatggccgtcttctccgacctccacaccgccgacggcctcaagtccctcgaggctcacctcgccggcaaaacctatgtgtctggtgactccattactaaggatgacattaaggtcttcgccgcggtgccgtcgaagcctggcgctgagtttcctaatgccgcccgctggtacgagaccgtctctgcggctgtagcctcaagattccctggtaaggctgttggtgtaaatctgcctgcgggatcagctcctgcggcagctgctcctgcggatgaagctgangatgatgatgaccttgatctttttggtgatgaaactgangaggacaagaaagcagctgatgagcgtgccggcgcttgcaagggcttttttaaaaagaagg

SEQ ID NO: 97582 - DNA, 531 bp, Zea mays
agtgtctaacagtgggggagtgaaagcttgctccggtccggaattcccgggtcgacccacgcgtccgaggtttcgcaggatcacttcacttaacttatttcatttcgagaaagagaacgattcttgtgcgatctagaaagaacgattcttcttcgaagcatgaaccaacccgcacctgccctcaaagcagatacgaatcacggaaactttgcctcttctgaagcgcagaaccagaaaacccacggcctgttgcttgattagaaaaaggagatccacggcctgtgagtaactacgccatgttacgaatcacagcctgacttgctctagatgaaagcataggtagtgacgacctattgttttcttctcagcggacccaatgagtaactacgccatgttacgaataaaagcgagggaaaatcggatgagcaacttttgcagctatatgaaatgcactttggaaaatcaggtcttgaggacgaaaaacacgatacaatggacttgcctacttttgcaaccgagaaactcataagt

SEQ ID NO: 97583 - DNA, 500 bp, Zea mays
  unsure (1)..(500): unsure at all n locations
atgcnttctacggccgggggatgggaagctgctaccggtccggaattcccgggtcgacccacgcgtccgcccactcgtccgcccacgcgtccgagaaaatgaaggatgacccgaaattcacctatgatgaaactgttcagattgcaatatctgcattgcaatcagttctccaggaagatttcaaggccactgagatcgaagttggtgttgtgagaaaagaagaacgtcttttcagagttctcacaacagaggagattgaccagcacctgacggcaattagtgaacgggactgagctgccatatgttggacatttgatccctacacactgcgccgtgccattgtgcttcagcactgccatttagtttgacatcaaatgaactgagtgtaccatttcatgtctaacactgaaaacaagctcgttgattgaatttggcacagtttggttttgcattgctaaaaaaaanaaaaaagggccggcctctagaggatccaagcttac

SEQ ID NO: 97584 - DNA, 529 bp, Zea mays
agatgctgtgataagccaggacagtagtgcatcctccggttcggaattcccgggtcgacccacgcgtccgtgcttctacgagaggatatagagaggaagaacagctcgtccgagaccatgaagagcagcccgcacctggtgctgatcctgtgcctccaggccgctctggtcatgggcgtcttcgccgctttggctaaagaaaatgccctggttgagagcaaggccatcgacatcaacccggggcagctcaagtgctgcaccaactgcaacttctccttctcggggctctacacctgcgacgacgtcaaaaaggactgcgaccccgtctgcaagaagtgcgtcgtcgccgtgcacgcctcctactcgggcaacaacaagttcaggtgcaccgacaccttcctcggcatgtgcggccccaagtgctagatcagagaggaagaacgcgcgctgctgctagctgctatagcttcgttctttcggcggcggcccgtgcatggttcacgtactgtgtgttgtgctactaccatac

SEQ ID NO: 97585 - DNA, 537 bp, Zea mays
  unsure (1)..(537): unsure at all n locations
cgtggggnnaactgaatgagatgataggatcgctccggttcggaattcccgggtcgacccacgcgtccgggagcacaagcacaaggagcacctcggcgagatgggcgcccttgccgccggcgccttggccgtgtacgagaggcacgaggcgaagaaggacccggagcacgcgcagcggcacaagatcgaggagggcgtggcggcggtggctgccctgggcagcggcggcttcgcgttccacgagcaccacgacaagaaggaggccaaagacgcggcggaggacgccggggaggaggaggagtccggccgccgcggcgaggggaagaagaagcaccacttcttcggctgatcgggctgctgctcgatcgatctacttgcgtacgtaggctgctccccaggaccagaaggagcatgcatggagggcgaacgaagtcacgggggtttgattgcccgtctatgtatatcatgtgtagttactgatgatgtgtgtgcatggtacttcgtacgcgttgttggtgatcgatgtgtggtgtgtgt

SEQ ID NO: 97586 - DNA, 540 bp, Zea mays
  unsure (1)..(540): unsure at all n locations
tggtgccagtnttgaggtgaatccagcnactcatcgttagctcgctanccgaccgcctgtaccgggtcgaccgcacgcgtccgccgacgcgttcggaagggttgtgtcctagccagccgtcaaagatgagctgctgatggtggggatgatgatgggaggccactgctaccctactacgtaccctcctctatgtgtgctggcatccgtccccgttagacgatcgaggcgagaataacgcatagctctctgctaccggcctgtcttctgccgtcccggccgtttaatttactagtgtgttcgtcctatatgtttagcagcagcaggtgtattgtgcgggtatgtaatggtattgcaactatattgggtgtaaaaccataataaatgtgggcatgatatgcaaggtaaaaaacaaaaaaagggcggccgctctagaggatccaagcttacgtacgcgtgcatgcgacgtcatagctcttctatagtgtcacctaaattcaatgcactggccggcagtttacaacgtcgtgactgggaaaaccc

SEQ ID NO: 97587 - DNA, 543 bp, Zea mays
  unsure (1)..(543): unsure at all n locations
tggtgccgganttttnagagagtacctgcnactcatagttcagtccttcatcgtacggacttcccgggtcgacccacgcgtccgcccacgcgtccgcccacgcgtccggcgtgttggcgcttcgagcattgtatgtaaaagtggcgatgtagctgggagggttgaaagtcaactcaaacttgtcatcaggcctatgtattcaaaccctcctatacatggtgcctctatcggtgctaccatactcagggacagccagatgttcaacgaatggactctggaactgaaagccattgctgataagatcattcacatgaggcatcaactatttaatgcccctaaatccaaatgaacccctggagattggagccatatcattgagcacattcggatgtacactgtgactgagctgaataacgaacaagtcgcattcatgaggcaggaatacctcatttacatgacatctgatgatatgaacatcatggtccgttagagcatgatgactgagccccatattgcagatgccatacacactatatgtactcc

SEQ ID NO: 97588 - DNA, 542 bp, Zea mays
  unsure (1)..(542): unsure at all n locations
tggggccnntnntntagatgcccatgatnactnttgtaaagactctcatcgcactgctcgtaccggtccggaattcccgggtcgacgccacgcgtccgctcacaatctggcgaccgtgaactgtcagaggacttgctcgtgtatttcattgagcagggtaagaaagaatgttttgcttcttgcctcttcatttgctacgacctgatccggccagatgtggctcttgagcttgcatggatgaacaacatggtggactttgccttcccgtacctgttgcagttcattcgtgaatacactagcaaggtggatgatttagtgaaggacaagatcgagtcgcagaaggaagaaagagccaaggagaaggaggagaaagaccttgtggctcagcagaacatgtatgcgcagctgcttcctctcgctttgccggcgccgccaatgcctggcatgggtggtcctccacctccgatgggtggaatgggcatgcctcccatgggcgggatgggtatgccgccgatgggccctggtccgatgccagcattcgg

SEQ ID NO: 97589 - DNA, 541 bp, Zea mays
  unsure (1)..(541): unsure at all n locations
agttaagtggctaggntntttatggtccagcctgcncatctataagaagaggtaagcagtcacgaattcccgggtcgacgcacgcgtccgcctgactctgcttggcatcataggaataaaggacccctgtcgcccaggtgtaagggatggggtacgcctgtgcactactgctggtgttaaggtgcgcatggttacaggagataatattgaaacagctaaagctatagctctggagtgtggaatactagatgcaaatagtgttatttcagagccagttgtaatcgagggaaaagtgttccgcgagatgtctgaaagtgcaagaggagaggccgcctacatgataattgtgatggggagatcctcgccaaatgataaacttttgcttgtccaagctttaaaacgaaaaggccatgttgtaactgttactggtgatggcacaaatgatgcccctgcattgcacgagggccgctatatgtctttcaatgggcatttcaaggacagatgttgctaaagaaagctctgacattataatcttggatga

SEQ ID NO: 97590 - DNA, 536 bp, Zea mays
  unsure (1)..(536): unsure at all n locations
agtgccggnnttgaggtgcgctgaagcattgttagctctcgtaggactgccgtaccggtccggaattcccgggtcgacccacgcgtccggtgtgtgtgtgtgtgtgtgtgtgtctgcgtgcagggcgcgagcgcggagggcacgcccaagaggctgacctacgacgagatccagagcaaaacgtacatggaggtgaagggcacgggcacggcgaaccagtgcccgaccatcgacggcggcgtggagtcgttcccgttcaaggccggcaagtaccagatgaagaagctgtgcctggagccgacgtccttcaccgtcaaggcggagggcatcgccaagaacgccccgcccgagttccagaagaccaagctcatgacccgcctcacgtacacgctggacgagatcgagggcccgctcgaggtcggctccgacggcacgctcaagttcgaggagaaggacggcatcgactacgccgtcgtcaccgtgcagctcccggggggcgagcgcgtgccgttcctcttcaccgtcaagcagctcgn

SEQ ID NO: 97591 - DNA, 540 bp, Zea mays
aggtctcgttttgtgagtgcatgaggctcatgtcagcatcatgatgtactgctcgtaccggtccggaattcccgggtcgacccacgcgtccgcccacgcgtccgcccacgcgtccgcggacgcgtgggctggatcgctatctcttttctagggcccagggaaagctagctagctcacagctgagctgagggaagaaagcaaggagagggagccagggaggaaggggaaaaacacgcggagagggtgagcaagaaagaaccgaggcggatcgccttctgttcctcctgccggctccgcgagaggaggcactgctcaggggggaagaaagaggtggaacaacgcccggggcagagcagagatgatgcgggagacgtacatggacgtgctgccgccggtggaccacatagccgcacggagcaactggttcccggcggcggcgcgtctgtggacggcggcggagaacaagcagttcgagcgggcgctcgccgggctcgacctctgccgcccggactgggaggaggtggcgcgggccatgcccgg

SEQ ID NO: 97592 - DNA, 526 bp, Zea mays
  unsure (1)..(526): unsure at all n locations
gtgtccnntataggtcgcctgcactctatgaataggtcgcattgacgtaccggtccggaattcccgggtcgacgcacgcgttcgcccacgcgtccgctctggaggcattacttccagaacacacagggtcttaggtttgttgtggatagcaatgaccgtgaccgtgttgttgaagccagagatgagctgcacaggatgctgaacgaggatgagctacgtgatgctgtgctgcttgttttcgccaacaagcaagatcttcctaatgccatgaatgctgctgagatcactgacaagtttggattacactccctgcggcagcgacactggtacatccagagcacttgtgccacaactggcgagggtctgtacgaaggcctggactggctgtccagcaacattgcgagcaaggcttgaatatcaaatgcgaactgactaggagctccggatgtatcaatggaaacttaagacagaatcgcctctacaacctgttaggtgtcttctaccggcacaatatattntttgtttg

SEQ ID NO: 97593 - DNA, 534 bp, Zea mays
  unsure (1)..(534): unsure at all n locations
ggtctcgtttntggtggagcaggactcatcgtcagctcctcatgtacggacntcccgggtcgaccgcacgcgtccggccacacgtgcgcccacgcgtccgcggatatacaaattgcgcgagtactagggaaggcaggaacaatagcaggggctggctacttgagattagcaggaagacctgccgtgcttactttaaatactctatcttattcagagaacttcttgtacatgctggactctatgggtgacagaacatataaaccaaatcctcgacttgctcgagctctagatattctttctattctgcatgctgaacatgaaatgaactgctgcactgctgctgttaggcaccttgcttcaagcggtgtggatgtatttactgatctttctggtggtgttggagctctatatgagcctctgcatggcggcgcatacgaggcagtacttaaaatgttaaatgacattggaagcatggaaaatattccagatttcattgtaggagtgaagaacacgaagaggaagatgtccggtttn

SEQ ID NO: 97594 - DNA, 542 bp, Zea mays
  unsure (1)..(542): unsure at all n locations
tgtgcccntnttcttagaggccctcggctcatttccagctcactacgtactgccgtaccggtccggaattcccgggtcgacgcacgcgtccgctccgacgtacaccccgacccccaagccttcgacacctaagccgaccccgccgacgtacgctccaagccccaaaccttcgacgcccaagccgaccccaccgacgtacactccttgcgccaagcctccgacacctaagccgaccccgcctacgtacactccaagccctaagccaccggctaccaagcctcccacgcccaagccgaccccgtcaacgtacaccccttcgccaaagcctccgacacccaagccgaccccgtcgacgtacaccccttctcccaagcctccgacgcccaagccgaccccgccgacgtacactccaagccccaagcctcccacacacccgacgcccaagccgaccccaccgacgtacacccctttctcaaagcctgcgacgcccaagccgaccccatcgacgtacaccccttacccaaagcctgcgacacccaagg

SEQ ID NO: 97595 - DNA, 530 bp, Zea mays
  unsure (1)..(530): unsure at all n locations
cgtgtgtccacntacaatcgnccaaaagactaagnactgttcgtaccggttcggaattcccgggtcgacccacgcgtccggtgagtgcttaaactgcttgcaggtttggctagtagacagcatcgacggggaggaacaggagatggcaccgaaaggagccgtattcgtctcaatctcacagttccccatcaagaaaatccgcaaggattgcacctacctgagcactccagcaatgaagatccctgaaaccatgcaaaatatccatgcctgcgagaactggctgccaagacggctgatgagcgcctggcgcatcggcgggatacttcacgccctggaagggtggaccgtgcacgagtgtggggacgccatggtgcatgctgagaaagcatggtcagctgctattaagcacggattcgttcctttgacgaaagcctgaaagcctgtacgcaactctagacgccattcgacgatggctggaaaactacgtttcagcaatcggtagcacaaatttttcccaacttccgaaaccc

SEQ ID NO: 97596 - DNA, 519 bp, Zea mays
  unsure (1)..(519): unsure at all n locations
tggtccggcagcntacagctcagctncgcttcgtattgncgctccggttcgggattgccggctggacgcacgcgtccgcccacgcgtccgctgcaccacacgcaggttcgcacgaactactcgctgagcatgccgctgtacgactacgtatacagcaccatggacaagtcgtgcgaccagctgttcgagacctcgctcaggggagcggaggagacgcctggcctcgtccacctcacgcacatgacggacctgcagtcggtctaccacctgcggatcggcttcgactgcgaggcgtccagaccgtctgccaccagcgccatgtggtggtacatgtgggtgctgaggaccgtggcgtggctgtccatggcgctcgcgtgggcctacgggtccttcgcgttcgtcgtcgagaggatcaaactctggaagctgatgatgcaaacgtgggcactaccaagatacaacttccagtacggtctgagctgggagagagaatcgatcaacggcctcatcgaaagggcc

SEQ ID NO: 97597 - DNA, 535 bp, Zea mays
  unsure (1)..(535): unsure at all n locations
gtttggtggctgttnattgggtgaggcctggactccnctgcnattgctgcagtctcgaattcccgggtcgaccgacgcgtccggagagagaggatgggtggcagcggcagggctgctctgctgctggccctggtggtggtgggcgtgagccgggccgtggagatccaggccgacgccgggtacggttacggcggcgggtacaccccgacgccgacgccggccaccccgaccccgaagcccgagaagccccccaccaaggggccgaagccggacaagccgcccaaggagcacaagccgtccaaggagcacgggcccaagccggagaagccgcccaaggagcacaagccgacgccgcccacgtacaccccgagccccaaacctacgccgacgacgtacactcccactccgacgccccccaagccgacgccatccacatacactgccgaccctacgccccacaaaactcacaccaaaacccactgccactcctgcgacgtacacttcaagccccaaacctccgacgcccaggtcgact

SEQ ID NO: 97598 - DNA, 535 bp, Zea mays
  unsure (1)..(535): unsure at all n locations
tgtgccggnttaaggggtggcctgcactcatcgtacgaacgtcatggtacggacttcccgggtcgacccacgcgtccgcggacgcgtgggcggacgcgtggggtcgctgggggcgaggatcctgcgggcgggcggcgtggggaaggtgttccggcgctggttctcctcccccgtcggcgggggcggcgagcggctgctcagggcgtcgcagtgctacctgtcgaccacggccggcccgatcgccggcatgctgttcgtgtccaccgagagggtcgcgttccggagcgaccgctcgctggcgctgccgctgacgtctccggccgccggcggcaccacgacggtgctgcgggtgccgtacaaggtgtccatcccgctgcgcagggtcgcggcggccaggccgggcgagaacagggaccgtccggaccacaagtacgtgcaggtcgtcacgcgcgacggcttcgacttctggttcatgggcttcgtcaggtaccaggcgtccctgcaggagctggagaaggccgtcncgcagtcgcaa

SEQ ID NO: 97599 - DNA, 527 bp, Zea mays
  unsure (1)..(527): unsure at all n locations
tggccntntttgtggactagtcttatgcagtctctcatcggacggaattcccgggtcgacccacgcgtccgctctcctctcctcggcggatccggcaccgacccaccgcccctctgctcgctccttccgccggaatcgctgctcctctctgtgctgtcgatttgtgcggcgactgttagtttggttcggtcccatccttctgttgatcaatggctgacggtgaggatatccagccacttgtgtgtgacaatggcactggaatggtcaaggctggctttgctggtgatgatgcgcccagagcagtgttccctagtatagtcggccgccctcggcacacgggtgtgatggttggaatgggccagaaggacgcctatgtaggtgacgaggcacagtcaaaaagaggtatcttgaccttgaagtaccccattgagcacggtatcgtgaacaactgggatgatatggagaaaatctggcaccacaccttctacaatgaactgcgtgttgctcctgaagagcacccagttctg

SEQ ID NO: 97600 - DNA, 541 bp, Zea mays
  unsure (1)..(541): unsure at all n locations
ggtgccgttnttnngagagtgcctgcgactcatttctagctcatcatcgcactgccgtaccggtccggaattcccgggtcgacccacgcgtccgcgttagacgatcgaggagagaataacgcagagctctctgctcccggcctgtcttctgccgtcccggccgtttaatttactagtgtgttcgtcctatatgtttagcagcagcaggtgtattgtgcgggtatgtaatggtattgcaactatattgggtgtaaaaccataataaatgtgggcaaatatgcaaggaaaaaaaaaaaaaaagggcggccgctctagaggatccaagcttacgtacgcgtgcatgcgacgtcatagctcttctatagtgtcacctaaattcaattcactggccgtcgttttacaacgtcgtgactgggaaaaccctggcgttacccaacttaatcgccttgcagcacatccccctttcgccagctggcgtaatagcgaagaggcccgcaccgatcgcccttcccaacagttgcgcagcctgaatggcgaatgg

SEQ ID NO: 97601 - DNA, 527 bp, Zea mays
  unsure (1)..(527): unsure at all n locations
gttagtgcgcggtaatgggtaagttgggacggctacngccccatgagnntcgaattcccgtttcgacggactcatgcggggacgcatggggttcatgaaaggtgtggaacaggggccgtagattgacgacgagcaatggaacaagaggttgcgctacattaggtatggtgttgacggtggagctacccttgtgacgggtggtgataggttgggtgacaagggtttctacatccagccaacgattttctcagatgtccaggacggcatgaagattgctcaggaggagatatttgggcctgtgcagtcgatcctcaagttcaaagacctcaatgaggttatcaagagggcaaacgcgagccagtatggattggccgccggcgtgttcaccaacagcctggacacggccaacaccctgacgcgcgcgctcagggccgggaccgtctgggtgaactgcgttcgacgtcttcgatgcttcgattccgtttggtgggtacaagatgagcggcatcgggagggagaagggcgtn

SEQ ID NO: 97602 - DNA, 540 bp, Zea mays
  unsure (1)..(540): unsure at all n locations
tgtgccggtnntnggcgtgagtaaagatctctatgtaagagtctcatcgtacggacttcccgggtcgacccacgcgtccgcggacgcgtgggaaagagcggtctggtttcgagggggcctggactacaaaccctttggtctttgacaactcttacttcaaggaacttctgagtggtgataaggagggccttcttcagctcccaagtgacaaagccctgctgagtgaccctgttttccgccctcttgtcgagaaatatgctgcggatgagaaggctttctttgatgactacaaagaggcccacctcaagctctccgaactggggtttgctgatgcttaaatagaccctatcctggagtgatacattctgctgcatgtggtcttttgcatctggagtcaatgtgaacaagcagattgtcgtattgtctttctcgtaataaatttgtcaatgttgagcccttaggcttgaattgtgggaccctttgntcgttttcctagactctgatgctgtatgcaactgaaacgagtaaatctatgatctt

SEQ ID NO: 97603 - DNA, 545 bp, Zea mays
  unsure (1)..(545): unsure at all n locations
tgtgggcnnnnttttagtgtgcttaggactcatttaaagcacatgattgtactgctcgtaccggtccggaattcccgggtcgacccacgcgtccgggcgtggccgaggtgttctgcctcgtcgcgctcctggagttcctgtaccaggaggcgcccgacgcgatgcgcagcgtcgggtccgcgtacgccgccgtcgccggcgggctcggctgctttgtggcgtcggcgatcaacaccgcggtggacgccgcgacgcgggacgatgaggaggggcggccgtcgtggctggcgcagaacatcaacgtgggcaggttcgactacctgtactggctgctcgccgtgctcagcacagtcaacctgctcgttttcgtcttctttgccaagcggtacaagtacagggtcagggtcgacgtgccgaccacagttgctgttgataagcagtagctagccgctagcgccattacaaggatttgagtttggatgtgctgtaactattgattactgggaataccatanaacatagatcttgtacanaaaaaaaaacaa

SEQ ID NO: 97604 - DNA, 529 bp, Zea mays
  unsure (1)..(529): unsure at all n locations
gtgcaatgaggccnatgtttagttcaggttagnattgctcgtaccggtccggaattcccgggtcgacccacgcgtccgcaaatgctactcattatagggatttcgacaaaacgaatttattcatcactaaagccgaagtcagtaggagtactattagcgtgctgattcagacctcgagctcgaggacgtagttattctataaaaaaaacgatgtgtaatataacaattgtactaaatatagtaaagaaatcaaaataatctttagatcaatctaagatttcgattcccagtaaaaaaaaaagaaatataatagaaaaatatgggacaaaaaataaatccactcggtttcagacttggtacaacccaaaatcaccattccttttggttcgcacaaccaaaaaattattctgaaggtctacaggaagataaaaaaatacggaattgtatcaagaactatatacaaaaaaaaaaaaaaagggcggacgctctagaggatccaagcttacgtacgcgtgcatgcgacgtcata

SEQ ID NO: 97605 - DNA, 526 bp, Zea mays
  unsure (1)..(526): unsure at all n locations
ggagtgccggttatgggtaagccttttatgcttatngntcatgcagtctcgaattcccgttcgacgcacgcatgcggcacgcatccgcccacgcgtccgcccactcttccgggatatcatcaaaacctgcatgaagcaccattagtagaaattgtagcccatgttgcaaaagcttaatgttaccatgaaggctgatgacaaggagttgattggcaaagctttgatgaagcgtgttatgcaaacgtggctaccagccagcactgcacttcttgagatgatgatattccaccttccttccccggcaaaggctcaaaagtatcgtgtggagaacttgtatgagggaccccttgatgatgtttatgcaactgctatcagaaactgtgatccgtatggccctcttatgctgtaatgttcaaaaatgattccaacatctgacaagggcatgttcttttgtcctttggtcgtgtcttctcatggaaggttgctactggtattaaaagtccgatcatgagtcccaactatgttc

SEQ ID NO: 97606 - DNA, 544 bp, Zea mays
  unsure (1)..(544): unsure at all n locations
gatggcntnnntgatgttggcctcnactcattgtttactccttcatggtacggacttcccgggtcgacccacgcgtccgcccacgcgtccgcccacgcgtccgcccacgcgtccggcagaaccttgaagttaaaaagataaatgatgagagaaaggctgcattggctgcccagtttgcagcagaagcaactttgcggagagtacatgcagcccagaaagatgatgacatgccaccaattgaagccattcttgcaccacttgaagctgagctaaagctttctcgccaggagattgcaaatctccaggatgacaacagagctttggatcgtctaacaaaacaaaaggaggcagctctgctagaagcagagaggactgtgcaaattgctatggcaaaagctgctatggttgacgatttgcaaaacaagaaccaagagttgatcaagcaaattgagatctgccatgaagaaaataaaatcttagataagctgcatcgccaaaagattgcagaagttgaaaagcttagccaaactgtgagggaagtgga

SEQ ID NO: 97607 - DNA, 542 bp, Zea mays
  unsure (1)..(542): unsure at all n locations
atgtgccggntntgggcgtggcctgcactcatcgtcgtaacgtcatggtacggacttcccgggtcgacccacgcgtccggccaccggctaccaagcctcccacgcccaagccgaccccgccaacgtacaccccttcgccgaagcctccgagacccaagccgaccccgccgacgtacaccccttctcccaagcctccgacgcccaagccgaccccgccgacgtacactccaagccccaagcctcccacacacccgacgcccaagccgaccccaccgacgtacaccccttccccaaagcctccgacgcccaagccgaccccaccgacgtacaccccttccccaaagcctccgacacccaagccgaccccaccgacgtacactcccacaccgaagccgccggccaccaagccgtccacctacacttcgacgccgncggtgtcttacaaccccagcccggcggcaccatactactagaaagcgatgcctaccataccacacttgtgtcagtctctggagcatttangtggtcttgatcaatggaag

SEQ ID NO: 97608 - DNA, 530 bp, Zea mays
tgtgccggtattgagttgggcctttcatacgtcagctcagttgcactatcgtccggctggagaaccgccggcgcaccgtccgcacaccttccccaatcttccgcagaatcttgaaataaaaagtgaatgattagaggaaggcttcattggctgcccaggttgcagcataagcaactttgcggagagtacatgcagcccagaaagatgatgacatgccaccaattgaagccattcttgcaccacttgaagctgagctaaagctttctcgccaggagattgcaaatctccaggatgacaacagagctttggatcgtctaacaaaacaaaatgaggcagctctgctagaagcagataggactgtgcaaattgctatggcaaaagctgctatggttgacgatttgcaaaacaagaaccaagagttgatcaagcaaattgagatctgccctgaagaatataaaatcttagattagctgcatcgtcaaaagattgcataaattgaaaaagcttaccaaactgtgaagggagttgga

SEQ ID NO: 97609 - DNA, 526 bp, Zea mays
  unsure (1)..(526): unsure at all n locations
gagacactgatgccnttgccctgcncacctacgtactgccgtaccggtccggaattcccgggtcgacccacgcgtccgcccacgcgtccggttggcttctcctccccctccggttcgggttcgggttcgtgaggttcgccggggttcggtttcgtgggtgagcggatcgagatggcggcgtcggatgttgagtaccgctgcttcgtcggcggcctcgcctgggccacggacgaccactccctccacaacgccttcagcacctacggcgaggtcctcgagtccaagatcatcctcgatcgggagacgcagaggtcccgcggcttcggcttcgtcaccttctccacggaggaggcgatgcggaacgccatcgagggcatgaacggcaaggagctggacggccgcaacatcaccgtcaacgaggcccagtcccgcggcggccgtggaggcggcggcggcggcgggtacggtggtggccgtggaggcggcggctacggcggtggcgggcgccgtgatggcggcggcggct

SEQ ID NO: 97610 - DNA, 535 bp, Zea mays
  unsure (1)..(535): unsure at all n locations
gagttatccctgaaacccctngcttagttcacctacgtactgccgtaccggtccggaattcccgggtcgacccacgcgtccggagatccggagcagccgcagtcccaccgactacgccgccggtcgccctacatctcctcggcggtgcctctcgtttctcttttcaataatcaagatgagccgcggtggtagtgccagcggtggtcaaagttctctgggctatctctttggaagcggcgagccccccaaaccagcactggcaccagctgcaagtgctccacctgttgagaaaccatctgctgcacagactgatgcggccaagcacgttgctgctgcggttaccagccaaaccaataactaccacagggctgatggtcagaacactgtcaacttacttactgaccgctcttcaaccaatgtccacgctgctcctggcggtggctcttccctgngctacctgttcggtggcaactgatgcccgtgctgatgcgctcaccaaagttatcctcccctgcctgctgcgtgctatgaatan

SEQ ID NO: 97611 - DNA, 527 bp, Zea mays
  unsure (1)..(527): unsure at all n locations
gtagtctcgctgaaccccaactgatnaccatggactgcccgtccggtccggaattcccgggtcgacgccacgcgtccgcggacgcgtgggcggacgcgtgggttgccgtctcccttttgcgtgagcaaagaaagagggcgagaagagcagtcgccatgtctggcatcatccacaagatcgaggagaagctccacatggggggcgaccacaagaaggaggatgagcaccacaagaaggccgaggagcaccacaagaaggaggagggggagcaccacaagaaggacggcggggagcataaggaaggcatcgtggagaagatcaaggacaagatcaccggcgagcacggcgacaagtccggcgaccacaaggaaaagaaggacaagaaaaagacgaaggagaagaagaagcacggcgagggccacgaccacgaccacgacggcggccacaggaattaacaacagcgacagcgactgagatcttgtgtcgcaacacaagtgccacacaagtatgcttgcttgattgaggan

SEQ ID NO: 97612 - DNA, 517 bp, Zea mays
  unsure (1)..(517): unsure at all n locations
tgggttccgatgagaccggaatgataccgctcgaatcccgaattcccgggtcgaccgacgcgtccggacccacgcgtccgcccacgcgtccgcgcacgcgtccgagataatcgaaatcgaaaagagctgtctctggggtatactttccccgttctattgctaccgcgggtcttatgcaatcgatcggatcatatagatatcccttcaacacaacataggtcatcgaaaggatctcggacgactgaccaaagcacgaaagccagttagaaaatggattcctatttgaagagtgcctaaccgcatggataagctcacattaacccgtcaattttggatccaattcaggatttttcttgggaagtttccgcaagaaattggaataatatcgattcatacagaggagaaagctctgtatcgatgcaaacgctgtacctagaggataanagatagaagaaaatggaaaaatcggaatggacataattaagaataatagccacaaaattagtcgaagatagan

SEQ ID NO: 97613 - DNA, 531 bp, Zea mays
  unsure (1)..(531): unsure at all n locations
tgggttattcactttgaacccccaatgagtatcgatcggactgtcngtaccggtccggaattcccgggtcgacgcacgcgtccgattcaatgataaggaactgtatgttggaagagcacagaagaagtctgaaagagagatggagttgaaggagaaatttgaaaagaatgttcaagaggtagctgagaagttccaaaacacaaacttgtatttgaagaacttagaggagaacattgatgatgagaaattgcgtgaactctttgctgagtatggcaatattacttcctgcaaggttatgcgggattcgaatggtgtcagcagaggttctggatttgttgctttcaaatctgctgaagatgctaaccgagctcttacggagaagaatggcaaaatggttggaaagcagcccctttatgtagctcttgcgcaacgtaaagaagacagaaagggcaaagcttcaggcacaattttcacaaatgcgttctgttgcaattgcgcctttagtaggtcctcgcatgcccatgttttcac

SEQ ID NO: 97614 - DNA, 553 bp, Zea mays
gtttgcaggtttctgtctacgatatcccgtaatcattatctcggtccggaattccgggtcgacccacgcgtccgcccacgcgtccgcttgctggccgtgatctgactgactgcctaatgaagatcctcacggaaaggggggattcctggaccacgacggcagaacgggaaatcgtgagagacataaaggagaagctggcctttgtggccctagactacgagcaggagctggagaccgctaagagcagctccttcgtcgagaagagctaccagcttgcctattggcatgtcatcacgatcggcgcggagaggttcaaaagcccataagtgctttttgaacccgtctctgatcgtgatggaagcttccggcattcacgagaccccctacaactttattattaaagttaccctgatatcatgaagggcctttactggtacattgttcctagaggagggaccaccatattttctggcatcgtttacatgattagcaaggggattactggctttttcccaggatccttttaatctaaggcgttggcctctctgtaaag

SEQ ID NO: 97615 - DNA, 558 bp, Zea mays
  unsure (1)..(558): unsure at all n locations
gcaaccgatcgtggatacagcattctgatgnaccatcgacagacntacantccttaacgacccacgccatccacgcacgcgtccgaccacacgtccacagaagctcaaatactgatctcaccagaccatcacaacatgccaaacgcaagcgcaccgagggtctcggcggaccagctttttactttctggctatcactcctctgcgctgtcgccggcccggccgccgcgcagaactgcagctgccagccaaacgtatgctgcagcaagtttggctactgcggcacgaccgaccagtactgcagcgacgggtgccaatcgggcccgtgccgctcgggcagccgcagcagcagtggcggcagtagtgcgaacgtggctaacgtcgtcaacccgctcttcttcaacggcatcaaaaacccaaccgggaaccaggtgcaatggcaagaacttctacacccggaacacgttccttaaacgccgtcaaagcgaacccaagcttttcccaaggcgggtcccaagatcaaggccagccctaaaaccgccgccttttatccgcacacc

SEQ ID NO: 97616 - DNA, 560 bp, Zea mays
  unsure (1)..(560): unsure at all n locations
agtgcgtgtngcgtgaggccaaaanagcccgacctntctaggcatgcacctaccggacctgacctgccgggtcgacccacgcgtgcgcccacgcgtccgaagcaagccatgtggaggagggctttagcgatggtcctgttcatgtctggcgccgcgctgctcgccggggctgccggcgccggcgcgcagcagggcgtgtggagcatcatcacccggcccatgttccagagcatgctgagccaccgcggcgacagcgggtgccagggcgccttctacacctacgacgccttcatcgaggccgccagcaagttccccggcttcggcaccaccggcgacgagcagacgcgcaggcgggagctcgccgccttcttcggccagacgtcccacgaaaccaccggtggatgggcgactgctccggatggaccgtttgcctggggatactgccgggtgaaggaacagaaacagacggacccaccctactatggacgaggacccatacagctaactcataagtacaactacaggctcgccgggcaagcgctgaacctgaacctgtgggc

SEQ ID NO: 97617 - DNA, 561 bp, Zea mays
  unsure (1)..(561): unsure at all n locations
tgagcggagtcctgaatgctgcnattcagtttacgntcggtatgctctaccggtccggaattcccgggtcgacccacgcgtccgcggactcgtgggcggactcgtgggtttgattattggttttgtcacagaatactacaggagcaatgcatacagtcccgtgcaagatgttgcggattcgtgcagaactggtgctgccactaatgtcatttttggtcttgctcttggatacaagtcggttatcatcccgattttcgctattgctgttagcatctatgtcagtttctccattgctgcgatgtacggcattgcagttgccgctcttgctattgatgcttatggtgccatcagtgacgatgctgatgctattgctgagatggctgacatgagccacagaatcgctgagagaactgatgctatcgacgctactggcaacagaactgctgctattgaaactgattttgccatagcttcagctgctctaagagccctggcgctttgtggagcctctgtcagcagagctggactgaatgtcgcctacgtcatcttacctaaagtgtt

SEQ ID NO: 97618 - DNA, 567 bp, Zea mays
  unsure (1)..(567): unsure at all n locations
tgatagcgtgttgcgtggatgtcagctncctcgacgtactcgtcaccggtccggaattcccgggtcgacccacgcgtccgcccacgcgtccgtccacgcgtccgcagaagctcaaatactgatctcactgatccagtatggctatggcaaangcaagcgcgccgagggtctcggcggcccagctggtgactctcgggctatcactcctctgcgctgtcgccggcccggccgncgcgcagaactgcggctgccagccaaacgtatgctgcagcaaagttggctactgcngcacgaccgacgagtactgcngcgacgggtgcccagtcggccccgtgccgttcgggccgcgccggaacaaatggcgccgttgttccaaccttggttacggtctgaacgggttcttttttaaacggattcagagaccagccccgggaccggttccaagggcagagactttatacacggagagcgtgtctgtagagcgccgaaaaggtacccagatttttcccatatgggggctcacatgcacaggaaaagcgagatcatcggcttctctttgcacaccac

SEQ ID NO: 97619 - DNA, 561 bp, Zea mays
  unsure (1)..(561): unsure at all n locations
agagcgggtnnntgaangccaaatnggctgaagtctgacagcacgctcctaccggtccggaattcccgggtcgacccactcgtccgcccacgcgtccgggaagatcccaatgctatcttcagctcgaactacatgcttctggggaagatagtggtcaaccaagctgatgatgttgcatgaatcatctcatcgaaggctggcctcaagtatctgggtcctgatgttgatgctatgaaagctgtggccgatgcctactccaaaaggtctctgaagtacttcgaaactgctctccgtgattacaaagctcagctggaagaagatcctattgtccacaggcacctttcctcgctgtatgacactctcttggagcagaacctctgcaggctgattgagccctactcaagggtggagattgctcacatagcagagatgattgatctgccaatgaaccatgttgagaagaagctgtcccagatgatcctcgacaagaaattcgcatggacacttgatcaaggcgctggctgtctcatcatcttccaagacagcatgactgangagatc

SEQ ID NO: 97620 - DNA, 555 bp, Zea mays
  unsure (1)..(555): unsure at all n locations
agagccgtatgctgaagctacnangctacntncgacagcatgatctaccggtcctgaattcccgggtcgacccactcgtccggttacttctggtgtcgagaaaggttaccttcgcgagcttgctttggctcgaatggaggatctgggcttaaaatgccgggacgtcagaacccgtgaggcagggattcaggatatccatcacaagatccggccagatgaagtagagcttgtcagacgtgactatgctgcaaatgagggttgggaaacattcctctcttatgaggatacacgacaggatatcctgatcgggctgttgcgcttgcgtaaatgtggccgtaatgttacatgccctgaacttgtaaggaggtgttcaattgtgcgtgagcttcatgtctatggaactgcagtccctgtgcatggccgtgatgtggacaaactgcatcaccagggatacggaactctattaatggaagaagcaaaaaggattgctcgaaaggagcaccgatcgaaaaattatctgtcattttcgggttggtactcgtcactactaccgcg

SEQ ID NO: 97621 - DNA, 563 bp, Zea mays
  unsure (1)..(563): unsure at all n locations
cgatgtacggtgtgagtagaatgncttttanactangctacnatcgaccggtccggaattcccgggtcgacccacgcgtccggaccccgccgacgtacactccaagccccaagccttccacacacccgacgcccaagccgaccccacgtacgtacaccccttccccaaagcctccgacgcccaagccgaccccaccgacgtacaccccttccccaaagcctccgacacccaagccgaccccaccgacgtacactcccacaccgaagccgccggccaccaagccgcccacctacactccgacgccgccggtgtctcacaccctcagcccgccgccaccatactactagaaagcgatgcctaccataccacactgctgtcagtctctggagcatttaggtggtctggatcaatggaagggttgtgtcctagccagccggcaaagatgagctgctgatggtaatgatgatgataagaggccactgctaccctactacgtaccctnctctttgtgtgctggcatccgtccccgttagacgatcgangagagaataacgcagagcttt

SEQ ID NO: 97622 - DNA, 563 bp, Zea mays
  unsure (1)..(563): unsure at all n locations
gagacgctggctgaagctacntngctaactgtcggtcgaactgctcgtccggtcctgaattcccgggtcgacccactcgtccgcccactcgtccgcctccactctctaaaaagtagaccagccaggggagagaagtgagggatcgaaggaagcccccaccatggcggccaacggcaagagcagcttgtcgaacggcgcctccaccgggggaaagcccatcaaatgcaaagcggcggtggcgtgggggcccggcgagccgcttgtgatggaggaggtggaggtggcgccgtcggtgcgcctggaggtgctcgtgaagctgctcttcacctacatctgccacaccgatctcagtttcttgaagggagagaacgagctgcaccgcaagttcccacgcatactgagccatgaggcatccagagtggtggagagcgtgggtgacggagtggaggatcttgccgcctgcgaccatgtgatccccatcttcaacggcgagtgctgggcgtgcgcttactgcgagtccgatccgacaaacctgttcaggacctaccgtgtggactctttcn

SEQ ID NO: 97623 - DNA, 552 bp, Zea mays
  unsure (1)..(552): unsure at all n locations
gatggagtgtggttatgntaggtccatcacgcatcnatgaacggtccttaattcccgggtcgacccacgcgtccgctggtgtacaccttggccaccgacggctcgccgttccgccttgagctgtttacgccgtggatggtggcaacactggctgatttttatgttaatgttattgcaatctcggcttgggttatctacaaggaagcaaactgggttagttctgctgtgtgggtggttctgttgttttgctttggcagtgctgtcacttgcgcttatattgttaagaaacttcttgaagtaacatctgcagggtcatcccaagatcctcttgaccttctatttatcaggcaaggtaatctatcccaaagaaagtgctcttatgttgtaattggaagggttattttcagcattttggggatattcatggctgcggttgtcacatatactgtcatcactgatggactaccttttaggaaggaattgttgacaccgtggatggcggcaaccttaattgatttctacataaatgtctttgtgatatcggtctgggtn

SEQ ID NO: 97624 - DNA, 551 bp, Zea mays
gtgaggtgcgattgctgaagtccgttgcagctacgcatgcacttaccggtccggaattcccgggtcgacccacgcgtccgcccacgcgtccgcccacgcgtccggtgacaaggaccgaacacccaaaaaggcacaagtaatgggcgcatttggagcggagggttttggaagtcaaccgaaagaggataaaagtagtaaagcctggatctaagacatcattcccgagtactgaagtacgaggaacctacgctccaccgttccatgtcgagctgtatcgcaatgaccagcaccgcttcaagattgttgtcgacggtgatactgaagttgacttaatggtgcaaacacggcacatgcgagaccgcatcatcctcacgatcagaggcctcgcccagaagttcaacagcacctccctcaacacacttctcaagatcgagtcatgatagacctgacagtgtaaaaaccaactataacgggaagctgtaccccttgttccgattggtagagtgcgtgttttagtagaatcctgacattgcaacctttgggggtatggt

SEQ ID NO: 97625 - DNA, 562 bp, Zea mays
  unsure (1)..(562): unsure at all n locations
agttgtatgagccntaatcgctgatngtccagctcactacgtactgacaaccggtccggaattcccgggtcgacccacgcgtccgcccacgcgtccgcggacgcgtgggtgcttctacgagaggatatagagaggaagaacagctcgtgggagaccatgaagagcagcccacacctggtgctgatcctgtgcctccaggccgctctggtcatgggcgtcttcgccgctttggctaaagaaaatgccctggttgagagcaaggccatcgacatcaacccggggcagctcaagtgctgcaccaactgcaacttctccttctcggggctctacacctgcgacgacgtcaaaaaggactgcgaccccgtctgcaagaagtgcgtcgtcgccgtgcacgccttctactcgggcaacaacaagttcaggtgcaccgacaccttcctcggcatgtgcggccccaagtgctagatcagagaagaagaacgcgcgctgctgctagctgctatagcttcgttcttacgccgacggccggtgcatggttcacgtactgtggtgtgagctactn

SEQ ID NO: 97626 - DNA, 560 bp, Zea mays
  unsure (1)..(560): unsure at all n locations
ggaggagatgcgtgggtcagctcttacgctactcatcgcatgcaccttccggtcctgaattcccgggtcgacccacgcgtccgcggacgcgtgggatggcatgtacttagggcgctagctctcctccgctagacacgtagggctctggtacaccccccattgtacacctggatcctctccttacgcctataaaaggaaggatcagggccctcttagagagggttggccgcgcggggacggggacgagacaggcgctcgcttgaagccgctcgctccctctcccgcgtggacgcttgtaaccccctactgcaagcgcacccgacctgggcgcgggacgaacacgaaggccgcgggatttccacctctctcacgcctgtctccgaccacctcactttcccccttcgcgctcggcctcgcgtcgacccatctgggctagggcacgcggcgacattcactcgtcggcttaaggaccccccggtctcgaaacaccgacaccagtggacttgttaaagactctatatgcccttgngtttgaatcatacccaagtaaaaagccttct

SEQ ID NO: 97627 - DNA, 566 bp, Zea mays
  unsure (1)..(566): unsure at all n locations
aggttcagggtcctnaagctgagtactcagctacctcatcgcactgctcctaccggtccggaattcccgggtcgacccacgcgtccggcgagctgagcaaggcggaggcggcgatggagcggctgcagcggatctttggcgcctccggcatggggcagccgccgacggactcgccgcttctcgactcctccgagcaggtctacatctcctccctcgcgcttctcaagatgctcaagcacgggagggccggcgtgcccatggaggtcatgggtctcatgctcggcgagttcgtcgatgactacaccgtcagggtcgtcgacgtcttcgccatgccgcagagcgggactggggtcagcgtcgaggccgtcgaccacgtcttccagacaaacatgcttgacatgctcaagcagaccggcaggccagaaatggttgtaggctggtatcactcacatcctggcttcggttgctggctatcaggcgttgatatcaatactcagcagagttttgaagctttgaaccccagggcagttgcttgtgtgatagaccccatccagagtgtgaagggg

SEQ ID NO: 97628 - DNA, 562 bp, Zea mays
  unsure (1)..(562): unsure at all n locations
cggatgccgatcctaatctcagctctacagatattactcactcggtccggaattcccgggtcgacccacgcgtccggcttgatgaatctgtgtctgctgcaattactgagaatgatattgttgctgctgctgtgttgtctggaaacagaaattttgaaggacgtgtgcatcctttaaccagagcaaattaccttgcttcccctcctttagttgtggcttatgcattggctggcacagttaatattgattttgagaaagaacctattggcatctcgaaagatggaaaagaggtttacttccgggatgtttggccatccacagaagagatagccgaggttgtcaagtcaagtgtgctccctgacatgttcaagagcacatatgagtcaatcaccaaaggaaatcctatgtggaatgagctgccagtctcaacaggcactctctacccctgggatccatcatctacatacattccatgagccactttactttaaggttttgaaaatgagtcctccttgcccgcggcctttggaggatgcatatggccttttgaattttggtgccn

SEQ ID NO: 97629 - DNA, 564 bp, Zea mays
  unsure (1)..(564): unsure at all n locations
tgagccggttgcntgaagctaaaattccagttggtcatagcatgctccttccggtccggaattcccgggtcgacccacgcgtgcgctcgaagaagggcgtgatgcggcggctgatgcggtggagccggccgcggtgggccggggcggaggaggcggagtgcgcggtgtgcctggacgagttccgcgcgggcgacgtgctggcgcacctgcgctgcggccaccgcttccactgggcctgcgcgctgccctggctcgagggcacctcacggtgccccttctgccgcgccgccgtggacgccggcgccgccgccgacggcgcctagaagcggccgaggctctggtcttgctggggcttgcccgtgggacggcgcggggcgccttgtcgctgtcggcccacgccagccacgccacccccatggcgttgccacgctaggcagtggctagtgggggtggtcatggtgagtggtgaccggcctgcttgtgtggcgcggagcggaggaggacagcgagacgcgcacgacgaacccgtgagtgccttggcagttcttgcacgctttgcgcgcg

SEQ ID NO: 97630 - DNA, 565 bp, Zea mays
  unsure (1)..(565): unsure at all n locations
agagccgggtncntgattccgagacctacgatactcatcgcatgctcctaccggtccggaattcccgggtcgacccacgcgtccgcggacgcgtgggcggacgcgtggggtttaggcacttatagtgcaagggcttccacggtgccccctgcagcaattgttgcaacaaaagctatgttgtctgacccaagggcagagcctcggtatgcagagagagtgccatatgttgtaatccatggggaaccaggagctcgtcttgccgacatggttattgatccttatggtctgctagaagttggctccccttatagattaaatgaacaatattacataaccaagcagattattcctgcattgcagcgtgtttttggacttcttggtgctgacctgaacaagtggtttaatgagatgcctcgccccatacgatcaactcttgcgaaacgccaatttgctgctgctcatggttcattctctcgtgatggcagtttcatccgattaggattgaataataaaacctcagccaaaggaggcagaatagatacatactacatgtcaagccactgct

SEQ ID NO: 97631 - DNA, 559 bp, Zea mays
  unsure (1)..(559): unsure at all n locations
agtcatataggttccgtcgtcactgaagtccgtnaacgactgcatgagctaccggtccggaattcccgggtcgacgccacgcgtccggaggttataaacaataagggctatgatggagctaaggctgatctgtggtcatgtggagtgattctgtttgtcctcatggcggggtacctcccatttgaagattcgaacctgatgtcgctctacaagaagatcttcaaagcggatttcagttgcccgtcctggttctccacaagcgcaaagaagctcatcaagaagatacttgaacctaatgctaacaatagaataactattgcagagctcattaacaacgagtggttcaagaaggggtatcagcctcccagatttgaaacagcagatgttaatctggatgacgtgaactccatcttcgatgaatccggggagccagcacagcttgttgttgaaaggagagaagaaagaccatcagtgatgaacgctntcgagttaatctctacgtctcaaggcctcaatctcgggacgctcttcgagaagcaaacgggttctgttaagcgag

SEQ ID NO: 97632 - DNA, 571 bp, Zea mays
  unsure (1)..(571): unsure at all n locations
agtgcgtnttanattaacctgaganngctacntntcatagtatgctccgtccggtcctgaactcccgggtcgacgccacgcgtccgctaagcccatggtagtggagaccttttctgaatatcctcctcttggtcgctttgctgtccgtgacgatgaggcaaacggtggctgtcggagtcatcaagagtgtggagaagaaggatccaactggagccaaggtgaccaaggctgccgcaaagaagaaatgatgtgtctggctggttctgtgtttgcttgagggaaacctagtggaaacataaaatatctcgtcttgttcacgtcattgtctgaactatgctcgcaacgtttgcctggtcgatttagaatggttattttcgttaaaaaaaaaatanaataanaaacacaacacccttaaaaaaaaaaagggcggccgctctataggatccaagcttacgtacgcgtgcatgcgacgtcataacctttctatagtggcacctaaattcaattcactggccgtcgtttacaacgtcgtgactggggaaaancttggcgtacccaacttaatcggctt

SEQ ID NO: 97633 - DNA, 547 bp, Zea mays
  unsure (1)..(547): unsure at all n locations
cgaggnntgctgaagccacnactcattgcaatngcactancgcttcgnnntnngntacccgggccgacccacgcgtncgcccaggccttgaaggttgccaaggctgtgaagtctgggtcagtaaaaaagaccaagaagatccgcacgtccgtgacatttcaccgccccaagaccctgaagaaggctagggaccccaagtacccaagaatcagcactaccggaaggaacaagcttgatcagtaccaaattctcaagtatcccctcaccacagaatcggcgatgaagaagattgaagataacaacactctggtcttcattgtcgacctcaaggcagacaagaagaagatcaaggctgctgtcaagaagatgtatgacattcaggccaagaaggtcaacaccctgatcagacctgatgganagaagaaggcttacgtgaagcttacgcctgactatgatgctcctgatgtggccaacaaatcggcatcatctaaggtactgcgtcaggcatctggtgtgccctaatttcatggggaaccagagttttgga

SEQ ID NO: 97634 - DNA, 552 bp, Zea mays
  unsure (1)..(552): unsure at all n locations
agttagaanacaatattcatgatgctcataggcacgtcgtaccggtccggaattcccgggtcgacccacgcgtccgcagaccgctggtaggagtatctcgtagacattgaacaacggctgcatggcgagcgcctgcgccacctccatccccctcgtctcggcgccctctgcatgcccgtccaagaagaccaccgtcgccaggttccggcgccgcacggcgacgtgcagggccagcagcggcggtggcggtggccggggcggcgaaaatgatggcctcctttggctgccccggcgggacgtgatgctcaacggcctgtccagtgtcgccgncgggctcgcctggtacccgggcgtcgcgtccggcgcggatgcccgtgtgcaccaggccgacaaggtgaacgagaagaccgtgcagtgcacgggacccgnncggcagcttccgtgccctctggtgtcgncgacggaccccgtggacttcaagccggaaagcaaggtgacgcgcattcngcagcggtgcatctcctgagccgggagtcccaggagaagtacaag

SEQ ID NO: 97635 - DNA, 550 bp, Zea mays
  unsure (1)..(550): unsure at all n locations
tgtgatggtanctgttccctggcactangcagtactacggcgtcggattcccggtcgacccacgcgtccggagagtgtgtgtgagagagaggatgggtggcagcggcagggctgctctgctgctggccgtggtggtggtggccgtgagcctggccgtggagatccaggccgacgccgggtacggttactgcggcgggtacaccccgacgccgacgccggccaccccgaccccgaagcccgagaagccccccaccaaggggccgaagccggacaagccgtccaaggagcacaagccgtccaaggagcacgggcccaagccggagaagccgtccaaggagcacaagccgacgcctgccacgtacaccccgagccccaaacccacgccgtcgacgtacactcccaccccgacgccctccaagccgacgccacccacatacacttccggccctacgccccacaaacccacaccaaaacccacttccaattctttcgacgtacacccctgaccccaaagccttcgacacctaaggcgaacccgccgacgtttact

SEQ ID NO: 97636 - DNA, 543 bp, Zea mays
gacggtgtgttccagccacgttagtactgacgtaccggtccggaattcccgggtcgacccacgcgtccgcccacgcgtccgcccacgcgtccggacgatagagaaggagctcaaccggcgggcggcggagacggcgagcaagcagcagctggagggcatcaggaaggtggccaagctccaagctgagtgcaggaggctgcaggccgcggcacaacggagggcgtcctccgtgaacgtcgagctccggcgttctccgagctcggcctgcgtcgagtcgctcacggattgccagtcggactgctccgactcatgggcctcggccctcgtcacggagctcgaccagttcaagaaggacaagagcggcgcgagcaccaggacagcgagcctcgtggccgcggacatcgacgtgatggacgacttcctcgagatggagaagctcgccttcgcgaacggctcgtcgaaaggcgacgccgtcgaggacgcgagcgggcatgttgagagaaggcctgacgatgctcaacgcgaggtgaagaatttgccgcc

SEQ ID NO: 97637 - DNA, 547 bp, Zea mays
  unsure (1)..(547): unsure at all n locations
gtgcgaattcaacttctagcntgctcatcgtacngacgtaccggtccggaattcccgggtcgacccacgcgtccggggagggatagtgcaaagctggataagaccaaggcctccataaacaagctgcaatcactgattgttgttacctctcaggctgccacaactacatcatcagccatcgttagagtccgtgacaatgagcttgcaccacagcttgttcagctctgttttgcgctattgggcatgtggaggtcaatgaaccatttccatgagatacagaatgagattgttcagcaagtccgtggtctggtggacagctccatggccgagtcaacatctgacctccacaggcttgcaactcgtgaccttgaagctgctgttgcggcgtggcactccaacttcgaccgcctcatcaagtatcagcgcgaatacatccgctctctgtatggctggctgaagctcacactctgccaggtggatagctgtgtgccacagggagcccatgcctcgatgatctcgcgcgaactcaccagcttctgtgacgagn

SEQ ID NO: 97638 - DNA, 549 bp, Zea mays
  unsure (1)..(549): unsure at all n locations
cgagtgtcgctgtcggcatggcacctacagtcgtngcataccgctccggaattcccgggtcgacccacgcgtccgcatctcctgagtcctgcctgcgctcgcctcagctcctttcttccccgccccttggcttttgcttggttgcatcgggccggtcgagccggagaggaaaagctagctagcagctaccagctctcggccggcggtggtagtctgcctgcagctggggttagctgcaagggttgggagctagccatggggaggggtcgggtggagctgaagcggatcgagaacaagatcaaccgccaggtcaccttcgccaagcgccgcaacggcctgctcaagaaggcgtacgagctctccgtgctctgcgacgccgaagtcgcgctcatcatcttctccaaccgcggcaagctctacgagttctgcagcggacagagcattaccaaaacacttgagaggtatgaaaaaaacagttatggaggaccagatactgctgtacagaacaaggagaactgtgctgctgtgaattgctgtttggatattatn

SEQ ID NO: 97639 - DNA, 542 bp, Zea mays
  unsure (1)..(542): unsure at all n locations
tgataggcagtcgtgacactgaggactgaggcantacgtaccgctccggaattcccgggtcgacccacgcgtccgcttcaaacgtaccattaaggatgaaggtttctcttccttgtggaggggtaacactgctaatgttattcgttacttccctactcaggctttgaactttgcatttaaggactacttcaagaggttgttcaacttcaagaaggatagggatggctattggaagtggtttgctggcaacctggcctctggtggtgctgctggtgcttcctccttgttttttgtgtactccctggactacgcgagaacaaagttggctaatgacgcgaaggctgccaaaggaggaggtgaaaggcaagtcaatgggcttgtcgatgtctaccgcaagacactcaagtctgatggtattgctgggccttaccggtggattaacatcttctgtgttggaatcatttgttatcgtgggctgtactttgggctctatgaattcatcaagccagttgccctaatgcaaacttcaagacaatttcttg

SEQ ID NO: 97640 - DNA, 551 bp, Zea mays
  unsure (1)..(551): unsure at all n locations
tgcgctcgttgtgcccagcctcgacagncgtgacgtaccggtccggaattcccgggtcgacccacgcgtccgcccacgcgtccgagagtgtgtgtgagagagaggatgggtggcagcggcagggctgctctgctgctggccctggtggtggtggccgtgagcctggccgtggagatccaggccgacgccgggtacggttacggcggcgggtacaccccgacgccgacgccggccaccccgaccccgaagcccgagaagccccccaccaaggggccgaagccggacaagccggccaaggagcacaaggccgccaaggagcacgggcccaagcccggaaaagccgcccaaggagcacaagccgacgcggccaagtacaacccggaggcccaaaccaaggcggccgacgtaaactccaacccggaggcccccaaggccgaggccaccaaaataaattccggccctaacgcccaaaaaaccataacaaaaccaattccaattcctccaacgaaaacccggacccccaagccttcaaaacttaaacggacccggcc

SEQ ID NO: 97641 - DNA, 546 bp, Zea mays
  unsure (1)..(546): unsure at all n locations
gatggtcgttggctgangcctcncctctctgtactgcccgtactcggtccgtnattcccgggtcgacccacgcgtccgggccccgtcgcccgtccccacgaagccgcctttccccgccgcttccatcccaatctccgtctccgtctcccccgttcccgttcccgcgtccgtctccgtccccatcggcgccgacgggtttgggtctccgcccaacacgctcacggagccggtatgggacaccatcaagcgagacttagcacgcatcgtcagcaatctcaagctcgtcgtcttccccaatccctaccgcgaggaccccggcaaggcgcttagggactgggacctgtggggtcccttcttcttcatcgtcttcctaggcctcacgctctcctggtcggcttccgtgaagaagtctgaagtatttgctgttgcattcgcggtcctggcagctggtgctataattctgaccttggaatgtctgcttctgggggggtccatcattttcttccaagcctgagtctttttggcttttgccaatttcattggttn

SEQ ID NO: 97642 - DNA, 550 bp, Zea mays
  unsure (1)..(550): unsure at all n locations
tggttagcgatgctgttaatgagcctgagtcngtcgtaccgcttcggaattcccgggtcgacccacgcgtccggcgcgtcaggctctacgtccggggcaccatcctcggatacaagaggtccaagtcgaacgagtacgagaccacgtcgttcgttcagatcgagggggtgaacaccaaggaggacgtcgcgtggtacgctggcaagcgcatggcgtacatctacaaggctaagaccaagagcagcgagacccgctacaggtgcatctggggcaaggtcacccgcccgcacggcaactcgggcgtcgtccgcgccaagttcaagtccaaccttccgcctgagtccatggggcgcaaggtcagagtgttcatgtacccgagcagcatctaaggttaggtttttggtgaagtaaaagtggactccaaatggccatgcttatttcttctctctgagcttaaaatgccatggtgttgcaacttagattggtcatgttcctgaaccttgtgaagtcttccaaaatttctggtcgaaccgcttgacaggttgtccan

SEQ ID NO: 97643 - DNA, 546 bp, Zea mays
  unsure (1)..(546): unsure at all n locations
agcgtggtgtccagcnctgatcgcactggcgtacccgtccggaattcccgggtcgacccacgcgtccgcccacgcgtccggttcaagacgcagacggccgaccagttctccgaccgcctcgtggccatggtcggccgcaccgtgcaggagctctacggcatgggggcgcgccgcgtcggcgtcacgtcgctgccgccgctgggctgcctgccggcgtcgatcacgctgttcgggcacggcgccgccgggtgcgtgtccaggctcaacagcgacgcgcagagcttcaaccggaagatgaacgccaccgtggacgcgctggcgcggcggtacccggacctcaagatcgccgtcttcgacatctacacgccgctgtacgacctggccacggacccccagtcgcagggcttcgcggaggccccgcggggatgctgcgggacgggcacggtggagaccaccgtgctcctttggaaccccaagttcgtcgggacgtgccccaacggcacgttctacgtcttctgggacgccgtncacccgttcgaggcgggc

SEQ ID NO: 97644 - DNA, 546 bp, Zea mays
  unsure (1)..(546): unsure at all n locations
agatttgcttggctgaagccctgcnactgcagncantacgtaccggttcggaattcccgggtcgacccacgcgtccgaggtccctggttgacgacacgcttcgaaaagtgaatgggctaaaacctatcgccgctgaacttggcgtttcgttagctcagctctcgattgcttggtgcgcgtcgaaccccaatgtctcgtctgtgatcactggagccaccaaagaaagccagattgtggagaacatgaaggccctagatgtcatcccactgctgacgccggaggtcgtcgacaggatcgaggcggtggtccaaagcaagcccaaacgcaacgtcgagtcatacaggtgaaaattcggtgttcatccgacggagttcaggcctnctncacgaaaactcatccatgatccgggtgtattctgggcgtggtgctgtgttcacaaacaccaatctggcaggccttgggtgtgtattctgctttccgaatcagattttggacccatccaatcctgcatggggtgcttgcgagcagaagaattgttggatgacn

SEQ ID NO: 97645 - DNA, 550 bp, Zea mays
  unsure (1)..(550): unsure at all n locations
gaggcctgctggctcggtgccaacttcttctgcatgcccgtaccggtccggaattcccgggtcgacccacgcgtccgaaatactgatctcactgatccagtatggctatggcaaaggcaggcgcgccgagggtctcggcggcccagctggtgactctcgggctatcactcctctgcgctgtcgccggcccggccgccgcgcagaactgcggctgccagccaaacgtatgctgcagcaagtttggctactgcggcacgaccgacgagtactgcggcgacgggtgccagtcgggcccgtgccgctcgggcggcggcggcagcagtggcggcggtggtgcgaacgtggctagcgtcgtcaccggctccttcttcaacggcatcaagagccaggccgggagcgggtgcgagggcaagaacttctacacccggagcgcgttcctgagcgccgtcaaggcgtacccaggcttcgcccatggcgggtcgcatgtgcagggcaagcgcgagatcgccgncttcttcgcgcacgccacgcacgagaccgggcatttctg

SEQ ID NO: 97646 - DNA, 546 bp, Zea mays
  unsure (1)..(546): unsure at all n locations
gttaggcggtgctgaatcatgcntacgngtcaatccgaccgcttcggaattcccggtcgacccacgcgtccgcccacgcgtccgcccacgcgtccgccagtaccgagtcctacgagcagtcgcacgcaagtgtcaagagacgaaacggtcgacatggctcgcacgcaatctgccgtagcggtcgccgtggtggccgcggtgctgctgctggcaacggcggcgacgacctcggaggccgccattacctgcgggcaggtgagcttcggcatctcgccctgcctctcctacgcccgcggcacggggtccgggccctccgcgtgctgctgtagcggcgtcaggaacctcaagagcgccttcagcaccgtcgtcgacaggcgcgccgtctgcaactgccttaagaacgccgtcaggggcgtcagcggcctcaacgccggcaacggcggcagcaatcccttcaagtgccgcgtcagcatcccctacaacattcgcaccttcaccgaatgcttccggttgaacttaaaccttgaccacgcgcgacgaccggcg

SEQ ID NO: 97647 - DNA, 553 bp, Zea mays
  unsure (1)..(553): unsure at all n locations
cgtggntnactgaatgctgcnttttcatagcactcccgtaccgcgtccggaattcccgggtcgacccacgcgtccgcccacgcgtccgtgaatccatatgcagaaggtgggcgacccgtcgctgaaggcactgctcctggacgaggagcggctgacggaggcggggatagaggcgatggtgtcgcggttcctggcgcaggtgaaggacgggacgtggggcgagcaggggtggcccaaggtgtggacggactactccgtctccaagctggccctgaacgcctactcccggctgctggcgcggcggctggaggcgcgcggcgtgagcgtgagcgtgaactgcttctgccccgggttcacgcgcacggacatgaccaggggctgggggaagcgcaccgccggcgaggcggccgacgtcggggcgcggctcgcgcttgttgccgccaccgagcttcccacggggaccttcttcaagtggcgcacgccgcagctatactctaagctgtgactggctctgggctctggcttgcttgctagctgagctgtcgtccgtcgg

SEQ ID NO: 97648 - DNA, 556 bp, Zea mays
  unsure (1)..(556): unsure at all n locations
cgaggccggtnttggactgaggacgtacagcactntcgaaccgctccggaattcccgggtcgacccacgcgtccgccaagaagcaagaaaactagaaaaggctcctcccgaccgcaacgcccctcatctccctcgaccccggcatccccgacccgatggcgcccaaggcggagaagaagccagcggagaagaagccggcggccgaggagaaggcggagaagacgaccgcagggaagaagcccaaggccgagaagcggctgcccgcgtccaagtcctccggcaaggagggcggcgagaagaaggggaagaagaaggccaagaagagcgtggagacctacaagatctacatcttcaaggtgctgaagcaggtgcaccccgacatcggcatatcctccaaggccatgtccatcatgaactccttcatcaacgacatctttgagaagctggccggcgaggccgncaagctggcgcggtacaacaagaagcccaccatcacgntccgcgagatccagaccttcgtgcgcctaagtcctcccggagagcttcgcagcacgcn

SEQ ID NO: 97649 - DNA, 547 bp, Zea mays
  unsure (1)..(547): unsure at all n locations
gaggaannnttgcctgagtcagtctgtcatagcaaccgctccggaattcccgggtcgacccacgcgtccggggcttgccaagcttatggactacaaggatacccatgtcacaacagctgttcgtggaacaattgggcacattgctcccgagtacctatctaccggcaagtcttctgagaagactgatgtttttggctatgggatcatgcttctggagcttattactggccagagggcatttgatctagctcgtcttgcaaatgatgatgatgttatgcttcttgactgggtgaaaggactgttgaaggagaagaaggtggagatgctggtggacccagatctgcagaaagcctacgaggaggtcgaggtggagagccttattcaggtggcactcctctgcacgcagggcttccccctggaccgtccaaagatgtcngaagtggtgaggatgctcgaaagtgacgggctggcaaagcgttgggacgaatggcangaagtagangtggtgaagcangaggctgaatcggaccgtttcgcaatgactgga

SEQ ID NO: 97650 - DNA, 528 bp, Zea mays
  unsure (1)..(528): unsure at all n locations
gattgagaactgatagcngtcgtgacgcagtaccggttcggaattgacggatgcatccactctgtcactgtggattcttgatcctgctggacgtgatgcaactgttttgagagaagcggtaaagggtgacactatggatctgagagcagccactgagattatatgttccaggacaccatcacagttgcaaataatgaaacagacttattatgctagattcggtacttatcttgagcatgacattgctcaccacacatccggtgatcaccagaagcttttacttgcatatatggggattccacgctatgaagggcccgaggttgatcctacaaatgtgacacatgatgcaaagggtttgtacaaagctggtgagaaaaggctgggtacggacgaaaagaattttatccgtggtttcactgaacgcaattgggcacacttggcaattggttcttcctgttaccaatcataggtttgaccgaaatttaaaaagggttttcaagaccgaaacttctggaaactttgaatttg

SEQ ID NO: 97651 - DNA, 514 bp, Zea mays
  unsure (1)..(514): unsure at all n locations
cgtataggcgtgctggngctgcagtcgatacactagccatgacgtaccggtccggaattcccgggtcgacgcacgcgtccgcccacgcgtccgcccacgcgtccgcccacgcgtccgggttctggatgacgccggggtcgggcaagccctcgtgccacgccgtgatgaccggcgactggaggccctccgccaccgaccgcgccgcggggaggctccccggatacggcctgaccacgaacatcatcaacggtggtctagagtgcggcgaggaccgctccaccgacggcgccaaagccgccaaggaccgggtcggctactacaagaggtactgcggtatgctctgagtggggtacggggacaacatggcatgcgggagccagaagccttacggaggatgatgacactagtagctgatctatggttgctgcaatgcaagccttcacgtgtgtttgcctctctacctaaagaataaatcaagctagcagcaaacctaccttccgcgtgtgtctacttg

SEQ ID NO: 97652 - DNA, 538 bp, Zea mays
tgtaatgcggagtggtgagaccagcatgggaagtatatggtaactgctccggaattcccgggtcgaccgacgcgtccgcgcgggcagcgccagcctgccgctgatgcagaagctgtgctccgtgctggtggaccacgcggtcagcagcggcgacgcggagcgggagccctccgtgttctccaagatcaccaggttcgaggaggagctccgcgcggtgctgccccaggaggtggaggcctgccgcgtggcggtcgccgagggcaccgtccccgtggcgaaccggatcgcggacagccggtcgttcccgctgtaccgcttcgtgcgcgaggagctcggctgcgtgttcctgaccggcgagaggctcaagtcctccggcgaggagtgcaacaaggtgttcgtcggcatcagccagggcaagctcgtggaccccatgctcgagtgcctaagggatgggacggcaggccgttgccattaaccatcaggtaaagaacggccaagggaagaagaaggaagggaggaaatacgtgaaaaaaattaa

SEQ ID NO: 97653 - DNA, 505 bp, Zea mays
  unsure (1)..(505): unsure at all n locations
gcggggctgtcgactgcatcctatgctatggcgaactcgttcggaattcccgggtcgacgcacgcgtccgactgcgccattggccagctagagccggccagaagagcttgcagttactgagagtgtgtggganagagaggatgggtggcagcggcagggctgctctgctgctggccctggtggtggtggccgtgagcctggccgtggagatccaggccgacgccgggtacggttacggcggcgggtacaccccgacgccgacgccggccaccccgaccccgaagcccgagaagccccccaccaaggggccgaagccggacaagccgcccaaggagcacaagccgcccaaggagcacgggcccaagccggagaagccgcccaaggagcacaagccgacgccggccacgtacaccccgagccccaaacccacgccgtcgacgtacactcccaccccgacgccccccaagccgacgccacccacatacacttccggccctacgccccc

SEQ ID NO: 97654 - DNA, 512 bp, Zea mays
cgttaggagacggcgtggtgctgatactgatgcaatagcacgccgtaccggtccggaattcccgggtcgacgcacgcgtccgcccacgcgtccgcccacgcgtccgcccacgcgtccgcgccgctgttccccgcagcgctatggacccaatctcgtccgacccggcgcgtcgtcccctccagatctccgtcgccctctccaggtagcagaaactgttctgcttcagtctgacaaagtggagggcttaggagtttctgcttcttttatgtctgaacaatctttgctttatttgggattgttgggagagtactctcgtgcaacgaggaaaaggcacaaggttccgttccactgcatgcgtcaagagcctgtctggttttcttgttctgatttgtcatttgctggtgctcaaagccggcttggtttcctcgaaggatcagcatctactcttgattgtggactttgtcgcatctgatatcaacttcataaatctttatccaagatggcgctgcaaa

SEQ ID NO: 97655 - DNA, 510 bp, Zea mays
cgggcctgtgggctgttacgagtcctacggactgtctgtaccggtccggaattcccgggtcgacgcacgcgtccgcccacgcgtccggcaactgcaaagcagcaagctctactcttcttctgtactgaacgtgtgactagataacaacaagcgtgaaccatggcggacgagtacggccgcagcggctacggcaggtccggcgccggcgacgactacgacagcggctacaacagcaagtccggcactgatgactacggccgtggcgaaggtggctacaacaagtcgggcggcgatgacgactacggccgcagcggcggcgatgggtacggcaggtccggcggcgacgactacggccgtggcaccggcggcggtggctacaacaagtccggcggcggagacgactacggccgcagcggcggcgacgactacggccgtggcaccggcggcggcgggtacaacaagtccggagacgacggctacgacagcgggtacaacagatcgggcaccacc

SEQ ID NO: 97656 - DNA, 536 bp, Zea mays
  unsure (1)..(536): unsure at all n locations
tgggctgggagatggtgatacagatacccgaacgagncgtactttctccctgaattcccgggtcgaccgacgcgtccgctcagtgttctactatgagattctgaacgcacctgactgcgcctgcagtcttgcaaagcaggcttttgacgaggccatctcggaactggacaccctgatcgaggagtcctacaaggacagcactttgatcatgcagctccttcgtgataacttgaccctatggacttctgacatctcggaggaccctgctgaagagattagggaggcacccaagcgcgactcgagtgaggggcagtaaagccggctttatgtgcctagaaactagtagctagtgtttgctgctgtcgaatgacactatgcaatgtgatctggaacctggtttcttgggtgcgacgcttgttatgactgtcgtcagtaaaatttgggggctccccgtatgagatgctgccgggcaaggcctcggtgtcccaccttgtttgtggcggngggcgctggagcccgggtctggtgggttggga

SEQ ID NO: 97657 - DNA, 538 bp, Zea mays
  unsure (1)..(538): unsure at all n locations
cgcatcgagtggtaagtccgtntccggcaagtaagctcatacagttcctgaattcccgggtcgaccgacgcgtgcgctcactcgtccaatatatatcccccaaccgactataactgctctcttcatatgaactgccccgcatgcgtcaagtgcatcaccggactgatcactccaaacatcaactatacgtggacagcactttgatcatgcagctccttcgtgataacttgaccctatggacttctgacatctcggaggaccctgctgaagagattagggaggcacccaagcgcgactcgagtgaggggcagtaaagccggctttatgtgcctagaaactagtagctagtgtttgctgctgtcgaatgacactatgcaatgtgatctggaacctggtttcttgggtgcgacgcttgttatgactgtcgtcagtaaaatttgggggctccccgtatgagatgctgccgggcaaggcctcggtgtcccacctcgtttgtggcggggggcgctggagcccggtctggttgggttgggaaccg

SEQ ID NO: 97658 - DNA, 508 bp, Zea mays
  unsure (1)..(508): unsure at all n locations
cgcgtgcgctagcgactgctaacgtagggcntggcgaaccgcttcggaattcccgggtcgacgcacgcgtccggagcaatggcggagccgagccagcagcagctgctgcggtcgttcgtggaggtgccggcgggctccgacttccccatccagaacctgcccttcggggtcttccgccggcggggggtgcaggcgcaggcgccgcgccccgcggtggccatcggggacttcgcgctcgacctcgccgctgtcgccgacgcggggctcttcgacgggcccgcgctctccggctccccgtgcttccaccaggagacgctcaacatgttcctggggatgggccggccggcgtggagggaggcgcgcgtcacgctacagaaaatcctatcagccgacgagcccgtcttgcgtgacaacgaagcgctgaggaacaagtgtctggtaccaatgagtgatatagagatggttctaccaatcacggttggaggttacacggacttcttttgttctg

SEQ ID NO: 97659 - DNA, 505 bp, Zea mays
gggcgcttgatgctacggaacctacgcatgtctgtaccggtccggaattcccgggtcgacccacgcgtccgcccacgcgtccgaccatgagcagctctctgtgcctgaaatcaccaatgctgtatttgaggcctcaagcatgatggccaagtgtgacccaaggcacggaaagtacatggcttgctgcttgatgtaccgcggtgatgttgttcctaaggatgtcaacgctgcagttgcaaccatcaagaccaagagaactgtccagtttgtggactggtgccccactggattcaagtgtggcatcaactatcagccaccctctgttgtccctggaggtgacctggcaaaggtccagcgtgccgtgtgcatgatcagcaacaacaccgccgttgccgaggtgttctcacgcatcgaccacaagtttgaccttatgtacgccaagcgcgcattcgttcactggtatgtcggtgagggtatggaagagggtgagttctcagaagcccgt

SEQ ID NO: 97660 - DNA, 512 bp, Zea mays
  unsure (1)..(512): unsure at all n locations
gtagctgtgctgtcgctgaaagatanagctatgtcgtaccgctccggaattcccgggtcgacccacgcgtccggaggagagtacagtgcaagcccgacttcttggattttatataaaaaagatgtgtggttccgatgataagtatcggtttgaaattaaggatattcttgaaatggaaatgaagctcctggaagctctcgactattatttggttgttttccatccatatcgtcctctcttacagttgttgcaggatgctggcataacagacctgacacaatttgcctggggccttgttaatgatacatacaagatggaccttatcctcatataccctccctacatgattgcactggcctgcatatacatagcgagtgttttgaaagataaggacaccacagcatggtttgaagagctccgtgttgacatgaacatagttaagaatatctctatggaaatattaaacttctatgacacctacaagattgatcctcaaaggggcatccctgaag

SEQ ID NO: 97661 - DNA, 510 bp, Zea mays
  unsure (1)..(510): unsure at all n locations
aggtgtcgctgttcaactgtagccgtanggcaatcgcaaactgctccggaattcccgggtcgacccacgcgtccgcggacgcgtgggtttggaattaggaaagtgagcatacaacagggacaagagccagaaagggtggtggacaatgagctatgggggtaccaagttggcttattcggggaaaggaataacatctacacacaagattcaaaaattactgaatggacaagtatcgacaatttgacatatagcccacttacttgactacattttccacaccagtgggaagtgacgcagtgacactgaaccttagtggtatgggtaagggtgaagtatgggtcaatggagagagtatcggacgatattgggtctctttcaaggctcctagtggcaatccttcgcaatcactgtatcacataccacgagaatttctaaaccctcaagacaataccctagccctttttgaggaaatgggaagtaacccacagctaataacagtgaacacaatgt

SEQ ID NO: 97662 - DNA, 516 bp, Zea mays
agtatagtgagagggcgcttgcctgtaatacgtatgcgctgccacgccgtaccggtccggaattcccgggtcgacgcacgcgtccggagcccccgagctacctcaccggcgagttccccggcgactacggctgggacaccgccgggctgtccgccgaccccgagacattcgccaagaaccgcgagctggaggtgatccactcccgctgggccatgctcggcgcgctcggctgcgtcttccccgagctgctctcccgcaacggcgtcaagttcggcgaggccgtctggttcaaggccggctcccagatcttcagcgagggcgggctggactacctcggcaaccccagcctgatccacgcgcagagcatcctcgccatctgggcctgccaggtcgtgctcatgggtgccgtcgagggctaccgcattgccggcgggccgctcggcgaggtcgtcgacccgctgtaccctggcggcagcttcgaccccctcggcctggccgacgaccccgaggccttcc

SEQ ID NO: 97663 - DNA, 535 bp, Zea mays
  unsure (1)..(535): unsure at all n locations
tgtaagcaggtgtgatgccttaacgctnncttacagcatctgctcctgaatttccgggtcgaccgacgcggactctgagatcaagaagcacccgtggttcctgattaatctttccatcgagatgaccgacgagtagcatcgtagcatgcagttggcagacatgaacaccccggggcaaagcctggaggaggtgatggcgatcatccaggaggcgcggaagccaggggacgccatgaaccttgccgggcagctgccctgcctggggagcgtggaccttgacgacattgattttgacgatattgacgacatcgacactgagaacagcggcgacttcgtttgtgcagtgtgactgtgtgaggctcagcagggcaggagctagcttcctttgatcgttggtgtctgtagatccttgttgtgctatgcttncattcgttcctggatcagatatgttgttgtgtaaccgagaaaattggcgttgctgtggacaacataaacagacccataaacttatgcggaaatctaccccccaaaaaaa

SEQ ID NO: 97664 - DNA, 509 bp, Zea mays
  unsure (1)..(509): unsure at all n locations
gaggcctgtggctgatacgtatcctcnggactgccgtaccggtccggaattcccgggtcgacgcacgcgtccgcccacgcgtccgcccacgcgtccgcgcacgcgtccgcccacgcgtccgcccacgcgtcgggtcttcttcagcaaggagcagggccctcgccaaattaggcacagcaccttcaagcacacacaagttccgatgctttcacaaagtccaagcaccaaggataactagggaatggaatccactttggacccgatcatggacttggaaactttctctatgccaccaagcatctaggctatcatcagtctgagcacattagcctagcacccacttgtgttgaaatctttctctataacccaagttatgatgtattgaaaccttttttcttataggtatgagtgaccaagaggtagcagattatatgaaaagtttggcaattcgggtttctggttttgatgtgccaaggccaataaaaaactttgaggattgtgggtttcct

SEQ ID NO: 97665 - DNA, 508 bp, Zea mays
  unsure (1)..(508): unsure at all n locations
tgaggcctatgctttgatcagcgtcctacgcgcactgtcgtaccggtccggaattcccgggtcgacgcacgcgtccggcgagctgagcaaggcggaggcggcgatggagcggctgcagcggatctttggcgcctcgggcatggggcagccgccgacggactcgccgcttctcgactcctccgagcaggtctacatctcctccctcgcgcttctcaagatgctcaagcacgggagggccggcgtgcccatggaggtcatgggtctcatgctcggcgagttcgtcgatgactacaccgtcagggtcgtcgacgtcttcgccatgccgcagagcgggactggggtcagcgtcgaggccgtcgaccacgtcttccagacaaacatgcttgacatgctcaagcagaccggcaggccagaaatggttgtaggctggtatcactcacatcctggcttcggttgctggctatcaggcgttgatatcaatactcagcagagttttgaagctttgaan

SEQ ID NO: 97666 - DNA, 531 bp, Zea mays
  unsure (1)..(531): unsure at all n locations
tgtagccggagggtggttcattcacagcctanttgtatgtacctcattttccgggtcgaccggcgcgtgcggaccgaataaccacccgtctgccgctgtgcctcacggtttgcaccccgcacgagacccgtcgtggaggggcacgtgctagatgcggggcgcctgcctctcgccgccgatacggtgcctctcgcggtctcgctccccctcgcagacatgcagagccagatagtgtgccacgggtgcaggacccttctgttctacccaagaggtgctccgagcgtgtgttgtgcggtatgccatgtggtcaccaatgtgccgncttcagcaatggagatggctcgacttatatgtggtggctgccagacattattgatgtatgctcgcagtgcaacaactgtaagatgctcatgttgtgacacagtcaatcttggcagaccagggagtagcatagctcatgtgaactgggggcagtggccaacaagggtgatggatccatacgggacaccggctggcaaatgtgctgtttcg

SEQ ID NO: 97667 - DNA, 539 bp, Zea mays
ggttagcgggggttagtatgcattcagcaccgtcatgcatactcctcctgaattcccgggtcgaccgacgcgtgcgcggacgcgtgggcttgttgcaggggaccgatatttgtaaccattcgtcattccaaaaccaggggtcaccgctgttcctagggcgaaagatgacgactgcctcattcttgcaagtgatgggctgtgggatgtagtgtcgaatgaagaggcatgcaaagctgcgcgtcggcagatccagctgtggcacaagatcaacggtgtcacatcatcattgtgtgacgagggtgatgaatccaatgatcctgctgctcaagctgctgctgattatcttatgaggctcgcactgaagaagggtaccgaggacaatatcactgtcattgtggttgacttgaaacctcgaaagaaggccaagagcaactcatatcactgggatggatccatcacggtagagctgaccatgatatgtccaaaggcttctgctggtacgttgtggtcgtccgcaagagacttgaccccacaggttt

SEQ ID NO: 97668 - DNA, 507 bp, Zea mays
gtagcggcgtgtcaatgaagcgtaagtcattgcaaatcgttcggaattcccgggtcgacccacgcgtccgaggattttctcttttttccattcattattatggtatttattctgacctccatacctcgatcgagatagtggacataggatgccactctttaaaatgaaaaaaaggagtaatcagctgtgacacgaaaaaaaacgaatccttttgtagctcgtcatttattggcaaaaatcgaaaaggtcaatatgaaggaggagaaagaaataatagtaacgtggtcccgggcatctagcattctacccgcaatggttggccatacaatcgcgattcataatggaaaagaacatatacctatttacataacaaatcctatggtaggtcgcaaattgggggaattcgtgcctactcggcatttcacgagttatgaaagtacaagaaaggatactaaatctcgtcgttaattgaattcagaatagaaagattcagaataaacaaaattt

SEQ ID NO: 97669 - DNA, 522 bp, Zea mays
gtattattagcctgtggtgtcactcttatacccatgtcatggcaaacttccatctcaattcccggaccgacgcacgcgtccgacgattttctcttttttccattcatgattattctatttattctgacctccatacctcgagcgagagtttacacataagaggccactctttaacatgaaaaaaaggaataatcagctctgacacaaaataaaacgaacccttttgtaactcctcattcattagcaaaaactcaaaaaagtcaatatcaatgacgagaaataaataattgcaacgtcgtccctagcatctaacattctacccccaatggttgtccatacaatctcgattcataatggaaaagaacatatacctatttacattaccaatcctatggtatatctcaaactgtaggaattcctgcctactctgcatttcaccaattatcaaactacaacaaacgattcttaaatatttccccaattgaattcctaatacaaagattcataatttacaaaatttct

SEQ ID NO: 97670 - DNA, 507 bp, Zea mays
cgaggcctgtggctgatccatcgccctacgcactgacgtaccggtccggaattcccgggtcgacgcacgcgtccgggagagtacgtggaggagcagccatggcttcatcggtggccgccgcggcgagcacattcgtgggcacccgcctggcggacccggcgccacagaacgggcgcatcgtggcccggttcgggttcgggttgggcggcaaggcgaagcctgctccgaagaaggtggcgaagacatcgacctcctctgaccggccgctgtggttccccggcgccgtggcgcccgactacctggacggctcgctggtcggcgactacgggttcgacccgttcggtctcgggaagcccgtggagtacctgcagttcgagttggactcgctggaccagaacctggccaagaatgaggccggcggcatcatcggcacccggttcgagtcctccgaagtcaagtccaccccgttgcagccctacagcgaggtgttcggcctccagcggttcc

SEQ ID NO: 97671 - DNA, 540 bp, Zea mays
  unsure (1)..(540): unsure at all n locations
tgatagtctntagtggtgagaccgaatcaggaagtagcatgcatctgctcttgaattcccgggtcgaccgacgcgtccgtctagatcttctcatcataccgataccgggctcaacttctctctttcccagcctcacaacgggttcctgtttcagtcgatcgcagttagcatggccgcgacacagagctgtcaggctgctgcttgcttaccggccgccgtggcggtcgacgaggagcacggtcaccacagccaccagctgaagggaggagcgcatgaggaggctgagaacgacaataagccggagctccggcgtggcccctggaccgtagacgaggacctcaccctcgtcaactacatcgccgacaacggcgagggtcgctggaacaaacctcgccgcgcccggcggcctgaacggacgggcaaaaacttgcggcttcggtggcttaaactacttcgggccgacctgaaaccttggcactttaacggcgaccaacaagtggtcattctagaacttcacaaccggttgggcgaccgattgtt

SEQ ID NO: 97672 - DNA, 510 bp, Zea mays
tggcgtggtgacgccgatacctcaggcatgacgtaccggtccggaattcccgggtcgacgcacgcgtccgcggacgcgtgggcggacgcgtgggcggacgcgtgggcgaagccgaaagccgtagtgaaggcgaagacacccgccaagcccaaggccaagccagctgccaaggcgaagcccaagaccgccggcgctaagccgaagccacttgctaagaaggccggccgccccgccaaggcggcgaagacgtcggccaaggacacgccagggaagaaggcccctgccaagaaggccgctccctcgaagaaggcggcgaccccggtgcggaaagcgccgtcccgtaaggccaagaagtaaagcggccaagaaggggggcgcgatgctgtaaatttgatatcggagaggctcgggtacactggtcattcagtatccgagaccgatagctgaggctagtggcgatggaggactgtgttattactactataaactggtggttgtgtttctgtaact

SEQ ID NO: 97673 - DNA, 514 bp, Zea mays
  unsure (1)..(514): unsure at all n locations
gcgtggntgagatgatacgtagtcctacgccatgccgtaccggtccggaattcccgggtcgacgcacgcgtccgcccacgcgtccggcgaccgccgccggttccctactcacccttggccggcgacgacgagggccaccacggcaggatgacgacgctgaggaacctcaagatcaagacgtcgacgtgcaagaggatcgtgaaggagctgcgctcgtacgagaaggaggtggagaaggaggcggccaagaccgccgacatgaaggagaagggcgctgatccctacgacctcaaacagcaggagaatgttttggctgagtcaaggatgatggtcccagactgccacaaacgacttgaaactgcactggctgacttgaaagcaacactggctgaactgaaggagtcaaatgagcaaggtgccgagattggagaagctgagagtacaatcgcagaagttgaagcagttgtcaagccagcagaagattaaactaaaaaaactcttggtttgctgaact

SEQ ID NO: 97674 - DNA, 536 bp, Zea mays
tggatgcagtgggtgagaccgaaaccgcagtatactgtaaccgccccggaattcccgggtcgaccgacgcgtccggttctagatcgccgcccttaccatttttgtttacgttttataatattctgtcacagtcctgggttctgtaccgtaatcttatctgtctctgttgctcaattctattgtgcacacaaacactttgctctattctcttctgcacacacacacacacacctcatagagcgaccagatcaaatcaaactataataacagtagttctagtcttgccattctacatagaaccagcttgctcagacctctcggcgcacacaggcaaccgcaccgacgctgtcgccgcctcttcctctgcaaagcttgaggccttgctgattaagccacggatattgaacatcgactggcccgcgtcaaagtcgacgatcgccgatgcgagaagtttctcgccagcgaacatcgagctggccccaacaaggaagcataaagcttagtctgcatggaaaaccgtacctcgcccgcttaaa

SEQ ID NO: 97675 - DNA, 537 bp, Zea mays
agggaaagcctgaggtgtgacacgatacgcacgtacgtctcaccgctccggaattcccgggtcgaccgacgcgtccgcccacgcgtccgcccacgcgtccgcccacgcgtccgcccacgcgtccgaagtcccaaaggcgcggcgtcgtccgccagcccaccatggccgcgcagtccttcctcctcgccgacactgacgccgtcaggtcccccgcggtcttcgccgatacctattcctccgcacgccctttgcactcggtccacttcgtcgccggcccgtggggcgccgccggcgccaggtcgctcgtcgtcgcggacgccactaagaacgccgtaaccctgctcaagggctcgtctgaggtcgaaggcgtggacacgctgacgcatgacgacgatggacctgcaactgagaatgtccgatcactggacctaccctgaacttaatggcttcaacttcaccaagtttgggaatactaccaaggggggcatatcgccaggacccctttttaagccaagaaaactgccaccgggcgcccaa

SEQ ID NO: 97676 - DNA, 507 bp, Zea mays
gtaggcctaggggttgagcctgaaccgtcgcgacgacgtaccggtccggaattcccgggtcgacgcacgcgtccggcaatgcctgggtgccatctgtggagctggagtggtgaagggcttccagcaggggctgggcatgggcaacggcggtggcgccaatgttgtcgcccccggatacaccaagggggatggccttggcgctgagatcgttggcaccttcatcctggtctacaccgtcttctcggccaccgatgccaagaggaacgccagggactctcatgtccccatccttgctccactgccaattgggttcgcggtgttcctggtccaccttgccaccatccccatcaccggcaccggcatcaacccggctaggagccttggcgccgccatcatctacaaccgggatcatgcgtggagcgaccattggatcttctgggtcggccccttcatcggcgccgacctggctgccatctaccaccaggtgatcatcagggccatcccgtt

SEQ ID NO: 97677 - DNA, 542 bp, Zea mays
  unsure (1)..(542): unsure at all n locations
agacatgccagagtgcgtcaccagggtccgangnatccgnacctgtctttcaactctcgggtcgagcgactcttgctcttaagacttcccttcgtctgcttcccagagtcccagtcttggcgatctcccagatctcacggatattgctggccatccttctgctggccgccgtcttcgcccgcgtcccagctgcgcttgccgaccgcgacgacctggtggcccttacccaatccacgttccaaaaggaggtcagaaaggaccgcggcgccctcgtcgagttctacgccccctggtgtggtcactgcaagaagcttgctcctgagtatgaaagacttggtgcaagttttaagaaagctaaatctgtcctgaatgctaaaggtgaatgtgattagcacacaaatttttgcaccaagttttgagtttccgcggatccaacaatccaatggtttcccaaaagatacttttagccccacaaagtttataaggcaaccccctttttaaaaccccttctcaaattttcaaactccaagaggggccacact

SEQ ID NO: 97678 - DNA, 540 bp, Zea mays
agtagccagtgggtgtggctgaggacagcacgagtacgcatccgccccggaattcccgggtcgacccacgcgtgcgtgctaaatctgctctcgagaaagttctccgttatgaagatctgcatggagcgccaatacttggatttggagacaagcaggattcaccagcagctgtcacggaggaagaattggctagacatctgcatcttaaggagttagacgagaggccatgcatgttccaggctggatctgccttcaatgggacggggatcaaacatggcgttgactggttggtggaaaaaatggagaggaagtaacgcaccgaggcactaaaggcgcgtacagaagcagctgggaagatttaacacctcaattcagggctatcacctgtgattttccaaatgcaaagcatctgaggaagatggcttctggtaactccatgaatagagacgcttgtcccggtggagccctgttcttttagtcacgggatccccaaaaaaatttccttggtgtgctgctcttgcgattttgaataaggtggcg

SEQ ID NO: 97679 - DNA, 528 bp, Zea mays
  unsure (1)..(528): unsure at all n locations
tgatggccgganttttagtgaacctgcnactcatgtcagctctttcatcgactgcctgtccggtccggaattcccgggtcgacccacgcgtccgcggacgcgtgggctgaagaccggagtgaccctgtggaaattgcacgtgtgattaaagagggagtaaaacagaatctgaaaagatttcacgaggaagcccggcattctttaattagcacccctgaaaggaagttggctctcattattgatggtagatgcctaatgtacgcactggacccaactcttcgtgttgatcttcttggattgagtctaacttgccactctgatatatgctgccgagtctctccgctgcataaggcacacgttacaagcttagttaggaagggtgctgagaaaataactctcagcattggtgacggtgctcatgatgtgagtatgactcaagctgctcatgctgagaatggcatcagtggccaacaacgaatgcaagcttgtattgctagcgactttggcattgcacaggtttaatttcat

SEQ ID NO: 97680 - DNA, 524 bp, Zea mays
  unsure (1)..(524): unsure at all n locations
gatgccgtantttgagtgcgcctgcactctatgcagttactcatcggaccggcattcccgggtcgacccacgcgtccgcccacgcgttcggggctttagcgatggtcctgttcatggctggcgccgcgctgctcgccggggctgccggcgccggcgcgcagcagggcgtgtggagcatcatcacccggcccatgttccagagcatgctgagccaccgcggcgacagcgggtgccagggcgccttctacacctacgacgccttcatcgacgccgtcagcaagttccccggcttcggcaccaccggcgacgagcagacgcgcacgcgggagctcgccggcttcttcggccagacgttccacgaaaccaccggtggatgggcgactgctacggattggaccgtttgcctggggatactggcctggtgaaggaacagatacagacggacccacccctactatggacgaggacccataccgcttactcataagtgcaactacaggctggccggcaagcgctgaacctga

SEQ ID NO: 97681 - DNA, 536 bp, Zea mays
  unsure (1)..(536): unsure at all n locations
gtnatgggccgntnttgtggtccggatgagaccngtattgcacctattgnactgcctgtccggtccggaattcccgggtcgacccacgcgtccgcggacgcgtgggcggacgcgtgggcagttccagacgtttatgtattgaaggcggaagcagtggtggtcttctggttgctgcttccattaatcagaggcctgatctctttggatgtgctctcgctcatgttggcgtcatggacatgctccgttttcacaagtttacaattggtcatgcatggactacagactatggttgttcagataaggaagaagagttccagtggctcattaaatattctccccttcataatgtacggagaccttgggagcaaagctctggtaataactgccagtatccagcaaccatgttgttgacagctgatcatgacgatcgtgttgtgccattgcattcactgaagttattagccnactttgcagcatgtcctgtgtaccagcactgaggacagtccgcagacgaatccaataattggtcgcattgn

SEQ ID NO: 97682 - DNA, 528 bp, Zea mays
  unsure (1)..(528): unsure at all n locations
aggagtnccnntattaggtccagcctgcacctctcagcccactcgcatattcctattccgggtcgacgcacgcgtccggcggcagcttcgacccgctcggcctcgccgacgaccccgaggccttcgccgagctcaagggcaaggagctcaagaacggccgcctcgccatgttctccatgttcggattcttcgtccaggccatcttcaccgggaagggcccgttcgagaacctcgttgaccacattgccgaccccgtcaacaccaacgctggggcctaccccaccaacttcgtccgcggcaagtgaggaaggcgccgccggagacctttatgtgtgcatatgcatgtgagcgcactctggttttcggtttgcaccatgatgtacactattgcacaatccacagggaataattgtgcacatgtgcaatatttttccaaaaaaaaaaaataaggggccaccatttttaggaagatccaagcttacgtacgcgtgcttgccaacgtatagcttctatatggtgtcacccaaa

SEQ ID NO: 97683 - DNA, 527 bp, Zea mays
  unsure (1)..(527): unsure at all n locations
agatgtctcttnttagatgcagttaaagttcatgtaagntgagcttagcatcggtctttccgggtcgacccacgcgtccgatgtaagttgggctagcctcttcctaggattccataccttgtgcctttatgttcataacgacgttatgctggcttttggtactccagaaaagcaaatcttgattgaacctatatttgcccaatggatacaatctgctcatggtaagacgacatatgggttcgatatactcttatcttcaacgaatggccccgctttcaatgcatgtcgaaacatatggttgcccggatggttgaatgctgttaatgagaatagtaattcgcttttcttaacaataggacctgggtatttcttggttcattatgctattgctctaggtttgtattcaacttccttgattttttaatatgttgctttattttctcctcggtttcttaatttattcccttattatattgattttatagtttatgtttttctttcgtagtgttctattatttgttattttt

SEQ ID NO: 97684 - DNA, 520 bp, Zea mays
  unsure (1)..(520): unsure at all n locations
agatgccgantgnaaggacctagtctgataaagaagagtaccgaccggcattcccgggtcgacccacgcgtccgcggacgcgtgggtaaaaaggcgagcctatttggtgcatcattttacgtttcgctagtttgtacgtgaatcggtgaataaaaaagagaaaaagaaaagaaaagagagagagtagccacttgctagtagctggttcagtgccccggcaaattaatggccatctccctggtaaaggtagtcgaatgttcttgtaatcttgtcaattggaagctacactgcactggatgcatgcccaccagtcgaactgagcatgcgattttttccctcggtcgcgcccgggtcatgtattgtagtactcctcagtgtctttntatttattgctgaatagtgcanaattatgctatccagcgacanataaaaaaaaacggaaggaaatatccccgtagaggaaagtcgattgagcaaaaaaaaaaaaaaaaaaaaaaaaaaaaaagggangccggtctaa

SEQ ID NO: 97685 - DNA, 515 bp, Zea mays
  unsure (1)..(515): unsure at all n locations
gtgccgtattttagtcgctacnccatgtcagcctatatcgacttatactcccgctcgaagtaccgtccgacgtactcatcctcccacacctgctgcggctcttagtacgattttgcgtcaaccgaattcggtcctccggggtttcattggccagcgggggcgcacccgacacctctcgatgtgcggtgctcttccggccgctggaccctacctccggctgaaccgattccaaggttggctggcccttaagcagaaaagataactcttcccgaggcccccgccggcgtctacggacttcctaacgtcgccgtctgccgtcacgtccctgctcgggaaatcttaaccccattccctttcaggtgacgcgcgttattccgctatcttcccggtttcccccgttccttaagatccgcttacccatgttcaaatgccttttacattgaacctttcttccttttcggccttaaaagttttaatttgaatattttcttctatcaccaaaatcttcacccact

SEQ ID NO: 97686 - DNA, 519 bp, Zea mays
  unsure (1)..(519): unsure at all n locations
gagtccggatgagtacaggcctgcncacctacgcactgncgctccggttcggaattcccgggtcgacgcacgcgtccgcccacgcgtccgcccacgcgtccgctggccggttcgttcccctacgcccggttctctctcgtcgcgcaacatcagagcacaagcgaggaacccagtccagtcccgggaatggagtgcgtattgggcgtggttggccgcgacttcgcgctggtggcggccgacacttccgccgtgcagagtattctcgtccacaagaccgacgaggacaaggtgatggtgctcgactcgcaaaagctgatgggcgcttcaggggagcctggtgatcgggtgcaatttacggagtttatacagaagaacctncacctgtaccagttccggaacaccatcccgctctcaaccgccgccgccgccaacttcacacgcggcgnaactcgccacagcccttcgcaagaatccatatatggtcaatattattcttggtggttatgataaggatgttgg

SEQ ID NO: 97687 - DNA, 529 bp, Zea mays
  unsure (1)..(529): unsure at all n locations
gtagtgccggttgagggtgcgcctgcactcctcagctactcatcgtagtcccgaattcccgggtcgacccacgcgtccgcggacgcgtggggttcaggaaaggtgttgaacagggcccgcagattgacgacgagcaatgcaacaagatgttgcgctacattaggtatggtgttgacggtggagctacccttgtgacgggtggtgataggttgggtgacaagggtttctacatccagccaacgattttctcagatgtccaggacggcatgaagattgctcaggaggagatatttgggcctgtgcagtcgatcctcaagttcaaagacctcaatgaggttatcaagagggcaaacgcgagccagtatggattggccgccggcgtgttcaccaacagcctggacacggccaacaccctgacgcgcgcgctcagggccgggaccgtctgggtgaactgcnttcgacgtcttcgatgctgcgattccgtttggtgggtacaagatgagcggcatcgggagggagaagggcgttg

SEQ ID NO: 97688 - DNA, 527 bp, Zea mays
  unsure (1)..(527): unsure at all n locations
tgatgccggnttcggagtgagncaaaactcatgcacgcacatcaatgnactgccgtaccggttcggaattcccgggtcgacgcacgcgtccgcccacgcgtccgatcattcccttcttgcataacgtgaccattcccaaggattgcaacagggaccagaagtgctacatctatctctctggacaggtgatggacaagcttgccaagatcgacccttactttgccaagctcggtgacgccatggtcacctggatcgacgcctgtgatgagctgaacccggatggacccgcggctgggaaagacacggacaagtagatgggagtccctgacgatgcattcacttacctgctgaagtgagaagaacgtctgatggggcacagcctaagccccccctagatctagcttctctctagaggtgagaacgacttaatctaatgcaaggtctctctataaatacctttgctgtcataaagaagcggtacttctattcgtataacggcatttgtcgacactatcatttaacataat

SEQ ID NO: 97689 - DNA, 515 bp, Zea mays
  unsure (1)..(515): unsure at all n locations
cggtgccgtttntagtgactagctctcatgacagccggtacggaccgctttccgggtcgacccacgcgtccgccacgcgtgcggtggaggagggctttagcgatggtcctgttcatggctggcgccgcgctgctcgccggggctgccggcgccggcgcgcagcagggcgtgtggagcatcatcacccggcccatgttccagagcatgctgagccaccgcggcgacagcgggtgccagggcgccttctacacctacgacgccttcatcgaggccgccagcaagttccccggcttcggcaccaccggcgacgagcagacgcgcaggcgggagctcgccgccttcttcggccagacgtcccacgaaaccaccggtggatgggcgactgctccggatggaccgtttgcctggggatactgccgggtgaaggaacagaaacagacggacccaccctactatggacgaggacccatacagctaactcataagtccacttccggctcgccggcaagcgctgg

SEQ ID NO: 97690 - DNA, 529 bp, Zea mays
  unsure (1)..(529): unsure at all n locations
gatttttcccggtatggtccggtgatnacagcttactatcactgcatntgcaattccgggtcgacgcacgcgtccggccacgcgtccgcccacgcgtccgcccacgcgtccggcaaatcatcaaaacctgcatgagggaccaaaaggagaaattgtggcccatgttgcaaaagcttaatgttaccatgaaggctgatgagaaggagttgattggcaaagctttgatgaagcgtgttatgcaaacgtggctaccagccagcactgcacttcttgagatgatgatattccaccttccttccccggcaaaggctcaaaagtatcgtgtggagaacttgtatgagggaccccttgatgatgtttatgcaactgctatcagaaactgtgatccggagggccctcttatgctgtatgtttcaaagatgattccagcatctgacaagggcaggttctttgcgctttggtcgtgtcttctcagggaaggttgctactggtatgaaagttcggatcatgggtcccaactatgttcctg

SEQ ID NO: 97691 - DNA, 528 bp, Zea mays
  unsure (1)..(528): unsure at all n locations
cgatggcgaaatgtgaggccgctacngccgcngtcagtnnacnctcgnactgccgntccgggccggaagtaccgggtcgacccacgcgtccgaccacgacgacggcgacggtggcggccataggcggcactactactaacagcaacgacaggcagcagaagcatggtcagagagcagctgcgcccggcgtgaacgccgaccagaagaccttcctgccgggctacgtcggcggcgtcggagggttcgctggcgccggcgccggcctcgggggcatcggaggcgttgcgggaggcattggcggtatgactggcggtggtgtcggcggtgtcgtcggtggtggactcggagggtttggaccgcttggtggtgctggaagcggatcaggccttggtggcgggtcaggtctcggcggccttggtggtctcggcggtggcggcggccttggccttggtggcggctcaggatcgggtctgggccgcagcggcggccttggcggtggcagtgggctcggtggcggcggtggctgcc

SEQ ID NO: 97692 - DNA, 530 bp, Zea mays
  unsure (1)..(530): unsure at all n locations
agaggttgcctccgaaaccgtcccacnttgctntgcactgcccgtccgcgcctggattcacgcgtcgaggcacgcgtccgcggacgcgtgggcggactcctgggttgccgtctcccttttgcgtgagcagaggaaagagggggagaagagcagtcgccatgtctgtcatcatccacaagatcgaggagaagctccacatggggggcgaccacaagacggaggatgagcaccacaagaaggccgacgagcaccacaagaaggaggaggtggagcaccacatgaaggacggcgtagagcatatggaaggcatcgtggagaagatcaaggacaagatcaccggcgagcacggcgacaagtccggcgaccacattgcaaagaaggactagataaagaacagtgataagacaagcactgcgagggccacgaacacgaacaccaccggggccacagtagcacccagcagcgacagcgactgagatcttgtgtcgcagcacaagtgcaacacaagtatgcttgctggatggaagatt

SEQ ID NO: 97693 - DNA, 538 bp, Zea mays
  unsure (1)..(538): unsure at all n locations
ggagtgcccgttacagggtgaagcctggtgctggcttcccgnacccagcactaccactccccggttcgaccgacgcctggaggccgcctactccgacgcctcggcagacgcctcggttggcttctcccttttgcgtcagcagagaaacagagcgagattagcaatcgccatgtctggcatcatccacaagatcgaggagaagctccacatgccgggcgaccacaagaaggaagatgagcaccacaagaatgccgacgatcaccacacgaaagaggagggggagcaccacacgaaggaccgctcctagcataaagaatgcatcatagacaagatcaaggacaagatcaccggcgagcacttgtacaagtccttctaccacaattaaaagaacgaccagaatattaccaatgacaacattatgcacggtgatggccactaccacgaccacgaactgctgccacacccctcaataactagccacaggtactgacaactgctgtctcaacacaagtgcaacacaatcatgcttgctggagcc

SEQ ID NO: 97694 - DNA, 523 bp, Zea mays
  unsure (1)..(523): unsure at all n locations
cttgacntccccactgatnacccctggnaatgtcgcttccggtccggaattcccgggtcgacgccacgcgtccgattcaatgataaggaactgtatgttggaagagcacagaagaagtctgaaagagagatgggggtgaaggagaaatttgaaaagaatgttcaagaggtagctgagaagttccaaaacacaaacttgtatttgaagaacttagaggagaacattgatgatgagaaattgcgtgaactctttgctgagtatggcaatattacttcctgcaaggttatgcgggattcgaatggtgtcagcagaggttctggatttgttgctttcaaatctgctgaagatgctaaccgagctcttacggagattaatggcaaaatggttggaagcaagcccctttatgtaactcttgcgcatcgtaaaaaaaacacgaaggcaaagcttctacgcccaatttttacaaatgcctcctgttgccatggcccccttcagaagtccttgcatgcccatgttttcaact

SEQ ID NO: 97695 - DNA, 454 bp, Zea mays
  unsure (1)..(454): unsure at all n locations
cgacccgagtgtcagctgaacgngattgcattctttaatttcgtcaccgcgctgccccacactccctaccttaatccgttttcttcacgtaagaaaaatcaccgggactgtttcggaaccctagccctacccctaccgccattcatgcattctctgagctcaactctatctcttcaagctctgtatcatccctatcctgattaagattatctccatactacatcaacagaagggggacaaggtctacaccaccaaaagagtacctcttgggtccaacgcatctgctcacccactcgttctacctgatgacaagtactctcgccacgatacctgtgaaaatatatttggacttttccacgctaatccagaccgaaatcttaactcaagtcactgtccaccttcaagttctttttggtcatgcttgttgttgaatgaccatcttcttctcaaaaag

SEQ ID NO: 97696 - DNA, 522 bp, Zea mays
  unsure (1)..(522): unsure at all n locations
gttaggggcctttcatgcgtacgnngatttgctatgtcgttccgtttcgattcgccgggtcgactttttcgtcctcccactcgtccggcgaccgtctccgcgtttctactcacccttggccgtctacgaggatctgcaccacgtcaggatgacgactctgatgaacctcaagatcatgacttcaacgtgcaagaggatcgtgaaggagctgctctcgtacgataaggatgtgtacaaggacgctttcaagaccgacgacatgaaggacaacggctctgatccctacgacctcaaacatcacgagaatgttttgcctgagtcaaggatgattgtcccagactgtcacaaacgacttgaaactgcactttcttactcgaaagcaacactggcttaactgaaggagtcaaatgatcaaggtacctatattgtacaaactgatagtacaatcgcacaagtttgaatcatttgtaaaatccacataatattaaactaaaaaaactcttggtttgctgaactgtttcn

SEQ ID NO: 97697 - DNA, 478 bp, Zea mays
  unsure (1)..(478): unsure at all n locations
gaaaacctctaaactgatacaatgatcgtattactacccntaaaacagagccaaaaccaaaaataacattaaaaaaagttataaaaaaaaaaaaaaaaataaacgaaaagtaaaaagtgggaagcacaaaacaaaaaaaaaaaaaaaaaaaaaaaataaaaaaataataaaaaaaataaaataaaaacaaaaaaaaaaaaaaaaaaaaaaaaaaataaaaaaaaaaaaaaaaaaaaaacaaaaaaaaaaataaaaaaaataaaaacaaaaaaaataaaaaaaaaaaaaaaaaaaaaaaaaaaaaaataaaaaaaaaaaaaaaaaaaaaaatataaacaaaaaataaaaaaaataaaacaaaaaaaaaaaaacaataaaaaaaaaaaaaaataaaaaaaaaaaaaaaaaaaaaaaaaaaaaaaaaacaaaataataataaaaaaaaaaaaaataaaacaaaacaaaaaaaaacaaaaaa

SEQ ID NO: 97698 - DNA, 616 bp, Zea mays
  unsure (1)..(616): unsure at all n locations
tgatattgtnaggtgggtnttcatgatactcatcgcatgactctaccggtccgtaattcccgggtcgacccacgcgtccgcaacaagctgccccgcagcaacgaacacgaaccttggcagaacgaagctgaagtagttcgttgtgaacccagtatggcaaacgcgccgaggatcctggccctcggcctgctagcgctcctgtgcgctgccgccggcccggccgccgcgcagaactgcggctgccagcctaacttctgctgcagcaagttcggctactgcggcacgaccgacgcctactgcggcgacgggtgccagtcgggcccgtgccgctcgggcggcggcggcggcggaggcggaggcggaggcggaagcagtggcggtgcgaacgtggctaacgtggtcagcgacgcgttcttcaacggcatcaagaaccaggccgggagccggtgcgagggncagaactctacacncggagcgcngttctgagcgccgtcaacaagtacccgggcttcgcccattggcggaccganngttgagggcagccgccagattcggcgcttcttcgggcacgttacgcacgagaccggacatttctggtacataaacgagatcaacc

SEQ ID NO: 97699 - DNA, 591 bp, Zea mays
cgggctgatttgtatggaaatgtattgcaagcctcaccggtcctgaattcccgggtcgacccacgcgtccgatatttagcaatttatagactaaaaaggaataaaataaagggactaaacattagtctctagaaagcaaacactccctaaaaatactaaatctttagatttagttaaaagttcaccatatttgcacccttacaacaaatgtttatacatcacgaagtcaagtgcacacctctcaaatttgctctataccactgcacgacgctcatctcgggacaggcaacaacgcatcatctcccagcagcacaaacagtgtcaacagaacggaacagcccaactgctgttcgccctcccggcccctgcccctgcccagtgatctgctgcccccgagccagccagtactgatccggaatccgaatccttcagtgccccccagccgatagtaattgtggttgggtggccgtttgtagggtaagcacgctgctgtgcttgggtggcttgcttggaatcttggacgggcgtattgaacttccagaaagtggcccatttgattgaccccttttcattaacaagggtcacccgggg

SEQ ID NO: 97700 - DNA, 513 bp, Zea mays
atggttctgacatagatattatgtacgctgccccggttcggaattcccgggtcgacccacgcgtccggcatgctcggcgacctggacggcctccccgaggaggacaagatgcggatggccgccatgatcgaccagctccagatccgcgacagcctgagaatgtacaattcgctggtggagaggtgcttcacggactgcgtggacacgttccggcgcaagaacctggacaagcaagaggagtcttgcgtccgccggtgcgcggagaagttcctgaagcactccatgagggtcggcatgaggttcgccgagcttaaccagggcgtggccacgccggactaagaaacatgctgctgctggctgtggccgccaggtttctggctttgctggcacagatttgtagccgacaaaaggatttcagcactttcgctgcctgagatatatgcgtcttaaagccgaacgctgggtgtcagattgaataaaaactgccttgagaaaaaaaaaaaaaaaaaggga

SEQ ID NO: 97701 - DNA, 592 bp, Zea mays
ttcttggtttaatgctacgtattcatcgcagcactcaccggtccgaattcccggtcgacccacgcgtccgctcctcctttttctccactccgcttttgcttggttccatcgggccggagagggagaagctagctagctagcagcagctctgttggtgtgtgtgtgtgtgtgtgtgtggagggtagctgcagctggggctagctggaaaggtcgggagccatggggaggggccgggtggagctgaagcggatcgagaacaagatcaaccgccaggtcaccttcgccaagcgccgcaacggcctgctcaagaaggcgtacgagctctccgtgctctgcgacgccgaagtcgcgctcatcgtcttctccaaccgcggcaagctatacgagttctgtagcggaccgagcatcacgagaacacttgagaggtacgaaaaaaacagttatgcaagcccaaatactgcttgacagaacaaagagaacgagttagtccaaaacaggcgcaatgagtaccttaaactgaaaagcaaggttgataatttaccgaggacctaaaagaatttgctctggtaaaaactggggtcacattgggtga

SEQ ID NO: 97702 - DNA, 591 bp, Zea mays
  unsure (1)..(591): unsure at all n locations
cacggtgagatgaaagaaagtatatggatngctcaccggtcctgaattcccgggtcgacccacgcgtccgatagggtctaatacatgaggtatttaccaaagttcttcgtggtctatctggtgctaaagtcacagggccaggttctttcagaagttgccaagatggatatgcagttaaatcatctctcaaagctgaagatggactgttgtatccacttgaaaagggtttctttttcctgccaaagccacctacactcattcttcatgaggagattgagtttgttgagtttgaacgtcatggtgctgggggtgccagtatatcatctcactattttgacctccttgtcaaactgaaaaatgaccaagagcatctcttcagaaacattcaaaggaatgaataccacaacctcttcaatttcatcaatggaaagaacattaaaataatgaaccttggaagagatggtcaaggtgcaagtggtgtagttacagatgttctaccagacactgatgatgatgcctgtgatccacatctagagccgattaaggatcaagcccgggattgaggaaaccattgaaaaggttgaatatttg

SEQ ID NO: 97703 - DNA, 518 bp, Zea mays
  unsure (1)..(518): unsure at all n locations
tcggtgactgatnccaggctgacagcaggtatcttncggntcggaattaccgggccgaccgcacgcgtccgatcatcaccaatggaagatacaagagtttagttcatcgagctgttgtcaatgctgagcgggcgggcttatcagtagcaacagtttatgatccatcaaaatcaaggaaaatatgcactgccccgcagcttgtgagtgagaatgaaccacaaaagtatcgggatgtaatttatggtgactatgtctcatcttggtatagcaaaggtccagagggcaagcgaaacatcgatgccctcctgattcagcactagagccataagtatgccttaaaacaaggttgggccactcattctgttcctaaacttctaaagcatgtacaatatatcaagtttcaactctaaacaatcatgattaggaaaccaacttgtatactggatgcagtgcaataaagtaccttttcattgtcaaaaaataaaaactatatttaaaaaaattatttattaattgtt

SEQ ID NO: 97704 - DNA, 520 bp, Zea mays
  unsure (1)..(520): unsure at all n locations
agtttgtctgccatccgatatttgntcgactgctncggttcggaattcccgggtcgacccacgcgtccgcccacgcgtccgcccacgcgtccggtcgacctgatccgccacatgttcaagacccagtaggcgtagtagagagatagatttctgcctccctatcgtgggtcgtccccaatggcctttggtcgcagaccatctttgctgcttgtctatgctgagaataaatgtgaacggtgcccctggacgctggatccatgctggttttggacacgctgtctttttgtgtttaacttatctgctgccgtcctgtaacgaattcgcaagttttagttcttttgtgctttgttaaagaataaacaatgaggtttcagtttaaaaaaaaaaaaaaaaaaaaaaaaaaataaaaaaaaaaaaataaaaaaatataaaaaaaaaatataaaaatataaaaataaaaaaaaaaaaaaagggcggccgctctaaaggatccaagcttacgtacccgtgcatgcaaatt

SEQ ID NO: 97705 - DNA, 597 bp, Zea mays
  unsure (1)..(597): unsure at all n locations
ntgtcgtcggtgtgtatgatggagggatgtattgctcactcctccggaattcccgggtcgacccacgcgtccgcgagaacggcgtcctgtgggaggtcgagggaaagtgggtcacccaaggtcctgttgatgtggacattggtgccaatccatccgccgagggtggtgaggacgaaagcgttgatgacacagctgtgaaagtggttgatattgttgacacattccgtctacaggagcaacctncttttgacaagaaatcatttgtgtcttacatcaaaaaatacatcaagaatctcactgctgtgttggagccagagaaagcggatgagttcaaaaagggtgtcgagggtgcaaccaagtttctccttagcaagcttgaggaccttcaatttttttgtggtgagtccatgaaggatgatgcgtctgtggtattcgcctattacaaggatggtgccactaatccgacattcctctatttctctcatggtcttaaggagatcaagtgctangcgttcggcgaaattaggtacccattgttggtactatctatgtactattattatattcaaaactttagntgtcctggcttgaatgaaa

SEQ ID NO: 97706 - DNA, 519 bp, Zea mays
  unsure (1)..(519): unsure at all n locations
ccggtgtctgtgccatcgcactancattangactctcncggttcggaattcccgggtcgacccacgcgtccgcatgccaaaaatgagcagtgggatgaagagaatcttcatagggatgacgaggagtacgcgtctgatggtgcaggaggtgactatgaggacaatctccatagcccattgctgtccaggcaggcaacaggtgcggaagggaaggacattgtgcaccatggtcaccgtggaagtgctttgagcatgagaaggcaaagcctcttaggggagggtggagatggtgtgagcagcactgatatcggtgggggatggcagcttgcttggaaatggtcagagaaggaaggtgagaatggtagaaaggaaagtggtggtttcaaaagagtctacttgcaccaagagggagttcctggctcaagaaggggctcaattgtttcactttccggtggtggcgatgttcttgagggtagtgagtttgtacatgctgctgctttaagtagtcagtcagcactt

SEQ ID NO: 97707 - DNA, 611 bp, Zea mays
  unsure (1)..(611): unsure at all n locations
agatagatnnggggggnaaatatgtgtgtagtgatggaggaggaattggatncactcccggaattcccgggtcgacccacgcgtccgcccacgcgtccgaagcaagccatgtggaggagggctttatcgatggtcctgttcatggctggcgccgcgcggctcgccggggctgccggcgccggcgcgcagcagggcgtgtggagcatcatcacccggcccatgttccagagcatgctgagccaccgcggcgacagcgggtgccagggcgccttctacacctacgacgccttcatcgaggccgccagcaagttccccggcttcggcaccaccggcgacgagcagacgcgcaggcgggagctcgccgncttcttcggccagacgtcccacgaaaccaccggtggatgggcgactgctccggatggaccgtttgcctggggatactgccgggtgaaggaacagaaacagacggacccaccctactatggacgaggacccatacagctaactcataagtacaactacaggctcgccgggcaagcgcttgacctgaacctggtgggcgacccggaccttgttgcagaagaccccgtggtaggctttaagaccggcat

SEQ ID NO: 97708 - DNA, 597 bp, Zea mays
  unsure (1)..(597): unsure at all n locations
cgggtgtatcatcgtatggagatgcatggctcaccgctccggaattcccgggtcgacccacgcgtccggcgccacccacccacccactcgcttcagccgcctccgtcgcgcgtaccaagcaagtggagacaggatgccggctggccacggcctgcgctcgcggacgcgcgacctcttcgcgcgcccctttcgcaagaagggctacatcccgctcaccacctacctncgcacctacaagatcggcgattacgtcgatgtcaaagtgaacggcgccgtccacaaggggatgccgcacaagttctaccacggccgcaccggtcgcgtctggaacgtcaccaagcgcgccatcggcgtcgaggtcaacaagcaagtcaatgggcgcatcatcaggaagcgtatccatgtccgtgtggagcatgtgcagncgttccgcttgacagaagagttccgnctgaggaaggcgaagaatgaccagctgaaggcngatgccaaaaagtgcggcnaggttatcagcaccaagaggcagncattgggttccaagcccggcttcattgtccagggcaccaacaattgagaccggaacctccattccatatn

SEQ ID NO: 97709 - DNA, 515 bp, Zea mays
cggtgcttgtccactacagtacatcaggactctctcggttcggaattcccgggtcgacccacgcgtccgcccacgcgtccggcgggaagatgatgatgacgcgggcaccgatggggccgatggagggcgcggcggtggacgagatggtgcgccgcctcgtggagggcggccgaggcgggcgccaggtgcagctgtccgaggcggagatccggcagctctgcgtagagggcaagcgggtgctcctctcccagcccaatctcctccgaatccacgccccagtcaagatctgcggtgatatccatggccagtttgtcgaccttctgagattattcgatttgggtggttatcctccagcttcaacttacgtattcctcggagactatgtcgatagaagcaaacagagcctggagactatatgcttgctgctggcgtacaaaatccggtaccccgaaaatattttcctgttgaggggtaaccacgaggatgcaaagatcaacagagtctatggtttttat

SEQ ID NO: 97710 - DNA, 602 bp, Zea mays
  unsure (1)..(602): unsure at all n locations
tgtatgnggggtggtgtgtaatttgatgggagtatatggatngcctgaccggtccggaattcccgggtcgacccacgcgtccgcccacgcgtccggagagatcatcgatcgatcgacgaccatggcgaggcaacgacaagttgcttgcatgcttgcagctgctctgctcgttgcaacgacgtttgcgtccattcctacaaccgtgcactccatcggcgtctgctacggcacgctgggcaacaacctgccgtccagcagcgacgtggtgcagctctacaggtccaagggcatcaaaggcatgcgcatctactcccccgacgccaaagccctcgccgccctgcgcaactccggcatcgcgctcatcctcgacaccggcaacggcggcggcgtcctgggccagctcgccaggagcgcctcgttcgcggactcgtgggtgcagagcaacgtgcggccctactaccccgncgtcggcattaagtacgtcgcggtgggcaacgaggtgcanggcgaccacacgcgcaaacttcttcccgcgatacgcaaccttgaacccgcctggncgccgccggtttccgggattaaggggtccaagttggggcctc

SEQ ID NO: 97711 - DNA, 516 bp, Zea mays
  unsure (1)..(516): unsure at all n locations
tggtcctgaacaccgatattatagtatngctcgcccggtctcggaattcccgggtcgacccacgcgtccgcccacgcgtccggagaaattgcgtgaactctttgctgagtatggcaatattacttcctgcaaggttatgcgggattcgaatggtgtcagcagaggttctggatttgttgctttcaaatctgctgaagatgctaaccgagctcttacggagatgaatggcaaaatggttggaagcaagcccctttatgtagctcttgcgcagcgtaaagaagacagaaaggcaaagctacaggcacaattttcacaaatgcgtcctgttgcaatggcgccttcagtaggtcctcgcatgcccatgtttccacctggtgtccctggagttggtcagcagctgttctatggtcagccaccaccagccttcatcaaccctcaggctggatttgctttccagcaacctctgatgcctggtatgaggcctggtggtccaatgccgaactttatgatgcctat

SEQ ID NO: 97712 - DNA, 614 bp, Zea mays
  unsure (1)..(614): unsure at all n locations
tgtatatnnttgggttggtcaggtgtgaagataagagacttgagtgctcacncctccgtaattcccgggtcgacccacgcgtccgggcctgtcttctgccatcccggccgtataatttactagtgtgttcgtcctatatgtttagcagcggcaggtgtattgtgcgggtatgtaatggtattgcaactatattgggtgtaaaaccataataaatgtgggcaaatatgcaaggaaaaatactggatttctagcaagaaaaaagggcggacggtctagaggatccaagcttacgtacgcgtgcatgcgacgtcatagctcttactatagtgtacctaaattcaattcactggccgtcgttttacaacatcctgactgggaaaaccctggccttacccaacttaatcgccttgcagaacatacccattttgccagctggcgtaatagcgaaaaggcctcgaacgatcggccttcccaacaagttcgcaaactgaattgcgaatgggacactccctggagcggancattaaacgcgtcnggttttgtagctacacgcaaacgggaccgattcactttccaagggcctatcgccccatccttatggtttatttcccttc

SEQ ID NO: 97713 - DNA, 608 bp, Zea mays
ttatggggattcgaggctgtgaatgagggagggacggtatttgtaccacttccggaattcccgggtcgacccacgcgtccggtgtttctgttggagaggtgatgaagagccctgtgttcagtgaggatgagtcatcggagaactgcttctgggttgatttgggacagagtccacttggttcaaaccattcagagcaatcaagcaagggaaaattgggctctccattgccagcatcctggttttctggcaggaagagtgctcagaaagcgtcacccaaagtgccattcaaactgtcaaggagtcctattcatgataaccatgttatgtcatttgatgcaaccgtgaagtctgtatcacaagagcccaggcccgataaaggggatctggatgaagataattcacatattaacatcaagaatactcctatcagcgagattgaagaagataataaagatgctaaagtaaataagagggttgtaaaattttcttgtgccaacgacacttgctaaagtgaaagctgtgcaacctctgtttttgggagcttgtcccaccgtgagaaatgcctcaccattcgagattttttcaaaaagttcaaccgaaaccaaagt

SEQ ID NO: 97714 - DNA, 605 bp, Zea mays
gtataggtagtcggtcttgagatgaattagttctcatcgcatgacgaccggtcctgaattcccggtcgacctacgcgtccgcccacgcgtccgcccacgcgtccgctcacacagcaaataccccacaaggccactccaaagaccgagtagtggaaccgaagatgttcgggaacatcggaaagatccccatcatcggcgacctgacgggcagcaacaagaatgcgcacctcaagggcaacgtggtgctcgtgcgcaagaccgtgctcggcttggacgtcaccagcatcgccggctccctcctcgacggcatcggcgagttcctcggccgcggcgtcacctgccagcttatcagctccaccgtcgtcgaccctaacaacggcaaccgcgggaagttgggcgcggaggcgagcctggagcagtggctgctgaacccgccgtcgcttctgtccagcgagaaccagttccgcgtcaccttcgactgggaagtggagaagcagggcatcccgggcgccatcatcgtcaagaacaaccacgccttcgagtcttcctcaagaccactaaccttaacgacgttcccggccaccggaccatcgtcttcgtcggcc

SEQ ID NO: 97715 - DNA, 515 bp, Zea mays
  unsure (1)..(515): unsure at all n locations
agctgtgtcttgttcccaggctttcagnaggnnatcttcggntcggaattaccgggtcgacccacgcgtccgcccacgcgtccggagaaattgcgtgaactctttgctgagtatggcaatattacttcctggagggttatgcgggattcgaagggtgtcagcagaggttctggatttgttgctctcaaatctgctgaagatgctaaccgagctcttacggagatgaatggcaaaatggttggaagcaagcccctttatgtagctcttgcgcagcgtaaagaagacagaaaggcaaaactacaagcacaattttcacaaatgcgtcctgttgcaatggcgccttcaataagtcctcgcatgcccatgtttccacctggtgtccctggaattggtcagcaacttgtctatggtcaatcaccaccagcctttatcaacccttatgcttgatttgcttttcagcaacctctgattcctggtatgatgcctggtggtccaaagccgaactttatgatgcg

SEQ ID NO: 97716 - DNA, 610 bp, Zea mays
  unsure (1)..(610): unsure at all n locations
tgattatatgtgttactcgggctatgnccgaactgcccgcactagcnacngctcctaattcccgggtcgagccacgcgtacgcaacaagctgccccgcagcaacgaacacgaaccttggctgaacgaagctgaagtagttcgatgtgaaccgagtatggcaaacgcgccgaggatcctggccctcggcctgctagcgctcctgtgcgctgccgccggccctgccgtcgcgcagaactgcggctgccagcctaacttctgctgcagcaagttcggctactgcggcacgaccgacgcctactgcggcgacgggtgccaatcgggcccgtgccgctcgggcggcgagggcggcagaggctgatgcagaagcggaggcagtggcggtgcgaacgttgctaacaaggtcagcgacgcgttcttcaacggcatcaagaaccaggccgggagcgggttcgaaggcaagaacttctacacccggaacgcgttccttagcgccgtcaacaagtcccgggcttttgccatggcgggaccgtatgttgaggcaagccccaaaacggcgacttatttgagcacgttaagcacgagaacggacttttttggtacattagccag

SEQ ID NO: 97717 - DNA, 596 bp, Zea mays
cactggttatggaaagagaatctcctcgcaaaactcaccggtcctgaattcccgggtcgacccacgcgtccgcccacgcgtccgagaactagagcttcggaaacttgaagtggcagtacaggccattcatgagaacttgatatacctcaaagaaaaggaagcagagatgcgaactgtgagtgagacaacaaattcaagggtcgtctggttcagtactctgtcgctatgggtctgcattgcggtatcggttttgcaagtccgacaccttcaagggttcttcagaaagaagaagctcatttagagtctctctgtaagatgttgcgctgtggttcagatgttgttcaccttggaagggtacaattttgccttttacatggaacatttcacaccagtgatgactgatgggctacttgtactgtatgtaatttaagtacgattggatcgaaaatctatatttcagggaaaaaaatcttataaaaaaaaaaaaaaaagggcggccgctctagaggatccaagcttacgtacgcgtgcatgcgacgtcataactcttctatagtgtcacctaaattcaattcactggccggcgtttacaaccc

SEQ ID NO: 97718 - DNA, 519 bp, Zea mays
  unsure (1)..(519): unsure at all n locations
agcgntgcttgtnnccagcctggaccgcatgaacgtctcggttcggaattcccgggtcgacccacgcgtccgcaaggacacaacatatgcttgatcagctcactgatcttcagaggagggagcaaatgctgggtgaagcaaataagtgccttagaagaaagctggaggagaccagcaaccaggtgcatggccaagtgtgggagcacggtgccaacttactcggctacgagaggcactctcctcaacagcaggccccatcacatgttggcaatggtttgttctttcatcccctggaagctgcagcagagccaaccctgcagatcgggttcgctcctgagcatatgaataacttcatgccaacatggctaccctgaagatggatcttgaggcaaaggaaataaataaagatgcggtggcagcatcatactctatgcaagctaagaatgacagctgtgtttcagtcacatatatgatctagtctgtgtgtcaatgtgtcgaaaaacatgtctgtgattttgt

SEQ ID NO: 97719 - DNA, 618 bp, Zea mays
  unsure (1)..(618): unsure at all n locations
tgtattgcgtctgctgtatgctgggcatccgtccgcctgacgcatgacctactcggtcctgagttaccgggtcgacccacgcgtccgcccacgcgtccgcccacgcgtccgcatgaaattcggcaacgggcgctacctcaagacgggggcgtacggccactttggaagggacgaccctgacttcacctgggaggtggtgaagccactcaagtcggagaaaccttctgcctaaggcggccttttttttcagtaagaagcttttggtggtctgctgtgcttaatcatgcttttatatggcttctacatgttgtggttctttcttgatctgcaccgcgcttatcgantgtgttgtactgccctaataattggtgcttatgatgactgtttctggttttgttagttatgtttgaatgcttttaatctatgaatgaatctatcagccacttatttttttgagaagtaatatttatatataaagtgggcgttctaattttaaggatccatcttaatgtactcgtgtgatacgatgttattattatataattaatataacattaagtaattcatataatattcttttcataagttctttatatgtttaaattgttccttatcttg

SEQ ID NO: 97720 - DNA, 605 bp, Zea mays
tattattgcgatctgcgcctggtgtgccggtaccgtcctgcatagcatgacctaccggtcctaattcccgggtcggcccacgcgtccgtgacattgtaaatgttgatgtaactgtatactataaaggtgttcatggtgatttgaatgagacggattttgttggaaatgttgatgaagcttccaaacaccttgtacgttgtacctatgagtgcttggagaaagctattgcgatagttaaacctggagttcggttccgagaggtcggagaagtcataaacagacatgtttcaatgtcaggtttatctgtggtgaaatcttattgtggccatggcataggggaactgtttcactgtgccccaaacattcctcattattcaagaaacaaggccgttggtatcatgaaagctgggcagacatttacaattgaaccaatggtcaatgcaagggtttggaatgatctgttgtggcctgacgattggacttcaatgactggagattggaaaccgggtgcctaatttgaacttacacttttggtagcgaaaccagaatttaaattttacacgtcgtttacccttattaacggcgtttttttcatggttgaaaaa

SEQ ID NO: 97721 - DNA, 599 bp, Zea mays
  unsure (1)..(599): unsure at all n locations
tagaattnnntagggtccgttgctgatnaactcaccggatcattcactgtatgcacttaccggtcctgaattcccgggtcgacccacgcgtccgcttgttccagaaaatagaaggtgtggaagtatgtctatttggaatgtatgttcaagaatttggtgctgaatgctctttcccgaaccagcgtcgtgtttatttgtcatacttggattctgttaagtacttcagacctgagattaaaacagtatctggagaagccttgcgtacatttgtgtatcatgaaattctgataggatatcttgaatactgtaaactgcggggattcacaagttgttacatatgggcttgtccacctttgaagggtgaagattacatcttatattgccatcctgagattcaaaagactccgaaatctgataaactgcgtgagtggtatctatctatgcttcggaaagcttctaaggaggaaattgttgttgagctcacaaatctatatgaccatttcttccttactatgggggaatgcaaggctaangtgactgcttctcgcttgccatatttcgatggagaatattggccaagagctgcagaagatatgatc

SEQ ID NO: 97722 - DNA, 596 bp, Zea mays
agtggcggggaggcctgagcacgtaaactcaccgaaaacctactcacgactcaccggtccggaattcccgggtcgacccacgcgtccggtccaaaatccagaccgctggtaggagtatctcgtagacattgaacaacggctgcatggcgagcgcctgcgccacctccatccccctcgtctcggcgccctctgcatgcccgtccaagaagaccaccgtcgccaggttccggcgccgcacggcgacgtgcagggccagcagcggcggtggcggtggccggggcggcgaaaatgatggcctcctttggctgccccggcgggacgtgatgctcaacggcctgtccagtgtcgccgccgggctcgcctggtacccgggcgtcgcgtccggcgcggatgcggtgtgcaccagggccgacaaggtgaacgagaagaccgtgcagtgcacggacccggccgggcaagctccgtgccctctggtgtcgccgaccgaccccgtggacttcaagcccggaagcaaggtgacgcgcaatccgcaagcggtgcatctcctgagcccggagtaccaggagaagttcaaggaggccgtccccaagattaaa

SEQ ID NO: 97723 - DNA, 591 bp, Zea mays
  unsure (1)..(591): unsure at all n locations
agggcnggaggccgtattacgatactaccagcgaagtactgtaagactcaccggtcctgaattcccgggtcgacccacgcgtccgcccacgcgtccgcccacgcgtccgcccacgcgttcgcccacgcgtccgcccacgcgtccgtgatgcacgacttcctgataatatcatggcatatgacaatgctgtttcggcgcttggaaaaatatgccaatttcatcgggatggtattgacgcagctcaggttgttccagcctggcttagctgcttgcctataaaagacgacaaggttgaagctaaagttgtacatggacagctttgctccatggtggagaggtcggatgctgaaattcttggtcctcacagtcagtatcttcctaaaattgtttcaatttttgcagaggttttgtgcaatggaacagaacttgccactgatgaaactagaaacaggatggtgaatgtcttgaggcgtttccagcagactttgcctnctgattntcttgcatcgacgttttccaacttgcaaccgcagcaacagctactgctacagtccatcttgtcgacatagttgttttttctgtcgctgcaag

SEQ ID NO: 97724 - DNA, 557 bp, Zea mays
  unsure (1)..(557): unsure at all n locations
agagaggatggtgagaccgccataacagcaactcatcgcaggtcccgaattcccgggtcgacccacgcgtccgcccacgcgtccgcccacgcgtccgcccacgcgttcgctttcctttcctttcctgcagacaagctagaaatctcgcctagctcgtcgtcggagaccaaggagaagagcaagggggggcgcagaggcagaggcttgccagcctacctagctcgtcggggccctatggagatccagcaccaccgggggctgggcaactccaaggttgtcaaggtgcagagcgaggaggcgtgggatctgttcaccgatcaagcgagcaacgagggccggcccgttgttgcccatttcggggcgtcatggtgcgtgacgtccctgtccatgaactacaagtttgaggagctggcgcagacccaccccgaggtcttgttcctctacgtggacgtcgacgatgtccatagtgtttcatccaggtacggagtgaaggccatgccgacgttcttcctcatcaagagcaagganngtgtgggngaggatcgtncgggccgaac

SEQ ID NO: 97725 - DNA, 561 bp, Zea mays
agagcgattgctgagtccagctctcacgcatcactcacaggtccgtaattcccgggtcgacccacgcgtccgcccacgcgtccgcacacacacagacaagtggtttccaaagccaagtgtgtgtactagcaaccagcgggctcgggcggcagcaggcagccatcatgtcggaggagaagcaccaccacttcttcaaccaccacaagaaggacgaggagcagcccgtcggcgagtacgggtactccgagaccgaggtggtcaccgccaccggcgagggcgagtacgagaggtacaagaaggaggagaaggagcacaagcacaagcagcacctcggcgaggccggcgccatcgccgtcggcgccttcgcactctacgagaagcacgaggcgaagaaggaccccgagcacgcgcacaggcacaagatcacggaggaggtcgctgccgcggcggccgtcggcgccggcggctacgtattccacgagcaccacgagaagaagaaggaccacaaggacgccgaggaggccatgcgcgagaagaagcaccaccacctcttcggctgac

SEQ ID NO: 97726 - DNA, 592 bp, Zea mays
  unsure (1)..(592): unsure at all n locations
tgggcntgtagggcgtgaactgagacttccagctcacctccgcatgtacttaccggtcctgaattcccgggtcgacccactcgttcgcccacgcgtccgaacgtcttcctttgctatacgcttggaagcacattgttcaaatcgttgacgagcattatcaatcaccctgctgagattgtgaatatgcttgccaagagcctgcctggaagcgcaacgttcttcctcacgtttgttgcgctgaagttcttggttggctatggccttgagctctctcgcctggttcctctcatcattttccacctgaaaaggaagtacctatgcaagacggaggaagaagtgagagcggcatgggctccagtggatctgggatataacaccagggtaccaaatgacatgctcatcgcaacagttgttctgtgctactcagtcattgcgcctttgattattccgttcggtgtcgcatactttgccctcggatggcttatagcaagaaatcagatcctgagagtttacgttcctagctacgagagctacggacgaatgtggccacacatgcacacgaggatcatcgcggctcttgatggttaccaan

SEQ ID NO: 97727 - DNA, 560 bp, Zea mays
  unsure (1)..(560): unsure at all n locations
tgtgcggttgctgattaagtatctcatagtatccactcacaggtccggaattcccgggtcgacccactcgtccgcccacgcgtccgtagcacaagactttactactcaagctgctttatatactcatcaccaatacattgcagggttcatcatgacaggggcttttgctcatggagctatttttttcattagggattacaatccggaacagaatgaagataatgtattggcaagaatgttagaccataaggaagctatcatatctcatttaagttgggctagcctcttcctaggattccataccttgggcctttatgttcataacgacgttatgcttgcttttggtactccagaaaagcaaatcttgattgaacctatatttgcccaatggatacaatctgctcatggtaagacgacatatgggttcgatatactcttatcttcaacgaatggccccgctttcaatgcatgtcgaaacatatggtttgcccgatggttgaatgctgntaatgagaatagtaattcgcttttcttaacaataagacctggggatttcttgg

SEQ ID NO: 97728 - DNA, 591 bp, Zea mays
  unsure (1)..(591): unsure at all n locations
aggcgtgtgagggtgatactagtacttcagctcactccgtaatgacttaccggtccggaattcccgggtcgacccactcgtccgcccacgcgtccgggaccccactgagcaggttgagattgacaacttcatggtccaacagcttgatggaacctccaatgagtggggctggtgcaaacagaagcttggagcaaatgccatccttgcggtttcacttgctgtgtgcaaagctggagctatggtgaagaagattcctctttaccagcacatcgcaaatcttgctgggaacaaaactctggtgctccctgtacctgcctttaatgtgattaatggagggtcacatgctggaaacaagcttgccatgcatgagttcatgatcctnccaactggtgcctcctcgttcaaggaggccatgaagatgggagttgaggtgtaccacaacctgaagagcataatcaagaagaagtacggtcaggatgcgacatatgttggngatgaaggtggttttgcacctaacattcanngaaacaaagaaggccctgaactattgaaggcagccatagaaaaggctgcttcacttgaaaggtgtca

SEQ ID NO: 97729 - DNA, 591 bp, Zea mays
gagggctgagtggtgttgctagtacttcacttctcatcgtactgtccttaccggtccggaattcccgggtcgacccacgcgtccggagcgtgtggcaccgctcggtggtgaactcggaccgggagcgcatgtccgtggcggggttcctgtgcccgtgcaaccaggtcgtgctcggccccgcgcggaagctcgtcaccgaggacaccctggccgtgtacaggaactacacgtacgacgagtactacgccaagttctggagcaggaacctggaccaggagcactgcctcgagctcttcagaacctagcgaatcggatacggatggatggatacattacatacgcgccctctgtttttctccatgacgttagaagaacacgttctgcaatgtttgtccattcaaggtggtatcaatcaaggctgtggtcgttgcaattcttccgatccatatacatgattaaatgctttgaaagaaaaagaacaatagaaacacatgtattatggcactactagtgtttttaggaacaaggaaagaggggttgccccctgctggctatatataataaatatcaataaaggtaaggctggagaca

SEQ ID NO: 97730 - DNA, 561 bp, Zea mays
  unsure (1)..(561): unsure at all n locations
agatgccgttcgcgtgattacgcatcatcacgcatgcactctccggtccggaattcccgggtcgacccacgcgtccgcccacgcgtccgggagtggaagaccaagccgtactgccggaagcacgacaacttcgcgctcgcccgcgtcaaggagtggtctctgaagccgctcccctccggcgcggcgccgcagtgcacggtcaacagttcggccaccgcgttcgtgctgtccacgggcgggttcaccggcaacccgttccacgactacacggacgtgctcatcccggccttcatcacggcgcacccgctccgcggcgaggtccagttcctggtgagcagctacaagtcgtggtggatgaaccgctacatccagatcttccagcagatgagccggcacgaggtggtggacatcgacgcggacgacgaggtccggtgctaccgcagcgtggtggtgggggcgacgttccaccgtgagctgggcgttgacgcgtncaaatcgccgtcggggtacttcacggtcgacttncgcaagatgctgcgcgacgcgttccggcttgagcgc

SEQ ID NO: 97731 - DNA, 559 bp, Zea mays
  unsure (1)..(559): unsure at all n locations
ggatgccgttggctgattcagctcctaccgcatcagctaccggtccggaattcccgggtcgacccacgcgtccgaagcaagccatgtggaggagggctttagcgatggtcctgttcatggctggcgccgcgctgctcgcgggggctgccggcgccggcgcgcagcatggcgtgtggagcatcatcacccggcccatgttccagagcatgctgagccaccgcggcgacagcgggtgccagggcgccttctacacctacgacgccttcatcgaggccgccagcaagttccccggcttcggcaccaccggcgacgagcagacgcgcaggctggagctcgccgccttcttcggccagacgtcccacgaaaccaccggtggatgggcgactgctccggatggaccgtttgcctggggatactgccgggtgaaggaacagaaacagacggacccaccctactatggacgaggacccatacagctaactcataagtacaactacaggctcgccgggcaagcgctgaacctgaaccntgtgtgcgaccccgaccttggtgcgagagg

SEQ ID NO: 97732 - DNA, 708 bp, Zea mays
  unsure (1)..(708): unsure at all n locations
aggggctgtagtagtaatgccagggtattntagttggtcggtgcaggtatcgtaattcccgtgtcgacccagcgcgtctcgtgcacgcgtctcggattaactcttgaaacaacaacgtattaattatctcttgctataaaacaggtctggggttttatcgtttcttaccatttgcgtaactatgagtaatcgagaagcatatttcaagtcccaggcaantttcaataanttatctggtctctagacaccagaataataatagacatttattcctcatattatacacatataagttcaaattctcaatctgaatacttaatgaatacttccaactcagttaatttatagataacatacatattcgaanagccttaagtgtctcgtattgttagaatagttttaaattcgaatagtacttcagacttcnnatatattaaangtaannnagtaatctcaaatttgtgaattctatgggtgtttgtgtatatagaatataaaatataattaatgaaataaataaataacgggctggcccgcttctaatagngtatctcaaagcttaacgtaacgtcgttgcatttgcgacggtcattagcttctttctataagtgttcaacctaaaattcaaattcacttggcccgtcgtttttacaaacgtcttgacctgggaaaacccttgtcgttatcccaacttaaatcgcctttgcn

SEQ ID NO: 97733 - DNA, 599 bp, Zea mays
  unsure (1)..(599): unsure at all n locations
tgggcgttaggccgttgctgatagttcagttgagctangtactgctattaccggtcctgaattcccgggtcgacccacgcgtccgcggacgcgtgggcggacgcgtggtcggacgcgtgggctgactcgtggtcgccaccgtgctactggaaagcgatgcctaccataccacactgctgtcagtctctggagcatttangtggtctggatcaatggaagggttgtgtcctagccagccggcaaagatgagctgctgatggtaatgatgatgactagaggccactgctaccctactacgtaccctcctctttgtgtgcttgcatcccgtcccgttagaccatcgaagggagaattacccaaagctttctggttccggcctggcttatggcgtcccggccgtttaatttactagtgtgttccgtctatattgttagcaacagcaagtgtattgtgccggtatttaatggtattgcaactataatgggtgctaaaccattattaatgttggcaaatttttccatgaaaaaaagggttttacatttaaaaaaaaaaataaaaggggggccgctctataaggtcccaagatttcatacacgttc

SEQ ID NO: 97734 - DNA, 586 bp, Zea mays
  unsure (1)..(586): unsure at all n locations
agtgggtagtgtgtgcagctctcgcagctctcatcgcaggttccgaattcccgggtcgacccacgcgtccgcgtcacccatggccactgccgaggtccagaccccgaccgtcgtggcgaccgaggaagcgccggtggtggagaccccggctccgcccgccgtcgtgcccgaggaggctgcccccgccgccgaggccaaggtggaggagccagctgccccggcggagaccgagccagctgccgccgctgagcccgaggcggcccccgtggcggcggaggaagagacgccaaaggaggaagagacggcaaaggaggcggagccggagccggagccggcggcggctgaagaggtgaaggaggaagcggcagcgcccgctgccgagacagaagcagaaccggcagccgctgagcccgaggctgctgctgctgctgaggagcccgcggcggctgagccggccgctgaggagcccgagaaggccgagccggccgctgaggtggccgagaaggccagcgagtgatgccgtgcgccgtacgcgcactgcggcngcngacaagcgggtcggagatccatgtctcaacgtgcgccc

SEQ ID NO: 97735 - DNA, 586 bp, Zea mays
  unsure (1)..(586): unsure at all n locations
tgtgttagagtgcgttcctgaagagtccagttcatcgacgcangtacaaccggtcctgaattcccgggtcgacccgctcgtccggaacagctcgtccgagaccatgaagagcagcctacacctggtgctgatcctgtgcctgcagtccggtctggtcatgggcgtcttcggcgctttggctaaagaaaatgccctggttgagagcaaggccatcgacatcaacccggggcagctcaagtgctgcaccaactgcaacttctccttctcggggctctacacctgcgacgacgtcaaaaaggactgcgaccccgtctgcaagaagtgcgtcgtcgccgtgcacgccttctactcgggcaacaacaagttcaggtgcaccgacaccttcctcggcatgtgcggccccaagtgctagatcagagaggaagaacgcgcgctgctgctagctgctatagcttcgttctttcgtcgtcggcccgtgcatggttcacgtacttgtgtgtgtgctactacgatacgtactggcttcttgtgtggtgggtctggtcctctcttgacaatgcacttgccccaacaataaaccttgttt

SEQ ID NO: 97736 - DNA, 595 bp, Zea mays
tgtcgttggaggccgtgactgattaacctggggagctaagcacgtatcgtctcggtcctgaattcccgggtcgacccgcgcgtccggcttctcctccccctccggttcgggttcgggttcgtgaggttctccggggttcgggttcgtgggggagcggatcgagatggcggcgtctgatgttgagtaccgctgcttcgtcggcggtctcgcctgggccacggacgaccactccctccacaacgccttcagcacctactgcgaggtcctcgagtccaagatcatcctcgatcgggagacgcagaggtcccgcggcttctgcttcgtcaccttcttcacggatgaggcgatgcggaacgccatcgaaggcatgaacggcaaggagctggacggtcgcaacatcaccgtcaacgaagtccattcccgcggcggccgttgaagccgtagccgttgctggtacagtggtggccgtggatgctgccgctacagccgttgcaggcgcccttgatgtcggatggtgctactgccgtggcggcagcttcaggtgttgccgttgaggttacaggtggtgttggcggtggtatctgcgtgtgaaccc

SEQ ID NO: 97737 - DNA, 565 bp, Zea mays
agtgccgcttgctagagaaagcactttaagcatctacttccaggtccgtaattcccgggtcgacccacgcgtccggtgtatagggagcaggagcaagaccactcaactctttgctgttatgctattggagatgcttctgaataattgcggagagcctgtccataggcaggtcattgataatggccttcttccaatacttgtgaagatagtgaagaaaaagacggatttaccagttcgagaaaaaatatttcttctgttagatgcaacacaaacatcccttggtggagctaaagcaaggttccctcagtactatgaggcatactatgagttggtgtctgctggtgtgcaattttcaaatcggccaaatgttcttgtcacacgagcagaagtgccagtcccagaaacgagaacagaaccaaataatgaaagtttatcgacccgtttgactgaagctcaacaagaagtgcacactcagcctgttcctgatgcaagtatagtccagaaagcctctagtgtcatggaagtattgagggatgtgcctaattctatggatcctatgcaccct

SEQ ID NO: 97738 - DNA, 567 bp, Zea mays
  unsure (1)..(567): unsure at all n locations
agagccggntnnntgaagtacgatactacaagcaactcatcgcaggtacctaattcccgggtcgacccacgcgtccgcccacgcgtccggcagcagccaattcgctcgagttcagatcgagcgcgcgccaagcaagtcttccggccggccgcgaagagcgcaatcaagcaagacaagatggtgaagctcgccttcggaagcgtcggcgactccttcagcgccacctccatcaaggcctacgtggccgagttcatcgccaccctcctcttcgtcttcgccggcgtcggttccgccatcgcctacgggcaactgacgaatggcggcgcgctggacccggtgggcctggtggcgatcgcgatcgcgcacgcgctggcgctgttcgtgggcgtgtccgtcgcggcgaacatctcgggcggccacctgaacccggccgtgacgttcgggctggccgtgggcgggcacatcaccatcctgacgggcgtcttctactgggtggcccatcttgctggcgccaccgtggcctgccttgttctccggttcgtcacccacggcatggccattcccacc

SEQ ID NO: 97739 - DNA, 547 bp, Zea mays
  unsure (1)..(547): unsure at all n locations
cgttgctagatatagtataagtacgtaatgtangactcnnnnnnnntnnnnncccgggtcgacccacgcgtccgcccacgcgtccgggccgccctttttttttttttttgaagtataaaaaacattcgtttattcgtgtggactctggacagaatcaaagcctttcctgaactctagtacacgttaacgcacggaaaagtacacgaacactgagcttgctgttacaggcttacagttacagcgttcagtaaccagcaggtggagaccgtttagccagaaaccccttgtagtgctccaacagccttccggcgtccggcatcacctccttcacggcgtccaccgccaagaagcgctccgcccacgccgtcaaggccgggaacttggcctcgtccagaagctttacgccggccgcctcgtccaccaccctgatccacaccacgaagctcccgagcgcgatgtccacgagcccgacggcgtcgccgccgaagaagggtttccctttggagcactccctgaacgcctgctccaagccggttnnnctttttcc

SEQ ID NO: 97740 - DNA, 512 bp, Zea mays
  unsure (1)..(512): unsure at all n locations
agctcttgtgcccacgcataganagcatcctctaccggttcggaattaccgggtcgacccacgcgtccgcccacgcgtccgggaacctgcccctggctcaggcccgatgggaagacccaggtgacagtggagtaccgcaacgagggtggcgccatggttcccatccgtgtgcacacagtcctcatctctacccagcacgacgagacagtcaccaacgacgagattgctgctgacctgaaggagcacgtcatcaagccagtcatccccgagcagtacctcgacgagaagacaatcttccacctcaacccgtctggccgcttcgtcatcggcggacctcacggcgacgccggcctcactggccggaagatcatcatcgacacctacggtggctggggagcccacggcgggggcgccttcttcggcaaggacccgaccaaagttgaccgcaacggggcctacgtcccgaggcaagcttgcaaaagcatcgtcggcggcggcctttgccggcgggc

SEQ ID NO: 97741 - DNA, 547 bp, Zea mays
  unsure (1)..(547): unsure at all n locations
gtgggtatcgaatcgatataagactctcatcgcangactcaccggtcctgaattcccgggtcgacccacgcgtccgcccacgcgtccgttggcttctcctccccctccggttcgggttcgggttcgtgaggttctccggggttcggtttcgtgggtgagcggatcgagatggcggcgtcggatgttgagtaccgctgcttcgtcggcggcctcgcctgggccacggacgaccactccctccacaacgccttcagcacctacggcgaggtcctcgagtccaagatcatcctcgatcgggagacgcagaggtcccgcggcttcggcttcgtcaccttctccacggaggaggcgatgcggaacgccatcgagggcatgaacggcaaggagctggacggccgcaacatcaccgtcaacgaggcccagtcccgcggcggccgtggaggcggcggcggcggcgggtacggtggtggccgtggaggcggcggctacggcggtggcgggcgccgtgatggcggcggcggctacggccggggggtttggggggccc

SEQ ID NO: 97742 - DNA, 552 bp, Zea mays
  unsure (1)..(552): unsure at all n locations
atcggcttgctccgaaattaaaanagcttagactatcatcattcggtcctgagttaacgggtccagccacgcgtccgcccacgcgtccgttggcttctcctcccactccgtatcgggttcgggttcgcgaggttctgcggtgtatcatttcaagggtgagcggatcgagatggcaacgtctgatgtagagtaccgatgcttcatcagcggactctcctgggccacggacgaccactccctccacaactccttcagcacctacggcgaggtcctcgagtccaagatcatactcaatcgcgagacgcataggtaccacagcttatgctacgtcaccttctccactgaggaggcgatgctgaacgccatcaagggcatgaactgcaaagagctggacggccgtaacatcaccgtcaactaggcccactcccgcagcttcacgtgatgcagaggctgaggcggatacagttgtggtccaataggcctgcggctacggcagtggcagtcgccgtgaaggctgcagctgctactgccagttaaaatccccccgaaaat

SEQ ID NO: 97743 - DNA, 558 bp, Zea mays
  unsure (1)..(558): unsure at all n locations
ngaatgctagtgcgntgtcatgancctagctctcatcgcacngacaaccggtcctgaattcccgggtcgacccacgcgtccgaggccatcgacgaggtactcgaggaacgccgcagcgaccagctcgcggcgatgctcaagacagcggtgtggtgcttgacgtcgccggagaagcacttcgcggaggtgatccggaggtccatcgtcgggctcggtacggacgaggaatccctgacgagggtgatcgtttcgcgcgccgagatcgacatgaagaaggtgaaggaggagtacaaggtcaggtaccgcacgacggttaccagcgacgtcaacggcgacacttccggatactacaattccatcttgctcactctagtcggccctgagtgaatgagcatggccacgagtgatccttgttggctcaagttgagaccgtagtgcaagctcatcaaagaaggaggtgtggccaatttgacatctacaactatagaaggcactaaagctttaacttttctagtcattgttgattgtaccaaaaaagaataattaatttattattaa

SEQ ID NO: 97744 - DNA, 553 bp, Zea mays
tgttgccaggggttttatgacattactctcatcgcacgcacttaccggtccggaattcccgggtcgacccacgcgtccgcccacgcgtccggctctcctcctttttctccactccgcttttgcttggttccatcgggccggagagggagaagctagctagctagcagcagctctgttggtgtgtgtgtgtgtgtgtgtgtggagggtagctgcagctggggctagctggaaaggtcgggagccatggggaggggccgggtggagctgaagcggatcgagaacaagatcaaccgccaggtcaccttcgccaagcgccgcaacggcctgctcaagaaggcgtacgagctctccgtgctctgcgacgccgaagtcgcgctcatcgtcttctccaaccgcggcaagctatacgagttctgtagcggaccgagcatcacgagaacacttgaaaggtacgaaaaaaacagttatgcaagcccagatactgctgtacagaacatagagaacgagttagtccagaacagccgcattgaagttaccccccttttttttaaaa

SEQ ID NO: 97745 - DNA, 515 bp, Zea mays
  unsure (1)..(515): unsure at all n locations
agcgatgtctggnccaggttgacagcgcantctttgtacctggttcgaattaccgggccgacccactcgtgcgcccacgcgtccgctcacccttggccgtcttcgacgagcgccaccacggtaggatgacggggcttaggaaccacaatatcaagacgtttacctgcaagacgatcgtgaaggaccttagctcgtacaataaggtatgttccaaggacgctgccaagactcccgacttgataaagtatgccgctgatacctactacctgttacagcaatagtaagatctggctgattcaaggatcacgcgttaacactctctctgacgacttttaactcgactggttgacttgaatgccacactggctgtactcaatgaatctaaactcttggtgctttagactgtataattctatattcataatttgtacttgcaacaatattttatccaacagtagatttcactcgaatagctccccgatgtttgacaggtccccacatacgattcatgcttt

SEQ ID NO: 97746 - DNA, 514 bp, Zea mays
  unsure (1)..(514): unsure at all n locations
agctttcctgccccagcctacanagnatcgacgctaccggttcggaattcccgggtcgacccacgcgtccggaaaatcttttcgccaatcggatatttgtccttttcgatgtcaagaaaaggggtgtcatggattttggtgactttgtccgagctctaaatgtgtttcatccaaatatcccaatggaagaaaaagtcgatttctcgttcaagctatacgatatggatggcacagggtttattgaacgaaaggaggttaagcagatgttaattgctctcctaggagaatcagaaatgaggctatctgatgagatcattgagacaatcctggataagacattttcagatgctgatgcaaatcaagatggaaaaatagatagaacagagtgggagaattttgtcacaagaaatccttccttgatgaagataatgactctgccatacctcaaggacattacaacaacattccctagctttgtgtttaactcggaagtcgacgatctcgtcacgtgacc

SEQ ID NO: 97747 - DNA, 550 bp, Zea mays
  unsure (1)..(550): unsure at all n locations
ttgccgtttaccctgaaaaagggtctcatcgcacngacttaccggtccggaattcccgggtcgacccacgcgtccgcccacgcgtccgaccacgcgtccgtttcgttcctggaggaatagcttcgcatcatattgctgcgggtactttgggcatattagcgggcctattgcatctaagtgtccgtccgtctcaacgtctatacacagggttacgtatgggcaatattgaaactgtcctttcaatagtatcgctgctgttctttttgctgctttcgtaattgccggaactattttggatggaacagcaactaccctaatcgaattatttgggcctactcgttatcaatgggatcagggatactttcagcaagtaatatatcgaagagttaacgattggttagccgcaaatcttaatttattagaaacttggtctaaaattcccgaaaaaattagcctttatggttattatgggaaatattcggccaaagggggaatattcagaacatgcttaatggacaatggggatcggcttttatatttcccttttttg

SEQ ID NO: 97748 - DNA, 557 bp, Zea mays
agtttgtccaggtgcttttccgtcacgtctgcatcgacgcacatcctgatttccggtcgacgccacgcgttcgccacgcgttcgctacgcgttcgccacgcgttcgctacgcgttcgccacgcgttcgtccacgcgtgcgccacgcgttcgatttaagaaacaacaatcgaaacttaaattaccattgctgatggtttattcgaaagactcaaactcatatataaagtaaagtaatccaatttggattcttgtgtttgttataagaaaaataaaatctcttacattactcttgacttcattctactattgctaaaaaacttcattttatgtatcgtttagtcaaaaattttctcaggttcagcagcctactatattatattgtttgacttgtggtgttactaaggttatagatctcttaatttgtaaccttaatttccattatttggtgtctcttttaaaatttcttatctgggaaaattttgtgtttccctatcttaaaacctttgttgtacatcatctttttttcatttttgaatttttgatatttttttactcg

SEQ ID NO: 97749 - DNA, 547 bp, Zea mays
tgtgcgatgggatgactcatgctccctccgcacgactcaccggtccggaattcccgggtcgacccacgcgtccgcccacgcgtccgaccatgcaaaatatccatgcctgcgagaactggctgccaagacgggtgatgagcgcctggcgcatcggcgggatacttcacgccctggaagggtggaccgtgcacgagtgtggggacgccatggtgcatgctgagaaagcatggtcagctgctattaggcacggattcgttcctttgacgaaagcctgaaagcctgtacgcaactctagacgccattcgacgatggctggaaaactacgtttcagcaatcggtagcacaaattctccccagctacagaagccgactatatggtctgcttgacgagtcgtccagggaggcacggcgtgatgaatggcgaccttgattccaacagcatatagtaactatatatatagttatgttgtggcattgtatgatgcaagtgcgagaaactgctttgtggctgtgtgggtgacatatacaaattttaaattttttaaaa

SEQ ID NO: 97750 - DNA, 516 bp, Zea mays
  unsure (1)..(516): unsure at all n locations
agtgtgactgtcgncccacgctcancgnacgtatgctgtaccggttcggaattcccgggtcgacccacgcgtccgccgagctctccaaaaccctaacgcgccagttctggggcgtcgccaacttcctcgcgccagcgcccggggagacgttgccgtcaccctcgcactctccccaatcagcggggggtcaatccgccgatgcgaggacaccacccgagatcgccgggatccggaacgacttcgctgagatcggtgggaggttcagaagcgggatctcccggatctcaggtcacaaggccgtctctgggttctctaagatggcctctagtttcttcgctcctgatgacggccaggaggacgagtgggaagaggagcggatacgacagattaagcatgagatgggagaagaggcggtatggcacgaggaggctgatggcgactaggagtggcatcagtgggaggagagggtaagacttagggtggaagatggcgatacaaggcatgagttggagatgg

SEQ ID NO: 97751 - DNA, 509 bp, Zea mays
  unsure (1)..(509): unsure at all n locations
tggtgctgtgnccagcctcacgnagcattctgtacctnctcgaattcccgggtcgacccacgcgtccgggcttctcctccccctcttaccaagtccttttcgggttagggttacttagggttttgtggaggggcgatggcggcggctgatgtggagtaccgttgcttcgtcggcgggcttgcctgggccaccagcaacgagtcgctggagaatgccttcgccttctacggcgagatcctcgactccaaggtcatcaccgaccgggagacggggaggtctcgcggcttcggcttcgttaccttctccttcgagaactccatgctcgacgctatcgagaacatgaacggcaaggagctcgacggccgtaacatcaccgttaaccaggcccagtcccgtggcggtggctgtggctgctgtggctacggcggctgtcgcggcggctgcggctattgttgccggcgccgtgacggcggttatggcggccgtggcagctacggcggtcggcgcga

SEQ ID NO: 97752 - DNA, 560 bp, Zea mays
  unsure (1)..(560): unsure at all n locations
tgcgtgcgcagttcatagcnacagtacctacatcgcangactcaccggtcctgaattcccgggtcgacccacgcgtccgcacgtcttcaccttcggcacgatccgggactgccggttcctgtgcctgttccggttcaagctgtggtggatgacgcagcggatgggcgtctccggccgcgacgtccctctggagacccagttcatgctcgtcgaggtccctgccagtgacggcggcggcgacgacgcccccgcgtacgtggtgatgcttccgctgctggaggggcagtttcgggcggcgctgcaggggaacgaccgcgacgagctgcagatctgcatcgagagcggggacaaggcggtgcagacggaccaggccgcgcacatggtgtaccttcacgccggcgacaaccccttcgacaccgtcaccgccgccgtcaaggcggtggagaagcacctgcagacgttccaccaccgcgacaagaagaagctgccgtcgttcctcgactggtttcgctggtgcacctgggacgccttctacaccggaccggggtttttcnaaaacc

SEQ ID NO: 97753 - DNA, 537 bp, Zea mays
  unsure (1)..(537): unsure at all n locations
ggcagttgatcgatccggttgcantgacgactactcggtcctaattcccggtcgacccacgcgtcgcttcacaccgacacacattcttaatcattgcaacaagataaccaacccatatcactcagctgagttggatacccagcgcatgggcgtgttcgactaacgtgcctctggacaccagctcatgctcgtcgacgtccctgccagacacggcggccgcgacgacgcctccgcctacgtggggatgcttgcgctgctgcaggcgcagtttcaggcggcgctgcaagggaacgaccgctacgagctgcagatctgcatcgagagcggagacaacgctgtgcatacggaccaggccgtgcacatggtgtaccttcacgccggcgacaaccccttcgacaccgtcaccgtcgccgtcaaggcggtggagaagcacctgcatacgttccaccatcgttgacaagaataaactgccgtcgttccttgactggttcggttggtgcacctgtgacgcctttctaccaaacctccgcgttatat

SEQ ID NO: 97754 - DNA, 509 bp, Zea mays
  unsure (1)..(509): unsure at all n locations
atggtcttgtgaaccagttcancnatcattctgtacctnctcgaatacccgccgacgcactcgttcgaccactcgtccgcccacgcgtccggttcttgggctgtctgacttcaacctgtcgcggggccttttgttcctgaccaaggctaggaagtacaccttcttcaagcccaagttcatcttctacgccacctacctgtccgagaagatcgggtactggaggtacatcaccatcttcaggcacctcaaggctaacccggaataccaggtgtaccccatcttcaagtacttcgagaactgttgccaggacgagaacaggcactgcgacttcttctctgccctgctcaaagctcaatcgcagttcctaaatgactggaatgccaagctctggtcacggatcttctgcctcttggtgtatgtgaccatgtacctgaatgactgccaacgcactgcattctatgatggaattggtctggaccagacgcctgggttctagatcgctaaccgag

SEQ ID NO: 97755 - DNA, 560 bp, Zea mays
  unsure (1)..(560): unsure at all n locations
agaatgggctcgttgagctgctcatgttcactangggcncgactnccgtaattcccgggtcgacccacgcgttcgttgggaagggagcttcgaggcgggccggcgcggttcgttggccgggcgggctgaaccaatggcacgggcccttggggccccaacgccctaacctgggtcggggccggccgccaacaaaagccccggttggtatcttggattctgacctaaaagccgtcaagccttattcgggccaacggaactttgggcccatgggttttcaaaccaagcgcgatgccaaattgtgtgattcaccggttcctttcgcactaggttgattaactatcggggcgcggacataattagggtaaaactaacctgtctcacgacggtttaaacccagctaacgttccctattggtgggtgaacaatccaacactgggtgaattctgcttcacaatgattggaagagccgacatcgaaggatcaaaaagcaacgtcgctatgaacgcttggctgccacaggccagttatccctgtggaaacttttttttttttggcgtagg

SEQ ID NO: 97756 - DNA, 564 bp, Zea mays
  unsure (1)..(564): unsure at all n locations
tgaatcgcttggtgaccccaccncagctacgaatgcctcaccggccctgaattcccgggtcgacccacgcgtccgcagtcaccaaaccaaaccgctctcgagtctccatccattctctccgctcatccgcagctctctagtctccagctctagctagccttagcctcgtccaagggacgaaggggccaccatgagcgtggtgatcctggacggctccacggtgcgcggcttcgtggcggacgaggcggccttcgcgcgcagcctggacgcgcggttcgccgcgctggacgccaacggcgacggcgtgctgtcccgcgccgagctccggcgcgcgctcgagtccttccgcctcctcgacggcggcggcttcgggtcccgccagccggcgccgctccccgccgaggtcgccgcgctctacgacgccgtcttcgagcagttcgacgccgaccacagcggcgccgtcgaccgcgccgagttccacgacgagatgcgccgcatcatgctcgncgtcgccgacgggcttcgcttccagncggttcaagtcggcccccggnttggggggga

SEQ ID NO: 97757 - DNA, 519 bp, Zea mays
ggcaacaactcccactgcagctcacttagtcacgccccgtcctgttcggaattaccggctcgacccacgcgtccgcccacgcgtccgatttataataccatgattgagtgctgcaaatggctgccatgctggaagtcagctagtgctttgctgtctttgatgcttcgagatggtttcaatcctacggttgtgacttttacatcactcctgaaggttgtattagaaaatgataattttgaaggggctctggatctgcttgatatatgcaagattgaaggacttcagcctggcatacagactttcaacacagtactcttacgtgcatatgctagaagtcaaattcatgtccttgaatatattttggagtgtatacatcgatcaaaaatccaacctgatccatcaacactttggtacacgttttgtgcctacgaggagcatgaactgtacaatactgcaattgagtcactgctagttcttaacatgagaatgatatctgaggatgccggcattcctagtgaa

SEQ ID NO: 97758 - DNA, 535 bp, Zea mays
  unsure (1)..(535): unsure at all n locations
tgctnctnacaactgctagcccatgantgactgctcaccggtccggaattcccggtcgacgcacgcgtccgcccacgcgtccgcccacgcgtccgcttcactgtttgggatgttggtggccaggacaagatgaggcccctgtggaggcactactttcagaacacacagggacttatttttgttgtagacagcaacgacagggaacgtgttgttgaggctagagatgagctccacaggatgctgattgaggatgacctgcgacactctgctctgtttgtattcgaacacacacaatatttccaaagctctgaaaatgctgctaaaatctactgacaatctgggtctgcattctgtgaaacaggcactctgctacatgcagagctcttgtacaacatgtgaaaaagggtattatgaggttcactagtgtttttccagcaacatctccagcaagtcttgaagcttttcggcagggctactagcgagaggatgtctgaacaacttatggctgctttttttatacatattattactaaca

SEQ ID NO: 97759 - DNA, 590 bp, Zea mays
  unsure (1)..(590): unsure at all n locations
tgttatttnnnnnnnaatnnnatttnnntattnnatnnnngnnnnnnngnnnnngcgttgtgnttttttagtttttgttatgttttaccggnnccggaancccgggncgaccgacgcgtccgcccacgcgtccgcggacgcgtggggtaccctgacctggaggagacgagcaccgccgcgcgggccaccgtcgtcctcggcgtggccccggagaagaaggccgcgcccgagttcgtcgaggccgcggcggagtccggcgaggccgcccacggctgcagctgcggtggcaactgcaagtgcgacccctgcaactgctgatcacatcgatcgacgaccatggatatgattattatctatctagcttgtggtggtggttgaacaataataagcgaggccgagctggctgccatacataggtattgtgtggtgtgtgtgagagagagagaaacagagttcttcagtttgctatctctctctgcatgtttggcgtcagtctttgtgctcatgtacctacgtgtgtctacctgcatggttggtgatccgattgcatttgctgtaacccaatttttaatgggcccccatgatatgat

SEQ ID NO: 97760 - DNA, 530 bp, Zea mays
agggctgatactgatagaagtctattgcatgcctctaccggtccggaattcccgggtcgacccacgcgtccgcccacgcgtccgcacagcttctttgtcgaatgcttcaggcactcggtaattcctagaaaaggttcggtaaagactttgccgagtgtagctctcggtgaactgtatatataatatcatgacatgtcgataaagttcatgattttctgacttcgtttgttgtttatacaattttaaaactactagatctcaagttcacattcatgttttgtgaccatgatactcaaaaattctggtctgtttttaaaataggtcgtaaactgtgctaaaataacataaatatcattttttgcattcactgttttctattttttgagtgacttacaattcaaatatgaattatctgaagaaattcaattaaaagaactaaatataatagctatagctaacactttgataattatgtcaagatggaacatgtatctctatatagtgtaagaacatagtagaaaaaatttgct

SEQ ID NO: 97761 - DNA, 601 bp, Zea mays
  unsure (1)..(601): unsure at all n locations
ttttgtggnnnnnnnnattgnnnatattttnataaaatgnnnnnnnnnnnnnnnnaagggcnnnnnnaatgncttagttcatgatgtcatngctctaccggnccggaatncccgggtcgacccacgcgtccgcccacgcgtccgcggacgcgtgggcaaggttctgcaatctgtgaaccctattatgcctgaggaggtagtccttgggcaatacgatggctacaaggatgaccctacagtgccagatgactcgaataccccaacttttgcatctgttgttcttcgggtacacaatgaaagatgggaaggtgttcctttcattcttaaagctggtaaagcattgagttcaaagaaagcagaagttcgggtgcaattcaaggatgttcctggtgacatttttagaagcaagaagcaaggaagaaatgagtttgttatacgcctccaaccatcagaagccatgtacatgaaactaactgttaagaagcctgggttagaaatggctactgaacaaagtgaacttgatctgtcatatgggatgcggtaccaaaatgtcaaaattcctgaggcatatgaacgccttatcttggatacaataaaaagg

SEQ ID NO: 97762 - DNA, 536 bp, Zea mays
  unsure (1)..(536): unsure at all n locations
tgttatggtntactgtttatagcagatggaagtactgccttaccggtccggaattcccgggtcgacccacgcgtccgaagccagtaccgagtcctacgagcagtcgcacgcaagtgtcaagagacgaaacggtcgacatggctcgcacgcaatctgccgtagcggtcgccgtggtggccgcggtgctgctgctggcagcggcggcgacgacctcggaggccgccatcacctgcgggcaggtgagctccgccatcgcgccctgcctctcctacgcccgcggcacggggtccggcccctccgcgtcctgctgtagcggcgtcaggaacctcaagagcgccgncagcaccgccgncgacaggcgcgccgnctgcaactgcctcaagaacgccgncaggggcgtcagcggcctcaacgccggcaacgccgncagcatcccctccaagtgcggcgtcagcatcccctacaccatcagcaccttcaccgactgctccagggtgaactaaacctagaccacgcgcgacgacggggcgctgatc

SEQ ID NO: 97763 - DNA, 550 bp, Zea mays
  unsure (1)..(550): unsure at all n locations
aagggaaatggtgnntnnnctaactgcatgagagtantaaagtaatgcatgcaccggtccggaattcccgggtcgacccacgcgtccgccgacgcgtccgcgtactcgtaccgacgcccttttcaatgtccacgaaatctatactctcgacgtgcttatctcacgacatgtccgatctgttgtaacagatgtcccggcccagccgaactcagcacctgacactgtcttccacgccgatatgacctgctagcgactgccttggagcctaaacgagtggctgtgcaccgcttgcgacccacgtactgcgtatataacgctgatgtactggtatttcaatcgtgcacagaggctccaacttatcctacaactgtcacgtcatctgccaatgtctgactaacgtcaacctgaacatgatctgccttaacggctgattccgccaaagcatttccttcaagtgcggcttcagtgtatagtacacagtgacagctggaatgactgctatacagtgatgcgcgtcactaattacacgacaagacattcggctgattta

SEQ ID NO: 97764 - DNA, 598 bp, Zea mays
  unsure (1)..(598): unsure at all n locations
atggtatttnnnnnnnaagnnnatttnnnaattnnatnnnnnnnnnnnnnnnnggtggcnnnnnnaatgcttagttcttgatgtcacgntgnaccggnccggaatncccgggtcgacgcacgcgtccgcccacgcgtccgaaaacccactcccactcctccgacgtacaccccgacccccaagcctgggacacctaagccgaccccgccgacgtacactccaagccccaaaccttcgacgcccaagccgaccccaccgacgtacaccccttcccccaagcctccgacacctaagccgaccccgcctacgtacactccaagccctaagccaccggctaccaagccttccacgcccaagccggccccgncaacgtacaccccttcgccaaagccttcgacacccaagccgaccccgccgacgtacaccccgtcttccaagccttcgacgcccaagccgaccccgccgacgtacactccnagccccaagccttccacacacccgacgcccaagccgaccccaacgacgtacacccctttcccaaaggcctccgcgcccaaagccgaccccaccgacgtacaccccattccccatagcctct

SEQ ID NO: 97765 - DNA, 595 bp, Zea mays
  unsure (1)..(595): unsure at all n locations
cgtgtaggtnnnnnnntatnnatgtnnnntggnagnnnagnnnnnnnnnngggggccntnnntttgttctagtcatgatcgcangcccgcaccggnccggaattcccgggtcgacccacgcgtccgggagagaataacgcagagctctctgctcccggcctgtcttctgccgtcccggccgtttagtttactagtgtgttcgtcctatatgtttagcagcagcaggtgtattgtgcgggtatgtaatggtattgcaactatattgggtgtaaaaccataataaatgtgggcaaatatgcaaggaaaaaaaaaaaaaaaaaaaaaaaaacaaaaacaaaaaaaaaaaaacaaaagggggcggccgctctagaggatccaagcttacgtacgcgtgcatgcgacgtcatagcttttctatagtgtcacctaaattcaattcactggccgtcgttttacaacgtcgtgactgggaaaaccctggcgttacccaacttaatcgccttgcagcacatccccctttccccagctggcgtaataacgaaaaggcccgcaccgaacggccttcccaacattgcgcaacccgaatgggcaaggg

SEQ ID NO: 97766 - DNA, 536 bp, Zea mays
  unsure (1)..(536): unsure at all n locations
nggggggtntnnccctgtaagcantactattggactgctgcaccggtccggaattcccgggtcgacccacgcgtccgctggcgtgcctgctggccatcttctcacagaagagcgcatccagcggccaagacaaggagcgggtgtcgccgcggtcggtctccggctcctgcggaagcagctcagcagacccctactgtgtcccagaattcgggtggcgggacgttggccagtacaagcagttcctgtcagtcgacacgaacatttctgccggcgacgactccgctcttgaccagagactgaaggcgctgctcaggaagctctctttggttgacctagcaggcctctcccaccagcataataggctggcgttctggatcaacacctactactcctgcatgatgaacgcatttctcgagcagggagcgcctagcgacccccgtatgctggtggccatgatgcccaaggcgaccatcaacgtcngcgggcgcgtgctgagcgccgtggcgatcgagcacttcattctncggcttgcccac

SEQ ID NO: 97767 - DNA, 538 bp, Zea mays
  unsure (1)..(538): unsure at all n locations
tgtggcntgactngttaagggggagtagaagatgatgcagtcaccggtccggaattcccgggtcgacccacgcgtccggataagcatcatgcgggcatgcaaggaggccggcaccgtgcggcgcatcgtcttcacttcgtgcgccgggacggtcaacctggaggagcggcagaggcccgtctacgacgaggaaagctggaccgacgtcgacttctgccgtcgcgtcaagatgaccggatggatgtacttcgtgtctaaaaccctggcggagaaggcggccctggcgtacgcggcggagcacggcctggacctggtcaccatcatcccgacgctcgtggtcggcccgttcatcagcgcgttcatgccagccagcctcatcaccgtgctggcgctcatcacggggaacgcgctccactactcgatcctcaagcaggtgcagctcatccacctcgacgacctctgcgacgccgagatcttcctcttcgagaacctcgccgcggccgggcgctacgtctgctcctcgcacgacgtcaccatc

SEQ ID NO: 97768 - DNA, 535 bp, Zea mays
  unsure (1)..(535): unsure at all n locations
tgggggnntgnccatgacaagcagatgaatgcatgcctgctaccggtccggaattcccgggtcgacccacgcgtccgcccacgcgtccggtaccgcggcccctaaacccctttcctcgttcccctccgtctctcagtgaggcacaatgatgctagctaataagcttggtggtctgctcaagaatgctacgagttcaaatatgtctgtctaccaagcaatcagatgcatgtcatcatccaagctttttgttggagggctttcttatggaaccgatgatcacagtctcagagacgagtttgccaaatatggacaagttattgaagctaagattatccttgatcgtgagtctgggaggtcccagaggtttggctttataacttacacgtcttctgaggaggcttcngctgccatcactgccatggatggaaagactctggatggacggaacatacgggttaatcatgctaacgagaggacaggtggcttccgcagcaaccgtggttatggtggtggcngctatggtggtngtggtggt

SEQ ID NO: 97769 - DNA, 602 bp, Zea mays
  unsure (1)..(602): unsure at all n locations
atagtatgggnnnnnnnatagnnaatgagnnatatgnnagnnnnnnnnnnnnnnnggcgggnnnnnnnttacttatttttatgtntgctctnacccgnccggaannnccgggncgaccgacgcggccgcccacgcgnccgcccacgcagacggacccacgcgnccgcggacgcgagggcaagcacaggggcaggcnancaanggcggcggagggngnccccccaagcgacaccgagccaccaaaggcacaagccgacanaaggcggcacagccacaccaaccacacgccccagncacngaggagcgccgnggagcnaggcaaccccacggcgaacaaccgccaaggcggggcngccncagccgcagagccggacacggcgcngncncnccccnccacgaaacagccgagccaccgccggcagcngcggcaacaagccgcggcgggcgggggcaccgncgacaagcagagcacggaggaagagcgggaccgcaacagccccggggcccaccnccgggggggcgggaacccccacgaggaccacangaaccacacccggccggggcccaacgggaccnngacgcgccacaaaaaaggcgggaat

SEQ ID NO: 97770 - DNA, 616 bp, Zea mays
  unsure (1)..(616): unsure at all n locations
agatagagcggnnnnnnnnnagagnnnataagnnnnaatggnnnagnnnnnnnnnnnnnnnnnnngggggnccnnnnnnnttactgttcattgtctttactgncangcgcgcaccggnccggaanncccggggcgacgcacgcgnccgcccacgcgcccgaggcgggaccacccgcngaananaagcaganaaanaaacacaggagaggaaacccacgaggacggcccgagaaacggcgagcgaaccgggagcagaccagccggagaancgggcggccncgccgcccgaaaaggagnccggagaggcggccccagcgacggaccgggcccaaggaccccggaaagggacgccagggagggngagagccccgcccggcccagacccaggcgcaccacgaggcgccggcaacgaggcagggcggccgggaacgcagcccaaaccgggcgcgaaaccccgnccaaggcnaaaaacaggcgagagacacgaagcgaacaagnaccgcgagggaaagaagaaaaggacgnngaaaagagaggcaaaaaaggccngaaaaagcccggagggaaaccgaagggggccggcgacgcccacccgccggaagcggaacggcccccg

SEQ ID NO: 97771 - DNA, 534 bp, Zea mays
  unsure (1)..(534): unsure at all n locations
aggtcttactgttatgggagagtagaagaatagcatgcatcggtccggaattcccgggtcgacccacgcgtccgcccacgcgtccggcaagacccacttcgagcagctcttcaaggagaccgggagcttctccaagaacttcacgccaggtggcaagtcttcagacaagggtgaactgacaagggcccccagcaagctatcatctgcgttttctggtactcaggataagtgtgcagcttgccagaaaacagtgtacccgctggagaagttaactctggaaggcgagtcctaccacaagagctgcttcaagtgctcgcacgggggctgcatcctcaccacctcctcctacgccgcgctcaacggcgttctgtactgcaagatccacttcgcgcagctgttcatggagaaggggagctacagccacatgatgaagaagagcccgtcccaggatacgctgccggacatggccgncgacgagcaaccgncggaaccggcgccaccgcaagacggggaaggagaagacaactaggnaga

SEQ ID NO: 97772 - DNA, 534 bp, Zea mays
tgagggggtctacaatgatggggatatataggatgcttgcccggtcctgaattcccgggtcgacccacgcgtccgcgccgccggcctcgcccgccgcgccatcgtccaggtctcctacgccatcggcgtgcccgaggccctatcggtgttcgtggacacgtaccggaacggggccaatcccgacaaggggatacctgagaatgcgaaaggagaacttgaatctaaggcccggtgtgaacataatcaacctagacctcaagaaaggcggaaacgggctctacctaaagacgggggtctacggacactttgagaggcacgaccgagacttcacctgagaggtggtgaagcccctcaaggcggaaaagccgtcttctgcatgaggcgcctcctctgtttcagaagaagcttttggtctggtctgcctgcgctctatcatgctttattatggctcctacgtgttgtgattcttgatctgccccttgcttatcatttgtactgtactgtcactgtcctaataagtggtacgtgtgcggg

SEQ ID NO: 97773 - DNA, 588 bp, Zea mays
  unsure (1)..(588): unsure at all n locations
tgtgatggnnnnnnatatnnatttnnntttgnatnnnnnnnnnnnngnngggcntngtttttttatgcgtaccgnatgtcttaccggtccggaattcccgggtcgaccgacgcgtccgcggacgcgtgggcggacgcgtgggcgttgagcaatggatggattttgccgcaacagaaggtgatgctggtgttgcatggtacttgtatccaaggcttgggtacctcccttatgttagcacaactgaggaaacagctatttcttcattgaagaggtcgcttggtgctctgaacacacaccttgcctcaaacacataccttgttgggcatgctgttactctagctgacattgtattgacatgcaacctctaccatggaattgcacggatcttgaccaagaccttcacgtctgatttccctcatgtcgagaggtatttctggaccatggttaaccagcctaacttcaagaaagtcattggtgaggtcaagcangcagagtctgcacctcctattccgaaaaaggctgcttcttctaaagagccaaaagcaaaagatgttaaaaaggaggcttcaaaagaggcccccaaaccat

SEQ ID NO: 97774 - DNA, 540 bp, Zea mays
  unsure (1)..(540): unsure at all n locations
aagcgtctgactcttggtaagccncactaccgcactgacgtaccggtccggaattcccgggtcgacccacgcgtccgcccacgcgtccgcccacgcgtccgcccacgcgtccgggaggaccctgctgaagagattagggaggcacccaagcgcgactcgagtgaggggcagtaaagccggctttatgtgcctagaaactagtagctagtgtttgctgctgtcgaatgacactatgcaatgtgatctggaacctggtttcttgggtgcgacgcttgttatgactgtcgtcagtaaaatttgggggctccccgtatgagatgctgccgggcaaggcctcggtgtcccacctcgtttgtggcggggggcgctggagcccggtctggttgggttgggaagccctttaaaaaaaaaaaaaaaaaaaaaaaaaaaaaaaaaaaaaaaaaaaaaaaaaaaaaaaaaaaaaaaaaaaaaaaaaaaaaaaaaaaaaaaaaaaaaaaaaaaaaaaaaaaaaaaaaaaaataaaaaaaaagggggggccct

SEQ ID NO: 97775 - DNA, 538 bp, Zea mays
  unsure (1)..(538): unsure at all n locations
ntgggnntnnncctgtatagaagatgattgaacgcctgctaccggtccggaattcccgggtcgacccacgcgtccgctaggtcaaaaggcactgcgccgtctggcccagaaccgtgaagctgctaggaaaagccgtggaagaaagaaggcatacgttgagcaacttgagaatagcaggctgaaacttagccagttggagcaggagctccagcgtgctcgccaacagggcatcttcattcctactccgggagacgaccagcagccaaactctactagtgaaaaaggtgctttggcgtttgacaaggactacgctggatgggaagacgagcacaggaagcagataagcgagctgagggccgcgctcaacgcacacgccggtgacgacgagctccggcgcatcgtggacggcgtcatggcgcatcaccacgaagcgttcaggctcaagtgcgtggcagccagggcggacgccttccacgtgctgtcggggatgtggaagacccccgttggagaggtgctttatgtggctgggcggatttca

SEQ ID NO: 97776 - DNA, 537 bp, Zea mays
  unsure (1)..(537): unsure at all n locations
gtgggntgacttttgtatcgaagtactaacgcattgcctgctaccggtccggaattcccgggtcgacccacgcgtccggtcgcctctcaagcctgatatccatcgcacaagccctgcgtggtgcagcccggtctaatcagaaacccctgctctctcttcgcgttgagggtccagtttccttgtcctcgactccttccatgtctcccaaggacaagctcaagctcaaacggttggccccaggccaagtggagctctcctcacaggcgggggcaatccctgctatcaccgaagacgaggatgaaccacataaccctggattgtggcctcttttgtctctgaatggttcagatggcagcctgcaggggtttgaggagctattggcctcagtacttggaaagaaggcaggcgagaagggtaccttcaagctactgaaggcacgggcctcggctcaaacctatgtcaagatggcattcacggtggagaagaagcttgctgaaggggatgtgaactggtcaaatattccagaatggaagacga

SEQ ID NO: 97777 - DNA, 511 bp, Zea mays
  unsure (1)..(511): unsure at all n locations
ggggtnnnnnnaaaagaccgtgaccgacgtacngncgnacnggnncggaattcccgggtcgacccacgcgtccgccctacctcaggtgctaacgtcaagctatgcaacaaatgctttaaatcaggccacatcgccgttgactgcaccaacgaacgggcctgcaacaactgccgtcagccagggcacatagctcgggagtgcaagaacgacccggtctgcaacctgtgcaatgtctctggccacgtcgcgcgcgtctgcccaaagacgactctggcttcagtgatacagggcggcccgttccgagatatcctgtgccgcatctgcggtcagccggggcacatcagccgcaactgcatggcgaccattatctgcgacacatgcggtgggagggggcacatgtcttatgagtgcccttcggcaaagaatattcgggctccgcaggctcttgagagcttttcgcccaaagctccgctttgttctgatggctgagaattcgccaggatgtttcatt

SEQ ID NO: 97778 - DNA, 504 bp, Zea mays
  unsure (1)..(504): unsure at all n locations
gggccannnnaacggacgtcagcgccgtcgnacnggccggaancccgggcgaccacgcgtccgccacgcgtccggaaaagcttcaccaccagaacgttatcaagctcaaggagatcgtcacctgcccaggcccagagcgggacgagcaagggaagccaattgacggtaacaagtacaaggggagcatttacatggttttcgagtatatggaccatgatctcaccgggcttgctgatcggccaggaatgcggttcactgtgccgcagattaagtgttacatgaggcagctgcttacaggcctgcactattgtcatgtcaaccaagttctgcatcgagatatcaaaggatctaaccttttgatagacaatgaaggtaacttgaagcttgctgattttggccttgcaagatcattctcgagtgatcacaatggcaaccttactaaccgtgtgatcactttgggtatagaacttcaagagtgctactttgaagcacnaaatatggccc

SEQ ID NO: 97779 - DNA, 507 bp, Zea mays
  unsure (1)..(507): unsure at all n locations
nctggtggtgaatcaccgtaccccgtagtcgnacnggntnggaaaaccnggggcgaggcacgcgtccgcccacgcgtncgatactatacctacctacctgtgtcggtttcgggtacaggtacccttggggggaatgtcgttcgagcttttcctgtgagtatggcatgggttacatacttcagcgccgtagcgcctggtatgagcctggtggagaagcaatggctagtacacggtgctcatacttcagcgctgcagcgcttggtactcggaccttggctcgaggcattttctctacgcctacttaccttgaaaaagcagggtcacctcgtgtccttaaacctattactcattgtcggctaacctaacctgcgccggacctccggtccaacaatgggtagtacaggaatatagacccggtcttcatcgactactcctttgcgcctgatcttaagcacgtgataactctgtgaggacaaaccttgccggaggaatctttggtgtttcggn

SEQ ID NO: 97780 - DNA, 514 bp, Zea mays
  unsure (1)..(514): unsure at all n locations
gggccgnnnnnaacgggaagttggcanggactgncgtaccggnccggaattcccgggtcgacccacgcgtccgagagtagtagtgatccgcaatgtcgacggaggaggctgttgtggctgaggtcccggtgaccgaggtgccagcggaggtcccggcggcccaggtggccgaggcgcccaaggcgaagaaggcgcccaaggagaagaaggcgcctaaggagaagaagctttccgcggcgaagaagccggcggcgcaccctccctacgctgagatgattgtagaggcgatcgctgccctcaaggagaggaaggggtcgagctcggtggccatcagcaagtacgtcgaggggaagcatggcggcaagctccccaccaacttccgcaagcagctcactgtgcagctgaagaagctcgctgccgccggcaagctgacgaaggtgaaaaactccttcaagctgccggccaccgcgccaaaccccagggcggcaagccccaagcactcaaggccgggccc

SEQ ID NO: 97781 - DNA, 504 bp, Zea mays
  unsure (1)..(504): unsure at all n locations
ggcctntnnncccccaattgcggaaggacngcgtaccggnccggaattcccgggtcgacccacgcgtccggagaagagaggtcccggagggaagaaatcaagctgcaagatatccaaaggagatgggttgcatctaaccgatgggctgaagctgcccagtttgcgcttgctagaagcctcacatcatcacatagtgacctccttgcattagaagctgccgagggaaataatattctgaggagaacaaaggatgctgtaatcactctgcaaagcgtactggaagggaagcacaatactgaaatcgatgaatctctaactcagtatcaggtcccagctgatcgatggtggtcttcactttacaaagtgatcgaaagcctcgccacaatgagcagattgggccgcaaccgtctgcagcaaccttcttataattttgagaacaacaattctattgactgggccaaatgtagatgtagaattctggatcacaacagcattgtggaatag

SEQ ID NO: 97782 - DNA, 514 bp, Zea mays
  unsure (1)..(514): unsure at all n locations
ntgcntgntnnaccccaggggccttcgcangactgaccggnncggaaattccggggtggaccacaccgtccgctcgggaccgtatggtggagatctacttttggacctgtggtatgcttcatgaggaggagtactccctggcacggatgttcttcgccaagacgttcgggatggtgtcactgatggacgacactttcgatgtccatgctactctagacgagtgtcacaagctcaaagaagctatgcagagatgggatgaaagtgaggtctccattctacccgagtatctacgctngctgtatatcaaaacccttagcaacttcaaagagtttgaggagatcttggaaaccgaacaagaagtactgcatggcttacacaaaagaggcatacaagttgtgctccaaaaactacctaaaggaagccatctggtctaaccagaaataccagccaaggcttcaaggagcctgaggagctattcaatcatgacctcaggccttgccgatgctcacgaatc

SEQ ID NO: 97783 - DNA, 512 bp, Zea mays
  unsure (1)..(512): unsure at all n locations
tggntgnnnnnnccccaaactgncggancgcatnnctggnncggaaatnccggggcggaccaagccttccggccaacattaagcccctggggggggcacaacatttttggcaggaacttgctcggccctgcaaccttggaaaggttaagggagcacttgacaaatccagcaacagttccagcaacttgcgattcgtaaccaaagcttagccagccaagctggtcagatggcaccagcgtcaagcaaatctgttaggttcccattgcgccctggcaagggtacgcatgggtccaggtgcattgtgaaggcaaatcatttctttgctgagctgcctaataaagaccttcaccaatacgatgtatcaataacacccgaggttacttcacgcggcgtcaatcgtgctgtcatggcagagctagtaaaactttacagacactcccatttggatgggcgtctgcctgcatacatggaaagaagagtctttatacagcttgagcggttgcctttggttt

SEQ ID NO: 97784 - DNA, 506 bp, Zea mays
  unsure (1)..(506): unsure at all n locations
aggccgnnnnccccccacctgccgcaaggacnaccggnncgaaanccggggcgaaccaagcgttcggccacgcgttcgatttccggatccacgaatagcaacatgaactaaatgtcctgttgctatttcccgattcaagggggagtaccttcgatgggataatttcttaaaagtattaacctatccccaaggggtgggtccccttcttacgggtcagtgggatctttatgcccaaaaaactgattcgagtaatcatttatttggtaccactcaaagagcgggaactgccattctgacccttcttgggggattccatccacaaacacaaaatttgtggctgaccgatattgctcatcatcatttagctattgcatttatttttctcattgccggtcatatgtatcgaactaacttcggaattgggcacagtatcaaagatcttttaaaagcacatactcctcggggggtcgattaggacgtgggcataaaagcccttatgatacaaa

SEQ ID NO: 97785 - DNA, 511 bp, Zea mays
  unsure (1)..(511): unsure at all n locations
agcccctnnnnccccnaaaatcgngnangtacgnncncgnnnnggaanncccgggtcgacccacgcgtccgcacgagagagacgaatcttccgaatctctcggtggcgatggcgctctccgaccgctgccgcgagtcgctcctcccgagcttcctctacggctcctcggcgcgctctttcgctgccacaggagccgccgcgcgcctccctgtctcctccccggcgcctgccgcggctggagcatgaggcggcgtgccgttctcgatccaggcgcccaaggagaagatcgagatgtactcgccggccttctatgccgcctgcactgccggaggaatcgccagctgcgggctcacccacatggccgtcacgcctctcgacctcgtcaagtgcaatatgcagattgacccaacgaaatacaagaatatctcatctggatttggtatcctgttaaaagagcaaggggccgggggtttcttcaggggatgggtgcctactttgtttggtaccaggg

SEQ ID NO: 97786 - DNA, 509 bp, Zea mays
  unsure (1)..(509): unsure at all n locations
cggttattttcccccgacctgcncgcacggacggncncgnncggaaatnccggggcggaccaagccgtcgggaaaatcttaattcattaagtggtagggagggcactatgtcaccacaaacagaaattgaagcaagtgttggatttaaagctggtgttaaggattataaattgacttactacaccccggagtacgaaaccaaggatactgatatcttggcagcattccgagtaactcctcagctcggggttccgcctgaagaagcaggagctgcagtagctgcggaatcttctactggtacatggacaactgtttggactgatggacttaccagtcttgatcgttacaaaagacgatgctatcacatcgagcccgttcctggggacccaaatcaatatatctgttatgtagcttatccattaaacctatttgaagagggttctggtactaacatgtttactttaattggggtaacgtatttggttttaaagccttacgcgctctacgtt

SEQ ID NO: 97787 - DNA, 514 bp, Zea mays
  unsure (1)..(514): unsure at all n locations
ntgcgntgnnnaacccggatttgncaaagnactgctgtaccggtccggaattcccgggtcgacccacgcgtccgccagcttctctaaagatcacaatgatgagagccctggcggtggtggccatgctggccggcgccttcttcgctgtgcccgctcgcgccgagcagtgcgggtcgcaggccggcggcgcgctgtgccccaactgcctgtgctgcagccagttcgggtggtgcggcagcacctccgactactgcggcagcgggtgccagagccagtgcagcggcagctgcggcagcaccccgaacccgccgagcagcggcggcgtggcgtccatcatccccgagtcgctcttcaaccagatgctgctgcaccgcaacgacgcggcgtgccccgccaacggcttctacacctacgcgggcttcatcgcggcggccaacgcgttcccgggcttcggcaccacgggtgcccccgacgtgcanaagcgcgagcttgcgggggttcttgcgccaaactg

SEQ ID NO: 97788 - DNA, 511 bp, Zea mays
  unsure (1)..(511): unsure at all n locations
gggccttttnnnnnnnnaaactgnngnagnnacnncnnnnngggaaanaccgggcgggaccaacccttccgcccacccatccgccaacgcttccggggttttgttgttctccaaccccaagctccaaaggcggaagaataaggcgcggcccccctctcgtgtgaccaaaatggcgctgccgaatcaggggaccgttgattaccccagcttcaagctcgtcatcgtcggcgatggtggaactggtaaaactacatttgtgaagaagcatctcactggagagtttgagaagaaatatgaaccaaccattggtgtggaaaatcattcgttggatttcaccactaactgtggtaagatcaagttctactgctgggataccgcaaggcaagagaagtttggtggcctcaaggatggatactatatacatggccagtgtgcgatcatcatgtttgatgtaacctcaaggctacttacaaaaatgtttctacgtggcaataggaacctgtgcaaggtt

SEQ ID NO: 97789 - DNA, 540 bp, Zea mays
  unsure (1)..(540): unsure at all n locations
gggccannnnttttgttgtatagtatctcgactacnnnnnntnnnnnnannggncggggcgagcgaacnannactgnaaatcacaatcaaacgatcttttaccctgctgttccacactatattggctgtctcttttaactcatcttactacaccttcactatcttttaacagatgtgccgccccatccaaactccctacctgacaatgtctttcttccagatctgccctttaatgctcttccttctaatctaaaagatgtgctgtttctccctttcgacccaatatataatctaaatatctataaaagtattgatatttaaactttctccccgttcgcttcctctttttccttaaacctttccaagatcatttttcacataggtgtgtactataactccatcctcctccagtgttcttttattccctctctttaatatcctcctaaacccttatccttttgtattatgatttcctcctcataagttttaattgtcatatcgtaatatcttttttaaatatatcttatctccttctttatg

SEQ ID NO: 97790 - DNA, 512 bp, Zea mays
  unsure (1)..(512): unsure at all n locations
ngtgcgtnnnnnccccagctacacagcacttctcgtaccggnccggaanncccgggncgacccacgcgtncgnccacgcgtncggtgggcgctggggcaggcgaagcaccagaagctggccgccgacgggctgcggttccgccgcgtggtgcgcggcgagcagcangtcgtgtccgggatgaactaccgcctctacgtcgacgccgccgaccccgccggccgcaccgtgccctacgtcgccgtcgtgtacgagcaggtctggacccgcacccgccagctcgcctccttcaacccggtgccccgcgccccctgaaaccatacggacacgggtgggccgaagcgaccacgacgatgttctccgtcaattacgtgtcgagctaatcttattattggttctattattataataatgcttctccctgttcctatggacctatagtagtatactagtatgttgcgagggagcagtagaccgtgtgtttcgctatcgtgggactagaataagccatgcc

SEQ ID NO: 97791 - DNA, 545 bp, Zea mays
  unsure (1)..(545): unsure at all n locations
tgagggtnntntcatgaggatgatactcatagcactgccgtaccggtccggaattcccgggtcgacccacgcgtccgaactccacgtcacacacctcacagagctgcaacagcatcagctgccacctccttccttccttcctgcataggttgctacacgtatatattctgaagaagagatcgagatgaccagcgtgtggaagaccaaggttctgcctggcctcaacaagatctttgacaaggatggcaagaaggctgcagctgcaggcttcttgaagtccttcaacaaggaggagattgacaaggagattgaggacaagaagacagagctggagcccaaggtcgtggaggcctacgaagcatctcctcctgaggtcaaggctctgttcaaggataagaagccagtcaaggtcagcaagaagaactcggctgcagtcaccaagttcctcgatgagctggctaagattgacttccctggagccaaggtggtgagcgaggcggtggccaagtccggcacctcgcccctgcttccggcgatcaccttcn

SEQ ID NO: 97792 - DNA, 543 bp, Zea mays
  unsure (1)..(543): unsure at all n locations
tgatgcgcgtttgtccgaggccaacngcatctgcactgccgtaccggtctcggaattcccgggtcgacccacgcgtccgaactccacgtcacacacctcacagagctgcaacagcatcagctgccacctccttgcttcgttcctgcataggttgctacacgtatatattctgaagaagagatcgagatgaccagcgtgtggaagaccaaggttctgcctggcctcaacaagatctttgacaaggatggcaagaaggctgcagctgcaggcttcttgaagtccttcaacaaggaggagattgacatggagattgaggacaagaagacagagctggagcccaaggtcgtggaggcctacgaagcatctcctcctgaggtcaaggctctgatcaaggataagaagccagtcaaggtcagcaagaagaactcggctgcagtcaccaagttcctcgatgagctggctaagattgactttcctggagccaaggtggtgagcgaggccgtggccaagtccgggaccttgaccctggtttcggcgaacacc

SEQ ID NO: 97793 - DNA, 544 bp, Zea mays
  unsure (1)..(544): unsure at all n locations
gaagaggccgatancctgatctcgatgcctgtgcgacctgcacgtaccggtccggaattcccgggtcgacccacgcgtccgcccaagccgaccccaccgacgtacactcccacaccgaagccgccggccaccaagccgcccacctacactccgacgccgccggtgtctcacacccccagcccgccgccaccatactactagaaagcgatgcctaccataccacactgctgtcagtctctggagcatttaggtggtctggatcaatggaagggttgtgtcctagccagccggcaaagatgagctgctgatggtaatgatgatgataagaggccactgctaccctactacgtaccctcctctttgtgtgctgccatccgtccccgttagacgatcgaggagagaataacgcagagctctctgctcccggcctgtcttctgccgtcccggccgtttaatttactagtgtgttcgtcctatatgtttagcagcagcaggtgtattgtgcgggtatgtaatggtattgcaactatatggggtgtaaaan

SEQ ID NO: 97794 - DNA, 542 bp, Zea mays
  unsure (1)..(542): unsure at all n locations
tggaggttgagtgttgctacngctgactgcactgacgtaccggtccggaattcccgggtcgacccacgcgtccgcagggccgggctggtcggcgcggacgggccgacccactgcggggcgttcgacgtcgcgtgcatggcctgcctgcccaacatggtcgtcatggccccgtccgacgaggccgagctctgccacatggtcgccaccgccgcggcaatcgacgaccgcccgtcctgcttccgctacccgagaggcaacggcgttggcgtcccgttgccgcccaactacaaaggcactcccctcgaggtcggcaaaggcaggatcctgctggagggcgacaccggggngctgctggngtacgggtcgggagtgcagnactggctgaccgtcgcgtacctggtgcagcgccacggcctgaaagtgaccgttgttgacgcgaaggtctggaagccgttggaccacgccctgatcaggaaccctgtcatagtccaataggtgcttatcacctagtaggaaagttccattctatgggtcgggtagcc

SEQ ID NO: 97795 - DNA, 543 bp, Zea mays
  unsure (1)..(543): unsure at all n locations
aggcggctcgtntcgctgaggactagactcatacgactgacgtaccggtccggaattcccgggtcgacccacgcgtccggccaaccagaagagcttgcagttactgagagtgtgtgtgagagagaggatgggtggcagcggcaaggcttcttttgttgttggccttggtggtggtggccttaagcttggccgtggaaatccaggccgacgccgggtacggttacggcggcgggtacaccccgacgccgacgccggccaccccgaccccgaagcccgagaaagcccccaccaaggggccgaagccggacaagccgcccaaggagcacaagccgcccaagagcacgggcccaagccgaaaagccgcccaagagcacaagccgacgccgtccacgtacaccccgagccctaaactcacgccggcgacgtacactcccaacccgaggccccccaagccgacgctacccacttacattcccgcccttacgccccacaaacccacaccaaaaccaattccgattcctccgacgtacacccggacctcta

SEQ ID NO: 97796 - DNA, 539 bp, Zea mays
  unsure (1)..(539): unsure at all n locations
gagccgtatgngatgattaaagatctcatgcgactgacgtaccggtccggaattcccgggtcgacccacgcgtccgctttaaatgagctcttggaatctgatgacaagtttgggttcattgttatggatggtaatggtactctttttggcacactaagtggcaatacccgtgaagtgcttcacaaattcactgttgacctcccaaagaagcatggtagaagaaggcagtctgctctgcgttttgctcggcttcggatggagaaacgccataactatgtccgcaaaacagctgaacttgctacccagtttttcatcaatccagctactagtcaacctaaatgtgcaagattgattctttgccggtctgcagaatttaaagcctgggcttagcccatcttaccttgttgaaccgcggactccaacccagatacctaatgggggtgaaggttcctattgtggccaaaaccggttcaacccaactattggaatatctggtgagaatctagccaatgtgaaattcattctagaaaagaaggtta

SEQ ID NO: 97797 - DNA, 544 bp, Zea mays
  unsure (1)..(544): unsure at all n locations
tggccgtgtgactgatggccagcncacatacgcacgtactgaaccgctccggaattcccgggtcgacccacgcgtccgccctttctctctcctcgaccctcccgacgcggcaaagcaaaaacacaaggaggagaggagggagagaaggaagaaggcgaggccaaaaatcccctccccctccccaaatcctagcccaataatctctcaatcaggggattcttaggtctgatcaagtcggaggattcggcagggcgcagccatgaacgagaaggcgtccgtctccaaggagctcaacgccaagcacaagaagatattggaaggtcttctacggcatcctgagaatagagaatgcgcagactgcaagtcaaagggtcctcgatgggcaagtgtgaatctagggatctttatatgcatgacatgttctggcattcatagaagcctgggggtgcccatatctaaagtaagatcttgccacctggatacatggctgccagagcaagttgcatttattcaatccatgggaaacgaaaaagcaaatagcttn

SEQ ID NO: 97798 - DNA, 529 bp, Zea mays
agttgcggtacgtgtcatagcacatgatgcacgtctgcaccggtccggaattcccgggtcgacccacgcgtccgcgatctgcaagtctcgctacgtagcagtgcaataaaaaaaagcagccgcaatggcgagcagcaccatggccctctcctccacggccttcgccggcaaggccgtgaacgtgccgtcgtcgtccgccttcggcgaggcccgcgtgacgatgcgcaagacggcggcgaaggccaagccggcggcggcgtccgggagcccgtggtacggccccgaccgcgtgctgtacctgggcccactgtccggcgagccgccgagctacctgacgggcgagttcccgggcgactacggctgggacaccgcggggcttgtcggcggacccggagacgttcgccaagaaccgggagctggaagtgatccactcccgctgggccatgcttggcgcgctcggctgcgtcttcccggagcttctcgcccgcaacggcgtcaagttcggcgaggccgtgtggttcaaagcccc

SEQ ID NO: 97799 - DNA, 542 bp, Zea mays
  unsure (1)..(542): unsure at all n locations
agatgcggtgctaaatccagcncagtacgcacatacgtaccggtccggaattcccgggtcgacccacgcgtccggagcataccagagctctcaaggaaattcttcagagaattatcccaacaatacaacagtctttgtaggtgggttagattccaatgtaaatgaggagtatctaaggcaaatttttactctgtatggagaaatttcttatgtgaagattcctgtaggcaagcattgtggatttgttcaatttaccagcaggtcatgtgctgaggaagccatccgaatgctgaatgggagtcaggttggtgggcagaaagttcggctttcatggggccgtagtcctcaaaacagacaggcttctcagcatgatgccaacaaccagtataatgggaacagctattatggataccaacagccgggttatgaaggttatggctatggtgcttncagtgcacaagacccaagcatacaaaactactacggatactctggttgtggtaactatgaacagcagcagccaacacaggaacagcagcttg

SEQ ID NO: 97800 - DNA, 542 bp, Zea mays
aggaggttgcctgagcctagctcatgactgcactgctctaccggtccggaattcccgggtcgacccacgcgtccgcggacgcgtgggaccaccactgccccggatccataccagctgcagcagcagcgcgcgcgagctagcttcggtcggtcgatagatcgatcgatcgctcggccatcatggcgcgggaggagcaggcgctgctgtcgacggagatcgtgaaccgcggcgtggagccgtcgggcccggacgccggctcgccggccttctcggtgcgcgtgcgccgccgcctgccggacttcctgcagtcggtgaacctcaagtacgtgcgcctcgggtaccactacctcatcagccacggcgtgtacctggccaccatccccgtcatcgtgctggtgtgccgcgcccagcttggcaagcctaagcgcgaacagcttttgcgcaaggtgttgggggagggcacctaacgacttggcaccgggctcggctttcttggcgtgcttggctttaacatcttcggctacattatggtcaggcccaag

SEQ ID NO: 97801 - DNA, 529 bp, Zea mays
  unsure (1)..(529): unsure at all n locations
gcagttagtgtggctgcnangtacgcactagctaccgctccggaattcccgggtcgaccaacgcgtccgcccaggcttccggaacaatcgacggccagggagccctggtgtggaccaggaaccagtgccagggttcttacaattgcaagatcctcccgaatagcttggtgctggattttgtgacgaacgtccagatccgcggcatcacgctgctcaacagcaagttcttccacctcaacatcttcgagtgcaagaacgtgctgatcgacaaagtgacggtcaaggcccccggcgacagccccaacacggacggcatccacatcggcgactccagcaacgtgaccatcagcagcaccaccatcggcgtcggcgacgactgcatctacatcggccccgggagcaagatgatccgcattcatggcgtcaagtgcggcccangccacggcatcagcgtcggcagcctggggcgctacaaggacgagaaggacgtggaagacgtgcaggtgacggggtgcacgatcgtccgcac

SEQ ID NO: 97802 - DNA, 542 bp, Zea mays
  unsure (1)..(542): unsure at all n locations
tgtgcgtgctattgccagcncattacagacatacgtacccgtccggaattcccgggtcgacccacgcgtccggtggagaccttttctgaatatcctcctcttggtcgctttgctgtccgtgacatgaggcaaacggtggctgtcggagtcatcaagagtgtggagaagaaggatccaactggagccaaggtgaccaaggctgccgcaaagaagaaatgatgtgtctggctggttctgtgtttgcttgagggaaacctagtggaaacataaaatatctcgtcttgttcacgtcattgtctgaactatgctcgcaacgtttgcctggtcgatttagaatggttattttcgttaaaaccagagtgttatttaagacttatccgaacatctggtgagccatatatggttactagttttgttactaccaaaaaaaaaaaaaaagggcggccgctctagaggatccaagcttacgtacgcgtgcatgcgacgtcatagctcttctatagtgtcacctaaattcaattcactggcccgtcgtttacacc

SEQ ID NO: 97803 - DNA, 544 bp, Zea mays
agatggttgcttgtgaaggaggaaggatggtaatgctctaccggtccggaattcccgggtcgacccacgcgtccgcccacgcgtccgcccacgcgtccgggggattacattggatgaatccttaaggaagacatatcacaaaagaaataaaggctaaagtaagcgctccttgcctttggtttgagcaaaacagattcttgtttcaccgaggaaaagagagaagttctggataaattgacaatgtcaacttgaattgactaattcagttccgcctattccacattaatgggagtacatttatgtttctgctttacgaatatgatattttttggacatttctaataatagcaagccttattcctattttggtattttggatttcaggacttttagccccgggtagtgaaggaccagagaagctttctagttatgaatcgggtatagaacccatgggggggggctgggtacaattccgaatacgctattacatgtttgcgcctagttttggtggttttgatggggaaaccagctttctttaaccttg

SEQ ID NO: 97804 - DNA, 528 bp, Zea mays
  unsure (1)..(528): unsure at all n locations
tgtaggggccgtgtggctacngcactacgnaccgtcctaccggcccggaattcccgggtcgacccacgcgtccgcggacgcgtgggttcctgcaggatggcactcctccttggcttgctgctgctagtagtagcttgggccgcgatcgctgatgaacgactccggtatctactaccagctggctcttatgtggccaggagcatactgcgagcagaccagcgctgggtgctgcaagccgaccaccggcgtctcggcggcgcgcgacttctacataacgggcttcaccgtccttaacgcgaccaccgacgctgcagtgaccggatgccacaaccaaagtccttacgacccttacctggttaccggcattcaagggctcgatcaatactggagccacaataagtggcccagacaccaccggcagaacaacttggataacccccggaaaaagggccgcgcctggttccggcctaacgaggaaaacttcctcgagaattgccttttctttcggaacccgataacccacttgtg

SEQ ID NO: 97805 - DNA, 541 bp, Zea mays
agatgcgtggtgtcccaacctcgagtgtactgcataccgcgccggaattcccgggtcgacccacgcgtccgctccttgtgagtctgagctgaagaggaggaggatgaggacgagaagcagcagcgcaaccggatgagggagagcgaagatgcgccgcgtcgcgctgttgctcgtcgccgccgagtgcgcgctggcggcgccggatgacgcggtcgtcactgacgggcttctcccgaacggcaacttcgaggatggcccgcccaagtcggcgctggtgaacggcacggtggtgtccggcgcccacgccatcccgcggtgggagacgtccggcttcgtggagtacatcgagtcggggcacatgcagggggacatgctgctggtggtgccgcacggcgcgcacgcagtgcggctgagcaacgaggcgtcgatccggcagagcctggccgaggcgcgcggcgcctactacggcatcacgttcagcgcggcgcggacgttcgcgcatgcggagcgggtgaacgtgttcgtgaggccccaattgggc

SEQ ID NO: 97806 - DNA, 546 bp, Zea mays
  unsure (1)..(546): unsure at all n locations
tggtaatgagtggcgcgntgtgatgagtccagctctcatcggacctgccgtaccggtccggaattcccgggtcgacccacgcgtccgcggacgcgtgggcgacccacgcgtccggcgcgttgaggccgagctccacgagcccaccggcaggagcggttcgcttatcgtctccgcctgcgggttcggcttcgtccccgccgagttcggcttcctgtttcactccaggcagtgggaagtgggaaccacccttcgcgccggccaccgtggaggcgtacgtgagcctgcaggtggtgtttggtttgatgaatcatattcctcaaatttggtagatgagcccattcatattagaaatttggtggatgagcctattcatattagtactaactaactatgagaaatgaggtgttgatggatcaacttattacattccacaaaccaaatgaaaaaaagtgaggagtgagaactagctcgttcatcaaagaacaccctataaaagaattgtcattgacatcagcacctacgaatcagccacgctcgaagtagtcn

SEQ ID NO: 97807 - DNA, 533 bp, Zea mays
  unsure (1)..(533): unsure at all n locations
tatgcgttgggtagaccctagcgccgtacgcacttacttaccggtccggaattcccgggtcgaccaacgcgtccgcagcaccagctaagcctttccaacaggacagcaccatggctgaggaggaggccaagaaggtggaggtggaggtcaccaaggagcccgaggcggcggcgaaggaggacgtagccgatgacaaggccgtcatccccgcgaccgacccgccgccgccgccgccgccggccgacgactccaaggccctggccatcgtcgagaaagttgcagatgaacctgctcccgagaagcctgcccctgcgaagcaagggggctccaatgacagggatctcgctcttgcaagggtggaaacagagaagaggaactctttgatcaaagcttgngaagagaatgagaaggacaaagctgagaacaaggctgctaagaaagtatccgctattctttcatgggaaaacacaaagaaagcaaacatagaagctgaacttgagaaaattgaagaacaactggaaaagaagaaggct

SEQ ID NO: 97808 - DNA, 544 bp, Zea mays
  unsure (1)..(544): unsure at all n locations
agatcggttgctgattnccttatacgangtcacatggattatcagttccgatactcaatccgatggacgacccacgcgtgctacttctacgagaggatatagagatttagaacagctcgttcgagaccatgaataggatcccacacctggtgctgatcctgtacctccaggccgctctggtcatgggcatcttcgccgctttggctaaagaaaatgccctggttgagagcaaggccatcgacatcaacccgtggcagctcaagtcctgcaccaactgcaactttttcttttcgggcttctacacctgcaactactttaaaaagactgcgacccctctgcaaaaatgcctttcttcttcactccttctactcttcaacaacattttatttgctccgacacctttctttaattggccgtcccaaattctatatcaaatatgaaaaacgcgcccttcttctttcttctaataaattctttctttcatccacctgcctgttcattttttaacctaccttatttttgtgcttctacgatacttaccttc

SEQ ID NO: 97809 - DNA, 542 bp, Zea mays
  unsure (1)..(542): unsure at all n locations
tgaggntcgctgatttagagaaggattgtattgctctaccggtccggaattcccgggtcgacccacgcgtccgttcactctgtgcgctcctcggcgcgtgcccacgtctcccacgcctccctccctgcattcgccccttcagatccggtctgccccgccgccgccgatgtccgaaggtcccgtgggatcccgccgctggcggtgcgacctcggcggcgacgagcgctggctctcgggggccgctggcgacgaccaattcgaccgcctcccggacgcgctcctcctcgtcatcttcaaccgcatcggcgacgtcaaggcgctcggccgctgctccctcgtctcccgccgcttccacgagctcgtgccccttgtctactccgtcctcgtccgcgtcgactgcgttatccccgacgagcccccgtccttctcggncttctcgtcgacgccggcctcttctaccgggttcgtgcgcgctcgcgggggcttcttacacgatgcgcgcattgtgctcggcggcattgtgaagcccattcacgcgcttg

SEQ ID NO: 97810 - DNA, 545 bp, Zea mays
tgaggtccgattgcattatctgatagtcataggacctgccgtaccggtccggaattcccgggtcgacccacgcgtccggcttctacgagaggatatagagaggaagaacagctcgtccgagaccatgaagagcagcccacacctggtgctgatcctgtgcctccaggccgctctggtcatgggcgtcttcgccgctttggctaaagaaaatgccctggttgagagcaaggccatcgacatcaacccggggcagctcaagtgctgcaccaactgcaacttcttcttctcggggctctacacctgcgacgacgtcaaaaaggactgcgaccccgtctgcaagaagtgcctcgtcgccgtgcacgccttctacttgggcaacaaccagttcaagtgcaccgacaactttcttggcatgtgccggcccaagtgcttgatcagagaggaagaacgcgcgcttctgctagctgctatatgcttcggtctttcgccgccggacggtgcatggttcacgtaccgtgtgttgtgctactaccatacctactggg

SEQ ID NO: 97811 - DNA, 549 bp, Zea mays
  unsure (1)..(549): unsure at all n locations
ctgatattagatggtagtgtggntcccttcagcctgtcatagcactgtcggttccggttcggaattcccggctcgacccacgcgttcggcttctacgagaggatatagagaggaagaacagctcgtccgagaccatgaagagcagccgacacctggtgctgatcctgtgcctccaggccgttctggtcatgggcgtattcgccgatttggctaaagaaaatgccctggctgagagcaaggccatcgacatcaacccgtttcagctcatgtgctgcaccaactgaagcttgtacttatcggggctctacacctgcgaccacgctgaatgggacatgggacgcgccctgtagaagtgcattaagcgcggtcactgttgctactacgcccacagcgaccgctacacttgccagagctctatcggcacgtgctttccctatcgttactatccttatggacaagttcgcctgcttttcccgtcaagctctaaatcgggggctccctttacgggtccggattaatgctttacgggaactggaaccccaaaaaact

SEQ ID NO: 97812 - DNA, 546 bp, Zea mays
  unsure (1)..(546): unsure at all n locations
cgagggtccgttgccatgatccagctctcatcgcacctgccgtaccggtccggaattcccgggtcgacccacgcgtccgaacgcgctcccggtccgaaaggcaaaccagccaccagtcccaccaccaccctctgtcttcgcctccgctgccgattcgaaagcacccgtcctgtcccctcgcaaaaccctagctccagccaccatgaagggcaaggctgacacctccaagaaggacgagggcaggctccgggcgggcggcgccgccggaaagcgcaagaaggccgccgcgagcggcaagcccaagcgcccgccctacgccttcttcgtcttcatgtctgaattcaggcaggagtatcaggcgctgcaccctggcaacaagagcgttgcgaccgtgagcaaggcagcaagggaaaagtggcgtgctatgtcagatcaagagaagcaaccatatgtggaccaagctgggcagaagaagcaggactatgagaagactaaggcgaactttgattagaaggagagcacaagctcaaagaaggcttagactgn

SEQ ID NO: 97813 - DNA, 541 bp, Zea mays
  unsure (1)..(541): unsure at all n locations
ggttnttagagcntctgagctgagcctaggctcagtancgcatgcctctaccggtccggaattcccgggtcgacccacgcgtccgctcgcctcttgttttctcccgagccccatccttccctcccggtctctccttgcgagctagtaccctacttgctccacagtgccacaccgctcgcgctggagtatgggttcgagcccgatgtggtggtcaggaccaccaccgtcgccgtggagccgcggtttagggaaatggtgggcgctggtagggccattcgtggtgaaggccgtcgggttcctgctgctcgcgggcctcttgttccgggtgctctggtcctttccgtcctctccggcgccggcgttgcagatcacaaaaggaaaatgcagtcttttcaatggggaatggataccaaacccctctggtccagcctatacaaatgcaagctgtcgatttattgacgatcaccagaactgcatgatgaatggtagacctgataaggaatatctacattggaagtggaaaccttatggatgtgatctt

SEQ ID NO: 97814 - DNA, 541 bp, Zea mays
  unsure (1)..(541): unsure at all n locations
agagcgntgcgtgagatcgaaatgtactggactgctctaccggtccggaattcccgggtcgacccacgcgtccgcccacgcgtccggtccaaaatccagaccgctggtaggagtatctcgtagacattgaacaacggctgcatggcgagcgcctgcgccacctccatccccctcgtctcggcgccctctgcatgcccgtccaagaagaccaccgtcgccaggttccggcgccgcacggcgacgtgcagggccagcagcggcggtggcggtggccggggcggcgaaaatgatggcctcctttggctgccccggcgggacgtgatgctcaacggcctgtccagtgtcgccgccgggctcgcctggtaccccggcgtcgcgtccggcgcggatgcggtgtgcaccaaggccgacaaggtgaacgagaagaccgtgcaatgcacggacccggccgggcagcttccgtgccctctggtggcggcgacggaacccgtggacttcaagccggaaagccaggtgacccgcattcggaagcggtgcattt

SEQ ID NO: 97815 - DNA, 526 bp, Zea mays
  unsure (1)..(526): unsure at all n locations
gggctgagacgggttnntaccgctgagaccctancgtacgacgtaccggtccggaattcccgggtcgacccacgcgtccgaagcacaagcgcactctagcaatggcttctgaggttgtccgccctagcgacgccgagctactaaaggcacaagccgacatatggcggctcagcctctcctacctcacgcccctgtcactgaggtgcgccgtggagcttggcatccccacggcgatctaccgccatggcggggctgcctcagccgctgagctggtcacggcgctgtctctcccctccactaagctgccgttcctccgccgnctgctgcggctcctcgccgcgtcgggcgtgttcaccgtcgacaagcagagcacggaagaggagcggtaccgcatcagccccgtgtcctacctcctggtggacggcatccctcacgaagaccacatgaaccacaccgctctggtgctcacctgcacctcgacgcgctacatcgaggcggggatagggctggcggagtggttcaagag

SEQ ID NO: 97816 - DNA, 504 bp, Zea mays
cggtgccggtatgcactgacgactgatacctgtggactgacgtaccggtccggaattcccgggtcgacccacgcgtccgactgtctgtgcgaaggcgaccattccttcttcgctccttcgccgccgctatggttaagtactcgcaggagccgggcaaccctaccaaatcggccaaggccatgggaagggacctgagggtccacttcaagaacacaagggagacagcttttgggcttcgcaagctgcctttgaccaaggctaagcgataccttgaggatgttattgctcacaagcaggcaattcccttccggagatacttgggaagtgttggtcggacctgacaagcaaagtctcgccactccaatgggcaaggtcgctggcctgttaagtcagccaggttcatattggatttgctgaaaaatgctgagagtaacgctgatgtgaaaggcttggacgtggacaacctctatgtttcacacattcaggtgaaccaagcccagaggc

SEQ ID NO: 97817 - DNA, 541 bp, Zea mays
  unsure (1)..(541): unsure at all n locations
gaggnttttctgtcgctgaagccctagagctgtacgactgcacgtaccggtccggaattcccgggtcgacccacgcgtccgcccacgcgtccgcccacgcgtccgcagcatcggccactaccacctagctagcgaacgagaacgaccatggcgtcccaggccatcgagagccaccgtgcaggcgctgaggtcgtcaccggaggagacgcaatctgcaggaagaagtcaatcgagctgctggaggagctcggcctccccaagggcttcctgcctcttgaggacatccaggagttcgggtacaaccgcgtgacagggttcatgtggctggtgcaggggaagaaggtggagcacaccttcaaaaagatcaagcagactgtgtcgtacgccactgaggtgacggcattcgccgagaagggcaagctgaggaagatcaccggcgtgaagacataggagctgatgctctggctcagcgtcgtcgaggtctacgttcccgaggcctcaccagagaaggttaccttcaagactggcactggcctatccg

SEQ ID NO: 97818 - DNA, 512 bp, Zea mays
  unsure (1)..(512): unsure at all n locations
agctatggcagtggtgcgtgcaggggacctttgncgatacgacttgcgttccggtcttgaattcgacgggtcgagccacgcgtccgaccggagcagcggcgctcgcgcgggcggagccatggcggacgacgattacaacgggatcgggatgggctatgaggatgagcctccagaacctgagattgaggaaggggccgaagaagagcttgagaacaacgaagatgcccctgatgatgtcataggtggagagggtgaagataaggaacaggaaaagaccaagcgtgagcgcaaaacaacaaaatatatgacgaagtatgaacgtgcgcgcattcttggtacacgagccttgcagataagcatgaatgctccagtcatggttgagcttgaaggagaaactgaccctcttgagattgcgatgaaagagcttagagcgcgcaagataccctttacgatcagacggtacctacctgatggaagttatgaagactggggagtagacgagctcattgtgg

SEQ ID NO: 97819 - DNA, 519 bp, Zea mays
  unsure (1)..(519): unsure at all n locations
tggagctgtcgtgtgctagtaataagaangattacaggactgnctcgtaccggtccggaattcccgggtcgacccacgcgtccgggtcgatatcccagtagacaaatatccaacattcaatttcgttggccgcatccttggtccaagaggaaattccttgaagcgggtggaggcaaatacggactgccgtgtgctaataagaggtcgtggcagcatcaaagatccagcacgggaggaaatgatgcgagggaagccaggatatgaacacctgaatgaacccctccatatattggttgaggcagagctacctgttgaaatcattgatgcgcgcctgatgcaagcccgcgagatccttgaagatctgctaaagcctgtggatgaatcccaggactacttcaagaagcagcagctacgggagctcgcaatgcttaatggcacccttcgtgaggaagggatgcagagatccggttcaacgtcccctttccacaacagccttgggatgaagagagccaagacaag

SEQ ID NO: 97820 - DNA, 505 bp, Zea mays
gctgctcgtgtcgatcgataaagactgccgtacgtactgacgtaccggtccggaattcccgggtcgacccacgcgtccgcacccgtgcctgtgtctcaccagcccactttccccagtactctactcacccacccactcacggactcatctactgagcagcgcggtgggcatccgagcgagagggcgagcgcggaaggatcggaattccgaaggttgggcatggaggcgagcggcgagaaggctgcggtggtgcgacggctgatggaagcgaaagaagtgttcgggaagaccttctcgggaatcgccgccgagacgggtctcaccaacgtctacgtggcgcagctgctgcggcgccaggcgcagctcaaggccgacacggtgcccgcgctgagggcggccctgcccacgctcacggacgacctcatcgaactcatgatgcagccgcccttacggtcctaccaccccaacatcgtccacgagcccgccatttacagattgaatgaag

SEQ ID NO: 97821 - DNA, 541 bp, Zea mays
  unsure (1)..(541): unsure at all n locations
gatggggnncncnnccaactgaagactgaggctcggtgcgactgacgtaccggtccggaattcccgggtcgacccacgcgtccgcgctgtcgaacctccagttcctcagcgcctcccacaccaacgtgtccggcgccatcccggagtcgctggcgcggctgcgcggcctcgactccgtggacctctccagcaaccggctgacgggcggcatcccggcggcgttcgccgacctgcccagcctccggtcgctggacctgcggcacaaccagctgacgggccccatcccggcggggctggtgcaggggcagttccggtcgctggtcctgtcctacaaccagctcacgggccccatcccgcgcgacgacgcgcgcgacgagatcaacaccgtcgacctctcccacaacaggctcaccggcgacgcctaccacctgttcgtcgccggccggcccatcggcaaggtagacctgtcgtggaactacctcaacttcgacctcagcaggctggtgttcccgccggagctcacgtacctggacctgtccca

SEQ ID NO: 97822 - DNA, 505 bp, Zea mays
  unsure (1)..(505): unsure at all n locations
tgagctgtgctgaacacgaagatgatgcactgcctgtaccggtccggaattcccgggtcgacccacgcgtccgcggacgcgtccgcccacgcgtccgcacatacacatgcacaagcgcactctagcaatggctgatgaggttgtccgccctagcgacgccgagctactaaaggcacaagccgacatatggcggctcagcctctgctacctaacgcncctgtcactgaggtgcgccgtggagcttggcatccccacggcgatctaccgccatggcggggctgcctcagccgctgaagctgtcacggcgctgtctctcccctncactaaagctgccggtctccgacgactgctgcggggtctcgccgcgtcaggcgtggtcaccggtcacaaggcaaacaacggagaaggggccgtccccattaagcccgtgggctaacctccgggggaccggattcctcacgaggaccacattgaacaaaccgctcttgtgcttaactgggcctac

SEQ ID NO: 97823 - DNA, 508 bp, Zea mays
  unsure (1)..(508): unsure at all n locations
tgagggtagtgtgatagcatataggaagtactgctgtaccggtccggaattcccgggtcgacccacgcgtccgcagcagtcaccactcccaagccagtaccgagtcctacgagcagtcgcacgcaagtgtcaagagacgaaacggtcgacatggctcgcacgcaatctgccgtagcggtcgccgtggtggccgcggtgctgctgctggcagcggcggcgacgacctcggaggccgccatcacctgcgggcaggtgagctccgncatcgcgccctgcctctcctacgcccgcggcacggggtccggccccttcgcgtcctgctgtagcggcgtcagggaacctcaagagcgctgncagcaccgncgccgacaggcgcgccgcctgcactgcctaaggacggcggcagggggcgtaagcgccttaacggccgcaacgccggcagcattcccttcaagtgcggcggtagcattccctacaccatcagcaccttcaccgactggtccagggc

SEQ ID NO: 97824 - DNA, 509 bp, Zea mays
tgagcgctgagtgaggttcggtcacgtccgcacgacgtaccggtccggaattcccgggtcgacccacgcgtccgctgcgagctacagtccaacatcagcaagctgcagtactacatgaccaaggtacagccctagagatgctagctatagcacgacatgaacaagctacagcgccaccttaccagttgatagcccaacgttaccagctatacaggcccacatcaaccgcttacagccgcacatcgccgtcctacagtgcaacttgaccatgttataggcctacattaccttcatacagccgtacgtgccctttatacagccctacgtaccgctgatacagacctacctagcgctgctacagcccgacatgacctgcttacagcccgacattaccaggatacagcccaacgggaccgaactacagtcctacatctccgagctacaggcctacatttccgagctacaatccttcatcagtcaagtacaggcctttacatggatagtctcca

SEQ ID NO: 97825 - DNA, 517 bp, Zea mays
  unsure (1)..(517): unsure at all n locations
cgtctgcgctcgtntggactgacgttcagttgctcgctacnactgnccgtaccggtccggaattcccgggtcgacccacgcgtccgcccacgcgtccgaaacatctgtggtttgtgtgtcatgaatcgtggttgtggcttcgttggtttaatggacctgttgtgtcctctgtgttgtacccaaaactcttctgcagcagtatggcttgaatccttgtgaagttacgatgtttgaacttaaaagtctgctcattatgttctttttctggttatatctcctaataactgcctgggatcaaatttgattcactggtgtttattggaccaataataacccgacaacatgtcgcacctactactacaacgcgcacaaaaaaaagggcggccgctctagaggatccaagcttacgtacgcgtgcatgcgacggcatagctcttctatagagtaacctaagttcaattcactggccgtcgatttacaacgtcatgactgggaaaaccctggcgttacccaactt

SEQ ID NO: 97826 - DNA, 500 bp, Zea mays
tgaggttgctgaactagatcatgattgcacgcttaccggtccggaattcccgggtcgacccacgcgtccgcccacgcgtccgcggacgcgtgggcagatcctgattttgatttggatattcgagatgatgtccaagatgagtgttccaagtttggtgcagtgaagcatatttttgttgacaaaaatactgcaggctttgtgtatctgcagttcgatagcgtgactgcagcagcaaaggcccaaaatgcccttcacggaagatggttcgctgggaagatgattacagcgacatttatgtccgctctggagtacagtacgaagttcccaaacttgtgagcatatgcccggaagaagtggccagacctgcatagttcggttggagtattcgcaagtgcttgatcgttggatggtagacgaacaccttattgattgtatgacaggatagttgcagcaccgggcgtcactatcagtacaatgcttgatgtactttatttacggcg

SEQ ID NO: 97827 - DNA, 532 bp, Zea mays
tgagcatgccgtggtcgactgaagactgaaagcgatagcactgccgtaccggtccggaattcccgggtcgacccacgcgtccgtttgcttttcttttctatatcccgttcgtgaggaatctccacaacttggagtctggcgcccttacaaagatgttcacaaagaatcacggagtaagggagggattagcaactcacacaagacacaaagatcacagcatattcgcacacacaagactcagacttaagctcatgagactagcacactataacggaggtgttctttttagcttagctaggaatgcaaatgacttgattcgttggaaaaaaaacaaaaataaaaaaaatataaaaaaaatgactaatatgaaaaattaaaaaaagaaaattatttaaaaatgaaaacaattaaaacaataaacttaattaaggaagttaaaaaataatatacaatagacaataaaaaaactggcgtatccatttataggccccatcttaacatcccacttaaggtattggttatcttataaaag

SEQ ID NO: 97828 - DNA, 504 bp, Zea mays
  unsure (1)..(504): unsure at all n locations
tgtagtnnttactgccgccaaaagactgacgcacgtcgtaccggtccggaattcccgggtcgacccacgcgtccggatcgatggagagtggaagttcgactcaagaaactctgtgttggaatggtctattctcctgatcgatcagtcgaatcgcagtggttccatggaatttgttgttcccccagctgacccatcatcgtttttccccatctccgttggattttctgcatcgagtactttcagtgatctgaaggttactggaattcttcctctgaaggaaagcaacccttccaagttttctcaacgggctcggttggtcactggtaacttcccaagtggttaaaccctggacccgtgagggttgttccactggaaggttccaataccaaaggtaattgccgggacctattccagccattggaccggagaatattttggggttggaaaaattctttaccaatcgcctcttaatggtataacctatatggccaatggtggtctaaa

SEQ ID NO: 97829 - DNA, 518 bp, Zea mays
  unsure (1)..(518): unsure at all n locations
ggagcagtgcgtgtcgctgatgnaagggagcgatngcataccgctccggaattcccgggtcgacccacgcgtccggccgtctcccacgattcgtttgtcttgcgacagctgggcgaccgtcgtcgccgccgcccgtctccaggtgcccaggtcttcgccggtccctttgccgccgacgagcaccagccaggaagaaaagaagctgaaccatggggaagagaaagtcagctgctaagccacctcctaagaagcggatggacaagcttgacactgtcttttcctgcccattctgcaaccacgggagtagtgttgagtgccgaattgacatgaagaatctgattggcgaagcatcttgtagaatctgtcaggaaaacttcagcacaactgttaatgcactcactgagcctattgatatatatagtgaatggattgatgagtgtgagcgtgtcaacactgttgaaggcgacgatgatgcgtgagcttgccccatgcgatgaaactggtacctacaatcgtaa

SEQ ID NO: 97830 - DNA, 587 bp, Zea mays
  unsure (1)..(587): unsure at all n locations
agcgcgaatttctctgacnacattacgactgtcgtaccggtccggaattcccgggtcgacccacgcgtccgcccacgcgtccgcccacgcgtccgaatgaaacctatgtgaacattgaatatgaagcttctgagatgtttgatctgcacaatgttgtcatatctatacctctgcctgcagttcgggaggctccaagtgtcaaacagattgatggaaagtggaagttgacctcaagaaactctgtgttggaagggcctatcctcctatatggaccactcaaatcgcaggggttccatgaaattggttgttcccagatctatcgtgaaatatttttccccatctgtgtggaattttgggcatagagctcttatcagagatcaaaggggtcagtggaatcttctctgaaagaaagggcacctcctaaagtttcccgcaggggtcttttgtcacaagtaagttttaaaattgttaaaagggtgacccgcttgtccaaatgtggatcccccttaaaattaatgctgagaagcctaatttttttggccatgggattcttcatgggcttgaaacttttgtaagtgtttgtgatt

SEQ ID NO: 97831 - DNA, 570 bp, Zea mays
ggggccgtatgactaactcagtactcgtacgactgacgtaccggtccggaattcccgggtcgacccacgcgtccggcaaagcttagggcatatcatcatactgctcaaacaaaggccgataagcaacattattcaagtatgggtcttgacctatctaaaggtatcgttcgcaacaaccttgagtatggcttgttaaagccttcgttgagcaaagtgaaaattatcaatttggcaccgaaggttgcattactattcctaggaatgaccacctgatccaactttaccaaggaaaaggttacccagaaaaagtattaacccaccccattttgtggtaaggactcttttgcccctggttgtcaaacccggaaactttttttctttttcccatttttccgttaagttttttgcttgctgtgtgtgaacacatcgtgtaaggtgttgtaaggaaaacctgagaatgaaaggtggattaaacgattccccgtgggcttgacgttatttagaataacgacccaacggatggatcaaaatttgcgtgtattggggccaaaacaagtcctctttaaggat

SEQ ID NO: 97832 - DNA, 555 bp, Zea mays
  unsure (1)..(555): unsure at all n locations
agttatttgtttgcgttgatgcctgcnattgacgncnatactactgccgtaccggtccggaattcccgggtcgacccacgcgtccgctatgacggaaatgtggtaggagaaaaggagattgacagcaggctaattcaggaaaatgatgtgatcaaagtagtcccaggtggaaaagttgcttctgatggattcgttatttggggccagagccatgtgaatgaaagcatgattactggagaatcacggccagtagcgaagaggaagggcgatactgtaattggaggaacagtgaatgagaatggtgtgctgcatgtccgggcaacatttgtcggatcagagactgcactggcacagatcgtaagactagttgagttcgcacaaatggcaaaagctcctgtccagaagttcgctgatcagatatctagagtctttgtcccactgggtatcgttctctctttgcttacttggcttgtgtggttcttagctgtgagattccatggttacccatacttatggataccattttccatgataggtttcagcttgctctttagt

SEQ ID NO: 97833 - DNA, 570 bp, Zea mays
  unsure (1)..(570): unsure at all n locations
tgatgcgtgctaattgcctgcggacctaccgccngtacgaaccgctccggaattcccgggtcgacccacgcgtccgcggacgcgtgggtggcgcgctccgatccaagagatggcggtgccgctgctgacaaagaagatcgtgaagaagcgggtcaagcagttcaagaagccccatcttgaccgctataagtgccttaagccaagctggcgccagccaaagggtattggactccgtgtcaggaagaagttcaagggatgcaccttgatgcccaacattggttacggctctgacaaatcaaccaggcactaccttcccaataagttcaagaagtttgtggtgcacaatgtctctgagctggagttgctcatgatgcancacagaacctactgtgccgagatcgcccacaacgtttcaaccaagaagcgcatggagattgttgaacgtgccgcgcagctcgacattgtggtcaccaacaagctcgccaggctccgcagccaggaggatgagtagtctggtttcttgtcataacggncaactagatcctgccattcccggcttgtaggaactac

SEQ ID NO: 97834 - DNA, 540 bp, Zea mays
  unsure (1)..(540): unsure at all n locations
cggtgtcgagtagtttgaaacgatgctgtaggcactgccgtaccggtccggaattcccgggtcgacccacgcgtccgctatgacggacatgtggtaggagaaaaggagattgacagcaggctaattcagaaaaatgatgtgatcaaagtagtcccaggtggaaaagttgcttctgatggattcgttatttggggccagagccatgtgaatgaaagcatgattactggagaatcacggccagtagcgaagaggaagggcgatactgtaattggaggaacagtgaatgagaatggtgtgctgcatgtccgggcaacatttgtcggatcagagactgcactggcacagatcgtaagactagttgagtccgcacaaatggcaaaagctcctgtccagaagttcgctgatcagatatctagagtctttgtcccactggttatcgatctctctttgcttacttggctagtgtggttcttagctgggagattccatggttacccatactcatggataccatctttcttggtaggtttaacttggttn

SEQ ID NO: 97835 - DNA, 577 bp, Zea mays
  unsure (1)..(577): unsure at all n locations
atggtggtgttgaggnctgggggactgacgacgtctcgtactgcccgtaccggtccggaattcccgggtcgacccacgcgtccggccagggccgtttccgaggacacgtcggactccggcggcgactagctcatcgaagacctcagggcaaagtgggacgccgttgaggacaagcccaccgtcctcctgtacggcggcggctccatcctggcgctatggttgacgttcgatgttgtcagcgccatcaacgccttgcctctgctccccaagatcctggagctcgttggcctcggctacaccggctggatcgtgtaccgctacctcctcttcaaggaaagcacgatagagctggtcgacgacattgagaccctcaagaaaaagattgctggaactgcagaataagcgctagctctcgtggaaagctttagaaccaacgactagaggggccgtatattctattgcaattgagatattaaccgacgaacgtacgtaccaatgcagctactgtcgcccatgttatgtggtgtgtgatgcattcctttccttcttgattccttacgaatacttatgaagggaa

SEQ ID NO: 97836 - DNA, 544 bp, Zea mays
attggtgcctgtgctgatcactgaactcgtaggcatgccgtaccggtccggaattcccgggtcgacccacgcgtccgatgcactcagtgcgaaggctactcatgcatatgaggatgcaagaagaaaagttgcaaatgttgtcaacgcagctgatagcagagagattgttttcactcgtaatgctactgaagctattaatctggtagcctattcatggggactatctaacttgaaagaaggagatgaaattgttcttacagttgcagagcatcatagtgctattgttccatggcaatttgtttcccagaagactggtgccaccttaaaatatgttggattgactaaagaaaatgtcccagacattgagcagttaaaagggtttctgtcgaacaagacaaagatagttgttgttcatcatgtctcatatgttctaggttccatgcttcctatcgaggagattgtaacatggtcaaacagagttggagctaaagtccttgtaaatgcttgccaaaagtgttccccatattgcaaagtgatgttcaaa

SEQ ID NO: 97837 - DNA, 568 bp, Zea mays
  unsure (1)..(568): unsure at all n locations
gatgcgtgtattcccacgncactaacgacnngtgcgtaccgcnccggaattcccgggtcgacccacgcgtccgcgtcttcgcgccggccgcggcggaccgcccgctccccgtggtggtgtacttccacggcggcggcttcgcgctcttctccccggccatcgggcccttcaacggcgtgtgccgccgcctctgcgccgcgctcggcgccgtcgtggtgtccgtcaactaccgcctggccccggagcaccgctggcccgccgcctacgacgacggcgtcgacgcgctgcgcttcctcgacgcccgcggcggcgtcccgggcctggacgacggcgtgcccgtcgacctcggcacctgcttcctggccggggagagcgcgggcggaaacatcgtgcaccacgtcgccaaccgctgggcggcggcgtggcagccgtccgcgcgggcccttcgcgtcgcgggcgtcttccccgtgcagccctacttcggcggcgtggagcgcacgccgtcggagctggagctagagggcgtggcgcccgtggtcaacctcaggcgctccgacttctcgtggac

SEQ ID NO: 97838 - DNA, 571 bp, Zea mays
  unsure (1)..(571): unsure at all n locations
tgatgccntntagactgatnaactacagcggtacgactgacgtaccggtccggaattcccgggtcgacccacgcgtccgctctaattgaggaccaccttacgcaagagcccatcaatgagtacgtccagagttgcgacatgctggctttcaacaagatctagagttcagtttctgagattgggcaacggcagcggctcatctcgtcaagtttgtgctgggatgccagtttatcccttctagtctattacagaaatgttgttcggagctgagtctattataaacatcttggtctgagtttattgttgagtggtgccagtttttttcaatatacatttatcttaaaaacaaaccaaaaaacaaagggcggccgctctagaggatccaagcttacgtacgcgtgcatgcgacgtcatagctcttctatagtgtcacctaaattcaattcactggccgttgttttacaacgtcatgactgggaaaaccctggcgttacccaacttaattgacttgcagcacattcccctttcgccaggtggcgtaatagcgaagaggcccggcccgatcgccctn

SEQ ID NO: 97839 - DNA, 570 bp, Zea mays
  unsure (1)..(570): unsure at all n locations
gtgagccatattccctgagncccgcgactcgctcgtactgacgtaccggtccggaattcccgggtcgacccacgcgtccgaaaaaggactgcgaccccgtctgcaagaagtgcgtcgtcgccgtgcacgcctcctactcgggcaacaacaagttcaggtgcaccgacaccttcctcggcatgtgcggccccaagtgctagatcagagaggaagaacgcgcgctgctgctagctgctatagcttcgttcttccgccgncggccggtgcatggttcacgtactgtgtgttgtgctactacgatacgtactggcttcttgtgtgttgggttcttgttcttctctcgacagtgcaccttgcgcgccaacaataaaccgtggttggccatgaataaatagtactatgaagttattggcaaaaaaaaaaaaaaagggcggccgttctagaggatccaagcttacgtacgcgtgcatgcgacgtcatagctcttctatagggtcacctaaattcaattcactggccgtcgttttacaacgtctggactgggaaaaccctggcgttacccaacttatt

SEQ ID NO: 97840 - DNA, 550 bp, Zea mays
  unsure (1)..(550): unsure at all n locations
ggatgggggtgcgctgtgaactgaaacatgaagcngtacggacgccgtaccggtccggaattcccgggtcgacccacgcgtccgcgcggtgacgctgctcatccacaacccgggcgtggaggaggacccggcctgcggcccgctcatcgacggcgtcgccatccgtgcgctgtacccgcccgcgctcgccaggcgggcggggggaaacctgctcaagaacggcgggttcgaggagggcccctacttcctgcccggcgcgtcctggggcgtgctcgtcccgcccaacatcgaggacgaccactcgccgctccccgcctggatgatcgtctcgtccaaggccgtcaagtacgtggactccgcgcacttcgccgtgccccaaggcgcgcgcgccgtcgagctggtgggcggccgggagagcgcgctcgtgcaagaaggtgcgcaccgtgcccggtggtcctaccgnctcggcttcggcaggggggactcgggcgatggctgcncgggcttcattgccggcgagggctacgcggggcgcggccacggtcatggn

SEQ ID NO: 97841 - DNA, 572 bp, Zea mays
  unsure (1)..(572): unsure at all n locations
aggttggcgtgttgcctgcnctcatgtncatcatcgtnaccgctccggaattcccgggtcgacccacgcgtccgctcaagtcacagattgcagatagcaaagcaagctattgggaacgacgctccgacaaccaccgcacgcctcaggtttggctagtagacagcatcgacgacgaggaacagaagatggcaccgaaaggagccgtattcgtctcaatctcacagttccccatcaagaaaatccgcaaggattgcacctacctgagcactccagcaatgaagatccctgaaaccatgcaaaatatccatgcctgcgagaactggctgccaagacgggtgatgagcgcctggcgcatcggcgggatacttcacgccctggaagggtggaccgtgcacgagtgtggggacgccatggtgcatgctgagaaagcatggtcagctgctattaggcacggattcgttcctttgacgaaagcctgaaagcctgtacgcaactctagacgccattcgacgatggctggaaaactacgtttcagcaatcggtagcacaaattcttcccagcttcagaagcg

SEQ ID NO: 97842 - DNA, 567 bp, Zea mays
  unsure (1)..(567): unsure at all n locations
gagcgtcgtgttgccagggcactgacgatcgtcgaaccgctccggaattcccgggtcgacccacgcgtccgctcccactttactcctatccactgcggcctggacgcgtgcgagaggcttgaccaagcagcagcagcagcagcagcgatggcgcctctgaagctgtacgggatgccgctgtcccccaacgtggtgcgcgtggccaccgtgctcaacgagaagggcctcgacttcgagatcgtccccgtcgacctcaccaccggcgcccacaagcagcccgacttcctcaccctcaaccctttcggccagatcccggctctcgtcgacggagacgaagtcctcttcgagtcccgtgcgatcaaccggtacatcgccagcaagtacgcgtcggagggcacggacctgctccccgcgacggcgtcngcggcgaagctggaggtgtggctagaggtggagttccaccacttctacccgaacgcgtcgccgctggtgttccagctgctcgtgaggccgctcctgggcggcgcccacgacgcggctgtggtggacaagcacgctgagcagctc

SEQ ID NO: 97843 - DNA, 572 bp, Zea mays
  unsure (1)..(572): unsure at all n locations
gagcgtgctagtgnttggggcactgacgcatcatctnaccgctcctgaattcccgggtcgaccgcacgcgtgcgctcaagtcacagattgcagatagcaaagcatgctattgggaacgacgctccgacaaccaccagacgcgtgaggtttggctagtagacagcatcgacgacgaggaacagaagatggcaccgaaaggagccgtattcgtctcaatctcacagttccccatcaagaaaatccgcaaggattgcacctacctgagcactccagcaatgaagatccctgaaaccatgcaaaatatccatgcctgcgagaactggctgccaagacgggtgatgagcgcctggcgcatcggcgggatacttcacgccctggaagggtggaccgtgcacgagtgtggggacgccatggtgcatgctgagaaagcatggtcagctgctattaggcactgattcgttcctttgacgaaagcctgaaagcctgtacgcaactctagacgccattcgacgatggctggaaaactacgtttcagcaatcggtagcacaaattcttcccagctacagaagcg

SEQ ID NO: 97844 - DNA, 570 bp, Zea mays
  unsure (1)..(570): unsure at all n locations
tgagcgtcttttcactgatgcctgcngctcatagtactgacgtaccggtccggaattcccgggtcgacccacgcgtccgcgccgccgccgaccacggcctcacgcacatccacctgtacgtgcacgagacgtacaccggggcgaacgccacggccgccgccgtgctgcagtccccgctgggcgccaactcgtcgttcgggagcatgggcgtggtggacgacgagatacgcgtgggcccggaccggtcgtcgcagctcgtcggccggtaccagggcgtcttcttcggcacgagcgtgcagctgggcgccggctacctgtcgtccatcacgctggtgttcaccgccggcgagtacaacgggagcaccctgtccgtgcaggggcccctgctcgggttcacgggcaccatcgagcgcgccgtggtcggcggcaccggcaagttcaggctggcgcgcgggtacatgcttttcaagatgataagcaagccgacgccggagacggacgtcaacgagatcaacctgttcgtgctcatgcactccgctggcaagtactagcgcacacaccttgagactt

SEQ ID NO: 97845 - DNA, 549 bp, Zea mays
  unsure (1)..(549): unsure at all n locations
ggggtgtcgctgtcaactgaaacatgaagcngtacgcactgccgtaccggtccggaattcccgggtcgacccacgcgtccgcccacgcgtccggtccagatcccgccaccccaaccgatctgccggcctccagcatggcggcggcggcgggggcgagggcgagggcgaaggcagcgggagccctggcgctggcgctcgtgctcgcgctagcgggggccaactccgagggcgacgcgctctcggcgctgcgccgcagcctcagggaccccggcggcgtgctgcagagctgggaccccacgctcgtcaacccctgcacctggttccacgtcacctgcgaccgcgacaaccgcgtcacccgcctagatcttggtaatttgaacttatctggtcatctggtgcctgagcttgggaaattggagcatctgcagtacctggaactttacaagaacagcattcaaggaacaatcccttctgagcttggtaattggagaatctaantagcttggacttgtacaagaacaacattttcgggacaattaccttcttcct

SEQ ID NO: 97846 - DNA, 544 bp, Zea mays
  unsure (1)..(544): unsure at all n locations
tggtgcgctatgctgacgctgaggcactagcactgccgtaccggtccggaattcccggtcgacccacgcgtccgggcggcgagaagaaggggaagaagaaggccaagaagagcgtggagacctacaaaatctacatcttcaaggtcctgaagcaggtgcaccccgacatcggcatctcctccaaggccatgtccatcatgaactccttcatcaacgacatcttcgagaagctcgccggcgaggccgctaagctcgcccggtacaacaagaagcccaccatcacctcccgcgagatccagacctccgtgcgcctcgtcctcccaggagagctcgccaaacacgccgtctccgagggaaccaaggccgtcaccaagttcaccagcaattgagcagcctncagcgtccacggatttgttaggtctccccttcttacaagggttcttcgtcgtgtcctctacccctnccctccccgcctatgtatgtgctgtgaaatcgttgatgttctcgttcggtgaacaaaggccagtagctaagctgcctgctt

SEQ ID NO: 97847 - DNA, 546 bp, Zea mays
ttatgtggtgtcgtgtcactgatactgaggcagtacgactgcgtaccgtctcggaattcccggtcgacccacgcgtccgcggacgcgtgggcggacgcgtgggcggacgcgtgggcggacgcgtgggatcgggtttgagggctatgagaagcgccttgagatcacattctctgaggcacctgtctttgtggaccctcatgggcgtggtttgcgtgccctctccagggcccagattgactctgttctggatcttgcacggtgcacaattgtgtccgagctcttcaacaaggatttcgactcatatgtcctttctgagtcaagcttgtttatctatcctctgaagattgtcatcaagacctgtggcactaccaagctcctgctcaccattccaagaatccttgagcttgctgaagagctgtctatgccacttgctgctgtgaagtactcccgtgggacgttcatctttccttgcgcacagccaggccctcacaggagcttctctgaaggaattgcttgcactaaaccgttatttgggggccttgaatt

SEQ ID NO: 97848 - DNA, 569 bp, Zea mays
  unsure (1)..(569): unsure at all n locations
tgtggtgttgcctgcncaactaagcatcgtcgtaccggcccggaattcccgggtcgacccacgcgtccgcccatctggccgctttgtcattggtggacctcacggcgatgctggcctcactggccgcaagatcatcattgacacctacggtggctggggagcccatggtggtggcgctttctccggcaaggacccaaccaaggttgaccgcagcggagcctatgtcgcaaggcaggctgccaagagcatcgtcgccagcggccttgctcgccgcgccatcgtccaggtgtcttacgccatcggcgtgcccgagcctctctccgtgttcgtcgacacgtacggcaccggcgcgatccccgacaaggagatcctcaagattgtcaaggagaacttcgatttcaggcctggcatcatcatcaaccttgacctcaagaaaggcggcaacgggcgctaccttaagacggcggcctacggccactttggaagggacgaccctgacttcacctgngaggtggtgaagccactcaagtcggagaaaccttctgcctaaggcggcnctttttttcaga

SEQ ID NO: 97849 - DNA, 572 bp, Zea mays
  unsure (1)..(572): unsure at all n locations
agtcgccactttgcctgatngcagccgccgtctgtactgacgtaccggtccggaattcccgggtcgacccacgcgtccgcccacgcgtccggcctcattcatctccattcgaaacaccctcgcacccacactctgccttcgtccccagcctaaatccccgcaacgatggctcgcacgaagcagacggcgcgcaagtccacgggcggcaaggccccgaggaagcagctggcgaccaaggcggcgcgcaagtcggcccctgcgaccggcggcgtgaagaagccgcaccgcttccgcccgggcaccgtggcgctgcgcgagatccgcaagtaccagaagagcacggagcttctcatccgcaagctgcccttccagcgcctggtccgcgagatcgcgcaggacttcaagaccgacctccgcttccagtcctccgacgtcgccgcgctgcatgaggccgccgaggcctacctcgtcggcctgttctaggacaccaacctttgcgccatccacgccaagcgcgtcaccatcatgcccaaggacatccagctcggccggcgcatccgcggggagcgcgc

SEQ ID NO: 97850 - DNA, 557 bp, Zea mays
gaattgtgtgtcctgtcttccagtaccgtagcaataccacgcccgtccggccgattcccgggtcgagcacgcgtccgtcccgcgtccgggcggatccgatccgtgcgcctgctgtgtgtgtgtcggtggagatgggcacagcttacgctcccatggcgagccaggtgatgaagagcagcctcgtcgtgcactcgaggccgagtggcctgtcaggcgctgctgcgctcacgatgcggcccctgttcaccgtcaaggccatccagcccgagaaggctacgtaccaggtggtgcagtctatcaactgctaccccttcatcggcagcctggagactcctgtcacctcgagcccgctcgtggcgtggtacctctccaaccttccggcctactcgactgttgtgagcccgctgctgctgtgcgtctgaggttggtctttcatcactgctactcttcttgggtggcgccttcatgcttaattggcccctcttttctagtatgccctgttcacttgtcggctcttttccgcttttgtgcctgtctgccttgtattctatttttat

SEQ ID NO: 97851 - DNA, 545 bp, Zea mays
gaatagcgtgtcgtgtggctgaaactacgctgtacggatgccgtaccggtccggaattcccgggtcgacccacgcgtccgggccgtccggagctgcctgccagtagcagcaacagcaaaacatgaagcagccgtaagcggcagagagcatggcgagatcagggcgggaagcggatcccggagaggaggaacggaagctggtgctgggcaagtacgagctgggccgactgctggggcagggcaccttcgccaaggtttactacgcgagggacctgagcgccggcgccggcacggtccacagctgcagcgtagccatcaaggtgatcgacaaggcgcggctgcggcgtacggaggggatggtggagcagctgcgccgggagatctccatcatgcggatggtgctgcaccccaacgtggtgggcatccgggatgtgctcgacagccggttccgcgtctttcaagtcatggagtacgcgcgcggcggagagctcttcggcaaggtggcccgggccgactcgactaggacaaccgcggcggttccttcaa

SEQ ID NO: 97852 - DNA, 569 bp, Zea mays
  unsure (1)..(569): unsure at all n locations
aggcgcgtantgaacccagggctcgatcgcacgtacgtaccggtccggaattcccgggtcgacccacgcgtccggtcgaagcgaggtaggggaggttcggctgggaacaagttccgcatgtcactgggtctaccggtggcggccacggtgaactgcgcggacaacacgggcgccaagaacctctacatcatctccgtcaagggcatcaagggccgcctcaaccgcctcccgtccgcctgtgtcggcgacatggtcatggccaccgtaaagaagggaaagcccgacctcaggaagaaagtgatgcccgccgtcatcgtccgccagcgcaagccgtggcgtcgcaaggacggtgtctacatgtacttcgaagataatgctggagtgattgtgaatcccaagggtgagatgaaaggttctgcaatcactggacctatcggcaaggagtgtgctgacctttggcctaggatcgccagtgcagcanatgccatcgtttgagagcttggtggaatgtgttagacttgagtatgatcatctcaattgtgtgttgcaggtgttgtaagggtgctatt

SEQ ID NO: 97853 - DNA, 572 bp, Zea mays
  unsure (1)..(572): unsure at all n locations
tgctcgtantcatccctgatagactgagagcagatacgactgtcgtaccggtccggaattcccgggtcgacccacgcgtccggggtgaccctacatttcgcgaagagcttcttaactttacacaaagggggcgtattctgcaacgtttcaaactttaaggatgactcaagtccaattgcttgggattgttctgcctgggtgcgcacatatggattgtttttggaagaaaggttggagtgcttcatagttctgaagtatgatgttgaagctgagcgtttgtccaaacaaggtcaaggtcctgaaaagggtcacagtagaaccagagagttggattcacaggatctgttagagcagctgccagcattgcagcagttactataccgactcgttggatgtcggcctgaaggagctgcaaataataactacctggtgcaatacgctttagctttggtgctaatagaaagctttaaaatttattgtgctataaatgatggaattatcaaccttgttgataagttttttgagatgccaagacatgaagcacataaagctcttgaaatatacagaagggc

SEQ ID NO: 97854 - DNA, 573 bp, Zea mays
  unsure (1)..(573): unsure at all n locations
cgccgaananaaaactgagaccttaagatcctcgtgacgacgtaccggtccggaattcccgggtcgacccacgcgtccggctgcagctagtgtggactggagatccaccactccaccagtccggtccatctgctggacctcgattggtttcttcttacctaggaacatccggggatgtcgactcctgcgaggaagaggctgatgagggatttcaagcggttgatgcaggaccctgcggccggcataagtggcgccccgcaggataacaacataatgctgtggaatgctgtcatatttggacctgatgataccccgtgggatggaggtacgtttaagctgactctccagtttaatgaagaatatccaaacaaaccaccaactgtgcgatttgtttctaggatgttccatcctaacatttatgctgatggaagcatatgcttagatatcctgcagaatcagtggagtccgatatatgatgtagctgcgatactcacgtcaatccagtcattgttgtgcgatccaaacccgaattcgcccgctaactctgaagcccgccgcatgttcagcgagaac

SEQ ID NO: 97855 - DNA, 546 bp, Zea mays
cgtagtgcgtgacctaactcatgaaacgtagccgatcgcacgccgtaccggtccggaattcccgggtcgacccacgcgtccgggagttgtcacgaagtacttgcttcagagtggtcttcaagaatacctcaacgggcaaggattccatatcgttggctatggctgtaccacttgcattggaaactctggtgatctcgatgaatccgtatcaactgccattacagaaaatgatgttgttgctgctgctgttttgtcgggtaaccgtaacttcgagggtcgtgtgcaccctttaactcgggctaactatcttgcctcaacacctcttggtgttgcttatgcacttgctggaacatgtgatattgattttgagaaagagcccattggatttggaaaggatggcaatgaagtcttacttcagggatatatggcccttgacagaagaaattgcgcaggttgtccaatccagtgtgctgtctgacatgttcaagggcacctatgatgctatcacaaaaagcaacccaatgttggaccaatttactgttccag

SEQ ID NO: 97856 - DNA, 547 bp, Zea mays
  unsure (1)..(547): unsure at all n locations
agttcgtggtgacttagtcccaccctgacgacgcatngcacataccggtcctgaattaccgggtcgacccacgcgtccgcttctacgagaggatatagagaggaagaacagttcgtccgagaccatgaagagcagcccacagctggtgctgatcctgtgcctccaggccgctctggtcatgggcgtcttcgccgctttggctaaagaaaatgccctggttgagagcaaggccatcgacatcaacccggggcagctcaagtgctgcaccaactgcaacttctccttctcggggctctacacctgcgacgacgtcaaaaaggactgcgaccccgtctgcaagaagtgcgtcgtcgccgtgcacgcctactacttgggcaacaacaagttcaggtgcaccgacaccttcctcggtatgtgctgccccaagtgctagatcagagaggaagaacgcgcgctgctgctagctgctatatgctctgttcttcgttgtctgcctgttccatggttaagtacttttgtttatttctactacttatcctttttggtt

SEQ ID NO: 97857 - DNA, 540 bp, Zea mays
  unsure (1)..(540): unsure at all n locations
cgtacggataanttccctgaaccgaaatgcatcgacttcccgtccggaattcccgggtcgacccacgcgtccgcccacgcgtccgcccacgcgtccgcttagcaactacggtacgtgaccctgagcgcgtgattgttgcgaaacaacgaccacctcggtctacaccttaaaggtttgcgcgacatggcttttcatagtgctcaattggatctatcccctgagcataggagaaaagtatcaatctgtacagtggatccaagtattctataaagcatgtatcctccaatttcccacaagcgagaatggcatgatatgatggatgaaatggctgttgcggtcaattgtctttcaaggatcaattgtctttcaagaaccacacttatgtattggtttgtgtgcagttcaagctctgcaaggtgaggtctgttcagtttggccagaaagtcatcccctacctgaacacctacgacgaccgtaccatccgctaccccgaccctctcatcaaggccaacgacaccatcaagatcgatctggagaccn

SEQ ID NO: 97858 - DNA, 541 bp, Zea mays
tgtagcggtactactcctagtcgtagatcgcatagcacgtaccggtccggaattcccgggtcgacccacgcgtccggttttttgagatgccaagacatgaagcacataaagctcttgaaatatacagaagggctggccaacaggctggaaatctatctgatttctacgagaattgccggggtttagaacttgcgaggaattttcagtttcccactctgagggagccgccacaaacatttcttgcaactatggaggagtatgtgaaggaggctccacgcatggtcccagttcgagaacccctggaacttcctgagaggcttcttcttacatacaaacctgaagaatcggaggacattcgtgagcctgcttctgttgaagaggaaaatgcaccagttgaagagcctgttctggtaccacctgttactgaagttggttcaccttccaagtccgaggtggccgatactggtgacttactgggcttagatgatccaaatcctgctgtatcagctatagaggaaagcaatgctcttgccttggctat

SEQ ID NO: 97859 - DNA, 528 bp, Zea mays
  unsure (1)..(528): unsure at all n locations
gttttgcgantnctgaacatcgtccgtangccatgcacgtaccggtccggaattcccgggtcgacccacgcgtccgcccacgcgtccgtttgatattgggctgaagattggcaaccttgaagatactcggaatcgtactctgcatggtattttaagggttcaaagctgtttcagggggcatcaagcccgtcatcatgcaagagaacgaacaagaggagttttgactcttcaatcattcattcgtggtgagaatgcacggcaaatttactcctctttgttgaggaaacatagagccgcagttgttttgcagagaaatgtgagatgttggcttgcaagaaggtatttcataaatgtccggaaggcctcagtgataatacagtctggtattcgtggcagtcttgttcgaagatgtaatggcaatattgatctaataaatgtgctaagagagtttgaatcanaacaggtacaataactgtgtgtgcgcgcgcgccccttatacggtgctgctggcagctatattcatgccan

SEQ ID NO: 97860 - DNA, 532 bp, Zea mays
  unsure (1)..(532): unsure at all n locations
tggcggtgcgcctcacgccncgtacgccatactcgtccggaattcgggtcgacccacgcgtccgcccacgcgtccggtccagatcccggcaccccaaccgatctgccggcctccagcatggcggcggcggcgggggcgagggcgagggcgaaggcagcgggagccctggcgctggcgctcgtgctcgcgctagcgggggccaactccgagggcgacgcgctctcaagcgctgcgccgcagcctcagggaccccggcggcgtgctgcagagctgggaccccacgctcgtcaacccctgcacctggttccacgtcacctgcgaccgcgacaaccgcgtcacccgactagatcttggtaattcgaacttatctggtcatctggtgcctgagcttgggaaattggagcatctgcagtacctggaactctacaagaacagcattcaaggaacaatcccttctgagcttaggaatttgaagaatctaataagcttggacttgtacaagaacaacatgttggggacaatacctncttcc

SEQ ID NO: 97861 - DNA, 538 bp, Zea mays
gaagtgcgctgcaatgctaggcgaggtaccgcacgactgtaccggtccggaattcccgggtcgacccacgcgtccggccgggcgttgatgttgaagaggtcgtccctggtcatgccgggcttcctgggcactcctgcggggatgatgacgatgtcggagccctccagcgcctccccgagctggtcgtcccccatgaaccccttcaccagggcgggggagttgatgtgggagacgtcggccgcgacgccgggggtgccggcgatatcgtagagggagagggaggaaacgagcgggttgagcttcatgaggagcgagagcggctgcccgatgccacccgccgcgcccaggatggccaccttccgctccggattggccgaagacgcgtagccgcggctgcagcggaggagctcggccgtggacttcagcagcgacggcctcatggcggcggctgggtcggggatcactcgctcgggcgtgtctcgctgtggattggtggggggagcggcagtgggcggcggcgagaagtgaggggagcact

SEQ ID NO: 97862 - DNA, 520 bp, Zea mays
  unsure (1)..(520): unsure at all n locations
gctagcgtgtcctgtcgctgcaacgtagtcatacgaactccttcggaattcccgggtcgacccacgcgtccggagcataccagagctctcaaggaaattcttcagagaattatcccaacaatacaacagtggttgtaggtgggttagattccaatgtaaatgaggagtatctaaggcaaatttttactctgtatggagaaatttcttatgtgaagattcctgtaggcaagcattgtggatttgttcaatttaccagcaggtcatgtgctgaggaagccatccgaatgctgaatgggagtcaggttggtgggcagaaagttcggctttcatggggccgtagtcctcaaaacagacaggcttctcagcatgatgccaacaaccagtataatgggaacagctattatggataccaacagccgggttatgaaggttatggctatggtgctttcagtgcacaagaaccaagcatacaaaactactacggatactcttgtttgggtaactatgagcagcaacaacn

SEQ ID NO: 97863 - DNA, 541 bp, Zea mays
  unsure (1)..(541): unsure at all n locations
tggatcggtnnctagtcctacncgagatagcatgcacgtaccggtccggaattcccgggtcgacccacgcgtccgaacactgcatgtgttccgtattgtgaggccattttaaggaatgcagaaagatgtgtttgagtgaaaaagatttctgctctgaagaggagcacatttctccaataaatttcaaatcgctaataattcttgatgagcgaggatttcaagcacacattagacgcatagtagaaaatagctgtgatgcaactgatgtcagaagaaatatcgcaatgctatgtcatataatttctgaagacggctgaagttctctctttaccgacttgtcgtcctacgagttcctacaatcagttggtagcaggtgtctatatatataatatgatggaagcagagaagaatggaaacattcttatgcaaaagtatgaggttggaaaattattggggcaaggaacatttgccaaggtataccatgctaggaacatagagacctctcaaagtgttgctatcaaaggtattgacaaggacaaaa

SEQ ID NO: 97864 - DNA, 538 bp, Zea mays
  unsure (1)..(538): unsure at all n locations
cgtaggcgnatgctatgccagcngagtaccgcactgacgtaccggtccggaattcccgggtcgacccacgcgtccggctgcaacctgcagcagacgcatatgtccgtcgccgccgccttgggccgcgccgatgagctgcgcgcgctggacgacaccctcgccggcgtccgcggccttgtagcgtctggtgcgaagcaagttcctcgcatctttcgcgtcccctacccggaggagctactccaccatgaacaaccgccagcggcggcgaccgtcccggtgatcgatctcagcggcgaccgcgcagccgtgatcgacgccgtccgtggggcggcggcggggtgggggttcttccaggtcacgggccacgcggtgcccgagcaggtgatgtcagcagccgtggcggcgatgcgggcgttccacgaagccgacggcggggagggcagcgacaaggcgcggctctactcgcgagagcccgggagggcggtcaagtaccactgcaacttcgacctgtaccagtctcccgtggccaactggcgcg

SEQ ID NO: 97865 - DNA, 538 bp, Zea mays
  unsure (1)..(538): unsure at all n locations
ttagtgggnttactcatgtcagctgagtacngcactgacgtaccggtccggaattcccgggtcgacccacgcgtccgcaaggtcgttgcaccgcctgagaggaagtacagtgtctggataggagggtcgatcctagcctcgctcagcactttccaacagatgtggatatcgaaggaggagtacgacgagtctggcccgacaattgttcaccggaagtgcttctagggtttcacaagttcctcgtcgttacctagtctcaaattatgtcccctccatttctcgagatatgtgtggcagatttgcatgatacgtttgtttgtttccatcggacctgaagtcttcttggggataggctcccccctttgtatgttgtggctccaatccatgtgcgagcacgctgtgtctgtcgtgacacctggttcgtgagatgggttgtcaaacttgattggttaggtgtgcgtggctggaagagctgatagttatatatntggctgggactgtgcccgttgtatgtatctgaattcctgaaggcgtgtaa

SEQ ID NO: 97866 - DNA, 526 bp, Zea mays
gttagcgtgtgtgacctgagactacgctatgcgaaccgcgtccggaattcccgggtcgacccacgcgtccgatgaaagacggaaaaaaatcattggcttatcaaattctctatcgagccgtgaaaaagatgcaacagaagacagaaacaaatccactattggttttacgtcaagcaatacgtagagtaactcccaatataggagtaaaaacaagacgtaataaaaaaggatcgacgcggaaagttccgattgaaataggatctaaacaaggaagagcacttgccattcgttggttattagaagcatcccaaaagcgtccgggtcgaaatatggctttcaaattaagttccgaattagtagatgctgccaaagggagtgggggtgccatacgcaaaaaggaagcgactcatagaatggcagaggcaaatagagctcttgcacattttcgttaatccatgaacagaatctaggtatgtagacacatggatccatacatctcgatcggaaaagaatcaatagaaggaga

SEQ ID NO: 97867 - DNA, 536 bp, Zea mays
tggaggctactgatcctacctgacaagtacgacctaccggtccggaattcccgggtcgacccacgcgtccgcggacgcgtgggtttagcgatggtcctgttcatggctggcgccgcgctgctcgccggggctgccggcgccggcgcgcagcagggcgtgtggagcatcatcacccggcccatgttccagagcatgctgagccaccgcggcgacagcgggtgccagggcgccttctacacctacgacgccttcatcgaggccgccagcaagttccccggcttcggcaccaccggcgacgagcagacgcgcaggcgggagctcgccgccttcttcggccagacgtcccacgaaaccaccggtggatgggcgactgctccggatggaccgtttgcctggggatactgccgggtgaaggaacagaaacagacggacccaccctactatggacgaggacccatacagctaactcataagtacaactacaggctcgccgggcaagcgctgaacctgaacctggtgggcgacccggacctggt

SEQ ID NO: 97868 - DNA, 536 bp, Zea mays
  unsure (1)..(536): unsure at all n locations
cgtgcgctgacttacgttcagtnctagactgcatgatcgtccttccttgaataatcgacccgggcgacccgtgacgccacgctttagccaaggtcctcatcatggtttgcgccacgctgctcgccgatgctgcctgcgcctgttcgcaggatggcgtgttgagcatcatcacccggcccatgttccatagcatgctgagccaccaccgctactgcatgtgccaaggcgccttctacacctacgacgccttcatctaggccgccagcaagttccccggcttctgcaccaccggcgacgagcaaactcgcaggcaggagctcgccgccttcttctgccagacgtcccacgaaaccaccagtggatgggcgactgcttctgatggaccctctgcctgctgatactgccggctgaaggaacataaacagacggacccaccctactatggacgacgacccatacaactaacttataagtacaacttcatgctctgcggtcaagctcttaaccataacctagttggcgaccctgacctgttg

SEQ ID NO: 97869 - DNA, 539 bp, Zea mays
  unsure (1)..(539): unsure at all n locations
tgagtgggnttactcatgataggagcagtacgcactgctctaccggtccggaattcccgggtcgacccacgcgtccgcggacgcgtgggattgttttgtcacaccgagaacccatacttacctaaactgtgtgtgtgtgtgcaggtgccaatggcttggcttcgccgagggatttcctttccccgacagcatggtttgagcaggagcaccaccctggatacacaatagtgcacaagtatggtggcgagctgttcagcgccacgcaggatttctctccattcaacgtggtcgcgtggcatgggaattatgtcccttacaaggtgtgttgtatgccattgtacacctgtctgccattgagatgtgtgtcgctgttcactccacccccttctctttcagtatgatctgagtaagttctgtccattcaacaccgtcctcttggatcatggcgacccgtcagtgaacacagttctaactgcgccaactgataagcctggcgtcgcgttgcttgattttgtaatattcccacccagatggctggn

SEQ ID NO: 97870 - DNA, 542 bp, Zea mays
  unsure (1)..(542): unsure at all n locations
tgtgggngnttactcatgctagcgagattancgcactgcccgtaccggtccggaattcccgggtcgacccacgcgtccgcccacgcgtccggtctaggtctagctagggtctggtctcgctgccccgccgcgcgcgcattcacaggcttctagacgttccgaggaggaggggaggtacccgccgccgcagccatggcgtcgaccaaggtccagcgtattatgacccagcccatcaacctcatcttccggttcctacagagcaaagcgcgcatccagatctggctattcgagcagaaggacctccggattgagggtcgcattatcggattcgatgagtacatgaacttggtcctcgaagacgctgaggaaatcaacgtcaagaaaaacactaggaaatcactgggccggatactcctcaaaggtgacaatataactttgatgatgaacagtggcaagtgaagattcttatggcaggaacgatgtttggtgctcgcttcgattatctgtgacacaatgtactccatccatccgtccagacttan

SEQ ID NO: 97871 - DNA, 528 bp, Zea mays
  unsure (1)..(528): unsure at all n locations
ggcaagccggtggtgaacatgagcctacgcactncgtaccgcgtccggaattcccgggtcgacccacgcgtccggaaggcgaaagagtagcagcagcaggcggcgccgagtagcggctccccacctcgagcttgccaccatggctagaggattgaagaagcatttgaagaggctcaatgcgcccaagcattggatgctggacaagcttggcggagcttttgctcccaagccatcttctggacctcacaagtctagggagtgcctgccactgatcctcatcatcaggaacaggctcaagtatgctcttacataccgtgaggtcatttccatcctgatgcaacgccatgtacttgttgatggcaaggtcaggacagacaagacctaccctgctgggttcatggatgtcatttccatccccaagaccaatgagaactacaggctgctgtacgataccaagggccgcttncgncttcacccaatcagggatgaggatgctaagttcaagctttgcagggttaggtctgttca

SEQ ID NO: 97872 - DNA, 537 bp, Zea mays
tgagcgctactgtccatgatgagtacgtacgcctctaccggtccggaattcccgggtcgacccacgcgtccggaccaacttggtgccctacccgaggatccacttcatgctttcctcctatgctccagtcatctgtgctgagaaggcctaccacgagcagctgtctgtggccgagatcaccaacagcgccttcgagccatcctccatgatggccaagtgcgatccccgccatggtaagtacatggcctgctgcctcatgtaccgtggtgatgtggtccccaaggatgtgaatgctgctgtggccaccatcaagaccaagcgcaccatccagtttgtggactggtgcccaactggctttaagtgcggcattaactaccagcctccaagtgtggtgcctggtggtgacctggccaaggtgcagcgcgctgtgtgcatgatctccaactccaccagtgttgtggaggtgttctcccgcatcgaccacaagttcgacctcatgtacgccaagcgtgccttcgtgcactggtatgtcggtga

SEQ ID NO: 97873 - DNA, 538 bp, Zea mays
  unsure (1)..(538): unsure at all n locations
cggtggtactacncctggcagcnaagtaccgactgacttaccggtccggaattcccgggtcgacccacgcgtccggctctctctctctattcgttccccgcctcaccccgagccagccgtctcgctagggtttcgccgccgccgccgccgccgccgccgctatgcctcgccgcagctcaggaaggtctgccccacgcccagctccccgtgctgctccagtgaggaacccgccacagccagcacgccaggctcctcctccagctcctgttcgagatggtggtggctccatgtttggaggaattgggtccaccattgctcaaggtatggcgtttggcacgggtagtgccatggcacacagggctgttgatgctgtattaggtccccggaccattcagcatgagactgttgcctcagaagctgctgctgctgcccctgcccctccagtgatgaatgctgacgctngcagcatccattctaaggctntccaagattggctcaacaactatggcagcgagatcagcaggtgccagttctacct

SEQ ID NO: 97874 - DNA, 522 bp, Zea mays
tgtttgcctgtggtgtcgctgaaacgtacgcatggctatacccgtccggaattcccgggtcgacccacgcgtccgctcatcaccaccttgtatgcagtttccctagcaacagtgatagtcctcctcctttggtggcacaagcccgcagtcgtggggaaagccactgccgttcccggcgacgagaagccacggcgacgactgccgcctgggccatggacccttccggtcatcggcagcatccaccacgtggtgcgcggcctaggacaccgcaccatgatggagctgtcccgtcggcacggccccctcatgttcctccgccttggcgaggtcccgacgctggtggtgtccagcgccgaggcagcggagctggtgatgaagacccacgacctcggcttcttgctccggccgaccaccagcgtcaccatcgacatcggtcgctgcaaaggcaaagggctcggcttcggcccctacggcgaccggtggcgtcagatgaagaagatcaccgttgggagctttttacgc

SEQ ID NO: 97875 - DNA, 540 bp, Zea mays
  unsure (1)..(540): unsure at all n locations
gtgcttactagtcatagatagaacatcgtantgcctgcaccggtccggaattcccgggtcgacccacgcgtccgggaccagaaaacatgcaggcgattcaagttgaacctgtggcctcatcattgaattcatcatattggtacattctacataatggaaacactgtgttcacttgggctggaaatctgaccactgcattggaccaagagttaatggaaaggcagcttgatgttattaagccaaacacacagtctaggtcacaaaaggaagggtcagaaacggaccagttttggagtttactgggaggcaaatctgagtactcaggccaaaaaatggtgcgagaactcgaaagtgacccccatcttttctcatgcatcctgtcgaaaggcaatttgaaagtcaaagaaatacaccactttactcaagatgatctaatgacagaagatgttttcattctggactgtcacacgagcatatttgtttgggttggtcaacaggtggatgttaaaagcaagttacaagctantggatgctgggaga

SEQ ID NO: 97876 - DNA, 542 bp, Zea mays
tgagtgccgcttgagtccgattcagttacgtacagtactgatcggtcctgtcttgaattaccgggccgaccgacgcgtccgcgcatcgtcatcaatcgagcagaggcgagggatagagatgacggagggcacggctaggggcggcgacatcctcatcgccatcatcctcccgcctctcggcgtcttcctcaagttcggctgcaaggtcgaattctggctctgcctcctgctcaccttcctcgtctatctccccgggatcatctacgccatatacgttatcaccaaggactacccagctagcgccgacataccgcgacaaggtgagagagctagccgatcacacagcgtacgtaatggagactaacgtactgctgagatcactataattagccctgtcgatcaatgctactggatggagactgaatctcagctgtgctgtgattctgctatatacctcgtgccggctggtctctattcactatccgtgctcccgcgtaatattcgttcagactcttgcgctatagtacatgaagcatgcaaat

SEQ ID NO: 97877 - DNA, 537 bp, Zea mays
  unsure (1)..(537): unsure at all n locations
tcggctncctgtcctcgatcgagatcgcatgcctctaccggtccggaattcccgggtcgacccacgcgtccggctatactcaaacacaaagaccaacttccgagaggttgccatcaaaggtttctgggacatgtacgacccagagggctactctttgtggttctgtgactacaagtacaatgatgagaacaccgtctcctttgtgaccctgaacaaggttggtggattcctgcagcggatggacctgtgccgtaagtacgcctttgggaagatgctcgtgataggctctgagccacccttcaagctgaagggcctttggctcttccgtggccaggatgttcccaagtttgtaatggatgaggtctatgacatggagctctacgagtggaccaaggtggacatctctgatgaggcccagaaggagcgtgtcaatgcgatgattgaggaccaggagccctttgagggcgaggccttgcttgacgcgaaatgcttcaagtgagtgtgcttgcctggagacagaactgtttagcccttgaa

SEQ ID NO: 97878 - DNA, 535 bp, Zea mays
tgagcgatgctagtgcttccggagcatgcacgactaccggtccggaattcccgggtcgacccacgcgtccgcggacgcgtgggggcgtcgcgcaacaccaacgaccgcgtcggcatctactacgaccgcgccgacgtgtacgccgagtaccgggcgatgcagatcacggtgcccaccgcgctgccgcccttcttccagccgcccaacgacgccgccgtctgggcgcccttcctctccgcctacaacgtcccgctgccgccctacctcgccaccgcgctcacacaggacgagacggcggggtacctgctcgtcaccatccgcgtcgacggctggatccgctggaaggccggggccttcatcaccagccactaccacctcagggtgcgctgccccgcgctgctcaccgtcaacgacggacaaggaagctacggctccaacgccggtggagggctcggctacttcaagttccagcgcgcagcaccctgcatcgtagacgtctgagatcgatctcgatcacaaatcacatttaagagct

SEQ ID NO: 97879 - DNA, 533 bp, Zea mays
  unsure (1)..(533): unsure at all n locations
cgttaatgcgtntggctgatcgctagcgcgctacgcactgccgtacccgttcggaattcccgggtcgacccacgcgtccgcccacgcgtccgcccacgcgtccgcttccgttctcaaaccaacctaggcaattcgccgcggcctgtcaccctcgcgagtcccgacctcccgcagccgccgcacagatggcacccaaggcggagaagaagccggtggccaagaagcccgcggaggaggagcccgcgacagagaaggtggagaaggctccggcggggaagaagcccaaggccgagaagcgccttccggcgggcaagtccaaggagggcggcgagggcaagaaggggaaaaagaaggcgaagaagtccgtggagacctacaagatctacatctttaaggtgctgaagcaggtgcaccccgacatcggcatctcgtccaaggccatgtccatcatgaactccttcatcaacgacatcttcgagaagctcgcggncgagtccggcaagctggcgcgctacaacaagaagcccaccatc

SEQ ID NO: 97880 - DNA, 526 bp, Zea mays
  unsure (1)..(526): unsure at all n locations
tatagcgtgtgtgtcgctgaaactcagcactncgtaccgcgttcggattcccgggtcgacccacgcgtccgcccacgcgtccgggtgggttggcttctcctccccctccggttcgggttcgggttcgtgaggttctccggggttcggtttcgtgggtgagcggatcgagatggcggcgtcggatgttgagtaccgctgcttcgtcggcggcctcgcctgggccacggacgaccactccctccacaacgccttcagcacctacggcgaggtcctcgagtccaagatcatcctcgatcgggagacgcaaaggtcccgcggcttcggcttcgtcaccttctacacggaggaggcgatgctgaacgccatcgagggcatgaacggcaaggagctggacggncgcaacatcaccgtcaacgaggcccagtcccgcggcggccgtggaggcagcggctgcggcgggtacggtggtagccgtggaggcggttgctactgcggtggcggtctgcgtgatggcggcggcggctac

SEQ ID NO: 97881 - DNA, 537 bp, Zea mays
  unsure (1)..(537): unsure at all n locations
taggctcttttnatcaacggtacgacatcgatganctaccggtccggaattcccgggtcgacccacgcgtccgaattagtccccatgttcttcgaatggatctcttaattgttgagagggttgcccaaacgcgggatataaggcatacccagtaaagcttacaagtaaaccagatatggagatggcgactaaagttgctgtttccatttttatagaatttcaagattacaatggatctatgaaaagatcgtgtatttacaactacaacggaatagtatacaaagtcaacaccaatgattaaatagaatttatggctacacaaaccgttgaagatagttctagacctaagccaaaacggactggcgcaggtagtttattgaaacccttgaattcggaatatgggaaagttgctccgggttgggggactactccttttatgggggtcgcaatggctttattcgcgatattcctatctataattttagaaatttataattcttctgtttaactggacggaattttaacgaattaggtttt

SEQ ID NO: 97882 - DNA, 538 bp, Zea mays
  unsure (1)..(538): unsure at all n locations
gtgccgctacttacgttactgatagcanagtacgactcttcctgtcctgaattatcgggtcgacccacgcgtccgaattagtccccatgttcttcgaatggatctcttaattgttgagagggttgcccaaacgcgggatataatgcatacccagtaaagcttacaagtaaaccatatatggagatggcgactaaagttgctgatcccatttttatagaatttcaagattacaatggatctatgaaaagatcgtgtatttacaactacaacggaatagtatacatagttaacaccaatgattaaattgaatttatggctacacaaaccgttgaagatagctctagacctaaaccaaaacctactggcgcaagtagtttattgaaacccttgaattccgaatatgttaaatgttgttcattttgggtgactactccttttaatggggttccaatggcttttattttcgatattcctatctataatttttaaaaattttaattcttcttgtttactggactgaaatttaacgaattatgtt

SEQ ID NO: 97883 - DNA, 539 bp, Zea mays
  unsure (1)..(539): unsure at all n locations
cgggcctgactcgcttccactttcggnatgctntgtagtgtcgtaccggtccggaattcccgggtcgacccacgcgtccgcccacgcgtccggtcatttatcgcgattttaaaacatctaacatactgctggatgcggagtgtaacgcaaagctctctgattttgggcttgcgaaagacggacctgtaggtgataaaactcatggttctactcaagtaatgggaacctatggatatgcagaaccaaattttgcaaggactggtcttttaccttaaagaatggtggctaccagtttcgggttggtgcttcttgagatgatgtcaggccgcaggtcgatggacaagaaccgcccgaacggggagcacaacctggtggaatgggcgcgccccctcctaggcgagaggcaacggttctacaagctaatcgacccttgcctggagggcaacttctctgtgaagggcgcgcagaaggctgcgcaactagcgcgcgtgtgcctgagcccggaccccaaggcgcggaccctgatgagccaagtggtg

SEQ ID NO: 97884 - DNA, 573 bp, Zea mays
gagtgtggttaagagttgttgaggagggtcatagtcttgaacctcagtactcatccgaccgccgtaccggtccggaattcccgggtcgacccacgcgtccgcccacgcgtccgcccacgcgtccgcttccctccctccctctccccgcgggccgccagaggcaatttcgccctcgattcgaccccgattcgtccgcccgcgaccgggattccctccgccaagcgcggatctgaacgctgcgctccgtgtcgtcgctcgaatccgccatgaagggggccaaatccaagggcgccgccaaggccgatgccaagctggcggtgaagagcaagggggcggagaagcccgccaagggcaggaaggggaaggccggcaaggaccccaacaagcctaagagggctcccagcgctttcttcgggttcatggaggaatttcgcaaggagttcaaggagaagaaccctaagaacaagtctgtcgctgcggtgggaaaagctgctggcgacaggtggaaatccctgagcgagtcggacaaggctccctatggagccaaggctaacaagctcaagctagagtccc

SEQ ID NO: 97885 - DNA, 585 bp, Zea mays
  unsure (1)..(585): unsure at all n locations
tggatattatagtgtatatatgtgaagtgaatggcgggttgatagttgcctgcgncactaaggacnttcgtaccgctccggaattcccgggtcgacccacgcgtccgcccacgcgtccgcagggagggcagctggtgtgcttgagaaccatgaggaggggagacgttgcgccatgcatggcctaagaagctttgtgcacgacaagactcctgagatcatgcctgcagttaacaagttcttcactgaccctaagtgaagcatgttgattggcatactactactactacttgctactggggattttacactttgctggcaactcaatatgttggggacatccatgacctctaaaagtactttgagcgcttggtgatgacttggtatatgtatgatggtggatgagtttgatcgtccatgcttgatgttcatattcatctgtcatctggatttgccgcacttcagtgataaaattgtcatttggataaaaaaaaaaaaaaaaaaaaagggcggccgctctagaggatccaagcttacgtacgcgtgcatgcgacgtcatagctcttctatagtggcacctaaaattca

SEQ ID NO: 97886 - DNA, 585 bp, Zea mays
  unsure (1)..(585): unsure at all n locations
gagtgtagttatatatatagttatgagatgccgaatcgatgatnctagtcactcatacgactgccgtaccggtccggaattcccgggtcgacccacgcgtccgcccacgcgtccgcccacgcgtccgcggacgcgtgggggcgtgctgaatccttggcagacggatccgtgcgacgcggggctggatctcagtggatcgtggcagcaaggccactctgccacttacaatgccccgtcgcgcccacgcgtccgaaaaaagaaatactacaactaatactagctacagaaaaattaaaaaatcggatagcaacataatatgagggcggacactcatgagctcccaaaattcctgccagcgctcttgcgatgaccatagcttatgtatggtggcaggtaagtctaatccattggtgccagggttgacaacttcgagtctgataaaccttttgcggaaccgatggaaatggtatgccttcgggattgaatattctaaatctggtcatgcccggcactttttaggatacatggcttttttccaacagtgtgcaacctttaaggcctttggaaaggtgccctagaatggtg

SEQ ID NO: 97887 - DNA, 578 bp, Zea mays
  unsure (1)..(578): unsure at all n locations
tggtgtgtatgatttagagttggtttatggggggtgccgagatcatgatatattgaatctcatacgaccgctcgtaccggtccggaattcccgggtcgacccacgcgtccgctcgtgcgatgggcgccgagaaacaacacacaatgctgactgatgaccgcaccatgccaggcaggaaatgatcgtgagcatggcggtggccggcgcgatcatcggcgcggccgtcggcgggtggaccacggaccggctcgggcggcgggcgtcgatcctggtggccgactgcctcttcttcgtgggctcagtgagaatggcgtaggccacgcgccccgcgctgctcgtggtgggccgtgtcttcgtaagccatcgcgtcggcatggcctgcatgacctccgcgctctacatactcgaggcgatcactgtcaggatccgcggatcgctcgtgagcaactaccgtttcctaataaccggcagccagttcctgggctacctcatgaacctcgacttcaccaacgctccggggacgttgaagtagatgctcagggttagcgngcctcccgggttcaacagctccggcttat

SEQ ID NO: 97888 - DNA, 569 bp, Zea mays
  unsure (1)..(569): unsure at all n locations
gaatattttttatatgggagtatactcgggtagtaaagctacnacatgagactgtcgtaccggcccggaattcccgggtcgacccacgcgtccgcttcaaccaccacaagaaggacgaggagcatcccgtcggcgagtacgggtactccgagagcgangtggtcaccgtcaccggcgagggcgagtactagaggtacaagaaggaggagaaggagcacaagcacaagcagcacctcggcgaggccggcgccatcgccgccggcgccttcgcactctacgagaagcacgaggcgaagaaggaccccgagcacgcgcacaggcacaagatcacggaggaggtcgctgccgcggcggccgtcggcgccggcggctacgtattccacgagcaccacgagaagaagaaggaccacaaggactccaagaaggcaaccgggagaaaaaacgcccaccactctattggtgtagccaataaccggccggtcccgaaccgagctagctagtttcgggacacacaaccacacccgtgttaaattgtgcctggatgcgtgggaaattaaggggacaaaaaa

SEQ ID NO: 97889 - DNA, 577 bp, Zea mays
ttaattaagtgatataatgagttatgagagccgtatcaatcgaacttagttcatcatacgactgacgtaccggtccggaattcccgggtcgacccacgcgtccgatatgtttagcagcagcaggtgtattgtgcgggtatgtaatggtattgcaactatattgggtgtaaaaccataataaatgtgggcaaatatgcaaggaaaaaaggcttctacttctaaaaaaaaaaaaaaagggcggccgctctagaggatccaagcttacgtacgcgtgcatgcgacgtcatagctcttctatagtgtcacctaaattcaattcactggccgtcgttttacaacgtcgtgactgggaaaaccctggcgttacccaacttaatcgccttgcagcacatccccctttcgccagctggcgtaatagcgaaaaggcccgcaccgatcgcccttcccaacagttgcgcagcctgaatggcgaatgggacgcgccctgtaacggcgcattaagcgcggcgggtgttgtggttacgcgcagcgttgaccgttcacttgccagcgcccctacgcccgcttctttcgcttt

SEQ ID NO: 97890 - DNA, 488 bp, Zea mays
  unsure (1)..(488): unsure at all n locations
ggttatgcagttnagtgaaaatgaacccttcgactgcctctccggtccggaattcccgggtcgacccacgcgtccgcccacgcgtccggtcaaaatacacgaagggcaacgaggcgaggcctagtatagaggaaaacgagtgagaggggggaaatgctgcgccacgccgcccgccgtctcgtctcccgcaccgccgcggcgcccaccgcccgccgggcgctcgtcacggcagaggtgcctgcggaggccgccgaggactccacgtttgtggagacgtggaagaaggtcgcccccaacatcgagcccccaacgacgcccctcttcctcatgcagccgcgcccgcccacgccggctaccatccccactaagctcaccgtcaacttcgtcctcccctacaagtccgagatcgccaacaaggaggtggacatggtaattgtaccagctacaactggtcagatgggcgttttgccaggccatgttgccacgna

SEQ ID NO: 97891 - DNA, 583 bp, Zea mays
  unsure (1)..(583): unsure at all n locations
ttattgatatatattaatggtagattaggcncgattggtagtttctagtacatgatgnatngtcgtaccngccttgaattaccgggccgacccacgcgtccgcggacgcgngggtccngatcgtcctgttcctcacagcagcagccatggcggccgagccggagaagcgggctgtccccgctgcacatgagacggccgtgcacatcgtgtacgttgaccgccccgaggacgccgaccctgaggagttccacatccggaccctcacccccgtcctcggcagctaacagaaggccagggacgcantgctctaccactacaataacgcctgcagcggcttctccgcgaagctcaccccccagcaggtcaaggatctcaaggagcaaccaggtgttctccaggttgtgccgagccagacttaccagctacatggtcctgggtctggcacttaccagggcacgacacacaccttgggccttatgtgaaggcgtttgagaatcaagaagattgtgtttaagtattgggtgtattgcacaggtctgaccaatgtggatagtccagtactattttagaaataagggacctt

SEQ ID NO: 97892 - DNA, 571 bp, Zea mays
  unsure (1)..(571): unsure at all n locations
naatatggttttaagatagttagtagatgccgatacatgaacttagtgctcctaggactgccgtaccggtccggaattcccgggtcgacccacgcgtccgcaagaacaacatttcggggacaataccttctgcccttggaaagttgaagtcccttgtatgcttgcgtctcaatggcaatcatttgactgggcccatcccaagggaactcgctggaatatctagtctcaaagttgttgatgtttcaagtaatgatttgtgcgggacgattcccacgtctggaccatttgagcatattcctctgagcaactttgagaagaacccgcgcttggaaggtccagagctacaaggcctggccatatacgacaccaactgctagaggcaccacgaagaaaagaactgctagaaagtaacgagcgaacaaggttaccagaaattgggcgatatagatttactaggtctggatctgtaatccttcctgcatagctcttattcgtaactcgctgtctgcacgaaaagtggtgtgtgttttagcaaaatgctttctgtccgtgaaagtaaacttgaactggt

SEQ ID NO: 97893 - DNA, 485 bp, Zea mays
  unsure (1)..(485): unsure at all n locations
gttatgcaggtntgtgaccatgacatgatgattctcgctaccggtccggaattcccgggtcgacccacgcgtccggagaattcttaattcatgagttgtagggagggacttatgtcaccacaaacagaaattaaaggaagtgttggatttaaagctggtgttaaggattataaattgacttactacaccccggagtacgaaaccaaggatactgatatcttggcagcattccgagtaactcctcagctcggggttccgcctgaagaagcaggagctgcagtagctgcggaatcttctactggtacatggacaactgtttggactgatggacttaccagtcttgatcgttacaaaggacgatgctatcacatcgagcccgttcctggggacccagatcaatatatctgttatgtagcttatccattagacctatttgaagagggttctgttactaacatgtttacttccattgtgggtaacgtaat

SEQ ID NO: 97894 - DNA, 489 bp, Zea mays
ggtgtgccggttagtgatccctagccggatcgactcagtcaccggtcctgaattcccgggtcgaccgacgcgtccggcgtcgttcttcgacccaaaccgtaaacagccgatgactagcccggtggttaccctatgcggcctcccaccctaactggttctcttcacaactgattactgggtcgatgttgacctctagactgcagcatatatcctggcctatttgctcgctgggaggccaattatgccacgacgaacacaggttgaacagctacataaaatttttaatttgtattgctccacaacagaataatattggaaaaagtctaatctacctcatgctacaatatttaatcctcagcaaccgtacagaaagcgaataacatatacttttaacgattttccacaatcaacacttacattgatctagacactacttgcaattgatccatcatatcgcttaacatactcttatgcattaagaaatgatat

SEQ ID NO: 97895 - DNA, 491 bp, Zea mays
  unsure (1)..(491): unsure at all n locations
agtttagccaggttatgtgtgccagcnactcgatgactctccctaccggtccggaattcccgggtcgacccacgcgtccgcccacgcgtccgaattcgtaaaggatgtgcacctggaaccagtaccgtttgacatggaccgggatttgagcaccccgacatacaaaaagaagcgtccgcaactgctcaagtactaccagggcgtgattgacaacatgtacaaaagtgctaagtgaactcactctacagtacacatcccgatgaagattcccaacgctgaatcttgaatgagcagccagaagttctgctgcgtatatgctcgtagtttgcatgcgagaattcttcctgtatcagtttttcagaaacgatttgccttgggcatatatatatagcaaaaccggctatgtggccagcagccaagtggagacaccgtttcaaattgattgaactatggcgaatactgattgacagaagggttagggcatgcttgtt

SEQ ID NO: 97896 - DNA, 566 bp, Zea mays
  unsure (1)..(566): unsure at all n locations
ggaattatttatatatagatagtattgccgtgtcgnattcctcncattacgacnttcgaccgctccggaatcccgggtcgacccacgcgttcgagacatctggccaaagcataacgcgctcacaggatctgctgcggtctcctgacatgggaaggacattcatcattgggcccgaggcctgctagttctctgccatggactacacttaccctctgtcgatgccgctccacgacgcagatgagctcaccaagtggtccctctaccgctcggtcatcgccgagttcatctccacgctgctcttactctacatcaccgtggacaccgtcatcgtatacaagcaccacacggacacggcctcttaaggccccgacacggcgtacagtagcgtgagcatacacggcatcatgtgggccttcagcggcatgatcttcatcctcagctactgcaccgtcggcctcttaggtaggcacataaacccggacgtgacctatcgactgatcctggccaagaacgtgttcctcgttcgaacgctggtctacattatctagcattccctggcgccattt

SEQ ID NO: 97897 - DNA, 482 bp, Zea mays
gatatgcggtagtaagccaaagagcttgactactttccctcccaattccctgtcgaccgactcttcaccccacgcgtccgattacccgatccacgaatttcaacatcaactaaatatcctctttctattgccgcattcaaaacttaggactttctattcaataatttcttaaatatattaccctatccccaaggcttgggtccccttctgaccattcaatccaatctttattcccaaaatcctgattccactaatcatttatttggtaccactcaaggaactggaactaccattctgacccttcttccgggattccatccacaaacacaaactttgttacttacctatatttctcatcatcatttagctatttcatttatttttctcattgccattcatatatatccaactaacttcacaattttgcacattattaaacatctttttataatcacatactccttcataggctcttattaaag

SEQ ID NO: 97898 - DNA, 570 bp, Zea mays
  unsure (1)..(570): unsure at all n locations
ttagtgattagattagagagtagtgccgatgcggtacctcgacataaggactgtcgtaccggcccggaattcccgggtcgacccacgcgtccgcggacgcgtggggcaaagcgaagcgcgcgcacagcagctgctgcaggtctcctgacatggcgaaggacatcgaagcatcggggcccgaggccggcgagttctcggccaaggactacaccgaccctccgccggcgccgctcgtcgacgcggatgagctcaccaagtggtccctctaccgcgcggtcatcgccgagttcatcgccacgctgctcttcctctacatcaccgtggccaccgtcatcgggtacaagcaccagacggacgcggcggcgtcgggccccgacgcggcgtgcggtggcgtgggcatcctcggcatcgcgtgggccttcggcggcatgatcttcatcctcgtctactgcaccgncggcatctcaagtgggcacatcaacccggccgtgaccttcggcctgttcctggcgaaggaggtgtccctcgtccgcgcgctgctttacatcatcgggcaatggctgggcgccc

SEQ ID NO: 97899 - DNA, 489 bp, Zea mays
  unsure (1)..(489): unsure at all n locations
ggggttggcgggtncgtgaaccctcnactgatcgactgctctaccggtccggaattcccgggtcgacccacgcgtccgcccacgcgtccgattcccggatccaggaatagcaacatgaactaaatgtcctgttgctattgccggatccaggggggagtacgttcgatggaataatttcttagatgtattaccctatccccaggggttgggtccccttctgacgggtcagtggaatctttatgcccaaaatcctgattcgagtaatcatttatttggtaccactcaaggagcgggaactgccattctgacccttcttgggggattccatccacaaacacaaagtttgtggctgaccgatattgctcatcatcatttagctattgcatttatttttctcattgccggtcatatgtatcgaactaacttcggaattgggcacagtatcaaagatcttttagaagcacatactcctccggggggtcgatttaa

SEQ ID NO: 97900 - DNA, 491 bp, Zea mays
ggttagtcgtgtagggtgacccacgactcatggactcacgtaccggtccggaattcccgggtcgacccacgcgtccgcccacgcgtccgcccacgcgtccgcccacgcgtccgtttcgttcacatccccttctctgacggcatgccccacgactgggccgaccgccacgccactgagaaccggatgcgcctccacgccctacgcgtgatccgcgagaggaagatggatggcgtagttgttttcaccgacgacagcaatgttcatagcatggagctgttcgatgaggtgcacaaggtccagtggatgggtgctgtatccgtcggaatccttgcgcatactggcacggcagaccaactacggctcactgaggaggacaagcagaatatgcctcttccagtccagggccctgcttgcaactcctcagggcatctgattggatggcacacgttcaactcattgcccttctctgggaagacggccacagttgtttt

SEQ ID NO: 97901 - DNA, 579 bp, Zea mays
  unsure (1)..(579): unsure at all n locations
ggaatgatagttatatagatttggagtagccgggtagtagacactgaaaactgacgacngtcgtaccgccgcggaattcccgggtcgacccacgcgtgcgcgccgcgctcctctgcttctacgccgtgcactctctctagtctctcccttcccttctacacgcctgcgcccccactcgtgagactctacctagccctagcgccagcaccacccgcccaacctcccggagagagagagagagaggaggaggccttcgccgccgccgttgccgtcggccgagacgccaggatgttcgggtaccagaagggcctcgatgtcgaggcggggacatcgggcgccgccgccacgggcggcgcgcgccagctctacccggggatgcaggagagccccgagctgcgctgggcgctcatccgcaagatctacgtcattctctccctccagctgctcctcaccgncgtcgtcgccgcagtcgtcgtcaaggtccgcgccatcccgcacttcttcaccaccaccagcgccgggctcgggctctacatctttctaatcatccttccctttattgggctgggccccggtgtc

SEQ ID NO: 97902 - DNA, 617 bp, Zea mays
  unsure (1)..(617): unsure at all n locations
ttattgagttttttatagatcggatgcccggagccgtagttccctgcngcattgangnacngtctgtnaccgctccggaattncccgggntcgactccacgccgnntccggtcggttcnnttggcttcnnctttctccaatcgaacctaggggttgacctgatgaccagccatgcctccgtgctctgggatgttcattggggtttgcttgcgtggcttactctgtcttcaacgtctttaccaaactgttcaagnggctcagaatggaagaacatncgccttgaggaccagccttcactttccctggcagtgtgtttgctatttttttcttcttgaatgctcttatctgggggcaaaagtcctcaggtgctgttccattcaccaccatgtttgctcttgtcctcctttggttcggtatttcagtacctttggtttttgttggaagcttccttggcttcaagaaacctaccattgaagatccagtgaagacaaacaagataccaaggcagatccctgaacaggcctggtacatgaacccaatcttctcgattctaatccgaaggatccttccattttgtgcctgcttcaatgaactcttccttatccctactttcatcc

SEQ ID NO: 97903 - DNA, 589 bp, Zea mays
  unsure (1)..(589): unsure at all n locations
tggatatgaatatgatatagatgatagtatagagttcgagttgatgatacactgaggacngtncgacctgacgtaccggtccggaattcccgggtcgacccacgcgtccggcaagatgaaggagaggctngtcggcgtctctgaggagaccaccacgggtgtcgaagagggtctaccagatgcaggagaccggcgccctcctcttccctgccattaacgtcaacgattccgtcaccaagagcaagtttgacaacctgtatggttgccgccactcgctccctgatggtctgatgagggccactgacgttatgatcgccggtaaggttgctgtggtctgcggatacggtgatgtcggcaagggttgtgctgctgccctcaagcaggctggtgcccgtgtcattgtgaccgagatcgaccccatctgtgccctccaggctctgatggagggtcttcaggtccttcccttggaagacgttgtctctgaagctgacatcttcgtgaccaccactggcaacaaggatatcatcatggttgaccacatgaggaagatgaaaaacattgccttggctggaacattgggcactttggc

SEQ ID NO: 97904 - DNA, 490 bp, Zea mays
  unsure (1)..(490): unsure at all n locations
ggttagccgtgtaggtgaacctacnactcatggactgcacgtaccggtccggaattcccgggtcgaccgacgcgtccgctttaactatggtcctgaccatggctggcgcccagctgatcgcctcgactgacgccacccggacgcagcacttcctttggaggatcatcatcctggccatgttccagatcatgctgatccaccgcgcgcacagcaggtgccagggcgccttctacacctacgacgtcttcatcgacgccaccagcaagttcctcagcttctgcaccaccggcgacgagcagactctcaggcgggagctcgacggcttcttcggccagacgtcccacgaaaccaccggtcgatgggccactgctccggatggaccgtttgactggggatactgcctggtgaacgaacagaaacagactgacccaccctactatggacgaggacccatacagctaactcataagtacaactacaagctccgccc

SEQ ID NO: 97905 - DNA, 490 bp, Zea mays
  unsure (1)..(490): unsure at all n locations
gtttatgcggttagtgtgctagggatgcatgacttcgtacaggtcccgaattccctgtcgaccgactcgtccgcccacgcgtccgcccactcgttcgctggcttctccttcctctcttaccaattcctcttcaagttanctttacttagtgttttgtatatgggccatggcatctgctaatgtgtactaccgttgcttcgtcaccgggcttgcctgggccaccagcaaccattcgctcgataatgccttcgcctcctacagctagatcctctactccaacgtcatcaccaaccacgagacagcgaggtctcgccgcttcgtcttcgttaccttctcctgcgacaactccatgctcgacgctatctataacatgaacggcaaggatctcaacctccctaacatcaccgctaaccaagaccagccccatttactatgcactagcacccatacattcttacttctatctacaactacaggctttattgttttg

SEQ ID NO: 97906 - DNA, 544 bp, Zea mays
  unsure (1)..(544): unsure at all n locations
tggaggagccctatncatgaaaaatgatagtgtacgactgacgtaccggtccggaattcccgggtcgacccacgcgtccgcaagatttttggtctcagcgagaggatctgcaaagaacaaacgtttccgctgaggcagagaaatggtagcaacggagattgtgataccattgaaataactgtctatgactactatgcaaagaaaggaatcgatctaaagtattctggtgatttcccctgtataaatacagggaaggcaaagcgcccaacatattttccaatcgagctatgctcgcttgttccgcttcaaagatacaccaaagctttgtctacgctacaaaggtcatcccttgtggagaagtctagacagaagcctgaagaaaggatgaccgttctaaatgatgcactgcaacgcagtaactacgattctgaccccatgttgagggcatgtggtgtttcagttgctccaaaatttacccaagttgaaggaaggatccttcaagcccccaaagctgaagccggcaatggtgatgatatcttttcac

SEQ ID NO: 97907 - DNA, 545 bp, Zea mays
  unsure (1)..(545): unsure at all n locations
cggcttctactantctcttaacctgangctgtacgactgcacgtaccggtccggaattcccgggtcgacccacgcgtccggcaaccggtccaacactttcacgctcagcttcagcaatggctgcctccaccatggcgatctcctccacggcgatggccggcacccccatcaaggtgggttccttcggcgagggccgcatcaccatgcgcaagaccgtgggcaagcccaaggtggcggcgtccggcagcccctggtacggccccgaccgcgtcaagtacctcggccccttctccggcgagcccccgagctacctcaccggcgagttccccggcgactacggctgggacaccgtcgggctgtccgtcgaccccgagacattcgccaagaaccgcgagctggaggtgatccactcccgctgggccatgctncgcgcgcttcgctgcgtcttccccgagcttgtttcccgcacggccgcaaagtccgcgaggccgtctggtttcaagccggctccaaaatctcaacgagggccggcttgactacctcgg

SEQ ID NO: 97908 - DNA, 542 bp, Zea mays
  unsure (1)..(542): unsure at all n locations
tgggggtgctgtgttcctgacgactaagncngtcggaccgctccggaattcccgggtcgacccacgcgtccgaggatatgttgagagtttgtgcacttcagcatggaggaagttgggataaaagtttaccttgtgctgagttctcatataataatagttaacatgccagtctgaagatgtcaccgttcgagactctatatgacaggaaatgcagaactcctctatttttggaccagactagaggaagacagttctttggacctgaacttattcaagaagcagaaaaacaagttcgtataattcgagagaattggaaggtagctcagaccaagcaaaagaagctacgctgataatagaagaagaccactggagtttgaagaaagtgatcatgtgtacctcaaagtgtcaccacttcgtggaatgaggagattcaatgttaagggcaaattgtcccctcgcttcattggaccattctgagttttttaggcaattggagagatggcataccaactcgagttacctgctagtctatcggacgtgca

SEQ ID NO: 97909 - DNA, 496 bp, Zea mays
  unsure (1)..(496): unsure at all n locations
tgggatgacgtntaggtgatgccagctaccctcngattatctttgcactgtcgtaccggtctggaattcccgggtcgacccacgcgtccgaagagatatattttacatcctagaggggctataattggagatactattgttgctggtacagaagttcctatatgaatgggaaatgccctacctttgaccgatatgcccttaggcacggccatacataacatagaaatcacacgtggaaggggtgggcaattagctagagcagcacgtgctgtatcgaaactgattgcaaaagagggtaaattggccactttaagattaccatctggggaggtccgtttggtatcccaatactgcttagcaacagtcggacaagtgggtactgttggtgtgaaccaatatagtttgggtagagccggatctaagtgttggctaggtaaacgcctcgtagtaagaggggtagttatgaaccctttggaccatgcccctgggggttttt

SEQ ID NO: 97910 - DNA, 492 bp, Zea mays
  unsure (1)..(492): unsure at all n locations
agtnatgcagtntagtgtcgatgatnactgatcgatactcctacgactgccgtaccggtccggaattcccgggtcgacccacgcgtccgcccacgcgtccgcccacgcgtccgcggacgcgtgggaaaaactgctcggttgctgctcctgcgtccgccgcgccggcatcatgtgtggcatcttagccgtgctcggttgctccgactggtctcaggcaaagagggctcgcatcctcgcctgctccagaaggttgaagcacaggggccccgactggtcgggcctttaccagcacgagggcaacttcctggcgcagcagcggctcgccgtcgtctccccgctgtccggcgaccagccgctgttcaacgaggaccgcaccgtcgtggtggtggccaatggagagatctacaaccacaagaacgtccggaagcagttcaccggcacacacaacttcagcacgggcagtgactgcgaggtcatcatgcccctgtaccc

SEQ ID NO: 97911 - DNA, 544 bp, Zea mays
  unsure (1)..(544): unsure at all n locations
tggtggatttnctgtctccgagatcagtaggacngtacgtaccgctccggaattcccgggtcgacccacgcgtccgatgtggaggagggctttagcgatggtcctgttcatggctggcgccgcgctgctcgccggggctgcgggcgccggcgcgcagcagggcgtgtggagcatcatcacccggcccatgttccagagcatgctgagccaccgcggcgacagcgggtgccagggcgccttctacacctacgacgccttcatcgaggccgccagcaagttccccggcttcggcaccaccggcgacgagcagacgcgcaagcgggagctcgccgccttcttcggccagacgtcccacgaaaccaccggtggatgggcgactgcttcggatggaccgtttgcctgtggatactgccgggtgaaagaacaaaaacagacggacccaccctactatggacgaagacccatacagcttactcataagttcaactacatgctcgtccggcaagcgcttaacctgaacctggtgggcgacccgacctggtgg

SEQ ID NO: 97912 - DNA, 551 bp, Zea mays
  unsure (1)..(551): unsure at all n locations
tgggttgtttactgtctaccgaaatacgatngncggtacgactgcacgtaccggtccggaattcccgggtcgacccacgcgtccgcggacgcgtgggcgagcatcttcgacgccaaggccgggattgccctgaacgacgacttcgtcaagctcgtgtcgtggtacgacaacgagtggggctacagcaaccgcgtcgtcgacctgatccgccacatgttcaagacccagtaggctagtagagagatagatttctgcctccctatcgtgggtcgtccccaatggcctttggtcgcagaccatctttgctgcttgtctatgctgagaataaatgtgaacggtgcccctggacgctggatccatgctggttttggacaaattataataaatggtaaatgtgacattcctattataaaagggctgcctgtctaaaagatccaagcttacgtacgcgtgcatggcaacttataactattccatagggtcacctaaattcaattcaattggccgctgttttacaacgttttgactgggaaaacccttgtcgttcctaa

SEQ ID NO: 97913 - DNA, 545 bp, Zea mays
  unsure (1)..(545): unsure at all n locations
aggtgctggcctnttccctgaggaccgacggcgctacgactgccgtaccggtccggaattcccgggtcgacccacgcgtccggcagctcctccgggggcggcgaactactcctcgtcgccaaaaccctagccctgcttctgtgccatggcgagcagcgctagccaggcgagcctcctgctccagaagcagctcaaggatcttgcgaagaaccccgtggatgggttctccgccgggcttgtagacgacagcaacatcttcgagtggcaggtcaccatcatcggaccgcctgacaccctatatgatggaggctacttcaatgcaataatgaccttcccccagaactatcccaacagcccgccatcagtaagatttacttctgagatgtggcatccgaatgtttatcctgatggacgtgtttgcatttctattcttcatccacctggtgaagatcccaatggttatgagcttgcaagcgaacgatggacaccaatgcacacggttgaaagtataggtctgagcatcatttcgatgctctctaatccaa

SEQ ID NO: 97914 - DNA, 540 bp, Zea mays
tgtgatgtcgtatgttctcgtcctatgtcgtacgactgacgtaccggtccggaattcccgggtcgacccacgcgtccggcacccgctcatgaattttccaagaatttccttcggagtcatctttgtgtacctgtgatggtcgtggataagatttacaagatgaggatcaataacgataaatgaccttagcattagtcagacgacatcatgatccgtccattttgtacttccatagctttgaatcttgttcgccagggtcttgagcctattgtaagtttgagttggcttctctccccttatcatggtgactctcccaagctcgtcttccaccagttacatcttggaaatcatggtggcgtcattaccctcgtgagagatcttgaaggtattccatatttgctttgtattgtccaagccacagactttgttgaattcattccttcatagggatgcttacaaaacaagtgtatcttgtgcaattttatgaatttgcttaataatcaatacaggattatcagtactattcaaatgcattccatt

SEQ ID NO: 97915 - DNA, 499 bp, Zea mays
  unsure (1)..(499): unsure at all n locations
aggggatgtatgtntatgggatgcatgagtnactcccagcnactcatcggactgcacgtaccggtccggaattcccgggtcgacccacgcgtccgcggacgcgtgggttaatattggcagcaagctaggatcatcagcatctgagcgtattattacgaaatcgatcggttgccatggcggggatgagagtcggcaagctggcgctggctgcggtgctgctgtgcgcggcggcggccatggccacggcgcagcaggcctccggcgtgcgcgcgacctacaacttctacaacccgcagcagaacaactgggacctcaacgccgtgagcgcgtactgcgcgacgtgggacgccagcaagccgctgtcgtggcgcatgaagtacggctggacggccttctgcgggcccgccggccccaccggccaggcggcgtgcgggcagtgtctcctggtgaccaacacggcgacgggggcgtccatcacggtgaggatcgtggaccagtt

SEQ ID NO: 97916 - DNA, 488 bp, Zea mays
gggatgtagttgtggtgtatgatactcccacgactcgtacgactgcacgtaccggtccggaattcccgggtcgacgcgcgtttcgaagcgcacctcaccacccagctcgtggatggaggcgcgcattttttccaccatgctgacgaggcggaacgtgccgatgtgcggccggctcagatacaggatgtcttccggcgcgccggccttgacgaattcgtccagcaccttgcggccatagtggtgcggatccttgatctggctgtacagcttgccgtcggaaaacgtcccggcgccgccttcgccgaactgcacgttggattcggggttgagcacgcttttgcgccacaggccgaaggtgtccttggtgcgctcgcgcacggccttgccgcgttcgaggatgatggggcgaaatcccatctgcgcgaggatcagccctgcaaacaggccacacggccccatgccgatgacgaccggacgcaagaaagttt

SEQ ID NO: 97917 - DNA, 497 bp, Zea mays
  unsure (1)..(497): unsure at all n locations
cggggatgcatgntgtggtngtcactgaaactcatagtgactcgtaggactgacgtaccggtccggaattcccgggtcgacccacgcgtccgcccacgcgtccgctcgtccaaggccgtcaagtacgtggactccgcgcacttggccgtgcccgagggcgcgcgcgccgtcgagctggtgggcggccgggagagcgcgctcgtgcaggaggtgcgcaccgtgcccgggtggtcctaccgcctcgccttcgccgtgggggactcgggcgatggctgcgcgggctccatggccgccgaggcctacgcggcgcgcgccacggtcaaggtgccctaccagtccaggggcaccggaggatacaagcgcgccgtgctggacttcacggccatcgccaaccgcacccgcgtcgtcttccagagcaccttctaccacatgaagcccgacggcacgctctgcggcccgctcgtcgacgacgcctcgctcgtcggcctgcgcaaggn

SEQ ID NO: 97918 - DNA, 551 bp, Zea mays
  unsure (1)..(551): unsure at all n locations
aggactggtgccgtgttcctgcngcactangctctctcgactgtctgtaccggtccggaattcccgggtcgacgcacgcgtccgccggagaattcctcccttgccccgccgtcgcatcctcttcgaagttcgaatcgagatcgcggcgcgatcacccacctcggggcggacaaggagcctgtcgtggagcggccagaggcgggtgaggaggaggacgcctcagccgccgccgccgcgggggaggaggaggacacgggcgcccaggtggctcccatcgtgcggcttgaggaggtagccgtcaccaccggcgaggaggacgaggacgtcctgctcgacatgaaggcgaagctgtaccgattcgacaaagacggtaaccaatggaaggaacggggcacgggcgctgtcaagcttctcaagcacaagcagaccgtcaaggtccgcctagtcatgcgccaggctaaaacgcttaagatctgcgcgaaccaccttgtggccttcaccacgaagatgcaggagcatgctggcaacgactagtcttgtgtttggcaccg
